United States Patent Application Publication US 2018/0305689 A1 - sequence listing, part 170

SEQ ID NO: 2515342 - RNA, 19 nt, Artificial Sequence
  Description of Artificial Sequence: Synthetic oligonucleotide
  Sense strand starting at position 716 of SEQ ID NO: 1888160
aguguagaauuauucuauc

SEQ ID NO: 2515343 - RNA, 19 nt, Artificial Sequence
  Description of Artificial Sequence: Synthetic oligonucleotide
  Antisense strand to SEQ ID NO: 2515342
gauagaauaauucuacacu

SEQ ID NO: 2515344 - RNA, 19 nt, Artificial Sequence
  Description of Artificial Sequence: Synthetic oligonucleotide
  Sense strand starting at position 780 of SEQ ID NO: 1888160
auugaugagucaucuaccu

SEQ ID NO: 2515345 - RNA, 19 nt, Artificial Sequence
  Description of Artificial Sequence: Synthetic oligonucleotide
  Antisense strand to SEQ ID NO: 2515344
agguagaugacucaucaau

SEQ ID NO: 2515346 - RNA, 19 nt, Artificial Sequence
  Description of Artificial Sequence: Synthetic oligonucleotide
  Sense strand starting at position 785 of SEQ ID NO: 1888160
ugagucaucuaccuagaug

SEQ ID NO: 2515347 - RNA, 19 nt, Artificial Sequence
  Description of Artificial Sequence: Synthetic oligonucleotide
  Antisense strand to SEQ ID NO: 2515346
caucuagguagaugacuca

SEQ ID NO: 2515348 - RNA, 19 nt, Artificial Sequence
  Description of Artificial Sequence: Synthetic oligonucleotide
  Sense strand starting at position 788 of SEQ ID NO: 1888160
gucaucuaccuagauguuu

SEQ ID NO: 2515349 - RNA, 19 nt, Artificial Sequence
  Description of Artificial Sequence: Synthetic oligonucleotide
  Antisense strand to SEQ ID NO: 2515348
aaacaucuagguagaugac

SEQ ID NO: 2515350 - RNA, 19 nt, Artificial Sequence
  Description of Artificial Sequence: Synthetic oligonucleotide
  Sense strand starting at position 821 of SEQ ID NO: 1888160
gacuaacuuguacagaguu

SEQ ID NO: 2515351 - RNA, 19 nt, Artificial Sequence
  Description of Artificial Sequence: Synthetic oligonucleotide
  Antisense strand to SEQ ID NO: 2515350
aacucuguacaaguuaguc

SEQ ID NO: 2515352 - RNA, 19 nt, Artificial Sequence
  Description of Artificial Sequence: Synthetic oligonucleotide
  Sense strand starting at position 929 of SEQ ID NO: 1888160
uuugaaagauaugcuuagu

SEQ ID NO: 2515353 - RNA, 19 nt, Artificial Sequence
  Description of Artificial Sequence: Synthetic oligonucleotide
  Antisense strand to SEQ ID NO: 2515352
acuaagcauaucuuucaaa

SEQ ID NO: 2515354 - RNA, 19 nt, Artificial Sequence
  Description of Artificial Sequence: Synthetic oligonucleotide
  Sense strand starting at position 932 of SEQ ID NO: 1888160
gaaagauaugcuuagugcu

SEQ ID NO: 2515355 - RNA, 19 nt, Artificial Sequence
  Description of Artificial Sequence: Synthetic oligonucleotide
  Antisense strand to SEQ ID NO: 2515354
agcacuaagcauaucuuuc

SEQ ID NO: 2515356 - RNA, 19 nt, Artificial Sequence
  Description of Artificial Sequence: Synthetic oligonucleotide
  Sense strand starting at position 956 of SEQ ID NO: 1888160
guguuuaagggucaacuau

SEQ ID NO: 2515357 - RNA, 19 nt, Artificial Sequence
  Description of Artificial Sequence: Synthetic oligonucleotide
  Antisense strand to SEQ ID NO: 2515356
auaguugacccuuaaacac

SEQ ID NO: 2515358 - RNA, 19 nt, Artificial Sequence
  Description of Artificial Sequence: Synthetic oligonucleotide
  Sense strand starting at position 963 of SEQ ID NO: 1888160
agggucaacuauucugacu

SEQ ID NO: 2515359 - RNA, 19 nt, Artificial Sequence
  Description of Artificial Sequence: Synthetic oligonucleotide
  Antisense strand to SEQ ID NO: 2515358
agucagaauaguugacccu

SEQ ID NO: 2515360 - RNA, 19 nt, Artificial Sequence
  Description of Artificial Sequence: Synthetic oligonucleotide
  Sense strand starting at position 996 of SEQ ID NO: 1888160
gcaaguaguagguaaggga

SEQ ID NO: 2515361 - RNA, 19 nt, Artificial Sequence
  Description of Artificial Sequence: Synthetic oligonucleotide
  Antisense strand to SEQ ID NO: 2515360
ucccuuaccuacuacuugc

SEQ ID NO: 2515362 - RNA, 19 nt, Artificial Sequence
  Description of Artificial Sequence: Synthetic oligonucleotide
  Sense strand starting at position 1037 of SEQ ID NO: 1888160
gguuaauaucaaugcugag

SEQ ID NO: 2515363 - RNA, 19 nt, Artificial Sequence
  Description of Artificial Sequence: Synthetic oligonucleotide
  Antisense strand to SEQ ID NO: 2515362
cucagcauugauauuaacc

SEQ ID NO: 2515364 - RNA, 19 nt, Artificial Sequence
  Description of Artificial Sequence: Synthetic oligonucleotide
  Sense strand starting at position 1123 of SEQ ID NO: 1888160
guccuaaguccucaucauc

SEQ ID NO: 2515365 - RNA, 19 nt, Artificial Sequence
  Description of Artificial Sequence: Synthetic oligonucleotide
  Antisense strand to SEQ ID NO: 2515364
gaugaugaggacuuaggac

SEQ ID NO: 2515366 - RNA, 19 nt, Artificial Sequence
  Description of Artificial Sequence: Synthetic oligonucleotide
  Sense strand starting at position 1133 of SEQ ID NO: 1888160
cucaucauccuguaugaag

SEQ ID NO: 2515367 - RNA, 19 nt, Artificial Sequence
  Description of Artificial Sequence: Synthetic oligonucleotide
  Antisense strand to SEQ ID NO: 2515366
cuucauacaggaugaugag

SEQ ID NO: 2515368 - RNA, 19 nt, Artificial Sequence
  Description of Artificial Sequence: Synthetic oligonucleotide
  Sense strand starting at position 1400 of SEQ ID NO: 1888160
ugcagucagccauauuugu

SEQ ID NO: 2515369 - RNA, 19 nt, Artificial Sequence
  Description of Artificial Sequence: Synthetic oligonucleotide
  Antisense strand to SEQ ID NO: 2515368
acaaauauggcugacugca

SEQ ID NO: 2515370 - RNA, 19 nt, Artificial Sequence
  Description of Artificial Sequence: Synthetic oligonucleotide
  Sense strand starting at position 1409 of SEQ ID NO: 1888160
ccauauuuguugcuuacau

SEQ ID NO: 2515371 - RNA, 19 nt, Artificial Sequence
  Description of Artificial Sequence: Synthetic oligonucleotide
  Antisense strand to SEQ ID NO: 2515370
auguaagcaacaaauaugg

SEQ ID NO: 2515372 - RNA, 19 nt, Artificial Sequence
  Description of Artificial Sequence: Synthetic oligonucleotide
  Sense strand starting at position 1489 of SEQ ID NO: 1888160
agguuuaugaagggccuua

SEQ ID NO: 2515373 - RNA, 19 nt, Artificial Sequence
  Description of Artificial Sequence: Synthetic oligonucleotide
  Antisense strand to SEQ ID NO: 2515372
uaaggcccuucauaaaccu

SEQ ID NO: 2515374 - RNA, 19 nt, Artificial Sequence
  Description of Artificial Sequence: Synthetic oligonucleotide
  Sense strand starting at position 1777 of SEQ ID NO: 1888160
aucagagguuucucacgau

SEQ ID NO: 2515375 - RNA, 19 nt, Artificial Sequence
  Description of Artificial Sequence: Synthetic oligonucleotide
  Antisense strand to SEQ ID NO: 2515374
aucgugagaaaccucugau

SEQ ID NO: 2515376 - RNA, 19 nt, Artificial Sequence
  Description of Artificial Sequence: Synthetic oligonucleotide
  Sense strand starting at position 1789 of SEQ ID NO: 1888160
ucacgauucccucaaguuc

SEQ ID NO: 2515377 - RNA, 19 nt, Artificial Sequence
  Description of Artificial Sequence: Synthetic oligonucleotide
  Antisense strand to SEQ ID NO: 2515376
gaacuugagggaaucguga

SEQ ID NO: 2515378 - RNA, 19 nt, Artificial Sequence
  Description of Artificial Sequence: Synthetic oligonucleotide
  Sense strand starting at position 1859 of SEQ ID NO: 1888160
uugucaguugauuauaaag

SEQ ID NO: 2515379 - RNA, 19 nt, Artificial Sequence
  Description of Artificial Sequence: Synthetic oligonucleotide
  Antisense strand to SEQ ID NO: 2515378
cuuuauaaucaacugacaa

SEQ ID NO: 2515380 - RNA, 19 nt, Artificial Sequence
  Description of Artificial Sequence: Synthetic oligonucleotide
  Sense strand starting at position 2035 of SEQ ID NO: 1888160
uccauuacauaggugugau

SEQ ID NO: 2515381 - RNA, 19 nt, Artificial Sequence
  Description of Artificial Sequence: Synthetic oligonucleotide
  Antisense strand to SEQ ID NO: 2515380
aucacaccuauguaaugga

SEQ ID NO: 2515382 - RNA, 19 nt, Artificial Sequence
  Description of Artificial Sequence: Synthetic oligonucleotide
  Sense strand starting at position 2300 of SEQ ID NO: 1888160
cucuucugucaugaacaga

SEQ ID NO: 2515383 - RNA, 19 nt, Artificial Sequence
  Description of Artificial Sequence: Synthetic oligonucleotide
  Antisense strand to SEQ ID NO: 2515382
ucuguucaugacagaagag

SEQ ID NO: 2515384 - RNA, 19 nt, Artificial Sequence
  Description of Artificial Sequence: Synthetic oligonucleotide
  Sense strand starting at position 2342 of SEQ ID NO: 1888160
cuuagaaauuuacaugagu

SEQ ID NO: 2515385 - RNA, 19 nt, Artificial Sequence
  Description of Artificial Sequence: Synthetic oligonucleotide
  Antisense strand to SEQ ID NO: 2515384
acucauguaaauuucuaag

SEQ ID NO: 2515386 - RNA, 19 nt, Artificial Sequence
  Description of Artificial Sequence: Synthetic oligonucleotide
  Sense strand starting at position 2799 of SEQ ID NO: 1888160
guugucaauguggaaugau

SEQ ID NO: 2515387 - RNA, 19 nt, Artificial Sequence
  Description of Artificial Sequence: Synthetic oligonucleotide
  Antisense strand to SEQ ID NO: 2515386
aucauuccacauugacaac

SEQ ID NO: 2515388 - RNA, 19 nt, Artificial Sequence
  Description of Artificial Sequence: Synthetic oligonucleotide
  Sense strand starting at position 2835 of SEQ ID NO: 1888160
acaguugaguucuuacaua

SEQ ID NO: 2515389 - RNA, 19 nt, Artificial Sequence
  Description of Artificial Sequence: Synthetic oligonucleotide
  Antisense strand to SEQ ID NO: 2515388
uauguaagaacucaacugu

SEQ ID NO: 2515390 - RNA, 19 nt, Artificial Sequence
  Description of Artificial Sequence: Synthetic oligonucleotide
  Sense strand starting at position 2894 of SEQ ID NO: 1888160
ugugguguucugaguguag

SEQ ID NO: 2515391 - RNA, 19 nt, Artificial Sequence
  Description of Artificial Sequence: Synthetic oligonucleotide
  Antisense strand to SEQ ID NO: 2515390
cuacacucagaacaccaca

SEQ ID NO: 2515392 - RNA, 19 nt, Artificial Sequence
  Description of Artificial Sequence: Synthetic oligonucleotide
  Sense strand starting at position 2961 of SEQ ID NO: 1888160
ugaggucucaggcaagcua

SEQ ID NO: 2515393 - RNA, 19 nt, Artificial Sequence
  Description of Artificial Sequence: Synthetic oligonucleotide
  Antisense strand to SEQ ID NO: 2515392
uagcuugccugagaccuca

SEQ ID NO: 2515394 - RNA, 19 nt, Artificial Sequence
  Description of Artificial Sequence: Synthetic oligonucleotide
  Sense strand starting at position 3053 of SEQ ID NO: 1888160
gggagauugagauggugca

SEQ ID NO: 2515395 - RNA, 19 nt, Artificial Sequence
  Description of Artificial Sequence: Synthetic oligonucleotide
  Antisense strand to SEQ ID NO: 2515394
ugcaccaucucaaucuccc

SEQ ID NO: 2515396 - RNA, 19 nt, Artificial Sequence
  Description of Artificial Sequence: Synthetic oligonucleotide
  Sense strand starting at position 3054 of SEQ ID NO: 1888160
ggagauugagauggugcau

SEQ ID NO: 2515397 - RNA, 19 nt, Artificial Sequence
  Description of Artificial Sequence: Synthetic oligonucleotide
  Antisense strand to SEQ ID NO: 2515396
augcaccaucucaaucucc

SEQ ID NO: 2515398 - RNA, 19 nt, Artificial Sequence
  Description of Artificial Sequence: Synthetic oligonucleotide
  Sense strand starting at position 3099 of SEQ ID NO: 1888160
cagagcugguacucaauaa

SEQ ID NO: 2515399 - RNA, 19 nt, Artificial Sequence
  Description of Artificial Sequence: Synthetic oligonucleotide
  Antisense strand to SEQ ID NO: 2515398
uuauugaguaccagcucug

SEQ ID NO: 2515400 - RNA, 19 nt, Artificial Sequence
  Description of Artificial Sequence: Synthetic oligonucleotide
  Sense strand starting at position 3103 of SEQ ID NO: 1888160
gcugguacucaauaacagu

SEQ ID NO: 2515401 - RNA, 19 nt, Artificial Sequence
  Description of Artificial Sequence: Synthetic oligonucleotide
  Antisense strand to SEQ ID NO: 2515400
acuguuauugaguaccagc

SEQ ID NO: 2515402 - RNA, 19 nt, Artificial Sequence
  Description of Artificial Sequence: Synthetic oligonucleotide
  Sense strand starting at position 3676 of SEQ ID NO: 1888160
agggauggcucgguaagag

SEQ ID NO: 2515403 - RNA, 19 nt, Artificial Sequence
  Description of Artificial Sequence: Synthetic oligonucleotide
  Antisense strand to SEQ ID NO: 2515402
cucuuaccgagccaucccu

SEQ ID NO: 2515404 - RNA, 19 nt, Artificial Sequence
  Description of Artificial Sequence: Synthetic oligonucleotide
  Sense strand starting at position 3677 of SEQ ID NO: 1888160
gggauggcucgguaagaga

SEQ ID NO: 2515405 - RNA, 19 nt, Artificial Sequence
  Description of Artificial Sequence: Synthetic oligonucleotide
  Antisense strand to SEQ ID NO: 2515404
ucucuuaccgagccauccc

SEQ ID NO: 2515406 - RNA, 19 nt, Artificial Sequence
  Description of Artificial Sequence: Synthetic oligonucleotide
  Sense strand starting at position 3740 of SEQ ID NO: 1888160
uacagagcauucucggaau

SEQ ID NO: 2515407 - RNA, 19 nt, Artificial Sequence
  Description of Artificial Sequence: Synthetic oligonucleotide
  Antisense strand to SEQ ID NO: 2515406
auuccgagaaugcucugua

SEQ ID NO: 2515408 - RNA, 19 nt, Artificial Sequence
  Description of Artificial Sequence: Synthetic oligonucleotide
  Sense strand starting at position 3935 of SEQ ID NO: 1888160
aggagugaaucuccagcuu

SEQ ID NO: 2515409 - RNA, 19 nt, Artificial Sequence
  Description of Artificial Sequence: Synthetic oligonucleotide
  Antisense strand to SEQ ID NO: 2515408
aagcuggagauucacuccu

SEQ ID NO: 2515410 - RNA, 19 nt, Artificial Sequence
  Description of Artificial Sequence: Synthetic oligonucleotide
  Sense strand starting at position 70 of SEQ ID NO: 1888161
uugagagacuuccuugcca

SEQ ID NO: 2515411 - RNA, 19 nt, Artificial Sequence
  Description of Artificial Sequence: Synthetic oligonucleotide
  Antisense strand to SEQ ID NO: 2515410
uggcaaggaagucucucaa

SEQ ID NO: 2515412 - RNA, 19 nt, Artificial Sequence
  Description of Artificial Sequence: Synthetic oligonucleotide
  Sense strand starting at position 204 of SEQ ID NO: 1888161
gccuauuuguguccuuuga

SEQ ID NO: 2515413 - RNA, 19 nt, Artificial Sequence
  Description of Artificial Sequence: Synthetic oligonucleotide
  Antisense strand to SEQ ID NO: 2515412
ucaaaggacacaaauaggc

SEQ ID NO: 2515414 - RNA, 19 nt, Artificial Sequence
  Description of Artificial Sequence: Synthetic oligonucleotide
  Sense strand starting at position 208 of SEQ ID NO: 1888161
auuuguguccuuugaccuu

SEQ ID NO: 2515415 - RNA, 19 nt, Artificial Sequence
  Description of Artificial Sequence: Synthetic oligonucleotide
  Antisense strand to SEQ ID NO: 2515414
aaggucaaaggacacaaau

SEQ ID NO: 2515416 - RNA, 19 nt, Artificial Sequence
  Description of Artificial Sequence: Synthetic oligonucleotide
  Sense strand starting at position 228 of SEQ ID NO: 1888161
acugauacacucugauguu

SEQ ID NO: 2515417 - RNA, 19 nt, Artificial Sequence
  Description of Artificial Sequence: Synthetic oligonucleotide
  Antisense strand to SEQ ID NO: 2515416
aacaucagaguguaucagu

SEQ ID NO: 2515418 - RNA, 19 nt, Artificial Sequence
  Description of Artificial Sequence: Synthetic oligonucleotide
  Sense strand starting at position 253 of SEQ ID NO: 1888161
aauaucuuagaggguuuga

SEQ ID NO: 2515419 - RNA, 19 nt, Artificial Sequence
  Description of Artificial Sequence: Synthetic oligonucleotide
  Antisense strand to SEQ ID NO: 2515418
ucaaacccucuaagauauu

SEQ ID NO: 2515420 - RNA, 19 nt, Artificial Sequence
  Description of Artificial Sequence: Synthetic oligonucleotide
  Sense strand starting at position 480 of SEQ ID NO: 1888161
agcauucuaccugaggcaa

SEQ ID NO: 2515421 - RNA, 19 nt, Artificial Sequence
  Description of Artificial Sequence: Synthetic oligonucleotide
  Antisense strand to SEQ ID NO: 2515420
uugccucagguagaaugcu

SEQ ID NO: 2515422 - RNA, 19 nt, Artificial Sequence
  Description of Artificial Sequence: Synthetic oligonucleotide
  Sense strand starting at position 601 of SEQ ID NO: 1888161
gcgccuuuacagucaugua

SEQ ID NO: 2515423 - RNA, 19 nt, Artificial Sequence
  Description of Artificial Sequence: Synthetic oligonucleotide
  Antisense strand to SEQ ID NO: 2515422
uacaugacuguaaaggcgc

SEQ ID NO: 2515424 - RNA, 19 nt, Artificial Sequence
  Description of Artificial Sequence: Synthetic oligonucleotide
  Sense strand starting at position 691 of SEQ ID NO: 1888161
ugccaauaucugggaugga

SEQ ID NO: 2515425 - RNA, 19 nt, Artificial Sequence
  Description of Artificial Sequence: Synthetic oligonucleotide
  Antisense strand to SEQ ID NO: 2515424
uccaucccagauauuggca

SEQ ID NO: 2515426 - RNA, 19 nt, Artificial Sequence
  Description of Artificial Sequence: Synthetic oligonucleotide
  Sense strand starting at position 752 of SEQ ID NO: 1888161
aggugucuucaaggaggau

SEQ ID NO: 2515427 - RNA, 19 nt, Artificial Sequence
  Description of Artificial Sequence: Synthetic oligonucleotide
  Antisense strand to SEQ ID NO: 2515426
auccuccuugaagacaccu

SEQ ID NO: 2515428 - RNA, 19 nt, Artificial Sequence
  Description of Artificial Sequence: Synthetic oligonucleotide
  Sense strand starting at position 788 of SEQ ID NO: 1888161
ucaggucaaccuugaguaa

SEQ ID NO: 2515429 - RNA, 19 nt, Artificial Sequence
  Description of Artificial Sequence: Synthetic oligonucleotide
  Antisense strand to SEQ ID NO: 2515428
uuacucaagguugaccuga

SEQ ID NO: 2515430 - RNA, 19 nt, Artificial Sequence
  Description of Artificial Sequence: Synthetic oligonucleotide
  Sense strand starting at position 792 of SEQ ID NO: 1888161
gucaaccuugaguaagcua

SEQ ID NO: 2515431 - RNA, 19 nt, Artificial Sequence
  Description of Artificial Sequence: Synthetic oligonucleotide
  Antisense strand to SEQ ID NO: 2515430
uagcuuacucaagguugac

SEQ ID NO: 2515432 - RNA, 19 nt, Artificial Sequence
  Description of Artificial Sequence: Synthetic oligonucleotide
  Sense strand starting at position 800 of SEQ ID NO: 1888161
ugaguaagcuacucaacau

SEQ ID NO: 2515433 - RNA, 19 nt, Artificial Sequence
  Description of Artificial Sequence: Synthetic oligonucleotide
  Antisense strand to SEQ ID NO: 2515432
auguugaguagcuuacuca

SEQ ID NO: 2515434 - RNA, 19 nt, Artificial Sequence
  Description of Artificial Sequence: Synthetic oligonucleotide
  Sense strand starting at position 957 of SEQ ID NO: 1888161
cugaguuggcaaugacaaa

SEQ ID NO: 2515435 - RNA, 19 nt, Artificial Sequence
  Description of Artificial Sequence: Synthetic oligonucleotide
  Antisense strand to SEQ ID NO: 2515434
uuugucauugccaacucag

SEQ ID NO: 2515436 - RNA, 19 nt, Artificial Sequence
  Description of Artificial Sequence: Synthetic oligonucleotide
  Sense strand starting at position 1147 of SEQ ID NO: 1888161
auguuuguggaguacauga

SEQ ID NO: 2515437 - RNA, 19 nt, Artificial Sequence
  Description of Artificial Sequence: Synthetic oligonucleotide
  Antisense strand to SEQ ID NO: 2515436
ucauguacuccacaaacau

SEQ ID NO: 2515438 - RNA, 19 nt, Artificial Sequence
  Description of Artificial Sequence: Synthetic oligonucleotide
  Sense strand starting at position 1149 of SEQ ID NO: 1888161
guuuguggaguacaugaga

SEQ ID NO: 2515439 - RNA, 19 nt, Artificial Sequence
  Description of Artificial Sequence: Synthetic oligonucleotide
  Antisense strand to SEQ ID NO: 2515438
ucucauguacuccacaaac

SEQ ID NO: 2515440 - RNA, 19 nt, Artificial Sequence
  Description of Artificial Sequence: Synthetic oligonucleotide
  Sense strand starting at position 1297 of SEQ ID NO: 1888161
acaauuaagucauuguuga

SEQ ID NO: 2515441 - RNA, 19 nt, Artificial Sequence
  Description of Artificial Sequence: Synthetic oligonucleotide
  Antisense strand to SEQ ID NO: 2515440
ucaacaaugacuuaauugu

SEQ ID NO: 2515442 - RNA, 19 nt, Artificial Sequence
  Description of Artificial Sequence: Synthetic oligonucleotide
  Sense strand starting at position 1409 of SEQ ID NO: 1888161
accuauauauuugaaggaa

SEQ ID NO: 2515443 - RNA, 19 nt, Artificial Sequence
  Description of Artificial Sequence: Synthetic oligonucleotide
  Antisense strand to SEQ ID NO: 2515442
uuccuucaaauauauaggu

SEQ ID NO: 2515444 - RNA, 19 nt, Artificial Sequence
  Description of Artificial Sequence: Synthetic oligonucleotide
  Sense strand starting at position 1534 of SEQ ID NO: 1888161
ccuuauaggugaucagauu

SEQ ID NO: 2515445 - RNA, 19 nt, Artificial Sequence
  Description of Artificial Sequence: Synthetic oligonucleotide
  Antisense strand to SEQ ID NO: 2515444
aaucugaucaccuauaagg

SEQ ID NO: 2515446 - RNA, 19 nt, Artificial Sequence
  Description of Artificial Sequence: Synthetic oligonucleotide
  Sense strand starting at position 1628 of SEQ ID NO: 1888161
cccugagaguuguuuaagg

SEQ ID NO: 2515447 - RNA, 19 nt, Artificial Sequence
  Description of Artificial Sequence: Synthetic oligonucleotide
  Antisense strand to SEQ ID NO: 2515446
ccuuaaacaacucucaggg

SEQ ID NO: 2515448 - RNA, 19 nt, Artificial Sequence
  Description of Artificial Sequence: Synthetic oligonucleotide
  Sense strand starting at position 1630 of SEQ ID NO: 1888161
cugagaguuguuuaaggac

SEQ ID NO: 2515449 - RNA, 19 nt, Artificial Sequence
  Description of Artificial Sequence: Synthetic oligonucleotide
  Antisense strand to SEQ ID NO: 2515448
guccuuaaacaacucucag

SEQ ID NO: 2515450 - RNA, 19 nt, Artificial Sequence
  Description of Artificial Sequence: Synthetic oligonucleotide
  Sense strand starting at position 1922 of SEQ ID NO: 1888161
ucagauucuccagguugga

SEQ ID NO: 2515451 - RNA, 19 nt, Artificial Sequence
  Description of Artificial Sequence: Synthetic oligonucleotide
  Antisense strand to SEQ ID NO: 2515450
uccaaccuggagaaucuga

SEQ ID NO: 2515452 - RNA, 19 nt, Artificial Sequence
  Description of Artificial Sequence: Synthetic oligonucleotide
  Sense strand starting at position 1925 of SEQ ID NO: 1888161
gauucuccagguuggaauu

SEQ ID NO: 2515453 - RNA, 19 nt, Artificial Sequence
  Description of Artificial Sequence: Synthetic oligonucleotide
  Antisense strand to SEQ ID NO: 2515452
aauuccaaccuggagaauc

SEQ ID NO: 2515454 - RNA, 19 nt, Artificial Sequence
  Description of Artificial Sequence: Synthetic oligonucleotide
  Sense strand starting at position 2095 of SEQ ID NO: 1888161
aggaaacgucagcagucau

SEQ ID NO: 2515455 - RNA, 19 nt, Artificial Sequence
  Description of Artificial Sequence: Synthetic oligonucleotide
  Antisense strand to SEQ ID NO: 2515454
augacugcugacguuuccu

SEQ ID NO: 2515456 - RNA, 19 nt, Artificial Sequence
  Description of Artificial Sequence: Synthetic oligonucleotide
  Sense strand starting at position 2108 of SEQ ID NO: 1888161
agucauuauugaccucauu

SEQ ID NO: 2515457 - RNA, 19 nt, Artificial Sequence
  Description of Artificial Sequence: Synthetic oligonucleotide
  Antisense strand to SEQ ID NO: 2515456
aaugaggucaauaaugacu

SEQ ID NO: 2515458 - RNA, 19 nt, Artificial Sequence
  Description of Artificial Sequence: Synthetic oligonucleotide
  Sense strand starting at position 2164 of SEQ ID NO: 1888161
uuucccaaagggugauaua

SEQ ID NO: 2515459 - RNA, 19 nt, Artificial Sequence
  Description of Artificial Sequence: Synthetic oligonucleotide
  Antisense strand to SEQ ID NO: 2515458
uauaucacccuuugggaaa

SEQ ID NO: 2515460 - RNA, 19 nt, Artificial Sequence
  Description of Artificial Sequence: Synthetic oligonucleotide
  Sense strand starting at position 2200 of SEQ ID NO: 1888161
auaggcaaccuuugagaaa

SEQ ID NO: 2515461 - RNA, 19 nt, Artificial Sequence
  Description of Artificial Sequence: Synthetic oligonucleotide
  Antisense strand to SEQ ID NO: 2515460
uuucucaaagguugccuau

SEQ ID NO: 2515462 - RNA, 19 nt, Artificial Sequence
  Description of Artificial Sequence: Synthetic oligonucleotide
  Sense strand starting at position 2384 of SEQ ID NO: 1888161
caagaaaguugaguucuau

SEQ ID NO: 2515463 - RNA, 19 nt, Artificial Sequence
  Description of Artificial Sequence: Synthetic oligonucleotide
  Antisense strand to SEQ ID NO: 2515462
auagaacucaacuuucuug

SEQ ID NO: 2515464 - RNA, 19 nt, Artificial Sequence
  Description of Artificial Sequence: Synthetic oligonucleotide
  Sense strand starting at position 2390 of SEQ ID NO: 1888161
aguugaguucuaugaacag

SEQ ID NO: 2515465 - RNA, 19 nt, Artificial Sequence
  Description of Artificial Sequence: Synthetic oligonucleotide
  Antisense strand to SEQ ID NO: 2515464
cuguucauagaacucaacu

SEQ ID NO: 2515466 - RNA, 19 nt, Artificial Sequence
  Description of Artificial Sequence: Synthetic oligonucleotide
  Sense strand starting at position 2394 of SEQ ID NO: 1888161
gaguucuaugaacagcuga

SEQ ID NO: 2515467 - RNA, 19 nt, Artificial Sequence
  Description of Artificial Sequence: Synthetic oligonucleotide
  Antisense strand to SEQ ID NO: 2515466
ucagcuguucauagaacuc

SEQ ID NO: 2515468 - RNA, 19 nt, Artificial Sequence
  Description of Artificial Sequence: Synthetic oligonucleotide
  Sense strand starting at position 2421 of SEQ ID NO: 1888161
gccauugagggccaggaau

SEQ ID NO: 2515469 - RNA, 19 nt, Artificial Sequence
  Description of Artificial Sequence: Synthetic oligonucleotide
  Antisense strand to SEQ ID NO: 2515468
auuccuggcccucaauggc

SEQ ID NO: 2515470 - RNA, 19 nt, Artificial Sequence
  Description of Artificial Sequence: Synthetic oligonucleotide
  Sense strand starting at position 2524 of SEQ ID NO: 1888161
auaaguguugaaggaaagu

SEQ ID NO: 2515471 - RNA, 19 nt, Artificial Sequence
  Description of Artificial Sequence: Synthetic oligonucleotide
  Antisense strand to SEQ ID NO: 2515470
acuuuccuucaacacuuau

SEQ ID NO: 2515472 - RNA, 19 nt, Artificial Sequence
  Description of Artificial Sequence: Synthetic oligonucleotide
  Sense strand starting at position 2533 of SEQ ID NO: 1888161
gaaggaaaguucccugauu

SEQ ID NO: 2515473 - RNA, 19 nt, Artificial Sequence
  Description of Artificial Sequence: Synthetic oligonucleotide
  Antisense strand to SEQ ID NO: 2515472
aaucagggaacuuuccuuc

SEQ ID NO: 2515474 - RNA, 19 nt, Artificial Sequence
  Description of Artificial Sequence: Synthetic oligonucleotide
  Sense strand starting at position 2590 of SEQ ID NO: 1888161
accaacuuugauggucauu

SEQ ID NO: 2515475 - RNA, 19 nt, Artificial Sequence
  Description of Artificial Sequence: Synthetic oligonucleotide
  Antisense strand to SEQ ID NO: 2515474
aaugaccaucaaaguuggu

SEQ ID NO: 2515476 - RNA, 19 nt, Artificial Sequence
  Description of Artificial Sequence: Synthetic oligonucleotide
  Sense strand starting at position 2595 of SEQ ID NO: 1888161
cuuugauggucauuaucca

SEQ ID NO: 2515477 - RNA, 19 nt, Artificial Sequence
  Description of Artificial Sequence: Synthetic oligonucleotide
  Antisense strand to SEQ ID NO: 2515476
uggauaaugaccaucaaag

SEQ ID NO: 2515478 - RNA, 19 nt, Artificial Sequence
  Description of Artificial Sequence: Synthetic oligonucleotide
  Sense strand starting at position 2742 of SEQ ID NO: 1888161
guucccauugcauagaaau

SEQ ID NO: 2515479 - RNA, 19 nt, Artificial Sequence
  Description of Artificial Sequence: Synthetic oligonucleotide
  Antisense strand to SEQ ID NO: 2515478
auuucuaugcaaugggaac

SEQ ID NO: 2515480 - RNA, 19 nt, Artificial Sequence
  Description of Artificial Sequence: Synthetic oligonucleotide
  Sense strand starting at position 2753 of SEQ ID NO: 1888161
auagaaaugccauagccau

SEQ ID NO: 2515481 - RNA, 19 nt, Artificial Sequence
  Description of Artificial Sequence: Synthetic oligonucleotide
  Antisense strand to SEQ ID NO: 2515480
auggcuauggcauuucuau

SEQ ID NO: 2515482 - RNA, 19 nt, Artificial Sequence
  Description of Artificial Sequence: Synthetic oligonucleotide
  Sense strand starting at position 2760 of SEQ ID NO: 1888161
ugccauagccaucaugaca

SEQ ID NO: 2515483 - RNA, 19 nt, Artificial Sequence
  Description of Artificial Sequence: Synthetic oligonucleotide
  Antisense strand to SEQ ID NO: 2515482
ugucaugauggcuauggca

SEQ ID NO: 2515484 - RNA, 19 nt, Artificial Sequence
  Description of Artificial Sequence: Synthetic oligonucleotide
  Sense strand starting at position 3064 of SEQ ID NO: 1888161
uguauuggcccugaagaca

SEQ ID NO: 2515485 - RNA, 19 nt, Artificial Sequence
  Description of Artificial Sequence: Synthetic oligonucleotide
  Antisense strand to SEQ ID NO: 2515484
ugucuucagggccaauaca

SEQ ID NO: 2515486 - RNA, 19 nt, Artificial Sequence
  Description of Artificial Sequence: Synthetic oligonucleotide
  Sense strand starting at position 3148 of SEQ ID NO: 1888161
uggacuagugugaguguuu

SEQ ID NO: 2515487 - RNA, 19 nt, Artificial Sequence
  Description of Artificial Sequence: Synthetic oligonucleotide
  Antisense strand to SEQ ID NO: 2515486
aaacacucacacuagucca

SEQ ID NO: 2515488 - RNA, 19 nt, Artificial Sequence
  Description of Artificial Sequence: Synthetic oligonucleotide
  Sense strand starting at position 3549 of SEQ ID NO: 1888161
guaagugcccuauacacaa

SEQ ID NO: 2515489 - RNA, 19 nt, Artificial Sequence
  Description of Artificial Sequence: Synthetic oligonucleotide
  Antisense strand to SEQ ID NO: 2515488
uuguguauagggcacuuac

SEQ ID NO: 2515490 - RNA, 19 nt, Artificial Sequence
  Description of Artificial Sequence: Synthetic oligonucleotide
  Sense strand starting at position 25 of SEQ ID NO: 1888162
agaacucaguucggaacaa

SEQ ID NO: 2515491 - RNA, 19 nt, Artificial Sequence
  Description of Artificial Sequence: Synthetic oligonucleotide
  Antisense strand to SEQ ID NO: 2515490
uuguuccgaacugaguucu

SEQ ID NO: 2515492 - RNA, 19 nt, Artificial Sequence
  Description of Artificial Sequence: Synthetic oligonucleotide
  Sense strand starting at position 29 of SEQ ID NO: 1888162
cucaguucggaacaaguga

SEQ ID NO: 2515493 - RNA, 19 nt, Artificial Sequence
  Description of Artificial Sequence: Synthetic oligonucleotide
  Antisense strand to SEQ ID NO: 2515492
ucacuuguuccgaacugag

SEQ ID NO: 2515494 - RNA, 19 nt, Artificial Sequence
  Description of Artificial Sequence: Synthetic oligonucleotide
  Sense strand starting at position 43 of SEQ ID NO: 1888162
agugaaguuugagaugcua

SEQ ID NO: 2515495 - RNA, 19 nt, Artificial Sequence
  Description of Artificial Sequence: Synthetic oligonucleotide
  Antisense strand to SEQ ID NO: 2515494
uagcaucucaaacuucacu

SEQ ID NO: 2515496 - RNA, 19 nt, Artificial Sequence
  Description of Artificial Sequence: Synthetic oligonucleotide
  Sense strand starting at position 45 of SEQ ID NO: 1888162
ugaaguuugagaugcuauu

SEQ ID NO: 2515497 - RNA, 19 nt, Artificial Sequence
  Description of Artificial Sequence: Synthetic oligonucleotide
  Antisense strand to SEQ ID NO: 2515496
aauagcaucucaaacuuca

SEQ ID NO: 2515498 - RNA, 19 nt, Artificial Sequence
  Description of Artificial Sequence: Synthetic oligonucleotide
  Sense strand starting at position 51 of SEQ ID NO: 1888162
uugagaugcuauuggauuc

SEQ ID NO: 2515499 - RNA, 19 nt, Artificial Sequence
  Description of Artificial Sequence: Synthetic oligonucleotide
  Antisense strand to SEQ ID NO: 2515498
gaauccaauagcaucucaa

SEQ ID NO: 2515500 - RNA, 19 nt, Artificial Sequence
  Description of Artificial Sequence: Synthetic oligonucleotide
  Sense strand starting at position 73 of SEQ ID NO: 1888162
guggguugucagggaggga

SEQ ID NO: 2515501 - RNA, 19 nt, Artificial Sequence
  Description of Artificial Sequence: Synthetic oligonucleotide
  Antisense strand to SEQ ID NO: 2515500
ucccucccugacaacccac

SEQ ID NO: 2515502 - RNA, 19 nt, Artificial Sequence
  Description of Artificial Sequence: Synthetic oligonucleotide
  Sense strand starting at position 301 of SEQ ID NO: 1888162
aaugacaggucaggagaau

SEQ ID NO: 2515503 - RNA, 19 nt, Artificial Sequence
  Description of Artificial Sequence: Synthetic oligonucleotide
  Antisense strand to SEQ ID NO: 2515502
auucuccugaccugucauu

SEQ ID NO: 2515504 - RNA, 19 nt, Artificial Sequence
  Description of Artificial Sequence: Synthetic oligonucleotide
  Sense strand starting at position 351 of SEQ ID NO: 1888162
ucaagaaauuagcaaagaa

SEQ ID NO: 2515505 - RNA, 19 nt, Artificial Sequence
  Description of Artificial Sequence: Synthetic oligonucleotide
  Antisense strand to SEQ ID NO: 2515504
uucuuugcuaauuucuuga

SEQ ID NO: 2515506 - RNA, 19 nt, Artificial Sequence
  Description of Artificial Sequence: Synthetic oligonucleotide
  Sense strand starting at position 367 of SEQ ID NO: 1888162
gaacaacucuaugggaguu

SEQ ID NO: 2515507 - RNA, 19 nt, Artificial Sequence
  Description of Artificial Sequence: Synthetic oligonucleotide
  Antisense strand to SEQ ID NO: 2515506
aacucccauagaguuguuc

SEQ ID NO: 2515508 - RNA, 19 nt, Artificial Sequence
  Description of Artificial Sequence: Synthetic oligonucleotide
  Sense strand starting at position 369 of SEQ ID NO: 1888162
acaacucuaugggaguuaa

SEQ ID NO: 2515509 - RNA, 19 nt, Artificial Sequence
  Description of Artificial Sequence: Synthetic oligonucleotide
  Antisense strand to SEQ ID NO: 2515508
uuaacucccauagaguugu

SEQ ID NO: 2515510 - RNA, 19 nt, Artificial Sequence
  Description of Artificial Sequence: Synthetic oligonucleotide
  Sense strand starting at position 917 of SEQ ID NO: 1888162
gggaaaguguugccaaggu

SEQ ID NO: 2515511 - RNA, 19 nt, Artificial Sequence
  Description of Artificial Sequence: Synthetic oligonucleotide
  Antisense strand to SEQ ID NO: 2515510
accuuggcaacacuuuccc

SEQ ID NO: 2515512 - RNA, 19 nt, Artificial Sequence
  Description of Artificial Sequence: Synthetic oligonucleotide
  Sense strand starting at position 1212 of SEQ ID NO: 1888162
acggcuuccauacagagaa

SEQ ID NO: 2515513 - RNA, 19 nt, Artificial Sequence
  Description of Artificial Sequence: Synthetic oligonucleotide
  Antisense strand to SEQ ID NO: 2515512
uucucuguauggaagccgu

SEQ ID NO: 2515514 - RNA, 19 nt, Artificial Sequence
  Description of Artificial Sequence: Synthetic oligonucleotide
  Sense strand starting at position 1300 of SEQ ID NO: 1888162
gugacagaguguucccaau

SEQ ID NO: 2515515 - RNA, 19 nt, Artificial Sequence
  Description of Artificial Sequence: Synthetic oligonucleotide
  Antisense strand to SEQ ID NO: 2515514
auugggaacacucugucac

SEQ ID NO: 2515516 - RNA, 19 nt, Artificial Sequence
  Description of Artificial Sequence: Synthetic oligonucleotide
  Sense strand starting at position 1302 of SEQ ID NO: 1888162
gacagaguguucccaauac

SEQ ID NO: 2515517 - RNA, 19 nt, Artificial Sequence
  Description of Artificial Sequence: Synthetic oligonucleotide
  Antisense strand to SEQ ID NO: 2515516
guauugggaacacucuguc

SEQ ID NO: 2515518 - RNA, 19 nt, Artificial Sequence
  Description of Artificial Sequence: Synthetic oligonucleotide
  Sense strand starting at position 1306 of SEQ ID NO: 1888162
gaguguucccaauacagca

SEQ ID NO: 2515519 - RNA, 19 nt, Artificial Sequence
  Description of Artificial Sequence: Synthetic oligonucleotide
  Antisense strand to SEQ ID NO: 2515518
ugcuguauugggaacacuc

SEQ ID NO: 2515520 - RNA, 19 nt, Artificial Sequence
  Description of Artificial Sequence: Synthetic oligonucleotide
  Sense strand starting at position 1321 of SEQ ID NO: 1888162
agcaaaguuuccgaccuga

SEQ ID NO: 2515521 - RNA, 19 nt, Artificial Sequence
  Description of Artificial Sequence: Synthetic oligonucleotide
  Antisense strand to SEQ ID NO: 2515520
ucaggucggaaacuuugcu

SEQ ID NO: 2515522 - RNA, 19 nt, Artificial Sequence
  Description of Artificial Sequence: Synthetic oligonucleotide
  Sense strand starting at position 1353 of SEQ ID NO: 1888162
cugagugcaucccggaaau

SEQ ID NO: 2515523 - RNA, 19 nt, Artificial Sequence
  Description of Artificial Sequence: Synthetic oligonucleotide
  Antisense strand to SEQ ID NO: 2515522
auuuccgggaugcacucag

SEQ ID NO: 2515524 - RNA, 19 nt, Artificial Sequence
  Description of Artificial Sequence: Synthetic oligonucleotide
  Sense strand starting at position 1355 of SEQ ID NO: 1888162
gagugcaucccggaaauaa

SEQ ID NO: 2515525 - RNA, 19 nt, Artificial Sequence
  Description of Artificial Sequence: Synthetic oligonucleotide
  Antisense strand to SEQ ID NO: 2515524
uuauuuccgggaugcacuc

SEQ ID NO: 2515526 - RNA, 19 nt, Artificial Sequence
  Description of Artificial Sequence: Synthetic oligonucleotide
  Sense strand starting at position 1701 of SEQ ID NO: 1888162
cccucaguguucccgaaac

SEQ ID NO: 2515527 - RNA, 19 nt, Artificial Sequence
  Description of Artificial Sequence: Synthetic oligonucleotide
  Antisense strand to SEQ ID NO: 2515526
guuucgggaacacugaggg

SEQ ID NO: 2515528 - RNA, 19 nt, Artificial Sequence
  Description of Artificial Sequence: Synthetic oligonucleotide
  Sense strand starting at position 1703 of SEQ ID NO: 1888162
cucaguguucccgaaacuc

SEQ ID NO: 2515529 - RNA, 19 nt, Artificial Sequence
  Description of Artificial Sequence: Synthetic oligonucleotide
  Antisense strand to SEQ ID NO: 2515528
gaguuucgggaacacugag

SEQ ID NO: 2515530 - RNA, 19 nt, Artificial Sequence
  Description of Artificial Sequence: Synthetic oligonucleotide
  Sense strand starting at position 1711 of SEQ ID NO: 1888162
ucccgaaacucuugcgaca

SEQ ID NO: 2515531 - RNA, 19 nt, Artificial Sequence
  Description of Artificial Sequence: Synthetic oligonucleotide
  Antisense strand to SEQ ID NO: 2515530
ugucgcaagaguuucggga

SEQ ID NO: 2515532 - RNA, 19 nt, Artificial Sequence
  Description of Artificial Sequence: Synthetic oligonucleotide
  Sense strand starting at position 2339 of SEQ ID NO: 1888162
acaguuagugcccaauaaa

SEQ ID NO: 2515533 - RNA, 19 nt, Artificial Sequence
  Description of Artificial Sequence: Synthetic oligonucleotide
  Antisense strand to SEQ ID NO: 2515532
uuuauugggcacuaacugu

SEQ ID NO: 2515534 - RNA, 19 nt, Artificial Sequence
  Description of Artificial Sequence: Synthetic oligonucleotide
  Sense strand starting at position 2342 of SEQ ID NO: 1888162
guuagugcccaauaaacgu

SEQ ID NO: 2515535 - RNA, 19 nt, Artificial Sequence
  Description of Artificial Sequence: Synthetic oligonucleotide
  Antisense strand to SEQ ID NO: 2515534
acguuuauugggcacuaac

SEQ ID NO: 2515536 - RNA, 19 nt, Artificial Sequence
  Description of Artificial Sequence: Synthetic oligonucleotide
  Sense strand starting at position 3213 of SEQ ID NO: 1888162
agcuaucacuccugucuuu

SEQ ID NO: 2515537 - RNA, 19 nt, Artificial Sequence
  Description of Artificial Sequence: Synthetic oligonucleotide
  Antisense strand to SEQ ID NO: 2515536
aaagacaggagugauagcu

SEQ ID NO: 2515538 - RNA, 19 nt, Artificial Sequence
  Description of Artificial Sequence: Synthetic oligonucleotide
  Sense strand starting at position 3333 of SEQ ID NO: 1888162
acaacaugcuuaugguauu

SEQ ID NO: 2515539 - RNA, 19 nt, Artificial Sequence
  Description of Artificial Sequence: Synthetic oligonucleotide
  Antisense strand to SEQ ID NO: 2515538
aauaccauaagcauguugu

SEQ ID NO: 2515540 - RNA, 19 nt, Artificial Sequence
  Description of Artificial Sequence: Synthetic oligonucleotide
  Sense strand starting at position 3361 of SEQ ID NO: 1888162
agcucaugaucugaaacua

SEQ ID NO: 2515541 - RNA, 19 nt, Artificial Sequence
  Description of Artificial Sequence: Synthetic oligonucleotide
  Antisense strand to SEQ ID NO: 2515540
uaguuucagaucaugagcu

SEQ ID NO: 2515542 - RNA, 19 nt, Artificial Sequence
  Description of Artificial Sequence: Synthetic oligonucleotide
  Sense strand starting at position 3875 of SEQ ID NO: 1888162
ggcuucauacucggugaca

SEQ ID NO: 2515543 - RNA, 19 nt, Artificial Sequence
  Description of Artificial Sequence: Synthetic oligonucleotide
  Antisense strand to SEQ ID NO: 2515542
ugucaccgaguaugaagcc

SEQ ID NO: 2515544 - RNA, 19 nt, Artificial Sequence
  Description of Artificial Sequence: Synthetic oligonucleotide
  Sense strand starting at position 3947 of SEQ ID NO: 1888162
uguuguugagguuggagua

SEQ ID NO: 2515545 - RNA, 19 nt, Artificial Sequence
  Description of Artificial Sequence: Synthetic oligonucleotide
  Antisense strand to SEQ ID NO: 2515544
uacuccaaccucaacaaca

SEQ ID NO: 2515546 - RNA, 19 nt, Artificial Sequence
  Description of Artificial Sequence: Synthetic oligonucleotide
  Sense strand starting at position 75 of SEQ ID NO: 1888163
uguuuaaucuacuuggaua

SEQ ID NO: 2515547 - RNA, 19 nt, Artificial Sequence
  Description of Artificial Sequence: Synthetic oligonucleotide
  Antisense strand to SEQ ID NO: 2515546
uauccaaguagauuaaaca

SEQ ID NO: 2515548 - RNA, 19 nt, Artificial Sequence
  Description of Artificial Sequence: Synthetic oligonucleotide
  Sense strand starting at position 77 of SEQ ID NO: 1888163
uuuaaucuacuuggauaga

SEQ ID NO: 2515549 - RNA, 19 nt, Artificial Sequence
  Description of Artificial Sequence: Synthetic oligonucleotide
  Antisense strand to SEQ ID NO: 2515548
ucuauccaaguagauuaaa

SEQ ID NO: 2515550 - RNA, 19 nt, Artificial Sequence
  Description of Artificial Sequence: Synthetic oligonucleotide
  Sense strand starting at position 137 of SEQ ID NO: 1888163
accaguuacuaacuguaga

SEQ ID NO: 2515551 - RNA, 19 nt, Artificial Sequence
  Description of Artificial Sequence: Synthetic oligonucleotide
  Antisense strand to SEQ ID NO: 2515550
ucuacaguuaguaacuggu

SEQ ID NO: 2515552 - RNA, 19 nt, Artificial Sequence
  Description of Artificial Sequence: Synthetic oligonucleotide
  Sense strand starting at position 290 of SEQ ID NO: 1888163
gacugauagcuggauguuc

SEQ ID NO: 2515553 - RNA, 19 nt, Artificial Sequence
  Description of Artificial Sequence: Synthetic oligonucleotide
  Antisense strand to SEQ ID NO: 2515552
gaacauccagcuaucaguc

SEQ ID NO: 2515554 - RNA, 19 nt, Artificial Sequence
  Description of Artificial Sequence: Synthetic oligonucleotide
  Sense strand starting at position 361 of SEQ ID NO: 1888163
gucauaaguauugagcagu

SEQ ID NO: 2515555 - RNA, 19 nt, Artificial Sequence
  Description of Artificial Sequence: Synthetic oligonucleotide
  Antisense strand to SEQ ID NO: 2515554
acugcucaauacuuaugac

SEQ ID NO: 2515556 - RNA, 19 nt, Artificial Sequence
  Description of Artificial Sequence: Synthetic oligonucleotide
  Sense strand starting at position 364 of SEQ ID NO: 1888163
auaaguauugagcagucau

SEQ ID NO: 2515557 - RNA, 19 nt, Artificial Sequence
  Description of Artificial Sequence: Synthetic oligonucleotide
  Antisense strand to SEQ ID NO: 2515556
augacugcucaauacuuau

SEQ ID NO: 2515558 - RNA, 19 nt, Artificial Sequence
  Description of Artificial Sequence: Synthetic oligonucleotide
  Sense strand starting at position 432 of SEQ ID NO: 1888163
acaauuagccaucagcagu

SEQ ID NO: 2515559 - RNA, 19 nt, Artificial Sequence
  Description of Artificial Sequence: Synthetic oligonucleotide
  Antisense strand to SEQ ID NO: 2515558
acugcugauggcuaauugu

SEQ ID NO: 2515560 - RNA, 19 nt, Artificial Sequence
  Description of Artificial Sequence: Synthetic oligonucleotide
  Sense strand starting at position 744 of SEQ ID NO: 1888163
gguguuauucuugagggca

SEQ ID NO: 2515561 - RNA, 19 nt, Artificial Sequence
  Description of Artificial Sequence: Synthetic oligonucleotide
  Antisense strand to SEQ ID NO: 2515560
ugcccucaagaauaacacc

SEQ ID NO: 2515562 - RNA, 19 nt, Artificial Sequence
  Description of Artificial Sequence: Synthetic oligonucleotide
  Sense strand starting at position 747 of SEQ ID NO: 1888163
guuauucuugagggcacaa

SEQ ID NO: 2515563 - RNA, 19 nt, Artificial Sequence
  Description of Artificial Sequence: Synthetic oligonucleotide
  Antisense strand to SEQ ID NO: 2515562
uugugcccucaagaauaac

SEQ ID NO: 2515564 - RNA, 19 nt, Artificial Sequence
  Description of Artificial Sequence: Synthetic oligonucleotide
  Sense strand starting at position 759 of SEQ ID NO: 1888163
ggcacaaagccuggauaaa

SEQ ID NO: 2515565 - RNA, 19 nt, Artificial Sequence
  Description of Artificial Sequence: Synthetic oligonucleotide
  Antisense strand to SEQ ID NO: 2515564
uuuauccaggcuuugugcc

SEQ ID NO: 2515566 - RNA, 19 nt, Artificial Sequence
  Description of Artificial Sequence: Synthetic oligonucleotide
  Sense strand starting at position 939 of SEQ ID NO: 1888163
cucagugccaaggauuaga

SEQ ID NO: 2515567 - RNA, 19 nt, Artificial Sequence
  Description of Artificial Sequence: Synthetic oligonucleotide
  Antisense strand to SEQ ID NO: 2515566
ucuaauccuuggcacugag

SEQ ID NO: 2515568 - RNA, 19 nt, Artificial Sequence
  Description of Artificial Sequence: Synthetic oligonucleotide
  Sense strand starting at position 964 of SEQ ID NO: 1888163
ugaaguacaggcugaauau

SEQ ID NO: 2515569 - RNA, 19 nt, Artificial Sequence
  Description of Artificial Sequence: Synthetic oligonucleotide
  Antisense strand to SEQ ID NO: 2515568
auauucagccuguacuuca

SEQ ID NO: 2515570 - RNA, 19 nt, Artificial Sequence
  Description of Artificial Sequence: Synthetic oligonucleotide
  Sense strand starting at position 1004 of SEQ ID NO: 1888163
agacacaaugagugucuua

SEQ ID NO: 2515571 - RNA, 19 nt, Artificial Sequence
  Description of Artificial Sequence: Synthetic oligonucleotide
  Antisense strand to SEQ ID NO: 2515570
uaagacacucauugugucu

SEQ ID NO: 2515572 - RNA, 19 nt, Artificial Sequence
  Description of Artificial Sequence: Synthetic oligonucleotide
  Sense strand starting at position 1007 of SEQ ID NO: 1888163
cacaaugagugucuuagga

SEQ ID NO: 2515573 - RNA, 19 nt, Artificial Sequence
  Description of Artificial Sequence: Synthetic oligonucleotide
  Antisense strand to SEQ ID NO: 2515572
uccuaagacacucauugug

SEQ ID NO: 2515574 - RNA, 19 nt, Artificial Sequence
  Description of Artificial Sequence: Synthetic oligonucleotide
  Sense strand starting at position 1502 of SEQ ID NO: 1888163
cuaauuaauggugagcuga

SEQ ID NO: 2515575 - RNA, 19 nt, Artificial Sequence
  Description of Artificial Sequence: Synthetic oligonucleotide
  Antisense strand to SEQ ID NO: 2515574
ucagcucaccauuaauuag

SEQ ID NO: 2515576 - RNA, 19 nt, Artificial Sequence
  Description of Artificial Sequence: Synthetic oligonucleotide
  Sense strand starting at position 1504 of SEQ ID NO: 1888163
aauuaauggugagcugauu

SEQ ID NO: 2515577 - RNA, 19 nt, Artificial Sequence
  Description of Artificial Sequence: Synthetic oligonucleotide
  Antisense strand to SEQ ID NO: 2515576
aaucagcucaccauuaauu

SEQ ID NO: 2515578 - RNA, 19 nt, Artificial Sequence
  Description of Artificial Sequence: Synthetic oligonucleotide
  Sense strand starting at position 1526 of SEQ ID NO: 1888163
aacugucucggauauuaua

SEQ ID NO: 2515579 - RNA, 19 nt, Artificial Sequence
  Description of Artificial Sequence: Synthetic oligonucleotide
  Antisense strand to SEQ ID NO: 2515578
uauaauauccgagacaguu

SEQ ID NO: 2515580 - RNA, 19 nt, Artificial Sequence
  Description of Artificial Sequence: Synthetic oligonucleotide
  Sense strand starting at position 1535 of SEQ ID NO: 1888163
ggauauuauaggcaaguuu

SEQ ID NO: 2515581 - RNA, 19 nt, Artificial Sequence
  Description of Artificial Sequence: Synthetic oligonucleotide
  Antisense strand to SEQ ID NO: 2515580
aaacuugccuauaauaucc

SEQ ID NO: 2515582 - RNA, 19 nt, Artificial Sequence
  Description of Artificial Sequence: Synthetic oligonucleotide
  Sense strand starting at position 1628 of SEQ ID NO: 1888163
gauuaaacgggaugaugca

SEQ ID NO: 2515583 - RNA, 19 nt, Artificial Sequence
  Description of Artificial Sequence: Synthetic oligonucleotide
  Antisense strand to SEQ ID NO: 2515582
ugcaucaucccguuuaauc

SEQ ID NO: 2515584 - RNA, 19 nt, Artificial Sequence
  Description of Artificial Sequence: Synthetic oligonucleotide
  Sense strand starting at position 1646 of SEQ ID NO: 1888163
acuauagccugguuauaua

SEQ ID NO: 2515585 - RNA, 19 nt, Artificial Sequence
  Description of Artificial Sequence: Synthetic oligonucleotide
  Antisense strand to SEQ ID NO: 2515584
uauauaaccaggcuauagu

SEQ ID NO: 2515586 - RNA, 19 nt, Artificial Sequence
  Description of Artificial Sequence: Synthetic oligonucleotide
  Sense strand starting at position 1734 of SEQ ID NO: 1888163
auagguaaacauugauucu

SEQ ID NO: 2515587 - RNA, 19 nt, Artificial Sequence
  Description of Artificial Sequence: Synthetic oligonucleotide
  Antisense strand to SEQ ID NO: 2515586
agaaucaauguuuaccuau

SEQ ID NO: 2515588 - RNA, 19 nt, Artificial Sequence
  Description of Artificial Sequence: Synthetic oligonucleotide
  Sense strand starting at position 1737 of SEQ ID NO: 1888163
gguaaacauugauucugga

SEQ ID NO: 2515589 - RNA, 19 nt, Artificial Sequence
  Description of Artificial Sequence: Synthetic oligonucleotide
  Antisense strand to SEQ ID NO: 2515588
uccagaaucaauguuuacc

SEQ ID NO: 2515590 - RNA, 19 nt, Artificial Sequence
  Description of Artificial Sequence: Synthetic oligonucleotide
  Sense strand starting at position 2045 of SEQ ID NO: 1888163
gcggucauccuaucuuguu

SEQ ID NO: 2515591 - RNA, 19 nt, Artificial Sequence
  Description of Artificial Sequence: Synthetic oligonucleotide
  Antisense strand to SEQ ID NO: 2515590
aacaagauaggaugaccgc

SEQ ID NO: 2515592 - RNA, 19 nt, Artificial Sequence
  Description of Artificial Sequence: Synthetic oligonucleotide
  Sense strand starting at position 2876 of SEQ ID NO: 1888163
ucauucggucgggaugaau

SEQ ID NO: 2515593 - RNA, 19 nt, Artificial Sequence
  Description of Artificial Sequence: Synthetic oligonucleotide
  Antisense strand to SEQ ID NO: 2515592
auucaucccgaccgaauga

SEQ ID NO: 2515594 - RNA, 19 nt, Artificial Sequence
  Description of Artificial Sequence: Synthetic oligonucleotide
  Sense strand starting at position 3077 of SEQ ID NO: 1888163
uagggcaagucuuugggaa

SEQ ID NO: 2515595 - RNA, 19 nt, Artificial Sequence
  Description of Artificial Sequence: Synthetic oligonucleotide
  Antisense strand to SEQ ID NO: 2515594
uucccaaagacuugcccua

SEQ ID NO: 2515596 - RNA, 19 nt, Artificial Sequence
  Description of Artificial Sequence: Synthetic oligonucleotide
  Sense strand starting at position 3078 of SEQ ID NO: 1888163
agggcaagucuuugggaau

SEQ ID NO: 2515597 - RNA, 19 nt, Artificial Sequence
  Description of Artificial Sequence: Synthetic oligonucleotide
  Antisense strand to SEQ ID NO: 2515596
auucccaaagacuugcccu

SEQ ID NO: 2515598 - RNA, 19 nt, Artificial Sequence
  Description of Artificial Sequence: Synthetic oligonucleotide
  Sense strand starting at position 3090 of SEQ ID NO: 1888163
ugggaauauuuagaaaggu

SEQ ID NO: 2515599 - RNA, 19 nt, Artificial Sequence
  Description of Artificial Sequence: Synthetic oligonucleotide
  Antisense strand to SEQ ID NO: 2515598
accuuucuaaauauuccca

SEQ ID NO: 2515600 - RNA, 19 nt, Artificial Sequence
  Description of Artificial Sequence: Synthetic oligonucleotide
  Sense strand starting at position 3256 of SEQ ID NO: 1888163
cuauucuugagguaacgga

SEQ ID NO: 2515601 - RNA, 19 nt, Artificial Sequence
  Description of Artificial Sequence: Synthetic oligonucleotide
  Antisense strand to SEQ ID NO: 2515600
uccguuaccucaagaauag

SEQ ID NO: 2515602 - RNA, 19 nt, Artificial Sequence
  Description of Artificial Sequence: Synthetic oligonucleotide
  Sense strand starting at position 3299 of SEQ ID NO: 1888163
uugauaugcuacccagaca

SEQ ID NO: 2515603 - RNA, 19 nt, Artificial Sequence
  Description of Artificial Sequence: Synthetic oligonucleotide
  Antisense strand to SEQ ID NO: 2515602
ugucuggguagcauaucaa

SEQ ID NO: 2515604 - RNA, 19 nt, Artificial Sequence
  Description of Artificial Sequence: Synthetic oligonucleotide
  Sense strand starting at position 3356 of SEQ ID NO: 1888163
ucauguuagcaagacucau

SEQ ID NO: 2515605 - RNA, 19 nt, Artificial Sequence
  Description of Artificial Sequence: Synthetic oligonucleotide
  Antisense strand to SEQ ID NO: 2515604
augagucuugcuaacauga

SEQ ID NO: 2515606 - RNA, 19 nt, Artificial Sequence
  Description of Artificial Sequence: Synthetic oligonucleotide
  Sense strand starting at position 3589 of SEQ ID NO: 1888163
gguuaucugguugaguaau

SEQ ID NO: 2515607 - RNA, 19 nt, Artificial Sequence
  Description of Artificial Sequence: Synthetic oligonucleotide
  Antisense strand to SEQ ID NO: 2515606
auuacucaaccagauaacc

SEQ ID NO: 2515608 - RNA, 19 nt, Artificial Sequence
  Description of Artificial Sequence: Synthetic oligonucleotide
  Sense strand starting at position 3595 of SEQ ID NO: 1888163
cugguugaguaaucugaga

SEQ ID NO: 2515609 - RNA, 19 nt, Artificial Sequence
  Description of Artificial Sequence: Synthetic oligonucleotide
  Antisense strand to SEQ ID NO: 2515608
ucucagauuacucaaccag

SEQ ID NO: 2515610 - RNA, 19 nt, Artificial Sequence
  Description of Artificial Sequence: Synthetic oligonucleotide
  Sense strand starting at position 3597 of SEQ ID NO: 1888163
gguugaguaaucugagauu

SEQ ID NO: 2515611 - RNA, 19 nt, Artificial Sequence
  Description of Artificial Sequence: Synthetic oligonucleotide
  Antisense strand to SEQ ID NO: 2515610
aaucucagauuacucaacc

SEQ ID NO: 2515612 - RNA, 19 nt, Artificial Sequence
  Description of Artificial Sequence: Synthetic oligonucleotide
  Sense strand starting at position 3684 of SEQ ID NO: 1888163
ugaaauauucuauguggag

SEQ ID NO: 2515613 - RNA, 19 nt, Artificial Sequence
  Description of Artificial Sequence: Synthetic oligonucleotide
  Antisense strand to SEQ ID NO: 2515612
cuccacauagaauauuuca

SEQ ID NO: 2515614 - RNA, 19 nt, Artificial Sequence
  Description of Artificial Sequence: Synthetic oligonucleotide
  Sense strand starting at position 3685 of SEQ ID NO: 1888163
gaaauauucuauguggagc

SEQ ID NO: 2515615 - RNA, 19 nt, Artificial Sequence
  Description of Artificial Sequence: Synthetic oligonucleotide
  Antisense strand to SEQ ID NO: 2515614
gcuccacauagaauauuuc

SEQ ID NO: 2515616 - RNA, 19 nt, Artificial Sequence
  Description of Artificial Sequence: Synthetic oligonucleotide
  Sense strand starting at position 3747 of SEQ ID NO: 1888163
uuguuaauucgccaaauga

SEQ ID NO: 2515617 - RNA, 19 nt, Artificial Sequence
  Description of Artificial Sequence: Synthetic oligonucleotide
  Antisense strand to SEQ ID NO: 2515616
ucauuuggcgaauuaacaa

SEQ ID NO: 2515618 - RNA, 19 nt, Artificial Sequence
  Description of Artificial Sequence: Synthetic oligonucleotide
  Sense strand starting at position 3808 of SEQ ID NO: 1888163
uggauaauuucugaaguua

SEQ ID NO: 2515619 - RNA, 19 nt, Artificial Sequence
  Description of Artificial Sequence: Synthetic oligonucleotide
  Antisense strand to SEQ ID NO: 2515618
uaacuucagaaauuaucca

SEQ ID NO: 2515620 - RNA, 19 nt, Artificial Sequence
  Description of Artificial Sequence: Synthetic oligonucleotide
  Sense strand starting at position 3917 of SEQ ID NO: 1888163
guaaccuuugaucaguauu

SEQ ID NO: 2515621 - RNA, 19 nt, Artificial Sequence
  Description of Artificial Sequence: Synthetic oligonucleotide
  Antisense strand to SEQ ID NO: 2515620
aauacugaucaaagguuac

SEQ ID NO: 2515622 - RNA, 19 nt, Artificial Sequence
  Description of Artificial Sequence: Synthetic oligonucleotide
  Sense strand starting at position 3953 of SEQ ID NO: 1888163
uaguauggucaacagacuu

SEQ ID NO: 2515623 - RNA, 19 nt, Artificial Sequence
  Description of Artificial Sequence: Synthetic oligonucleotide
  Antisense strand to SEQ ID NO: 2515622
aagucuguugaccauacua

SEQ ID NO: 2515624 - RNA, 19 nt, Artificial Sequence
  Description of Artificial Sequence: Synthetic oligonucleotide
  Sense strand starting at position 3979 of SEQ ID NO: 1888163
uucuuuggacucugaaaca

SEQ ID NO: 2515625 - RNA, 19 nt, Artificial Sequence
  Description of Artificial Sequence: Synthetic oligonucleotide
  Antisense strand to SEQ ID NO: 2515624
uguuucagaguccaaagaa

SEQ ID NO: 2515626 - RNA, 19 nt, Artificial Sequence
  Description of Artificial Sequence: Synthetic oligonucleotide
  Sense strand starting at position 18 of SEQ ID NO: 1888164
gccagacauccuuggcauc

SEQ ID NO: 2515627 - RNA, 19 nt, Artificial Sequence
  Description of Artificial Sequence: Synthetic oligonucleotide
  Antisense strand to SEQ ID NO: 2515626
gaugccaaggaugucuggc

SEQ ID NO: 2515628 - RNA, 19 nt, Artificial Sequence
  Description of Artificial Sequence: Synthetic oligonucleotide
  Sense strand starting at position 347 of SEQ ID NO: 1888164
gaugaucucugagcagaga

SEQ ID NO: 2515629 - RNA, 19 nt, Artificial Sequence
  Description of Artificial Sequence: Synthetic oligonucleotide
  Antisense strand to SEQ ID NO: 2515628
ucucugcucagagaucauc

SEQ ID NO: 2515630 - RNA, 19 nt, Artificial Sequence
  Description of Artificial Sequence: Synthetic oligonucleotide
  Sense strand starting at position 490 of SEQ ID NO: 1888164
cccagauuaguaugaguuu

SEQ ID NO: 2515631 - RNA, 19 nt, Artificial Sequence
  Description of Artificial Sequence: Synthetic oligonucleotide
  Antisense strand to SEQ ID NO: 2515630
aaacucauacuaaucuggg

SEQ ID NO: 2515632 - RNA, 19 nt, Artificial Sequence
  Description of Artificial Sequence: Synthetic oligonucleotide
  Sense strand starting at position 610 of SEQ ID NO: 1888164
gggaaguggucuuuggugu

SEQ ID NO: 2515633 - RNA, 19 nt, Artificial Sequence
  Description of Artificial Sequence: Synthetic oligonucleotide
  Antisense strand to SEQ ID NO: 2515632
acaccaaagaccacuuccc

SEQ ID NO: 2515634 - RNA, 19 nt, Artificial Sequence
  Description of Artificial Sequence: Synthetic oligonucleotide
  Sense strand starting at position 611 of SEQ ID NO: 1888164
ggaaguggucuuugguguu

SEQ ID NO: 2515635 - RNA, 19 nt, Artificial Sequence
  Description of Artificial Sequence: Synthetic oligonucleotide
  Antisense strand to SEQ ID NO: 2515634
aacaccaaagaccacuucc

SEQ ID NO: 2515636 - RNA, 19 nt, Artificial Sequence
  Description of Artificial Sequence: Synthetic oligonucleotide
  Sense strand starting at position 639 of SEQ ID NO: 1888164
ggcuuuguuacuuguagcu

SEQ ID NO: 2515637 - RNA, 19 nt, Artificial Sequence
  Description of Artificial Sequence: Synthetic oligonucleotide
  Antisense strand to SEQ ID NO: 2515636
agcuacaaguaacaaagcc

SEQ ID NO: 2515638 - RNA, 19 nt, Artificial Sequence
  Description of Artificial Sequence: Synthetic oligonucleotide
  Sense strand starting at position 645 of SEQ ID NO: 1888164
guuacuuguagcuggguga

SEQ ID NO: 2515639 - RNA, 19 nt, Artificial Sequence
  Description of Artificial Sequence: Synthetic oligonucleotide
  Antisense strand to SEQ ID NO: 2515638
ucacccagcuacaaguaac

SEQ ID NO: 2515640 - RNA, 19 nt, Artificial Sequence
  Description of Artificial Sequence: Synthetic oligonucleotide
  Sense strand starting at position 834 of SEQ ID NO: 1888164
gagcccaggucuuuagaaa

SEQ ID NO: 2515641 - RNA, 19 nt, Artificial Sequence
  Description of Artificial Sequence: Synthetic oligonucleotide
  Antisense strand to SEQ ID NO: 2515640
uuucuaaagaccugggcuc

SEQ ID NO: 2515642 - RNA, 19 nt, Artificial Sequence
  Description of Artificial Sequence: Synthetic oligonucleotide
  Sense strand starting at position 835 of SEQ ID NO: 1888164
agcccaggucuuuagaaag

SEQ ID NO: 2515643 - RNA, 19 nt, Artificial Sequence
  Description of Artificial Sequence: Synthetic oligonucleotide
  Antisense strand to SEQ ID NO: 2515642
cuuucuaaagaccugggcu

SEQ ID NO: 2515644 - RNA, 19 nt, Artificial Sequence
  Description of Artificial Sequence: Synthetic oligonucleotide
  Sense strand starting at position 845 of SEQ ID NO: 1888164
uuuagaaaggucgaguuaa

SEQ ID NO: 2515645 - RNA, 19 nt, Artificial Sequence
  Description of Artificial Sequence: Synthetic oligonucleotide
  Antisense strand to SEQ ID NO: 2515644
uuaacucgaccuuucuaaa

SEQ ID NO: 2515646 - RNA, 19 nt, Artificial Sequence
  Description of Artificial Sequence: Synthetic oligonucleotide
  Sense strand starting at position 877 of SEQ ID NO: 1888164
cuacuuugccaccaaagga

SEQ ID NO: 2515647 - RNA, 19 nt, Artificial Sequence
  Description of Artificial Sequence: Synthetic oligonucleotide
  Antisense strand to SEQ ID NO: 2515646
uccuuugguggcaaaguag

SEQ ID NO: 2515648 - RNA, 19 nt, Artificial Sequence
  Description of Artificial Sequence: Synthetic oligonucleotide
  Sense strand starting at position 944 of SEQ ID NO: 1888164
ggaagagaugcaggucuca

SEQ ID NO: 2515649 - RNA, 19 nt, Artificial Sequence
  Description of Artificial Sequence: Synthetic oligonucleotide
  Antisense strand to SEQ ID NO: 2515648
ugagaccugcaucucuucc

SEQ ID NO: 2515650 - RNA, 19 nt, Artificial Sequence
  Description of Artificial Sequence: Synthetic oligonucleotide
  Sense strand starting at position 1008 of SEQ ID NO: 1888164
gguagacaucuugauguua

SEQ ID NO: 2515651 - RNA, 19 nt, Artificial Sequence
  Description of Artificial Sequence: Synthetic oligonucleotide
  Antisense strand to SEQ ID NO: 2515650
uaacaucaagaugucuacc

SEQ ID NO: 2515652 - RNA, 19 nt, Artificial Sequence
  Description of Artificial Sequence: Synthetic oligonucleotide
  Sense strand starting at position 1013 of SEQ ID NO: 1888164
acaucuugauguuagacca

SEQ ID NO: 2515653 - RNA, 19 nt, Artificial Sequence
  Description of Artificial Sequence: Synthetic oligonucleotide
  Antisense strand to SEQ ID NO: 2515652
uggucuaacaucaagaugu

SEQ ID NO: 2515654 - RNA, 19 nt, Artificial Sequence
  Description of Artificial Sequence: Synthetic oligonucleotide
  Sense strand starting at position 1023 of SEQ ID NO: 1888164
guuagaccauucucaauug

SEQ ID NO: 2515655 - RNA, 19 nt, Artificial Sequence
  Description of Artificial Sequence: Synthetic oligonucleotide
  Antisense strand to SEQ ID NO: 2515654
caauugagaauggucuaac

SEQ ID NO: 2515656 - RNA, 19 nt, Artificial Sequence
  Description of Artificial Sequence: Synthetic oligonucleotide
  Sense strand starting at position 1043 of SEQ ID NO: 1888164
uuccaagcuuccuaagaag

SEQ ID NO: 2515657 - RNA, 19 nt, Artificial Sequence
  Description of Artificial Sequence: Synthetic oligonucleotide
  Antisense strand to SEQ ID NO: 2515656
cuucuuaggaagcuuggaa

SEQ ID NO: 2515658 - RNA, 19 nt, Artificial Sequence
  Description of Artificial Sequence: Synthetic oligonucleotide
  Sense strand starting at position 1076 of SEQ ID NO: 1888164
uggaguuugccgggaguca

SEQ ID NO: 2515659 - RNA, 19 nt, Artificial Sequence
  Description of Artificial Sequence: Synthetic oligonucleotide
  Antisense strand to SEQ ID NO: 2515658
ugacucccggcaaacucca

SEQ ID NO: 2515660 - RNA, 19 nt, Artificial Sequence
  Description of Artificial Sequence: Synthetic oligonucleotide
  Sense strand starting at position 1120 of SEQ ID NO: 1888164
uccagaguguuagcagacu

SEQ ID NO: 2515661 - RNA, 19 nt, Artificial Sequence
  Description of Artificial Sequence: Synthetic oligonucleotide
  Antisense strand to SEQ ID NO: 2515660
agucugcuaacacucugga

SEQ ID NO: 2515662 - RNA, 19 nt, Artificial Sequence
  Description of Artificial Sequence: Synthetic oligonucleotide
  Sense strand starting at position 2030 of SEQ ID NO: 1888164
gcuuuacggcccggugaaa

SEQ ID NO: 2515663 - RNA, 19 nt, Artificial Sequence
  Description of Artificial Sequence: Synthetic oligonucleotide
  Antisense strand to SEQ ID NO: 2515662
uuucaccgggccguaaagc

SEQ ID NO: 2515664 - RNA, 19 nt, Artificial Sequence
  Description of Artificial Sequence: Synthetic oligonucleotide
  Sense strand starting at position 2039 of SEQ ID NO: 1888164
cccggugaaaucugacaac

SEQ ID NO: 2515665 - RNA, 19 nt, Artificial Sequence
  Description of Artificial Sequence: Synthetic oligonucleotide
  Antisense strand to SEQ ID NO: 2515664
guugucagauuucaccggg

SEQ ID NO: 2515666 - RNA, 19 nt, Artificial Sequence
  Description of Artificial Sequence: Synthetic oligonucleotide
  Sense strand starting at position 2042 of SEQ ID NO: 1888164
ggugaaaucugacaacuuc

SEQ ID NO: 2515667 - RNA, 19 nt, Artificial Sequence
  Description of Artificial Sequence: Synthetic oligonucleotide
  Antisense strand to SEQ ID NO: 2515666
gaaguugucagauuucacc

SEQ ID NO: 2515668 - RNA, 19 nt, Artificial Sequence
  Description of Artificial Sequence: Synthetic oligonucleotide
  Sense strand starting at position 2113 of SEQ ID NO: 1888164
gcugauuccucuccaauga

SEQ ID NO: 2515669 - RNA, 19 nt, Artificial Sequence
  Description of Artificial Sequence: Synthetic oligonucleotide
  Antisense strand to SEQ ID NO: 2515668
ucauuggagaggaaucagc

SEQ ID NO: 2515670 - RNA, 19 nt, Artificial Sequence
  Description of Artificial Sequence: Synthetic oligonucleotide
  Sense strand starting at position 2117 of SEQ ID NO: 1888164
auuccucuccaaugaggau

SEQ ID NO: 2515671 - RNA, 19 nt, Artificial Sequence
  Description of Artificial Sequence: Synthetic oligonucleotide
  Antisense strand to SEQ ID NO: 2515670
auccucauuggagaggaau

SEQ ID NO: 2515672 - RNA, 19 nt, Artificial Sequence
  Description of Artificial Sequence: Synthetic oligonucleotide
  Sense strand starting at position 2176 of SEQ ID NO: 1888164
augcuuucuccuugccgga

SEQ ID NO: 2515673 - RNA, 19 nt, Artificial Sequence
  Description of Artificial Sequence: Synthetic oligonucleotide
  Antisense strand to SEQ ID NO: 2515672
uccggcaaggagaaagcau

SEQ ID NO: 2515674 - RNA, 19 nt, Artificial Sequence
  Description of Artificial Sequence: Synthetic oligonucleotide
  Sense strand starting at position 2217 of SEQ ID NO: 1888164
ccugaugaguuaguucuaa

SEQ ID NO: 2515675 - RNA, 19 nt, Artificial Sequence
  Description of Artificial Sequence: Synthetic oligonucleotide
  Antisense strand to SEQ ID NO: 2515674
uuagaacuaacucaucagg

SEQ ID NO: 2515676 - RNA, 19 nt, Artificial Sequence
  Description of Artificial Sequence: Synthetic oligonucleotide
  Sense strand starting at position 2403 of SEQ ID NO: 1888164
gaccuugaagacuguggua

SEQ ID NO: 2515677 - RNA, 19 nt, Artificial Sequence
  Description of Artificial Sequence: Synthetic oligonucleotide
  Antisense strand to SEQ ID NO: 2515676
uaccacagucuucaagguc

SEQ ID NO: 2515678 - RNA, 19 nt, Artificial Sequence
  Description of Artificial Sequence: Synthetic oligonucleotide
  Sense strand starting at position 2405 of SEQ ID NO: 1888164
ccuugaagacugugguaua

SEQ ID NO: 2515679 - RNA, 19 nt, Artificial Sequence
  Description of Artificial Sequence: Synthetic oligonucleotide
  Antisense strand to SEQ ID NO: 2515678
uauaccacagucuucaagg

SEQ ID NO: 2515680 - RNA, 19 nt, Artificial Sequence
  Description of Artificial Sequence: Synthetic oligonucleotide
  Sense strand starting at position 2416 of SEQ ID NO: 1888164
gugguauaagccuagccuu

SEQ ID NO: 2515681 - RNA, 19 nt, Artificial Sequence
  Description of Artificial Sequence: Synthetic oligonucleotide
  Antisense strand to SEQ ID NO: 2515680
aaggcuaggcuuauaccac

SEQ ID NO: 2515682 - RNA, 19 nt, Artificial Sequence
  Description of Artificial Sequence: Synthetic oligonucleotide
  Sense strand starting at position 2694 of SEQ ID NO: 1888164
uccgccuucccagguuaaa

SEQ ID NO: 2515683 - RNA, 19 nt, Artificial Sequence
  Description of Artificial Sequence: Synthetic oligonucleotide
  Antisense strand to SEQ ID NO: 2515682
uuuaaccugggaaggcgga

SEQ ID NO: 2515684 - RNA, 19 nt, Artificial Sequence
  Description of Artificial Sequence: Synthetic oligonucleotide
  Sense strand starting at position 2906 of SEQ ID NO: 1888164
ggcccaagcucagucuuua

SEQ ID NO: 2515685 - RNA, 19 nt, Artificial Sequence
  Description of Artificial Sequence: Synthetic oligonucleotide
  Antisense strand to SEQ ID NO: 2515684
uaaagacugagcuugggcc

SEQ ID NO: 2515686 - RNA, 19 nt, Artificial Sequence
  Description of Artificial Sequence: Synthetic oligonucleotide
  Sense strand starting at position 2939 of SEQ ID NO: 1888164
acaauuguuuaacagaggu

SEQ ID NO: 2515687 - RNA, 19 nt, Artificial Sequence
  Description of Artificial Sequence: Synthetic oligonucleotide
  Antisense strand to SEQ ID NO: 2515686
accucuguuaaacaauugu

SEQ ID NO: 2515688 - RNA, 19 nt, Artificial Sequence
  Description of Artificial Sequence: Synthetic oligonucleotide
  Sense strand starting at position 3349 of SEQ ID NO: 1888164
ucacaugcucaguauugua

SEQ ID NO: 2515689 - RNA, 19 nt, Artificial Sequence
  Description of Artificial Sequence: Synthetic oligonucleotide
  Antisense strand to SEQ ID NO: 2515688
uacaauacugagcauguga

SEQ ID NO: 2515690 - RNA, 19 nt, Artificial Sequence
  Description of Artificial Sequence: Synthetic oligonucleotide
  Sense strand starting at position 3356 of SEQ ID NO: 1888164
cucaguauuguauacaaga

SEQ ID NO: 2515691 - RNA, 19 nt, Artificial Sequence
  Description of Artificial Sequence: Synthetic oligonucleotide
  Antisense strand to SEQ ID NO: 2515690
ucuuguauacaauacugag

SEQ ID NO: 2515692 - RNA, 19 nt, Artificial Sequence
  Description of Artificial Sequence: Synthetic oligonucleotide
  Sense strand starting at position 3398 of SEQ ID NO: 1888164
cucacucacgccuguaauu

SEQ ID NO: 2515693 - RNA, 19 nt, Artificial Sequence
  Description of Artificial Sequence: Synthetic oligonucleotide
  Antisense strand to SEQ ID NO: 2515692
aauuacaggcgugagugag

SEQ ID NO: 2515694 - RNA, 19 nt, Artificial Sequence
  Description of Artificial Sequence: Synthetic oligonucleotide
  Sense strand starting at position 3540 of SEQ ID NO: 1888164
acacgccuguaaucucaau

SEQ ID NO: 2515695 - RNA, 19 nt, Artificial Sequence
  Description of Artificial Sequence: Synthetic oligonucleotide
  Antisense strand to SEQ ID NO: 2515694
auugagauuacaggcgugu

SEQ ID NO: 2515696 - RNA, 19 nt, Artificial Sequence
  Description of Artificial Sequence: Synthetic oligonucleotide
  Sense strand starting at position 3662 of SEQ ID NO: 1888164
ccugcuguuuggucaagca

SEQ ID NO: 2515697 - RNA, 19 nt, Artificial Sequence
  Description of Artificial Sequence: Synthetic oligonucleotide
  Antisense strand to SEQ ID NO: 2515696
ugcuugaccaaacagcagg

SEQ ID NO: 2515698 - RNA, 19 nt, Artificial Sequence
  Description of Artificial Sequence: Synthetic oligonucleotide
  Sense strand starting at position 3670 of SEQ ID NO: 1888164
uuggucaagcauugauaau

SEQ ID NO: 2515699 - RNA, 19 nt, Artificial Sequence
  Description of Artificial Sequence: Synthetic oligonucleotide
  Antisense strand to SEQ ID NO: 2515698
auuaucaaugcuugaccaa

SEQ ID NO: 2515700 - RNA, 19 nt, Artificial Sequence
  Description of Artificial Sequence: Synthetic oligonucleotide
  Sense strand starting at position 3681 of SEQ ID NO: 1888164
uugauaaucuuguuacagc

SEQ ID NO: 2515701 - RNA, 19 nt, Artificial Sequence
  Description of Artificial Sequence: Synthetic oligonucleotide
  Antisense strand to SEQ ID NO: 2515700
gcuguaacaagauuaucaa

SEQ ID NO: 2515702 - RNA, 19 nt, Artificial Sequence
  Description of Artificial Sequence: Synthetic oligonucleotide
  Sense strand starting at position 3887 of SEQ ID NO: 1888164
cacuguuucuggccaguuu

SEQ ID NO: 2515703 - RNA, 19 nt, Artificial Sequence
  Description of Artificial Sequence: Synthetic oligonucleotide
  Antisense strand to SEQ ID NO: 2515702
aaacuggccagaaacagug

SEQ ID NO: 2515704 - RNA, 19 nt, Artificial Sequence
  Description of Artificial Sequence: Synthetic oligonucleotide
  Sense strand starting at position 3949 of SEQ ID NO: 1888164
aggugaggcagugaucaca

SEQ ID NO: 2515705 - RNA, 19 nt, Artificial Sequence
  Description of Artificial Sequence: Synthetic oligonucleotide
  Antisense strand to SEQ ID NO: 2515704
ugugaucacugccucaccu

SEQ ID NO: 2515706 - RNA, 19 nt, Artificial Sequence
  Description of Artificial Sequence: Synthetic oligonucleotide
  Sense strand starting at position 89 of SEQ ID NO: 1888165
ugacacagucagugcaaua

SEQ ID NO: 2515707 - RNA, 19 nt, Artificial Sequence
  Description of Artificial Sequence: Synthetic oligonucleotide
  Antisense strand to SEQ ID NO: 2515706
uauugcacugacuguguca

SEQ ID NO: 2515708 - RNA, 19 nt, Artificial Sequence
  Description of Artificial Sequence: Synthetic oligonucleotide
  Sense strand starting at position 224 of SEQ ID NO: 1888165
uugcauuaguaucagggaa

SEQ ID NO: 2515709 - RNA, 19 nt, Artificial Sequence
  Description of Artificial Sequence: Synthetic oligonucleotide
  Antisense strand to SEQ ID NO: 2515708
uucccugauacuaaugcaa

SEQ ID NO: 2515710 - RNA, 19 nt, Artificial Sequence
  Description of Artificial Sequence: Synthetic oligonucleotide
  Sense strand starting at position 226 of SEQ ID NO: 1888165
gcauuaguaucagggaaga

SEQ ID NO: 2515711 - RNA, 19 nt, Artificial Sequence
  Description of Artificial Sequence: Synthetic oligonucleotide
  Antisense strand to SEQ ID NO: 2515710
ucuucccugauacuaaugc

SEQ ID NO: 2515712 - RNA, 19 nt, Artificial Sequence
  Description of Artificial Sequence: Synthetic oligonucleotide
  Sense strand starting at position 625 of SEQ ID NO: 1888165
ccucaaguuccaugacagu

SEQ ID NO: 2515713 - RNA, 19 nt, Artificial Sequence
  Description of Artificial Sequence: Synthetic oligonucleotide
  Antisense strand to SEQ ID NO: 2515712
acugucauggaacuugagg

SEQ ID NO: 2515714 - RNA, 19 nt, Artificial Sequence
  Description of Artificial Sequence: Synthetic oligonucleotide
  Sense strand starting at position 655 of SEQ ID NO: 1888165
gcccucuguguacauaaua

SEQ ID NO: 2515715 - RNA, 19 nt, Artificial Sequence
  Description of Artificial Sequence: Synthetic oligonucleotide
  Antisense strand to SEQ ID NO: 2515714
uauuauguacacagagggc

SEQ ID NO: 2515716 - RNA, 19 nt, Artificial Sequence
  Description of Artificial Sequence: Synthetic oligonucleotide
  Sense strand starting at position 693 of SEQ ID NO: 1888165
gcuuaccucguguuccgaa

SEQ ID NO: 2515717 - RNA, 19 nt, Artificial Sequence
  Description of Artificial Sequence: Synthetic oligonucleotide
  Antisense strand to SEQ ID NO: 2515716
uucggaacacgagguaagc

SEQ ID NO: 2515718 - RNA, 19 nt, Artificial Sequence
  Description of Artificial Sequence: Synthetic oligonucleotide
  Sense strand starting at position 694 of SEQ ID NO: 1888165
cuuaccucguguuccgaaa

SEQ ID NO: 2515719 - RNA, 19 nt, Artificial Sequence
  Description of Artificial Sequence: Synthetic oligonucleotide
  Antisense strand to SEQ ID NO: 2515718
uuucggaacacgagguaag

SEQ ID NO: 2515720 - RNA, 19 nt, Artificial Sequence
  Description of Artificial Sequence: Synthetic oligonucleotide
  Sense strand starting at position 926 of SEQ ID NO: 1888165
uuugacugcugaucaaauu

SEQ ID NO: 2515721 - RNA, 19 nt, Artificial Sequence
  Description of Artificial Sequence: Synthetic oligonucleotide
  Antisense strand to SEQ ID NO: 2515720
aauuugaucagcagucaaa

SEQ ID NO: 2515722 - RNA, 19 nt, Artificial Sequence
  Description of Artificial Sequence: Synthetic oligonucleotide
  Sense strand starting at position 1011 of SEQ ID NO: 1888165
gcuagauaaugucacagga

SEQ ID NO: 2515723 - RNA, 19 nt, Artificial Sequence
  Description of Artificial Sequence: Synthetic oligonucleotide
  Antisense strand to SEQ ID NO: 2515722
uccugugacauuaucuagc

SEQ ID NO: 2515724 - RNA, 19 nt, Artificial Sequence
  Description of Artificial Sequence: Synthetic oligonucleotide
  Sense strand starting at position 1013 of SEQ ID NO: 1888165
uagauaaugucacaggaga

SEQ ID NO: 2515725 - RNA, 19 nt, Artificial Sequence
  Description of Artificial Sequence: Synthetic oligonucleotide
  Antisense strand to SEQ ID NO: 2515724
ucuccugugacauuaucua

SEQ ID NO: 2515726 - RNA, 19 nt, Artificial Sequence
  Description of Artificial Sequence: Synthetic oligonucleotide
  Sense strand starting at position 1289 of SEQ ID NO: 1888165
accaucaguaguuguagua

SEQ ID NO: 2515727 - RNA, 19 nt, Artificial Sequence
  Description of Artificial Sequence: Synthetic oligonucleotide
  Antisense strand to SEQ ID NO: 2515726
uacuacaacuacugauggu

SEQ ID NO: 2515728 - RNA, 19 nt, Artificial Sequence
  Description of Artificial Sequence: Synthetic oligonucleotide
  Sense strand starting at position 1328 of SEQ ID NO: 1888165
cgcuaaagaugaucuaaau

SEQ ID NO: 2515729 - RNA, 19 nt, Artificial Sequence
  Description of Artificial Sequence: Synthetic oligonucleotide
  Antisense strand to SEQ ID NO: 2515728
auuuagaucaucuuuagcg

SEQ ID NO: 2515730 - RNA, 19 nt, Artificial Sequence
  Description of Artificial Sequence: Synthetic oligonucleotide
  Sense strand starting at position 1367 of SEQ ID NO: 1888165
gcaucaugacgauaaaugu

SEQ ID NO: 2515731 - RNA, 19 nt, Artificial Sequence
  Description of Artificial Sequence: Synthetic oligonucleotide
  Antisense strand to SEQ ID NO: 2515730
acauuuaucgucaugaugc

SEQ ID NO: 2515732 - RNA, 19 nt, Artificial Sequence
  Description of Artificial Sequence: Synthetic oligonucleotide
  Sense strand starting at position 1486 of SEQ ID NO: 1888165
augcuuacugccgaguuau

SEQ ID NO: 2515733 - RNA, 19 nt, Artificial Sequence
  Description of Artificial Sequence: Synthetic oligonucleotide
  Antisense strand to SEQ ID NO: 2515732
auaacucggcaguaagcau

SEQ ID NO: 2515734 - RNA, 19 nt, Artificial Sequence
  Description of Artificial Sequence: Synthetic oligonucleotide
  Sense strand starting at position 1496 of SEQ ID NO: 1888165
ccgaguuaugagcaagcaa

SEQ ID NO: 2515735 - RNA, 19 nt, Artificial Sequence
  Description of Artificial Sequence: Synthetic oligonucleotide
  Antisense strand to SEQ ID NO: 2515734
uugcuugcucauaacucgg

SEQ ID NO: 2515736 - RNA, 19 nt, Artificial Sequence
  Description of Artificial Sequence: Synthetic oligonucleotide
  Sense strand starting at position 1519 of SEQ ID NO: 1888165
augccaagcucuguuauuu

SEQ ID NO: 2515737 - RNA, 19 nt, Artificial Sequence
  Description of Artificial Sequence: Synthetic oligonucleotide
  Antisense strand to SEQ ID NO: 2515736
aaauaacagagcuuggcau

SEQ ID NO: 2515738 - RNA, 19 nt, Artificial Sequence
  Description of Artificial Sequence: Synthetic oligonucleotide
  Sense strand starting at position 2137 of SEQ ID NO: 1888165
ucagcaucguuauccauca

SEQ ID NO: 2515739 - RNA, 19 nt, Artificial Sequence
  Description of Artificial Sequence: Synthetic oligonucleotide
  Antisense strand to SEQ ID NO: 2515738
ugauggauaacgaugcuga

SEQ ID NO: 2515740 - RNA, 19 nt, Artificial Sequence
  Description of Artificial Sequence: Synthetic oligonucleotide
  Sense strand starting at position 2292 of SEQ ID NO: 1888165
uaaucuguauuugaagagu

SEQ ID NO: 2515741 - RNA, 19 nt, Artificial Sequence
  Description of Artificial Sequence: Synthetic oligonucleotide
  Antisense strand to SEQ ID NO: 2515740
acucuucaaauacagauua

SEQ ID NO: 2515742 - RNA, 19 nt, Artificial Sequence
  Description of Artificial Sequence: Synthetic oligonucleotide
  Sense strand starting at position 2621 of SEQ ID NO: 1888165
acagaacuugaauguuacu

SEQ ID NO: 2515743 - RNA, 19 nt, Artificial Sequence
  Description of Artificial Sequence: Synthetic oligonucleotide
  Antisense strand to SEQ ID NO: 2515742
aguaacauucaaguucugu

SEQ ID NO: 2515744 - RNA, 19 nt, Artificial Sequence
  Description of Artificial Sequence: Synthetic oligonucleotide
  Sense strand starting at position 2663 of SEQ ID NO: 1888165
agggcaacauuguugaaau

SEQ ID NO: 2515745 - RNA, 19 nt, Artificial Sequence
  Description of Artificial Sequence: Synthetic oligonucleotide
  Antisense strand to SEQ ID NO: 2515744
auuucaacaauguugcccu

SEQ ID NO: 2515746 - RNA, 19 nt, Artificial Sequence
  Description of Artificial Sequence: Synthetic oligonucleotide
  Sense strand starting at position 2665 of SEQ ID NO: 1888165
ggcaacauuguugaaaucu

SEQ ID NO: 2515747 - RNA, 19 nt, Artificial Sequence
  Description of Artificial Sequence: Synthetic oligonucleotide
  Antisense strand to SEQ ID NO: 2515746
agauuucaacaauguugcc

SEQ ID NO: 2515748 - RNA, 19 nt, Artificial Sequence
  Description of Artificial Sequence: Synthetic oligonucleotide
  Sense strand starting at position 2781 of SEQ ID NO: 1888165
gcgguuucuacugaaaucu

SEQ ID NO: 2515749 - RNA, 19 nt, Artificial Sequence
  Description of Artificial Sequence: Synthetic oligonucleotide
  Antisense strand to SEQ ID NO: 2515748
agauuucaguagaaaccgc

SEQ ID NO: 2515750 - RNA, 19 nt, Artificial Sequence
  Description of Artificial Sequence: Synthetic oligonucleotide
  Sense strand starting at position 2790 of SEQ ID NO: 1888165
acugaaaucuagcuuggau

SEQ ID NO: 2515751 - RNA, 19 nt, Artificial Sequence
  Description of Artificial Sequence: Synthetic oligonucleotide
  Antisense strand to SEQ ID NO: 2515750
auccaagcuagauuucagu

SEQ ID NO: 2515752 - RNA, 19 nt, Artificial Sequence
  Description of Artificial Sequence: Synthetic oligonucleotide
  Sense strand starting at position 2792 of SEQ ID NO: 1888165
ugaaaucuagcuuggauac

SEQ ID NO: 2515753 - RNA, 19 nt, Artificial Sequence
  Description of Artificial Sequence: Synthetic oligonucleotide
  Antisense strand to SEQ ID NO: 2515752
guauccaagcuagauuuca

SEQ ID NO: 2515754 - RNA, 19 nt, Artificial Sequence
  Description of Artificial Sequence: Synthetic oligonucleotide
  Sense strand starting at position 2799 of SEQ ID NO: 1888165
uagcuuggauaccagauau

SEQ ID NO: 2515755 - RNA, 19 nt, Artificial Sequence
  Description of Artificial Sequence: Synthetic oligonucleotide
  Antisense strand to SEQ ID NO: 2515754
auaucugguauccaagcua

SEQ ID NO: 2515756 - RNA, 19 nt, Artificial Sequence
  Description of Artificial Sequence: Synthetic oligonucleotide
  Sense strand starting at position 2829 of SEQ ID NO: 1888165
guuagaaucucaucagaug

SEQ ID NO: 2515757 - RNA, 19 nt, Artificial Sequence
  Description of Artificial Sequence: Synthetic oligonucleotide
  Antisense strand to SEQ ID NO: 2515756
caucugaugagauucuaac

SEQ ID NO: 2515758 - RNA, 19 nt, Artificial Sequence
  Description of Artificial Sequence: Synthetic oligonucleotide
  Sense strand starting at position 2956 of SEQ ID NO: 1888165
cugguaaacugcucuauca

SEQ ID NO: 2515759 - RNA, 19 nt, Artificial Sequence
  Description of Artificial Sequence: Synthetic oligonucleotide
  Antisense strand to SEQ ID NO: 2515758
ugauagagcaguuuaccag

SEQ ID NO: 2515760 - RNA, 19 nt, Artificial Sequence
  Description of Artificial Sequence: Synthetic oligonucleotide
  Sense strand starting at position 2958 of SEQ ID NO: 1888165
gguaaacugcucuaucaga

SEQ ID NO: 2515761 - RNA, 19 nt, Artificial Sequence
  Description of Artificial Sequence: Synthetic oligonucleotide
  Antisense strand to SEQ ID NO: 2515760
ucugauagagcaguuuacc

SEQ ID NO: 2515762 - RNA, 19 nt, Artificial Sequence
  Description of Artificial Sequence: Synthetic oligonucleotide
  Sense strand starting at position 2963 of SEQ ID NO: 1888165
acugcucuaucagagcaga

SEQ ID NO: 2515763 - RNA, 19 nt, Artificial Sequence
  Description of Artificial Sequence: Synthetic oligonucleotide
  Antisense strand to SEQ ID NO: 2515762
ucugcucugauagagcagu

SEQ ID NO: 2515764 - RNA, 19 nt, Artificial Sequence
  Description of Artificial Sequence: Synthetic oligonucleotide
  Sense strand starting at position 2966 of SEQ ID NO: 1888165
gcucuaucagagcagagua

SEQ ID NO: 2515765 - RNA, 19 nt, Artificial Sequence
  Description of Artificial Sequence: Synthetic oligonucleotide
  Antisense strand to SEQ ID NO: 2515764
uacucugcucugauagagc

SEQ ID NO: 2515766 - RNA, 19 nt, Artificial Sequence
  Description of Artificial Sequence: Synthetic oligonucleotide
  Sense strand starting at position 3003 of SEQ ID NO: 1888165
cccagagugagcugcuuaa

SEQ ID NO: 2515767 - RNA, 19 nt, Artificial Sequence
  Description of Artificial Sequence: Synthetic oligonucleotide
  Antisense strand to SEQ ID NO: 2515766
uuaagcagcucacucuggg

SEQ ID NO: 2515768 - RNA, 19 nt, Artificial Sequence
  Description of Artificial Sequence: Synthetic oligonucleotide
  Sense strand starting at position 3007 of SEQ ID NO: 1888165
gagugagcugcuuaagaau

SEQ ID NO: 2515769 - RNA, 19 nt, Artificial Sequence
  Description of Artificial Sequence: Synthetic oligonucleotide
  Antisense strand to SEQ ID NO: 2515768
auucuuaagcagcucacuc

SEQ ID NO: 2515770 - RNA, 19 nt, Artificial Sequence
  Description of Artificial Sequence: Synthetic oligonucleotide
  Sense strand starting at position 3059 of SEQ ID NO: 1888165
guacaugcucagcagaacu

SEQ ID NO: 2515771 - RNA, 19 nt, Artificial Sequence
  Description of Artificial Sequence: Synthetic oligonucleotide
  Antisense strand to SEQ ID NO: 2515770
aguucugcugagcauguac

SEQ ID NO: 2515772 - RNA, 19 nt, Artificial Sequence
  Description of Artificial Sequence: Synthetic oligonucleotide
  Sense strand starting at position 3070 of SEQ ID NO: 1888165
gcagaacugcuacaauaau

SEQ ID NO: 2515773 - RNA, 19 nt, Artificial Sequence
  Description of Artificial Sequence: Synthetic oligonucleotide
  Antisense strand to SEQ ID NO: 2515772
auuauuguagcaguucugc

SEQ ID NO: 2515774 - RNA, 19 nt, Artificial Sequence
  Description of Artificial Sequence: Synthetic oligonucleotide
  Sense strand starting at position 3388 of SEQ ID NO: 1888165
cuaaaucaaugggaagaca

SEQ ID NO: 2515775 - RNA, 19 nt, Artificial Sequence
  Description of Artificial Sequence: Synthetic oligonucleotide
  Antisense strand to SEQ ID NO: 2515774
ugucuucccauugauuuag

SEQ ID NO: 2515776 - RNA, 19 nt, Artificial Sequence
  Description of Artificial Sequence: Synthetic oligonucleotide
  Sense strand starting at position 3421 of SEQ ID NO: 1888165
aucagaagacuuuguauua

SEQ ID NO: 2515777 - RNA, 19 nt, Artificial Sequence
  Description of Artificial Sequence: Synthetic oligonucleotide
  Antisense strand to SEQ ID NO: 2515776
uaauacaaagucuucugau

SEQ ID NO: 2515778 - RNA, 19 nt, Artificial Sequence
  Description of Artificial Sequence: Synthetic oligonucleotide
  Sense strand starting at position 3422 of SEQ ID NO: 1888165
ucagaagacuuuguauuag

SEQ ID NO: 2515779 - RNA, 19 nt, Artificial Sequence
  Description of Artificial Sequence: Synthetic oligonucleotide
  Antisense strand to SEQ ID NO: 2515778
cuaauacaaagucuucuga

SEQ ID NO: 2515780 - RNA, 19 nt, Artificial Sequence
  Description of Artificial Sequence: Synthetic oligonucleotide
  Sense strand starting at position 3431 of SEQ ID NO: 1888165
uuuguauuaggauggccaa

SEQ ID NO: 2515781 - RNA, 19 nt, Artificial Sequence
  Description of Artificial Sequence: Synthetic oligonucleotide
  Antisense strand to SEQ ID NO: 2515780
uuggccauccuaauacaaa

SEQ ID NO: 2515782 - RNA, 19 nt, Artificial Sequence
  Description of Artificial Sequence: Synthetic oligonucleotide
  Sense strand starting at position 3432 of SEQ ID NO: 1888165
uuguauuaggauggccaaa

SEQ ID NO: 2515783 - RNA, 19 nt, Artificial Sequence
  Description of Artificial Sequence: Synthetic oligonucleotide
  Antisense strand to SEQ ID NO: 2515782
uuuggccauccuaauacaa

SEQ ID NO: 2515784 - RNA, 19 nt, Artificial Sequence
  Description of Artificial Sequence: Synthetic oligonucleotide
  Sense strand starting at position 3621 of SEQ ID NO: 1888165
guaucaaggcaguauggua

SEQ ID NO: 2515785 - RNA, 19 nt, Artificial Sequence
  Description of Artificial Sequence: Synthetic oligonucleotide
  Antisense strand to SEQ ID NO: 2515784
uaccauacugccuugauac

SEQ ID NO: 2515786 - RNA, 19 nt, Artificial Sequence
  Description of Artificial Sequence: Synthetic oligonucleotide
  Sense strand starting at position 218 of SEQ ID NO: 1888166
gaccauagauguuuggguu

SEQ ID NO: 2515787 - RNA, 19 nt, Artificial Sequence
  Description of Artificial Sequence: Synthetic oligonucleotide
  Antisense strand to SEQ ID NO: 2515786
aacccaaacaucuaugguc

SEQ ID NO: 2515788 - RNA, 19 nt, Artificial Sequence
  Description of Artificial Sequence: Synthetic oligonucleotide
  Sense strand starting at position 222 of SEQ ID NO: 1888166
auagauguuuggguuuacu

SEQ ID NO: 2515789 - RNA, 19 nt, Artificial Sequence
  Description of Artificial Sequence: Synthetic oligonucleotide
  Antisense strand to SEQ ID NO: 2515788
aguaaacccaaacaucuau

SEQ ID NO: 2515790 - RNA, 19 nt, Artificial Sequence
  Description of Artificial Sequence: Synthetic oligonucleotide
  Sense strand starting at position 232 of SEQ ID NO: 1888166
ggguuuacuccuggacucu

SEQ ID NO: 2515791 - RNA, 19 nt, Artificial Sequence
  Description of Artificial Sequence: Synthetic oligonucleotide
  Antisense strand to SEQ ID NO: 2515790
agaguccaggaguaaaccc

SEQ ID NO: 2515792 - RNA, 19 nt, Artificial Sequence
  Description of Artificial Sequence: Synthetic oligonucleotide
  Sense strand starting at position 233 of SEQ ID NO: 1888166
gguuuacuccuggacucuu

SEQ ID NO: 2515793 - RNA, 19 nt, Artificial Sequence
  Description of Artificial Sequence: Synthetic oligonucleotide
  Antisense strand to SEQ ID NO: 2515792
aagaguccaggaguaaacc

SEQ ID NO: 2515794 - RNA, 19 nt, Artificial Sequence
  Description of Artificial Sequence: Synthetic oligonucleotide
  Sense strand starting at position 312 of SEQ ID NO: 1888166
uguagcguuguauuaaguu

SEQ ID NO: 2515795 - RNA, 19 nt, Artificial Sequence
  Description of Artificial Sequence: Synthetic oligonucleotide
  Antisense strand to SEQ ID NO: 2515794
aacuuaauacaacgcuaca

SEQ ID NO: 2515796 - RNA, 19 nt, Artificial Sequence
  Description of Artificial Sequence: Synthetic oligonucleotide
  Sense strand starting at position 333 of SEQ ID NO: 1888166
gaaguaagaaagugugagu

SEQ ID NO: 2515797 - RNA, 19 nt, Artificial Sequence
  Description of Artificial Sequence: Synthetic oligonucleotide
  Antisense strand to SEQ ID NO: 2515796
acucacacuuucuuacuuc

SEQ ID NO: 2515798 - RNA, 19 nt, Artificial Sequence
  Description of Artificial Sequence: Synthetic oligonucleotide
  Sense strand starting at position 344 of SEQ ID NO: 1888166
gugugagucauccaacuug

SEQ ID NO: 2515799 - RNA, 19 nt, Artificial Sequence
  Description of Artificial Sequence: Synthetic oligonucleotide
  Antisense strand to SEQ ID NO: 2515798
caaguuggaugacucacac

SEQ ID NO: 2515800 - RNA, 19 nt, Artificial Sequence
  Description of Artificial Sequence: Synthetic oligonucleotide
  Sense strand starting at position 406 of SEQ ID NO: 1888166
auaugaauuguaggguuaa

SEQ ID NO: 2515801 - RNA, 19 nt, Artificial Sequence
  Description of Artificial Sequence: Synthetic oligonucleotide
  Antisense strand to SEQ ID NO: 2515800
uuaacccuacaauucauau

SEQ ID NO: 2515802 - RNA, 19 nt, Artificial Sequence
  Description of Artificial Sequence: Synthetic oligonucleotide
  Sense strand starting at position 427 of SEQ ID NO: 1888166
uggcaaggucuguaaauaa

SEQ ID NO: 2515803 - RNA, 19 nt, Artificial Sequence
  Description of Artificial Sequence: Synthetic oligonucleotide
  Antisense strand to SEQ ID NO: 2515802
uuauuuacagaccuugcca

SEQ ID NO: 2515804 - RNA, 19 nt, Artificial Sequence
  Description of Artificial Sequence: Synthetic oligonucleotide
  Sense strand starting at position 519 of SEQ ID NO: 1888166
gauggaaugucuucccauu

SEQ ID NO: 2515805 - RNA, 19 nt, Artificial Sequence
  Description of Artificial Sequence: Synthetic oligonucleotide
  Antisense strand to SEQ ID NO: 2515804
aaugggaagacauuccauc

SEQ ID NO: 2515806 - RNA, 19 nt, Artificial Sequence
  Description of Artificial Sequence: Synthetic oligonucleotide
  Sense strand starting at position 521 of SEQ ID NO: 1888166
uggaaugucuucccauuga

SEQ ID NO: 2515807 - RNA, 19 nt, Artificial Sequence
  Description of Artificial Sequence: Synthetic oligonucleotide
  Antisense strand to SEQ ID NO: 2515806
ucaaugggaagacauucca

SEQ ID NO: 2515808 - RNA, 19 nt, Artificial Sequence
  Description of Artificial Sequence: Synthetic oligonucleotide
  Sense strand starting at position 606 of SEQ ID NO: 1888166
uagauauauccguaagugu

SEQ ID NO: 2515809 - RNA, 19 nt, Artificial Sequence
  Description of Artificial Sequence: Synthetic oligonucleotide
  Antisense strand to SEQ ID NO: 2515808
acacuuacggauauaucua

SEQ ID NO: 2515810 - RNA, 19 nt, Artificial Sequence
  Description of Artificial Sequence: Synthetic oligonucleotide
  Sense strand starting at position 802 of SEQ ID NO: 1888166
aacauuugcucguugguca

SEQ ID NO: 2515811 - RNA, 19 nt, Artificial Sequence
  Description of Artificial Sequence: Synthetic oligonucleotide
  Antisense strand to SEQ ID NO: 2515810
ugaccaacgagcaaauguu

SEQ ID NO: 2515812 - RNA, 19 nt, Artificial Sequence
  Description of Artificial Sequence: Synthetic oligonucleotide
  Sense strand starting at position 803 of SEQ ID NO: 1888166
acauuugcucguuggucau

SEQ ID NO: 2515813 - RNA, 19 nt, Artificial Sequence
  Description of Artificial Sequence: Synthetic oligonucleotide
  Antisense strand to SEQ ID NO: 2515812
augaccaacgagcaaaugu

SEQ ID NO: 2515814 - RNA, 19 nt, Artificial Sequence
  Description of Artificial Sequence: Synthetic oligonucleotide
  Sense strand starting at position 883 of SEQ ID NO: 1888166
cuuuaucuucuagggaaac

SEQ ID NO: 2515815 - RNA, 19 nt, Artificial Sequence
  Description of Artificial Sequence: Synthetic oligonucleotide
  Antisense strand to SEQ ID NO: 2515814
guuucccuagaagauaaag

SEQ ID NO: 2515816 - RNA, 19 nt, Artificial Sequence
  Description of Artificial Sequence: Synthetic oligonucleotide
  Sense strand starting at position 986 of SEQ ID NO: 1888166
uggccaucugaguggaaca

SEQ ID NO: 2515817 - RNA, 19 nt, Artificial Sequence
  Description of Artificial Sequence: Synthetic oligonucleotide
  Antisense strand to SEQ ID NO: 2515816
uguuccacucagauggcca

SEQ ID NO: 2515818 - RNA, 19 nt, Artificial Sequence
  Description of Artificial Sequence: Synthetic oligonucleotide
  Sense strand starting at position 1107 of SEQ ID NO: 1888166
auaugugaauaucugguau

SEQ ID NO: 2515819 - RNA, 19 nt, Artificial Sequence
  Description of Artificial Sequence: Synthetic oligonucleotide
  Antisense strand to SEQ ID NO: 2515818
auaccagauauucacauau

SEQ ID NO: 2515820 - RNA, 19 nt, Artificial Sequence
  Description of Artificial Sequence: Synthetic oligonucleotide
  Sense strand starting at position 1159 of SEQ ID NO: 1888166
gcugucugcucauuuagaa

SEQ ID NO: 2515821 - RNA, 19 nt, Artificial Sequence
  Description of Artificial Sequence: Synthetic oligonucleotide
  Antisense strand to SEQ ID NO: 2515820
uucuaaaugagcagacagc

SEQ ID NO: 2515822 - RNA, 19 nt, Artificial Sequence
  Description of Artificial Sequence: Synthetic oligonucleotide
  Sense strand starting at position 1190 of SEQ ID NO: 1888166
cuguuugaaguuugcauuu

SEQ ID NO: 2515823 - RNA, 19 nt, Artificial Sequence
  Description of Artificial Sequence: Synthetic oligonucleotide
  Antisense strand to SEQ ID NO: 2515822
aaaugcaaacuucaaacag

SEQ ID NO: 2515824 - RNA, 19 nt, Artificial Sequence
  Description of Artificial Sequence: Synthetic oligonucleotide
  Sense strand starting at position 1199 of SEQ ID NO: 1888166
guuugcauuucucuuugaa

SEQ ID NO: 2515825 - RNA, 19 nt, Artificial Sequence
  Description of Artificial Sequence: Synthetic oligonucleotide
  Antisense strand to SEQ ID NO: 2515824
uucaaagagaaaugcaaac

SEQ ID NO: 2515826 - RNA, 19 nt, Artificial Sequence
  Description of Artificial Sequence: Synthetic oligonucleotide
  Sense strand starting at position 1320 of SEQ ID NO: 1888166
guugcuguugguuuagcaa

SEQ ID NO: 2515827 - RNA, 19 nt, Artificial Sequence
  Description of Artificial Sequence: Synthetic oligonucleotide
  Antisense strand to SEQ ID NO: 2515826
uugcuaaaccaacagcaac

SEQ ID NO: 2515828 - RNA, 19 nt, Artificial Sequence
  Description of Artificial Sequence: Synthetic oligonucleotide
  Sense strand starting at position 1506 of SEQ ID NO: 1888166
cuuuaauugcucuaaggaa

SEQ ID NO: 2515829 - RNA, 19 nt, Artificial Sequence
  Description of Artificial Sequence: Synthetic oligonucleotide
  Antisense strand to SEQ ID NO: 2515828
uuccuuagagcaauuaaag

SEQ ID NO: 2515830 - RNA, 19 nt, Artificial Sequence
  Description of Artificial Sequence: Synthetic oligonucleotide
  Sense strand starting at position 1564 of SEQ ID NO: 1888166
cagaacagugccuaaaugu

SEQ ID NO: 2515831 - RNA, 19 nt, Artificial Sequence
  Description of Artificial Sequence: Synthetic oligonucleotide
  Antisense strand to SEQ ID NO: 2515830
acauuuaggcacuguucug

SEQ ID NO: 2515832 - RNA, 19 nt, Artificial Sequence
  Description of Artificial Sequence: Synthetic oligonucleotide
  Sense strand starting at position 1573 of SEQ ID NO: 1888166
gccuaaauguagucauuug

SEQ ID NO: 2515833 - RNA, 19 nt, Artificial Sequence
  Description of Artificial Sequence: Synthetic oligonucleotide
  Antisense strand to SEQ ID NO: 2515832
caaaugacuacauuuaggc

SEQ ID NO: 2515834 - RNA, 19 nt, Artificial Sequence
  Description of Artificial Sequence: Synthetic oligonucleotide
  Sense strand starting at position 1679 of SEQ ID NO: 1888166
gcuacuugucuagagguaa

SEQ ID NO: 2515835 - RNA, 19 nt, Artificial Sequence
  Description of Artificial Sequence: Synthetic oligonucleotide
  Antisense strand to SEQ ID NO: 2515834
uuaccucuagacaaguagc

SEQ ID NO: 2515836 - RNA, 19 nt, Artificial Sequence
  Description of Artificial Sequence: Synthetic oligonucleotide
  Sense strand starting at position 1741 of SEQ ID NO: 1888166
gccaguguuccagauauug

SEQ ID NO: 2515837 - RNA, 19 nt, Artificial Sequence
  Description of Artificial Sequence: Synthetic oligonucleotide
  Antisense strand to SEQ ID NO: 2515836
caauaucuggaacacuggc

SEQ ID NO: 2515838 - RNA, 19 nt, Artificial Sequence
  Description of Artificial Sequence: Synthetic oligonucleotide
  Sense strand starting at position 1778 of SEQ ID NO: 1888166
gauggauaacgaugcugaa

SEQ ID NO: 2515839 - RNA, 19 nt, Artificial Sequence
  Description of Artificial Sequence: Synthetic oligonucleotide
  Antisense strand to SEQ ID NO: 2515838
uucagcaucguuauccauc

SEQ ID NO: 2515840 - RNA, 19 nt, Artificial Sequence
  Description of Artificial Sequence: Synthetic oligonucleotide
  Sense strand starting at position 1782 of SEQ ID NO: 1888166
gauaacgaugcugaaugua

SEQ ID NO: 2515841 - RNA, 19 nt, Artificial Sequence
  Description of Artificial Sequence: Synthetic oligonucleotide
  Antisense strand to SEQ ID NO: 2515840
uacauucagcaucguuauc

SEQ ID NO: 2515842 - RNA, 19 nt, Artificial Sequence
  Description of Artificial Sequence: Synthetic oligonucleotide
  Sense strand starting at position 2457 of SEQ ID NO: 1888166
gaaguuauucuuugguuga

SEQ ID NO: 2515843 - RNA, 19 nt, Artificial Sequence
  Description of Artificial Sequence: Synthetic oligonucleotide
  Antisense strand to SEQ ID NO: 2515842
ucaaccaaagaauaacuuc

SEQ ID NO: 2515844 - RNA, 19 nt, Artificial Sequence
  Description of Artificial Sequence: Synthetic oligonucleotide
  Sense strand starting at position 2603 of SEQ ID NO: 1888166
cggugaaugaguggauuaa

SEQ ID NO: 2515845 - RNA, 19 nt, Artificial Sequence
  Description of Artificial Sequence: Synthetic oligonucleotide
  Antisense strand to SEQ ID NO: 2515844
uuaauccacucauucaccg

SEQ ID NO: 2515846 - RNA, 19 nt, Artificial Sequence
  Description of Artificial Sequence: Synthetic oligonucleotide
  Sense strand starting at position 2647 of SEQ ID NO: 1888166
gguggaauuucaguugcuu

SEQ ID NO: 2515847 - RNA, 19 nt, Artificial Sequence
  Description of Artificial Sequence: Synthetic oligonucleotide
  Antisense strand to SEQ ID NO: 2515846
aagcaacugaaauuccacc

SEQ ID NO: 2515848 - RNA, 19 nt, Artificial Sequence
  Description of Artificial Sequence: Synthetic oligonucleotide
  Sense strand starting at position 2673 of SEQ ID NO: 1888166
cgagguuaauaggucuaaa

SEQ ID NO: 2515849 - RNA, 19 nt, Artificial Sequence
  Description of Artificial Sequence: Synthetic oligonucleotide
  Antisense strand to SEQ ID NO: 2515848
uuuagaccuauuaaccucg

SEQ ID NO: 2515850 - RNA, 19 nt, Artificial Sequence
  Description of Artificial Sequence: Synthetic oligonucleotide
  Sense strand starting at position 2707 of SEQ ID NO: 1888166
gaugacuagugguuugaau

SEQ ID NO: 2515851 - RNA, 19 nt, Artificial Sequence
  Description of Artificial Sequence: Synthetic oligonucleotide
  Antisense strand to SEQ ID NO: 2515850
auucaaaccacuagucauc

SEQ ID NO: 2515852 - RNA, 19 nt, Artificial Sequence
  Description of Artificial Sequence: Synthetic oligonucleotide
  Sense strand starting at position 2727 of SEQ ID NO: 1888166
uuucgcugccuguuauauu

SEQ ID NO: 2515853 - RNA, 19 nt, Artificial Sequence
  Description of Artificial Sequence: Synthetic oligonucleotide
  Antisense strand to SEQ ID NO: 2515852
aauauaacaggcagcgaaa

SEQ ID NO: 2515854 - RNA, 19 nt, Artificial Sequence
  Description of Artificial Sequence: Synthetic oligonucleotide
  Sense strand starting at position 3244 of SEQ ID NO: 1888166
uuguucguugugguauauu

SEQ ID NO: 2515855 - RNA, 19 nt, Artificial Sequence
  Description of Artificial Sequence: Synthetic oligonucleotide
  Antisense strand to SEQ ID NO: 2515854
aauauaccacaacgaacaa

SEQ ID NO: 2515856 - RNA, 19 nt, Artificial Sequence
  Description of Artificial Sequence: Synthetic oligonucleotide
  Sense strand starting at position 3653 of SEQ ID NO: 1888166
uugguaguuuaauuucgua

SEQ ID NO: 2515857 - RNA, 19 nt, Artificial Sequence
  Description of Artificial Sequence: Synthetic oligonucleotide
  Antisense strand to SEQ ID NO: 2515856
uacgaaauuaaacuaccaa

SEQ ID NO: 2515858 - RNA, 19 nt, Artificial Sequence
  Description of Artificial Sequence: Synthetic oligonucleotide
  Sense strand starting at position 3684 of SEQ ID NO: 1888166
uguuucuucccugauacua

SEQ ID NO: 2515859 - RNA, 19 nt, Artificial Sequence
  Description of Artificial Sequence: Synthetic oligonucleotide
  Antisense strand to SEQ ID NO: 2515858
uaguaucagggaagaaaca

SEQ ID NO: 2515860 - RNA, 19 nt, Artificial Sequence
  Description of Artificial Sequence: Synthetic oligonucleotide
  Sense strand starting at position 3697 of SEQ ID NO: 1888166
auacuaaugcaagguaaau

SEQ ID NO: 2515861 - RNA, 19 nt, Artificial Sequence
  Description of Artificial Sequence: Synthetic oligonucleotide
  Antisense strand to SEQ ID NO: 2515860
auuuaccuugcauuaguau

SEQ ID NO: 2515862 - RNA, 19 nt, Artificial Sequence
  Description of Artificial Sequence: Synthetic oligonucleotide
  Sense strand starting at position 3906 of SEQ ID NO: 1888166
uugugccaguuauuuaaga

SEQ ID NO: 2515863 - RNA, 19 nt, Artificial Sequence
  Description of Artificial Sequence: Synthetic oligonucleotide
  Antisense strand to SEQ ID NO: 2515862
ucuuaaauaacuggcacaa

SEQ ID NO: 2515864 - RNA, 19 nt, Artificial Sequence
  Description of Artificial Sequence: Synthetic oligonucleotide
  Sense strand starting at position 3907 of SEQ ID NO: 1888166
ugugccaguuauuuaagau

SEQ ID NO: 2515865 - RNA, 19 nt, Artificial Sequence
  Description of Artificial Sequence: Synthetic oligonucleotide
  Antisense strand to SEQ ID NO: 2515864
aucuuaaauaacuggcaca

SEQ ID NO: 2515866 - RNA, 19 nt, Artificial Sequence
  Description of Artificial Sequence: Synthetic oligonucleotide
  Sense strand starting at position 129 of SEQ ID NO: 1888167
gcaauaaagcuuuaaugua

SEQ ID NO: 2515867 - RNA, 19 nt, Artificial Sequence
  Description of Artificial Sequence: Synthetic oligonucleotide
  Antisense strand to SEQ ID NO: 2515866
uacauuaaagcuuuauugc

SEQ ID NO: 2515868 - RNA, 19 nt, Artificial Sequence
  Description of Artificial Sequence: Synthetic oligonucleotide
  Sense strand starting at position 1098 of SEQ ID NO: 1888167
gguuggauucggcggaaca

SEQ ID NO: 2515869 - RNA, 19 nt, Artificial Sequence
  Description of Artificial Sequence: Synthetic oligonucleotide
  Antisense strand to SEQ ID NO: 2515868
uguuccgccgaauccaacc

SEQ ID NO: 2515870 - RNA, 19 nt, Artificial Sequence
  Description of Artificial Sequence: Synthetic oligonucleotide
  Sense strand starting at position 1100 of SEQ ID NO: 1888167
uuggauucggcggaacaga

SEQ ID NO: 2515871 - RNA, 19 nt, Artificial Sequence
  Description of Artificial Sequence: Synthetic oligonucleotide
  Antisense strand to SEQ ID NO: 2515870
ucuguuccgccgaauccaa

SEQ ID NO: 2515872 - RNA, 19 nt, Artificial Sequence
  Description of Artificial Sequence: Synthetic oligonucleotide
  Sense strand starting at position 1512 of SEQ ID NO: 1888167
ugucuugugccucugagca

SEQ ID NO: 2515873 - RNA, 19 nt, Artificial Sequence
  Description of Artificial Sequence: Synthetic oligonucleotide
  Antisense strand to SEQ ID NO: 2515872
ugcucagaggcacaagaca

SEQ ID NO: 2515874 - RNA, 19 nt, Artificial Sequence
  Description of Artificial Sequence: Synthetic oligonucleotide
  Sense strand starting at position 1732 of SEQ ID NO: 1888167
uuuaaugucuggugagcac

SEQ ID NO: 2515875 - RNA, 19 nt, Artificial Sequence
  Description of Artificial Sequence: Synthetic oligonucleotide
  Antisense strand to SEQ ID NO: 2515874
gugcucaccagacauuaaa

SEQ ID NO: 2515876 - RNA, 19 nt, Artificial Sequence
  Description of Artificial Sequence: Synthetic oligonucleotide
  Sense strand starting at position 1919 of SEQ ID NO: 1888167
gaggucccggccugagaua

SEQ ID NO: 2515877 - RNA, 19 nt, Artificial Sequence
  Description of Artificial Sequence: Synthetic oligonucleotide
  Antisense strand to SEQ ID NO: 2515876
uaucucaggccgggaccuc

SEQ ID NO: 2515878 - RNA, 19 nt, Artificial Sequence
  Description of Artificial Sequence: Synthetic oligonucleotide
  Sense strand starting at position 1926 of SEQ ID NO: 1888167
cggccugagauacauacuu

SEQ ID NO: 2515879 - RNA, 19 nt, Artificial Sequence
  Description of Artificial Sequence: Synthetic oligonucleotide
  Antisense strand to SEQ ID NO: 2515878
aaguauguaucucaggccg

SEQ ID NO: 2515880 - RNA, 19 nt, Artificial Sequence
  Description of Artificial Sequence: Synthetic oligonucleotide
  Sense strand starting at position 1987 of SEQ ID NO: 1888167
gaaguauguuucccaagca

SEQ ID NO: 2515881 - RNA, 19 nt, Artificial Sequence
  Description of Artificial Sequence: Synthetic oligonucleotide
  Antisense strand to SEQ ID NO: 2515880
ugcuugggaaacauacuuc

SEQ ID NO: 2515882 - RNA, 19 nt, Artificial Sequence
  Description of Artificial Sequence: Synthetic oligonucleotide
  Sense strand starting at position 2096 of SEQ ID NO: 1888167
guaacuucuucccuggagu

SEQ ID NO: 2515883 - RNA, 19 nt, Artificial Sequence
  Description of Artificial Sequence: Synthetic oligonucleotide
  Antisense strand to SEQ ID NO: 2515882
acuccagggaagaaguuac

SEQ ID NO: 2515884 - RNA, 19 nt, Artificial Sequence
  Description of Artificial Sequence: Synthetic oligonucleotide
  Sense strand starting at position 2099 of SEQ ID NO: 1888167
acuucuucccuggagucua

SEQ ID NO: 2515885 - RNA, 19 nt, Artificial Sequence
  Description of Artificial Sequence: Synthetic oligonucleotide
  Antisense strand to SEQ ID NO: 2515884
uagacuccagggaagaagu

SEQ ID NO: 2515886 - RNA, 19 nt, Artificial Sequence
  Description of Artificial Sequence: Synthetic oligonucleotide
  Sense strand starting at position 3167 of SEQ ID NO: 1888167
gccgccuuccuguuaauga

SEQ ID NO: 2515887 - RNA, 19 nt, Artificial Sequence
  Description of Artificial Sequence: Synthetic oligonucleotide
  Antisense strand to SEQ ID NO: 2515886
ucauuaacaggaaggcggc

SEQ ID NO: 2515888 - RNA, 19 nt, Artificial Sequence
  Description of Artificial Sequence: Synthetic oligonucleotide
  Sense strand starting at position 3168 of SEQ ID NO: 1888167
ccgccuuccuguuaaugaa

SEQ ID NO: 2515889 - RNA, 19 nt, Artificial Sequence
  Description of Artificial Sequence: Synthetic oligonucleotide
  Antisense strand to SEQ ID NO: 2515888
uucauuaacaggaaggcgg

SEQ ID NO: 2515890 - RNA, 19 nt, Artificial Sequence
  Description of Artificial Sequence: Synthetic oligonucleotide
  Sense strand starting at position 3180 of SEQ ID NO: 1888167
uaaugaauuucccggugcu

SEQ ID NO: 2515891 - RNA, 19 nt, Artificial Sequence
  Description of Artificial Sequence: Synthetic oligonucleotide
  Antisense strand to SEQ ID NO: 2515890
agcaccgggaaauucauua

SEQ ID NO: 2515892 - RNA, 19 nt, Artificial Sequence
  Description of Artificial Sequence: Synthetic oligonucleotide
  Sense strand starting at position 3206 of SEQ ID NO: 1888167
uccuaaugagccuguuaaa

SEQ ID NO: 2515893 - RNA, 19 nt, Artificial Sequence
  Description of Artificial Sequence: Synthetic oligonucleotide
  Antisense strand to SEQ ID NO: 2515892
uuuaacaggcucauuagga

SEQ ID NO: 2515894 - RNA, 19 nt, Artificial Sequence
  Description of Artificial Sequence: Synthetic oligonucleotide
  Sense strand starting at position 3209 of SEQ ID NO: 1888167
uaaugagccuguuaaagag

SEQ ID NO: 2515895 - RNA, 19 nt, Artificial Sequence
  Description of Artificial Sequence: Synthetic oligonucleotide
  Antisense strand to SEQ ID NO: 2515894
cucuuuaacaggcucauua

SEQ ID NO: 2515896 - RNA, 19 nt, Artificial Sequence
  Description of Artificial Sequence: Synthetic oligonucleotide
  Sense strand starting at position 3215 of SEQ ID NO: 1888167
gccuguuaaagaggguuua

SEQ ID NO: 2515897 - RNA, 19 nt, Artificial Sequence
  Description of Artificial Sequence: Synthetic oligonucleotide
  Antisense strand to SEQ ID NO: 2515896
uaaacccucuuuaacaggc

SEQ ID NO: 2515898 - RNA, 19 nt, Artificial Sequence
  Description of Artificial Sequence: Synthetic oligonucleotide
  Sense strand starting at position 3216 of SEQ ID NO: 1888167
ccuguuaaagaggguuuaa

SEQ ID NO: 2515899 - RNA, 19 nt, Artificial Sequence
  Description of Artificial Sequence: Synthetic oligonucleotide
  Antisense strand to SEQ ID NO: 2515898
uuaaacccucuuuaacagg

SEQ ID NO: 2515900 - RNA, 19 nt, Artificial Sequence
  Description of Artificial Sequence: Synthetic oligonucleotide
  Sense strand starting at position 3237 of SEQ ID NO: 1888167
aaacuuagcgaguggcaaa

SEQ ID NO: 2515901 - RNA, 19 nt, Artificial Sequence
  Description of Artificial Sequence: Synthetic oligonucleotide
  Antisense strand to SEQ ID NO: 2515900
uuugccacucgcuaaguuu

SEQ ID NO: 2515902 - RNA, 19 nt, Artificial Sequence
  Description of Artificial Sequence: Synthetic oligonucleotide
  Sense strand starting at position 3272 of SEQ ID NO: 1888167
acuuaauuguaucgauaug

SEQ ID NO: 2515903 - RNA, 19 nt, Artificial Sequence
  Description of Artificial Sequence: Synthetic oligonucleotide
  Antisense strand to SEQ ID NO: 2515902
cauaucgauacaauuaagu

SEQ ID NO: 2515904 - RNA, 19 nt, Artificial Sequence
  Description of Artificial Sequence: Synthetic oligonucleotide
  Sense strand starting at position 3308 of SEQ ID NO: 1888167
aaaugucucugagugggaa

SEQ ID NO: 2515905 - RNA, 19 nt, Artificial Sequence
  Description of Artificial Sequence: Synthetic oligonucleotide
  Antisense strand to SEQ ID NO: 2515904
uucccacucagagacauuu

SEQ ID NO: 2515906 - RNA, 19 nt, Artificial Sequence
  Description of Artificial Sequence: Synthetic oligonucleotide
  Sense strand starting at position 3839 of SEQ ID NO: 1888167
gcgaguugguucucucuua

SEQ ID NO: 2515907 - RNA, 19 nt, Artificial Sequence
  Description of Artificial Sequence: Synthetic oligonucleotide
  Antisense strand to SEQ ID NO: 2515906
uaagagagaaccaacucgc

SEQ ID NO: 2515908 - RNA, 19 nt, Artificial Sequence
  Description of Artificial Sequence: Synthetic oligonucleotide
  Sense strand starting at position 3869 of SEQ ID NO: 1888167
agggcaaugucuccgcaga

SEQ ID NO: 2515909 - RNA, 19 nt, Artificial Sequence
  Description of Artificial Sequence: Synthetic oligonucleotide
  Antisense strand to SEQ ID NO: 2515908
ucugcggagacauugcccu

SEQ ID NO: 2515910 - RNA, 19 nt, Artificial Sequence
  Description of Artificial Sequence: Synthetic oligonucleotide
  Sense strand starting at position 156 of SEQ ID NO: 1888168
gaaggaaagugguacaaga

SEQ ID NO: 2515911 - RNA, 19 nt, Artificial Sequence
  Description of Artificial Sequence: Synthetic oligonucleotide
  Antisense strand to SEQ ID NO: 2515910
ucuuguaccacuuuccuuc

SEQ ID NO: 2515912 - RNA, 19 nt, Artificial Sequence
  Description of Artificial Sequence: Synthetic oligonucleotide
  Sense strand starting at position 342 of SEQ ID NO: 1888168
ugguguuguccuggaacga

SEQ ID NO: 2515913 - RNA, 19 nt, Artificial Sequence
  Description of Artificial Sequence: Synthetic oligonucleotide
  Antisense strand to SEQ ID NO: 2515912
ucguuccaggacaacacca

SEQ ID NO: 2515914 - RNA, 19 nt, Artificial Sequence
  Description of Artificial Sequence: Synthetic oligonucleotide
  Sense strand starting at position 343 of SEQ ID NO: 1888168
gguguuguccuggaacgau

SEQ ID NO: 2515915 - RNA, 19 nt, Artificial Sequence
  Description of Artificial Sequence: Synthetic oligonucleotide
  Antisense strand to SEQ ID NO: 2515914
aucguuccaggacaacacc

SEQ ID NO: 2515916 - RNA, 19 nt, Artificial Sequence
  Description of Artificial Sequence: Synthetic oligonucleotide
  Sense strand starting at position 659 of SEQ ID NO: 1888168
gaggucugugcugaggaca

SEQ ID NO: 2515917 - RNA, 19 nt, Artificial Sequence
  Description of Artificial Sequence: Synthetic oligonucleotide
  Antisense strand to SEQ ID NO: 2515916
uguccucagcacagaccuc

SEQ ID NO: 2515918 - RNA, 19 nt, Artificial Sequence
  Description of Artificial Sequence: Synthetic oligonucleotide
  Sense strand starting at position 802 of SEQ ID NO: 1888168
gggagaacuucaggugacu

SEQ ID NO: 2515919 - RNA, 19 nt, Artificial Sequence
  Description of Artificial Sequence: Synthetic oligonucleotide
  Antisense strand to SEQ ID NO: 2515918
agucaccugaaguucuccc

SEQ ID NO: 2515920 - RNA, 19 nt, Artificial Sequence
  Description of Artificial Sequence: Synthetic oligonucleotide
  Sense strand starting at position 823 of SEQ ID NO: 1888168
gacuccugccucggauuga

SEQ ID NO: 2515921 - RNA, 19 nt, Artificial Sequence
  Description of Artificial Sequence: Synthetic oligonucleotide
  Antisense strand to SEQ ID NO: 2515920
ucaauccgaggcaggaguc

SEQ ID NO: 2515922 - RNA, 19 nt, Artificial Sequence
  Description of Artificial Sequence: Synthetic oligonucleotide
  Sense strand starting at position 824 of SEQ ID NO: 1888168
acuccugccucggauugaa

SEQ ID NO: 2515923 - RNA, 19 nt, Artificial Sequence
  Description of Artificial Sequence: Synthetic oligonucleotide
  Antisense strand to SEQ ID NO: 2515922
uucaauccgaggcaggagu

SEQ ID NO: 2515924 - RNA, 19 nt, Artificial Sequence
  Description of Artificial Sequence: Synthetic oligonucleotide
  Sense strand starting at position 862 of SEQ ID NO: 1888168
gccucuaccugguuaagag

SEQ ID NO: 2515925 - RNA, 19 nt, Artificial Sequence
  Description of Artificial Sequence: Synthetic oligonucleotide
  Antisense strand to SEQ ID NO: 2515924
cucuuaaccagguagaggc

SEQ ID NO: 2515926 - RNA, 19 nt, Artificial Sequence
  Description of Artificial Sequence: Synthetic oligonucleotide
  Sense strand starting at position 1790 of SEQ ID NO: 1888168
ggcgcauuguucgccggau

SEQ ID NO: 2515927 - RNA, 19 nt, Artificial Sequence
  Description of Artificial Sequence: Synthetic oligonucleotide
  Antisense strand to SEQ ID NO: 2515926
auccggcgaacaaugcgcc

SEQ ID NO: 2515928 - RNA, 19 nt, Artificial Sequence
  Description of Artificial Sequence: Synthetic oligonucleotide
  Sense strand starting at position 1791 of SEQ ID NO: 1888168
gcgcauuguucgccggauu

SEQ ID NO: 2515929 - RNA, 19 nt, Artificial Sequence
  Description of Artificial Sequence: Synthetic oligonucleotide
  Antisense strand to SEQ ID NO: 2515928
aauccggcgaacaaugcgc

SEQ ID NO: 2515930 - RNA, 19 nt, Artificial Sequence
  Description of Artificial Sequence: Synthetic oligonucleotide
  Sense strand starting at position 1792 of SEQ ID NO: 1888168
cgcauuguucgccggauuu

SEQ ID NO: 2515931 - RNA, 19 nt, Artificial Sequence
  Description of Artificial Sequence: Synthetic oligonucleotide
  Antisense strand to SEQ ID NO: 2515930
aaauccggcgaacaaugcg

SEQ ID NO: 2515932 - RNA, 19 nt, Artificial Sequence
  Description of Artificial Sequence: Synthetic oligonucleotide
  Sense strand starting at position 1794 of SEQ ID NO: 1888168
cauuguucgccggauuugu

SEQ ID NO: 2515933 - RNA, 19 nt, Artificial Sequence
  Description of Artificial Sequence: Synthetic oligonucleotide
  Antisense strand to SEQ ID NO: 2515932
acaaauccggcgaacaaug

SEQ ID NO: 2515934 - RNA, 19 nt, Artificial Sequence
  Description of Artificial Sequence: Synthetic oligonucleotide
  Sense strand starting at position 1805 of SEQ ID NO: 1888168
ggauuuguccgcggcgcga

SEQ ID NO: 2515935 - RNA, 19 nt, Artificial Sequence
  Description of Artificial Sequence: Synthetic oligonucleotide
  Antisense strand to SEQ ID NO: 2515934
ucgcgccgcggacaaaucc

SEQ ID NO: 2515936 - RNA, 19 nt, Artificial Sequence
  Description of Artificial Sequence: Synthetic oligonucleotide
  Sense strand starting at position 1806 of SEQ ID NO: 1888168
gauuuguccgcggcgcgaa

SEQ ID NO: 2515937 - RNA, 19 nt, Artificial Sequence
  Description of Artificial Sequence: Synthetic oligonucleotide
  Antisense strand to SEQ ID NO: 2515936
uucgcgccgcggacaaauc

SEQ ID NO: 2515938 - RNA, 19 nt, Artificial Sequence
  Description of Artificial Sequence: Synthetic oligonucleotide
  Sense strand starting at position 1886 of SEQ ID NO: 1888168
gcgggccauuuccaugaga

SEQ ID NO: 2515939 - RNA, 19 nt, Artificial Sequence
  Description of Artificial Sequence: Synthetic oligonucleotide
  Antisense strand to SEQ ID NO: 2515938
ucucauggaaauggcccgc

SEQ ID NO: 2515940 - RNA, 19 nt, Artificial Sequence
  Description of Artificial Sequence: Synthetic oligonucleotide
  Sense strand starting at position 1891 of SEQ ID NO: 1888168
ccauuuccaugagaaagga

SEQ ID NO: 2515941 - RNA, 19 nt, Artificial Sequence
  Description of Artificial Sequence: Synthetic oligonucleotide
  Antisense strand to SEQ ID NO: 2515940
uccuuucucauggaaaugg

SEQ ID NO: 2515942 - RNA, 19 nt, Artificial Sequence
  Description of Artificial Sequence: Synthetic oligonucleotide
  Sense strand starting at position 2439 of SEQ ID NO: 1888168
aacgaaucucgaugcucaa

SEQ ID NO: 2515943 - RNA, 19 nt, Artificial Sequence
  Description of Artificial Sequence: Synthetic oligonucleotide
  Antisense strand to SEQ ID NO: 2515942
uugagcaucgagauucguu

SEQ ID NO: 2515944 - RNA, 19 nt, Artificial Sequence
  Description of Artificial Sequence: Synthetic oligonucleotide
  Sense strand starting at position 2442 of SEQ ID NO: 1888168
gaaucucgaugcucaaaga

SEQ ID NO: 2515945 - RNA, 19 nt, Artificial Sequence
  Description of Artificial Sequence: Synthetic oligonucleotide
  Antisense strand to SEQ ID NO: 2515944
ucuuugagcaucgagauuc

SEQ ID NO: 2515946 - RNA, 19 nt, Artificial Sequence
  Description of Artificial Sequence: Synthetic oligonucleotide
  Sense strand starting at position 2533 of SEQ ID NO: 1888168
cgagcuguucguggagaga

SEQ ID NO: 2515947 - RNA, 19 nt, Artificial Sequence
  Description of Artificial Sequence: Synthetic oligonucleotide
  Antisense strand to SEQ ID NO: 2515946
ucucuccacgaacagcucg

SEQ ID NO: 2515948 - RNA, 19 nt, Artificial Sequence
  Description of Artificial Sequence: Synthetic oligonucleotide
  Sense strand starting at position 2535 of SEQ ID NO: 1888168
agcuguucguggagagaaa

SEQ ID NO: 2515949 - RNA, 19 nt, Artificial Sequence
  Description of Artificial Sequence: Synthetic oligonucleotide
  Antisense strand to SEQ ID NO: 2515948
uuucucuccacgaacagcu

SEQ ID NO: 2515950 - RNA, 19 nt, Artificial Sequence
  Description of Artificial Sequence: Synthetic oligonucleotide
  Sense strand starting at position 2998 of SEQ ID NO: 1888168
cgagguguccuugagaacu

SEQ ID NO: 2515951 - RNA, 19 nt, Artificial Sequence
  Description of Artificial Sequence: Synthetic oligonucleotide
  Antisense strand to SEQ ID NO: 2515950
aguucucaaggacaccucg

SEQ ID NO: 2515952 - RNA, 19 nt, Artificial Sequence
  Description of Artificial Sequence: Synthetic oligonucleotide
  Sense strand starting at position 3440 of SEQ ID NO: 1888168
gccucucaguccugagaaa

SEQ ID NO: 2515953 - RNA, 19 nt, Artificial Sequence
  Description of Artificial Sequence: Synthetic oligonucleotide
  Antisense strand to SEQ ID NO: 2515952
uuucucaggacugagaggc

SEQ ID NO: 2515954 - RNA, 19 nt, Artificial Sequence
  Description of Artificial Sequence: Synthetic oligonucleotide
  Sense strand starting at position 3517 of SEQ ID NO: 1888168
ggaauuaaaggucguccuu

SEQ ID NO: 2515955 - RNA, 19 nt, Artificial Sequence
  Description of Artificial Sequence: Synthetic oligonucleotide
  Antisense strand to SEQ ID NO: 2515954
aaggacgaccuuuaauucc

SEQ ID NO: 2515956 - RNA, 19 nt, Artificial Sequence
  Description of Artificial Sequence: Synthetic oligonucleotide
  Sense strand starting at position 20 of SEQ ID NO: 1888169
ggacacuccuuguaaucag

SEQ ID NO: 2515957 - RNA, 19 nt, Artificial Sequence
  Description of Artificial Sequence: Synthetic oligonucleotide
  Antisense strand to SEQ ID NO: 2515956
cugauuacaaggagugucc

SEQ ID NO: 2515958 - RNA, 19 nt, Artificial Sequence
  Description of Artificial Sequence: Synthetic oligonucleotide
  Sense strand starting at position 74 of SEQ ID NO: 1888169
ucaggugaucugcgaagca

SEQ ID NO: 2515959 - RNA, 19 nt, Artificial Sequence
  Description of Artificial Sequence: Synthetic oligonucleotide
  Antisense strand to SEQ ID NO: 2515958
ugcuucgcagaucaccuga

SEQ ID NO: 2515960 - RNA, 19 nt, Artificial Sequence
  Description of Artificial Sequence: Synthetic oligonucleotide
  Sense strand starting at position 196 of SEQ ID NO: 1888169
gccuucucuugggucauuu

SEQ ID NO: 2515961 - RNA, 19 nt, Artificial Sequence
  Description of Artificial Sequence: Synthetic oligonucleotide
  Antisense strand to SEQ ID NO: 2515960
aaaugacccaagagaaggc

SEQ ID NO: 2515962 - RNA, 19 nt, Artificial Sequence
  Description of Artificial Sequence: Synthetic oligonucleotide
  Sense strand starting at position 238 of SEQ ID NO: 1888169
uccucugucccaggaggau

SEQ ID NO: 2515963 - RNA, 19 nt, Artificial Sequence
  Description of Artificial Sequence: Synthetic oligonucleotide
  Antisense strand to SEQ ID NO: 2515962
auccuccugggacagagga

SEQ ID NO: 2515964 - RNA, 19 nt, Artificial Sequence
  Description of Artificial Sequence: Synthetic oligonucleotide
  Sense strand starting at position 898 of SEQ ID NO: 1888169
uguuguauuuguuuccuga

SEQ ID NO: 2515965 - RNA, 19 nt, Artificial Sequence
  Description of Artificial Sequence: Synthetic oligonucleotide
  Antisense strand to SEQ ID NO: 2515964
ucaggaaacaaauacaaca

SEQ ID NO: 2515966 - RNA, 19 nt, Artificial Sequence
  Description of Artificial Sequence: Synthetic oligonucleotide
  Sense strand starting at position 989 of SEQ ID NO: 1888169
gucugagaucaguaucccu

SEQ ID NO: 2515967 - RNA, 19 nt, Artificial Sequence
  Description of Artificial Sequence: Synthetic oligonucleotide
  Antisense strand to SEQ ID NO: 2515966
agggauacugaucucagac

SEQ ID NO: 2515968 - RNA, 19 nt, Artificial Sequence
  Description of Artificial Sequence: Synthetic oligonucleotide
  Sense strand starting at position 1203 of SEQ ID NO: 1888169
gccuaugacuaguccugaa

SEQ ID NO: 2515969 - RNA, 19 nt, Artificial Sequence
  Description of Artificial Sequence: Synthetic oligonucleotide
  Antisense strand to SEQ ID NO: 2515968
uucaggacuagucauaggc

SEQ ID NO: 2515970 - RNA, 19 nt, Artificial Sequence
  Description of Artificial Sequence: Synthetic oligonucleotide
  Sense strand starting at position 1216 of SEQ ID NO: 1888169
ccugaaagaucucaucuug

SEQ ID NO: 2515971 - RNA, 19 nt, Artificial Sequence
  Description of Artificial Sequence: Synthetic oligonucleotide
  Antisense strand to SEQ ID NO: 2515970
caagaugagaucuuucagg

SEQ ID NO: 2515972 - RNA, 19 nt, Artificial Sequence
  Description of Artificial Sequence: Synthetic oligonucleotide
  Sense strand starting at position 1244 of SEQ ID NO: 1888169
acuugaucauaucugcaga

SEQ ID NO: 2515973 - RNA, 19 nt, Artificial Sequence
  Description of Artificial Sequence: Synthetic oligonucleotide
  Antisense strand to SEQ ID NO: 2515972
ucugcagauaugaucaagu

SEQ ID NO: 2515974 - RNA, 19 nt, Artificial Sequence
  Description of Artificial Sequence: Synthetic oligonucleotide
  Sense strand starting at position 1246 of SEQ ID NO: 1888169
uugaucauaucugcagaga

SEQ ID NO: 2515975 - RNA, 19 nt, Artificial Sequence
  Description of Artificial Sequence: Synthetic oligonucleotide
  Antisense strand to SEQ ID NO: 2515974
ucucugcagauaugaucaa

SEQ ID NO: 2515976 - RNA, 19 nt, Artificial Sequence
  Description of Artificial Sequence: Synthetic oligonucleotide
  Sense strand starting at position 1474 of SEQ ID NO: 1888169
ggucauuucuuacacagcu

SEQ ID NO: 2515977 - RNA, 19 nt, Artificial Sequence
  Description of Artificial Sequence: Synthetic oligonucleotide
  Antisense strand to SEQ ID NO: 2515976
agcuguguaagaaaugacc

SEQ ID NO: 2515978 - RNA, 19 nt, Artificial Sequence
  Description of Artificial Sequence: Synthetic oligonucleotide
  Sense strand starting at position 1519 of SEQ ID NO: 1888169
gggagugucacuuagcuac

SEQ ID NO: 2515979 - RNA, 19 nt, Artificial Sequence
  Description of Artificial Sequence: Synthetic oligonucleotide
  Antisense strand to SEQ ID NO: 2515978
guagcuaagugacacuccc

SEQ ID NO: 2515980 - RNA, 19 nt, Artificial Sequence
  Description of Artificial Sequence: Synthetic oligonucleotide
  Sense strand starting at position 1564 of SEQ ID NO: 1888169
gaccguguaucagcuaguu

SEQ ID NO: 2515981 - RNA, 19 nt, Artificial Sequence
  Description of Artificial Sequence: Synthetic oligonucleotide
  Antisense strand to SEQ ID NO: 2515980
aacuagcugauacacgguc

SEQ ID NO: 2515982 - RNA, 19 nt, Artificial Sequence
  Description of Artificial Sequence: Synthetic oligonucleotide
  Sense strand starting at position 1574 of SEQ ID NO: 1888169
cagcuaguugcugaguaac

SEQ ID NO: 2515983 - RNA, 19 nt, Artificial Sequence
  Description of Artificial Sequence: Synthetic oligonucleotide
  Antisense strand to SEQ ID NO: 2515982
guuacucagcaacuagcug

SEQ ID NO: 2515984 - RNA, 19 nt, Artificial Sequence
  Description of Artificial Sequence: Synthetic oligonucleotide
  Sense strand starting at position 1576 of SEQ ID NO: 1888169
gcuaguugcugaguaacaa

SEQ ID NO: 2515985 - RNA, 19 nt, Artificial Sequence
  Description of Artificial Sequence: Synthetic oligonucleotide
  Antisense strand to SEQ ID NO: 2515984
uuguuacucagcaacuagc

SEQ ID NO: 2515986 - RNA, 19 nt, Artificial Sequence
  Description of Artificial Sequence: Synthetic oligonucleotide
  Sense strand starting at position 1577 of SEQ ID NO: 1888169
cuaguugcugaguaacaaa

SEQ ID NO: 2515987 - RNA, 19 nt, Artificial Sequence
  Description of Artificial Sequence: Synthetic oligonucleotide
  Antisense strand to SEQ ID NO: 2515986
uuuguuacucagcaacuag

SEQ ID NO: 2515988 - RNA, 19 nt, Artificial Sequence
  Description of Artificial Sequence: Synthetic oligonucleotide
  Sense strand starting at position 2081 of SEQ ID NO: 1888169
uuccaaguguccuccucau

SEQ ID NO: 2515989 - RNA, 19 nt, Artificial Sequence
  Description of Artificial Sequence: Synthetic oligonucleotide
  Antisense strand to SEQ ID NO: 2515988
augaggaggacacuuggaa

SEQ ID NO: 2515990 - RNA, 19 nt, Artificial Sequence
  Description of Artificial Sequence: Synthetic oligonucleotide
  Sense strand starting at position 2196 of SEQ ID NO: 1888169
gacgcaugauuugcaaucu

SEQ ID NO: 2515991 - RNA, 19 nt, Artificial Sequence
  Description of Artificial Sequence: Synthetic oligonucleotide
  Antisense strand to SEQ ID NO: 2515990
agauugcaaaucaugcguc

SEQ ID NO: 2515992 - RNA, 19 nt, Artificial Sequence
  Description of Artificial Sequence: Synthetic oligonucleotide
  Sense strand starting at position 2205 of SEQ ID NO: 1888169
uuugcaaucucguuaauga

SEQ ID NO: 2515993 - RNA, 19 nt, Artificial Sequence
  Description of Artificial Sequence: Synthetic oligonucleotide
  Antisense strand to SEQ ID NO: 2515992
ucauuaacgagauugcaaa

SEQ ID NO: 2515994 - RNA, 19 nt, Artificial Sequence
  Description of Artificial Sequence: Synthetic oligonucleotide
  Sense strand starting at position 2206 of SEQ ID NO: 1888169
uugcaaucucguuaaugag

SEQ ID NO: 2515995 - RNA, 19 nt, Artificial Sequence
  Description of Artificial Sequence: Synthetic oligonucleotide
  Antisense strand to SEQ ID NO: 2515994
cucauuaacgagauugcaa

SEQ ID NO: 2515996 - RNA, 19 nt, Artificial Sequence
  Description of Artificial Sequence: Synthetic oligonucleotide
  Sense strand starting at position 2216 of SEQ ID NO: 1888169
guuaaugagccguagcaca

SEQ ID NO: 2515997 - RNA, 19 nt, Artificial Sequence
  Description of Artificial Sequence: Synthetic oligonucleotide
  Antisense strand to SEQ ID NO: 2515996
ugugcuacggcucauuaac

SEQ ID NO: 2515998 - RNA, 19 nt, Artificial Sequence
  Description of Artificial Sequence: Synthetic oligonucleotide
  Sense strand starting at position 2258 of SEQ ID NO: 1888169
agcugcacucgugguaaca

SEQ ID NO: 2515999 - RNA, 19 nt, Artificial Sequence
  Description of Artificial Sequence: Synthetic oligonucleotide
  Antisense strand to SEQ ID NO: 2515998
uguuaccacgagugcagcu

SEQ ID NO: 2516000 - RNA, 19 nt, Artificial Sequence
  Description of Artificial Sequence: Synthetic oligonucleotide
  Sense strand starting at position 2259 of SEQ ID NO: 1888169
gcugcacucgugguaacau

SEQ ID NO: 2516001 - RNA, 19 nt, Artificial Sequence
  Description of Artificial Sequence: Synthetic oligonucleotide
  Antisense strand to SEQ ID NO: 2516000
auguuaccacgagugcagc

SEQ ID NO: 2516002 - RNA, 19 nt, Artificial Sequence
  Description of Artificial Sequence: Synthetic oligonucleotide
  Sense strand starting at position 2502 of SEQ ID NO: 1888169
cagaguuugcagcaaguca

SEQ ID NO: 2516003 - RNA, 19 nt, Artificial Sequence
  Description of Artificial Sequence: Synthetic oligonucleotide
  Antisense strand to SEQ ID NO: 2516002
ugacuugcugcaaacucug

SEQ ID NO: 2516004 - RNA, 19 nt, Artificial Sequence
  Description of Artificial Sequence: Synthetic oligonucleotide
  Sense strand starting at position 2822 of SEQ ID NO: 1888169
gcugacuuggaccguucaa

SEQ ID NO: 2516005 - RNA, 19 nt, Artificial Sequence
  Description of Artificial Sequence: Synthetic oligonucleotide
  Antisense strand to SEQ ID NO: 2516004
uugaacgguccaagucagc

SEQ ID NO: 2516006 - RNA, 19 nt, Artificial Sequence
  Description of Artificial Sequence: Synthetic oligonucleotide
  Sense strand starting at position 2960 of SEQ ID NO: 1888169
ccuuguacuccaugguaaa

SEQ ID NO: 2516007 - RNA, 19 nt, Artificial Sequence
  Description of Artificial Sequence: Synthetic oligonucleotide
  Antisense strand to SEQ ID NO: 2516006
uuuaccauggaguacaagg

SEQ ID NO: 2516008 - RNA, 19 nt, Artificial Sequence
  Description of Artificial Sequence: Synthetic oligonucleotide
  Sense strand starting at position 2961 of SEQ ID NO: 1888169
cuuguacuccaugguaaac

SEQ ID NO: 2516009 - RNA, 19 nt, Artificial Sequence
  Description of Artificial Sequence: Synthetic oligonucleotide
  Antisense strand to SEQ ID NO: 2516008
guuuaccauggaguacaag

SEQ ID NO: 2516010 - RNA, 19 nt, Artificial Sequence
  Description of Artificial Sequence: Synthetic oligonucleotide
  Sense strand starting at position 3118 of SEQ ID NO: 1888169
gcaggcugagugugaaaua

SEQ ID NO: 2516011 - RNA, 19 nt, Artificial Sequence
  Description of Artificial Sequence: Synthetic oligonucleotide
  Antisense strand to SEQ ID NO: 2516010
uauuucacacucagccugc

SEQ ID NO: 2516012 - RNA, 19 nt, Artificial Sequence
  Description of Artificial Sequence: Synthetic oligonucleotide
  Sense strand starting at position 3268 of SEQ ID NO: 1888169
cccucugcgaucugagagu

SEQ ID NO: 2516013 - RNA, 19 nt, Artificial Sequence
  Description of Artificial Sequence: Synthetic oligonucleotide
  Antisense strand to SEQ ID NO: 2516012
acucucagaucgcagaggg

SEQ ID NO: 2516014 - RNA, 19 nt, Artificial Sequence
  Description of Artificial Sequence: Synthetic oligonucleotide
  Sense strand starting at position 3322 of SEQ ID NO: 1888169
accuguucgcccugaaucu

SEQ ID NO: 2516015 - RNA, 19 nt, Artificial Sequence
  Description of Artificial Sequence: Synthetic oligonucleotide
  Antisense strand to SEQ ID NO: 2516014
agauucagggcgaacaggu

SEQ ID NO: 2516016 - RNA, 19 nt, Artificial Sequence
  Description of Artificial Sequence: Synthetic oligonucleotide
  Sense strand starting at position 3323 of SEQ ID NO: 1888169
ccuguucgcccugaaucua

SEQ ID NO: 2516017 - RNA, 19 nt, Artificial Sequence
  Description of Artificial Sequence: Synthetic oligonucleotide
  Antisense strand to SEQ ID NO: 2516016
uagauucagggcgaacagg

SEQ ID NO: 2516018 - RNA, 19 nt, Artificial Sequence
  Description of Artificial Sequence: Synthetic oligonucleotide
  Sense strand starting at position 3342 of SEQ ID NO: 1888169
augugcucacuuugagcua

SEQ ID NO: 2516019 - RNA, 19 nt, Artificial Sequence
  Description of Artificial Sequence: Synthetic oligonucleotide
  Antisense strand to SEQ ID NO: 2516018
uagcucaaagugagcacau

SEQ ID NO: 2516020 - RNA, 19 nt, Artificial Sequence
  Description of Artificial Sequence: Synthetic oligonucleotide
  Sense strand starting at position 3354 of SEQ ID NO: 1888169
ugagcuaucuuccuguaug

SEQ ID NO: 2516021 - RNA, 19 nt, Artificial Sequence
  Description of Artificial Sequence: Synthetic oligonucleotide
  Antisense strand to SEQ ID NO: 2516020
cauacaggaagauagcuca

SEQ ID NO: 2516022 - RNA, 19 nt, Artificial Sequence
  Description of Artificial Sequence: Synthetic oligonucleotide
  Sense strand starting at position 3497 of SEQ ID NO: 1888169
ccuguuugccaaugguaug

SEQ ID NO: 2516023 - RNA, 19 nt, Artificial Sequence
  Description of Artificial Sequence: Synthetic oligonucleotide
  Antisense strand to SEQ ID NO: 2516022
cauaccauuggcaaacagg

SEQ ID NO: 2516024 - RNA, 19 nt, Artificial Sequence
  Description of Artificial Sequence: Synthetic oligonucleotide
  Sense strand starting at position 3502 of SEQ ID NO: 1888169
uugccaaugguaugaucuu

SEQ ID NO: 2516025 - RNA, 19 nt, Artificial Sequence
  Description of Artificial Sequence: Synthetic oligonucleotide
  Antisense strand to SEQ ID NO: 2516024
aagaucauaccauuggcaa

SEQ ID NO: 2516026 - RNA, 19 nt, Artificial Sequence
  Description of Artificial Sequence: Synthetic oligonucleotide
  Sense strand starting at position 3554 of SEQ ID NO: 1888169
acuccuagauucgauaaau

SEQ ID NO: 2516027 - RNA, 19 nt, Artificial Sequence
  Description of Artificial Sequence: Synthetic oligonucleotide
  Antisense strand to SEQ ID NO: 2516026
auuuaucgaaucuaggagu

SEQ ID NO: 2516028 - RNA, 19 nt, Artificial Sequence
  Description of Artificial Sequence: Synthetic oligonucleotide
  Sense strand starting at position 3578 of SEQ ID NO: 1888169
caguaaagccucggucaca

SEQ ID NO: 2516029 - RNA, 19 nt, Artificial Sequence
  Description of Artificial Sequence: Synthetic oligonucleotide
  Antisense strand to SEQ ID NO: 2516028
ugugaccgaggcuuuacug

SEQ ID NO: 2516030 - RNA, 19 nt, Artificial Sequence
  Description of Artificial Sequence: Synthetic oligonucleotide
  Sense strand starting at position 3579 of SEQ ID NO: 1888169
aguaaagccucggucacaa

SEQ ID NO: 2516031 - RNA, 19 nt, Artificial Sequence
  Description of Artificial Sequence: Synthetic oligonucleotide
  Antisense strand to SEQ ID NO: 2516030
uugugaccgaggcuuuacu

SEQ ID NO: 2516032 - RNA, 19 nt, Artificial Sequence
  Description of Artificial Sequence: Synthetic oligonucleotide
  Sense strand starting at position 3625 of SEQ ID NO: 1888169
cgaugaccaagcugagaau

SEQ ID NO: 2516033 - RNA, 19 nt, Artificial Sequence
  Description of Artificial Sequence: Synthetic oligonucleotide
  Antisense strand to SEQ ID NO: 2516032
auucucagcuuggucaucg

SEQ ID NO: 2516034 - RNA, 19 nt, Artificial Sequence
  Description of Artificial Sequence: Synthetic oligonucleotide
  Sense strand starting at position 3795 of SEQ ID NO: 1888169
gcucacuuauuggaagaau

SEQ ID NO: 2516035 - RNA, 19 nt, Artificial Sequence
  Description of Artificial Sequence: Synthetic oligonucleotide
  Antisense strand to SEQ ID NO: 2516034
auucuuccaauaagugagc

SEQ ID NO: 2516036 - RNA, 19 nt, Artificial Sequence
  Description of Artificial Sequence: Synthetic oligonucleotide
  Sense strand starting at position 25 of SEQ ID NO: 1888170
guggaagucucaucucaaa

SEQ ID NO: 2516037 - RNA, 19 nt, Artificial Sequence
  Description of Artificial Sequence: Synthetic oligonucleotide
  Antisense strand to SEQ ID NO: 2516036
uuugagaugagacuuccac

SEQ ID NO: 2516038 - RNA, 19 nt, Artificial Sequence
  Description of Artificial Sequence: Synthetic oligonucleotide
  Sense strand starting at position 99 of SEQ ID NO: 1888170
ugggcuuuggcucagauaa

SEQ ID NO: 2516039 - RNA, 19 nt, Artificial Sequence
  Description of Artificial Sequence: Synthetic oligonucleotide
  Antisense strand to SEQ ID NO: 2516038
uuaucugagccaaagccca

SEQ ID NO: 2516040 - RNA, 19 nt, Artificial Sequence
  Description of Artificial Sequence: Synthetic oligonucleotide
  Sense strand starting at position 121 of SEQ ID NO: 1888170
ccaguuguacuacauuauu

SEQ ID NO: 2516041 - RNA, 19 nt, Artificial Sequence
  Description of Artificial Sequence: Synthetic oligonucleotide
  Antisense strand to SEQ ID NO: 2516040
aauaauguaguacaacugg

SEQ ID NO: 2516042 - RNA, 19 nt, Artificial Sequence
  Description of Artificial Sequence: Synthetic oligonucleotide
  Sense strand starting at position 215 of SEQ ID NO: 1888170
auaaauguccacuggguaa

SEQ ID NO: 2516043 - RNA, 19 nt, Artificial Sequence
  Description of Artificial Sequence: Synthetic oligonucleotide
  Antisense strand to SEQ ID NO: 2516042
uuacccaguggacauuuau

SEQ ID NO: 2516044 - RNA, 19 nt, Artificial Sequence
  Description of Artificial Sequence: Synthetic oligonucleotide
  Sense strand starting at position 217 of SEQ ID NO: 1888170
aaauguccacuggguaaau

SEQ ID NO: 2516045 - RNA, 19 nt, Artificial Sequence
  Description of Artificial Sequence: Synthetic oligonucleotide
  Antisense strand to SEQ ID NO: 2516044
auuuacccaguggacauuu

SEQ ID NO: 2516046 - RNA, 19 nt, Artificial Sequence
  Description of Artificial Sequence: Synthetic oligonucleotide
  Sense strand starting at position 295 of SEQ ID NO: 1888170
auaucuugguagucugaaa

SEQ ID NO: 2516047 - RNA, 19 nt, Artificial Sequence
  Description of Artificial Sequence: Synthetic oligonucleotide
  Antisense strand to SEQ ID NO: 2516046
uuucagacuaccaagauau

SEQ ID NO: 2516048 - RNA, 19 nt, Artificial Sequence
  Description of Artificial Sequence: Synthetic oligonucleotide
  Sense strand starting at position 663 of SEQ ID NO: 1888170
aauggauguuaugucauua

SEQ ID NO: 2516049 - RNA, 19 nt, Artificial Sequence
  Description of Artificial Sequence: Synthetic oligonucleotide
  Antisense strand to SEQ ID NO: 2516048
uaaugacauaacauccauu

SEQ ID NO: 2516050 - RNA, 19 nt, Artificial Sequence
  Description of Artificial Sequence: Synthetic oligonucleotide
  Sense strand starting at position 675 of SEQ ID NO: 1888170
gucauuaaacuuuguaaca

SEQ ID NO: 2516051 - RNA, 19 nt, Artificial Sequence
  Description of Artificial Sequence: Synthetic oligonucleotide
  Antisense strand to SEQ ID NO: 2516050
uguuacaaaguuuaaugac

SEQ ID NO: 2516052 - RNA, 19 nt, Artificial Sequence
  Description of Artificial Sequence: Synthetic oligonucleotide
  Sense strand starting at position 738 of SEQ ID NO: 1888170
accuaccauguguguaaga

SEQ ID NO: 2516053 - RNA, 19 nt, Artificial Sequence
  Description of Artificial Sequence: Synthetic oligonucleotide
  Antisense strand to SEQ ID NO: 2516052
ucuuacacacaugguaggu

SEQ ID NO: 2516054 - RNA, 19 nt, Artificial Sequence
  Description of Artificial Sequence: Synthetic oligonucleotide
  Sense strand starting at position 740 of SEQ ID NO: 1888170
cuaccauguguguaagacu

SEQ ID NO: 2516055 - RNA, 19 nt, Artificial Sequence
  Description of Artificial Sequence: Synthetic oligonucleotide
  Antisense strand to SEQ ID NO: 2516054
agucuuacacacaugguag

SEQ ID NO: 2516056 - RNA, 19 nt, Artificial Sequence
  Description of Artificial Sequence: Synthetic oligonucleotide
  Sense strand starting at position 749 of SEQ ID NO: 1888170
guguaagacugugcuaaau

SEQ ID NO: 2516057 - RNA, 19 nt, Artificial Sequence
  Description of Artificial Sequence: Synthetic oligonucleotide
  Antisense strand to SEQ ID NO: 2516056
auuuagcacagucuuacac

SEQ ID NO: 2516058 - RNA, 19 nt, Artificial Sequence
  Description of Artificial Sequence: Synthetic oligonucleotide
  Sense strand starting at position 760 of SEQ ID NO: 1888170
ugcuaaaucccaggaauaa

SEQ ID NO: 2516059 - RNA, 19 nt, Artificial Sequence
  Description of Artificial Sequence: Synthetic oligonucleotide
  Antisense strand to SEQ ID NO: 2516058
uuauuccugggauuuagca

SEQ ID NO: 2516060 - RNA, 19 nt, Artificial Sequence
  Description of Artificial Sequence: Synthetic oligonucleotide
  Sense strand starting at position 810 of SEQ ID NO: 1888170
agggaauguuaauaggaaa

SEQ ID NO: 2516061 - RNA, 19 nt, Artificial Sequence
  Description of Artificial Sequence: Synthetic oligonucleotide
  Antisense strand to SEQ ID NO: 2516060
uuuccuauuaacauucccu

SEQ ID NO: 2516062 - RNA, 19 nt, Artificial Sequence
  Description of Artificial Sequence: Synthetic oligonucleotide
  Sense strand starting at position 1168 of SEQ ID NO: 1888170
agaagacuauccuagaaag

SEQ ID NO: 2516063 - RNA, 19 nt, Artificial Sequence
  Description of Artificial Sequence: Synthetic oligonucleotide
  Antisense strand to SEQ ID NO: 2516062
cuuucuaggauagucuucu

SEQ ID NO: 2516064 - RNA, 19 nt, Artificial Sequence
  Description of Artificial Sequence: Synthetic oligonucleotide
  Sense strand starting at position 1179 of SEQ ID NO: 1888170
cuagaaaguauaggguauu

SEQ ID NO: 2516065 - RNA, 19 nt, Artificial Sequence
  Description of Artificial Sequence: Synthetic oligonucleotide
  Antisense strand to SEQ ID NO: 2516064
aauacccuauacuuucuag

SEQ ID NO: 2516066 - RNA, 19 nt, Artificial Sequence
  Description of Artificial Sequence: Synthetic oligonucleotide
  Sense strand starting at position 1349 of SEQ ID NO: 1888170
agagcuugaugugcauaau

SEQ ID NO: 2516067 - RNA, 19 nt, Artificial Sequence
  Description of Artificial Sequence: Synthetic oligonucleotide
  Antisense strand to SEQ ID NO: 2516066
auuaugcacaucaagcucu

SEQ ID NO: 2516068 - RNA, 19 nt, Artificial Sequence
  Description of Artificial Sequence: Synthetic oligonucleotide
  Sense strand starting at position 1350 of SEQ ID NO: 1888170
gagcuugaugugcauaaua

SEQ ID NO: 2516069 - RNA, 19 nt, Artificial Sequence
  Description of Artificial Sequence: Synthetic oligonucleotide
  Antisense strand to SEQ ID NO: 2516068
uauuaugcacaucaagcuc

SEQ ID NO: 2516070 - RNA, 19 nt, Artificial Sequence
  Description of Artificial Sequence: Synthetic oligonucleotide
  Sense strand starting at position 1352 of SEQ ID NO: 1888170
gcuugaugugcauaauauu

SEQ ID NO: 2516071 - RNA, 19 nt, Artificial Sequence
  Description of Artificial Sequence: Synthetic oligonucleotide
  Antisense strand to SEQ ID NO: 2516070
aauauuaugcacaucaagc

SEQ ID NO: 2516072 - RNA, 19 nt, Artificial Sequence
  Description of Artificial Sequence: Synthetic oligonucleotide
  Sense strand starting at position 1670 of SEQ ID NO: 1888170
uaccuuuggcuguggauua

SEQ ID NO: 2516073 - RNA, 19 nt, Artificial Sequence
  Description of Artificial Sequence: Synthetic oligonucleotide
  Antisense strand to SEQ ID NO: 2516072
uaauccacagccaaaggua

SEQ ID NO: 2516074 - RNA, 19 nt, Artificial Sequence
  Description of Artificial Sequence: Synthetic oligonucleotide
  Sense strand starting at position 1681 of SEQ ID NO: 1888170
guggauuaaccugaagccu

SEQ ID NO: 2516075 - RNA, 19 nt, Artificial Sequence
  Description of Artificial Sequence: Synthetic oligonucleotide
  Antisense strand to SEQ ID NO: 2516074
aggcuucagguuaauccac

SEQ ID NO: 2516076 - RNA, 19 nt, Artificial Sequence
  Description of Artificial Sequence: Synthetic oligonucleotide
  Sense strand starting at position 1782 of SEQ ID NO: 1888170
gagcgcuauagucagauga

SEQ ID NO: 2516077 - RNA, 19 nt, Artificial Sequence
  Description of Artificial Sequence: Synthetic oligonucleotide
  Antisense strand to SEQ ID NO: 2516076
ucaucugacuauagcgcuc

SEQ ID NO: 2516078 - RNA, 19 nt, Artificial Sequence
  Description of Artificial Sequence: Synthetic oligonucleotide
  Sense strand starting at position 2012 of SEQ ID NO: 1888170
aagagugaggcagguaaau

SEQ ID NO: 2516079 - RNA, 19 nt, Artificial Sequence
  Description of Artificial Sequence: Synthetic oligonucleotide
  Antisense strand to SEQ ID NO: 2516078
auuuaccugccucacucuu

SEQ ID NO: 2516080 - RNA, 19 nt, Artificial Sequence
  Description of Artificial Sequence: Synthetic oligonucleotide
  Sense strand starting at position 2403 of SEQ ID NO: 1888170
auggguccuauugggaaga

SEQ ID NO: 2516081 - RNA, 19 nt, Artificial Sequence
  Description of Artificial Sequence: Synthetic oligonucleotide
  Antisense strand to SEQ ID NO: 2516080
ucuucccaauaggacccau

SEQ ID NO: 2516082 - RNA, 19 nt, Artificial Sequence
  Description of Artificial Sequence: Synthetic oligonucleotide
  Sense strand starting at position 2466 of SEQ ID NO: 1888170
gacggauuaagucagguaa

SEQ ID NO: 2516083 - RNA, 19 nt, Artificial Sequence
  Description of Artificial Sequence: Synthetic oligonucleotide
  Antisense strand to SEQ ID NO: 2516082
uuaccugacuuaauccguc

SEQ ID NO: 2516084 - RNA, 19 nt, Artificial Sequence
  Description of Artificial Sequence: Synthetic oligonucleotide
  Sense strand starting at position 2470 of SEQ ID NO: 1888170
gauuaagucagguaaaggu

SEQ ID NO: 2516085 - RNA, 19 nt, Artificial Sequence
  Description of Artificial Sequence: Synthetic oligonucleotide
  Antisense strand to SEQ ID NO: 2516084
accuuuaccugacuuaauc

SEQ ID NO: 2516086 - RNA, 19 nt, Artificial Sequence
  Description of Artificial Sequence: Synthetic oligonucleotide
  Sense strand starting at position 2485 of SEQ ID NO: 1888170
agguaacacucugugcaga

SEQ ID NO: 2516087 - RNA, 19 nt, Artificial Sequence
  Description of Artificial Sequence: Synthetic oligonucleotide
  Antisense strand to SEQ ID NO: 2516086
ucugcacagaguguuaccu

SEQ ID NO: 2516088 - RNA, 19 nt, Artificial Sequence
  Description of Artificial Sequence: Synthetic oligonucleotide
  Sense strand starting at position 2487 of SEQ ID NO: 1888170
guaacacucugugcagaga

SEQ ID NO: 2516089 - RNA, 19 nt, Artificial Sequence
  Description of Artificial Sequence: Synthetic oligonucleotide
  Antisense strand to SEQ ID NO: 2516088
ucucugcacagaguguuac

SEQ ID NO: 2516090 - RNA, 19 nt, Artificial Sequence
  Description of Artificial Sequence: Synthetic oligonucleotide
  Sense strand starting at position 2490 of SEQ ID NO: 1888170
acacucugugcagagacau

SEQ ID NO: 2516091 - RNA, 19 nt, Artificial Sequence
  Description of Artificial Sequence: Synthetic oligonucleotide
  Antisense strand to SEQ ID NO: 2516090
augucucugcacagagugu

SEQ ID NO: 2516092 - RNA, 19 nt, Artificial Sequence
  Description of Artificial Sequence: Synthetic oligonucleotide
  Sense strand starting at position 2519 of SEQ ID NO: 1888170
ccgaguguugaguaaguaa

SEQ ID NO: 2516093 - RNA, 19 nt, Artificial Sequence
  Description of Artificial Sequence: Synthetic oligonucleotide
  Antisense strand to SEQ ID NO: 2516092
uuacuuacucaacacucgg

SEQ ID NO: 2516094 - RNA, 19 nt, Artificial Sequence
  Description of Artificial Sequence: Synthetic oligonucleotide
  Sense strand starting at position 2622 of SEQ ID NO: 1888170
ccaguauuaucgcuaacca

SEQ ID NO: 2516095 - RNA, 19 nt, Artificial Sequence
  Description of Artificial Sequence: Synthetic oligonucleotide
  Antisense strand to SEQ ID NO: 2516094
ugguuagcgauaauacugg

SEQ ID NO: 2516096 - RNA, 19 nt, Artificial Sequence
  Description of Artificial Sequence: Synthetic oligonucleotide
  Sense strand starting at position 2623 of SEQ ID NO: 1888170
caguauuaucgcuaaccag

SEQ ID NO: 2516097 - RNA, 19 nt, Artificial Sequence
  Description of Artificial Sequence: Synthetic oligonucleotide
  Antisense strand to SEQ ID NO: 2516096
cugguuagcgauaauacug

SEQ ID NO: 2516098 - RNA, 19 nt, Artificial Sequence
  Description of Artificial Sequence: Synthetic oligonucleotide
  Sense strand starting at position 2658 of SEQ ID NO: 1888170
uguuucucggcaguuguaa

SEQ ID NO: 2516099 - RNA, 19 nt, Artificial Sequence
  Description of Artificial Sequence: Synthetic oligonucleotide
  Antisense strand to SEQ ID NO: 2516098
uuacaacugccgagaaaca

SEQ ID NO: 2516100 - RNA, 19 nt, Artificial Sequence
  Description of Artificial Sequence: Synthetic oligonucleotide
  Sense strand starting at position 2659 of SEQ ID NO: 1888170
guuucucggcaguuguaau

SEQ ID NO: 2516101 - RNA, 19 nt, Artificial Sequence
  Description of Artificial Sequence: Synthetic oligonucleotide
  Antisense strand to SEQ ID NO: 2516100
auuacaacugccgagaaac

SEQ ID NO: 2516102 - RNA, 19 nt, Artificial Sequence
  Description of Artificial Sequence: Synthetic oligonucleotide
  Sense strand starting at position 2804 of SEQ ID NO: 1888170
cgaaaugucccuuucgcga

SEQ ID NO: 2516103 - RNA, 19 nt, Artificial Sequence
  Description of Artificial Sequence: Synthetic oligonucleotide
  Antisense strand to SEQ ID NO: 2516102
ucgcgaaagggacauuucg

SEQ ID NO: 2516104 - RNA, 19 nt, Artificial Sequence
  Description of Artificial Sequence: Synthetic oligonucleotide
  Sense strand starting at position 3248 of SEQ ID NO: 1888170
ucuuguuacccgggaggaa

SEQ ID NO: 2516105 - RNA, 19 nt, Artificial Sequence
  Description of Artificial Sequence: Synthetic oligonucleotide
  Antisense strand to SEQ ID NO: 2516104
uuccucccggguaacaaga

SEQ ID NO: 2516106 - RNA, 19 nt, Artificial Sequence
  Description of Artificial Sequence: Synthetic oligonucleotide
  Sense strand starting at position 3708 of SEQ ID NO: 1888170
ggccuagcacgugaugaua

SEQ ID NO: 2516107 - RNA, 19 nt, Artificial Sequence
  Description of Artificial Sequence: Synthetic oligonucleotide
  Antisense strand to SEQ ID NO: 2516106
uaucaucacgugcuaggcc

SEQ ID NO: 2516108 - RNA, 19 nt, Artificial Sequence
  Description of Artificial Sequence: Synthetic oligonucleotide
  Sense strand starting at position 3711 of SEQ ID NO: 1888170
cuagcacgugaugauaaua

SEQ ID NO: 2516109 - RNA, 19 nt, Artificial Sequence
  Description of Artificial Sequence: Synthetic oligonucleotide
  Antisense strand to SEQ ID NO: 2516108
uauuaucaucacgugcuag

SEQ ID NO: 2516110 - RNA, 19 nt, Artificial Sequence
  Description of Artificial Sequence: Synthetic oligonucleotide
  Sense strand starting at position 3723 of SEQ ID NO: 1888170
gauaauagucauggcuuac

SEQ ID NO: 2516111 - RNA, 19 nt, Artificial Sequence
  Description of Artificial Sequence: Synthetic oligonucleotide
  Antisense strand to SEQ ID NO: 2516110
guaagccaugacuauuauc

SEQ ID NO: 2516112 - RNA, 19 nt, Artificial Sequence
  Description of Artificial Sequence: Synthetic oligonucleotide
  Sense strand starting at position 3736 of SEQ ID NO: 1888170
gcuuacuguacggaaugau

SEQ ID NO: 2516113 - RNA, 19 nt, Artificial Sequence
  Description of Artificial Sequence: Synthetic oligonucleotide
  Antisense strand to SEQ ID NO: 2516112
aucauuccguacaguaagc

SEQ ID NO: 2516114 - RNA, 19 nt, Artificial Sequence
  Description of Artificial Sequence: Synthetic oligonucleotide
  Sense strand starting at position 3767 of SEQ ID NO: 1888170
ggugcuacugaaugcauua

SEQ ID NO: 2516115 - RNA, 19 nt, Artificial Sequence
  Description of Artificial Sequence: Synthetic oligonucleotide
  Antisense strand to SEQ ID NO: 2516114
uaaugcauucaguagcacc

SEQ ID NO: 2516116 - RNA, 19 nt, Artificial Sequence
  Description of Artificial Sequence: Synthetic oligonucleotide
  Sense strand starting at position 175 of SEQ ID NO: 1888171
acaggaauauaacagauga

SEQ ID NO: 2516117 - RNA, 19 nt, Artificial Sequence
  Description of Artificial Sequence: Synthetic oligonucleotide
  Antisense strand to SEQ ID NO: 2516116
ucaucuguuauauuccugu

SEQ ID NO: 2516118 - RNA, 19 nt, Artificial Sequence
  Description of Artificial Sequence: Synthetic oligonucleotide
  Sense strand starting at position 550 of SEQ ID NO: 1888171
gcaagucaucacugcaaag

SEQ ID NO: 2516119 - RNA, 19 nt, Artificial Sequence
  Description of Artificial Sequence: Synthetic oligonucleotide
  Antisense strand to SEQ ID NO: 2516118
cuuugcagugaugacuugc

SEQ ID NO: 2516120 - RNA, 19 nt, Artificial Sequence
  Description of Artificial Sequence: Synthetic oligonucleotide
  Sense strand starting at position 636 of SEQ ID NO: 1888171
guaacacacccucgaguau

SEQ ID NO: 2516121 - RNA, 19 nt, Artificial Sequence
  Description of Artificial Sequence: Synthetic oligonucleotide
  Antisense strand to SEQ ID NO: 2516120
auacucgaggguguguuac

SEQ ID NO: 2516122 - RNA, 19 nt, Artificial Sequence
  Description of Artificial Sequence: Synthetic oligonucleotide
  Sense strand starting at position 745 of SEQ ID NO: 1888171
cagacacuugauuguguuu

SEQ ID NO: 2516123 - RNA, 19 nt, Artificial Sequence
  Description of Artificial Sequence: Synthetic oligonucleotide
  Antisense strand to SEQ ID NO: 2516122
aaacacaaucaagugucug

SEQ ID NO: 2516124 - RNA, 19 nt, Artificial Sequence
  Description of Artificial Sequence: Synthetic oligonucleotide
  Sense strand starting at position 751 of SEQ ID NO: 1888171
cuugauuguguuuaggcaa

SEQ ID NO: 2516125 - RNA, 19 nt, Artificial Sequence
  Description of Artificial Sequence: Synthetic oligonucleotide
  Antisense strand to SEQ ID NO: 2516124
uugccuaaacacaaucaag

SEQ ID NO: 2516126 - RNA, 19 nt, Artificial Sequence
  Description of Artificial Sequence: Synthetic oligonucleotide
  Sense strand starting at position 1182 of SEQ ID NO: 1888171
uaaacaguuuggucuagca

SEQ ID NO: 2516127 - RNA, 19 nt, Artificial Sequence
  Description of Artificial Sequence: Synthetic oligonucleotide
  Antisense strand to SEQ ID NO: 2516126
ugcuagaccaaacuguuua

SEQ ID NO: 2516128 - RNA, 19 nt, Artificial Sequence
  Description of Artificial Sequence: Synthetic oligonucleotide
  Sense strand starting at position 1184 of SEQ ID NO: 1888171
aacaguuuggucuagcaca

SEQ ID NO: 2516129 - RNA, 19 nt, Artificial Sequence
  Description of Artificial Sequence: Synthetic oligonucleotide
  Antisense strand to SEQ ID NO: 2516128
ugugcuagaccaaacuguu

SEQ ID NO: 2516130 - RNA, 19 nt, Artificial Sequence
  Description of Artificial Sequence: Synthetic oligonucleotide
  Sense strand starting at position 1210 of SEQ ID NO: 1888171
gaccuugagcucugugaag

SEQ ID NO: 2516131 - RNA, 19 nt, Artificial Sequence
  Description of Artificial Sequence: Synthetic oligonucleotide
  Antisense strand to SEQ ID NO: 2516130
cuucacagagcucaagguc

SEQ ID NO: 2516132 - RNA, 19 nt, Artificial Sequence
  Description of Artificial Sequence: Synthetic oligonucleotide
  Sense strand starting at position 1216 of SEQ ID NO: 1888171
gagcucugugaagacaauu

SEQ ID NO: 2516133 - RNA, 19 nt, Artificial Sequence
  Description of Artificial Sequence: Synthetic oligonucleotide
  Antisense strand to SEQ ID NO: 2516132
aauugucuucacagagcuc

SEQ ID NO: 2516134 - RNA, 19 nt, Artificial Sequence
  Description of Artificial Sequence: Synthetic oligonucleotide
  Sense strand starting at position 1266 of SEQ ID NO: 1888171
cugccucacgccuaucaga

SEQ ID NO: 2516135 - RNA, 19 nt, Artificial Sequence
  Description of Artificial Sequence: Synthetic oligonucleotide
  Antisense strand to SEQ ID NO: 2516134
ucugauaggcgugaggcag

SEQ ID NO: 2516136 - RNA, 19 nt, Artificial Sequence
  Description of Artificial Sequence: Synthetic oligonucleotide
  Sense strand starting at position 1346 of SEQ ID NO: 1888171
accacaucucucugugaca

SEQ ID NO: 2516137 - RNA, 19 nt, Artificial Sequence
  Description of Artificial Sequence: Synthetic oligonucleotide
  Antisense strand to SEQ ID NO: 2516136
ugucacagagagauguggu

SEQ ID NO: 2516138 - RNA, 19 nt, Artificial Sequence
  Description of Artificial Sequence: Synthetic oligonucleotide
  Sense strand starting at position 1659 of SEQ ID NO: 1888171
gcuuauuucuaauugcuag

SEQ ID NO: 2516139 - RNA, 19 nt, Artificial Sequence
  Description of Artificial Sequence: Synthetic oligonucleotide
  Antisense strand to SEQ ID NO: 2516138
cuagcaauuagaaauaagc

SEQ ID NO: 2516140 - RNA, 19 nt, Artificial Sequence
  Description of Artificial Sequence: Synthetic oligonucleotide
  Sense strand starting at position 1665 of SEQ ID NO: 1888171
uucuaauugcuagagcgau

SEQ ID NO: 2516141 - RNA, 19 nt, Artificial Sequence
  Description of Artificial Sequence: Synthetic oligonucleotide
  Antisense strand to SEQ ID NO: 2516140
aucgcucuagcaauuagaa

SEQ ID NO: 2516142 - RNA, 19 nt, Artificial Sequence
  Description of Artificial Sequence: Synthetic oligonucleotide
  Sense strand starting at position 1680 of SEQ ID NO: 1888171
cgauucuacccauggguca

SEQ ID NO: 2516143 - RNA, 19 nt, Artificial Sequence
  Description of Artificial Sequence: Synthetic oligonucleotide
  Antisense strand to SEQ ID NO: 2516142
ugacccauggguagaaucg

SEQ ID NO: 2516144 - RNA, 19 nt, Artificial Sequence
  Description of Artificial Sequence: Synthetic oligonucleotide
  Sense strand starting at position 1681 of SEQ ID NO: 1888171
gauucuacccaugggucaa

SEQ ID NO: 2516145 - RNA, 19 nt, Artificial Sequence
  Description of Artificial Sequence: Synthetic oligonucleotide
  Antisense strand to SEQ ID NO: 2516144
uugacccauggguagaauc

SEQ ID NO: 2516146 - RNA, 19 nt, Artificial Sequence
  Description of Artificial Sequence: Synthetic oligonucleotide
  Sense strand starting at position 2450 of SEQ ID NO: 1888171
augaguuacgggcagcaga

SEQ ID NO: 2516147 - RNA, 19 nt, Artificial Sequence
  Description of Artificial Sequence: Synthetic oligonucleotide
  Antisense strand to SEQ ID NO: 2516146
ucugcugcccguaacucau

SEQ ID NO: 2516148 - RNA, 19 nt, Artificial Sequence
  Description of Artificial Sequence: Synthetic oligonucleotide
  Sense strand starting at position 2951 of SEQ ID NO: 1888171
gagugaaucgcagcugcuu

SEQ ID NO: 2516149 - RNA, 19 nt, Artificial Sequence
  Description of Artificial Sequence: Synthetic oligonucleotide
  Antisense strand to SEQ ID NO: 2516148
aagcagcugcgauucacuc

SEQ ID NO: 2516150 - RNA, 19 nt, Artificial Sequence
  Description of Artificial Sequence: Synthetic oligonucleotide
  Sense strand starting at position 2999 of SEQ ID NO: 1888171
ucaggcgacucuuuagaaa

SEQ ID NO: 2516151 - RNA, 19 nt, Artificial Sequence
  Description of Artificial Sequence: Synthetic oligonucleotide
  Antisense strand to SEQ ID NO: 2516150
uuucuaaagagucgccuga

SEQ ID NO: 2516152 - RNA, 19 nt, Artificial Sequence
  Description of Artificial Sequence: Synthetic oligonucleotide
  Sense strand starting at position 3098 of SEQ ID NO: 1888171
uuuaaagagucauucgaag

SEQ ID NO: 2516153 - RNA, 19 nt, Artificial Sequence
  Description of Artificial Sequence: Synthetic oligonucleotide
  Antisense strand to SEQ ID NO: 2516152
cuucgaaugacucuuuaaa

SEQ ID NO: 2516154 - RNA, 19 nt, Artificial Sequence
  Description of Artificial Sequence: Synthetic oligonucleotide
  Sense strand starting at position 3181 of SEQ ID NO: 1888171
gcgauugaguuacuugaca

SEQ ID NO: 2516155 - RNA, 19 nt, Artificial Sequence
  Description of Artificial Sequence: Synthetic oligonucleotide
  Antisense strand to SEQ ID NO: 2516154
ugucaaguaacucaaucgc

SEQ ID NO: 2516156 - RNA, 19 nt, Artificial Sequence
  Description of Artificial Sequence: Synthetic oligonucleotide
  Sense strand starting at position 3241 of SEQ ID NO: 1888171
accuaaaugugguugguaa

SEQ ID NO: 2516157 - RNA, 19 nt, Artificial Sequence
  Description of Artificial Sequence: Synthetic oligonucleotide
  Antisense strand to SEQ ID NO: 2516156
uuaccaaccacauuuaggu

SEQ ID NO: 2516158 - RNA, 19 nt, Artificial Sequence
  Description of Artificial Sequence: Synthetic oligonucleotide
  Sense strand starting at position 3242 of SEQ ID NO: 1888171
ccuaaaugugguugguaaa

SEQ ID NO: 2516159 - RNA, 19 nt, Artificial Sequence
  Description of Artificial Sequence: Synthetic oligonucleotide
  Antisense strand to SEQ ID NO: 2516158
uuuaccaaccacauuuagg

SEQ ID NO: 2516160 - RNA, 19 nt, Artificial Sequence
  Description of Artificial Sequence: Synthetic oligonucleotide
  Sense strand starting at position 3243 of SEQ ID NO: 1888171
cuaaaugugguugguaaau

SEQ ID NO: 2516161 - RNA, 19 nt, Artificial Sequence
  Description of Artificial Sequence: Synthetic oligonucleotide
  Antisense strand to SEQ ID NO: 2516160
auuuaccaaccacauuuag

SEQ ID NO: 2516162 - RNA, 19 nt, Artificial Sequence
  Description of Artificial Sequence: Synthetic oligonucleotide
  Sense strand starting at position 3282 of SEQ ID NO: 1888171
augguuuacagaugugguu

SEQ ID NO: 2516163 - RNA, 19 nt, Artificial Sequence
  Description of Artificial Sequence: Synthetic oligonucleotide
  Antisense strand to SEQ ID NO: 2516162
aaccacaucuguaaaccau

SEQ ID NO: 2516164 - RNA, 19 nt, Artificial Sequence
  Description of Artificial Sequence: Synthetic oligonucleotide
  Sense strand starting at position 3284 of SEQ ID NO: 1888171
gguuuacagaugugguuga

SEQ ID NO: 2516165 - RNA, 19 nt, Artificial Sequence
  Description of Artificial Sequence: Synthetic oligonucleotide
  Antisense strand to SEQ ID NO: 2516164
ucaaccacaucuguaaacc

SEQ ID NO: 2516166 - RNA, 19 nt, Artificial Sequence
  Description of Artificial Sequence: Synthetic oligonucleotide
  Sense strand starting at position 3288 of SEQ ID NO: 1888171
uacagaugugguugaauuc

SEQ ID NO: 2516167 - RNA, 19 nt, Artificial Sequence
  Description of Artificial Sequence: Synthetic oligonucleotide
  Antisense strand to SEQ ID NO: 2516166
gaauucaaccacaucugua

SEQ ID NO: 2516168 - RNA, 19 nt, Artificial Sequence
  Description of Artificial Sequence: Synthetic oligonucleotide
  Sense strand starting at position 3307 of SEQ ID NO: 1888171
uguuacacaugucuacuua

SEQ ID NO: 2516169 - RNA, 19 nt, Artificial Sequence
  Description of Artificial Sequence: Synthetic oligonucleotide
  Antisense strand to SEQ ID NO: 2516168
uaaguagacauguguaaca

SEQ ID NO: 2516170 - RNA, 19 nt, Artificial Sequence
  Description of Artificial Sequence: Synthetic oligonucleotide
  Sense strand starting at position 3330 of SEQ ID NO: 1888171
ucagaaucguuauuccauu

SEQ ID NO: 2516171 - RNA, 19 nt, Artificial Sequence
  Description of Artificial Sequence: Synthetic oligonucleotide
  Antisense strand to SEQ ID NO: 2516170
aauggaauaacgauucuga

SEQ ID NO: 2516172 - RNA, 19 nt, Artificial Sequence
  Description of Artificial Sequence: Synthetic oligonucleotide
  Sense strand starting at position 3501 of SEQ ID NO: 1888171
uccugaaucuuccuggagu

SEQ ID NO: 2516173 - RNA, 19 nt, Artificial Sequence
  Description of Artificial Sequence: Synthetic oligonucleotide
  Antisense strand to SEQ ID NO: 2516172
acuccaggaagauucagga

SEQ ID NO: 2516174 - RNA, 19 nt, Artificial Sequence
  Description of Artificial Sequence: Synthetic oligonucleotide
  Sense strand starting at position 3504 of SEQ ID NO: 1888171
ugaaucuuccuggaguuac

SEQ ID NO: 2516175 - RNA, 19 nt, Artificial Sequence
  Description of Artificial Sequence: Synthetic oligonucleotide
  Antisense strand to SEQ ID NO: 2516174
guaacuccaggaagauuca

SEQ ID NO: 2516176 - RNA, 19 nt, Artificial Sequence
  Description of Artificial Sequence: Synthetic oligonucleotide
  Sense strand starting at position 3514 of SEQ ID NO: 1888171
uggaguuacaggugcuuau

SEQ ID NO: 2516177 - RNA, 19 nt, Artificial Sequence
  Description of Artificial Sequence: Synthetic oligonucleotide
  Antisense strand to SEQ ID NO: 2516176
auaagcaccuguaacucca

SEQ ID NO: 2516178 - RNA, 19 nt, Artificial Sequence
  Description of Artificial Sequence: Synthetic oligonucleotide
  Sense strand starting at position 3521 of SEQ ID NO: 1888171
acaggugcuuauccacuaa

SEQ ID NO: 2516179 - RNA, 19 nt, Artificial Sequence
  Description of Artificial Sequence: Synthetic oligonucleotide
  Antisense strand to SEQ ID NO: 2516178
uuaguggauaagcaccugu

SEQ ID NO: 2516180 - RNA, 19 nt, Artificial Sequence
  Description of Artificial Sequence: Synthetic oligonucleotide
  Sense strand starting at position 3569 of SEQ ID NO: 1888171
ugcauuaauggacagcauu

SEQ ID NO: 2516181 - RNA, 19 nt, Artificial Sequence
  Description of Artificial Sequence: Synthetic oligonucleotide
  Antisense strand to SEQ ID NO: 2516180
aaugcuguccauuaaugca

SEQ ID NO: 2516182 - RNA, 19 nt, Artificial Sequence
  Description of Artificial Sequence: Synthetic oligonucleotide
  Sense strand starting at position 3596 of SEQ ID NO: 1888171
uaggauugggugggcuaua

SEQ ID NO: 2516183 - RNA, 19 nt, Artificial Sequence
  Description of Artificial Sequence: Synthetic oligonucleotide
  Antisense strand to SEQ ID NO: 2516182
uauagcccacccaauccua

SEQ ID NO: 2516184 - RNA, 19 nt, Artificial Sequence
  Description of Artificial Sequence: Synthetic oligonucleotide
  Sense strand starting at position 3597 of SEQ ID NO: 1888171
aggauugggugggcuauaa

SEQ ID NO: 2516185 - RNA, 19 nt, Artificial Sequence
  Description of Artificial Sequence: Synthetic oligonucleotide
  Antisense strand to SEQ ID NO: 2516184
uuauagcccacccaauccu

SEQ ID NO: 2516186 - RNA, 19 nt, Artificial Sequence
  Description of Artificial Sequence: Synthetic oligonucleotide
  Sense strand starting at position 3889 of SEQ ID NO: 1888171
uagaaauaagaguguguug

SEQ ID NO: 2516187 - RNA, 19 nt, Artificial Sequence
  Description of Artificial Sequence: Synthetic oligonucleotide
  Antisense strand to SEQ ID NO: 2516186
caacacacucuuauuucua

SEQ ID NO: 2516188 - RNA, 19 nt, Artificial Sequence
  Description of Artificial Sequence: Synthetic oligonucleotide
  Sense strand starting at position 3891 of SEQ ID NO: 1888171
gaaauaagaguguguugcu

SEQ ID NO: 2516189 - RNA, 19 nt, Artificial Sequence
  Description of Artificial Sequence: Synthetic oligonucleotide
  Antisense strand to SEQ ID NO: 2516188
agcaacacacucuuauuuc

SEQ ID NO: 2516190 - RNA, 19 nt, Artificial Sequence
  Description of Artificial Sequence: Synthetic oligonucleotide
  Sense strand starting at position 3892 of SEQ ID NO: 1888171
aaauaagaguguguugcuu

SEQ ID NO: 2516191 - RNA, 19 nt, Artificial Sequence
  Description of Artificial Sequence: Synthetic oligonucleotide
  Antisense strand to SEQ ID NO: 2516190
aagcaacacacucuuauuu

SEQ ID NO: 2516192 - RNA, 19 nt, Artificial Sequence
  Description of Artificial Sequence: Synthetic oligonucleotide
  Sense strand starting at position 3896 of SEQ ID NO: 1888171
aagaguguguugcuuagag

SEQ ID NO: 2516193 - RNA, 19 nt, Artificial Sequence
  Description of Artificial Sequence: Synthetic oligonucleotide
  Antisense strand to SEQ ID NO: 2516192
cucuaagcaacacacucuu

SEQ ID NO: 2516194 - RNA, 19 nt, Artificial Sequence
  Description of Artificial Sequence: Synthetic oligonucleotide
  Sense strand starting at position 3942 of SEQ ID NO: 1888171
gucucagcucuacauacau

SEQ ID NO: 2516195 - RNA, 19 nt, Artificial Sequence
  Description of Artificial Sequence: Synthetic oligonucleotide
  Antisense strand to SEQ ID NO: 2516194
auguauguagagcugagac

SEQ ID NO: 2516196 - RNA, 19 nt, Artificial Sequence
  Description of Artificial Sequence: Synthetic oligonucleotide
  Sense strand starting at position 240 of SEQ ID NO: 1888172
ugagguuacggagagcuau

SEQ ID NO: 2516197 - RNA, 19 nt, Artificial Sequence
  Description of Artificial Sequence: Synthetic oligonucleotide
  Antisense strand to SEQ ID NO: 2516196
auagcucuccguaaccuca

SEQ ID NO: 2516198 - RNA, 19 nt, Artificial Sequence
  Description of Artificial Sequence: Synthetic oligonucleotide
  Sense strand starting at position 293 of SEQ ID NO: 1888172
guaagaccuugucacuuua

SEQ ID NO: 2516199 - RNA, 19 nt, Artificial Sequence
  Description of Artificial Sequence: Synthetic oligonucleotide
  Antisense strand to SEQ ID NO: 2516198
uaaagugacaaggucuuac

SEQ ID NO: 2516200 - RNA, 19 nt, Artificial Sequence
  Description of Artificial Sequence: Synthetic oligonucleotide
  Sense strand starting at position 531 of SEQ ID NO: 1888172
gauugugcgcgccuguaau

SEQ ID NO: 2516201 - RNA, 19 nt, Artificial Sequence
  Description of Artificial Sequence: Synthetic oligonucleotide
  Antisense strand to SEQ ID NO: 2516200
auuacaggcgcgcacaauc

SEQ ID NO: 2516202 - RNA, 19 nt, Artificial Sequence
  Description of Artificial Sequence: Synthetic oligonucleotide
  Sense strand starting at position 925 of SEQ ID NO: 1888172
gcuuuagaguuacuucuag

SEQ ID NO: 2516203 - RNA, 19 nt, Artificial Sequence
  Description of Artificial Sequence: Synthetic oligonucleotide
  Antisense strand to SEQ ID NO: 2516202
cuagaaguaacucuaaagc

SEQ ID NO: 2516204 - RNA, 19 nt, Artificial Sequence
  Description of Artificial Sequence: Synthetic oligonucleotide
  Sense strand starting at position 929 of SEQ ID NO: 1888172
uagaguuacuucuagaaug

SEQ ID NO: 2516205 - RNA, 19 nt, Artificial Sequence
  Description of Artificial Sequence: Synthetic oligonucleotide
  Antisense strand to SEQ ID NO: 2516204
cauucuagaaguaacucua

SEQ ID NO: 2516206 - RNA, 19 nt, Artificial Sequence
  Description of Artificial Sequence: Synthetic oligonucleotide
  Sense strand starting at position 984 of SEQ ID NO: 1888172
acuguacccaugugagaag

SEQ ID NO: 2516207 - RNA, 19 nt, Artificial Sequence
  Description of Artificial Sequence: Synthetic oligonucleotide
  Antisense strand to SEQ ID NO: 2516206
cuucucacauggguacagu

SEQ ID NO: 2516208 - RNA, 19 nt, Artificial Sequence
  Description of Artificial Sequence: Synthetic oligonucleotide
  Sense strand starting at position 1022 of SEQ ID NO: 1888172
gggugauaucuuggcagca

SEQ ID NO: 2516209 - RNA, 19 nt, Artificial Sequence
  Description of Artificial Sequence: Synthetic oligonucleotide
  Antisense strand to SEQ ID NO: 2516208
ugcugccaagauaucaccc

SEQ ID NO: 2516210 - RNA, 19 nt, Artificial Sequence
  Description of Artificial Sequence: Synthetic oligonucleotide
  Sense strand starting at position 1023 of SEQ ID NO: 1888172
ggugauaucuuggcagcac

SEQ ID NO: 2516211 - RNA, 19 nt, Artificial Sequence
  Description of Artificial Sequence: Synthetic oligonucleotide
  Antisense strand to SEQ ID NO: 2516210
gugcugccaagauaucacc

SEQ ID NO: 2516212 - RNA, 19 nt, Artificial Sequence
  Description of Artificial Sequence: Synthetic oligonucleotide
  Sense strand starting at position 1219 of SEQ ID NO: 1888172
ccgcuuguuugcuugcuua

SEQ ID NO: 2516213 - RNA, 19 nt, Artificial Sequence
  Description of Artificial Sequence: Synthetic oligonucleotide
  Antisense strand to SEQ ID NO: 2516212
uaagcaagcaaacaagcgg

SEQ ID NO: 2516214 - RNA, 19 nt, Artificial Sequence
  Description of Artificial Sequence: Synthetic oligonucleotide
  Sense strand starting at position 1221 of SEQ ID NO: 1888172
gcuuguuugcuugcuuauu

SEQ ID NO: 2516215 - RNA, 19 nt, Artificial Sequence
  Description of Artificial Sequence: Synthetic oligonucleotide
  Antisense strand to SEQ ID NO: 2516214
aauaagcaagcaaacaagc

SEQ ID NO: 2516216 - RNA, 19 nt, Artificial Sequence
  Description of Artificial Sequence: Synthetic oligonucleotide
  Sense strand starting at position 1637 of SEQ ID NO: 1888172
ggugcuuuggaggagggau

SEQ ID NO: 2516217 - RNA, 19 nt, Artificial Sequence
  Description of Artificial Sequence: Synthetic oligonucleotide
  Antisense strand to SEQ ID NO: 2516216
aucccuccuccaaagcacc

SEQ ID NO: 2516218 - RNA, 19 nt, Artificial Sequence
  Description of Artificial Sequence: Synthetic oligonucleotide
  Sense strand starting at position 1649 of SEQ ID NO: 1888172
gagggauucugggaaacac

SEQ ID NO: 2516219 - RNA, 19 nt, Artificial Sequence
  Description of Artificial Sequence: Synthetic oligonucleotide
  Antisense strand to SEQ ID NO: 2516218
guguuucccagaaucccuc

SEQ ID NO: 2516220 - RNA, 19 nt, Artificial Sequence
  Description of Artificial Sequence: Synthetic oligonucleotide
  Sense strand starting at position 1674 of SEQ ID NO: 1888172
ggaggagaaucccacagua

SEQ ID NO: 2516221 - RNA, 19 nt, Artificial Sequence
  Description of Artificial Sequence: Synthetic oligonucleotide
  Antisense strand to SEQ ID NO: 2516220
uacugugggauucuccucc

SEQ ID NO: 2516222 - RNA, 19 nt, Artificial Sequence
  Description of Artificial Sequence: Synthetic oligonucleotide
  Sense strand starting at position 1763 of SEQ ID NO: 1888172
cggagagacuucccagaug

SEQ ID NO: 2516223 - RNA, 19 nt, Artificial Sequence
  Description of Artificial Sequence: Synthetic oligonucleotide
  Antisense strand to SEQ ID NO: 2516222
caucugggaagucucuccg

SEQ ID NO: 2516224 - RNA, 19 nt, Artificial Sequence
  Description of Artificial Sequence: Synthetic oligonucleotide
  Sense strand starting at position 1785 of SEQ ID NO: 1888172
ggaagauccuccugcugaa

SEQ ID NO: 2516225 - RNA, 19 nt, Artificial Sequence
  Description of Artificial Sequence: Synthetic oligonucleotide
  Antisense strand to SEQ ID NO: 2516224
uucagcaggaggaucuucc

SEQ ID NO: 2516226 - RNA, 19 nt, Artificial Sequence
  Description of Artificial Sequence: Synthetic oligonucleotide
  Sense strand starting at position 1805 of SEQ ID NO: 1888172
ggaugaagucccugagcaa

SEQ ID NO: 2516227 - RNA, 19 nt, Artificial Sequence
  Description of Artificial Sequence: Synthetic oligonucleotide
  Antisense strand to SEQ ID NO: 2516226
uugcucagggacuucaucc

SEQ ID NO: 2516228 - RNA, 19 nt, Artificial Sequence
  Description of Artificial Sequence: Synthetic oligonucleotide
  Sense strand starting at position 1806 of SEQ ID NO: 1888172
gaugaagucccugagcaau

SEQ ID NO: 2516229 - RNA, 19 nt, Artificial Sequence
  Description of Artificial Sequence: Synthetic oligonucleotide
  Antisense strand to SEQ ID NO: 2516228
auugcucagggacuucauc

SEQ ID NO: 2516230 - RNA, 19 nt, Artificial Sequence
  Description of Artificial Sequence: Synthetic oligonucleotide
  Sense strand starting at position 1831 of SEQ ID NO: 1888172
cuagcagugucaccagaua

SEQ ID NO: 2516231 - RNA, 19 nt, Artificial Sequence
  Description of Artificial Sequence: Synthetic oligonucleotide
  Antisense strand to SEQ ID NO: 2516230
uaucuggugacacugcuag

SEQ ID NO: 2516232 - RNA, 19 nt, Artificial Sequence
  Description of Artificial Sequence: Synthetic oligonucleotide
  Sense strand starting at position 1934 of SEQ ID NO: 1888172
gggauauacuuauaccuaa

SEQ ID NO: 2516233 - RNA, 19 nt, Artificial Sequence
  Description of Artificial Sequence: Synthetic oligonucleotide
  Antisense strand to SEQ ID NO: 2516232
uuagguauaaguauauccc

SEQ ID NO: 2516234 - RNA, 19 nt, Artificial Sequence
  Description of Artificial Sequence: Synthetic oligonucleotide
  Sense strand starting at position 2307 of SEQ ID NO: 1888172
gggcaugcuauuugugagu

SEQ ID NO: 2516235 - RNA, 19 nt, Artificial Sequence
  Description of Artificial Sequence: Synthetic oligonucleotide
  Antisense strand to SEQ ID NO: 2516234
acucacaaauagcaugccc

SEQ ID NO: 2516236 - RNA, 19 nt, Artificial Sequence
  Description of Artificial Sequence: Synthetic oligonucleotide
  Sense strand starting at position 2309 of SEQ ID NO: 1888172
gcaugcuauuugugagugu

SEQ ID NO: 2516237 - RNA, 19 nt, Artificial Sequence
  Description of Artificial Sequence: Synthetic oligonucleotide
  Antisense strand to SEQ ID NO: 2516236
acacucacaaauagcaugc

SEQ ID NO: 2516238 - RNA, 19 nt, Artificial Sequence
  Description of Artificial Sequence: Synthetic oligonucleotide
  Sense strand starting at position 2364 of SEQ ID NO: 1888172
cuaagucggucucugcuaa

SEQ ID NO: 2516239 - RNA, 19 nt, Artificial Sequence
  Description of Artificial Sequence: Synthetic oligonucleotide
  Antisense strand to SEQ ID NO: 2516238
uuagcagagaccgacuuag

SEQ ID NO: 2516240 - RNA, 19 nt, Artificial Sequence
  Description of Artificial Sequence: Synthetic oligonucleotide
  Sense strand starting at position 2368 of SEQ ID NO: 1888172
gucggucucugcuaaggga

SEQ ID NO: 2516241 - RNA, 19 nt, Artificial Sequence
  Description of Artificial Sequence: Synthetic oligonucleotide
  Antisense strand to SEQ ID NO: 2516240
ucccuuagcagagaccgac

SEQ ID NO: 2516242 - RNA, 19 nt, Artificial Sequence
  Description of Artificial Sequence: Synthetic oligonucleotide
  Sense strand starting at position 2403 of SEQ ID NO: 1888172
gcaggugagccuugggcaa

SEQ ID NO: 2516243 - RNA, 19 nt, Artificial Sequence
  Description of Artificial Sequence: Synthetic oligonucleotide
  Antisense strand to SEQ ID NO: 2516242
uugcccaaggcucaccugc

SEQ ID NO: 2516244 - RNA, 19 nt, Artificial Sequence
  Description of Artificial Sequence: Synthetic oligonucleotide
  Sense strand starting at position 2769 of SEQ ID NO: 1888172
cccugaugauggcaggaaa

SEQ ID NO: 2516245 - RNA, 19 nt, Artificial Sequence
  Description of Artificial Sequence: Synthetic oligonucleotide
  Antisense strand to SEQ ID NO: 2516244
uuuccugccaucaucaggg

SEQ ID NO: 2516246 - RNA, 19 nt, Artificial Sequence
  Description of Artificial Sequence: Synthetic oligonucleotide
  Sense strand starting at position 2992 of SEQ ID NO: 1888172
gcauuacuucuagaaccga

SEQ ID NO: 2516247 - RNA, 19 nt, Artificial Sequence
  Description of Artificial Sequence: Synthetic oligonucleotide
  Antisense strand to SEQ ID NO: 2516246
ucgguucuagaaguaaugc

SEQ ID NO: 2516248 - RNA, 19 nt, Artificial Sequence
  Description of Artificial Sequence: Synthetic oligonucleotide
  Sense strand starting at position 3033 of SEQ ID NO: 1888172
aaacgugugaacugcugua

SEQ ID NO: 2516249 - RNA, 19 nt, Artificial Sequence
  Description of Artificial Sequence: Synthetic oligonucleotide
  Antisense strand to SEQ ID NO: 2516248
uacagcaguucacacguuu

SEQ ID NO: 2516250 - RNA, 19 nt, Artificial Sequence
  Description of Artificial Sequence: Synthetic oligonucleotide
  Sense strand starting at position 3063 of SEQ ID NO: 1888172
gaaguuaacucagugcaac

SEQ ID NO: 2516251 - RNA, 19 nt, Artificial Sequence
  Description of Artificial Sequence: Synthetic oligonucleotide
  Antisense strand to SEQ ID NO: 2516250
guugcacugaguuaacuuc

SEQ ID NO: 2516252 - RNA, 19 nt, Artificial Sequence
  Description of Artificial Sequence: Synthetic oligonucleotide
  Sense strand starting at position 3083 of SEQ ID NO: 1888172
ugaagaggcuauuccauaa

SEQ ID NO: 2516253 - RNA, 19 nt, Artificial Sequence
  Description of Artificial Sequence: Synthetic oligonucleotide
  Antisense strand to SEQ ID NO: 2516252
uuauggaauagccucuuca

SEQ ID NO: 2516254 - RNA, 19 nt, Artificial Sequence
  Description of Artificial Sequence: Synthetic oligonucleotide
  Sense strand starting at position 3102 of SEQ ID NO: 1888172
accucuaguucugagaaag

SEQ ID NO: 2516255 - RNA, 19 nt, Artificial Sequence
  Description of Artificial Sequence: Synthetic oligonucleotide
  Antisense strand to SEQ ID NO: 2516254
cuuucucagaacuagaggu

SEQ ID NO: 2516256 - RNA, 19 nt, Artificial Sequence
  Description of Artificial Sequence: Synthetic oligonucleotide
  Sense strand starting at position 3119 of SEQ ID NO: 1888172
agagucacaccgugacaua

SEQ ID NO: 2516257 - RNA, 19 nt, Artificial Sequence
  Description of Artificial Sequence: Synthetic oligonucleotide
  Antisense strand to SEQ ID NO: 2516256
uaugucacggugugacucu

SEQ ID NO: 2516258 - RNA, 19 nt, Artificial Sequence
  Description of Artificial Sequence: Synthetic oligonucleotide
  Sense strand starting at position 3177 of SEQ ID NO: 1888172
aaggcuaucugggugggaa

SEQ ID NO: 2516259 - RNA, 19 nt, Artificial Sequence
  Description of Artificial Sequence: Synthetic oligonucleotide
  Antisense strand to SEQ ID NO: 2516258
uucccacccagauagccuu

SEQ ID NO: 2516260 - RNA, 19 nt, Artificial Sequence
  Description of Artificial Sequence: Synthetic oligonucleotide
  Sense strand starting at position 3237 of SEQ ID NO: 1888172
ugucuuuguggcguccaga

SEQ ID NO: 2516261 - RNA, 19 nt, Artificial Sequence
  Description of Artificial Sequence: Synthetic oligonucleotide
  Antisense strand to SEQ ID NO: 2516260
ucuggacgccacaaagaca

SEQ ID NO: 2516262 - RNA, 19 nt, Artificial Sequence
  Description of Artificial Sequence: Synthetic oligonucleotide
  Sense strand starting at position 3480 of SEQ ID NO: 1888172
cagggaaguuccuaguuaa

SEQ ID NO: 2516263 - RNA, 19 nt, Artificial Sequence
  Description of Artificial Sequence: Synthetic oligonucleotide
  Antisense strand to SEQ ID NO: 2516262
uuaacuaggaacuucccug

SEQ ID NO: 2516264 - RNA, 19 nt, Artificial Sequence
  Description of Artificial Sequence: Synthetic oligonucleotide
  Sense strand starting at position 3483 of SEQ ID NO: 1888172
ggaaguuccuaguuaauuc

SEQ ID NO: 2516265 - RNA, 19 nt, Artificial Sequence
  Description of Artificial Sequence: Synthetic oligonucleotide
  Antisense strand to SEQ ID NO: 2516264
gaauuaacuaggaacuucc

SEQ ID NO: 2516266 - RNA, 19 nt, Artificial Sequence
  Description of Artificial Sequence: Synthetic oligonucleotide
  Sense strand starting at position 3518 of SEQ ID NO: 1888172
aguagcuucuacuguuauu

SEQ ID NO: 2516267 - RNA, 19 nt, Artificial Sequence
  Description of Artificial Sequence: Synthetic oligonucleotide
  Antisense strand to SEQ ID NO: 2516266
aauaacaguagaagcuacu

SEQ ID NO: 2516268 - RNA, 19 nt, Artificial Sequence
  Description of Artificial Sequence: Synthetic oligonucleotide
  Sense strand starting at position 3521 of SEQ ID NO: 1888172
agcuucuacuguuauuaua

SEQ ID NO: 2516269 - RNA, 19 nt, Artificial Sequence
  Description of Artificial Sequence: Synthetic oligonucleotide
  Antisense strand to SEQ ID NO: 2516268
uauaauaacaguagaagcu

SEQ ID NO: 2516270 - RNA, 19 nt, Artificial Sequence
  Description of Artificial Sequence: Synthetic oligonucleotide
  Sense strand starting at position 3966 of SEQ ID NO: 1888172
guggccuucugagcccaaa

SEQ ID NO: 2516271 - RNA, 19 nt, Artificial Sequence
  Description of Artificial Sequence: Synthetic oligonucleotide
  Antisense strand to SEQ ID NO: 2516270
uuugggcucagaaggccac

SEQ ID NO: 2516272 - RNA, 19 nt, Artificial Sequence
  Description of Artificial Sequence: Synthetic oligonucleotide
  Sense strand starting at position 101 of SEQ ID NO: 1888173
gacacuguucuuggcauga

SEQ ID NO: 2516273 - RNA, 19 nt, Artificial Sequence
  Description of Artificial Sequence: Synthetic oligonucleotide
  Antisense strand to SEQ ID NO: 2516272
ucaugccaagaacaguguc

SEQ ID NO: 2516274 - RNA, 19 nt, Artificial Sequence
  Description of Artificial Sequence: Synthetic oligonucleotide
  Sense strand starting at position 111 of SEQ ID NO: 1888173
uuggcaugauguuugcaca

SEQ ID NO: 2516275 - RNA, 19 nt, Artificial Sequence
  Description of Artificial Sequence: Synthetic oligonucleotide
  Antisense strand to SEQ ID NO: 2516274
ugugcaaacaucaugccaa

SEQ ID NO: 2516276 - RNA, 19 nt, Artificial Sequence
  Description of Artificial Sequence: Synthetic oligonucleotide
  Sense strand starting at position 112 of SEQ ID NO: 1888173
uggcaugauguuugcacaa

SEQ ID NO: 2516277 - RNA, 19 nt, Artificial Sequence
  Description of Artificial Sequence: Synthetic oligonucleotide
  Antisense strand to SEQ ID NO: 2516276
uugugcaaacaucaugcca

SEQ ID NO: 2516278 - RNA, 19 nt, Artificial Sequence
  Description of Artificial Sequence: Synthetic oligonucleotide
  Sense strand starting at position 114 of SEQ ID NO: 1888173
gcaugauguuugcacaaau

SEQ ID NO: 2516279 - RNA, 19 nt, Artificial Sequence
  Description of Artificial Sequence: Synthetic oligonucleotide
  Antisense strand to SEQ ID NO: 2516278
auuugugcaaacaucaugc

SEQ ID NO: 2516280 - RNA, 19 nt, Artificial Sequence
  Description of Artificial Sequence: Synthetic oligonucleotide
  Sense strand starting at position 147 of SEQ ID NO: 1888173
cgggagugguucccugagu

SEQ ID NO: 2516281 - RNA, 19 nt, Artificial Sequence
  Description of Artificial Sequence: Synthetic oligonucleotide
  Antisense strand to SEQ ID NO: 2516280
acucagggaaccacucccg

SEQ ID NO: 2516282 - RNA, 19 nt, Artificial Sequence
  Description of Artificial Sequence: Synthetic oligonucleotide
  Sense strand starting at position 148 of SEQ ID NO: 1888173
gggagugguucccugaguc

SEQ ID NO: 2516283 - RNA, 19 nt, Artificial Sequence
  Description of Artificial Sequence: Synthetic oligonucleotide
  Antisense strand to SEQ ID NO: 2516282
gacucagggaaccacuccc

SEQ ID NO: 2516284 - RNA, 19 nt, Artificial Sequence
  Description of Artificial Sequence: Synthetic oligonucleotide
  Sense strand starting at position 175 of SEQ ID NO: 1888173
ggugauguauuugacagag

SEQ ID NO: 2516285 - RNA, 19 nt, Artificial Sequence
  Description of Artificial Sequence: Synthetic oligonucleotide
  Antisense strand to SEQ ID NO: 2516284
cucugucaaauacaucacc

SEQ ID NO: 2516286 - RNA, 19 nt, Artificial Sequence
  Description of Artificial Sequence: Synthetic oligonucleotide
  Sense strand starting at position 177 of SEQ ID NO: 1888173
ugauguauuugacagagga

SEQ ID NO: 2516287 - RNA, 19 nt, Artificial Sequence
  Description of Artificial Sequence: Synthetic oligonucleotide
  Antisense strand to SEQ ID NO: 2516286
uccucugucaaauacauca

SEQ ID NO: 2516288 - RNA, 19 nt, Artificial Sequence
  Description of Artificial Sequence: Synthetic oligonucleotide
  Sense strand starting at position 532 of SEQ ID NO: 1888173
cucagagaggcuugaauaa

SEQ ID NO: 2516289 - RNA, 19 nt, Artificial Sequence
  Description of Artificial Sequence: Synthetic oligonucleotide
  Antisense strand to SEQ ID NO: 2516288
uuauucaagccucucugag

SEQ ID NO: 2516290 - RNA, 19 nt, Artificial Sequence
  Description of Artificial Sequence: Synthetic oligonucleotide
  Sense strand starting at position 695 of SEQ ID NO: 1888173
uagcgacucugugugaaga

SEQ ID NO: 2516291 - RNA, 19 nt, Artificial Sequence
  Description of Artificial Sequence: Synthetic oligonucleotide
  Antisense strand to SEQ ID NO: 2516290
ucuucacacagagucgcua

SEQ ID NO: 2516292 - RNA, 19 nt, Artificial Sequence
  Description of Artificial Sequence: Synthetic oligonucleotide
  Sense strand starting at position 754 of SEQ ID NO: 1888173
cuaggaauuagaggcacua

SEQ ID NO: 2516293 - RNA, 19 nt, Artificial Sequence
  Description of Artificial Sequence: Synthetic oligonucleotide
  Antisense strand to SEQ ID NO: 2516292
uagugccucuaauuccuag

SEQ ID NO: 2516294 - RNA, 19 nt, Artificial Sequence
  Description of Artificial Sequence: Synthetic oligonucleotide
  Sense strand starting at position 840 of SEQ ID NO: 1888173
cuucuauccguccaucagu

SEQ ID NO: 2516295 - RNA, 19 nt, Artificial Sequence
  Description of Artificial Sequence: Synthetic oligonucleotide
  Antisense strand to SEQ ID NO: 2516294
acugauggacggauagaag

SEQ ID NO: 2516296 - RNA, 19 nt, Artificial Sequence
  Description of Artificial Sequence: Synthetic oligonucleotide
  Sense strand starting at position 1630 of SEQ ID NO: 1888173
aagcaaagcucuuguguga

SEQ ID NO: 2516297 - RNA, 19 nt, Artificial Sequence
  Description of Artificial Sequence: Synthetic oligonucleotide
  Antisense strand to SEQ ID NO: 2516296
ucacacaagagcuuugcuu

SEQ ID NO: 2516298 - RNA, 19 nt, Artificial Sequence
  Description of Artificial Sequence: Synthetic oligonucleotide
  Sense strand starting at position 1634 of SEQ ID NO: 1888173
aaagcucuugugugagcaa

SEQ ID NO: 2516299 - RNA, 19 nt, Artificial Sequence
  Description of Artificial Sequence: Synthetic oligonucleotide
  Antisense strand to SEQ ID NO: 2516298
uugcucacacaagagcuuu

SEQ ID NO: 2516300 - RNA, 19 nt, Artificial Sequence
  Description of Artificial Sequence: Synthetic oligonucleotide
  Sense strand starting at position 1635 of SEQ ID NO: 1888173
aagcucuugugugagcaau

SEQ ID NO: 2516301 - RNA, 19 nt, Artificial Sequence
  Description of Artificial Sequence: Synthetic oligonucleotide
  Antisense strand to SEQ ID NO: 2516300
auugcucacacaagagcuu

SEQ ID NO: 2516302 - RNA, 19 nt, Artificial Sequence
  Description of Artificial Sequence: Synthetic oligonucleotide
  Sense strand starting at position 1637 of SEQ ID NO: 1888173
gcucuugugugagcaauga

SEQ ID NO: 2516303 - RNA, 19 nt, Artificial Sequence
  Description of Artificial Sequence: Synthetic oligonucleotide
  Antisense strand to SEQ ID NO: 2516302
ucauugcucacacaagagc

SEQ ID NO: 2516304 - RNA, 19 nt, Artificial Sequence
  Description of Artificial Sequence: Synthetic oligonucleotide
  Sense strand starting at position 1641 of SEQ ID NO: 1888173
uugugugagcaaugaacau

SEQ ID NO: 2516305 - RNA, 19 nt, Artificial Sequence
  Description of Artificial Sequence: Synthetic oligonucleotide
  Antisense strand to SEQ ID NO: 2516304
auguucauugcucacacaa

SEQ ID NO: 2516306 - RNA, 19 nt, Artificial Sequence
  Description of Artificial Sequence: Synthetic oligonucleotide
  Sense strand starting at position 2014 of SEQ ID NO: 1888173
cagcgacgucggugaagaa

SEQ ID NO: 2516307 - RNA, 19 nt, Artificial Sequence
  Description of Artificial Sequence: Synthetic oligonucleotide
  Antisense strand to SEQ ID NO: 2516306
uucuucaccgacgucgcug

SEQ ID NO: 2516308 - RNA, 19 nt, Artificial Sequence
  Description of Artificial Sequence: Synthetic oligonucleotide
  Sense strand starting at position 2121 of SEQ ID NO: 1888173
uggaguuucccucaagcuc

SEQ ID NO: 2516309 - RNA, 19 nt, Artificial Sequence
  Description of Artificial Sequence: Synthetic oligonucleotide
  Antisense strand to SEQ ID NO: 2516308
gagcuugagggaaacucca

SEQ ID NO: 2516310 - RNA, 19 nt, Artificial Sequence
  Description of Artificial Sequence: Synthetic oligonucleotide
  Sense strand starting at position 2401 of SEQ ID NO: 1888173
uagccucagcugugggaua

SEQ ID NO: 2516311 - RNA, 19 nt, Artificial Sequence
  Description of Artificial Sequence: Synthetic oligonucleotide
  Antisense strand to SEQ ID NO: 2516310
uaucccacagcugaggcua

SEQ ID NO: 2516312 - RNA, 19 nt, Artificial Sequence
  Description of Artificial Sequence: Synthetic oligonucleotide
  Sense strand starting at position 2469 of SEQ ID NO: 1888173
agugaucuugcagguuuga

SEQ ID NO: 2516313 - RNA, 19 nt, Artificial Sequence
  Description of Artificial Sequence: Synthetic oligonucleotide
  Antisense strand to SEQ ID NO: 2516312
ucaaaccugcaagaucacu

SEQ ID NO: 2516314 - RNA, 19 nt, Artificial Sequence
  Description of Artificial Sequence: Synthetic oligonucleotide
  Sense strand starting at position 2685 of SEQ ID NO: 1888173
ggaagauuccagggacguc

SEQ ID NO: 2516315 - RNA, 19 nt, Artificial Sequence
  Description of Artificial Sequence: Synthetic oligonucleotide
  Antisense strand to SEQ ID NO: 2516314
gacgucccuggaaucuucc

SEQ ID NO: 2516316 - RNA, 19 nt, Artificial Sequence
  Description of Artificial Sequence: Synthetic oligonucleotide
  Sense strand starting at position 3037 of SEQ ID NO: 1888173
gcuucuauccgggagcaca

SEQ ID NO: 2516317 - RNA, 19 nt, Artificial Sequence
  Description of Artificial Sequence: Synthetic oligonucleotide
  Antisense strand to SEQ ID NO: 2516316
ugugcucccggauagaagc

SEQ ID NO: 2516318 - RNA, 19 nt, Artificial Sequence
  Description of Artificial Sequence: Synthetic oligonucleotide
  Sense strand starting at position 3208 of SEQ ID NO: 1888173
cugacauugcagggacaga

SEQ ID NO: 2516319 - RNA, 19 nt, Artificial Sequence
  Description of Artificial Sequence: Synthetic oligonucleotide
  Antisense strand to SEQ ID NO: 2516318
ucugucccugcaaugucag

SEQ ID NO: 2516320 - RNA, 19 nt, Artificial Sequence
  Description of Artificial Sequence: Synthetic oligonucleotide
  Sense strand starting at position 3383 of SEQ ID NO: 1888173
cggugcccuccagaaagau

SEQ ID NO: 2516321 - RNA, 19 nt, Artificial Sequence
  Description of Artificial Sequence: Synthetic oligonucleotide
  Antisense strand to SEQ ID NO: 2516320
aucuuucuggagggcaccg

SEQ ID NO: 2516322 - RNA, 19 nt, Artificial Sequence
  Description of Artificial Sequence: Synthetic oligonucleotide
  Sense strand starting at position 3646 of SEQ ID NO: 1888173
guccauuuaucgccuguca

SEQ ID NO: 2516323 - RNA, 19 nt, Artificial Sequence
  Description of Artificial Sequence: Synthetic oligonucleotide
  Antisense strand to SEQ ID NO: 2516322
ugacaggcgauaaauggac

SEQ ID NO: 2516324 - RNA, 19 nt, Artificial Sequence
  Description of Artificial Sequence: Synthetic oligonucleotide
  Sense strand starting at position 3648 of SEQ ID NO: 1888173
ccauuuaucgccugucaau

SEQ ID NO: 2516325 - RNA, 19 nt, Artificial Sequence
  Description of Artificial Sequence: Synthetic oligonucleotide
  Antisense strand to SEQ ID NO: 2516324
auugacaggcgauaaaugg

SEQ ID NO: 2516326 - RNA, 19 nt, Artificial Sequence
  Description of Artificial Sequence: Synthetic oligonucleotide
  Sense strand starting at position 3651 of SEQ ID NO: 1888173
uuuaucgccugucaauauu

SEQ ID NO: 2516327 - RNA, 19 nt, Artificial Sequence
  Description of Artificial Sequence: Synthetic oligonucleotide
  Antisense strand to SEQ ID NO: 2516326
aauauugacaggcgauaaa

SEQ ID NO: 2516328 - RNA, 19 nt, Artificial Sequence
  Description of Artificial Sequence: Synthetic oligonucleotide
  Sense strand starting at position 3660 of SEQ ID NO: 1888173
ugucaauauuccuaaugga

SEQ ID NO: 2516329 - RNA, 19 nt, Artificial Sequence
  Description of Artificial Sequence: Synthetic oligonucleotide
  Antisense strand to SEQ ID NO: 2516328
uccauuaggaauauugaca

SEQ ID NO: 2516330 - RNA, 19 nt, Artificial Sequence
  Description of Artificial Sequence: Synthetic oligonucleotide
  Sense strand starting at position 3678 of SEQ ID NO: 1888173
agcagaagauuugacaaga

SEQ ID NO: 2516331 - RNA, 19 nt, Artificial Sequence
  Description of Artificial Sequence: Synthetic oligonucleotide
  Antisense strand to SEQ ID NO: 2516330
ucuugucaaaucuucugcu

SEQ ID NO: 2516332 - RNA, 19 nt, Artificial Sequence
  Description of Artificial Sequence: Synthetic oligonucleotide
  Sense strand starting at position 3721 of SEQ ID NO: 1888173
ccgcgauucuaucccauca

SEQ ID NO: 2516333 - RNA, 19 nt, Artificial Sequence
  Description of Artificial Sequence: Synthetic oligonucleotide
  Antisense strand to SEQ ID NO: 2516332
ugaugggauagaaucgcgg

SEQ ID NO: 2516334 - RNA, 19 nt, Artificial Sequence
  Description of Artificial Sequence: Synthetic oligonucleotide
  Sense strand starting at position 3752 of SEQ ID NO: 1888173
ucuggcauuugccaaucaa

SEQ ID NO: 2516335 - RNA, 19 nt, Artificial Sequence
  Description of Artificial Sequence: Synthetic oligonucleotide
  Antisense strand to SEQ ID NO: 2516334
uugauuggcaaaugccaga

SEQ ID NO: 2516336 - RNA, 19 nt, Artificial Sequence
  Description of Artificial Sequence: Synthetic oligonucleotide
  Sense strand starting at position 3899 of SEQ ID NO: 1888173
gugggcgugagcugugaau

SEQ ID NO: 2516337 - RNA, 19 nt, Artificial Sequence
  Description of Artificial Sequence: Synthetic oligonucleotide
  Antisense strand to SEQ ID NO: 2516336
auucacagcucacgcccac

SEQ ID NO: 2516338 - RNA, 19 nt, Artificial Sequence
  Description of Artificial Sequence: Synthetic oligonucleotide
  Sense strand starting at position 3901 of SEQ ID NO: 1888173
gggcgugagcugugaauag

SEQ ID NO: 2516339 - RNA, 19 nt, Artificial Sequence
  Description of Artificial Sequence: Synthetic oligonucleotide
  Antisense strand to SEQ ID NO: 2516338
cuauucacagcucacgccc

SEQ ID NO: 2516340 - RNA, 19 nt, Artificial Sequence
  Description of Artificial Sequence: Synthetic oligonucleotide
  Sense strand starting at position 3902 of SEQ ID NO: 1888173
ggcgugagcugugaauaga

SEQ ID NO: 2516341 - RNA, 19 nt, Artificial Sequence
  Description of Artificial Sequence: Synthetic oligonucleotide
  Antisense strand to SEQ ID NO: 2516340
ucuauucacagcucacgcc

SEQ ID NO: 2516342 - RNA, 19 nt, Artificial Sequence
  Description of Artificial Sequence: Synthetic oligonucleotide
  Sense strand starting at position 215 of SEQ ID NO: 1888174
aagcgauuggccuguguca

SEQ ID NO: 2516343 - RNA, 19 nt, Artificial Sequence
  Description of Artificial Sequence: Synthetic oligonucleotide
  Antisense strand to SEQ ID NO: 2516342
ugacacaggccaaucgcuu

SEQ ID NO: 2516344 - RNA, 19 nt, Artificial Sequence
  Description of Artificial Sequence: Synthetic oligonucleotide
  Sense strand starting at position 217 of SEQ ID NO: 1888174
gcgauuggccugugucaac

SEQ ID NO: 2516345 - RNA, 19 nt, Artificial Sequence
  Description of Artificial Sequence: Synthetic oligonucleotide
  Antisense strand to SEQ ID NO: 2516344
guugacacaggccaaucgc

SEQ ID NO: 2516346 - RNA, 19 nt, Artificial Sequence
  Description of Artificial Sequence: Synthetic oligonucleotide
  Sense strand starting at position 331 of SEQ ID NO: 1888174
auuugaucaucugguugua

SEQ ID NO: 2516347 - RNA, 19 nt, Artificial Sequence
  Description of Artificial Sequence: Synthetic oligonucleotide
  Antisense strand to SEQ ID NO: 2516346
uacaaccagaugaucaaau

SEQ ID NO: 2516348 - RNA, 19 nt, Artificial Sequence
  Description of Artificial Sequence: Synthetic oligonucleotide
  Sense strand starting at position 333 of SEQ ID NO: 1888174
uugaucaucugguuguaaa

SEQ ID NO: 2516349 - RNA, 19 nt, Artificial Sequence
  Description of Artificial Sequence: Synthetic oligonucleotide
  Antisense strand to SEQ ID NO: 2516348
uuuacaaccagaugaucaa

SEQ ID NO: 2516350 - RNA, 19 nt, Artificial Sequence
  Description of Artificial Sequence: Synthetic oligonucleotide
  Sense strand starting at position 334 of SEQ ID NO: 1888174
ugaucaucugguuguaaag

SEQ ID NO: 2516351 - RNA, 19 nt, Artificial Sequence
  Description of Artificial Sequence: Synthetic oligonucleotide
  Antisense strand to SEQ ID NO: 2516350
cuuuacaaccagaugauca

SEQ ID NO: 2516352 - RNA, 19 nt, Artificial Sequence
  Description of Artificial Sequence: Synthetic oligonucleotide
  Sense strand starting at position 369 of SEQ ID NO: 1888174
auaggagauguaggucagu

SEQ ID NO: 2516353 - RNA, 19 nt, Artificial Sequence
  Description of Artificial Sequence: Synthetic oligonucleotide
  Antisense strand to SEQ ID NO: 2516352
acugaccuacaucuccuau

SEQ ID NO: 2516354 - RNA, 19 nt, Artificial Sequence
  Description of Artificial Sequence: Synthetic oligonucleotide
  Sense strand starting at position 372 of SEQ ID NO: 1888174
ggagauguaggucaguaca

SEQ ID NO: 2516355 - RNA, 19 nt, Artificial Sequence
  Description of Artificial Sequence: Synthetic oligonucleotide
  Antisense strand to SEQ ID NO: 2516354
uguacugaccuacaucucc

SEQ ID NO: 2516356 - RNA, 19 nt, Artificial Sequence
  Description of Artificial Sequence: Synthetic oligonucleotide
  Sense strand starting at position 374 of SEQ ID NO: 1888174
agauguaggucaguacaaa

SEQ ID NO: 2516357 - RNA, 19 nt, Artificial Sequence
  Description of Artificial Sequence: Synthetic oligonucleotide
  Antisense strand to SEQ ID NO: 2516356
uuuguacugaccuacaucu

SEQ ID NO: 2516358 - RNA, 19 nt, Artificial Sequence
  Description of Artificial Sequence: Synthetic oligonucleotide
  Sense strand starting at position 375 of SEQ ID NO: 1888174
gauguaggucaguacaaac

SEQ ID NO: 2516359 - RNA, 19 nt, Artificial Sequence
  Description of Artificial Sequence: Synthetic oligonucleotide
  Antisense strand to SEQ ID NO: 2516358
guuuguacugaccuacauc

SEQ ID NO: 2516360 - RNA, 19 nt, Artificial Sequence
  Description of Artificial Sequence: Synthetic oligonucleotide
  Sense strand starting at position 481 of SEQ ID NO: 1888174
ccauuaccgugggcugaau

SEQ ID NO: 2516361 - RNA, 19 nt, Artificial Sequence
  Description of Artificial Sequence: Synthetic oligonucleotide
  Antisense strand to SEQ ID NO: 2516360
auucagcccacgguaaugg

SEQ ID NO: 2516362 - RNA, 19 nt, Artificial Sequence
  Description of Artificial Sequence: Synthetic oligonucleotide
  Sense strand starting at position 527 of SEQ ID NO: 1888174
ucagaucaguguugcucaa

SEQ ID NO: 2516363 - RNA, 19 nt, Artificial Sequence
  Description of Artificial Sequence: Synthetic oligonucleotide
  Antisense strand to SEQ ID NO: 2516362
uugagcaacacugaucuga

SEQ ID NO: 2516364 - RNA, 19 nt, Artificial Sequence
  Description of Artificial Sequence: Synthetic oligonucleotide
  Sense strand starting at position 529 of SEQ ID NO: 1888174
agaucaguguugcucaagu

SEQ ID NO: 2516365 - RNA, 19 nt, Artificial Sequence
  Description of Artificial Sequence: Synthetic oligonucleotide
  Antisense strand to SEQ ID NO: 2516364
acuugagcaacacugaucu

SEQ ID NO: 2516366 - RNA, 19 nt, Artificial Sequence
  Description of Artificial Sequence: Synthetic oligonucleotide
  Sense strand starting at position 531 of SEQ ID NO: 1888174
aucaguguugcucaaguuu

SEQ ID NO: 2516367 - RNA, 19 nt, Artificial Sequence
  Description of Artificial Sequence: Synthetic oligonucleotide
  Antisense strand to SEQ ID NO: 2516366
aaacuugagcaacacugau

SEQ ID NO: 2516368 - RNA, 19 nt, Artificial Sequence
  Description of Artificial Sequence: Synthetic oligonucleotide
  Sense strand starting at position 590 of SEQ ID NO: 1888174
cagagauccugacucagug

SEQ ID NO: 2516369 - RNA, 19 nt, Artificial Sequence
  Description of Artificial Sequence: Synthetic oligonucleotide
  Antisense strand to SEQ ID NO: 2516368
cacugagucaggaucucug

SEQ ID NO: 2516370 - RNA, 19 nt, Artificial Sequence
  Description of Artificial Sequence: Synthetic oligonucleotide
  Sense strand starting at position 743 of SEQ ID NO: 1888174
ggcagauuccugggcacua

SEQ ID NO: 2516371 - RNA, 19 nt, Artificial Sequence
  Description of Artificial Sequence: Synthetic oligonucleotide
  Antisense strand to SEQ ID NO: 2516370
uagugcccaggaaucugcc

SEQ ID NO: 2516372 - RNA, 19 nt, Artificial Sequence
  Description of Artificial Sequence: Synthetic oligonucleotide
  Sense strand starting at position 765 of SEQ ID NO: 1888174
ccgagacauucugauucuc

SEQ ID NO: 2516373 - RNA, 19 nt, Artificial Sequence
  Description of Artificial Sequence: Synthetic oligonucleotide
  Antisense strand to SEQ ID NO: 2516372
gagaaucagaaugucucgg

SEQ ID NO: 2516374 - RNA, 19 nt, Artificial Sequence
  Description of Artificial Sequence: Synthetic oligonucleotide
  Sense strand starting at position 767 of SEQ ID NO: 1888174
gagacauucugauucucag

SEQ ID NO: 2516375 - RNA, 19 nt, Artificial Sequence
  Description of Artificial Sequence: Synthetic oligonucleotide
  Antisense strand to SEQ ID NO: 2516374
cugagaaucagaaugucuc

SEQ ID NO: 2516376 - RNA, 19 nt, Artificial Sequence
  Description of Artificial Sequence: Synthetic oligonucleotide
  Sense strand starting at position 789 of SEQ ID NO: 1888174
caggguggcuccugggaau

SEQ ID NO: 2516377 - RNA, 19 nt, Artificial Sequence
  Description of Artificial Sequence: Synthetic oligonucleotide
  Antisense strand to SEQ ID NO: 2516376
auucccaggagccacccug

SEQ ID NO: 2516378 - RNA, 19 nt, Artificial Sequence
  Description of Artificial Sequence: Synthetic oligonucleotide
  Sense strand starting at position 800 of SEQ ID NO: 1888174
cugggaaucugccauauca

SEQ ID NO: 2516379 - RNA, 19 nt, Artificial Sequence
  Description of Artificial Sequence: Synthetic oligonucleotide
  Antisense strand to SEQ ID NO: 2516378
ugauauggcagauucccag

SEQ ID NO: 2516380 - RNA, 19 nt, Artificial Sequence
  Description of Artificial Sequence: Synthetic oligonucleotide
  Sense strand starting at position 880 of SEQ ID NO: 1888174
accuguaaugcugagguga

SEQ ID NO: 2516381 - RNA, 19 nt, Artificial Sequence
  Description of Artificial Sequence: Synthetic oligonucleotide
  Antisense strand to SEQ ID NO: 2516380
ucaccucagcauuacaggu

SEQ ID NO: 2516382 - RNA, 19 nt, Artificial Sequence
  Description of Artificial Sequence: Synthetic oligonucleotide
  Sense strand starting at position 967 of SEQ ID NO: 1888174
ggcccuaaaucuuggagca

SEQ ID NO: 2516383 - RNA, 19 nt, Artificial Sequence
  Description of Artificial Sequence: Synthetic oligonucleotide
  Antisense strand to SEQ ID NO: 2516382
ugcuccaagauuuagggcc

SEQ ID NO: 2516384 - RNA, 19 nt, Artificial Sequence
  Description of Artificial Sequence: Synthetic oligonucleotide
  Sense strand starting at position 1112 of SEQ ID NO: 1888174
augcaacuagacugguaaa

SEQ ID NO: 2516385 - RNA, 19 nt, Artificial Sequence
  Description of Artificial Sequence: Synthetic oligonucleotide
  Antisense strand to SEQ ID NO: 2516384
uuuaccagucuaguugcau

SEQ ID NO: 2516386 - RNA, 19 nt, Artificial Sequence
  Description of Artificial Sequence: Synthetic oligonucleotide
  Sense strand starting at position 1129 of SEQ ID NO: 1888174
aaaugugggucauuguuga

SEQ ID NO: 2516387 - RNA, 19 nt, Artificial Sequence
  Description of Artificial Sequence: Synthetic oligonucleotide
  Antisense strand to SEQ ID NO: 2516386
ucaacaaugacccacauuu

SEQ ID NO: 2516388 - RNA, 19 nt, Artificial Sequence
  Description of Artificial Sequence: Synthetic oligonucleotide
  Sense strand starting at position 161 of SEQ ID NO: 1888175
gggaaugcuugguccugca

SEQ ID NO: 2516389 - RNA, 19 nt, Artificial Sequence
  Description of Artificial Sequence: Synthetic oligonucleotide
  Antisense strand to SEQ ID NO: 2516388
ugcaggaccaagcauuccc

SEQ ID NO: 2516390 - RNA, 19 nt, Artificial Sequence
  Description of Artificial Sequence: Synthetic oligonucleotide
  Sense strand starting at position 259 of SEQ ID NO: 1888175
ucuccugugcuguaaccaa

SEQ ID NO: 2516391 - RNA, 19 nt, Artificial Sequence
  Description of Artificial Sequence: Synthetic oligonucleotide
  Antisense strand to SEQ ID NO: 2516390
uugguuacagcacaggaga

SEQ ID NO: 2516392 - RNA, 19 nt, Artificial Sequence
  Description of Artificial Sequence: Synthetic oligonucleotide
  Sense strand starting at position 476 of SEQ ID NO: 1888175
ccgcgucugucccaaagua

SEQ ID NO: 2516393 - RNA, 19 nt, Artificial Sequence
  Description of Artificial Sequence: Synthetic oligonucleotide
  Antisense strand to SEQ ID NO: 2516392
uacuuugggacagacgcgg

SEQ ID NO: 2516394 - RNA, 19 nt, Artificial Sequence
  Description of Artificial Sequence: Synthetic oligonucleotide
  Sense strand starting at position 488 of SEQ ID NO: 1888175
caaaguagcggucgccaaa

SEQ ID NO: 2516395 - RNA, 19 nt, Artificial Sequence
  Description of Artificial Sequence: Synthetic oligonucleotide
  Antisense strand to SEQ ID NO: 2516394
uuuggcgaccgcuacuuug

SEQ ID NO: 2516396 - RNA, 19 nt, Artificial Sequence
  Description of Artificial Sequence: Synthetic oligonucleotide
  Sense strand starting at position 500 of SEQ ID NO: 1888175
cgccaaaguucccuggaaa

SEQ ID NO: 2516397 - RNA, 19 nt, Artificial Sequence
  Description of Artificial Sequence: Synthetic oligonucleotide
  Antisense strand to SEQ ID NO: 2516396
uuuccagggaacuuuggcg

SEQ ID NO: 2516398 - RNA, 19 nt, Artificial Sequence
  Description of Artificial Sequence: Synthetic oligonucleotide
  Sense strand starting at position 602 of SEQ ID NO: 1888175
ucaccaaugccugggauga

SEQ ID NO: 2516399 - RNA, 19 nt, Artificial Sequence
  Description of Artificial Sequence: Synthetic oligonucleotide
  Antisense strand to SEQ ID NO: 2516398
ucaucccaggcauugguga

SEQ ID NO: 2516400 - RNA, 19 nt, Artificial Sequence
  Description of Artificial Sequence: Synthetic oligonucleotide
  Sense strand starting at position 603 of SEQ ID NO: 1888175
caccaaugccugggaugau

SEQ ID NO: 2516401 - RNA, 19 nt, Artificial Sequence
  Description of Artificial Sequence: Synthetic oligonucleotide
  Antisense strand to SEQ ID NO: 2516400
aucaucccaggcauuggug

SEQ ID NO: 2516402 - RNA, 19 nt, Artificial Sequence
  Description of Artificial Sequence: Synthetic oligonucleotide
  Sense strand starting at position 662 of SEQ ID NO: 1888175
augauucucacucgcggaa

SEQ ID NO: 2516403 - RNA, 19 nt, Artificial Sequence
  Description of Artificial Sequence: Synthetic oligonucleotide
  Antisense strand to SEQ ID NO: 2516402
uuccgcgagugagaaucau

SEQ ID NO: 2516404 - RNA, 19 nt, Artificial Sequence
  Description of Artificial Sequence: Synthetic oligonucleotide
  Sense strand starting at position 664 of SEQ ID NO: 1888175
gauucucacucgcggaaau

SEQ ID NO: 2516405 - RNA, 19 nt, Artificial Sequence
  Description of Artificial Sequence: Synthetic oligonucleotide
  Antisense strand to SEQ ID NO: 2516404
auuuccgcgagugagaauc

SEQ ID NO: 2516406 - RNA, 19 nt, Artificial Sequence
  Description of Artificial Sequence: Synthetic oligonucleotide
  Sense strand starting at position 734 of SEQ ID NO: 1888175
aagaucuuguccucaggca

SEQ ID NO: 2516407 - RNA, 19 nt, Artificial Sequence
  Description of Artificial Sequence: Synthetic oligonucleotide
  Antisense strand to SEQ ID NO: 2516406
ugccugaggacaagaucuu

SEQ ID NO: 2516408 - RNA, 19 nt, Artificial Sequence
  Description of Artificial Sequence: Synthetic oligonucleotide
  Sense strand starting at position 757 of SEQ ID NO: 1888175
gugguccuaccgaguguau

SEQ ID NO: 2516409 - RNA, 19 nt, Artificial Sequence
  Description of Artificial Sequence: Synthetic oligonucleotide
  Antisense strand to SEQ ID NO: 2516408
auacacucgguaggaccac

SEQ ID NO: 2516410 - RNA, 19 nt, Artificial Sequence
  Description of Artificial Sequence: Synthetic oligonucleotide
  Sense strand starting at position 767 of SEQ ID NO: 1888175
cgaguguauugggcaggua

SEQ ID NO: 2516411 - RNA, 19 nt, Artificial Sequence
  Description of Artificial Sequence: Synthetic oligonucleotide
  Antisense strand to SEQ ID NO: 2516410
uaccugcccaauacacucg

SEQ ID NO: 2516412 - RNA, 19 nt, Artificial Sequence
  Description of Artificial Sequence: Synthetic oligonucleotide
  Sense strand starting at position 768 of SEQ ID NO: 1888175
gaguguauugggcagguaa

SEQ ID NO: 2516413 - RNA, 19 nt, Artificial Sequence
  Description of Artificial Sequence: Synthetic oligonucleotide
  Antisense strand to SEQ ID NO: 2516412
uuaccugcccaauacacuc

SEQ ID NO: 2516414 - RNA, 19 nt, Artificial Sequence
  Description of Artificial Sequence: Synthetic oligonucleotide
  Sense strand starting at position 770 of SEQ ID NO: 1888175
guguauugggcagguaaau

SEQ ID NO: 2516415 - RNA, 19 nt, Artificial Sequence
  Description of Artificial Sequence: Synthetic oligonucleotide
  Antisense strand to SEQ ID NO: 2516414
auuuaccugcccaauacac

SEQ ID NO: 2516416 - RNA, 19 nt, Artificial Sequence
  Description of Artificial Sequence: Synthetic oligonucleotide
  Sense strand starting at position 878 of SEQ ID NO: 1888175
cggugcaguccaugaggau

SEQ ID NO: 2516417 - RNA, 19 nt, Artificial Sequence
  Description of Artificial Sequence: Synthetic oligonucleotide
  Antisense strand to SEQ ID NO: 2516416
auccucauggacugcaccg

SEQ ID NO: 2516418 - RNA, 19 nt, Artificial Sequence
  Description of Artificial Sequence: Synthetic oligonucleotide
  Sense strand starting at position 1070 of SEQ ID NO: 1888175
gguuggucuggaugaggau

SEQ ID NO: 2516419 - RNA, 19 nt, Artificial Sequence
  Description of Artificial Sequence: Synthetic oligonucleotide
  Antisense strand to SEQ ID NO: 2516418
auccucauccagaccaacc

SEQ ID NO: 2516420 - RNA, 19 nt, Artificial Sequence
  Description of Artificial Sequence: Synthetic oligonucleotide
  Sense strand starting at position 1447 of SEQ ID NO: 1888175
gcaucagucucuuggagua

SEQ ID NO: 2516421 - RNA, 19 nt, Artificial Sequence
  Description of Artificial Sequence: Synthetic oligonucleotide
  Antisense strand to SEQ ID NO: 2516420
uacuccaagagacugaugc

SEQ ID NO: 2516422 - RNA, 19 nt, Artificial Sequence
  Description of Artificial Sequence: Synthetic oligonucleotide
  Sense strand starting at position 1449 of SEQ ID NO: 1888175
aucagucucuuggaguaga

SEQ ID NO: 2516423 - RNA, 19 nt, Artificial Sequence
  Description of Artificial Sequence: Synthetic oligonucleotide
  Antisense strand to SEQ ID NO: 2516422
ucuacuccaagagacugau

SEQ ID NO: 2516424 - RNA, 19 nt, Artificial Sequence
  Description of Artificial Sequence: Synthetic oligonucleotide
  Sense strand starting at position 1468 of SEQ ID NO: 1888175
agaugaacucgucgcgacu

SEQ ID NO: 2516425 - RNA, 19 nt, Artificial Sequence
  Description of Artificial Sequence: Synthetic oligonucleotide
  Antisense strand to SEQ ID NO: 2516424
agucgcgacgaguucaucu

SEQ ID NO: 2516426 - RNA, 19 nt, Artificial Sequence
  Description of Artificial Sequence: Synthetic oligonucleotide
  Sense strand starting at position 1564 of SEQ ID NO: 1888175
accugaugauggugugcau

SEQ ID NO: 2516427 - RNA, 19 nt, Artificial Sequence
  Description of Artificial Sequence: Synthetic oligonucleotide
  Antisense strand to SEQ ID NO: 2516426
augcacaccaucaucaggu

SEQ ID NO: 2516428 - RNA, 19 nt, Artificial Sequence
  Description of Artificial Sequence: Synthetic oligonucleotide
  Sense strand starting at position 1859 of SEQ ID NO: 1888175
gaaagauggcggcgaacaa

SEQ ID NO: 2516429 - RNA, 19 nt, Artificial Sequence
  Description of Artificial Sequence: Synthetic oligonucleotide
  Antisense strand to SEQ ID NO: 2516428
uuguucgccgccaucuuuc

SEQ ID NO: 2516430 - RNA, 19 nt, Artificial Sequence
  Description of Artificial Sequence: Synthetic oligonucleotide
  Sense strand starting at position 1999 of SEQ ID NO: 1888175
cgugcugauaggugucaua

SEQ ID NO: 2516431 - RNA, 19 nt, Artificial Sequence
  Description of Artificial Sequence: Synthetic oligonucleotide
  Antisense strand to SEQ ID NO: 2516430
uaugacaccuaucagcacg

SEQ ID NO: 2516432 - RNA, 19 nt, Artificial Sequence
  Description of Artificial Sequence: Synthetic oligonucleotide
  Sense strand starting at position 2368 of SEQ ID NO: 1888175
cacagaauuggguguggca

SEQ ID NO: 2516433 - RNA, 19 nt, Artificial Sequence
  Description of Artificial Sequence: Synthetic oligonucleotide
  Antisense strand to SEQ ID NO: 2516432
ugccacacccaauucugug

SEQ ID NO: 2516434 - RNA, 19 nt, Artificial Sequence
  Description of Artificial Sequence: Synthetic oligonucleotide
  Sense strand starting at position 2910 of SEQ ID NO: 1888175
ggagcacacugcucacaua

SEQ ID NO: 2516435 - RNA, 19 nt, Artificial Sequence
  Description of Artificial Sequence: Synthetic oligonucleotide
  Antisense strand to SEQ ID NO: 2516434
uaugugagcagugugcucc

SEQ ID NO: 2516436 - RNA, 19 nt, Artificial Sequence
  Description of Artificial Sequence: Synthetic oligonucleotide
  Sense strand starting at position 2920 of SEQ ID NO: 1888175
gcucacauaucccaacgua

SEQ ID NO: 2516437 - RNA, 19 nt, Artificial Sequence
  Description of Artificial Sequence: Synthetic oligonucleotide
  Antisense strand to SEQ ID NO: 2516436
uacguugggauaugugagc

SEQ ID NO: 2516438 - RNA, 19 nt, Artificial Sequence
  Description of Artificial Sequence: Synthetic oligonucleotide
  Sense strand starting at position 3236 of SEQ ID NO: 1888175
guuugaaacccuggaaagu

SEQ ID NO: 2516439 - RNA, 19 nt, Artificial Sequence
  Description of Artificial Sequence: Synthetic oligonucleotide
  Antisense strand to SEQ ID NO: 2516438
acuuuccaggguuucaaac

SEQ ID NO: 2516440 - RNA, 19 nt, Artificial Sequence
  Description of Artificial Sequence: Synthetic oligonucleotide
  Sense strand starting at position 3412 of SEQ ID NO: 1888175
uuuggagggcucugaaugu

SEQ ID NO: 2516441 - RNA, 19 nt, Artificial Sequence
  Description of Artificial Sequence: Synthetic oligonucleotide
  Antisense strand to SEQ ID NO: 2516440
acauucagagcccuccaaa

SEQ ID NO: 2516442 - RNA, 19 nt, Artificial Sequence
  Description of Artificial Sequence: Synthetic oligonucleotide
  Sense strand starting at position 3589 of SEQ ID NO: 1888175
cccaguuccugcuggcaga

SEQ ID NO: 2516443 - RNA, 19 nt, Artificial Sequence
  Description of Artificial Sequence: Synthetic oligonucleotide
  Antisense strand to SEQ ID NO: 2516442
ucugccagcaggaacuggg

SEQ ID NO: 2516444 - RNA, 19 nt, Artificial Sequence
  Description of Artificial Sequence: Synthetic oligonucleotide
  Sense strand starting at position 3753 of SEQ ID NO: 1888175
gggacaugucuguagucac

SEQ ID NO: 2516445 - RNA, 19 nt, Artificial Sequence
  Description of Artificial Sequence: Synthetic oligonucleotide
  Antisense strand to SEQ ID NO: 2516444
gugacuacagacauguccc

SEQ ID NO: 2516446 - RNA, 19 nt, Artificial Sequence
  Description of Artificial Sequence: Synthetic oligonucleotide
  Sense strand starting at position 94 of SEQ ID NO: 1888176
gggagggcucggugucuaa

SEQ ID NO: 2516447 - RNA, 19 nt, Artificial Sequence
  Description of Artificial Sequence: Synthetic oligonucleotide
  Antisense strand to SEQ ID NO: 2516446
uuagacaccgagcccuccc

SEQ ID NO: 2516448 - RNA, 19 nt, Artificial Sequence
  Description of Artificial Sequence: Synthetic oligonucleotide
  Sense strand starting at position 98 of SEQ ID NO: 1888176
gggcucggugucuaaugau

SEQ ID NO: 2516449 - RNA, 19 nt, Artificial Sequence
  Description of Artificial Sequence: Synthetic oligonucleotide
  Antisense strand to SEQ ID NO: 2516448
aucauuagacaccgagccc

SEQ ID NO: 2516450 - RNA, 19 nt, Artificial Sequence
  Description of Artificial Sequence: Synthetic oligonucleotide
  Sense strand starting at position 162 of SEQ ID NO: 1888176
gaaggucagccuuggaaag

SEQ ID NO: 2516451 - RNA, 19 nt, Artificial Sequence
  Description of Artificial Sequence: Synthetic oligonucleotide
  Antisense strand to SEQ ID NO: 2516450
cuuuccaaggcugaccuuc

SEQ ID NO: 2516452 - RNA, 19 nt, Artificial Sequence
  Description of Artificial Sequence: Synthetic oligonucleotide
  Sense strand starting at position 178 of SEQ ID NO: 1888176
aaggaaucacaguggguuu

SEQ ID NO: 2516453 - RNA, 19 nt, Artificial Sequence
  Description of Artificial Sequence: Synthetic oligonucleotide
  Antisense strand to SEQ ID NO: 2516452
aaacccacugugauuccuu

SEQ ID NO: 2516454 - RNA, 19 nt, Artificial Sequence
  Description of Artificial Sequence: Synthetic oligonucleotide
  Sense strand starting at position 1114 of SEQ ID NO: 1888176
gagaccugcuccguccuaa

SEQ ID NO: 2516455 - RNA, 19 nt, Artificial Sequence
  Description of Artificial Sequence: Synthetic oligonucleotide
  Antisense strand to SEQ ID NO: 2516454
uuaggacggagcaggucuc

SEQ ID NO: 2516456 - RNA, 19 nt, Artificial Sequence
  Description of Artificial Sequence: Synthetic oligonucleotide
  Sense strand starting at position 1124 of SEQ ID NO: 1888176
ccguccuaaguguaugaga

SEQ ID NO: 2516457 - RNA, 19 nt, Artificial Sequence
  Description of Artificial Sequence: Synthetic oligonucleotide
  Antisense strand to SEQ ID NO: 2516456
ucucauacacuuaggacgg

SEQ ID NO: 2516458 - RNA, 19 nt, Artificial Sequence
  Description of Artificial Sequence: Synthetic oligonucleotide
  Sense strand starting at position 1126 of SEQ ID NO: 1888176
guccuaaguguaugagaga

SEQ ID NO: 2516459 - RNA, 19 nt, Artificial Sequence
  Description of Artificial Sequence: Synthetic oligonucleotide
  Antisense strand to SEQ ID NO: 2516458
ucucucauacacuuaggac

SEQ ID NO: 2516460 - RNA, 19 nt, Artificial Sequence
  Description of Artificial Sequence: Synthetic oligonucleotide
  Sense strand starting at position 1129 of SEQ ID NO: 1888176
cuaaguguaugagagaguu

SEQ ID NO: 2516461 - RNA, 19 nt, Artificial Sequence
  Description of Artificial Sequence: Synthetic oligonucleotide
  Antisense strand to SEQ ID NO: 2516460
aacucucucauacacuuag

SEQ ID NO: 2516462 - RNA, 19 nt, Artificial Sequence
  Description of Artificial Sequence: Synthetic oligonucleotide
  Sense strand starting at position 1131 of SEQ ID NO: 1888176
aaguguaugagagaguucu

SEQ ID NO: 2516463 - RNA, 19 nt, Artificial Sequence
  Description of Artificial Sequence: Synthetic oligonucleotide
  Antisense strand to SEQ ID NO: 2516462
agaacucucucauacacuu

SEQ ID NO: 2516464 - RNA, 19 nt, Artificial Sequence
  Description of Artificial Sequence: Synthetic oligonucleotide
  Sense strand starting at position 1175 of SEQ ID NO: 1888176
ggagacagguguuaagaca

SEQ ID NO: 2516465 - RNA, 19 nt, Artificial Sequence
  Description of Artificial Sequence: Synthetic oligonucleotide
  Antisense strand to SEQ ID NO: 2516464
ugucuuaacaccugucucc

SEQ ID NO: 2516466 - RNA, 19 nt, Artificial Sequence
  Description of Artificial Sequence: Synthetic oligonucleotide
  Sense strand starting at position 1294 of SEQ ID NO: 1888176
ggugccauguuuccagcau

SEQ ID NO: 2516467 - RNA, 19 nt, Artificial Sequence
  Description of Artificial Sequence: Synthetic oligonucleotide
  Antisense strand to SEQ ID NO: 2516466
augcuggaaacauggcacc

SEQ ID NO: 2516468 - RNA, 19 nt, Artificial Sequence
  Description of Artificial Sequence: Synthetic oligonucleotide
  Sense strand starting at position 1327 of SEQ ID NO: 1888176
caccaugagucagaagcaa

SEQ ID NO: 2516469 - RNA, 19 nt, Artificial Sequence
  Description of Artificial Sequence: Synthetic oligonucleotide
  Antisense strand to SEQ ID NO: 2516468
uugcuucugacucauggug

SEQ ID NO: 2516470 - RNA, 19 nt, Artificial Sequence
  Description of Artificial Sequence: Synthetic oligonucleotide
  Sense strand starting at position 1905 of SEQ ID NO: 1888176
gggugcagcgcucuucaga

SEQ ID NO: 2516471 - RNA, 19 nt, Artificial Sequence
  Description of Artificial Sequence: Synthetic oligonucleotide
  Antisense strand to SEQ ID NO: 2516470
ucugaagagcgcugcaccc

SEQ ID NO: 2516472 - RNA, 19 nt, Artificial Sequence
  Description of Artificial Sequence: Synthetic oligonucleotide
  Sense strand starting at position 2342 of SEQ ID NO: 1888176
ucaucuucugaaggcuauu

SEQ ID NO: 2516473 - RNA, 19 nt, Artificial Sequence
  Description of Artificial Sequence: Synthetic oligonucleotide
  Antisense strand to SEQ ID NO: 2516472
aauagccuucagaagauga

SEQ ID NO: 2516474 - RNA, 19 nt, Artificial Sequence
  Description of Artificial Sequence: Synthetic oligonucleotide
  Sense strand starting at position 2554 of SEQ ID NO: 1888176
caggcuaguuccucacagu

SEQ ID NO: 2516475 - RNA, 19 nt, Artificial Sequence
  Description of Artificial Sequence: Synthetic oligonucleotide
  Antisense strand to SEQ ID NO: 2516474
acugugaggaacuagccug

SEQ ID NO: 2516476 - RNA, 19 nt, Artificial Sequence
  Description of Artificial Sequence: Synthetic oligonucleotide
  Sense strand starting at position 2675 of SEQ ID NO: 1888176
gcugauucuggagaucuuu

SEQ ID NO: 2516477 - RNA, 19 nt, Artificial Sequence
  Description of Artificial Sequence: Synthetic oligonucleotide
  Antisense strand to SEQ ID NO: 2516476
aaagaucuccagaaucagc

SEQ ID NO: 2516478 - RNA, 19 nt, Artificial Sequence
  Description of Artificial Sequence: Synthetic oligonucleotide
  Sense strand starting at position 2683 of SEQ ID NO: 1888176
uggagaucuuuaggaggau

SEQ ID NO: 2516479 - RNA, 19 nt, Artificial Sequence
  Description of Artificial Sequence: Synthetic oligonucleotide
  Antisense strand to SEQ ID NO: 2516478
auccuccuaaagaucucca

SEQ ID NO: 2516480 - RNA, 19 nt, Artificial Sequence
  Description of Artificial Sequence: Synthetic oligonucleotide
  Sense strand starting at position 2684 of SEQ ID NO: 1888176
ggagaucuuuaggaggaug

SEQ ID NO: 2516481 - RNA, 19 nt, Artificial Sequence
  Description of Artificial Sequence: Synthetic oligonucleotide
  Antisense strand to SEQ ID NO: 2516480
cauccuccuaaagaucucc

SEQ ID NO: 2516482 - RNA, 19 nt, Artificial Sequence
  Description of Artificial Sequence: Synthetic oligonucleotide
  Sense strand starting at position 2709 of SEQ ID NO: 1888176
gcuguugagaacugucagu

SEQ ID NO: 2516483 - RNA, 19 nt, Artificial Sequence
  Description of Artificial Sequence: Synthetic oligonucleotide
  Antisense strand to SEQ ID NO: 2516482
acugacaguucucaacagc

SEQ ID NO: 2516484 - RNA, 19 nt, Artificial Sequence
  Description of Artificial Sequence: Synthetic oligonucleotide
  Sense strand starting at position 2714 of SEQ ID NO: 1888176
ugagaacugucaguaugag

SEQ ID NO: 2516485 - RNA, 19 nt, Artificial Sequence
  Description of Artificial Sequence: Synthetic oligonucleotide
  Antisense strand to SEQ ID NO: 2516484
cucauacugacaguucuca

SEQ ID NO: 2516486 - RNA, 19 nt, Artificial Sequence
  Description of Artificial Sequence: Synthetic oligonucleotide
  Sense strand starting at position 2715 of SEQ ID NO: 1888176
gagaacugucaguaugagu

SEQ ID NO: 2516487 - RNA, 19 nt, Artificial Sequence
  Description of Artificial Sequence: Synthetic oligonucleotide
  Antisense strand to SEQ ID NO: 2516486
acucauacugacaguucuc

SEQ ID NO: 2516488 - RNA, 19 nt, Artificial Sequence
  Description of Artificial Sequence: Synthetic oligonucleotide
  Sense strand starting at position 2739 of SEQ ID NO: 1888176
uggcuacucugccugggaa

SEQ ID NO: 2516489 - RNA, 19 nt, Artificial Sequence
  Description of Artificial Sequence: Synthetic oligonucleotide
  Antisense strand to SEQ ID NO: 2516488
uucccaggcagaguagcca

SEQ ID NO: 2516490 - RNA, 19 nt, Artificial Sequence
  Description of Artificial Sequence: Synthetic oligonucleotide
  Sense strand starting at position 2742 of SEQ ID NO: 1888176
cuacucugccugggaacau

SEQ ID NO: 2516491 - RNA, 19 nt, Artificial Sequence
  Description of Artificial Sequence: Synthetic oligonucleotide
  Antisense strand to SEQ ID NO: 2516490
auguucccaggcagaguag

SEQ ID NO: 2516492 - RNA, 19 nt, Artificial Sequence
  Description of Artificial Sequence: Synthetic oligonucleotide
  Sense strand starting at position 2824 of SEQ ID NO: 1888176
ggaggucuuagaggaucau

SEQ ID NO: 2516493 - RNA, 19 nt, Artificial Sequence
  Description of Artificial Sequence: Synthetic oligonucleotide
  Antisense strand to SEQ ID NO: 2516492
augauccucuaagaccucc

SEQ ID NO: 2516494 - RNA, 19 nt, Artificial Sequence
  Description of Artificial Sequence: Synthetic oligonucleotide
  Sense strand starting at position 2830 of SEQ ID NO: 1888176
cuuagaggaucauucugua

SEQ ID NO: 2516495 - RNA, 19 nt, Artificial Sequence
  Description of Artificial Sequence: Synthetic oligonucleotide
  Antisense strand to SEQ ID NO: 2516494
uacagaaugauccucuaag

SEQ ID NO: 2516496 - RNA, 19 nt, Artificial Sequence
  Description of Artificial Sequence: Synthetic oligonucleotide
  Sense strand starting at position 2834 of SEQ ID NO: 1888176
gaggaucauucuguaagug

SEQ ID NO: 2516497 - RNA, 19 nt, Artificial Sequence
  Description of Artificial Sequence: Synthetic oligonucleotide
  Antisense strand to SEQ ID NO: 2516496
cacuuacagaaugauccuc

SEQ ID NO: 2516498 - RNA, 19 nt, Artificial Sequence
  Description of Artificial Sequence: Synthetic oligonucleotide
  Sense strand starting at position 2987 of SEQ ID NO: 1888176
ccugcauuccaugggauca

SEQ ID NO: 2516499 - RNA, 19 nt, Artificial Sequence
  Description of Artificial Sequence: Synthetic oligonucleotide
  Antisense strand to SEQ ID NO: 2516498
ugaucccauggaaugcagg

SEQ ID NO: 2516500 - RNA, 19 nt, Artificial Sequence
  Description of Artificial Sequence: Synthetic oligonucleotide
  Sense strand starting at position 3165 of SEQ ID NO: 1888176
uguggucgccaccaagaau

SEQ ID NO: 2516501 - RNA, 19 nt, Artificial Sequence
  Description of Artificial Sequence: Synthetic oligonucleotide
  Antisense strand to SEQ ID NO: 2516500
auucuugguggcgaccaca

SEQ ID NO: 2516502 - RNA, 19 nt, Artificial Sequence
  Description of Artificial Sequence: Synthetic oligonucleotide
  Sense strand starting at position 3377 of SEQ ID NO: 1888176
ggaucuugcucaccaaacu

SEQ ID NO: 2516503 - RNA, 19 nt, Artificial Sequence
  Description of Artificial Sequence: Synthetic oligonucleotide
  Antisense strand to SEQ ID NO: 2516502
aguuuggugagcaagaucc

SEQ ID NO: 2516504 - RNA, 19 nt, Artificial Sequence
  Description of Artificial Sequence: Synthetic oligonucleotide
  Sense strand starting at position 3444 of SEQ ID NO: 1888176
ucuagaagagguugaagua

SEQ ID NO: 2516505 - RNA, 19 nt, Artificial Sequence
  Description of Artificial Sequence: Synthetic oligonucleotide
  Antisense strand to SEQ ID NO: 2516504
uacuucaaccucuucuaga

SEQ ID NO: 2516506 - RNA, 19 nt, Artificial Sequence
  Description of Artificial Sequence: Synthetic oligonucleotide
  Sense strand starting at position 3568 of SEQ ID NO: 1888176
agcagacagguuuggaaua

SEQ ID NO: 2516507 - RNA, 19 nt, Artificial Sequence
  Description of Artificial Sequence: Synthetic oligonucleotide
  Antisense strand to SEQ ID NO: 2516506
uauuccaaaccugucugcu

SEQ ID NO: 2516508 - RNA, 19 nt, Artificial Sequence
  Description of Artificial Sequence: Synthetic oligonucleotide
  Sense strand starting at position 3658 of SEQ ID NO: 1888176
gcaugaucgccugcgguca

SEQ ID NO: 2516509 - RNA, 19 nt, Artificial Sequence
  Description of Artificial Sequence: Synthetic oligonucleotide
  Antisense strand to SEQ ID NO: 2516508
ugaccgcaggcgaucaugc

SEQ ID NO: 2516510 - RNA, 19 nt, Artificial Sequence
  Description of Artificial Sequence: Synthetic oligonucleotide
  Sense strand starting at position 3713 of SEQ ID NO: 1888176
cggccaucaguggaacuua

SEQ ID NO: 2516511 - RNA, 19 nt, Artificial Sequence
  Description of Artificial Sequence: Synthetic oligonucleotide
  Antisense strand to SEQ ID NO: 2516510
uaaguuccacugauggccg

SEQ ID NO: 2516512 - RNA, 19 nt, Artificial Sequence
  Description of Artificial Sequence: Synthetic oligonucleotide
  Sense strand starting at position 3751 of SEQ ID NO: 1888176
ggcuguuguuuauuguuga

SEQ ID NO: 2516513 - RNA, 19 nt, Artificial Sequence
  Description of Artificial Sequence: Synthetic oligonucleotide
  Antisense strand to SEQ ID NO: 2516512
ucaacaauaaacaacagcc

SEQ ID NO: 2516514 - RNA, 19 nt, Artificial Sequence
  Description of Artificial Sequence: Synthetic oligonucleotide
  Sense strand starting at position 3775 of SEQ ID NO: 1888176
gagagaagcaguuaugguu

SEQ ID NO: 2516515 - RNA, 19 nt, Artificial Sequence
  Description of Artificial Sequence: Synthetic oligonucleotide
  Antisense strand to SEQ ID NO: 2516514
aaccauaacugcuucucuc

SEQ ID NO: 2516516 - RNA, 19 nt, Artificial Sequence
  Description of Artificial Sequence: Synthetic oligonucleotide
  Sense strand starting at position 3871 of SEQ ID NO: 1888176
cuuugugucugaucugaga

SEQ ID NO: 2516517 - RNA, 19 nt, Artificial Sequence
  Description of Artificial Sequence: Synthetic oligonucleotide
  Antisense strand to SEQ ID NO: 2516516
ucucagaucagacacaaag

SEQ ID NO: 2516518 - RNA, 19 nt, Artificial Sequence
  Description of Artificial Sequence: Synthetic oligonucleotide
  Sense strand starting at position 3873 of SEQ ID NO: 1888176
uugugucugaucugagaga

SEQ ID NO: 2516519 - RNA, 19 nt, Artificial Sequence
  Description of Artificial Sequence: Synthetic oligonucleotide
  Antisense strand to SEQ ID NO: 2516518
ucucucagaucagacacaa

SEQ ID NO: 2516520 - RNA, 19 nt, Artificial Sequence
  Description of Artificial Sequence: Synthetic oligonucleotide
  Sense strand starting at position 3874 of SEQ ID NO: 1888176
ugugucugaucugagagaa

SEQ ID NO: 2516521 - RNA, 19 nt, Artificial Sequence
  Description of Artificial Sequence: Synthetic oligonucleotide
  Antisense strand to SEQ ID NO: 2516520
uucucucagaucagacaca

SEQ ID NO: 2516522 - RNA, 19 nt, Artificial Sequence
  Description of Artificial Sequence: Synthetic oligonucleotide
  Sense strand starting at position 3887 of SEQ ID NO: 1888176
agagaagccaucugccaga

SEQ ID NO: 2516523 - RNA, 19 nt, Artificial Sequence
  Description of Artificial Sequence: Synthetic oligonucleotide
  Antisense strand to SEQ ID NO: 2516522
ucuggcagauggcuucucu

SEQ ID NO: 2516524 - RNA, 19 nt, Artificial Sequence
  Description of Artificial Sequence: Synthetic oligonucleotide
  Sense strand starting at position 3892 of SEQ ID NO: 1888176
agccaucugccagagucaa

SEQ ID NO: 2516525 - RNA, 19 nt, Artificial Sequence
  Description of Artificial Sequence: Synthetic oligonucleotide
  Antisense strand to SEQ ID NO: 2516524
uugacucuggcagauggcu

SEQ ID NO: 2516526 - RNA, 19 nt, Artificial Sequence
  Description of Artificial Sequence: Synthetic oligonucleotide
  Sense strand starting at position 495 of SEQ ID NO: 1888177
gagaccugcuccguccuaa

SEQ ID NO: 2516527 - RNA, 19 nt, Artificial Sequence
  Description of Artificial Sequence: Synthetic oligonucleotide
  Antisense strand to SEQ ID NO: 2516526
uuaggacggagcaggucuc

SEQ ID NO: 2516528 - RNA, 19 nt, Artificial Sequence
  Description of Artificial Sequence: Synthetic oligonucleotide
  Sense strand starting at position 505 of SEQ ID NO: 1888177
ccguccuaaguguaugaga

SEQ ID NO: 2516529 - RNA, 19 nt, Artificial Sequence
  Description of Artificial Sequence: Synthetic oligonucleotide
  Antisense strand to SEQ ID NO: 2516528
ucucauacacuuaggacgg

SEQ ID NO: 2516530 - RNA, 19 nt, Artificial Sequence
  Description of Artificial Sequence: Synthetic oligonucleotide
  Sense strand starting at position 507 of SEQ ID NO: 1888177
guccuaaguguaugagaga

SEQ ID NO: 2516531 - RNA, 19 nt, Artificial Sequence
  Description of Artificial Sequence: Synthetic oligonucleotide
  Antisense strand to SEQ ID NO: 2516530
ucucucauacacuuaggac

SEQ ID NO: 2516532 - RNA, 19 nt, Artificial Sequence
  Description of Artificial Sequence: Synthetic oligonucleotide
  Sense strand starting at position 512 of SEQ ID NO: 1888177
aaguguaugagagaguucu

SEQ ID NO: 2516533 - RNA, 19 nt, Artificial Sequence
  Description of Artificial Sequence: Synthetic oligonucleotide
  Antisense strand to SEQ ID NO: 2516532
agaacucucucauacacuu

SEQ ID NO: 2516534 - RNA, 19 nt, Artificial Sequence
  Description of Artificial Sequence: Synthetic oligonucleotide
  Sense strand starting at position 556 of SEQ ID NO: 1888177
ggagacagguguuaagaca

SEQ ID NO: 2516535 - RNA, 19 nt, Artificial Sequence
  Description of Artificial Sequence: Synthetic oligonucleotide
  Antisense strand to SEQ ID NO: 2516534
ugucuuaacaccugucucc

SEQ ID NO: 2516536 - RNA, 19 nt, Artificial Sequence
  Description of Artificial Sequence: Synthetic oligonucleotide
  Sense strand starting at position 708 of SEQ ID NO: 1888177
caccaugagucagaagcaa

SEQ ID NO: 2516537 - RNA, 19 nt, Artificial Sequence
  Description of Artificial Sequence: Synthetic oligonucleotide
  Antisense strand to SEQ ID NO: 2516536
uugcuucugacucauggug

SEQ ID NO: 2516538 - RNA, 19 nt, Artificial Sequence
  Description of Artificial Sequence: Synthetic oligonucleotide
  Sense strand starting at position 1286 of SEQ ID NO: 1888177
gggugcagcgcucuucaga

SEQ ID NO: 2516539 - RNA, 19 nt, Artificial Sequence
  Description of Artificial Sequence: Synthetic oligonucleotide
  Antisense strand to SEQ ID NO: 2516538
ucugaagagcgcugcaccc

SEQ ID NO: 2516540 - RNA, 19 nt, Artificial Sequence
  Description of Artificial Sequence: Synthetic oligonucleotide
  Sense strand starting at position 1723 of SEQ ID NO: 1888177
ucaucuucugaaggcuauu

SEQ ID NO: 2516541 - RNA, 19 nt, Artificial Sequence
  Description of Artificial Sequence: Synthetic oligonucleotide
  Antisense strand to SEQ ID NO: 2516540
aauagccuucagaagauga

SEQ ID NO: 2516542 - RNA, 19 nt, Artificial Sequence
  Description of Artificial Sequence: Synthetic oligonucleotide
  Sense strand starting at position 1935 of SEQ ID NO: 1888177
caggcuaguuccucacagu

SEQ ID NO: 2516543 - RNA, 19 nt, Artificial Sequence
  Description of Artificial Sequence: Synthetic oligonucleotide
  Antisense strand to SEQ ID NO: 2516542
acugugaggaacuagccug

SEQ ID NO: 2516544 - RNA, 19 nt, Artificial Sequence
  Description of Artificial Sequence: Synthetic oligonucleotide
  Sense strand starting at position 2056 of SEQ ID NO: 1888177
gcugauucuggagaucuuu

SEQ ID NO: 2516545 - RNA, 19 nt, Artificial Sequence
  Description of Artificial Sequence: Synthetic oligonucleotide
  Antisense strand to SEQ ID NO: 2516544
aaagaucuccagaaucagc

SEQ ID NO: 2516546 - RNA, 19 nt, Artificial Sequence
  Description of Artificial Sequence: Synthetic oligonucleotide
  Sense strand starting at position 2064 of SEQ ID NO: 1888177
uggagaucuuuaggaggau

SEQ ID NO: 2516547 - RNA, 19 nt, Artificial Sequence
  Description of Artificial Sequence: Synthetic oligonucleotide
  Antisense strand to SEQ ID NO: 2516546
auccuccuaaagaucucca

SEQ ID NO: 2516548 - RNA, 19 nt, Artificial Sequence
  Description of Artificial Sequence: Synthetic oligonucleotide
  Sense strand starting at position 2065 of SEQ ID NO: 1888177
ggagaucuuuaggaggaug

SEQ ID NO: 2516549 - RNA, 19 nt, Artificial Sequence
  Description of Artificial Sequence: Synthetic oligonucleotide
  Antisense strand to SEQ ID NO: 2516548
cauccuccuaaagaucucc

SEQ ID NO: 2516550 - RNA, 19 nt, Artificial Sequence
  Description of Artificial Sequence: Synthetic oligonucleotide
  Sense strand starting at position 2090 of SEQ ID NO: 1888177
gcuguugagaacugucagu

SEQ ID NO: 2516551 - RNA, 19 nt, Artificial Sequence
  Description of Artificial Sequence: Synthetic oligonucleotide
  Antisense strand to SEQ ID NO: 2516550
acugacaguucucaacagc

SEQ ID NO: 2516552 - RNA, 19 nt, Artificial Sequence
  Description of Artificial Sequence: Synthetic oligonucleotide
  Sense strand starting at position 2095 of SEQ ID NO: 1888177
ugagaacugucaguaugag

SEQ ID NO: 2516553 - RNA, 19 nt, Artificial Sequence
  Description of Artificial Sequence: Synthetic oligonucleotide
  Antisense strand to SEQ ID NO: 2516552
cucauacugacaguucuca

SEQ ID NO: 2516554 - RNA, 19 nt, Artificial Sequence
  Description of Artificial Sequence: Synthetic oligonucleotide
  Sense strand starting at position 2096 of SEQ ID NO: 1888177
gagaacugucaguaugagu

SEQ ID NO: 2516555 - RNA, 19 nt, Artificial Sequence
  Description of Artificial Sequence: Synthetic oligonucleotide
  Antisense strand to SEQ ID NO: 2516554
acucauacugacaguucuc

SEQ ID NO: 2516556 - RNA, 19 nt, Artificial Sequence
  Description of Artificial Sequence: Synthetic oligonucleotide
  Sense strand starting at position 2120 of SEQ ID NO: 1888177
uggcuacucugccugggaa

SEQ ID NO: 2516557 - RNA, 19 nt, Artificial Sequence
  Description of Artificial Sequence: Synthetic oligonucleotide
  Antisense strand to SEQ ID NO: 2516556
uucccaggcagaguagcca

SEQ ID NO: 2516558 - RNA, 19 nt, Artificial Sequence
  Description of Artificial Sequence: Synthetic oligonucleotide
  Sense strand starting at position 2123 of SEQ ID NO: 1888177
cuacucugccugggaacau

SEQ ID NO: 2516559 - RNA, 19 nt, Artificial Sequence
  Description of Artificial Sequence: Synthetic oligonucleotide
  Antisense strand to SEQ ID NO: 2516558
auguucccaggcagaguag

SEQ ID NO: 2516560 - RNA, 19 nt, Artificial Sequence
  Description of Artificial Sequence: Synthetic oligonucleotide
  Sense strand starting at position 2205 of SEQ ID NO: 1888177
ggaggucuuagaggaucau

SEQ ID NO: 2516561 - RNA, 19 nt, Artificial Sequence
  Description of Artificial Sequence: Synthetic oligonucleotide
  Antisense strand to SEQ ID NO: 2516560
augauccucuaagaccucc

SEQ ID NO: 2516562 - RNA, 19 nt, Artificial Sequence
  Description of Artificial Sequence: Synthetic oligonucleotide
  Sense strand starting at position 2211 of SEQ ID NO: 1888177
cuuagaggaucauucugua

SEQ ID NO: 2516563 - RNA, 19 nt, Artificial Sequence
  Description of Artificial Sequence: Synthetic oligonucleotide
  Antisense strand to SEQ ID NO: 2516562
uacagaaugauccucuaag

SEQ ID NO: 2516564 - RNA, 19 nt, Artificial Sequence
  Description of Artificial Sequence: Synthetic oligonucleotide
  Sense strand starting at position 2215 of SEQ ID NO: 1888177
gaggaucauucuguaagug

SEQ ID NO: 2516565 - RNA, 19 nt, Artificial Sequence
  Description of Artificial Sequence: Synthetic oligonucleotide
  Antisense strand to SEQ ID NO: 2516564
cacuuacagaaugauccuc

SEQ ID NO: 2516566 - RNA, 19 nt, Artificial Sequence
  Description of Artificial Sequence: Synthetic oligonucleotide
  Sense strand starting at position 2368 of SEQ ID NO: 1888177
ccugcauuccaugggauca

SEQ ID NO: 2516567 - RNA, 19 nt, Artificial Sequence
  Description of Artificial Sequence: Synthetic oligonucleotide
  Antisense strand to SEQ ID NO: 2516566
ugaucccauggaaugcagg

SEQ ID NO: 2516568 - RNA, 19 nt, Artificial Sequence
  Description of Artificial Sequence: Synthetic oligonucleotide
  Sense strand starting at position 2546 of SEQ ID NO: 1888177
uguggucgccaccaagaau

SEQ ID NO: 2516569 - RNA, 19 nt, Artificial Sequence
  Description of Artificial Sequence: Synthetic oligonucleotide
  Antisense strand to SEQ ID NO: 2516568
auucuugguggcgaccaca

SEQ ID NO: 2516570 - RNA, 19 nt, Artificial Sequence
  Description of Artificial Sequence: Synthetic oligonucleotide
  Sense strand starting at position 2758 of SEQ ID NO: 1888177
ggaucuugcucaccaaacu

SEQ ID NO: 2516571 - RNA, 19 nt, Artificial Sequence
  Description of Artificial Sequence: Synthetic oligonucleotide
  Antisense strand to SEQ ID NO: 2516570
aguuuggugagcaagaucc

SEQ ID NO: 2516572 - RNA, 19 nt, Artificial Sequence
  Description of Artificial Sequence: Synthetic oligonucleotide
  Sense strand starting at position 2825 of SEQ ID NO: 1888177
ucuagaagagguugaagua

SEQ ID NO: 2516573 - RNA, 19 nt, Artificial Sequence
  Description of Artificial Sequence: Synthetic oligonucleotide
  Antisense strand to SEQ ID NO: 2516572
uacuucaaccucuucuaga

SEQ ID NO: 2516574 - RNA, 19 nt, Artificial Sequence
  Description of Artificial Sequence: Synthetic oligonucleotide
  Sense strand starting at position 2949 of SEQ ID NO: 1888177
agcagacagguuuggaaua

SEQ ID NO: 2516575 - RNA, 19 nt, Artificial Sequence
  Description of Artificial Sequence: Synthetic oligonucleotide
  Antisense strand to SEQ ID NO: 2516574
uauuccaaaccugucugcu

SEQ ID NO: 2516576 - RNA, 19 nt, Artificial Sequence
  Description of Artificial Sequence: Synthetic oligonucleotide
  Sense strand starting at position 3039 of SEQ ID NO: 1888177
gcaugaucgccugcgguca

SEQ ID NO: 2516577 - RNA, 19 nt, Artificial Sequence
  Description of Artificial Sequence: Synthetic oligonucleotide
  Antisense strand to SEQ ID NO: 2516576
ugaccgcaggcgaucaugc

SEQ ID NO: 2516578 - RNA, 19 nt, Artificial Sequence
  Description of Artificial Sequence: Synthetic oligonucleotide
  Sense strand starting at position 3094 of SEQ ID NO: 1888177
cggccaucaguggaacuua

SEQ ID NO: 2516579 - RNA, 19 nt, Artificial Sequence
  Description of Artificial Sequence: Synthetic oligonucleotide
  Antisense strand to SEQ ID NO: 2516578
uaaguuccacugauggccg

SEQ ID NO: 2516580 - RNA, 19 nt, Artificial Sequence
  Description of Artificial Sequence: Synthetic oligonucleotide
  Sense strand starting at position 3132 of SEQ ID NO: 1888177
ggcuguuguuuauuguuga

SEQ ID NO: 2516581 - RNA, 19 nt, Artificial Sequence
  Description of Artificial Sequence: Synthetic oligonucleotide
  Antisense strand to SEQ ID NO: 2516580
ucaacaauaaacaacagcc

SEQ ID NO: 2516582 - RNA, 19 nt, Artificial Sequence
  Description of Artificial Sequence: Synthetic oligonucleotide
  Sense strand starting at position 3156 of SEQ ID NO: 1888177
gagagaagcaguuaugguu

SEQ ID NO: 2516583 - RNA, 19 nt, Artificial Sequence
  Description of Artificial Sequence: Synthetic oligonucleotide
  Antisense strand to SEQ ID NO: 2516582
aaccauaacugcuucucuc

SEQ ID NO: 2516584 - RNA, 19 nt, Artificial Sequence
  Description of Artificial Sequence: Synthetic oligonucleotide
  Sense strand starting at position 3252 of SEQ ID NO: 1888177
cuuugugucugaucugaga

SEQ ID NO: 2516585 - RNA, 19 nt, Artificial Sequence
  Description of Artificial Sequence: Synthetic oligonucleotide
  Antisense strand to SEQ ID NO: 2516584
ucucagaucagacacaaag

SEQ ID NO: 2516586 - RNA, 19 nt, Artificial Sequence
  Description of Artificial Sequence: Synthetic oligonucleotide
  Sense strand starting at position 3254 of SEQ ID NO: 1888177
uugugucugaucugagaga

SEQ ID NO: 2516587 - RNA, 19 nt, Artificial Sequence
  Description of Artificial Sequence: Synthetic oligonucleotide
  Antisense strand to SEQ ID NO: 2516586
ucucucagaucagacacaa

SEQ ID NO: 2516588 - RNA, 19 nt, Artificial Sequence
  Description of Artificial Sequence: Synthetic oligonucleotide
  Sense strand starting at position 3268 of SEQ ID NO: 1888177
agagaagccaucugccaga

SEQ ID NO: 2516589 - RNA, 19 nt, Artificial Sequence
  Description of Artificial Sequence: Synthetic oligonucleotide
  Antisense strand to SEQ ID NO: 2516588
ucuggcagauggcuucucu

SEQ ID NO: 2516590 - RNA, 19 nt, Artificial Sequence
  Description of Artificial Sequence: Synthetic oligonucleotide
  Sense strand starting at position 3273 of SEQ ID NO: 1888177
agccaucugccagagucaa

SEQ ID NO: 2516591 - RNA, 19 nt, Artificial Sequence
  Description of Artificial Sequence: Synthetic oligonucleotide
  Antisense strand to SEQ ID NO: 2516590
uugacucuggcagauggcu

SEQ ID NO: 2516592 - RNA, 19 nt, Artificial Sequence
  Description of Artificial Sequence: Synthetic oligonucleotide
  Sense strand starting at position 3455 of SEQ ID NO: 1888177
ccaggauuguuuccaucau

SEQ ID NO: 2516593 - RNA, 19 nt, Artificial Sequence
  Description of Artificial Sequence: Synthetic oligonucleotide
  Antisense strand to SEQ ID NO: 2516592
augauggaaacaauccugg

SEQ ID NO: 2516594 - RNA, 19 nt, Artificial Sequence
  Description of Artificial Sequence: Synthetic oligonucleotide
  Sense strand starting at position 3513 of SEQ ID NO: 1888177
aaccuuugucacggacaaa

SEQ ID NO: 2516595 - RNA, 19 nt, Artificial Sequence
  Description of Artificial Sequence: Synthetic oligonucleotide
  Antisense strand to SEQ ID NO: 2516594
uuuguccgugacaaagguu

SEQ ID NO: 2516596 - RNA, 19 nt, Artificial Sequence
  Description of Artificial Sequence: Synthetic oligonucleotide
  Sense strand starting at position 3561 of SEQ ID NO: 1888177
cucagugugagguagaaca

SEQ ID NO: 2516597 - RNA, 19 nt, Artificial Sequence
  Description of Artificial Sequence: Synthetic oligonucleotide
  Antisense strand to SEQ ID NO: 2516596
uguucuaccucacacugag

SEQ ID NO: 2516598 - RNA, 19 nt, Artificial Sequence
  Description of Artificial Sequence: Synthetic oligonucleotide
  Sense strand starting at position 3666 of SEQ ID NO: 1888177
gcugaaugcucauccguac

SEQ ID NO: 2516599 - RNA, 19 nt, Artificial Sequence
  Description of Artificial Sequence: Synthetic oligonucleotide
  Antisense strand to SEQ ID NO: 2516598
guacggaugagcauucagc

SEQ ID NO: 2516600 - RNA, 19 nt, Artificial Sequence
  Description of Artificial Sequence: Synthetic oligonucleotide
  Sense strand starting at position 3751 of SEQ ID NO: 1888177
gguucucaaucuccagagu

SEQ ID NO: 2516601 - RNA, 19 nt, Artificial Sequence
  Description of Artificial Sequence: Synthetic oligonucleotide
  Antisense strand to SEQ ID NO: 2516600
acucuggagauugagaacc

SEQ ID NO: 2516602 - RNA, 19 nt, Artificial Sequence
  Description of Artificial Sequence: Synthetic oligonucleotide
  Sense strand starting at position 3752 of SEQ ID NO: 1888177
guucucaaucuccagaguu

SEQ ID NO: 2516603 - RNA, 19 nt, Artificial Sequence
  Description of Artificial Sequence: Synthetic oligonucleotide
  Antisense strand to SEQ ID NO: 2516602
aacucuggagauugagaac

SEQ ID NO: 2516604 - RNA, 19 nt, Artificial Sequence
  Description of Artificial Sequence: Synthetic oligonucleotide
  Sense strand starting at position 3812 of SEQ ID NO: 1888177
augccuucacgguguugau

SEQ ID NO: 2516605 - RNA, 19 nt, Artificial Sequence
  Description of Artificial Sequence: Synthetic oligonucleotide
  Antisense strand to SEQ ID NO: 2516604
aucaacaccgugaaggcau

SEQ ID NO: 2516606 - RNA, 19 nt, Artificial Sequence
  Description of Artificial Sequence: Synthetic oligonucleotide
  Sense strand starting at position 92 of SEQ ID NO: 1888178
uauucuguugcacagugaa

SEQ ID NO: 2516607 - RNA, 19 nt, Artificial Sequence
  Description of Artificial Sequence: Synthetic oligonucleotide
  Antisense strand to SEQ ID NO: 2516606
uucacugugcaacagaaua

SEQ ID NO: 2516608 - RNA, 19 nt, Artificial Sequence
  Description of Artificial Sequence: Synthetic oligonucleotide
  Sense strand starting at position 603 of SEQ ID NO: 1888178
gcuauucccuuguuuauuu

SEQ ID NO: 2516609 - RNA, 19 nt, Artificial Sequence
  Description of Artificial Sequence: Synthetic oligonucleotide
  Antisense strand to SEQ ID NO: 2516608
aaauaaacaagggaauagc

SEQ ID NO: 2516610 - RNA, 19 nt, Artificial Sequence
  Description of Artificial Sequence: Synthetic oligonucleotide
  Sense strand starting at position 608 of SEQ ID NO: 1888178
ucccuuguuuauuuaugua

SEQ ID NO: 2516611 - RNA, 19 nt, Artificial Sequence
  Description of Artificial Sequence: Synthetic oligonucleotide
  Antisense strand to SEQ ID NO: 2516610
uacauaaauaaacaaggga

SEQ ID NO: 2516612 - RNA, 19 nt, Artificial Sequence
  Description of Artificial Sequence: Synthetic oligonucleotide
  Sense strand starting at position 775 of SEQ ID NO: 1888178
ccacgcugauauuuguauu

SEQ ID NO: 2516613 - RNA, 19 nt, Artificial Sequence
  Description of Artificial Sequence: Synthetic oligonucleotide
  Antisense strand to SEQ ID NO: 2516612
aauacaaauaucagcgugg

SEQ ID NO: 2516614 - RNA, 19 nt, Artificial Sequence
  Description of Artificial Sequence: Synthetic oligonucleotide
  Sense strand starting at position 845 of SEQ ID NO: 1888178
gccucuagugauccgccua

SEQ ID NO: 2516615 - RNA, 19 nt, Artificial Sequence
  Description of Artificial Sequence: Synthetic oligonucleotide
  Antisense strand to SEQ ID NO: 2516614
uaggcggaucacuagaggc

SEQ ID NO: 2516616 - RNA, 19 nt, Artificial Sequence
  Description of Artificial Sequence: Synthetic oligonucleotide
  Sense strand starting at position 956 of SEQ ID NO: 1888178
ggauuuacauacugaauga

SEQ ID NO: 2516617 - RNA, 19 nt, Artificial Sequence
  Description of Artificial Sequence: Synthetic oligonucleotide
  Antisense strand to SEQ ID NO: 2516616
ucauucaguauguaaaucc

SEQ ID NO: 2516618 - RNA, 19 nt, Artificial Sequence
  Description of Artificial Sequence: Synthetic oligonucleotide
  Sense strand starting at position 1169 of SEQ ID NO: 1888178
ucugguuggcauuaagaua

SEQ ID NO: 2516619 - RNA, 19 nt, Artificial Sequence
  Description of Artificial Sequence: Synthetic oligonucleotide
  Antisense strand to SEQ ID NO: 2516618
uaucuuaaugccaaccaga

SEQ ID NO: 2516620 - RNA, 19 nt, Artificial Sequence
  Description of Artificial Sequence: Synthetic oligonucleotide
  Sense strand starting at position 1304 of SEQ ID NO: 1888178
guuagucaucuguaaagaa

SEQ ID NO: 2516621 - RNA, 19 nt, Artificial Sequence
  Description of Artificial Sequence: Synthetic oligonucleotide
  Antisense strand to SEQ ID NO: 2516620
uucuuuacagaugacuaac

SEQ ID NO: 2516622 - RNA, 19 nt, Artificial Sequence
  Description of Artificial Sequence: Synthetic oligonucleotide
  Sense strand starting at position 1375 of SEQ ID NO: 1888178
gcaugauguggccagaaac

SEQ ID NO: 2516623 - RNA, 19 nt, Artificial Sequence
  Description of Artificial Sequence: Synthetic oligonucleotide
  Antisense strand to SEQ ID NO: 2516622
guuucuggccacaucaugc

SEQ ID NO: 2516624 - RNA, 19 nt, Artificial Sequence
  Description of Artificial Sequence: Synthetic oligonucleotide
  Sense strand starting at position 1466 of SEQ ID NO: 1888178
agggacucagugugggaaa

SEQ ID NO: 2516625 - RNA, 19 nt, Artificial Sequence
  Description of Artificial Sequence: Synthetic oligonucleotide
  Antisense strand to SEQ ID NO: 2516624
uuucccacacugagucccu

SEQ ID NO: 2516626 - RNA, 19 nt, Artificial Sequence
  Description of Artificial Sequence: Synthetic oligonucleotide
  Sense strand starting at position 1477 of SEQ ID NO: 1888178
gugggaaacccaggaguuu

SEQ ID NO: 2516627 - RNA, 19 nt, Artificial Sequence
  Description of Artificial Sequence: Synthetic oligonucleotide
  Antisense strand to SEQ ID NO: 2516626
aaacuccuggguuucccac

SEQ ID NO: 2516628 - RNA, 19 nt, Artificial Sequence
  Description of Artificial Sequence: Synthetic oligonucleotide
  Sense strand starting at position 1489 of SEQ ID NO: 1888178
ggaguuugaacuugaaucu

SEQ ID NO: 2516629 - RNA, 19 nt, Artificial Sequence
  Description of Artificial Sequence: Synthetic oligonucleotide
  Antisense strand to SEQ ID NO: 2516628
agauucaaguucaaacucc

SEQ ID NO: 2516630 - RNA, 19 nt, Artificial Sequence
  Description of Artificial Sequence: Synthetic oligonucleotide
  Sense strand starting at position 1517 of SEQ ID NO: 1888178
acaaauuguaggugguaga

SEQ ID NO: 2516631 - RNA, 19 nt, Artificial Sequence
  Description of Artificial Sequence: Synthetic oligonucleotide
  Antisense strand to SEQ ID NO: 2516630
ucuaccaccuacaauuugu

SEQ ID NO: 2516632 - RNA, 19 nt, Artificial Sequence
  Description of Artificial Sequence: Synthetic oligonucleotide
  Sense strand starting at position 1549 of SEQ ID NO: 1888178
accugcauuuaagacagau

SEQ ID NO: 2516633 - RNA, 19 nt, Artificial Sequence
  Description of Artificial Sequence: Synthetic oligonucleotide
  Antisense strand to SEQ ID NO: 2516632
aucugucuuaaaugcaggu

SEQ ID NO: 2516634 - RNA, 19 nt, Artificial Sequence
  Description of Artificial Sequence: Synthetic oligonucleotide
  Sense strand starting at position 2003 of SEQ ID NO: 1888178
cugucuuuccuagagcuga

SEQ ID NO: 2516635 - RNA, 19 nt, Artificial Sequence
  Description of Artificial Sequence: Synthetic oligonucleotide
  Antisense strand to SEQ ID NO: 2516634
ucagcucuaggaaagacag

SEQ ID NO: 2516636 - RNA, 19 nt, Artificial Sequence
  Description of Artificial Sequence: Synthetic oligonucleotide
  Sense strand starting at position 2066 of SEQ ID NO: 1888178
uuguccuugggcuagaaca

SEQ ID NO: 2516637 - RNA, 19 nt, Artificial Sequence
  Description of Artificial Sequence: Synthetic oligonucleotide
  Antisense strand to SEQ ID NO: 2516636
uguucuagcccaaggacaa

SEQ ID NO: 2516638 - RNA, 19 nt, Artificial Sequence
  Description of Artificial Sequence: Synthetic oligonucleotide
  Sense strand starting at position 2145 of SEQ ID NO: 1888178
guagccauuuguuuaugua

SEQ ID NO: 2516639 - RNA, 19 nt, Artificial Sequence
  Description of Artificial Sequence: Synthetic oligonucleotide
  Antisense strand to SEQ ID NO: 2516638
uacauaaacaaauggcuac

SEQ ID NO: 2516640 - RNA, 19 nt, Artificial Sequence
  Description of Artificial Sequence: Synthetic oligonucleotide
  Sense strand starting at position 2200 of SEQ ID NO: 1888178
guaguugugacagaaauca

SEQ ID NO: 2516641 - RNA, 19 nt, Artificial Sequence
  Description of Artificial Sequence: Synthetic oligonucleotide
  Antisense strand to SEQ ID NO: 2516640
ugauuucugucacaacuac

SEQ ID NO: 2516642 - RNA, 19 nt, Artificial Sequence
  Description of Artificial Sequence: Synthetic oligonucleotide
  Sense strand starting at position 2343 of SEQ ID NO: 1888178
uccagagcccuuggaaauc

SEQ ID NO: 2516643 - RNA, 19 nt, Artificial Sequence
  Description of Artificial Sequence: Synthetic oligonucleotide
  Antisense strand to SEQ ID NO: 2516642
gauuuccaagggcucugga

SEQ ID NO: 2516644 - RNA, 19 nt, Artificial Sequence
  Description of Artificial Sequence: Synthetic oligonucleotide
  Sense strand starting at position 2415 of SEQ ID NO: 1888178
cguagaacucuuuaaccua

SEQ ID NO: 2516645 - RNA, 19 nt, Artificial Sequence
  Description of Artificial Sequence: Synthetic oligonucleotide
  Antisense strand to SEQ ID NO: 2516644
uagguuaaagaguucuacg

SEQ ID NO: 2516646 - RNA, 19 nt, Artificial Sequence
  Description of Artificial Sequence: Synthetic oligonucleotide
  Sense strand starting at position 2680 of SEQ ID NO: 1888178
aaaugcucagagugacaau

SEQ ID NO: 2516647 - RNA, 19 nt, Artificial Sequence
  Description of Artificial Sequence: Synthetic oligonucleotide
  Antisense strand to SEQ ID NO: 2516646
auugucacucugagcauuu

SEQ ID NO: 2516648 - RNA, 19 nt, Artificial Sequence
  Description of Artificial Sequence: Synthetic oligonucleotide
  Sense strand starting at position 2717 of SEQ ID NO: 1888178
augacugggcucugugaca

SEQ ID NO: 2516649 - RNA, 19 nt, Artificial Sequence
  Description of Artificial Sequence: Synthetic oligonucleotide
  Antisense strand to SEQ ID NO: 2516648
ugucacagagcccagucau

SEQ ID NO: 2516650 - RNA, 19 nt, Artificial Sequence
  Description of Artificial Sequence: Synthetic oligonucleotide
  Sense strand starting at position 2835 of SEQ ID NO: 1888178
ggcaguggcaauuaauaaa

SEQ ID NO: 2516651 - RNA, 19 nt, Artificial Sequence
  Description of Artificial Sequence: Synthetic oligonucleotide
  Antisense strand to SEQ ID NO: 2516650
uuuauuaauugccacugcc

SEQ ID NO: 2516652 - RNA, 19 nt, Artificial Sequence
  Description of Artificial Sequence: Synthetic oligonucleotide
  Sense strand starting at position 2950 of SEQ ID NO: 1888178
uuuagagucuuaucaguca

SEQ ID NO: 2516653 - RNA, 19 nt, Artificial Sequence
  Description of Artificial Sequence: Synthetic oligonucleotide
  Antisense strand to SEQ ID NO: 2516652
ugacugauaagacucuaaa

SEQ ID NO: 2516654 - RNA, 19 nt, Artificial Sequence
  Description of Artificial Sequence: Synthetic oligonucleotide
  Sense strand starting at position 2953 of SEQ ID NO: 1888178
agagucuuaucagucaaac

SEQ ID NO: 2516655 - RNA, 19 nt, Artificial Sequence
  Description of Artificial Sequence: Synthetic oligonucleotide
  Antisense strand to SEQ ID NO: 2516654
guuugacugauaagacucu

SEQ ID NO: 2516656 - RNA, 19 nt, Artificial Sequence
  Description of Artificial Sequence: Synthetic oligonucleotide
  Sense strand starting at position 3064 of SEQ ID NO: 1888178
gaagcuauuugcucuguga

SEQ ID NO: 2516657 - RNA, 19 nt, Artificial Sequence
  Description of Artificial Sequence: Synthetic oligonucleotide
  Antisense strand to SEQ ID NO: 2516656
ucacagagcaaauagcuuc

SEQ ID NO: 2516658 - RNA, 19 nt, Artificial Sequence
  Description of Artificial Sequence: Synthetic oligonucleotide
  Sense strand starting at position 3066 of SEQ ID NO: 1888178
agcuauuugcucugugauu

SEQ ID NO: 2516659 - RNA, 19 nt, Artificial Sequence
  Description of Artificial Sequence: Synthetic oligonucleotide
  Antisense strand to SEQ ID NO: 2516658
aaucacagagcaaauagcu

SEQ ID NO: 2516660 - RNA, 19 nt, Artificial Sequence
  Description of Artificial Sequence: Synthetic oligonucleotide
  Sense strand starting at position 3067 of SEQ ID NO: 1888178
gcuauuugcucugugauua

SEQ ID NO: 2516661 - RNA, 19 nt, Artificial Sequence
  Description of Artificial Sequence: Synthetic oligonucleotide
  Antisense strand to SEQ ID NO: 2516660
uaaucacagagcaaauagc

SEQ ID NO: 2516662 - RNA, 19 nt, Artificial Sequence
  Description of Artificial Sequence: Synthetic oligonucleotide
  Sense strand starting at position 3068 of SEQ ID NO: 1888178
cuauuugcucugugauuau

SEQ ID NO: 2516663 - RNA, 19 nt, Artificial Sequence
  Description of Artificial Sequence: Synthetic oligonucleotide
  Antisense strand to SEQ ID NO: 2516662
auaaucacagagcaaauag

SEQ ID NO: 2516664 - RNA, 19 nt, Artificial Sequence
  Description of Artificial Sequence: Synthetic oligonucleotide
  Sense strand starting at position 3244 of SEQ ID NO: 1888178
agcccagcucaagauugaa

SEQ ID NO: 2516665 - RNA, 19 nt, Artificial Sequence
  Description of Artificial Sequence: Synthetic oligonucleotide
  Antisense strand to SEQ ID NO: 2516664
uucaaucuugagcugggcu

SEQ ID NO: 2516666 - RNA, 19 nt, Artificial Sequence
  Description of Artificial Sequence: Synthetic oligonucleotide
  Sense strand starting at position 3288 of SEQ ID NO: 1888178
cugccacuuuguucuauuu

SEQ ID NO: 2516667 - RNA, 19 nt, Artificial Sequence
  Description of Artificial Sequence: Synthetic oligonucleotide
  Antisense strand to SEQ ID NO: 2516666
aaauagaacaaaguggcag

SEQ ID NO: 2516668 - RNA, 19 nt, Artificial Sequence
  Description of Artificial Sequence: Synthetic oligonucleotide
  Sense strand starting at position 3323 of SEQ ID NO: 1888178
ggaugaugcucacccaacu

SEQ ID NO: 2516669 - RNA, 19 nt, Artificial Sequence
  Description of Artificial Sequence: Synthetic oligonucleotide
  Antisense strand to SEQ ID NO: 2516668
aguugggugagcaucaucc

SEQ ID NO: 2516670 - RNA, 19 nt, Artificial Sequence
  Description of Artificial Sequence: Synthetic oligonucleotide
  Sense strand starting at position 3439 of SEQ ID NO: 1888178
guaggaauccuguaucuua

SEQ ID NO: 2516671 - RNA, 19 nt, Artificial Sequence
  Description of Artificial Sequence: Synthetic oligonucleotide
  Antisense strand to SEQ ID NO: 2516670
uaagauacaggauuccuac

SEQ ID NO: 2516672 - RNA, 19 nt, Artificial Sequence
  Description of Artificial Sequence: Synthetic oligonucleotide
  Sense strand starting at position 3504 of SEQ ID NO: 1888178
agugauaaucagcauauca

SEQ ID NO: 2516673 - RNA, 19 nt, Artificial Sequence
  Description of Artificial Sequence: Synthetic oligonucleotide
  Antisense strand to SEQ ID NO: 2516672
ugauaugcugauuaucacu

SEQ ID NO: 2516674 - RNA, 19 nt, Artificial Sequence
  Description of Artificial Sequence: Synthetic oligonucleotide
  Sense strand starting at position 3506 of SEQ ID NO: 1888178
ugauaaucagcauaucagu

SEQ ID NO: 2516675 - RNA, 19 nt, Artificial Sequence
  Description of Artificial Sequence: Synthetic oligonucleotide
  Antisense strand to SEQ ID NO: 2516674
acugauaugcugauuauca

SEQ ID NO: 2516676 - RNA, 19 nt, Artificial Sequence
  Description of Artificial Sequence: Synthetic oligonucleotide
  Sense strand starting at position 3743 of SEQ ID NO: 1888178
aguagaauaguuugaaacu

SEQ ID NO: 2516677 - RNA, 19 nt, Artificial Sequence
  Description of Artificial Sequence: Synthetic oligonucleotide
  Antisense strand to SEQ ID NO: 2516676
aguuucaaacuauucuacu

SEQ ID NO: 2516678 - RNA, 19 nt, Artificial Sequence
  Description of Artificial Sequence: Synthetic oligonucleotide
  Sense strand starting at position 3809 of SEQ ID NO: 1888178
uggaucaaagcauguuaga

SEQ ID NO: 2516679 - RNA, 19 nt, Artificial Sequence
  Description of Artificial Sequence: Synthetic oligonucleotide
  Antisense strand to SEQ ID NO: 2516678
ucuaacaugcuuugaucca

SEQ ID NO: 2516680 - RNA, 19 nt, Artificial Sequence
  Description of Artificial Sequence: Synthetic oligonucleotide
  Sense strand starting at position 3846 of SEQ ID NO: 1888178
cuaaauacauguuuacagu

SEQ ID NO: 2516681 - RNA, 19 nt, Artificial Sequence
  Description of Artificial Sequence: Synthetic oligonucleotide
  Antisense strand to SEQ ID NO: 2516680
acuguaaacauguauuuag

SEQ ID NO: 2516682 - RNA, 19 nt, Artificial Sequence
  Description of Artificial Sequence: Synthetic oligonucleotide
  Sense strand starting at position 3976 of SEQ ID NO: 1888178
ggguguaauaagcaugaca

SEQ ID NO: 2516683 - RNA, 19 nt, Artificial Sequence
  Description of Artificial Sequence: Synthetic oligonucleotide
  Antisense strand to SEQ ID NO: 2516682
ugucaugcuuauuacaccc

SEQ ID NO: 2516684 - RNA, 19 nt, Artificial Sequence
  Description of Artificial Sequence: Synthetic oligonucleotide
  Sense strand starting at position 3978 of SEQ ID NO: 1888178
guguaauaagcaugacaaa

SEQ ID NO: 2516685 - RNA, 19 nt, Artificial Sequence
  Description of Artificial Sequence: Synthetic oligonucleotide
  Antisense strand to SEQ ID NO: 2516684
uuugucaugcuuauuacac

SEQ ID NO: 2516686 - RNA, 19 nt, Artificial Sequence
  Description of Artificial Sequence: Synthetic oligonucleotide
  Sense strand starting at position 50 of SEQ ID NO: 1888179
cuauuacucuuguuguagu

SEQ ID NO: 2516687 - RNA, 19 nt, Artificial Sequence
  Description of Artificial Sequence: Synthetic oligonucleotide
  Antisense strand to SEQ ID NO: 2516686
acuacaacaagaguaauag

SEQ ID NO: 2516688 - RNA, 19 nt, Artificial Sequence
  Description of Artificial Sequence: Synthetic oligonucleotide
  Sense strand starting at position 69 of SEQ ID NO: 1888179
gguggugguugcucuuauu

SEQ ID NO: 2516689 - RNA, 19 nt, Artificial Sequence
  Description of Artificial Sequence: Synthetic oligonucleotide
  Antisense strand to SEQ ID NO: 2516688
aauaagagcaaccaccacc

SEQ ID NO: 2516690 - RNA, 19 nt, Artificial Sequence
  Description of Artificial Sequence: Synthetic oligonucleotide
  Sense strand starting at position 120 of SEQ ID NO: 1888179
uuaacaaguucugacgauu

SEQ ID NO: 2516691 - RNA, 19 nt, Artificial Sequence
  Description of Artificial Sequence: Synthetic oligonucleotide
  Antisense strand to SEQ ID NO: 2516690
aaucgucagaacuuguuaa

SEQ ID NO: 2516692 - RNA, 19 nt, Artificial Sequence
  Description of Artificial Sequence: Synthetic oligonucleotide
  Sense strand starting at position 238 of SEQ ID NO: 1888179
gaguccagugcccaagaaa

SEQ ID NO: 2516693 - RNA, 19 nt, Artificial Sequence
  Description of Artificial Sequence: Synthetic oligonucleotide
  Antisense strand to SEQ ID NO: 2516692
uuucuugggcacuggacuc

SEQ ID NO: 2516694 - RNA, 19 nt, Artificial Sequence
  Description of Artificial Sequence: Synthetic oligonucleotide
  Sense strand starting at position 241 of SEQ ID NO: 1888179
uccagugcccaagaaacuu

SEQ ID NO: 2516695 - RNA, 19 nt, Artificial Sequence
  Description of Artificial Sequence: Synthetic oligonucleotide
  Antisense strand to SEQ ID NO: 2516694
aaguuucuugggcacugga

SEQ ID NO: 2516696 - RNA, 19 nt, Artificial Sequence
  Description of Artificial Sequence: Synthetic oligonucleotide
  Sense strand starting at position 253 of SEQ ID NO: 1888179
gaaacuugguccucggguu

SEQ ID NO: 2516697 - RNA, 19 nt, Artificial Sequence
  Description of Artificial Sequence: Synthetic oligonucleotide
  Antisense strand to SEQ ID NO: 2516696
aacccgaggaccaaguuuc

SEQ ID NO: 2516698 - RNA, 19 nt, Artificial Sequence
  Description of Artificial Sequence: Synthetic oligonucleotide
  Sense strand starting at position 265 of SEQ ID NO: 1888179
ucggguuucucggcaucuu

SEQ ID NO: 2516699 - RNA, 19 nt, Artificial Sequence
  Description of Artificial Sequence: Synthetic oligonucleotide
  Antisense strand to SEQ ID NO: 2516698
aagaugccgagaaacccga

SEQ ID NO: 2516700 - RNA, 19 nt, Artificial Sequence
  Description of Artificial Sequence: Synthetic oligonucleotide
  Sense strand starting at position 328 of SEQ ID NO: 1888179
guuaaugauuuccaaagga

SEQ ID NO: 2516701 - RNA, 19 nt, Artificial Sequence
  Description of Artificial Sequence: Synthetic oligonucleotide
  Antisense strand to SEQ ID NO: 2516700
uccuuuggaaaucauuaac

SEQ ID NO: 2516702 - RNA, 19 nt, Artificial Sequence
  Description of Artificial Sequence: Synthetic oligonucleotide
  Sense strand starting at position 577 of SEQ ID NO: 1888179
guuaaauagcuccgcauuc

SEQ ID NO: 2516703 - RNA, 19 nt, Artificial Sequence
  Description of Artificial Sequence: Synthetic oligonucleotide
  Antisense strand to SEQ ID NO: 2516702
gaaugcggagcuauuuaac

SEQ ID NO: 2516704 - RNA, 19 nt, Artificial Sequence
  Description of Artificial Sequence: Synthetic oligonucleotide
  Sense strand starting at position 892 of SEQ ID NO: 1888179
aggcgacaauaauaauuua

SEQ ID NO: 2516705 - RNA, 19 nt, Artificial Sequence
  Description of Artificial Sequence: Synthetic oligonucleotide
  Antisense strand to SEQ ID NO: 2516704
uaaauuauuauugucgccu

SEQ ID NO: 2516706 - RNA, 19 nt, Artificial Sequence
  Description of Artificial Sequence: Synthetic oligonucleotide
  Sense strand starting at position 916 of SEQ ID NO: 1888179
augaaacauucugugccaa

SEQ ID NO: 2516707 - RNA, 19 nt, Artificial Sequence
  Description of Artificial Sequence: Synthetic oligonucleotide
  Antisense strand to SEQ ID NO: 2516706
uuggcacagaauguuucau

SEQ ID NO: 2516708 - RNA, 19 nt, Artificial Sequence
  Description of Artificial Sequence: Synthetic oligonucleotide
  Sense strand starting at position 917 of SEQ ID NO: 1888179
ugaaacauucugugccaag

SEQ ID NO: 2516709 - RNA, 19 nt, Artificial Sequence
  Description of Artificial Sequence: Synthetic oligonucleotide
  Antisense strand to SEQ ID NO: 2516708
cuuggcacagaauguuuca

SEQ ID NO: 2516710 - RNA, 19 nt, Artificial Sequence
  Description of Artificial Sequence: Synthetic oligonucleotide
  Sense strand starting at position 981 of SEQ ID NO: 1888179
guacuacauuccgugaggu

SEQ ID NO: 2516711 - RNA, 19 nt, Artificial Sequence
  Description of Artificial Sequence: Synthetic oligonucleotide
  Antisense strand to SEQ ID NO: 2516710
accucacggaauguaguac

SEQ ID NO: 2516712 - RNA, 19 nt, Artificial Sequence
  Description of Artificial Sequence: Synthetic oligonucleotide
  Sense strand starting at position 982 of SEQ ID NO: 1888179
uacuacauuccgugagguu

SEQ ID NO: 2516713 - RNA, 19 nt, Artificial Sequence
  Description of Artificial Sequence: Synthetic oligonucleotide
  Antisense strand to SEQ ID NO: 2516712
aaccucacggaauguagua

SEQ ID NO: 2516714 - RNA, 19 nt, Artificial Sequence
  Description of Artificial Sequence: Synthetic oligonucleotide
  Sense strand starting at position 983 of SEQ ID NO: 1888179
acuacauuccgugagguua

SEQ ID NO: 2516715 - RNA, 19 nt, Artificial Sequence
  Description of Artificial Sequence: Synthetic oligonucleotide
  Antisense strand to SEQ ID NO: 2516714
uaaccucacggaauguagu

SEQ ID NO: 2516716 - RNA, 19 nt, Artificial Sequence
  Description of Artificial Sequence: Synthetic oligonucleotide
  Sense strand starting at position 996 of SEQ ID NO: 1888179
agguuaguacuguaauaca

SEQ ID NO: 2516717 - RNA, 19 nt, Artificial Sequence
  Description of Artificial Sequence: Synthetic oligonucleotide
  Antisense strand to SEQ ID NO: 2516716
uguauuacaguacuaaccu

SEQ ID NO: 2516718 - RNA, 19 nt, Artificial Sequence
  Description of Artificial Sequence: Synthetic oligonucleotide
  Sense strand starting at position 1043 of SEQ ID NO: 1888179
acauaauucgccugcaagu

SEQ ID NO: 2516719 - RNA, 19 nt, Artificial Sequence
  Description of Artificial Sequence: Synthetic oligonucleotide
  Antisense strand to SEQ ID NO: 2516718
acuugcaggcgaauuaugu

SEQ ID NO: 2516720 - RNA, 19 nt, Artificial Sequence
  Description of Artificial Sequence: Synthetic oligonucleotide
  Sense strand starting at position 1059 of SEQ ID NO: 1888179
aguacuggguucuucgaua

SEQ ID NO: 2516721 - RNA, 19 nt, Artificial Sequence
  Description of Artificial Sequence: Synthetic oligonucleotide
  Antisense strand to SEQ ID NO: 2516720
uaucgaagaacccaguacu

SEQ ID NO: 2516722 - RNA, 19 nt, Artificial Sequence
  Description of Artificial Sequence: Synthetic oligonucleotide
  Sense strand starting at position 1098 of SEQ ID NO: 1888179
ggguguaccuggcuuaaug

SEQ ID NO: 2516723 - RNA, 19 nt, Artificial Sequence
  Description of Artificial Sequence: Synthetic oligonucleotide
  Antisense strand to SEQ ID NO: 2516722
cauuaagccagguacaccc

SEQ ID NO: 2516724 - RNA, 19 nt, Artificial Sequence
  Description of Artificial Sequence: Synthetic oligonucleotide
  Sense strand starting at position 1100 of SEQ ID NO: 1888179
guguaccuggcuuaauguu

SEQ ID NO: 2516725 - RNA, 19 nt, Artificial Sequence
  Description of Artificial Sequence: Synthetic oligonucleotide
  Antisense strand to SEQ ID NO: 2516724
aacauuaagccagguacac

SEQ ID NO: 2516726 - RNA, 19 nt, Artificial Sequence
  Description of Artificial Sequence: Synthetic oligonucleotide
  Sense strand starting at position 1108 of SEQ ID NO: 1888179
ggcuuaauguuagugcuca

SEQ ID NO: 2516727 - RNA, 19 nt, Artificial Sequence
  Description of Artificial Sequence: Synthetic oligonucleotide
  Antisense strand to SEQ ID NO: 2516726
ugagcacuaacauuaagcc

SEQ ID NO: 2516728 - RNA, 19 nt, Artificial Sequence
  Description of Artificial Sequence: Synthetic oligonucleotide
  Sense strand starting at position 1242 of SEQ ID NO: 1888179
uuguaaaggguucaguuga

SEQ ID NO: 2516729 - RNA, 19 nt, Artificial Sequence
  Description of Artificial Sequence: Synthetic oligonucleotide
  Antisense strand to SEQ ID NO: 2516728
ucaacugaacccuuuacaa

SEQ ID NO: 2516730 - RNA, 19 nt, Artificial Sequence
  Description of Artificial Sequence: Synthetic oligonucleotide
  Sense strand starting at position 1277 of SEQ ID NO: 1888179
ggugcuaagggcuauugau

SEQ ID NO: 2516731 - RNA, 19 nt, Artificial Sequence
  Description of Artificial Sequence: Synthetic oligonucleotide
  Antisense strand to SEQ ID NO: 2516730
aucaauagcccuuagcacc

SEQ ID NO: 2516732 - RNA, 19 nt, Artificial Sequence
  Description of Artificial Sequence: Synthetic oligonucleotide
  Sense strand starting at position 1344 of SEQ ID NO: 1888179
ugggacaaguucuuuguca

SEQ ID NO: 2516733 - RNA, 19 nt, Artificial Sequence
  Description of Artificial Sequence: Synthetic oligonucleotide
  Antisense strand to SEQ ID NO: 2516732
ugacaaagaacuuguccca

SEQ ID NO: 2516734 - RNA, 19 nt, Artificial Sequence
  Description of Artificial Sequence: Synthetic oligonucleotide
  Sense strand starting at position 1345 of SEQ ID NO: 1888179
gggacaaguucuuugucau

SEQ ID NO: 2516735 - RNA, 19 nt, Artificial Sequence
  Description of Artificial Sequence: Synthetic oligonucleotide
  Antisense strand to SEQ ID NO: 2516734
augacaaagaacuuguccc

SEQ ID NO: 2516736 - RNA, 19 nt, Artificial Sequence
  Description of Artificial Sequence: Synthetic oligonucleotide
  Sense strand starting at position 1357 of SEQ ID NO: 1888179
uugucauuccugggacuca

SEQ ID NO: 2516737 - RNA, 19 nt, Artificial Sequence
  Description of Artificial Sequence: Synthetic oligonucleotide
  Antisense strand to SEQ ID NO: 2516736
ugagucccaggaaugacaa

SEQ ID NO: 2516738 - RNA, 19 nt, Artificial Sequence
  Description of Artificial Sequence: Synthetic oligonucleotide
  Sense strand starting at position 1409 of SEQ ID NO: 1888179
ggcagcaauccuugagggu

SEQ ID NO: 2516739 - RNA, 19 nt, Artificial Sequence
  Description of Artificial Sequence: Synthetic oligonucleotide
  Antisense strand to SEQ ID NO: 2516738
acccucaaggauugcugcc

SEQ ID NO: 2516740 - RNA, 19 nt, Artificial Sequence
  Description of Artificial Sequence: Synthetic oligonucleotide
  Sense strand starting at position 1410 of SEQ ID NO: 1888179
gcagcaauccuugaggguu

SEQ ID NO: 2516741 - RNA, 19 nt, Artificial Sequence
  Description of Artificial Sequence: Synthetic oligonucleotide
  Antisense strand to SEQ ID NO: 2516740
aacccucaaggauugcugc

SEQ ID NO: 2516742 - RNA, 19 nt, Artificial Sequence
  Description of Artificial Sequence: Synthetic oligonucleotide
  Sense strand starting at position 1458 of SEQ ID NO: 1888179
ggaguugccacgugaacuu

SEQ ID NO: 2516743 - RNA, 19 nt, Artificial Sequence
  Description of Artificial Sequence: Synthetic oligonucleotide
  Antisense strand to SEQ ID NO: 2516742
aaguucacguggcaacucc

SEQ ID NO: 2516744 - RNA, 19 nt, Artificial Sequence
  Description of Artificial Sequence: Synthetic oligonucleotide
  Sense strand starting at position 1479 of SEQ ID NO: 1888179
gaggaaggguuugcccaaa

SEQ ID NO: 2516745 - RNA, 19 nt, Artificial Sequence
  Description of Artificial Sequence: Synthetic oligonucleotide
  Antisense strand to SEQ ID NO: 2516744
uuugggcaaacccuuccuc

SEQ ID NO: 2516746 - RNA, 19 nt, Artificial Sequence
  Description of Artificial Sequence: Synthetic oligonucleotide
  Sense strand starting at position 1638 of SEQ ID NO: 1888179
ugcagagaugccuacaaug

SEQ ID NO: 2516747 - RNA, 19 nt, Artificial Sequence
  Description of Artificial Sequence: Synthetic oligonucleotide
  Antisense strand to SEQ ID NO: 2516746
cauuguaggcaucucugca

SEQ ID NO: 2516748 - RNA, 19 nt, Artificial Sequence
  Description of Artificial Sequence: Synthetic oligonucleotide
  Sense strand starting at position 1829 of SEQ ID NO: 1888179
ggaagaucagcuuacuccu

SEQ ID NO: 2516749 - RNA, 19 nt, Artificial Sequence
  Description of Artificial Sequence: Synthetic oligonucleotide
  Antisense strand to SEQ ID NO: 2516748
aggaguaagcugaucuucc

SEQ ID NO: 2516750 - RNA, 19 nt, Artificial Sequence
  Description of Artificial Sequence: Synthetic oligonucleotide
  Sense strand starting at position 1860 of SEQ ID NO: 1888179
ggcguagacacucauacau

SEQ ID NO: 2516751 - RNA, 19 nt, Artificial Sequence
  Description of Artificial Sequence: Synthetic oligonucleotide
  Antisense strand to SEQ ID NO: 2516750
auguaugagugucuacgcc

SEQ ID NO: 2516752 - RNA, 19 nt, Artificial Sequence
  Description of Artificial Sequence: Synthetic oligonucleotide
  Sense strand starting at position 1900 of SEQ ID NO: 1888179
cauacauguccaggaagau

SEQ ID NO: 2516753 - RNA, 19 nt, Artificial Sequence
  Description of Artificial Sequence: Synthetic oligonucleotide
  Antisense strand to SEQ ID NO: 2516752
aucuuccuggacauguaug

SEQ ID NO: 2516754 - RNA, 19 nt, Artificial Sequence
  Description of Artificial Sequence: Synthetic oligonucleotide
  Sense strand starting at position 1912 of SEQ ID NO: 1888179
ggaagauucuuagacccuu

SEQ ID NO: 2516755 - RNA, 19 nt, Artificial Sequence
  Description of Artificial Sequence: Synthetic oligonucleotide
  Antisense strand to SEQ ID NO: 2516754
aagggucuaagaaucuucc

SEQ ID NO: 2516756 - RNA, 19 nt, Artificial Sequence
  Description of Artificial Sequence: Synthetic oligonucleotide
  Sense strand starting at position 2286 of SEQ ID NO: 1888179
uccacaucuuggcaaggaa

SEQ ID NO: 2516757 - RNA, 19 nt, Artificial Sequence
  Description of Artificial Sequence: Synthetic oligonucleotide
  Antisense strand to SEQ ID NO: 2516756
uuccuugccaagaugugga

SEQ ID NO: 2516758 - RNA, 19 nt, Artificial Sequence
  Description of Artificial Sequence: Synthetic oligonucleotide
  Sense strand starting at position 2333 of SEQ ID NO: 1888179
acuuaaauggcuugcucaa

SEQ ID NO: 2516759 - RNA, 19 nt, Artificial Sequence
  Description of Artificial Sequence: Synthetic oligonucleotide
  Antisense strand to SEQ ID NO: 2516758
uugagcaagccauuuaagu

SEQ ID NO: 2516760 - RNA, 19 nt, Artificial Sequence
  Description of Artificial Sequence: Synthetic oligonucleotide
  Sense strand starting at position 2423 of SEQ ID NO: 1888179
cccaaugaucacugugaga

SEQ ID NO: 2516761 - RNA, 19 nt, Artificial Sequence
  Description of Artificial Sequence: Synthetic oligonucleotide
  Antisense strand to SEQ ID NO: 2516760
ucucacagugaucauuggg

SEQ ID NO: 2516762 - RNA, 19 nt, Artificial Sequence
  Description of Artificial Sequence: Synthetic oligonucleotide
  Sense strand starting at position 2426 of SEQ ID NO: 1888179
aaugaucacugugagaaac

SEQ ID NO: 2516763 - RNA, 19 nt, Artificial Sequence
  Description of Artificial Sequence: Synthetic oligonucleotide
  Antisense strand to SEQ ID NO: 2516762
guuucucacagugaucauu

SEQ ID NO: 2516764 - RNA, 19 nt, Artificial Sequence
  Description of Artificial Sequence: Synthetic oligonucleotide
  Sense strand starting at position 2541 of SEQ ID NO: 1888179
cucauucaggccgguaaga

SEQ ID NO: 2516765 - RNA, 19 nt, Artificial Sequence
  Description of Artificial Sequence: Synthetic oligonucleotide
  Antisense strand to SEQ ID NO: 2516764
ucuuaccggccugaaugag

SEQ ID NO: 2516766 - RNA, 19 nt, Artificial Sequence
  Description of Artificial Sequence: Synthetic oligonucleotide
  Sense strand starting at position 28 of SEQ ID NO: 1888180
acuccuaacuccguaagga

SEQ ID NO: 2516767 - RNA, 19 nt, Artificial Sequence
  Description of Artificial Sequence: Synthetic oligonucleotide
  Antisense strand to SEQ ID NO: 2516766
uccuuacggaguuaggagu

SEQ ID NO: 2516768 - RNA, 19 nt, Artificial Sequence
  Description of Artificial Sequence: Synthetic oligonucleotide
  Sense strand starting at position 29 of SEQ ID NO: 1888180
cuccuaacuccguaaggaa

SEQ ID NO: 2516769 - RNA, 19 nt, Artificial Sequence
  Description of Artificial Sequence: Synthetic oligonucleotide
  Antisense strand to SEQ ID NO: 2516768
uuccuuacggaguuaggag

SEQ ID NO: 2516770 - RNA, 19 nt, Artificial Sequence
  Description of Artificial Sequence: Synthetic oligonucleotide
  Sense strand starting at position 295 of SEQ ID NO: 1888180
aggugacccugauucugau

SEQ ID NO: 2516771 - RNA, 19 nt, Artificial Sequence
  Description of Artificial Sequence: Synthetic oligonucleotide
  Antisense strand to SEQ ID NO: 2516770
aucagaaucagggucaccu

SEQ ID NO: 2516772 - RNA, 19 nt, Artificial Sequence
  Description of Artificial Sequence: Synthetic oligonucleotide
  Sense strand starting at position 534 of SEQ ID NO: 1888180
agucauuaucugggccaaa

SEQ ID NO: 2516773 - RNA, 19 nt, Artificial Sequence
  Description of Artificial Sequence: Synthetic oligonucleotide
  Antisense strand to SEQ ID NO: 2516772
uuuggcccagauaaugacu

SEQ ID NO: 2516774 - RNA, 19 nt, Artificial Sequence
  Description of Artificial Sequence: Synthetic oligonucleotide
  Sense strand starting at position 535 of SEQ ID NO: 1888180
gucauuaucugggccaaac

SEQ ID NO: 2516775 - RNA, 19 nt, Artificial Sequence
  Description of Artificial Sequence: Synthetic oligonucleotide
  Antisense strand to SEQ ID NO: 2516774
guuuggcccagauaaugac

SEQ ID NO: 2516776 - RNA, 19 nt, Artificial Sequence
  Description of Artificial Sequence: Synthetic oligonucleotide
  Sense strand starting at position 555 of SEQ ID NO: 1888180
gucaauaaugcugaggcua

SEQ ID NO: 2516777 - RNA, 19 nt, Artificial Sequence
  Description of Artificial Sequence: Synthetic oligonucleotide
  Antisense strand to SEQ ID NO: 2516776
uagccucagcauuauugac

SEQ ID NO: 2516778 - RNA, 19 nt, Artificial Sequence
  Description of Artificial Sequence: Synthetic oligonucleotide
  Sense strand starting at position 904 of SEQ ID NO: 1888180
agugauucuacaugauggu

SEQ ID NO: 2516779 - RNA, 19 nt, Artificial Sequence
  Description of Artificial Sequence: Synthetic oligonucleotide
  Antisense strand to SEQ ID NO: 2516778
accaucauguagaaucacu

SEQ ID NO: 2516780 - RNA, 19 nt, Artificial Sequence
  Description of Artificial Sequence: Synthetic oligonucleotide
  Sense strand starting at position 1101 of SEQ ID NO: 1888180
agagucuucuugccuagag

SEQ ID NO: 2516781 - RNA, 19 nt, Artificial Sequence
  Description of Artificial Sequence: Synthetic oligonucleotide
  Antisense strand to SEQ ID NO: 2516780
cucuaggcaagaagacucu

SEQ ID NO: 2516782 - RNA, 19 nt, Artificial Sequence
  Description of Artificial Sequence: Synthetic oligonucleotide
  Sense strand starting at position 1105 of SEQ ID NO: 1888180
ucuucuugccuagagcaga

SEQ ID NO: 2516783 - RNA, 19 nt, Artificial Sequence
  Description of Artificial Sequence: Synthetic oligonucleotide
  Antisense strand to SEQ ID NO: 2516782
ucugcucuaggcaagaaga

SEQ ID NO: 2516784 - RNA, 19 nt, Artificial Sequence
  Description of Artificial Sequence: Synthetic oligonucleotide
  Sense strand starting at position 1520 of SEQ ID NO: 1888180
gguuucuuagucuagacca

SEQ ID NO: 2516785 - RNA, 19 nt, Artificial Sequence
  Description of Artificial Sequence: Synthetic oligonucleotide
  Antisense strand to SEQ ID NO: 2516784
uggucuagacuaagaaacc

SEQ ID NO: 2516786 - RNA, 19 nt, Artificial Sequence
  Description of Artificial Sequence: Synthetic oligonucleotide
  Sense strand starting at position 1564 of SEQ ID NO: 1888180
ugccuuuccacagagguga

SEQ ID NO: 2516787 - RNA, 19 nt, Artificial Sequence
  Description of Artificial Sequence: Synthetic oligonucleotide
  Antisense strand to SEQ ID NO: 2516786
ucaccucuguggaaaggca

SEQ ID NO: 2516788 - RNA, 19 nt, Artificial Sequence
  Description of Artificial Sequence: Synthetic oligonucleotide
  Sense strand starting at position 1577 of SEQ ID NO: 1888180
aggugagaucaugguucau

SEQ ID NO: 2516789 - RNA, 19 nt, Artificial Sequence
  Description of Artificial Sequence: Synthetic oligonucleotide
  Antisense strand to SEQ ID NO: 2516788
augaaccaugaucucaccu

SEQ ID NO: 2516790 - RNA, 19 nt, Artificial Sequence
  Description of Artificial Sequence: Synthetic oligonucleotide
  Sense strand starting at position 1815 of SEQ ID NO: 1888180
cgagcacuuccggugcuaa

SEQ ID NO: 2516791 - RNA, 19 nt, Artificial Sequence
  Description of Artificial Sequence: Synthetic oligonucleotide
  Antisense strand to SEQ ID NO: 2516790
uuagcaccggaagugcucg

SEQ ID NO: 2516792 - RNA, 19 nt, Artificial Sequence
  Description of Artificial Sequence: Synthetic oligonucleotide
  Sense strand starting at position 1857 of SEQ ID NO: 1888180
gaccuuaccuuugugggua

SEQ ID NO: 2516793 - RNA, 19 nt, Artificial Sequence
  Description of Artificial Sequence: Synthetic oligonucleotide
  Antisense strand to SEQ ID NO: 2516792
uacccacaaagguaagguc

SEQ ID NO: 2516794 - RNA, 19 nt, Artificial Sequence
  Description of Artificial Sequence: Synthetic oligonucleotide
  Sense strand starting at position 1915 of SEQ ID NO: 1888180
ggagaguuuccgcagguga

SEQ ID NO: 2516795 - RNA, 19 nt, Artificial Sequence
  Description of Artificial Sequence: Synthetic oligonucleotide
  Antisense strand to SEQ ID NO: 2516794
ucaccugcggaaacucucc

SEQ ID NO: 2516796 - RNA, 19 nt, Artificial Sequence
  Description of Artificial Sequence: Synthetic oligonucleotide
  Sense strand starting at position 1992 of SEQ ID NO: 1888180
cugccaccugcguucuuaa

SEQ ID NO: 2516797 - RNA, 19 nt, Artificial Sequence
  Description of Artificial Sequence: Synthetic oligonucleotide
  Antisense strand to SEQ ID NO: 2516796
uuaagaacgcagguggcag

SEQ ID NO: 2516798 - RNA, 19 nt, Artificial Sequence
  Description of Artificial Sequence: Synthetic oligonucleotide
  Sense strand starting at position 1993 of SEQ ID NO: 1888180
ugccaccugcguucuuaau

SEQ ID NO: 2516799 - RNA, 19 nt, Artificial Sequence
  Description of Artificial Sequence: Synthetic oligonucleotide
  Antisense strand to SEQ ID NO: 2516798
auuaagaacgcagguggca

SEQ ID NO: 2516800 - RNA, 19 nt, Artificial Sequence
  Description of Artificial Sequence: Synthetic oligonucleotide
  Sense strand starting at position 2186 of SEQ ID NO: 1888180
ugcuuccaacugugagaau

SEQ ID NO: 2516801 - RNA, 19 nt, Artificial Sequence
  Description of Artificial Sequence: Synthetic oligonucleotide
  Antisense strand to SEQ ID NO: 2516800
auucucacaguuggaagca

SEQ ID NO: 2516802 - RNA, 19 nt, Artificial Sequence
  Description of Artificial Sequence: Synthetic oligonucleotide
  Sense strand starting at position 2198 of SEQ ID NO: 1888180
ugagaaugcaguugucaca

SEQ ID NO: 2516803 - RNA, 19 nt, Artificial Sequence
  Description of Artificial Sequence: Synthetic oligonucleotide
  Antisense strand to SEQ ID NO: 2516802
ugugacaacugcauucuca

SEQ ID NO: 2516804 - RNA, 19 nt, Artificial Sequence
  Description of Artificial Sequence: Synthetic oligonucleotide
  Sense strand starting at position 2273 of SEQ ID NO: 1888180
gcacucuuugccuaagaca

SEQ ID NO: 2516805 - RNA, 19 nt, Artificial Sequence
  Description of Artificial Sequence: Synthetic oligonucleotide
  Antisense strand to SEQ ID NO: 2516804
ugucuuaggcaaagagugc

SEQ ID NO: 2516806 - RNA, 19 nt, Artificial Sequence
  Description of Artificial Sequence: Synthetic oligonucleotide
  Sense strand starting at position 2327 of SEQ ID NO: 1888180
guguaaacuggugauguau

SEQ ID NO: 2516807 - RNA, 19 nt, Artificial Sequence
  Description of Artificial Sequence: Synthetic oligonucleotide
  Antisense strand to SEQ ID NO: 2516806
auacaucaccaguuuacac

SEQ ID NO: 2516808 - RNA, 19 nt, Artificial Sequence
  Description of Artificial Sequence: Synthetic oligonucleotide
  Sense strand starting at position 2404 of SEQ ID NO: 1888180
cuggacaacucaccuguua

SEQ ID NO: 2516809 - RNA, 19 nt, Artificial Sequence
  Description of Artificial Sequence: Synthetic oligonucleotide
  Antisense strand to SEQ ID NO: 2516808
uaacaggugaguuguccag

SEQ ID NO: 2516810 - RNA, 19 nt, Artificial Sequence
  Description of Artificial Sequence: Synthetic oligonucleotide
  Sense strand starting at position 2490 of SEQ ID NO: 1888180
cugaaaucaugucuguuaa

SEQ ID NO: 2516811 - RNA, 19 nt, Artificial Sequence
  Description of Artificial Sequence: Synthetic oligonucleotide
  Antisense strand to SEQ ID NO: 2516810
uuaacagacaugauuucag

SEQ ID NO: 2516812 - RNA, 19 nt, Artificial Sequence
  Description of Artificial Sequence: Synthetic oligonucleotide
  Sense strand starting at position 2491 of SEQ ID NO: 1888180
ugaaaucaugucuguuaag

SEQ ID NO: 2516813 - RNA, 19 nt, Artificial Sequence
  Description of Artificial Sequence: Synthetic oligonucleotide
  Antisense strand to SEQ ID NO: 2516812
cuuaacagacaugauuuca

SEQ ID NO: 2516814 - RNA, 19 nt, Artificial Sequence
  Description of Artificial Sequence: Synthetic oligonucleotide
  Sense strand starting at position 2492 of SEQ ID NO: 1888180
gaaaucaugucuguuaagg

SEQ ID NO: 2516815 - RNA, 19 nt, Artificial Sequence
  Description of Artificial Sequence: Synthetic oligonucleotide
  Antisense strand to SEQ ID NO: 2516814
ccuuaacagacaugauuuc

SEQ ID NO: 2516816 - RNA, 19 nt, Artificial Sequence
  Description of Artificial Sequence: Synthetic oligonucleotide
  Sense strand starting at position 2685 of SEQ ID NO: 1888180
gaagaauacacguggugaa

SEQ ID NO: 2516817 - RNA, 19 nt, Artificial Sequence
  Description of Artificial Sequence: Synthetic oligonucleotide
  Antisense strand to SEQ ID NO: 2516816
uucaccacguguauucuuc

SEQ ID NO: 2516818 - RNA, 19 nt, Artificial Sequence
  Description of Artificial Sequence: Synthetic oligonucleotide
  Sense strand starting at position 2686 of SEQ ID NO: 1888180
aagaauacacguggugaau

SEQ ID NO: 2516819 - RNA, 19 nt, Artificial Sequence
  Description of Artificial Sequence: Synthetic oligonucleotide
  Antisense strand to SEQ ID NO: 2516818
auucaccacguguauucuu

SEQ ID NO: 2516820 - RNA, 19 nt, Artificial Sequence
  Description of Artificial Sequence: Synthetic oligonucleotide
  Sense strand starting at position 2812 of SEQ ID NO: 1888180
gugaaacuaugacugacau

SEQ ID NO: 2516821 - RNA, 19 nt, Artificial Sequence
  Description of Artificial Sequence: Synthetic oligonucleotide
  Antisense strand to SEQ ID NO: 2516820
augucagucauaguuucac

SEQ ID NO: 2516822 - RNA, 19 nt, Artificial Sequence
  Description of Artificial Sequence: Synthetic oligonucleotide
  Sense strand starting at position 2984 of SEQ ID NO: 1888180
cuagaaguauaagcugauu

SEQ ID NO: 2516823 - RNA, 19 nt, Artificial Sequence
  Description of Artificial Sequence: Synthetic oligonucleotide
  Antisense strand to SEQ ID NO: 2516822
aaucagcuuauacuucuag

SEQ ID NO: 2516824 - RNA, 19 nt, Artificial Sequence
  Description of Artificial Sequence: Synthetic oligonucleotide
  Sense strand starting at position 3059 of SEQ ID NO: 1888180
uguacuuggcacuauuaua

SEQ ID NO: 2516825 - RNA, 19 nt, Artificial Sequence
  Description of Artificial Sequence: Synthetic oligonucleotide
  Antisense strand to SEQ ID NO: 2516824
uauaauagugccaaguaca

SEQ ID NO: 2516826 - RNA, 19 nt, Artificial Sequence
  Description of Artificial Sequence: Synthetic oligonucleotide
  Sense strand starting at position 3073 of SEQ ID NO: 1888180
uuauaauuacgugacaugu

SEQ ID NO: 2516827 - RNA, 19 nt, Artificial Sequence
  Description of Artificial Sequence: Synthetic oligonucleotide
  Antisense strand to SEQ ID NO: 2516826
acaugucacguaauuauaa

SEQ ID NO: 2516828 - RNA, 19 nt, Artificial Sequence
  Description of Artificial Sequence: Synthetic oligonucleotide
  Sense strand starting at position 3201 of SEQ ID NO: 1888180
caagauauccagggccaga

SEQ ID NO: 2516829 - RNA, 19 nt, Artificial Sequence
  Description of Artificial Sequence: Synthetic oligonucleotide
  Antisense strand to SEQ ID NO: 2516828
ucuggcccuggauaucuug

SEQ ID NO: 2516830 - RNA, 19 nt, Artificial Sequence
  Description of Artificial Sequence: Synthetic oligonucleotide
  Sense strand starting at position 3574 of SEQ ID NO: 1888180
uggucuucucaguaaacac

SEQ ID NO: 2516831 - RNA, 19 nt, Artificial Sequence
  Description of Artificial Sequence: Synthetic oligonucleotide
  Antisense strand to SEQ ID NO: 2516830
guguuuacugagaagacca

SEQ ID NO: 2516832 - RNA, 19 nt, Artificial Sequence
  Description of Artificial Sequence: Synthetic oligonucleotide
  Sense strand starting at position 3593 of SEQ ID NO: 1888180
aacuuuggacucggaugua

SEQ ID NO: 2516833 - RNA, 19 nt, Artificial Sequence
  Description of Artificial Sequence: Synthetic oligonucleotide
  Antisense strand to SEQ ID NO: 2516832
uacauccgaguccaaaguu

SEQ ID NO: 2516834 - RNA, 19 nt, Artificial Sequence
  Description of Artificial Sequence: Synthetic oligonucleotide
  Sense strand starting at position 3596 of SEQ ID NO: 1888180
uuuggacucggauguaaag

SEQ ID NO: 2516835 - RNA, 19 nt, Artificial Sequence
  Description of Artificial Sequence: Synthetic oligonucleotide
  Antisense strand to SEQ ID NO: 2516834
cuuuacauccgaguccaaa

SEQ ID NO: 2516836 - RNA, 19 nt, Artificial Sequence
  Description of Artificial Sequence: Synthetic oligonucleotide
  Sense strand starting at position 3598 of SEQ ID NO: 1888180
uggacucggauguaaaguu

SEQ ID NO: 2516837 - RNA, 19 nt, Artificial Sequence
  Description of Artificial Sequence: Synthetic oligonucleotide
  Antisense strand to SEQ ID NO: 2516836
aacuuuacauccgagucca

SEQ ID NO: 2516838 - RNA, 19 nt, Artificial Sequence
  Description of Artificial Sequence: Synthetic oligonucleotide
  Sense strand starting at position 3726 of SEQ ID NO: 1888180
gagagaagucacugugaua

SEQ ID NO: 2516839 - RNA, 19 nt, Artificial Sequence
  Description of Artificial Sequence: Synthetic oligonucleotide
  Antisense strand to SEQ ID NO: 2516838
uaucacagugacuucucuc

SEQ ID NO: 2516840 - RNA, 19 nt, Artificial Sequence
  Description of Artificial Sequence: Synthetic oligonucleotide
  Sense strand starting at position 3853 of SEQ ID NO: 1888180
ccugacaaucaaugacgua

SEQ ID NO: 2516841 - RNA, 19 nt, Artificial Sequence
  Description of Artificial Sequence: Synthetic oligonucleotide
  Antisense strand to SEQ ID NO: 2516840
uacgucauugauugucagg

SEQ ID NO: 2516842 - RNA, 19 nt, Artificial Sequence
  Description of Artificial Sequence: Synthetic oligonucleotide
  Sense strand starting at position 3887 of SEQ ID NO: 1888180
gugaaagugcucuaaguca

SEQ ID NO: 2516843 - RNA, 19 nt, Artificial Sequence
  Description of Artificial Sequence: Synthetic oligonucleotide
  Antisense strand to SEQ ID NO: 2516842
ugacuuagagcacuuucac

SEQ ID NO: 2516844 - RNA, 19 nt, Artificial Sequence
  Description of Artificial Sequence: Synthetic oligonucleotide
  Sense strand starting at position 3962 of SEQ ID NO: 1888180
gccuguucuccuuacagga

SEQ ID NO: 2516845 - RNA, 19 nt, Artificial Sequence
  Description of Artificial Sequence: Synthetic oligonucleotide
  Antisense strand to SEQ ID NO: 2516844
uccuguaaggagaacaggc

SEQ ID NO: 2516846 - RNA, 19 nt, Artificial Sequence
  Description of Artificial Sequence: Synthetic oligonucleotide
  Sense strand starting at position 584 of SEQ ID NO: 1888181
ggccucagaucccagaguu

SEQ ID NO: 2516847 - RNA, 19 nt, Artificial Sequence
  Description of Artificial Sequence: Synthetic oligonucleotide
  Antisense strand to SEQ ID NO: 2516846
aacucugggaucugaggcc

SEQ ID NO: 2516848 - RNA, 19 nt, Artificial Sequence
  Description of Artificial Sequence: Synthetic oligonucleotide
  Sense strand starting at position 808 of SEQ ID NO: 1888181
cagugucucgcuuguguaa

SEQ ID NO: 2516849 - RNA, 19 nt, Artificial Sequence
  Description of Artificial Sequence: Synthetic oligonucleotide
  Antisense strand to SEQ ID NO: 2516848
uuacacaagcgagacacug

SEQ ID NO: 2516850 - RNA, 19 nt, Artificial Sequence
  Description of Artificial Sequence: Synthetic oligonucleotide
  Sense strand starting at position 874 of SEQ ID NO: 1888181
uuccuugaccacugaggaa

SEQ ID NO: 2516851 - RNA, 19 nt, Artificial Sequence
  Description of Artificial Sequence: Synthetic oligonucleotide
  Antisense strand to SEQ ID NO: 2516850
uuccucaguggucaaggaa

SEQ ID NO: 2516852 - RNA, 19 nt, Artificial Sequence
  Description of Artificial Sequence: Synthetic oligonucleotide
  Sense strand starting at position 910 of SEQ ID NO: 1888181
gccagcaggcgucaguuaa

SEQ ID NO: 2516853 - RNA, 19 nt, Artificial Sequence
  Description of Artificial Sequence: Synthetic oligonucleotide
  Antisense strand to SEQ ID NO: 2516852
uuaacugacgccugcuggc

SEQ ID NO: 2516854 - RNA, 19 nt, Artificial Sequence
  Description of Artificial Sequence: Synthetic oligonucleotide
  Sense strand starting at position 1009 of SEQ ID NO: 1888181
guaagauugaugggcgcua

SEQ ID NO: 2516855 - RNA, 19 nt, Artificial Sequence
  Description of Artificial Sequence: Synthetic oligonucleotide
  Antisense strand to SEQ ID NO: 2516854
uagcgcccaucaaucuuac

SEQ ID NO: 2516856 - RNA, 19 nt, Artificial Sequence
  Description of Artificial Sequence: Synthetic oligonucleotide
  Sense strand starting at position 2549 of SEQ ID NO: 1888181
aggguagucccaugggaga

SEQ ID NO: 2516857 - RNA, 19 nt, Artificial Sequence
  Description of Artificial Sequence: Synthetic oligonucleotide
  Antisense strand to SEQ ID NO: 2516856
ucucccaugggacuacccu

SEQ ID NO: 2516858 - RNA, 19 nt, Artificial Sequence
  Description of Artificial Sequence: Synthetic oligonucleotide
  Sense strand starting at position 2697 of SEQ ID NO: 1888181
cugguguugggucgacaga

SEQ ID NO: 2516859 - RNA, 19 nt, Artificial Sequence
  Description of Artificial Sequence: Synthetic oligonucleotide
  Antisense strand to SEQ ID NO: 2516858
ucugucgacccaacaccag

SEQ ID NO: 2516860 - RNA, 19 nt, Artificial Sequence
  Description of Artificial Sequence: Synthetic oligonucleotide
  Sense strand starting at position 3025 of SEQ ID NO: 1888181
ggaugucacuuguaccuca

SEQ ID NO: 2516861 - RNA, 19 nt, Artificial Sequence
  Description of Artificial Sequence: Synthetic oligonucleotide
  Antisense strand to SEQ ID NO: 2516860
ugagguacaagugacaucc

SEQ ID NO: 2516862 - RNA, 19 nt, Artificial Sequence
  Description of Artificial Sequence: Synthetic oligonucleotide
  Sense strand starting at position 3028 of SEQ ID NO: 1888181
ugucacuuguaccucauua

SEQ ID NO: 2516863 - RNA, 19 nt, Artificial Sequence
  Description of Artificial Sequence: Synthetic oligonucleotide
  Antisense strand to SEQ ID NO: 2516862
uaaugagguacaagugaca

SEQ ID NO: 2516864 - RNA, 19 nt, Artificial Sequence
  Description of Artificial Sequence: Synthetic oligonucleotide
  Sense strand starting at position 3032 of SEQ ID NO: 1888181
acuuguaccucauuagcau

SEQ ID NO: 2516865 - RNA, 19 nt, Artificial Sequence
  Description of Artificial Sequence: Synthetic oligonucleotide
  Antisense strand to SEQ ID NO: 2516864
augcuaaugagguacaagu

SEQ ID NO: 2516866 - RNA, 19 nt, Artificial Sequence
  Description of Artificial Sequence: Synthetic oligonucleotide
  Sense strand starting at position 3039 of SEQ ID NO: 1888181
ccucauuagcaucaaaggu

SEQ ID NO: 2516867 - RNA, 19 nt, Artificial Sequence
  Description of Artificial Sequence: Synthetic oligonucleotide
  Antisense strand to SEQ ID NO: 2516866
accuuugaugcuaaugagg

SEQ ID NO: 2516868 - RNA, 19 nt, Artificial Sequence
  Description of Artificial Sequence: Synthetic oligonucleotide
  Sense strand starting at position 3096 of SEQ ID NO: 1888181
gggcgagaauguucaggaa

SEQ ID NO: 2516869 - RNA, 19 nt, Artificial Sequence
  Description of Artificial Sequence: Synthetic oligonucleotide
  Antisense strand to SEQ ID NO: 2516868
uuccugaacauucucgccc

SEQ ID NO: 2516870 - RNA, 19 nt, Artificial Sequence
  Description of Artificial Sequence: Synthetic oligonucleotide
  Sense strand starting at position 3099 of SEQ ID NO: 1888181
cgagaauguucaggaaagg

SEQ ID NO: 2516871 - RNA, 19 nt, Artificial Sequence
  Description of Artificial Sequence: Synthetic oligonucleotide
  Antisense strand to SEQ ID NO: 2516870
ccuuuccugaacauucucg

SEQ ID NO: 2516872 - RNA, 19 nt, Artificial Sequence
  Description of Artificial Sequence: Synthetic oligonucleotide
  Sense strand starting at position 3130 of SEQ ID NO: 1888181
uuugcauuguucccagagu

SEQ ID NO: 2516873 - RNA, 19 nt, Artificial Sequence
  Description of Artificial Sequence: Synthetic oligonucleotide
  Antisense strand to SEQ ID NO: 2516872
acucugggaacaaugcaaa

SEQ ID NO: 2516874 - RNA, 19 nt, Artificial Sequence
  Description of Artificial Sequence: Synthetic oligonucleotide
  Sense strand starting at position 3131 of SEQ ID NO: 1888181
uugcauuguucccagagug

SEQ ID NO: 2516875 - RNA, 19 nt, Artificial Sequence
  Description of Artificial Sequence: Synthetic oligonucleotide
  Antisense strand to SEQ ID NO: 2516874
cacucugggaacaaugcaa

SEQ ID NO: 2516876 - RNA, 19 nt, Artificial Sequence
  Description of Artificial Sequence: Synthetic oligonucleotide
  Sense strand starting at position 3383 of SEQ ID NO: 1888181
gcauccaugcgauacguca

SEQ ID NO: 2516877 - RNA, 19 nt, Artificial Sequence
  Description of Artificial Sequence: Synthetic oligonucleotide
  Antisense strand to SEQ ID NO: 2516876
ugacguaucgcauggaugc

SEQ ID NO: 2516878 - RNA, 19 nt, Artificial Sequence
  Description of Artificial Sequence: Synthetic oligonucleotide
  Sense strand starting at position 20 of SEQ ID NO: 1888182
ucuguuugguuuccuuaua

SEQ ID NO: 2516879 - RNA, 19 nt, Artificial Sequence
  Description of Artificial Sequence: Synthetic oligonucleotide
  Antisense strand to SEQ ID NO: 2516878
uauaaggaaaccaaacaga

SEQ ID NO: 2516880 - RNA, 19 nt, Artificial Sequence
  Description of Artificial Sequence: Synthetic oligonucleotide
  Sense strand starting at position 21 of SEQ ID NO: 1888182
cuguuugguuuccuuauaa

SEQ ID NO: 2516881 - RNA, 19 nt, Artificial Sequence
  Description of Artificial Sequence: Synthetic oligonucleotide
  Antisense strand to SEQ ID NO: 2516880
uuauaaggaaaccaaacag

SEQ ID NO: 2516882 - RNA, 19 nt, Artificial Sequence
  Description of Artificial Sequence: Synthetic oligonucleotide
  Sense strand starting at position 44 of SEQ ID NO: 1888182
gcagguugacugcaaggaa

SEQ ID NO: 2516883 - RNA, 19 nt, Artificial Sequence
  Description of Artificial Sequence: Synthetic oligonucleotide
  Antisense strand to SEQ ID NO: 2516882
uuccuugcagucaaccugc

SEQ ID NO: 2516884 - RNA, 19 nt, Artificial Sequence
  Description of Artificial Sequence: Synthetic oligonucleotide
  Sense strand starting at position 325 of SEQ ID NO: 1888182
gccucaugaucugugauca

SEQ ID NO: 2516885 - RNA, 19 nt, Artificial Sequence
  Description of Artificial Sequence: Synthetic oligonucleotide
  Antisense strand to SEQ ID NO: 2516884
ugaucacagaucaugaggc

SEQ ID NO: 2516886 - RNA, 19 nt, Artificial Sequence
  Description of Artificial Sequence: Synthetic oligonucleotide
  Sense strand starting at position 326 of SEQ ID NO: 1888182
ccucaugaucugugaucau

SEQ ID NO: 2516887 - RNA, 19 nt, Artificial Sequence
  Description of Artificial Sequence: Synthetic oligonucleotide
  Antisense strand to SEQ ID NO: 2516886
augaucacagaucaugagg

SEQ ID NO: 2516888 - RNA, 19 nt, Artificial Sequence
  Description of Artificial Sequence: Synthetic oligonucleotide
  Sense strand starting at position 330 of SEQ ID NO: 1888182
augaucugugaucaucauu

SEQ ID NO: 2516889 - RNA, 19 nt, Artificial Sequence
  Description of Artificial Sequence: Synthetic oligonucleotide
  Antisense strand to SEQ ID NO: 2516888
aaugaugaucacagaucau

SEQ ID NO: 2516890 - RNA, 19 nt, Artificial Sequence
  Description of Artificial Sequence: Synthetic oligonucleotide
  Sense strand starting at position 384 of SEQ ID NO: 1888182
agggcuugccauugaacaa

SEQ ID NO: 2516891 - RNA, 19 nt, Artificial Sequence
  Description of Artificial Sequence: Synthetic oligonucleotide
  Antisense strand to SEQ ID NO: 2516890
uuguucaauggcaagcccu

SEQ ID NO: 2516892 - RNA, 19 nt, Artificial Sequence
  Description of Artificial Sequence: Synthetic oligonucleotide
  Sense strand starting at position 952 of SEQ ID NO: 1888182
ugcugaaugguggauuaag

SEQ ID NO: 2516893 - RNA, 19 nt, Artificial Sequence
  Description of Artificial Sequence: Synthetic oligonucleotide
  Antisense strand to SEQ ID NO: 2516892
cuuaauccaccauucagca

SEQ ID NO: 2516894 - RNA, 19 nt, Artificial Sequence
  Description of Artificial Sequence: Synthetic oligonucleotide
  Sense strand starting at position 1113 of SEQ ID NO: 1888182
gcacauucuuaucucggaa

SEQ ID NO: 2516895 - RNA, 19 nt, Artificial Sequence
  Description of Artificial Sequence: Synthetic oligonucleotide
  Antisense strand to SEQ ID NO: 2516894
uuccgagauaagaaugugc

SEQ ID NO: 2516896 - RNA, 19 nt, Artificial Sequence
  Description of Artificial Sequence: Synthetic oligonucleotide
  Sense strand starting at position 1182 of SEQ ID NO: 1888182
gaucuugaggugggaaguu

SEQ ID NO: 2516897 - RNA, 19 nt, Artificial Sequence
  Description of Artificial Sequence: Synthetic oligonucleotide
  Antisense strand to SEQ ID NO: 2516896
aacuucccaccucaagauc

SEQ ID NO: 2516898 - RNA, 19 nt, Artificial Sequence
  Description of Artificial Sequence: Synthetic oligonucleotide
  Sense strand starting at position 1339 of SEQ ID NO: 1888182
acaaguggccacugaaaga

SEQ ID NO: 2516899 - RNA, 19 nt, Artificial Sequence
  Description of Artificial Sequence: Synthetic oligonucleotide
  Antisense strand to SEQ ID NO: 2516898
ucuuucaguggccacuugu

SEQ ID NO: 2516900 - RNA, 19 nt, Artificial Sequence
  Description of Artificial Sequence: Synthetic oligonucleotide
  Sense strand starting at position 1746 of SEQ ID NO: 1888182
uguguuguucgaagccagu

SEQ ID NO: 2516901 - RNA, 19 nt, Artificial Sequence
  Description of Artificial Sequence: Synthetic oligonucleotide
  Antisense strand to SEQ ID NO: 2516900
acuggcuucgaacaacaca

SEQ ID NO: 2516902 - RNA, 19 nt, Artificial Sequence
  Description of Artificial Sequence: Synthetic oligonucleotide
  Sense strand starting at position 1846 of SEQ ID NO: 1888182
gcacuuugcagccaagagu

SEQ ID NO: 2516903 - RNA, 19 nt, Artificial Sequence
  Description of Artificial Sequence: Synthetic oligonucleotide
  Antisense strand to SEQ ID NO: 2516902
acucuuggcugcaaagugc

SEQ ID NO: 2516904 - RNA, 19 nt, Artificial Sequence
  Description of Artificial Sequence: Synthetic oligonucleotide
  Sense strand starting at position 1990 of SEQ ID NO: 1888182
ggcggagugacaugauaau

SEQ ID NO: 2516905 - RNA, 19 nt, Artificial Sequence
  Description of Artificial Sequence: Synthetic oligonucleotide
  Antisense strand to SEQ ID NO: 2516904
auuaucaugucacuccgcc

SEQ ID NO: 2516906 - RNA, 19 nt, Artificial Sequence
  Description of Artificial Sequence: Synthetic oligonucleotide
  Sense strand starting at position 2277 of SEQ ID NO: 1888182
gcauacauguuaguuucua

SEQ ID NO: 2516907 - RNA, 19 nt, Artificial Sequence
  Description of Artificial Sequence: Synthetic oligonucleotide
  Antisense strand to SEQ ID NO: 2516906
uagaaacuaacauguaugc

SEQ ID NO: 2516908 - RNA, 19 nt, Artificial Sequence
  Description of Artificial Sequence: Synthetic oligonucleotide
  Sense strand starting at position 2290 of SEQ ID NO: 1888182
uuucuaccacuguguuaag

SEQ ID NO: 2516909 - RNA, 19 nt, Artificial Sequence
  Description of Artificial Sequence: Synthetic oligonucleotide
  Antisense strand to SEQ ID NO: 2516908
cuuaacacagugguagaaa

SEQ ID NO: 2516910 - RNA, 19 nt, Artificial Sequence
  Description of Artificial Sequence: Synthetic oligonucleotide
  Sense strand starting at position 2341 of SEQ ID NO: 1888182
ggugauuucucgaggcagc

SEQ ID NO: 2516911 - RNA, 19 nt, Artificial Sequence
  Description of Artificial Sequence: Synthetic oligonucleotide
  Antisense strand to SEQ ID NO: 2516910
gcugccucgagaaaucacc

SEQ ID NO: 2516912 - RNA, 19 nt, Artificial Sequence
  Description of Artificial Sequence: Synthetic oligonucleotide
  Sense strand starting at position 2342 of SEQ ID NO: 1888182
gugauuucucgaggcagcu

SEQ ID NO: 2516913 - RNA, 19 nt, Artificial Sequence
  Description of Artificial Sequence: Synthetic oligonucleotide
  Antisense strand to SEQ ID NO: 2516912
agcugccucgagaaaucac

SEQ ID NO: 2516914 - RNA, 19 nt, Artificial Sequence
  Description of Artificial Sequence: Synthetic oligonucleotide
  Sense strand starting at position 2401 of SEQ ID NO: 1888182
gacucugagcuugacuacu

SEQ ID NO: 2516915 - RNA, 19 nt, Artificial Sequence
  Description of Artificial Sequence: Synthetic oligonucleotide
  Antisense strand to SEQ ID NO: 2516914
aguagucaagcucagaguc

SEQ ID NO: 2516916 - RNA, 19 nt, Artificial Sequence
  Description of Artificial Sequence: Synthetic oligonucleotide
  Sense strand starting at position 2432 of SEQ ID NO: 1888182
guuguaacaucucuggaac

SEQ ID NO: 2516917 - RNA, 19 nt, Artificial Sequence
  Description of Artificial Sequence: Synthetic oligonucleotide
  Antisense strand to SEQ ID NO: 2516916
guuccagagauguuacaac

SEQ ID NO: 2516918 - RNA, 19 nt, Artificial Sequence
  Description of Artificial Sequence: Synthetic oligonucleotide
  Sense strand starting at position 2435 of SEQ ID NO: 1888182
guaacaucucuggaaccuu

SEQ ID NO: 2516919 - RNA, 19 nt, Artificial Sequence
  Description of Artificial Sequence: Synthetic oligonucleotide
  Antisense strand to SEQ ID NO: 2516918
aagguuccagagauguuac

SEQ ID NO: 2516920 - RNA, 19 nt, Artificial Sequence
  Description of Artificial Sequence: Synthetic oligonucleotide
  Sense strand starting at position 2644 of SEQ ID NO: 1888182
agguuuaggugauucucaa

SEQ ID NO: 2516921 - RNA, 19 nt, Artificial Sequence
  Description of Artificial Sequence: Synthetic oligonucleotide
  Antisense strand to SEQ ID NO: 2516920
uugagaaucaccuaaaccu

SEQ ID NO: 2516922 - RNA, 19 nt, Artificial Sequence
  Description of Artificial Sequence: Synthetic oligonucleotide
  Sense strand starting at position 3078 of SEQ ID NO: 1888182
uguuguuauggugauguuu

SEQ ID NO: 2516923 - RNA, 19 nt, Artificial Sequence
  Description of Artificial Sequence: Synthetic oligonucleotide
  Antisense strand to SEQ ID NO: 2516922
aaacaucaccauaacaaca

SEQ ID NO: 2516924 - RNA, 19 nt, Artificial Sequence
  Description of Artificial Sequence: Synthetic oligonucleotide
  Sense strand starting at position 3090 of SEQ ID NO: 1888182
gauguuuagggaggcaaga

SEQ ID NO: 2516925 - RNA, 19 nt, Artificial Sequence
  Description of Artificial Sequence: Synthetic oligonucleotide
  Antisense strand to SEQ ID NO: 2516924
ucuugccucccuaaacauc

SEQ ID NO: 2516926 - RNA, 19 nt, Artificial Sequence
  Description of Artificial Sequence: Synthetic oligonucleotide
  Sense strand starting at position 3156 of SEQ ID NO: 1888182
ugggcuggaaucugagaga

SEQ ID NO: 2516927 - RNA, 19 nt, Artificial Sequence
  Description of Artificial Sequence: Synthetic oligonucleotide
  Antisense strand to SEQ ID NO: 2516926
ucucucagauuccagccca

SEQ ID NO: 2516928 - RNA, 19 nt, Artificial Sequence
  Description of Artificial Sequence: Synthetic oligonucleotide
  Sense strand starting at position 3260 of SEQ ID NO: 1888182
ugaggcuuguuuccagagu

SEQ ID NO: 2516929 - RNA, 19 nt, Artificial Sequence
  Description of Artificial Sequence: Synthetic oligonucleotide
  Antisense strand to SEQ ID NO: 2516928
acucuggaaacaagccuca

SEQ ID NO: 2516930 - RNA, 19 nt, Artificial Sequence
  Description of Artificial Sequence: Synthetic oligonucleotide
  Sense strand starting at position 3309 of SEQ ID NO: 1888182
cuuuguggcaggugacaaa

SEQ ID NO: 2516931 - RNA, 19 nt, Artificial Sequence
  Description of Artificial Sequence: Synthetic oligonucleotide
  Antisense strand to SEQ ID NO: 2516930
uuugucaccugccacaaag

SEQ ID NO: 2516932 - RNA, 19 nt, Artificial Sequence
  Description of Artificial Sequence: Synthetic oligonucleotide
  Sense strand starting at position 3467 of SEQ ID NO: 1888182
gggucagcucugggcaaau

SEQ ID NO: 2516933 - RNA, 19 nt, Artificial Sequence
  Description of Artificial Sequence: Synthetic oligonucleotide
  Antisense strand to SEQ ID NO: 2516932
auuugcccagagcugaccc

SEQ ID NO: 2516934 - RNA, 19 nt, Artificial Sequence
  Description of Artificial Sequence: Synthetic oligonucleotide
  Sense strand starting at position 3625 of SEQ ID NO: 1888182
acugcucaguauuucgaau

SEQ ID NO: 2516935 - RNA, 19 nt, Artificial Sequence
  Description of Artificial Sequence: Synthetic oligonucleotide
  Antisense strand to SEQ ID NO: 2516934
auucgaaauacugagcagu

SEQ ID NO: 2516936 - RNA, 19 nt, Artificial Sequence
  Description of Artificial Sequence: Synthetic oligonucleotide
  Sense strand starting at position 3627 of SEQ ID NO: 1888182
ugcucaguauuucgaauuu

SEQ ID NO: 2516937 - RNA, 19 nt, Artificial Sequence
  Description of Artificial Sequence: Synthetic oligonucleotide
  Antisense strand to SEQ ID NO: 2516936
aaauucgaaauacugagca

SEQ ID NO: 2516938 - RNA, 19 nt, Artificial Sequence
  Description of Artificial Sequence: Synthetic oligonucleotide
  Sense strand starting at position 3671 of SEQ ID NO: 1888182
cugauuaaugcuugguggu

SEQ ID NO: 2516939 - RNA, 19 nt, Artificial Sequence
  Description of Artificial Sequence: Synthetic oligonucleotide
  Antisense strand to SEQ ID NO: 2516938
accaccaagcauuaaucag

SEQ ID NO: 2516940 - RNA, 19 nt, Artificial Sequence
  Description of Artificial Sequence: Synthetic oligonucleotide
  Sense strand starting at position 3673 of SEQ ID NO: 1888182
gauuaaugcuugguggucu

SEQ ID NO: 2516941 - RNA, 19 nt, Artificial Sequence
  Description of Artificial Sequence: Synthetic oligonucleotide
  Antisense strand to SEQ ID NO: 2516940
agaccaccaagcauuaauc

SEQ ID NO: 2516942 - RNA, 19 nt, Artificial Sequence
  Description of Artificial Sequence: Synthetic oligonucleotide
  Sense strand starting at position 3684 of SEQ ID NO: 1888182
gguggucucagguauaauc

SEQ ID NO: 2516943 - RNA, 19 nt, Artificial Sequence
  Description of Artificial Sequence: Synthetic oligonucleotide
  Antisense strand to SEQ ID NO: 2516942
gauuauaccugagaccacc

SEQ ID NO: 2516944 - RNA, 19 nt, Artificial Sequence
  Description of Artificial Sequence: Synthetic oligonucleotide
  Sense strand starting at position 3686 of SEQ ID NO: 1888182
uggucucagguauaaucua

SEQ ID NO: 2516945 - RNA, 19 nt, Artificial Sequence
  Description of Artificial Sequence: Synthetic oligonucleotide
  Antisense strand to SEQ ID NO: 2516944
uagauuauaccugagacca

SEQ ID NO: 2516946 - RNA, 19 nt, Artificial Sequence
  Description of Artificial Sequence: Synthetic oligonucleotide
  Sense strand starting at position 3737 of SEQ ID NO: 1888182
gcaguagucaagcacgaug

SEQ ID NO: 2516947 - RNA, 19 nt, Artificial Sequence
  Description of Artificial Sequence: Synthetic oligonucleotide
  Antisense strand to SEQ ID NO: 2516946
caucgugcuugacuacugc

SEQ ID NO: 2516948 - RNA, 19 nt, Artificial Sequence
  Description of Artificial Sequence: Synthetic oligonucleotide
  Sense strand starting at position 3739 of SEQ ID NO: 1888182
aguagucaagcacgaugau

SEQ ID NO: 2516949 - RNA, 19 nt, Artificial Sequence
  Description of Artificial Sequence: Synthetic oligonucleotide
  Antisense strand to SEQ ID NO: 2516948
aucaucgugcuugacuacu

SEQ ID NO: 2516950 - RNA, 19 nt, Artificial Sequence
  Description of Artificial Sequence: Synthetic oligonucleotide
  Sense strand starting at position 3740 of SEQ ID NO: 1888182
guagucaagcacgaugaua

SEQ ID NO: 2516951 - RNA, 19 nt, Artificial Sequence
  Description of Artificial Sequence: Synthetic oligonucleotide
  Antisense strand to SEQ ID NO: 2516950
uaucaucgugcuugacuac

SEQ ID NO: 2516952 - RNA, 19 nt, Artificial Sequence
  Description of Artificial Sequence: Synthetic oligonucleotide
  Sense strand starting at position 3780 of SEQ ID NO: 1888182
agagccauguugucuaaua

SEQ ID NO: 2516953 - RNA, 19 nt, Artificial Sequence
  Description of Artificial Sequence: Synthetic oligonucleotide
  Antisense strand to SEQ ID NO: 2516952
uauuagacaacauggcucu

SEQ ID NO: 2516954 - RNA, 19 nt, Artificial Sequence
  Description of Artificial Sequence: Synthetic oligonucleotide
  Sense strand starting at position 3782 of SEQ ID NO: 1888182
agccauguugucuaauaug

SEQ ID NO: 2516955 - RNA, 19 nt, Artificial Sequence
  Description of Artificial Sequence: Synthetic oligonucleotide
  Antisense strand to SEQ ID NO: 2516954
cauauuagacaacauggcu

SEQ ID NO: 2516956 - RNA, 19 nt, Artificial Sequence
  Description of Artificial Sequence: Synthetic oligonucleotide
  Sense strand starting at position 3928 of SEQ ID NO: 1888182
cagugaacgcugcagauau

SEQ ID NO: 2516957 - RNA, 19 nt, Artificial Sequence
  Description of Artificial Sequence: Synthetic oligonucleotide
  Antisense strand to SEQ ID NO: 2516956
auaucugcagcguucacug

SEQ ID NO: 2516958 - RNA, 19 nt, Artificial Sequence
  Description of Artificial Sequence: Synthetic oligonucleotide
  Sense strand starting at position 17 of SEQ ID NO: 1888183
ggugucuaucucuaaacug

SEQ ID NO: 2516959 - RNA, 19 nt, Artificial Sequence
  Description of Artificial Sequence: Synthetic oligonucleotide
  Antisense strand to SEQ ID NO: 2516958
caguuuagagauagacacc

SEQ ID NO: 2516960 - RNA, 19 nt, Artificial Sequence
  Description of Artificial Sequence: Synthetic oligonucleotide
  Sense strand starting at position 92 of SEQ ID NO: 1888183
cccagugagcuauagaaua

SEQ ID NO: 2516961 - RNA, 19 nt, Artificial Sequence
  Description of Artificial Sequence: Synthetic oligonucleotide
  Antisense strand to SEQ ID NO: 2516960
uauucuauagcucacuggg

SEQ ID NO: 2516962 - RNA, 19 nt, Artificial Sequence
  Description of Artificial Sequence: Synthetic oligonucleotide
  Sense strand starting at position 146 of SEQ ID NO: 1888183
ucuguuaaauugucaacag

SEQ ID NO: 2516963 - RNA, 19 nt, Artificial Sequence
  Description of Artificial Sequence: Synthetic oligonucleotide
  Antisense strand to SEQ ID NO: 2516962
cuguugacaauuuaacaga

SEQ ID NO: 2516964 - RNA, 19 nt, Artificial Sequence
  Description of Artificial Sequence: Synthetic oligonucleotide
  Sense strand starting at position 708 of SEQ ID NO: 1888183
cccagaacuuacuugugaa

SEQ ID NO: 2516965 - RNA, 19 nt, Artificial Sequence
  Description of Artificial Sequence: Synthetic oligonucleotide
  Antisense strand to SEQ ID NO: 2516964
uucacaaguaaguucuggg

SEQ ID NO: 2516966 - RNA, 19 nt, Artificial Sequence
  Description of Artificial Sequence: Synthetic oligonucleotide
  Sense strand starting at position 894 of SEQ ID NO: 1888183
cacaaugaaucagugcaga

SEQ ID NO: 2516967 - RNA, 19 nt, Artificial Sequence
  Description of Artificial Sequence: Synthetic oligonucleotide
  Antisense strand to SEQ ID NO: 2516966
ucugcacugauucauugug

SEQ ID NO: 2516968 - RNA, 19 nt, Artificial Sequence
  Description of Artificial Sequence: Synthetic oligonucleotide
  Sense strand starting at position 899 of SEQ ID NO: 1888183
ugaaucagugcagaacgaa

SEQ ID NO: 2516969 - RNA, 19 nt, Artificial Sequence
  Description of Artificial Sequence: Synthetic oligonucleotide
  Antisense strand to SEQ ID NO: 2516968
uucguucugcacugauuca

SEQ ID NO: 2516970 - RNA, 19 nt, Artificial Sequence
  Description of Artificial Sequence: Synthetic oligonucleotide
  Sense strand starting at position 1200 of SEQ ID NO: 1888183
cugaguucugaacauuacu

SEQ ID NO: 2516971 - RNA, 19 nt, Artificial Sequence
  Description of Artificial Sequence: Synthetic oligonucleotide
  Antisense strand to SEQ ID NO: 2516970
aguaauguucagaacucag

SEQ ID NO: 2516972 - RNA, 19 nt, Artificial Sequence
  Description of Artificial Sequence: Synthetic oligonucleotide
  Sense strand starting at position 1259 of SEQ ID NO: 1888183
uccagaguauaucuuggaa

SEQ ID NO: 2516973 - RNA, 19 nt, Artificial Sequence
  Description of Artificial Sequence: Synthetic oligonucleotide
  Antisense strand to SEQ ID NO: 2516972
uuccaagauauacucugga

SEQ ID NO: 2516974 - RNA, 19 nt, Artificial Sequence
  Description of Artificial Sequence: Synthetic oligonucleotide
  Sense strand starting at position 1262 of SEQ ID NO: 1888183
agaguauaucuuggaaccu

SEQ ID NO: 2516975 - RNA, 19 nt, Artificial Sequence
  Description of Artificial Sequence: Synthetic oligonucleotide
  Antisense strand to SEQ ID NO: 2516974
agguuccaagauauacucu

SEQ ID NO: 2516976 - RNA, 19 nt, Artificial Sequence
  Description of Artificial Sequence: Synthetic oligonucleotide
  Sense strand starting at position 1424 of SEQ ID NO: 1888183
aucucauauccaggucuga

SEQ ID NO: 2516977 - RNA, 19 nt, Artificial Sequence
  Description of Artificial Sequence: Synthetic oligonucleotide
  Antisense strand to SEQ ID NO: 2516976
ucagaccuggauaugagau

SEQ ID NO: 2516978 - RNA, 19 nt, Artificial Sequence
  Description of Artificial Sequence: Synthetic oligonucleotide
  Sense strand starting at position 1468 of SEQ ID NO: 1888183
gcagaagagucccuuacca

SEQ ID NO: 2516979 - RNA, 19 nt, Artificial Sequence
  Description of Artificial Sequence: Synthetic oligonucleotide
  Antisense strand to SEQ ID NO: 2516978
ugguaagggacucuucugc

SEQ ID NO: 2516980 - RNA, 19 nt, Artificial Sequence
  Description of Artificial Sequence: Synthetic oligonucleotide
  Sense strand starting at position 1552 of SEQ ID NO: 1888183
ucucuugaccaaggauaau

SEQ ID NO: 2516981 - RNA, 19 nt, Artificial Sequence
  Description of Artificial Sequence: Synthetic oligonucleotide
  Antisense strand to SEQ ID NO: 2516980
auuauccuuggucaagaga

SEQ ID NO: 2516982 - RNA, 19 nt, Artificial Sequence
  Description of Artificial Sequence: Synthetic oligonucleotide
  Sense strand starting at position 1715 of SEQ ID NO: 1888183
cccuuaucccagggacacu

SEQ ID NO: 2516983 - RNA, 19 nt, Artificial Sequence
  Description of Artificial Sequence: Synthetic oligonucleotide
  Antisense strand to SEQ ID NO: 2516982
agugucccugggauaaggg

SEQ ID NO: 2516984 - RNA, 19 nt, Artificial Sequence
  Description of Artificial Sequence: Synthetic oligonucleotide
  Sense strand starting at position 1862 of SEQ ID NO: 1888183
uuugauuaauuguccagac

SEQ ID NO: 2516985 - RNA, 19 nt, Artificial Sequence
  Description of Artificial Sequence: Synthetic oligonucleotide
  Antisense strand to SEQ ID NO: 2516984
gucuggacaauuaaucaaa

SEQ ID NO: 2516986 - RNA, 19 nt, Artificial Sequence
  Description of Artificial Sequence: Synthetic oligonucleotide
  Sense strand starting at position 1863 of SEQ ID NO: 1888183
uugauuaauuguccagaca

SEQ ID NO: 2516987 - RNA, 19 nt, Artificial Sequence
  Description of Artificial Sequence: Synthetic oligonucleotide
  Antisense strand to SEQ ID NO: 2516986
ugucuggacaauuaaucaa

SEQ ID NO: 2516988 - RNA, 19 nt, Artificial Sequence
  Description of Artificial Sequence: Synthetic oligonucleotide
  Sense strand starting at position 1945 of SEQ ID NO: 1888183
gcugaugagacauaugguu

SEQ ID NO: 2516989 - RNA, 19 nt, Artificial Sequence
  Description of Artificial Sequence: Synthetic oligonucleotide
  Antisense strand to SEQ ID NO: 2516988
aaccauaugucucaucagc

SEQ ID NO: 2516990 - RNA, 19 nt, Artificial Sequence
  Description of Artificial Sequence: Synthetic oligonucleotide
  Sense strand starting at position 1947 of SEQ ID NO: 1888183
ugaugagacauaugguuuc

SEQ ID NO: 2516991 - RNA, 19 nt, Artificial Sequence
  Description of Artificial Sequence: Synthetic oligonucleotide
  Antisense strand to SEQ ID NO: 2516990
gaaaccauaugucucauca

SEQ ID NO: 2516992 - RNA, 19 nt, Artificial Sequence
  Description of Artificial Sequence: Synthetic oligonucleotide
  Sense strand starting at position 1950 of SEQ ID NO: 1888183
ugagacauaugguuucuaa

SEQ ID NO: 2516993 - RNA, 19 nt, Artificial Sequence
  Description of Artificial Sequence: Synthetic oligonucleotide
  Antisense strand to SEQ ID NO: 2516992
uuagaaaccauaugucuca

SEQ ID NO: 2516994 - RNA, 19 nt, Artificial Sequence
  Description of Artificial Sequence: Synthetic oligonucleotide
  Sense strand starting at position 1989 of SEQ ID NO: 1888183
uuucuaugaccuugaguaa

SEQ ID NO: 2516995 - RNA, 19 nt, Artificial Sequence
  Description of Artificial Sequence: Synthetic oligonucleotide
  Antisense strand to SEQ ID NO: 2516994
uuacucaaggucauagaaa

SEQ ID NO: 2516996 - RNA, 19 nt, Artificial Sequence
  Description of Artificial Sequence: Synthetic oligonucleotide
  Sense strand starting at position 1992 of SEQ ID NO: 1888183
cuaugaccuugaguaagac

SEQ ID NO: 2516997 - RNA, 19 nt, Artificial Sequence
  Description of Artificial Sequence: Synthetic oligonucleotide
  Antisense strand to SEQ ID NO: 2516996
gucuuacucaaggucauag

SEQ ID NO: 2516998 - RNA, 19 nt, Artificial Sequence
  Description of Artificial Sequence: Synthetic oligonucleotide
  Sense strand starting at position 2074 of SEQ ID NO: 1888183
uugcaaggcccauaugaaa

SEQ ID NO: 2516999 - RNA, 19 nt, Artificial Sequence
  Description of Artificial Sequence: Synthetic oligonucleotide
  Antisense strand to SEQ ID NO: 2516998
uuucauaugggccuugcaa

SEQ ID NO: 2517000 - RNA, 19 nt, Artificial Sequence
  Description of Artificial Sequence: Synthetic oligonucleotide
  Sense strand starting at position 2123 of SEQ ID NO: 1888183
caaugagcccuuugaggga

SEQ ID NO: 2517001 - RNA, 19 nt, Artificial Sequence
  Description of Artificial Sequence: Synthetic oligonucleotide
  Antisense strand to SEQ ID NO: 2517000
ucccucaaagggcucauug

SEQ ID NO: 2517002 - RNA, 19 nt, Artificial Sequence
  Description of Artificial Sequence: Synthetic oligonucleotide
  Sense strand starting at position 2196 of SEQ ID NO: 1888183
augagauaaugugcagagu

SEQ ID NO: 2517003 - RNA, 19 nt, Artificial Sequence
  Description of Artificial Sequence: Synthetic oligonucleotide
  Antisense strand to SEQ ID NO: 2517002
acucugcacauuaucucau

SEQ ID NO: 2517004 - RNA, 19 nt, Artificial Sequence
  Description of Artificial Sequence: Synthetic oligonucleotide
  Sense strand starting at position 2199 of SEQ ID NO: 1888183
agauaaugugcagagugau

SEQ ID NO: 2517005 - RNA, 19 nt, Artificial Sequence
  Description of Artificial Sequence: Synthetic oligonucleotide
  Antisense strand to SEQ ID NO: 2517004
aucacucugcacauuaucu

SEQ ID NO: 2517006 - RNA, 19 nt, Artificial Sequence
  Description of Artificial Sequence: Synthetic oligonucleotide
  Sense strand starting at position 2215 of SEQ ID NO: 1888183
gauuaagcaugggcucaaa

SEQ ID NO: 2517007 - RNA, 19 nt, Artificial Sequence
  Description of Artificial Sequence: Synthetic oligonucleotide
  Antisense strand to SEQ ID NO: 2517006
uuugagcccaugcuuaauc

SEQ ID NO: 2517008 - RNA, 19 nt, Artificial Sequence
  Description of Artificial Sequence: Synthetic oligonucleotide
  Sense strand starting at position 2274 of SEQ ID NO: 1888183
gaccuuaagugaucuuaga

SEQ ID NO: 2517009 - RNA, 19 nt, Artificial Sequence
  Description of Artificial Sequence: Synthetic oligonucleotide
  Antisense strand to SEQ ID NO: 2517008
ucuaagaucacuuaagguc

SEQ ID NO: 2517010 - RNA, 19 nt, Artificial Sequence
  Description of Artificial Sequence: Synthetic oligonucleotide
  Sense strand starting at position 2400 of SEQ ID NO: 1888183
ccaacauaauugcugugaa

SEQ ID NO: 2517011 - RNA, 19 nt, Artificial Sequence
  Description of Artificial Sequence: Synthetic oligonucleotide
  Antisense strand to SEQ ID NO: 2517010
uucacagcaauuauguugg

SEQ ID NO: 2517012 - RNA, 19 nt, Artificial Sequence
  Description of Artificial Sequence: Synthetic oligonucleotide
  Sense strand starting at position 2435 of SEQ ID NO: 1888183
accacuucucuuugaagag

SEQ ID NO: 2517013 - RNA, 19 nt, Artificial Sequence
  Description of Artificial Sequence: Synthetic oligonucleotide
  Antisense strand to SEQ ID NO: 2517012
cucuucaaagagaaguggu

SEQ ID NO: 2517014 - RNA, 19 nt, Artificial Sequence
  Description of Artificial Sequence: Synthetic oligonucleotide
  Sense strand starting at position 2491 of SEQ ID NO: 1888183
ucuacauuggaaugcagaa

SEQ ID NO: 2517015 - RNA, 19 nt, Artificial Sequence
  Description of Artificial Sequence: Synthetic oligonucleotide
  Antisense strand to SEQ ID NO: 2517014
uucugcauuccaauguaga

SEQ ID NO: 2517016 - RNA, 19 nt, Artificial Sequence
  Description of Artificial Sequence: Synthetic oligonucleotide
  Sense strand starting at position 2591 of SEQ ID NO: 1888183
aauauuaaugguggaagua

SEQ ID NO: 2517017 - RNA, 19 nt, Artificial Sequence
  Description of Artificial Sequence: Synthetic oligonucleotide
  Antisense strand to SEQ ID NO: 2517016
uacuuccaccauuaauauu

SEQ ID NO: 2517018 - RNA, 19 nt, Artificial Sequence
  Description of Artificial Sequence: Synthetic oligonucleotide
  Sense strand starting at position 2782 of SEQ ID NO: 1888183
ugagauucccagggaugcu

SEQ ID NO: 2517019 - RNA, 19 nt, Artificial Sequence
  Description of Artificial Sequence: Synthetic oligonucleotide
  Antisense strand to SEQ ID NO: 2517018
agcaucccugggaaucuca

SEQ ID NO: 2517020 - RNA, 19 nt, Artificial Sequence
  Description of Artificial Sequence: Synthetic oligonucleotide
  Sense strand starting at position 2942 of SEQ ID NO: 1888183
gcaugaauucugcaacaca

SEQ ID NO: 2517021 - RNA, 19 nt, Artificial Sequence
  Description of Artificial Sequence: Synthetic oligonucleotide
  Antisense strand to SEQ ID NO: 2517020
uguguugcagaauucaugc

SEQ ID NO: 2517022 - RNA, 19 nt, Artificial Sequence
  Description of Artificial Sequence: Synthetic oligonucleotide
  Sense strand starting at position 3017 of SEQ ID NO: 1888183
aggcuuugucaaggaacaa

SEQ ID NO: 2517023 - RNA, 19 nt, Artificial Sequence
  Description of Artificial Sequence: Synthetic oligonucleotide
  Antisense strand to SEQ ID NO: 2517022
uuguuccuugacaaagccu

SEQ ID NO: 2517024 - RNA, 19 nt, Artificial Sequence
  Description of Artificial Sequence: Synthetic oligonucleotide
  Sense strand starting at position 3117 of SEQ ID NO: 1888183
acuguaccucucugagaca

SEQ ID NO: 2517025 - RNA, 19 nt, Artificial Sequence
  Description of Artificial Sequence: Synthetic oligonucleotide
  Antisense strand to SEQ ID NO: 2517024
ugucucagagagguacagu

SEQ ID NO: 2517026 - RNA, 19 nt, Artificial Sequence
  Description of Artificial Sequence: Synthetic oligonucleotide
  Sense strand starting at position 3202 of SEQ ID NO: 1888183
ggccauguagauggaagaa

SEQ ID NO: 2517027 - RNA, 19 nt, Artificial Sequence
  Description of Artificial Sequence: Synthetic oligonucleotide
  Antisense strand to SEQ ID NO: 2517026
uucuuccaucuacauggcc

SEQ ID NO: 2517028 - RNA, 19 nt, Artificial Sequence
  Description of Artificial Sequence: Synthetic oligonucleotide
  Sense strand starting at position 3217 of SEQ ID NO: 1888183
agaacuuggucucugcaaa

SEQ ID NO: 2517029 - RNA, 19 nt, Artificial Sequence
  Description of Artificial Sequence: Synthetic oligonucleotide
  Antisense strand to SEQ ID NO: 2517028
uuugcagagaccaaguucu

SEQ ID NO: 2517030 - RNA, 19 nt, Artificial Sequence
  Description of Artificial Sequence: Synthetic oligonucleotide
  Sense strand starting at position 3612 of SEQ ID NO: 1888183
ugggaaucaucuuuauuau

SEQ ID NO: 2517031 - RNA, 19 nt, Artificial Sequence
  Description of Artificial Sequence: Synthetic oligonucleotide
  Antisense strand to SEQ ID NO: 2517030
auaauaaagaugauuccca

SEQ ID NO: 2517032 - RNA, 19 nt, Artificial Sequence
  Description of Artificial Sequence: Synthetic oligonucleotide
  Sense strand starting at position 3660 of SEQ ID NO: 1888183
aauggaguccuguggaauu

SEQ ID NO: 2517033 - RNA, 19 nt, Artificial Sequence
  Description of Artificial Sequence: Synthetic oligonucleotide
  Antisense strand to SEQ ID NO: 2517032
aauuccacaggacuccauu

SEQ ID NO: 2517034 - RNA, 19 nt, Artificial Sequence
  Description of Artificial Sequence: Synthetic oligonucleotide
  Sense strand starting at position 3775 of SEQ ID NO: 1888183
uucugaugucuccagaugu

SEQ ID NO: 2517035 - RNA, 19 nt, Artificial Sequence
  Description of Artificial Sequence: Synthetic oligonucleotide
  Antisense strand to SEQ ID NO: 2517034
acaucuggagacaucagaa

SEQ ID NO: 2517036 - RNA, 19 nt, Artificial Sequence
  Description of Artificial Sequence: Synthetic oligonucleotide
  Sense strand starting at position 3842 of SEQ ID NO: 1888183
uacaaaggagcgugauaaa

SEQ ID NO: 2517037 - RNA, 19 nt, Artificial Sequence
  Description of Artificial Sequence: Synthetic oligonucleotide
  Antisense strand to SEQ ID NO: 2517036
uuuaucacgcuccuuugua

SEQ ID NO: 2517038 - RNA, 19 nt, Artificial Sequence
  Description of Artificial Sequence: Synthetic oligonucleotide
  Sense strand starting at position 368 of SEQ ID NO: 1888184
ggcugaaggguucauuauc

SEQ ID NO: 2517039 - RNA, 19 nt, Artificial Sequence
  Description of Artificial Sequence: Synthetic oligonucleotide
  Antisense strand to SEQ ID NO: 2517038
gauaaugaacccuucagcc

SEQ ID NO: 2517040 - RNA, 19 nt, Artificial Sequence
  Description of Artificial Sequence: Synthetic oligonucleotide
  Sense strand starting at position 461 of SEQ ID NO: 1888184
aaugacucuggaugucuaa

SEQ ID NO: 2517041 - RNA, 19 nt, Artificial Sequence
  Description of Artificial Sequence: Synthetic oligonucleotide
  Antisense strand to SEQ ID NO: 2517040
uuagacauccagagucauu

SEQ ID NO: 2517042 - RNA, 19 nt, Artificial Sequence
  Description of Artificial Sequence: Synthetic oligonucleotide
  Sense strand starting at position 464 of SEQ ID NO: 1888184
gacucuggaugucuaauaa

SEQ ID NO: 2517043 - RNA, 19 nt, Artificial Sequence
  Description of Artificial Sequence: Synthetic oligonucleotide
  Antisense strand to SEQ ID NO: 2517042
uuauuagacauccagaguc

SEQ ID NO: 2517044 - RNA, 19 nt, Artificial Sequence
  Description of Artificial Sequence: Synthetic oligonucleotide
  Sense strand starting at position 611 of SEQ ID NO: 1888184
gagagcuguucucucaaac

SEQ ID NO: 2517045 - RNA, 19 nt, Artificial Sequence
  Description of Artificial Sequence: Synthetic oligonucleotide
  Antisense strand to SEQ ID NO: 2517044
guuugagagaacagcucuc

SEQ ID NO: 2517046 - RNA, 19 nt, Artificial Sequence
  Description of Artificial Sequence: Synthetic oligonucleotide
  Sense strand starting at position 729 of SEQ ID NO: 1888184
ggaaccuuagacuguaguu

SEQ ID NO: 2517047 - RNA, 19 nt, Artificial Sequence
  Description of Artificial Sequence: Synthetic oligonucleotide
  Antisense strand to SEQ ID NO: 2517046
aacuacagucuaagguucc

SEQ ID NO: 2517048 - RNA, 19 nt, Artificial Sequence
  Description of Artificial Sequence: Synthetic oligonucleotide
  Sense strand starting at position 734 of SEQ ID NO: 1888184
cuuagacuguaguucucaa

SEQ ID NO: 2517049 - RNA, 19 nt, Artificial Sequence
  Description of Artificial Sequence: Synthetic oligonucleotide
  Antisense strand to SEQ ID NO: 2517048
uugagaacuacagucuaag

SEQ ID NO: 2517050 - RNA, 19 nt, Artificial Sequence
  Description of Artificial Sequence: Synthetic oligonucleotide
  Sense strand starting at position 827 of SEQ ID NO: 1888184
aguugaaguggaugagaca

SEQ ID NO: 2517051 - RNA, 19 nt, Artificial Sequence
  Description of Artificial Sequence: Synthetic oligonucleotide
  Antisense strand to SEQ ID NO: 2517050
ugucucauccacuucaacu

SEQ ID NO: 2517052 - RNA, 19 nt, Artificial Sequence
  Description of Artificial Sequence: Synthetic oligonucleotide
  Sense strand starting at position 834 of SEQ ID NO: 1888184
guggaugagacaggcuuaa

SEQ ID NO: 2517053 - RNA, 19 nt, Artificial Sequence
  Description of Artificial Sequence: Synthetic oligonucleotide
  Antisense strand to SEQ ID NO: 2517052
uuaagccugucucauccac

SEQ ID NO: 2517054 - RNA, 19 nt, Artificial Sequence
  Description of Artificial Sequence: Synthetic oligonucleotide
  Sense strand starting at position 880 of SEQ ID NO: 1888184
gagggaguauuugcagcuu

SEQ ID NO: 2517055 - RNA, 19 nt, Artificial Sequence
  Description of Artificial Sequence: Synthetic oligonucleotide
  Antisense strand to SEQ ID NO: 2517054
aagcugcaaauacucccuc

SEQ ID NO: 2517056 - RNA, 19 nt, Artificial Sequence
  Description of Artificial Sequence: Synthetic oligonucleotide
  Sense strand starting at position 906 of SEQ ID NO: 1888184
cccucuugcccuuggagaa

SEQ ID NO: 2517057 - RNA, 19 nt, Artificial Sequence
  Description of Artificial Sequence: Synthetic oligonucleotide
  Antisense strand to SEQ ID NO: 2517056
uucuccaagggcaagaggg

SEQ ID NO: 2517058 - RNA, 19 nt, Artificial Sequence
  Description of Artificial Sequence: Synthetic oligonucleotide
  Sense strand starting at position 1229 of SEQ ID NO: 1888184
gguguuuguaccgaacuag

SEQ ID NO: 2517059 - RNA, 19 nt, Artificial Sequence
  Description of Artificial Sequence: Synthetic oligonucleotide
  Antisense strand to SEQ ID NO: 2517058
cuaguucgguacaaacacc

SEQ ID NO: 2517060 - RNA, 19 nt, Artificial Sequence
  Description of Artificial Sequence: Synthetic oligonucleotide
  Sense strand starting at position 1277 of SEQ ID NO: 1888184
gcacaacugugggcuagaa

SEQ ID NO: 2517061 - RNA, 19 nt, Artificial Sequence
  Description of Artificial Sequence: Synthetic oligonucleotide
  Antisense strand to SEQ ID NO: 2517060
uucuagcccacaguugugc

SEQ ID NO: 2517062 - RNA, 19 nt, Artificial Sequence
  Description of Artificial Sequence: Synthetic oligonucleotide
  Sense strand starting at position 1323 of SEQ ID NO: 1888184
ugggaaagguugaguuuag

SEQ ID NO: 2517063 - RNA, 19 nt, Artificial Sequence
  Description of Artificial Sequence: Synthetic oligonucleotide
  Antisense strand to SEQ ID NO: 2517062
cuaaacucaaccuuuccca

SEQ ID NO: 2517064 - RNA, 19 nt, Artificial Sequence
  Description of Artificial Sequence: Synthetic oligonucleotide
  Sense strand starting at position 1324 of SEQ ID NO: 1888184
gggaaagguugaguuuaga

SEQ ID NO: 2517065 - RNA, 19 nt, Artificial Sequence
  Description of Artificial Sequence: Synthetic oligonucleotide
  Antisense strand to SEQ ID NO: 2517064
ucuaaacucaaccuuuccc

SEQ ID NO: 2517066 - RNA, 19 nt, Artificial Sequence
  Description of Artificial Sequence: Synthetic oligonucleotide
  Sense strand starting at position 1675 of SEQ ID NO: 1888184
ggccucaaguuacuuuaaa

SEQ ID NO: 2517067 - RNA, 19 nt, Artificial Sequence
  Description of Artificial Sequence: Synthetic oligonucleotide
  Antisense strand to SEQ ID NO: 2517066
uuuaaaguaacuugaggcc

SEQ ID NO: 2517068 - RNA, 19 nt, Artificial Sequence
  Description of Artificial Sequence: Synthetic oligonucleotide
  Sense strand starting at position 1676 of SEQ ID NO: 1888184
gccucaaguuacuuuaaag

SEQ ID NO: 2517069 - RNA, 19 nt, Artificial Sequence
  Description of Artificial Sequence: Synthetic oligonucleotide
  Antisense strand to SEQ ID NO: 2517068
cuuuaaaguaacuugaggc

SEQ ID NO: 2517070 - RNA, 19 nt, Artificial Sequence
  Description of Artificial Sequence: Synthetic oligonucleotide
  Sense strand starting at position 1749 of SEQ ID NO: 1888184
cugguaucuggagagcaua

SEQ ID NO: 2517071 - RNA, 19 nt, Artificial Sequence
  Description of Artificial Sequence: Synthetic oligonucleotide
  Antisense strand to SEQ ID NO: 2517070
uaugcucuccagauaccag

SEQ ID NO: 2517072 - RNA, 19 nt, Artificial Sequence
  Description of Artificial Sequence: Synthetic oligonucleotide
  Sense strand starting at position 1784 of SEQ ID NO: 1888184
ugaagugugguccaaauag

SEQ ID NO: 2517073 - RNA, 19 nt, Artificial Sequence
  Description of Artificial Sequence: Synthetic oligonucleotide
  Antisense strand to SEQ ID NO: 2517072
cuauuuggaccacacuuca

SEQ ID NO: 2517074 - RNA, 19 nt, Artificial Sequence
  Description of Artificial Sequence: Synthetic oligonucleotide
  Sense strand starting at position 1851 of SEQ ID NO: 1888184
aggcaaguugcuuaaccau

SEQ ID NO: 2517075 - RNA, 19 nt, Artificial Sequence
  Description of Artificial Sequence: Synthetic oligonucleotide
  Antisense strand to SEQ ID NO: 2517074
augguuaagcaacuugccu

SEQ ID NO: 2517076 - RNA, 19 nt, Artificial Sequence
  Description of Artificial Sequence: Synthetic oligonucleotide
  Sense strand starting at position 2155 of SEQ ID NO: 1888184
ucacgugauacccacgaau

SEQ ID NO: 2517077 - RNA, 19 nt, Artificial Sequence
  Description of Artificial Sequence: Synthetic oligonucleotide
  Antisense strand to SEQ ID NO: 2517076
auucguggguaucacguga

SEQ ID NO: 2517078 - RNA, 19 nt, Artificial Sequence
  Description of Artificial Sequence: Synthetic oligonucleotide
  Sense strand starting at position 2157 of SEQ ID NO: 1888184
acgugauacccacgaauga

SEQ ID NO: 2517079 - RNA, 19 nt, Artificial Sequence
  Description of Artificial Sequence: Synthetic oligonucleotide
  Antisense strand to SEQ ID NO: 2517078
ucauucguggguaucacgu

SEQ ID NO: 2517080 - RNA, 19 nt, Artificial Sequence
  Description of Artificial Sequence: Synthetic oligonucleotide
  Sense strand starting at position 2158 of SEQ ID NO: 1888184
cgugauacccacgaaugaa

SEQ ID NO: 2517081 - RNA, 19 nt, Artificial Sequence
  Description of Artificial Sequence: Synthetic oligonucleotide
  Antisense strand to SEQ ID NO: 2517080
uucauucguggguaucacg

SEQ ID NO: 2517082 - RNA, 19 nt, Artificial Sequence
  Description of Artificial Sequence: Synthetic oligonucleotide
  Sense strand starting at position 2255 of SEQ ID NO: 1888184
uugggauagugaguacuca

SEQ ID NO: 2517083 - RNA, 19 nt, Artificial Sequence
  Description of Artificial Sequence: Synthetic oligonucleotide
  Antisense strand to SEQ ID NO: 2517082
ugaguacucacuaucccaa

SEQ ID NO: 2517084 - RNA, 19 nt, Artificial Sequence
  Description of Artificial Sequence: Synthetic oligonucleotide
  Sense strand starting at position 2259 of SEQ ID NO: 1888184
gauagugaguacucagaug

SEQ ID NO: 2517085 - RNA, 19 nt, Artificial Sequence
  Description of Artificial Sequence: Synthetic oligonucleotide
  Antisense strand to SEQ ID NO: 2517084
caucugaguacucacuauc

SEQ ID NO: 2517086 - RNA, 19 nt, Artificial Sequence
  Description of Artificial Sequence: Synthetic oligonucleotide
  Sense strand starting at position 2273 of SEQ ID NO: 1888184
agauguuugcaauaucauu

SEQ ID NO: 2517087 - RNA, 19 nt, Artificial Sequence
  Description of Artificial Sequence: Synthetic oligonucleotide
  Antisense strand to SEQ ID NO: 2517086
aaugauauugcaaacaucu

SEQ ID NO: 2517088 - RNA, 19 nt, Artificial Sequence
  Description of Artificial Sequence: Synthetic oligonucleotide
  Sense strand starting at position 2298 of SEQ ID NO: 1888184
gcuuguccuaacguucgaa

SEQ ID NO: 2517089 - RNA, 19 nt, Artificial Sequence
  Description of Artificial Sequence: Synthetic oligonucleotide
  Antisense strand to SEQ ID NO: 2517088
uucgaacguuaggacaagc

SEQ ID NO: 2517090 - RNA, 19 nt, Artificial Sequence
  Description of Artificial Sequence: Synthetic oligonucleotide
  Sense strand starting at position 2437 of SEQ ID NO: 1888184
gggagcuuaucucucugaa

SEQ ID NO: 2517091 - RNA, 19 nt, Artificial Sequence
  Description of Artificial Sequence: Synthetic oligonucleotide
  Antisense strand to SEQ ID NO: 2517090
uucagagagauaagcuccc

SEQ ID NO: 2517092 - RNA, 19 nt, Artificial Sequence
  Description of Artificial Sequence: Synthetic oligonucleotide
  Sense strand starting at position 2898 of SEQ ID NO: 1888184
cuaugaacucucuaagagc

SEQ ID NO: 2517093 - RNA, 19 nt, Artificial Sequence
  Description of Artificial Sequence: Synthetic oligonucleotide
  Antisense strand to SEQ ID NO: 2517092
gcucuuagagaguucauag

SEQ ID NO: 2517094 - RNA, 19 nt, Artificial Sequence
  Description of Artificial Sequence: Synthetic oligonucleotide
  Sense strand starting at position 3013 of SEQ ID NO: 1888184
aaccuugaccucuggagua

SEQ ID NO: 2517095 - RNA, 19 nt, Artificial Sequence
  Description of Artificial Sequence: Synthetic oligonucleotide
  Antisense strand to SEQ ID NO: 2517094
uacuccagaggucaagguu

SEQ ID NO: 2517096 - RNA, 19 nt, Artificial Sequence
  Description of Artificial Sequence: Synthetic oligonucleotide
  Sense strand starting at position 3089 of SEQ ID NO: 1888184
cugguuauggcucagaguu

SEQ ID NO: 2517097 - RNA, 19 nt, Artificial Sequence
  Description of Artificial Sequence: Synthetic oligonucleotide
  Antisense strand to SEQ ID NO: 2517096
aacucugagccauaaccag

SEQ ID NO: 2517098 - RNA, 19 nt, Artificial Sequence
  Description of Artificial Sequence: Synthetic oligonucleotide
  Sense strand starting at position 3223 of SEQ ID NO: 1888184
cugguugaccuugggcaaa

SEQ ID NO: 2517099 - RNA, 19 nt, Artificial Sequence
  Description of Artificial Sequence: Synthetic oligonucleotide
  Antisense strand to SEQ ID NO: 2517098
uuugcccaaggucaaccag

SEQ ID NO: 2517100 - RNA, 19 nt, Artificial Sequence
  Description of Artificial Sequence: Synthetic oligonucleotide
  Sense strand starting at position 3311 of SEQ ID NO: 1888184
gguguugacaggugaaaug

SEQ ID NO: 2517101 - RNA, 19 nt, Artificial Sequence
  Description of Artificial Sequence: Synthetic oligonucleotide
  Antisense strand to SEQ ID NO: 2517100
cauuucaccugucaacacc

SEQ ID NO: 2517102 - RNA, 19 nt, Artificial Sequence
  Description of Artificial Sequence: Synthetic oligonucleotide
  Sense strand starting at position 3350 of SEQ ID NO: 1888184
acagucuuuguacaugaca

SEQ ID NO: 2517103 - RNA, 19 nt, Artificial Sequence
  Description of Artificial Sequence: Synthetic oligonucleotide
  Antisense strand to SEQ ID NO: 2517102
ugucauguacaaagacugu

SEQ ID NO: 2517104 - RNA, 19 nt, Artificial Sequence
  Description of Artificial Sequence: Synthetic oligonucleotide
  Sense strand starting at position 3353 of SEQ ID NO: 1888184
gucuuuguacaugacaagu

SEQ ID NO: 2517105 - RNA, 19 nt, Artificial Sequence
  Description of Artificial Sequence: Synthetic oligonucleotide
  Antisense strand to SEQ ID NO: 2517104
acuugucauguacaaagac

SEQ ID NO: 2517106 - RNA, 19 nt, Artificial Sequence
  Description of Artificial Sequence: Synthetic oligonucleotide
  Sense strand starting at position 3648 of SEQ ID NO: 1888184
uugugccuggcauaugaua

SEQ ID NO: 2517107 - RNA, 19 nt, Artificial Sequence
  Description of Artificial Sequence: Synthetic oligonucleotide
  Antisense strand to SEQ ID NO: 2517106
uaucauaugccaggcacaa

SEQ ID NO: 2517108 - RNA, 19 nt, Artificial Sequence
  Description of Artificial Sequence: Synthetic oligonucleotide
  Sense strand starting at position 3689 of SEQ ID NO: 1888184
guagcuugaugaucaguaa

SEQ ID NO: 2517109 - RNA, 19 nt, Artificial Sequence
  Description of Artificial Sequence: Synthetic oligonucleotide
  Antisense strand to SEQ ID NO: 2517108
uuacugaucaucaagcuac

SEQ ID NO: 2517110 - RNA, 19 nt, Artificial Sequence
  Description of Artificial Sequence: Synthetic oligonucleotide
  Sense strand starting at position 3690 of SEQ ID NO: 1888184
uagcuugaugaucaguaaa

SEQ ID NO: 2517111 - RNA, 19 nt, Artificial Sequence
  Description of Artificial Sequence: Synthetic oligonucleotide
  Antisense strand to SEQ ID NO: 2517110
uuuacugaucaucaagcua

SEQ ID NO: 2517112 - RNA, 19 nt, Artificial Sequence
  Description of Artificial Sequence: Synthetic oligonucleotide
  Sense strand starting at position 3692 of SEQ ID NO: 1888184
gcuugaugaucaguaaaug

SEQ ID NO: 2517113 - RNA, 19 nt, Artificial Sequence
  Description of Artificial Sequence: Synthetic oligonucleotide
  Antisense strand to SEQ ID NO: 2517112
cauuuacugaucaucaagc

SEQ ID NO: 2517114 - RNA, 19 nt, Artificial Sequence
  Description of Artificial Sequence: Synthetic oligonucleotide
  Sense strand starting at position 3693 of SEQ ID NO: 1888184
cuugaugaucaguaaaugu

SEQ ID NO: 2517115 - RNA, 19 nt, Artificial Sequence
  Description of Artificial Sequence: Synthetic oligonucleotide
  Antisense strand to SEQ ID NO: 2517114
acauuuacugaucaucaag

SEQ ID NO: 2517116 - RNA, 19 nt, Artificial Sequence
  Description of Artificial Sequence: Synthetic oligonucleotide
  Sense strand starting at position 3702 of SEQ ID NO: 1888184
caguaaaugugguuccuag

SEQ ID NO: 2517117 - RNA, 19 nt, Artificial Sequence
  Description of Artificial Sequence: Synthetic oligonucleotide
  Antisense strand to SEQ ID NO: 2517116
cuaggaaccacauuuacug

SEQ ID NO: 2517118 - RNA, 19 nt, Artificial Sequence
  Description of Artificial Sequence: Synthetic oligonucleotide
  Sense strand starting at position 24 of SEQ ID NO: 1888185
gcaagaaugguguggugaa

SEQ ID NO: 2517119 - RNA, 19 nt, Artificial Sequence
  Description of Artificial Sequence: Synthetic oligonucleotide
  Antisense strand to SEQ ID NO: 2517118
uucaccacaccauucuugc

SEQ ID NO: 2517120 - RNA, 19 nt, Artificial Sequence
  Description of Artificial Sequence: Synthetic oligonucleotide
  Sense strand starting at position 111 of SEQ ID NO: 1888185
ugaagauguguguauccua

SEQ ID NO: 2517121 - RNA, 19 nt, Artificial Sequence
  Description of Artificial Sequence: Synthetic oligonucleotide
  Antisense strand to SEQ ID NO: 2517120
uaggauacacacaucuuca

SEQ ID NO: 2517122 - RNA, 19 nt, Artificial Sequence
  Description of Artificial Sequence: Synthetic oligonucleotide
  Sense strand starting at position 127 of SEQ ID NO: 1888185
cuacguccugcccagaaga

SEQ ID NO: 2517123 - RNA, 19 nt, Artificial Sequence
  Description of Artificial Sequence: Synthetic oligonucleotide
  Antisense strand to SEQ ID NO: 2517122
ucuucugggcaggacguag

SEQ ID NO: 2517124 - RNA, 19 nt, Artificial Sequence
  Description of Artificial Sequence: Synthetic oligonucleotide
  Sense strand starting at position 204 of SEQ ID NO: 1888185
ugcuuacaucaaggagauc

SEQ ID NO: 2517125 - RNA, 19 nt, Artificial Sequence
  Description of Artificial Sequence: Synthetic oligonucleotide
  Antisense strand to SEQ ID NO: 2517124
gaucuccuugauguaagca

SEQ ID NO: 2517126 - RNA, 19 nt, Artificial Sequence
  Description of Artificial Sequence: Synthetic oligonucleotide
  Sense strand starting at position 574 of SEQ ID NO: 1888185
ggugucuacccaggagaaa

SEQ ID NO: 2517127 - RNA, 19 nt, Artificial Sequence
  Description of Artificial Sequence: Synthetic oligonucleotide
  Antisense strand to SEQ ID NO: 2517126
uuucuccuggguagacacc

SEQ ID NO: 2517128 - RNA, 19 nt, Artificial Sequence
  Description of Artificial Sequence: Synthetic oligonucleotide
  Sense strand starting at position 727 of SEQ ID NO: 1888185
ggaauagcauuugaccaua

SEQ ID NO: 2517129 - RNA, 19 nt, Artificial Sequence
  Description of Artificial Sequence: Synthetic oligonucleotide
  Antisense strand to SEQ ID NO: 2517128
uauggucaaaugcuauucc

SEQ ID NO: 2517130 - RNA, 19 nt, Artificial Sequence
  Description of Artificial Sequence: Synthetic oligonucleotide
  Sense strand starting at position 793 of SEQ ID NO: 1888185
cacuacacucagugagaga

SEQ ID NO: 2517131 - RNA, 19 nt, Artificial Sequence
  Description of Artificial Sequence: Synthetic oligonucleotide
  Antisense strand to SEQ ID NO: 2517130
ucucucacugaguguagug

SEQ ID NO: 2517132 - RNA, 19 nt, Artificial Sequence
  Description of Artificial Sequence: Synthetic oligonucleotide
  Sense strand starting at position 851 of SEQ ID NO: 1888185
augugaaauguccggaaca

SEQ ID NO: 2517133 - RNA, 19 nt, Artificial Sequence
  Description of Artificial Sequence: Synthetic oligonucleotide
  Antisense strand to SEQ ID NO: 2517132
uguuccggacauuucacau

SEQ ID NO: 2517134 - RNA, 19 nt, Artificial Sequence
  Description of Artificial Sequence: Synthetic oligonucleotide
  Sense strand starting at position 853 of SEQ ID NO: 1888185
gugaaauguccggaacaga

SEQ ID NO: 2517135 - RNA, 19 nt, Artificial Sequence
  Description of Artificial Sequence: Synthetic oligonucleotide
  Antisense strand to SEQ ID NO: 2517134
ucuguuccggacauuucac

SEQ ID NO: 2517136 - RNA, 19 nt, Artificial Sequence
  Description of Artificial Sequence: Synthetic oligonucleotide
  Sense strand starting at position 890 of SEQ ID NO: 1888185
guagaugaguggcuuccaa

SEQ ID NO: 2517137 - RNA, 19 nt, Artificial Sequence
  Description of Artificial Sequence: Synthetic oligonucleotide
  Antisense strand to SEQ ID NO: 2517136
uuggaagccacucaucuac

SEQ ID NO: 2517138 - RNA, 19 nt, Artificial Sequence
  Description of Artificial Sequence: Synthetic oligonucleotide
  Sense strand starting at position 990 of SEQ ID NO: 1888185
gauugugaggaugauugca

SEQ ID NO: 2517139 - RNA, 19 nt, Artificial Sequence
  Description of Artificial Sequence: Synthetic oligonucleotide
  Antisense strand to SEQ ID NO: 2517138
ugcaaucauccucacaauc

SEQ ID NO: 2517140 - RNA, 19 nt, Artificial Sequence
  Description of Artificial Sequence: Synthetic oligonucleotide
  Sense strand starting at position 1067 of SEQ ID NO: 1888185
ugaugcgugaauuagaucu

SEQ ID NO: 2517141 - RNA, 19 nt, Artificial Sequence
  Description of Artificial Sequence: Synthetic oligonucleotide
  Antisense strand to SEQ ID NO: 2517140
agaucuaauucacgcauca

SEQ ID NO: 2517142 - RNA, 19 nt, Artificial Sequence
  Description of Artificial Sequence: Synthetic oligonucleotide
  Sense strand starting at position 1532 of SEQ ID NO: 1888185
ugauacaggucuucucaga

SEQ ID NO: 2517143 - RNA, 19 nt, Artificial Sequence
  Description of Artificial Sequence: Synthetic oligonucleotide
  Antisense strand to SEQ ID NO: 2517142
ucugagaagaccuguauca

SEQ ID NO: 2517144 - RNA, 19 nt, Artificial Sequence
  Description of Artificial Sequence: Synthetic oligonucleotide
  Sense strand starting at position 1605 of SEQ ID NO: 1888185
accagauaaugcuuauuga

SEQ ID NO: 2517145 - RNA, 19 nt, Artificial Sequence
  Description of Artificial Sequence: Synthetic oligonucleotide
  Antisense strand to SEQ ID NO: 2517144
ucaauaagcauuaucuggu

SEQ ID NO: 2517146 - RNA, 19 nt, Artificial Sequence
  Description of Artificial Sequence: Synthetic oligonucleotide
  Sense strand starting at position 1608 of SEQ ID NO: 1888185
agauaaugcuuauugagua

SEQ ID NO: 2517147 - RNA, 19 nt, Artificial Sequence
  Description of Artificial Sequence: Synthetic oligonucleotide
  Antisense strand to SEQ ID NO: 2517146
uacucaauaagcauuaucu

SEQ ID NO: 2517148 - RNA, 19 nt, Artificial Sequence
  Description of Artificial Sequence: Synthetic oligonucleotide
  Sense strand starting at position 1621 of SEQ ID NO: 1888185
ugaguauucgcaguguucu

SEQ ID NO: 2517149 - RNA, 19 nt, Artificial Sequence
  Description of Artificial Sequence: Synthetic oligonucleotide
  Antisense strand to SEQ ID NO: 2517148
agaacacugcgaauacuca

SEQ ID NO: 2517150 - RNA, 19 nt, Artificial Sequence
  Description of Artificial Sequence: Synthetic oligonucleotide
  Sense strand starting at position 1629 of SEQ ID NO: 1888185
cgcaguguucuagucaucu

SEQ ID NO: 2517151 - RNA, 19 nt, Artificial Sequence
  Description of Artificial Sequence: Synthetic oligonucleotide
  Antisense strand to SEQ ID NO: 2517150
agaugacuagaacacugcg

SEQ ID NO: 2517152 - RNA, 19 nt, Artificial Sequence
  Description of Artificial Sequence: Synthetic oligonucleotide
  Sense strand starting at position 1640 of SEQ ID NO: 1888185
agucaucuauuagcuuauu

SEQ ID NO: 2517153 - RNA, 19 nt, Artificial Sequence
  Description of Artificial Sequence: Synthetic oligonucleotide
  Antisense strand to SEQ ID NO: 2517152
aauaagcuaauagaugacu

SEQ ID NO: 2517154 - RNA, 19 nt, Artificial Sequence
  Description of Artificial Sequence: Synthetic oligonucleotide
  Sense strand starting at position 1641 of SEQ ID NO: 1888185
gucaucuauuagcuuauuu

SEQ ID NO: 2517155 - RNA, 19 nt, Artificial Sequence
  Description of Artificial Sequence: Synthetic oligonucleotide
  Antisense strand to SEQ ID NO: 2517154
aaauaagcuaauagaugac

SEQ ID NO: 2517156 - RNA, 19 nt, Artificial Sequence
  Description of Artificial Sequence: Synthetic oligonucleotide
  Sense strand starting at position 1687 of SEQ ID NO: 1888185
acauuagcccucugagaug

SEQ ID NO: 2517157 - RNA, 19 nt, Artificial Sequence
  Description of Artificial Sequence: Synthetic oligonucleotide
  Antisense strand to SEQ ID NO: 2517156
caucucagagggcuaaugu

SEQ ID NO: 2517158 - RNA, 19 nt, Artificial Sequence
  Description of Artificial Sequence: Synthetic oligonucleotide
  Sense strand starting at position 1755 of SEQ ID NO: 1888185
ugagaauccugcccaagau

SEQ ID NO: 2517159 - RNA, 19 nt, Artificial Sequence
  Description of Artificial Sequence: Synthetic oligonucleotide
  Antisense strand to SEQ ID NO: 2517158
aucuugggcaggauucuca

SEQ ID NO: 2517160 - RNA, 19 nt, Artificial Sequence
  Description of Artificial Sequence: Synthetic oligonucleotide
  Sense strand starting at position 1814 of SEQ ID NO: 1888185
auagccuugcucugggauu

SEQ ID NO: 2517161 - RNA, 19 nt, Artificial Sequence
  Description of Artificial Sequence: Synthetic oligonucleotide
  Antisense strand to SEQ ID NO: 2517160
aaucccagagcaaggcuau

SEQ ID NO: 2517162 - RNA, 19 nt, Artificial Sequence
  Description of Artificial Sequence: Synthetic oligonucleotide
  Sense strand starting at position 1878 of SEQ ID NO: 1888185
cagguuugaccauagcuua

SEQ ID NO: 2517163 - RNA, 19 nt, Artificial Sequence
  Description of Artificial Sequence: Synthetic oligonucleotide
  Antisense strand to SEQ ID NO: 2517162
uaagcuauggucaaaccug

SEQ ID NO: 2517164 - RNA, 19 nt, Artificial Sequence
  Description of Artificial Sequence: Synthetic oligonucleotide
  Sense strand starting at position 1894 of SEQ ID NO: 1888185
uuacuugaauaggaacaau

SEQ ID NO: 2517165 - RNA, 19 nt, Artificial Sequence
  Description of Artificial Sequence: Synthetic oligonucleotide
  Antisense strand to SEQ ID NO: 2517164
auuguuccuauucaaguaa

SEQ ID NO: 2517166 - RNA, 19 nt, Artificial Sequence
  Description of Artificial Sequence: Synthetic oligonucleotide
  Sense strand starting at position 1965 of SEQ ID NO: 1888185
agcaucucucacugagaca

SEQ ID NO: 2517167 - RNA, 19 nt, Artificial Sequence
  Description of Artificial Sequence: Synthetic oligonucleotide
  Antisense strand to SEQ ID NO: 2517166
ugucucagugagagaugcu

SEQ ID NO: 2517168 - RNA, 19 nt, Artificial Sequence
  Description of Artificial Sequence: Synthetic oligonucleotide
  Sense strand starting at position 2147 of SEQ ID NO: 1888185
ugaugaguucucuguggua

SEQ ID NO: 2517169 - RNA, 19 nt, Artificial Sequence
  Description of Artificial Sequence: Synthetic oligonucleotide
  Antisense strand to SEQ ID NO: 2517168
uaccacagagaacucauca

SEQ ID NO: 2517170 - RNA, 19 nt, Artificial Sequence
  Description of Artificial Sequence: Synthetic oligonucleotide
  Sense strand starting at position 2149 of SEQ ID NO: 1888185
augaguucucugugguagg

SEQ ID NO: 2517171 - RNA, 19 nt, Artificial Sequence
  Description of Artificial Sequence: Synthetic oligonucleotide
  Antisense strand to SEQ ID NO: 2517170
ccuaccacagagaacucau

SEQ ID NO: 2517172 - RNA, 19 nt, Artificial Sequence
  Description of Artificial Sequence: Synthetic oligonucleotide
  Sense strand starting at position 2312 of SEQ ID NO: 1888185
uggaaucacugccuuagaa

SEQ ID NO: 2517173 - RNA, 19 nt, Artificial Sequence
  Description of Artificial Sequence: Synthetic oligonucleotide
  Antisense strand to SEQ ID NO: 2517172
uucuaaggcagugauucca

SEQ ID NO: 2517174 - RNA, 19 nt, Artificial Sequence
  Description of Artificial Sequence: Synthetic oligonucleotide
  Sense strand starting at position 2623 of SEQ ID NO: 1888185
acacacugugauugaacuu

SEQ ID NO: 2517175 - RNA, 19 nt, Artificial Sequence
  Description of Artificial Sequence: Synthetic oligonucleotide
  Antisense strand to SEQ ID NO: 2517174
aaguucaaucacagugugu

SEQ ID NO: 2517176 - RNA, 19 nt, Artificial Sequence
  Description of Artificial Sequence: Synthetic oligonucleotide
  Sense strand starting at position 3019 of SEQ ID NO: 1888185
augccaagcuugguugaau

SEQ ID NO: 2517177 - RNA, 19 nt, Artificial Sequence
  Description of Artificial Sequence: Synthetic oligonucleotide
  Antisense strand to SEQ ID NO: 2517176
auucaaccaagcuuggcau

SEQ ID NO: 2517178 - RNA, 19 nt, Artificial Sequence
  Description of Artificial Sequence: Synthetic oligonucleotide
  Sense strand starting at position 3078 of SEQ ID NO: 1888185
uaaaccauuuguuggauga

SEQ ID NO: 2517179 - RNA, 19 nt, Artificial Sequence
  Description of Artificial Sequence: Synthetic oligonucleotide
  Antisense strand to SEQ ID NO: 2517178
ucauccaacaaaugguuua

SEQ ID NO: 2517180 - RNA, 19 nt, Artificial Sequence
  Description of Artificial Sequence: Synthetic oligonucleotide
  Sense strand starting at position 3080 of SEQ ID NO: 1888185
aaccauuuguuggaugaau

SEQ ID NO: 2517181 - RNA, 19 nt, Artificial Sequence
  Description of Artificial Sequence: Synthetic oligonucleotide
  Antisense strand to SEQ ID NO: 2517180
auucauccaacaaaugguu

SEQ ID NO: 2517182 - RNA, 19 nt, Artificial Sequence
  Description of Artificial Sequence: Synthetic oligonucleotide
  Sense strand starting at position 3205 of SEQ ID NO: 1888185
ggguuugaacacuggacau

SEQ ID NO: 2517183 - RNA, 19 nt, Artificial Sequence
  Description of Artificial Sequence: Synthetic oligonucleotide
  Antisense strand to SEQ ID NO: 2517182
auguccaguguucaaaccc

SEQ ID NO: 2517184 - RNA, 19 nt, Artificial Sequence
  Description of Artificial Sequence: Synthetic oligonucleotide
  Sense strand starting at position 3373 of SEQ ID NO: 1888185
gagcaagucucuguuuaau

SEQ ID NO: 2517185 - RNA, 19 nt, Artificial Sequence
  Description of Artificial Sequence: Synthetic oligonucleotide
  Antisense strand to SEQ ID NO: 2517184
auuaaacagagacuugcuc

SEQ ID NO: 2517186 - RNA, 19 nt, Artificial Sequence
  Description of Artificial Sequence: Synthetic oligonucleotide
  Sense strand starting at position 3383 of SEQ ID NO: 1888185
cuguuuaauguugacugau

SEQ ID NO: 2517187 - RNA, 19 nt, Artificial Sequence
  Description of Artificial Sequence: Synthetic oligonucleotide
  Antisense strand to SEQ ID NO: 2517186
aucagucaacauuaaacag

SEQ ID NO: 2517188 - RNA, 19 nt, Artificial Sequence
  Description of Artificial Sequence: Synthetic oligonucleotide
  Sense strand starting at position 3466 of SEQ ID NO: 1888185
aggucagggccucaggauu

SEQ ID NO: 2517189 - RNA, 19 nt, Artificial Sequence
  Description of Artificial Sequence: Synthetic oligonucleotide
  Antisense strand to SEQ ID NO: 2517188
aauccugaggcccugaccu

SEQ ID NO: 2517190 - RNA, 19 nt, Artificial Sequence
  Description of Artificial Sequence: Synthetic oligonucleotide
  Sense strand starting at position 3820 of SEQ ID NO: 1888185
gauugaggcuagcucugaa

SEQ ID NO: 2517191 - RNA, 19 nt, Artificial Sequence
  Description of Artificial Sequence: Synthetic oligonucleotide
  Antisense strand to SEQ ID NO: 2517190
uucagagcuagccucaauc

SEQ ID NO: 2517192 - RNA, 19 nt, Artificial Sequence
  Description of Artificial Sequence: Synthetic oligonucleotide
  Sense strand starting at position 3866 of SEQ ID NO: 1888185
ggaguucuggaagguuaca

SEQ ID NO: 2517193 - RNA, 19 nt, Artificial Sequence
  Description of Artificial Sequence: Synthetic oligonucleotide
  Antisense strand to SEQ ID NO: 2517192
uguaaccuuccagaacucc

SEQ ID NO: 2517194 - RNA, 19 nt, Artificial Sequence
  Description of Artificial Sequence: Synthetic oligonucleotide
  Sense strand starting at position 3875 of SEQ ID NO: 1888185
gaagguuacaauggagguu

SEQ ID NO: 2517195 - RNA, 19 nt, Artificial Sequence
  Description of Artificial Sequence: Synthetic oligonucleotide
  Antisense strand to SEQ ID NO: 2517194
aaccuccauuguaaccuuc

SEQ ID NO: 2517196 - RNA, 19 nt, Artificial Sequence
  Description of Artificial Sequence: Synthetic oligonucleotide
  Sense strand starting at position 3878 of SEQ ID NO: 1888185
gguuacaauggagguucua

SEQ ID NO: 2517197 - RNA, 19 nt, Artificial Sequence
  Description of Artificial Sequence: Synthetic oligonucleotide
  Antisense strand to SEQ ID NO: 2517196
uagaaccuccauuguaacc

SEQ ID NO: 2517198 - RNA, 19 nt, Artificial Sequence
  Description of Artificial Sequence: Synthetic oligonucleotide
  Sense strand starting at position 1508 of SEQ ID NO: 1888186
gcuccaaacugcugcaaua

SEQ ID NO: 2517199 - RNA, 19 nt, Artificial Sequence
  Description of Artificial Sequence: Synthetic oligonucleotide
  Antisense strand to SEQ ID NO: 2517198
uauugcagcaguuuggagc

SEQ ID NO: 2517200 - RNA, 19 nt, Artificial Sequence
  Description of Artificial Sequence: Synthetic oligonucleotide
  Sense strand starting at position 1528 of SEQ ID NO: 1888186
aacagugguuuagucaagu

SEQ ID NO: 2517201 - RNA, 19 nt, Artificial Sequence
  Description of Artificial Sequence: Synthetic oligonucleotide
  Antisense strand to SEQ ID NO: 2517200
acuugacuaaaccacuguu

SEQ ID NO: 2517202 - RNA, 19 nt, Artificial Sequence
  Description of Artificial Sequence: Synthetic oligonucleotide
  Sense strand starting at position 2827 of SEQ ID NO: 1888186
gcacuuacuuaccgaggaa

SEQ ID NO: 2517203 - RNA, 19 nt, Artificial Sequence
  Description of Artificial Sequence: Synthetic oligonucleotide
  Antisense strand to SEQ ID NO: 2517202
uuccucgguaaguaagugc

SEQ ID NO: 2517204 - RNA, 19 nt, Artificial Sequence
  Description of Artificial Sequence: Synthetic oligonucleotide
  Sense strand starting at position 2912 of SEQ ID NO: 1888186
gggccaaguuguuuccaua

SEQ ID NO: 2517205 - RNA, 19 nt, Artificial Sequence
  Description of Artificial Sequence: Synthetic oligonucleotide
  Antisense strand to SEQ ID NO: 2517204
uauggaaacaacuuggccc

SEQ ID NO: 2517206 - RNA, 19 nt, Artificial Sequence
  Description of Artificial Sequence: Synthetic oligonucleotide
  Sense strand starting at position 3165 of SEQ ID NO: 1888186
ugaagacagcggcauuaau

SEQ ID NO: 2517207 - RNA, 19 nt, Artificial Sequence
  Description of Artificial Sequence: Synthetic oligonucleotide
  Antisense strand to SEQ ID NO: 2517206
auuaaugccgcugucuuca

SEQ ID NO: 2517208 - RNA, 19 nt, Artificial Sequence
  Description of Artificial Sequence: Synthetic oligonucleotide
  Sense strand starting at position 3345 of SEQ ID NO: 1888186
gaggccuggugucugcaaa

SEQ ID NO: 2517209 - RNA, 19 nt, Artificial Sequence
  Description of Artificial Sequence: Synthetic oligonucleotide
  Antisense strand to SEQ ID NO: 2517208
uuugcagacaccaggccuc

SEQ ID NO: 2517210 - RNA, 19 nt, Artificial Sequence
  Description of Artificial Sequence: Synthetic oligonucleotide
  Sense strand starting at position 110 of SEQ ID NO: 1888187
ugagguucaccgcgaaaga

SEQ ID NO: 2517211 - RNA, 19 nt, Artificial Sequence
  Description of Artificial Sequence: Synthetic oligonucleotide
  Antisense strand to SEQ ID NO: 2517210
ucuuucgcggugaaccuca

SEQ ID NO: 2517212 - RNA, 19 nt, Artificial Sequence
  Description of Artificial Sequence: Synthetic oligonucleotide
  Sense strand starting at position 183 of SEQ ID NO: 1888187
agcagaguccaguguucgu

SEQ ID NO: 2517213 - RNA, 19 nt, Artificial Sequence
  Description of Artificial Sequence: Synthetic oligonucleotide
  Antisense strand to SEQ ID NO: 2517212
acgaacacuggacucugcu

SEQ ID NO: 2517214 - RNA, 19 nt, Artificial Sequence
  Description of Artificial Sequence: Synthetic oligonucleotide
  Sense strand starting at position 262 of SEQ ID NO: 1888187
gcgccagaucuaggaaaug

SEQ ID NO: 2517215 - RNA, 19 nt, Artificial Sequence
  Description of Artificial Sequence: Synthetic oligonucleotide
  Antisense strand to SEQ ID NO: 2517214
cauuuccuagaucuggcgc

SEQ ID NO: 2517216 - RNA, 19 nt, Artificial Sequence
  Description of Artificial Sequence: Synthetic oligonucleotide
  Sense strand starting at position 904 of SEQ ID NO: 1888187
gccaauuaguaaccacagu

SEQ ID NO: 2517217 - RNA, 19 nt, Artificial Sequence
  Description of Artificial Sequence: Synthetic oligonucleotide
  Antisense strand to SEQ ID NO: 2517216
acugugguuacuaauuggc

SEQ ID NO: 2517218 - RNA, 19 nt, Artificial Sequence
  Description of Artificial Sequence: Synthetic oligonucleotide
  Sense strand starting at position 946 of SEQ ID NO: 1888187
ggaagacuugcacgucucu

SEQ ID NO: 2517219 - RNA, 19 nt, Artificial Sequence
  Description of Artificial Sequence: Synthetic oligonucleotide
  Antisense strand to SEQ ID NO: 2517218
agagacgugcaagucuucc

SEQ ID NO: 2517220 - RNA, 19 nt, Artificial Sequence
  Description of Artificial Sequence: Synthetic oligonucleotide
  Sense strand starting at position 955 of SEQ ID NO: 1888187
gcacgucucucacuugaag

SEQ ID NO: 2517221 - RNA, 19 nt, Artificial Sequence
  Description of Artificial Sequence: Synthetic oligonucleotide
  Antisense strand to SEQ ID NO: 2517220
cuucaagugagagacgugc

SEQ ID NO: 2517222 - RNA, 19 nt, Artificial Sequence
  Description of Artificial Sequence: Synthetic oligonucleotide
  Sense strand starting at position 988 of SEQ ID NO: 1888187
ugaucaagcuuagugaaga

SEQ ID NO: 2517223 - RNA, 19 nt, Artificial Sequence
  Description of Artificial Sequence: Synthetic oligonucleotide
  Antisense strand to SEQ ID NO: 2517222
ucuucacuaagcuugauca

SEQ ID NO: 2517224 - RNA, 19 nt, Artificial Sequence
  Description of Artificial Sequence: Synthetic oligonucleotide
  Sense strand starting at position 1221 of SEQ ID NO: 1888187
cuguuaauagcauaguuua

SEQ ID NO: 2517225 - RNA, 19 nt, Artificial Sequence
  Description of Artificial Sequence: Synthetic oligonucleotide
  Antisense strand to SEQ ID NO: 2517224
uaaacuaugcuauuaacag

SEQ ID NO: 2517226 - RNA, 19 nt, Artificial Sequence
  Description of Artificial Sequence: Synthetic oligonucleotide
  Sense strand starting at position 1825 of SEQ ID NO: 1888187
agcuaucauagauagcgau

SEQ ID NO: 2517227 - RNA, 19 nt, Artificial Sequence
  Description of Artificial Sequence: Synthetic oligonucleotide
  Antisense strand to SEQ ID NO: 2517226
aucgcuaucuaugauagcu

SEQ ID NO: 2517228 - RNA, 19 nt, Artificial Sequence
  Description of Artificial Sequence: Synthetic oligonucleotide
  Sense strand starting at position 1831 of SEQ ID NO: 1888187
cauagauagcgaugucuuu

SEQ ID NO: 2517229 - RNA, 19 nt, Artificial Sequence
  Description of Artificial Sequence: Synthetic oligonucleotide
  Antisense strand to SEQ ID NO: 2517228
aaagacaucgcuaucuaug

SEQ ID NO: 2517230 - RNA, 19 nt, Artificial Sequence
  Description of Artificial Sequence: Synthetic oligonucleotide
  Sense strand starting at position 1837 of SEQ ID NO: 1888187
uagcgaugucuuugaugaa

SEQ ID NO: 2517231 - RNA, 19 nt, Artificial Sequence
  Description of Artificial Sequence: Synthetic oligonucleotide
  Antisense strand to SEQ ID NO: 2517230
uucaucaaagacaucgcua

SEQ ID NO: 2517232 - RNA, 19 nt, Artificial Sequence
  Description of Artificial Sequence: Synthetic oligonucleotide
  Sense strand starting at position 2100 of SEQ ID NO: 1888187
cgugguagaaaucgcaaga

SEQ ID NO: 2517233 - RNA, 19 nt, Artificial Sequence
  Description of Artificial Sequence: Synthetic oligonucleotide
  Antisense strand to SEQ ID NO: 2517232
ucuugcgauuucuaccacg

SEQ ID NO: 2517234 - RNA, 19 nt, Artificial Sequence
  Description of Artificial Sequence: Synthetic oligonucleotide
  Sense strand starting at position 2199 of SEQ ID NO: 1888187
gcuucuuguggacgagcaa

SEQ ID NO: 2517235 - RNA, 19 nt, Artificial Sequence
  Description of Artificial Sequence: Synthetic oligonucleotide
  Antisense strand to SEQ ID NO: 2517234
uugcucguccacaagaagc

SEQ ID NO: 2517236 - RNA, 19 nt, Artificial Sequence
  Description of Artificial Sequence: Synthetic oligonucleotide
  Sense strand starting at position 2200 of SEQ ID NO: 1888187
cuucuuguggacgagcaaa

SEQ ID NO: 2517237 - RNA, 19 nt, Artificial Sequence
  Description of Artificial Sequence: Synthetic oligonucleotide
  Antisense strand to SEQ ID NO: 2517236
uuugcucguccacaagaag

SEQ ID NO: 2517238 - RNA, 19 nt, Artificial Sequence
  Description of Artificial Sequence: Synthetic oligonucleotide
  Sense strand starting at position 2500 of SEQ ID NO: 1888187
agcagucaucaauauauag

SEQ ID NO: 2517239 - RNA, 19 nt, Artificial Sequence
  Description of Artificial Sequence: Synthetic oligonucleotide
  Antisense strand to SEQ ID NO: 2517238
cuauauauugaugacugcu

SEQ ID NO: 2517240 - RNA, 19 nt, Artificial Sequence
  Description of Artificial Sequence: Synthetic oligonucleotide
  Sense strand starting at position 2549 of SEQ ID NO: 1888187
cuuggugaggcucagauau

SEQ ID NO: 2517241 - RNA, 19 nt, Artificial Sequence
  Description of Artificial Sequence: Synthetic oligonucleotide
  Antisense strand to SEQ ID NO: 2517240
auaucugagccucaccaag

SEQ ID NO: 2517242 - RNA, 19 nt, Artificial Sequence
  Description of Artificial Sequence: Synthetic oligonucleotide
  Sense strand starting at position 2551 of SEQ ID NO: 1888187
uggugaggcucagauauuc

SEQ ID NO: 2517243 - RNA, 19 nt, Artificial Sequence
  Description of Artificial Sequence: Synthetic oligonucleotide
  Antisense strand to SEQ ID NO: 2517242
gaauaucugagccucacca

SEQ ID NO: 2517244 - RNA, 19 nt, Artificial Sequence
  Description of Artificial Sequence: Synthetic oligonucleotide
  Sense strand starting at position 2627 of SEQ ID NO: 1888187
acgugcuauuaauuacuaa

SEQ ID NO: 2517245 - RNA, 19 nt, Artificial Sequence
  Description of Artificial Sequence: Synthetic oligonucleotide
  Antisense strand to SEQ ID NO: 2517244
uuaguaauuaauagcacgu

SEQ ID NO: 2517246 - RNA, 19 nt, Artificial Sequence
  Description of Artificial Sequence: Synthetic oligonucleotide
  Sense strand starting at position 2813 of SEQ ID NO: 1888187
guuguaacauuugccuuau

SEQ ID NO: 2517247 - RNA, 19 nt, Artificial Sequence
  Description of Artificial Sequence: Synthetic oligonucleotide
  Antisense strand to SEQ ID NO: 2517246
auaaggcaaauguuacaac

SEQ ID NO: 2517248 - RNA, 19 nt, Artificial Sequence
  Description of Artificial Sequence: Synthetic oligonucleotide
  Sense strand starting at position 2888 of SEQ ID NO: 1888187
guuguaacauuugcuuuau

SEQ ID NO: 2517249 - RNA, 19 nt, Artificial Sequence
  Description of Artificial Sequence: Synthetic oligonucleotide
  Antisense strand to SEQ ID NO: 2517248
auaaagcaaauguuacaac

SEQ ID NO: 2517250 - RNA, 19 nt, Artificial Sequence
  Description of Artificial Sequence: Synthetic oligonucleotide
  Sense strand starting at position 2935 of SEQ ID NO: 1888187
accucugaguaugcuugua

SEQ ID NO: 2517251 - RNA, 19 nt, Artificial Sequence
  Description of Artificial Sequence: Synthetic oligonucleotide
  Antisense strand to SEQ ID NO: 2517250
uacaagcauacucagaggu

SEQ ID NO: 2517252 - RNA, 19 nt, Artificial Sequence
  Description of Artificial Sequence: Synthetic oligonucleotide
  Sense strand starting at position 2962 of SEQ ID NO: 1888187
gugguucuuuguuuggaga

SEQ ID NO: 2517253 - RNA, 19 nt, Artificial Sequence
  Description of Artificial Sequence: Synthetic oligonucleotide
  Antisense strand to SEQ ID NO: 2517252
ucuccaaacaaagaaccac

SEQ ID NO: 2517254 - RNA, 19 nt, Artificial Sequence
  Description of Artificial Sequence: Synthetic oligonucleotide
  Sense strand starting at position 2963 of SEQ ID NO: 1888187
ugguucuuuguuuggagau

SEQ ID NO: 2517255 - RNA, 19 nt, Artificial Sequence
  Description of Artificial Sequence: Synthetic oligonucleotide
  Antisense strand to SEQ ID NO: 2517254
aucuccaaacaaagaacca

SEQ ID NO: 2517256 - RNA, 19 nt, Artificial Sequence
  Description of Artificial Sequence: Synthetic oligonucleotide
  Sense strand starting at position 3107 of SEQ ID NO: 1888187
agcacuaugcuuggcuauu

SEQ ID NO: 2517257 - RNA, 19 nt, Artificial Sequence
  Description of Artificial Sequence: Synthetic oligonucleotide
  Antisense strand to SEQ ID NO: 2517256
aauagccaagcauagugcu

SEQ ID NO: 2517258 - RNA, 19 nt, Artificial Sequence
  Description of Artificial Sequence: Synthetic oligonucleotide
  Sense strand starting at position 3108 of SEQ ID NO: 1888187
gcacuaugcuuggcuauuu

SEQ ID NO: 2517259 - RNA, 19 nt, Artificial Sequence
  Description of Artificial Sequence: Synthetic oligonucleotide
  Antisense strand to SEQ ID NO: 2517258
aaauagccaagcauagugc

SEQ ID NO: 2517260 - RNA, 19 nt, Artificial Sequence
  Description of Artificial Sequence: Synthetic oligonucleotide
  Sense strand starting at position 3149 of SEQ ID NO: 1888187
acgggaucucacuauguag

SEQ ID NO: 2517261 - RNA, 19 nt, Artificial Sequence
  Description of Artificial Sequence: Synthetic oligonucleotide
  Antisense strand to SEQ ID NO: 2517260
cuacauagugagaucccgu

SEQ ID NO: 2517262 - RNA, 19 nt, Artificial Sequence
  Description of Artificial Sequence: Synthetic oligonucleotide
  Sense strand starting at position 3177 of SEQ ID NO: 1888187
ucuugaacuccgggacuga

SEQ ID NO: 2517263 - RNA, 19 nt, Artificial Sequence
  Description of Artificial Sequence: Synthetic oligonucleotide
  Antisense strand to SEQ ID NO: 2517262
ucagucccggaguucaaga

SEQ ID NO: 2517264 - RNA, 19 nt, Artificial Sequence
  Description of Artificial Sequence: Synthetic oligonucleotide
  Sense strand starting at position 3680 of SEQ ID NO: 1888187
cucugugcucuguguauca

SEQ ID NO: 2517265 - RNA, 19 nt, Artificial Sequence
  Description of Artificial Sequence: Synthetic oligonucleotide
  Antisense strand to SEQ ID NO: 2517264
ugauacacagagcacagag

SEQ ID NO: 2517266 - RNA, 19 nt, Artificial Sequence
  Description of Artificial Sequence: Synthetic oligonucleotide
  Sense strand starting at position 3690 of SEQ ID NO: 1888187
uguguaucaucucuuccuu

SEQ ID NO: 2517267 - RNA, 19 nt, Artificial Sequence
  Description of Artificial Sequence: Synthetic oligonucleotide
  Antisense strand to SEQ ID NO: 2517266
aaggaagagaugauacaca

SEQ ID NO: 2517268 - RNA, 19 nt, Artificial Sequence
  Description of Artificial Sequence: Synthetic oligonucleotide
  Sense strand starting at position 3880 of SEQ ID NO: 1888187
ucuccuguuagcggugaau

SEQ ID NO: 2517269 - RNA, 19 nt, Artificial Sequence
  Description of Artificial Sequence: Synthetic oligonucleotide
  Antisense strand to SEQ ID NO: 2517268
auucaccgcuaacaggaga

SEQ ID NO: 2517270 - RNA, 19 nt, Artificial Sequence
  Description of Artificial Sequence: Synthetic oligonucleotide
  Sense strand starting at position 3882 of SEQ ID NO: 1888187
uccuguuagcggugaauaa

SEQ ID NO: 2517271 - RNA, 19 nt, Artificial Sequence
  Description of Artificial Sequence: Synthetic oligonucleotide
  Antisense strand to SEQ ID NO: 2517270
uuauucaccgcuaacagga

SEQ ID NO: 2517272 - RNA, 19 nt, Artificial Sequence
  Description of Artificial Sequence: Synthetic oligonucleotide
  Sense strand starting at position 3883 of SEQ ID NO: 1888187
ccuguuagcggugaauaau

SEQ ID NO: 2517273 - RNA, 19 nt, Artificial Sequence
  Description of Artificial Sequence: Synthetic oligonucleotide
  Antisense strand to SEQ ID NO: 2517272
auuauucaccgcuaacagg

SEQ ID NO: 2517274 - RNA, 19 nt, Artificial Sequence
  Description of Artificial Sequence: Synthetic oligonucleotide
  Sense strand starting at position 3923 of SEQ ID NO: 1888187
ugucaagacucagaaagua

SEQ ID NO: 2517275 - RNA, 19 nt, Artificial Sequence
  Description of Artificial Sequence: Synthetic oligonucleotide
  Antisense strand to SEQ ID NO: 2517274
uacuuucugagucuugaca

SEQ ID NO: 2517276 - RNA, 19 nt, Artificial Sequence
  Description of Artificial Sequence: Synthetic oligonucleotide
  Sense strand starting at position 3963 of SEQ ID NO: 1888187
augaaugugcacuguaaac

SEQ ID NO: 2517277 - RNA, 19 nt, Artificial Sequence
  Description of Artificial Sequence: Synthetic oligonucleotide
  Antisense strand to SEQ ID NO: 2517276
guuuacagugcacauucau

SEQ ID NO: 2517278 - RNA, 19 nt, Artificial Sequence
  Description of Artificial Sequence: Synthetic oligonucleotide
  Sense strand starting at position 3965 of SEQ ID NO: 1888187
gaaugugcacuguaaacuu

SEQ ID NO: 2517279 - RNA, 19 nt, Artificial Sequence
  Description of Artificial Sequence: Synthetic oligonucleotide
  Antisense strand to SEQ ID NO: 2517278
aaguuuacagugcacauuc

SEQ ID NO: 2517280 - RNA, 19 nt, Artificial Sequence
  Description of Artificial Sequence: Synthetic oligonucleotide
  Sense strand starting at position 3972 of SEQ ID NO: 1888187
cacuguaaacuuugaguga

SEQ ID NO: 2517281 - RNA, 19 nt, Artificial Sequence
  Description of Artificial Sequence: Synthetic oligonucleotide
  Antisense strand to SEQ ID NO: 2517280
ucacucaaaguuuacagug

SEQ ID NO: 2517282 - RNA, 19 nt, Artificial Sequence
  Description of Artificial Sequence: Synthetic oligonucleotide
  Sense strand starting at position 3973 of SEQ ID NO: 1888187
acuguaaacuuugagugau

SEQ ID NO: 2517283 - RNA, 19 nt, Artificial Sequence
  Description of Artificial Sequence: Synthetic oligonucleotide
  Antisense strand to SEQ ID NO: 2517282
aucacucaaaguuuacagu

SEQ ID NO: 2517284 - RNA, 19 nt, Artificial Sequence
  Description of Artificial Sequence: Synthetic oligonucleotide
  Sense strand starting at position 3975 of SEQ ID NO: 1888187
uguaaacuuugagugauac

SEQ ID NO: 2517285 - RNA, 19 nt, Artificial Sequence
  Description of Artificial Sequence: Synthetic oligonucleotide
  Antisense strand to SEQ ID NO: 2517284
guaucacucaaaguuuaca

SEQ ID NO: 2517286 - RNA, 19 nt, Artificial Sequence
  Description of Artificial Sequence: Synthetic oligonucleotide
  Sense strand starting at position 3976 of SEQ ID NO: 1888187
guaaacuuugagugauacu

SEQ ID NO: 2517287 - RNA, 19 nt, Artificial Sequence
  Description of Artificial Sequence: Synthetic oligonucleotide
  Antisense strand to SEQ ID NO: 2517286
aguaucacucaaaguuuac

SEQ ID NO: 2517288 - RNA, 19 nt, Artificial Sequence
  Description of Artificial Sequence: Synthetic oligonucleotide
  Sense strand starting at position 3979 of SEQ ID NO: 1888187
aacuuugagugauacugaa

SEQ ID NO: 2517289 - RNA, 19 nt, Artificial Sequence
  Description of Artificial Sequence: Synthetic oligonucleotide
  Antisense strand to SEQ ID NO: 2517288
uucaguaucacucaaaguu

SEQ ID NO: 2517290 - RNA, 19 nt, Artificial Sequence
  Description of Artificial Sequence: Synthetic oligonucleotide
  Sense strand starting at position 3 of SEQ ID NO: 1888188
guauaauggcaaugggaua

SEQ ID NO: 2517291 - RNA, 19 nt, Artificial Sequence
  Description of Artificial Sequence: Synthetic oligonucleotide
  Antisense strand to SEQ ID NO: 2517290
uaucccauugccauuauac

SEQ ID NO: 2517292 - RNA, 19 nt, Artificial Sequence
  Description of Artificial Sequence: Synthetic oligonucleotide
  Sense strand starting at position 365 of SEQ ID NO: 1888188
gaaucuugcucugucgcaa

SEQ ID NO: 2517293 - RNA, 19 nt, Artificial Sequence
  Description of Artificial Sequence: Synthetic oligonucleotide
  Antisense strand to SEQ ID NO: 2517292
uugcgacagagcaagauuc

SEQ ID NO: 2517294 - RNA, 19 nt, Artificial Sequence
  Description of Artificial Sequence: Synthetic oligonucleotide
  Sense strand starting at position 837 of SEQ ID NO: 1888188
cucaguaggcugugguaga

SEQ ID NO: 2517295 - RNA, 19 nt, Artificial Sequence
  Description of Artificial Sequence: Synthetic oligonucleotide
  Antisense strand to SEQ ID NO: 2517294
ucuaccacagccuacugag

SEQ ID NO: 2517296 - RNA, 19 nt, Artificial Sequence
  Description of Artificial Sequence: Synthetic oligonucleotide
  Sense strand starting at position 971 of SEQ ID NO: 1888188
caagcauacucagagguau

SEQ ID NO: 2517297 - RNA, 19 nt, Artificial Sequence
  Description of Artificial Sequence: Synthetic oligonucleotide
  Antisense strand to SEQ ID NO: 2517296
auaccucugaguaugcuug

SEQ ID NO: 2517298 - RNA, 19 nt, Artificial Sequence
  Description of Artificial Sequence: Synthetic oligonucleotide
  Sense strand starting at position 973 of SEQ ID NO: 1888188
agcauacucagagguauug

SEQ ID NO: 2517299 - RNA, 19 nt, Artificial Sequence
  Description of Artificial Sequence: Synthetic oligonucleotide
  Antisense strand to SEQ ID NO: 2517298
caauaccucugaguaugcu

SEQ ID NO: 2517300 - RNA, 19 nt, Artificial Sequence
  Description of Artificial Sequence: Synthetic oligonucleotide
  Sense strand starting at position 1094 of SEQ ID NO: 1888188
aggcaaauguuacaaccaa

SEQ ID NO: 2517301 - RNA, 19 nt, Artificial Sequence
  Description of Artificial Sequence: Synthetic oligonucleotide
  Antisense strand to SEQ ID NO: 2517300
uugguuguaacauuugccu

SEQ ID NO: 2517302 - RNA, 19 nt, Artificial Sequence
  Description of Artificial Sequence: Synthetic oligonucleotide
  Sense strand starting at position 1139 of SEQ ID NO: 1888188
ggguggguuugguuccaga

SEQ ID NO: 2517303 - RNA, 19 nt, Artificial Sequence
  Description of Artificial Sequence: Synthetic oligonucleotide
  Antisense strand to SEQ ID NO: 2517302
ucuggaaccaaacccaccc

SEQ ID NO: 2517304 - RNA, 19 nt, Artificial Sequence
  Description of Artificial Sequence: Synthetic oligonucleotide
  Sense strand starting at position 1389 of SEQ ID NO: 1888188
uggugagggucuugccuau

SEQ ID NO: 2517305 - RNA, 19 nt, Artificial Sequence
  Description of Artificial Sequence: Synthetic oligonucleotide
  Antisense strand to SEQ ID NO: 2517304
auaggcaagacccucacca

SEQ ID NO: 2517306 - RNA, 19 nt, Artificial Sequence
  Description of Artificial Sequence: Synthetic oligonucleotide
  Sense strand starting at position 1393 of SEQ ID NO: 1888188
gagggucuugccuauauau

SEQ ID NO: 2517307 - RNA, 19 nt, Artificial Sequence
  Description of Artificial Sequence: Synthetic oligonucleotide
  Antisense strand to SEQ ID NO: 2517306
auauauaggcaagacccuc

SEQ ID NO: 2517308 - RNA, 19 nt, Artificial Sequence
  Description of Artificial Sequence: Synthetic oligonucleotide
  Sense strand starting at position 1395 of SEQ ID NO: 1888188
gggucuugccuauauauug

SEQ ID NO: 2517309 - RNA, 19 nt, Artificial Sequence
  Description of Artificial Sequence: Synthetic oligonucleotide
  Antisense strand to SEQ ID NO: 2517308
caauauauaggcaagaccc

SEQ ID NO: 2517310 - RNA, 19 nt, Artificial Sequence
  Description of Artificial Sequence: Synthetic oligonucleotide
  Sense strand starting at position 1700 of SEQ ID NO: 1888188
uuucuuugcucguccacaa

SEQ ID NO: 2517311 - RNA, 19 nt, Artificial Sequence
  Description of Artificial Sequence: Synthetic oligonucleotide
  Antisense strand to SEQ ID NO: 2517310
uuguggacgagcaaagaaa

SEQ ID NO: 2517312 - RNA, 19 nt, Artificial Sequence
  Description of Artificial Sequence: Synthetic oligonucleotide
  Sense strand starting at position 1807 of SEQ ID NO: 1888188
ugcgauuucuaccacgucu

SEQ ID NO: 2517313 - RNA, 19 nt, Artificial Sequence
  Description of Artificial Sequence: Synthetic oligonucleotide
  Antisense strand to SEQ ID NO: 2517312
agacgugguagaaaucgca

SEQ ID NO: 2517314 - RNA, 19 nt, Artificial Sequence
  Description of Artificial Sequence: Synthetic oligonucleotide
  Sense strand starting at position 2075 of SEQ ID NO: 1888188
agacaucgcuaucuaugau

SEQ ID NO: 2517315 - RNA, 19 nt, Artificial Sequence
  Description of Artificial Sequence: Synthetic oligonucleotide
  Antisense strand to SEQ ID NO: 2517314
aucauagauagcgaugucu

SEQ ID NO: 2517316 - RNA, 19 nt, Artificial Sequence
  Description of Artificial Sequence: Synthetic oligonucleotide
  Sense strand starting at position 2079 of SEQ ID NO: 1888188
aucgcuaucuaugauagcu

SEQ ID NO: 2517317 - RNA, 19 nt, Artificial Sequence
  Description of Artificial Sequence: Synthetic oligonucleotide
  Antisense strand to SEQ ID NO: 2517316
agcuaucauagauagcgau

SEQ ID NO: 2517318 - RNA, 19 nt, Artificial Sequence
  Description of Artificial Sequence: Synthetic oligonucleotide
  Sense strand starting at position 2081 of SEQ ID NO: 1888188
cgcuaucuaugauagcuau

SEQ ID NO: 2517319 - RNA, 19 nt, Artificial Sequence
  Description of Artificial Sequence: Synthetic oligonucleotide
  Antisense strand to SEQ ID NO: 2517318
auagcuaucauagauagcg

SEQ ID NO: 2517320 - RNA, 19 nt, Artificial Sequence
  Description of Artificial Sequence: Synthetic oligonucleotide
  Sense strand starting at position 2871 of SEQ ID NO: 1888188
uuugaagccaaguguugau

SEQ ID NO: 2517321 - RNA, 19 nt, Artificial Sequence
  Description of Artificial Sequence: Synthetic oligonucleotide
  Antisense strand to SEQ ID NO: 2517320
aucaacacuuggcuucaaa

SEQ ID NO: 2517322 - RNA, 19 nt, Artificial Sequence
  Description of Artificial Sequence: Synthetic oligonucleotide
  Sense strand starting at position 2884 of SEQ ID NO: 1888188
guugauuucucucuagcua

SEQ ID NO: 2517323 - RNA, 19 nt, Artificial Sequence
  Description of Artificial Sequence: Synthetic oligonucleotide
  Antisense strand to SEQ ID NO: 2517322
uagcuagagagaaaucaac

SEQ ID NO: 2517324 - RNA, 19 nt, Artificial Sequence
  Description of Artificial Sequence: Synthetic oligonucleotide
  Sense strand starting at position 2984 of SEQ ID NO: 1888188
ugaguucuuugaggucacu

SEQ ID NO: 2517325 - RNA, 19 nt, Artificial Sequence
  Description of Artificial Sequence: Synthetic oligonucleotide
  Antisense strand to SEQ ID NO: 2517324
agugaccucaaagaacuca

SEQ ID NO: 2517326 - RNA, 19 nt, Artificial Sequence
  Description of Artificial Sequence: Synthetic oligonucleotide
  Sense strand starting at position 2990 of SEQ ID NO: 1888188
cuuugaggucacugugguu

SEQ ID NO: 2517327 - RNA, 19 nt, Artificial Sequence
  Description of Artificial Sequence: Synthetic oligonucleotide
  Antisense strand to SEQ ID NO: 2517326
aaccacagugaccucaaag

SEQ ID NO: 2517328 - RNA, 19 nt, Artificial Sequence
  Description of Artificial Sequence: Synthetic oligonucleotide
  Sense strand starting at position 2995 of SEQ ID NO: 1888188
aggucacugugguuacuaa

SEQ ID NO: 2517329 - RNA, 19 nt, Artificial Sequence
  Description of Artificial Sequence: Synthetic oligonucleotide
  Antisense strand to SEQ ID NO: 2517328
uuaguaaccacagugaccu

SEQ ID NO: 2517330 - RNA, 19 nt, Artificial Sequence
  Description of Artificial Sequence: Synthetic oligonucleotide
  Sense strand starting at position 2996 of SEQ ID NO: 1888188
ggucacugugguuacuaau

SEQ ID NO: 2517331 - RNA, 19 nt, Artificial Sequence
  Description of Artificial Sequence: Synthetic oligonucleotide
  Antisense strand to SEQ ID NO: 2517330
auuaguaaccacagugacc

SEQ ID NO: 2517332 - RNA, 19 nt, Artificial Sequence
  Description of Artificial Sequence: Synthetic oligonucleotide
  Sense strand starting at position 3898 of SEQ ID NO: 1888188
gaggacugcugucaagaau

SEQ ID NO: 2517333 - RNA, 19 nt, Artificial Sequence
  Description of Artificial Sequence: Synthetic oligonucleotide
  Antisense strand to SEQ ID NO: 2517332
auucuugacagcaguccuc

SEQ ID NO: 2517334 - RNA, 19 nt, Artificial Sequence
  Description of Artificial Sequence: Synthetic oligonucleotide
  Sense strand starting at position 3904 of SEQ ID NO: 1888188
ugcugucaagaaugacaau

SEQ ID NO: 2517335 - RNA, 19 nt, Artificial Sequence
  Description of Artificial Sequence: Synthetic oligonucleotide
  Antisense strand to SEQ ID NO: 2517334
auugucauucuugacagca

SEQ ID NO: 2517336 - RNA, 19 nt, Artificial Sequence
  Description of Artificial Sequence: Synthetic oligonucleotide
  Sense strand starting at position 3907 of SEQ ID NO: 1888188
ugucaagaaugacaauaaa

SEQ ID NO: 2517337 - RNA, 19 nt, Artificial Sequence
  Description of Artificial Sequence: Synthetic oligonucleotide
  Antisense strand to SEQ ID NO: 2517336
uuuauugucauucuugaca

SEQ ID NO: 2517338 - RNA, 19 nt, Artificial Sequence
  Description of Artificial Sequence: Synthetic oligonucleotide
  Sense strand starting at position 134 of SEQ ID NO: 1888189
guucuucuaagguaguguu

SEQ ID NO: 2517339 - RNA, 19 nt, Artificial Sequence
  Description of Artificial Sequence: Synthetic oligonucleotide
  Antisense strand to SEQ ID NO: 2517338
aacacuaccuuagaagaac

SEQ ID NO: 2517340 - RNA, 19 nt, Artificial Sequence
  Description of Artificial Sequence: Synthetic oligonucleotide
  Sense strand starting at position 144 of SEQ ID NO: 1888189
gguaguguuucucuaccac

SEQ ID NO: 2517341 - RNA, 19 nt, Artificial Sequence
  Description of Artificial Sequence: Synthetic oligonucleotide
  Antisense strand to SEQ ID NO: 2517340
gugguagagaaacacuacc

SEQ ID NO: 2517342 - RNA, 19 nt, Artificial Sequence
  Description of Artificial Sequence: Synthetic oligonucleotide
  Sense strand starting at position 150 of SEQ ID NO: 1888189
guuucucuaccacagugau

SEQ ID NO: 2517343 - RNA, 19 nt, Artificial Sequence
  Description of Artificial Sequence: Synthetic oligonucleotide
  Antisense strand to SEQ ID NO: 2517342
aucacugugguagagaaac

SEQ ID NO: 2517344 - RNA, 19 nt, Artificial Sequence
  Description of Artificial Sequence: Synthetic oligonucleotide
  Sense strand starting at position 188 of SEQ ID NO: 1888189
ugccaauguccggagacau

SEQ ID NO: 2517345 - RNA, 19 nt, Artificial Sequence
  Description of Artificial Sequence: Synthetic oligonucleotide
  Antisense strand to SEQ ID NO: 2517344
augucuccggacauuggca

SEQ ID NO: 2517346 - RNA, 19 nt, Artificial Sequence
  Description of Artificial Sequence: Synthetic oligonucleotide
  Sense strand starting at position 668 of SEQ ID NO: 1888189
gucucuagcccucggacaa

SEQ ID NO: 2517347 - RNA, 19 nt, Artificial Sequence
  Description of Artificial Sequence: Synthetic oligonucleotide
  Antisense strand to SEQ ID NO: 2517346
uuguccgagggcuagagac

SEQ ID NO: 2517348 - RNA, 19 nt, Artificial Sequence
  Description of Artificial Sequence: Synthetic oligonucleotide
  Sense strand starting at position 792 of SEQ ID NO: 1888189
cucagauaucaacgguucu

SEQ ID NO: 2517349 - RNA, 19 nt, Artificial Sequence
  Description of Artificial Sequence: Synthetic oligonucleotide
  Antisense strand to SEQ ID NO: 2517348
agaaccguugauaucugag

SEQ ID NO: 2517350 - RNA, 19 nt, Artificial Sequence
  Description of Artificial Sequence: Synthetic oligonucleotide
  Sense strand starting at position 935 of SEQ ID NO: 1888189
ggccuuugcugaccuugaa

SEQ ID NO: 2517351 - RNA, 19 nt, Artificial Sequence
  Description of Artificial Sequence: Synthetic oligonucleotide
  Antisense strand to SEQ ID NO: 2517350
uucaaggucagcaaaggcc

SEQ ID NO: 2517352 - RNA, 19 nt, Artificial Sequence
  Description of Artificial Sequence: Synthetic oligonucleotide
  Sense strand starting at position 1046 of SEQ ID NO: 1888189
agagcuuucuacuuggaaa

SEQ ID NO: 2517353 - RNA, 19 nt, Artificial Sequence
  Description of Artificial Sequence: Synthetic oligonucleotide
  Antisense strand to SEQ ID NO: 2517352
uuuccaaguagaaagcucu

SEQ ID NO: 2517354 - RNA, 19 nt, Artificial Sequence
  Description of Artificial Sequence: Synthetic oligonucleotide
  Sense strand starting at position 1048 of SEQ ID NO: 1888189
agcuuucuacuuggaaauu

SEQ ID NO: 2517355 - RNA, 19 nt, Artificial Sequence
  Description of Artificial Sequence: Synthetic oligonucleotide
  Antisense strand to SEQ ID NO: 2517354
aauuuccaaguagaaagcu

SEQ ID NO: 2517356 - RNA, 19 nt, Artificial Sequence
  Description of Artificial Sequence: Synthetic oligonucleotide
  Sense strand starting at position 1060 of SEQ ID NO: 1888189
ggaaauuccaaaggugcua

SEQ ID NO: 2517357 - RNA, 19 nt, Artificial Sequence
  Description of Artificial Sequence: Synthetic oligonucleotide
  Antisense strand to SEQ ID NO: 2517356
uagcaccuuuggaauuucc

SEQ ID NO: 2517358 - RNA, 19 nt, Artificial Sequence
  Description of Artificial Sequence: Synthetic oligonucleotide
  Sense strand starting at position 1297 of SEQ ID NO: 1888189
ccagacuugcccgacaguu

SEQ ID NO: 2517359 - RNA, 19 nt, Artificial Sequence
  Description of Artificial Sequence: Synthetic oligonucleotide
  Antisense strand to SEQ ID NO: 2517358
aacugucgggcaagucugg

SEQ ID NO: 2517360 - RNA, 19 nt, Artificial Sequence
  Description of Artificial Sequence: Synthetic oligonucleotide
  Sense strand starting at position 1405 of SEQ ID NO: 1888189
aaggaagauuuagguacau

SEQ ID NO: 2517361 - RNA, 19 nt, Artificial Sequence
  Description of Artificial Sequence: Synthetic oligonucleotide
  Antisense strand to SEQ ID NO: 2517360
auguaccuaaaucuuccuu

SEQ ID NO: 2517362 - RNA, 19 nt, Artificial Sequence
  Description of Artificial Sequence: Synthetic oligonucleotide
  Sense strand starting at position 1484 of SEQ ID NO: 1888189
caagaagauuuagggucuu

SEQ ID NO: 2517363 - RNA, 19 nt, Artificial Sequence
  Description of Artificial Sequence: Synthetic oligonucleotide
  Antisense strand to SEQ ID NO: 2517362
aagacccuaaaucuucuug

SEQ ID NO: 2517364 - RNA, 19 nt, Artificial Sequence
  Description of Artificial Sequence: Synthetic oligonucleotide
  Sense strand starting at position 1490 of SEQ ID NO: 1888189
gauuuagggucuugaagga

SEQ ID NO: 2517365 - RNA, 19 nt, Artificial Sequence
  Description of Artificial Sequence: Synthetic oligonucleotide
  Antisense strand to SEQ ID NO: 2517364
uccuucaagacccuaaauc

SEQ ID NO: 2517366 - RNA, 19 nt, Artificial Sequence
  Description of Artificial Sequence: Synthetic oligonucleotide
  Sense strand starting at position 1530 of SEQ ID NO: 1888189
gauuuaggguucugaagaa

SEQ ID NO: 2517367 - RNA, 19 nt, Artificial Sequence
  Description of Artificial Sequence: Synthetic oligonucleotide
  Antisense strand to SEQ ID NO: 2517366
uucuucagaacccuaaauc

SEQ ID NO: 2517368 - RNA, 19 nt, Artificial Sequence
  Description of Artificial Sequence: Synthetic oligonucleotide
  Sense strand starting at position 1608 of SEQ ID NO: 1888189
agauucucuggguggagau

SEQ ID NO: 2517369 - RNA, 19 nt, Artificial Sequence
  Description of Artificial Sequence: Synthetic oligonucleotide
  Antisense strand to SEQ ID NO: 2517368
aucuccacccagagaaucu

SEQ ID NO: 2517370 - RNA, 19 nt, Artificial Sequence
  Description of Artificial Sequence: Synthetic oligonucleotide
  Sense strand starting at position 1653 of SEQ ID NO: 1888189
ucaggaauguguucaggug

SEQ ID NO: 2517371 - RNA, 19 nt, Artificial Sequence
  Description of Artificial Sequence: Synthetic oligonucleotide
  Antisense strand to SEQ ID NO: 2517370
caccugaacacauuccuga

SEQ ID NO: 2517372 - RNA, 19 nt, Artificial Sequence
  Description of Artificial Sequence: Synthetic oligonucleotide
  Sense strand starting at position 1654 of SEQ ID NO: 1888189
caggaauguguucaggugu

SEQ ID NO: 2517373 - RNA, 19 nt, Artificial Sequence
  Description of Artificial Sequence: Synthetic oligonucleotide
  Antisense strand to SEQ ID NO: 2517372
acaccugaacacauuccug

SEQ ID NO: 2517374 - RNA, 19 nt, Artificial Sequence
  Description of Artificial Sequence: Synthetic oligonucleotide
  Sense strand starting at position 1791 of SEQ ID NO: 1888189
gacccaugggcuuguggau

SEQ ID NO: 2517375 - RNA, 19 nt, Artificial Sequence
  Description of Artificial Sequence: Synthetic oligonucleotide
  Antisense strand to SEQ ID NO: 2517374
auccacaagcccauggguc

SEQ ID NO: 2517376 - RNA, 19 nt, Artificial Sequence
  Description of Artificial Sequence: Synthetic oligonucleotide
  Sense strand starting at position 2006 of SEQ ID NO: 1888189
ugugaugucccuuauccaa

SEQ ID NO: 2517377 - RNA, 19 nt, Artificial Sequence
  Description of Artificial Sequence: Synthetic oligonucleotide
  Antisense strand to SEQ ID NO: 2517376
uuggauaagggacaucaca

SEQ ID NO: 2517378 - RNA, 19 nt, Artificial Sequence
  Description of Artificial Sequence: Synthetic oligonucleotide
  Sense strand starting at position 2008 of SEQ ID NO: 1888189
ugaugucccuuauccaaga

SEQ ID NO: 2517379 - RNA, 19 nt, Artificial Sequence
  Description of Artificial Sequence: Synthetic oligonucleotide
  Antisense strand to SEQ ID NO: 2517378
ucuuggauaagggacauca

SEQ ID NO: 2517380 - RNA, 19 nt, Artificial Sequence
  Description of Artificial Sequence: Synthetic oligonucleotide
  Sense strand starting at position 2021 of SEQ ID NO: 1888189
ccaagaagauuauaggcaa

SEQ ID NO: 2517381 - RNA, 19 nt, Artificial Sequence
  Description of Artificial Sequence: Synthetic oligonucleotide
  Antisense strand to SEQ ID NO: 2517380
uugccuauaaucuucuugg

SEQ ID NO: 2517382 - RNA, 19 nt, Artificial Sequence
  Description of Artificial Sequence: Synthetic oligonucleotide
  Sense strand starting at position 2055 of SEQ ID NO: 1888189
cugguugugaaugguggua

SEQ ID NO: 2517383 - RNA, 19 nt, Artificial Sequence
  Description of Artificial Sequence: Synthetic oligonucleotide
  Antisense strand to SEQ ID NO: 2517382
uaccaccauucacaaccag

SEQ ID NO: 2517384 - RNA, 19 nt, Artificial Sequence
  Description of Artificial Sequence: Synthetic oligonucleotide
  Sense strand starting at position 2271 of SEQ ID NO: 1888189
ccggcauggacugaaucaa

SEQ ID NO: 2517385 - RNA, 19 nt, Artificial Sequence
  Description of Artificial Sequence: Synthetic oligonucleotide
  Antisense strand to SEQ ID NO: 2517384
uugauucaguccaugccgg

SEQ ID NO: 2517386 - RNA, 19 nt, Artificial Sequence
  Description of Artificial Sequence: Synthetic oligonucleotide
  Sense strand starting at position 2290 of SEQ ID NO: 1888189
uuguauccauuagugauaa

SEQ ID NO: 2517387 - RNA, 19 nt, Artificial Sequence
  Description of Artificial Sequence: Synthetic oligonucleotide
  Antisense strand to SEQ ID NO: 2517386
uuaucacuaauggauacaa

SEQ ID NO: 2517388 - RNA, 19 nt, Artificial Sequence
  Description of Artificial Sequence: Synthetic oligonucleotide
  Sense strand starting at position 2919 of SEQ ID NO: 1888189
gacccaauuccaggugacu

SEQ ID NO: 2517389 - RNA, 19 nt, Artificial Sequence
  Description of Artificial Sequence: Synthetic oligonucleotide
  Antisense strand to SEQ ID NO: 2517388
agucaccuggaauuggguc

SEQ ID NO: 2517390 - RNA, 19 nt, Artificial Sequence
  Description of Artificial Sequence: Synthetic oligonucleotide
  Sense strand starting at position 2932 of SEQ ID NO: 1888189
gugacugaguuucuguaag

SEQ ID NO: 2517391 - RNA, 19 nt, Artificial Sequence
  Description of Artificial Sequence: Synthetic oligonucleotide
  Antisense strand to SEQ ID NO: 2517390
cuuacagaaacucagucac

SEQ ID NO: 2517392 - RNA, 19 nt, Artificial Sequence
  Description of Artificial Sequence: Synthetic oligonucleotide
  Sense strand starting at position 2934 of SEQ ID NO: 1888189
gacugaguuucuguaagga

SEQ ID NO: 2517393 - RNA, 19 nt, Artificial Sequence
  Description of Artificial Sequence: Synthetic oligonucleotide
  Antisense strand to SEQ ID NO: 2517392
uccuuacagaaacucaguc

SEQ ID NO: 2517394 - RNA, 19 nt, Artificial Sequence
  Description of Artificial Sequence: Synthetic oligonucleotide
  Sense strand starting at position 2939 of SEQ ID NO: 1888189
aguuucuguaaggaugauu

SEQ ID NO: 2517395 - RNA, 19 nt, Artificial Sequence
  Description of Artificial Sequence: Synthetic oligonucleotide
  Antisense strand to SEQ ID NO: 2517394
aaucauccuuacagaaacu

SEQ ID NO: 2517396 - RNA, 19 nt, Artificial Sequence
  Description of Artificial Sequence: Synthetic oligonucleotide
  Sense strand starting at position 3033 of SEQ ID NO: 1888189
gcucuugagggcugcaaau

SEQ ID NO: 2517397 - RNA, 19 nt, Artificial Sequence
  Description of Artificial Sequence: Synthetic oligonucleotide
  Antisense strand to SEQ ID NO: 2517396
auuugcagcccucaagagc

SEQ ID NO: 2517398 - RNA, 19 nt, Artificial Sequence
  Description of Artificial Sequence: Synthetic oligonucleotide
  Sense strand starting at position 3035 of SEQ ID NO: 1888189
ucuugagggcugcaaauaa

SEQ ID NO: 2517399 - RNA, 19 nt, Artificial Sequence
  Description of Artificial Sequence: Synthetic oligonucleotide
  Antisense strand to SEQ ID NO: 2517398
uuauuugcagcccucaaga

SEQ ID NO: 2517400 - RNA, 19 nt, Artificial Sequence
  Description of Artificial Sequence: Synthetic oligonucleotide
  Sense strand starting at position 3291 of SEQ ID NO: 1888189
gcuucuuguggauggguga

SEQ ID NO: 2517401 - RNA, 19 nt, Artificial Sequence
  Description of Artificial Sequence: Synthetic oligonucleotide
  Antisense strand to SEQ ID NO: 2517400
ucacccauccacaagaagc

SEQ ID NO: 2517402 - RNA, 19 nt, Artificial Sequence
  Description of Artificial Sequence: Synthetic oligonucleotide
  Sense strand starting at position 3476 of SEQ ID NO: 1888189
cuuggucacccauauaggu

SEQ ID NO: 2517403 - RNA, 19 nt, Artificial Sequence
  Description of Artificial Sequence: Synthetic oligonucleotide
  Antisense strand to SEQ ID NO: 2517402
accuauaugggugaccaag

SEQ ID NO: 2517404 - RNA, 19 nt, Artificial Sequence
  Description of Artificial Sequence: Synthetic oligonucleotide
  Sense strand starting at position 3565 of SEQ ID NO: 1888189
cucagucaugcaugugaau

SEQ ID NO: 2517405 - RNA, 19 nt, Artificial Sequence
  Description of Artificial Sequence: Synthetic oligonucleotide
  Antisense strand to SEQ ID NO: 2517404
auucacaugcaugacugag

SEQ ID NO: 2517406 - RNA, 19 nt, Artificial Sequence
  Description of Artificial Sequence: Synthetic oligonucleotide
  Sense strand starting at position 3574 of SEQ ID NO: 1888189
gcaugugaauacccuuacu

SEQ ID NO: 2517407 - RNA, 19 nt, Artificial Sequence
  Description of Artificial Sequence: Synthetic oligonucleotide
  Antisense strand to SEQ ID NO: 2517406
aguaaggguauucacaugc

SEQ ID NO: 2517408 - RNA, 19 nt, Artificial Sequence
  Description of Artificial Sequence: Synthetic oligonucleotide
  Sense strand starting at position 3734 of SEQ ID NO: 1888189
uugaaagacccaugguuuc

SEQ ID NO: 2517409 - RNA, 19 nt, Artificial Sequence
  Description of Artificial Sequence: Synthetic oligonucleotide
  Antisense strand to SEQ ID NO: 2517408
gaaaccaugggucuuucaa

SEQ ID NO: 2517410 - RNA, 19 nt, Artificial Sequence
  Description of Artificial Sequence: Synthetic oligonucleotide
  Sense strand starting at position 3744 of SEQ ID NO: 1888189
caugguuucucugcugaac

SEQ ID NO: 2517411 - RNA, 19 nt, Artificial Sequence
  Description of Artificial Sequence: Synthetic oligonucleotide
  Antisense strand to SEQ ID NO: 2517410
guucagcagagaaaccaug

SEQ ID NO: 2517412 - RNA, 19 nt, Artificial Sequence
  Description of Artificial Sequence: Synthetic oligonucleotide
  Sense strand starting at position 3850 of SEQ ID NO: 1888189
gccucugcuccuggauaau

SEQ ID NO: 2517413 - RNA, 19 nt, Artificial Sequence
  Description of Artificial Sequence: Synthetic oligonucleotide
  Antisense strand to SEQ ID NO: 2517412
auuauccaggagcagaggc

SEQ ID NO: 2517414 - RNA, 19 nt, Artificial Sequence
  Description of Artificial Sequence: Synthetic oligonucleotide
  Sense strand starting at position 3859 of SEQ ID NO: 1888189
ccuggauaaugagcucaga

SEQ ID NO: 2517415 - RNA, 19 nt, Artificial Sequence
  Description of Artificial Sequence: Synthetic oligonucleotide
  Antisense strand to SEQ ID NO: 2517414
ucugagcucauuauccagg

SEQ ID NO: 2517416 - RNA, 19 nt, Artificial Sequence
  Description of Artificial Sequence: Synthetic oligonucleotide
  Sense strand starting at position 3973 of SEQ ID NO: 1888189
ccuguuucccagggcagau

SEQ ID NO: 2517417 - RNA, 19 nt, Artificial Sequence
  Description of Artificial Sequence: Synthetic oligonucleotide
  Antisense strand to SEQ ID NO: 2517416
aucugcccugggaaacagg

SEQ ID NO: 2517418 - RNA, 19 nt, Artificial Sequence
  Description of Artificial Sequence: Synthetic oligonucleotide
  Sense strand starting at position 28 of SEQ ID NO: 1888190
cuaaccuacuggguaaauu

SEQ ID NO: 2517419 - RNA, 19 nt, Artificial Sequence
  Description of Artificial Sequence: Synthetic oligonucleotide
  Antisense strand to SEQ ID NO: 2517418
aauuuacccaguagguuag

SEQ ID NO: 2517420 - RNA, 19 nt, Artificial Sequence
  Description of Artificial Sequence: Synthetic oligonucleotide
  Sense strand starting at position 166 of SEQ ID NO: 1888190
agagaagcucagggaguua

SEQ ID NO: 2517421 - RNA, 19 nt, Artificial Sequence
  Description of Artificial Sequence: Synthetic oligonucleotide
  Antisense strand to SEQ ID NO: 2517420
uaacucccugagcuucucu

SEQ ID NO: 2517422 - RNA, 19 nt, Artificial Sequence
  Description of Artificial Sequence: Synthetic oligonucleotide
  Sense strand starting at position 189 of SEQ ID NO: 1888190
acaacauagucauuauggu

SEQ ID NO: 2517423 - RNA, 19 nt, Artificial Sequence
  Description of Artificial Sequence: Synthetic oligonucleotide
  Antisense strand to SEQ ID NO: 2517422
accauaaugacuauguugu

SEQ ID NO: 2517424 - RNA, 19 nt, Artificial Sequence
  Description of Artificial Sequence: Synthetic oligonucleotide
  Sense strand starting at position 205 of SEQ ID NO: 1888190
ggugaauaacaauguauug

SEQ ID NO: 2517425 - RNA, 19 nt, Artificial Sequence
  Description of Artificial Sequence: Synthetic oligonucleotide
  Antisense strand to SEQ ID NO: 2517424
caauacauuguuauucacc

SEQ ID NO: 2517426 - RNA, 19 nt, Artificial Sequence
  Description of Artificial Sequence: Synthetic oligonucleotide
  Sense strand starting at position 332 of SEQ ID NO: 1888190
ccacaauguuaugcauaga

SEQ ID NO: 2517427 - RNA, 19 nt, Artificial Sequence
  Description of Artificial Sequence: Synthetic oligonucleotide
  Antisense strand to SEQ ID NO: 2517426
ucuaugcauaacauugugg

SEQ ID NO: 2517428 - RNA, 19 nt, Artificial Sequence
  Description of Artificial Sequence: Synthetic oligonucleotide
  Sense strand starting at position 340 of SEQ ID NO: 1888190
uuaugcauagauggaaaua

SEQ ID NO: 2517429 - RNA, 19 nt, Artificial Sequence
  Description of Artificial Sequence: Synthetic oligonucleotide
  Antisense strand to SEQ ID NO: 2517428
uauuuccaucuaugcauaa

SEQ ID NO: 2517430 - RNA, 19 nt, Artificial Sequence
  Description of Artificial Sequence: Synthetic oligonucleotide
  Sense strand starting at position 454 of SEQ ID NO: 1888190
uuugaaucuugagcuuaca

SEQ ID NO: 2517431 - RNA, 19 nt, Artificial Sequence
  Description of Artificial Sequence: Synthetic oligonucleotide
  Antisense strand to SEQ ID NO: 2517430
uguaagcucaagauucaaa

SEQ ID NO: 2517432 - RNA, 19 nt, Artificial Sequence
  Description of Artificial Sequence: Synthetic oligonucleotide
  Sense strand starting at position 482 of SEQ ID NO: 1888190
uuguguaaucuugaacaua

SEQ ID NO: 2517433 - RNA, 19 nt, Artificial Sequence
  Description of Artificial Sequence: Synthetic oligonucleotide
  Antisense strand to SEQ ID NO: 2517432
uauguucaagauuacacaa

SEQ ID NO: 2517434 - RNA, 19 nt, Artificial Sequence
  Description of Artificial Sequence: Synthetic oligonucleotide
  Sense strand starting at position 553 of SEQ ID NO: 1888190
cuguauagcauugaugaga

SEQ ID NO: 2517435 - RNA, 19 nt, Artificial Sequence
  Description of Artificial Sequence: Synthetic oligonucleotide
  Antisense strand to SEQ ID NO: 2517434
ucucaucaaugcuauacag

SEQ ID NO: 2517436 - RNA, 19 nt, Artificial Sequence
  Description of Artificial Sequence: Synthetic oligonucleotide
  Sense strand starting at position 589 of SEQ ID NO: 1888190
gaaggaaagugcuuaucac

SEQ ID NO: 2517437 - RNA, 19 nt, Artificial Sequence
  Description of Artificial Sequence: Synthetic oligonucleotide
  Antisense strand to SEQ ID NO: 2517436
gugauaagcacuuuccuuc

SEQ ID NO: 2517438 - RNA, 19 nt, Artificial Sequence
  Description of Artificial Sequence: Synthetic oligonucleotide
  Sense strand starting at position 590 of SEQ ID NO: 1888190
aaggaaagugcuuaucacu

SEQ ID NO: 2517439 - RNA, 19 nt, Artificial Sequence
  Description of Artificial Sequence: Synthetic oligonucleotide
  Antisense strand to SEQ ID NO: 2517438
agugauaagcacuuuccuu

SEQ ID NO: 2517440 - RNA, 19 nt, Artificial Sequence
  Description of Artificial Sequence: Synthetic oligonucleotide
  Sense strand starting at position 1454 of SEQ ID NO: 1888190
uccaacgugagugauaaga

SEQ ID NO: 2517441 - RNA, 19 nt, Artificial Sequence
  Description of Artificial Sequence: Synthetic oligonucleotide
  Antisense strand to SEQ ID NO: 2517440
ucuuaucacucacguugga

SEQ ID NO: 2517442 - RNA, 19 nt, Artificial Sequence
  Description of Artificial Sequence: Synthetic oligonucleotide
  Sense strand starting at position 1464 of SEQ ID NO: 1888190
gugauaagaugcucuaaag

SEQ ID NO: 2517443 - RNA, 19 nt, Artificial Sequence
  Description of Artificial Sequence: Synthetic oligonucleotide
  Antisense strand to SEQ ID NO: 2517442
cuuuagagcaucuuaucac

SEQ ID NO: 2517444 - RNA, 19 nt, Artificial Sequence
  Description of Artificial Sequence: Synthetic oligonucleotide
  Sense strand starting at position 1496 of SEQ ID NO: 1888190
gggacucucucaucgacaa

SEQ ID NO: 2517445 - RNA, 19 nt, Artificial Sequence
  Description of Artificial Sequence: Synthetic oligonucleotide
  Antisense strand to SEQ ID NO: 2517444
uugucgaugagagaguccc

SEQ ID NO: 2517446 - RNA, 19 nt, Artificial Sequence
  Description of Artificial Sequence: Synthetic oligonucleotide
  Sense strand starting at position 1497 of SEQ ID NO: 1888190
ggacucucucaucgacaaa

SEQ ID NO: 2517447 - RNA, 19 nt, Artificial Sequence
  Description of Artificial Sequence: Synthetic oligonucleotide
  Antisense strand to SEQ ID NO: 2517446
uuugucgaugagagagucc

SEQ ID NO: 2517448 - RNA, 19 nt, Artificial Sequence
  Description of Artificial Sequence: Synthetic oligonucleotide
  Sense strand starting at position 1802 of SEQ ID NO: 1888190
cuguuugaccugcagagau

SEQ ID NO: 2517449 - RNA, 19 nt, Artificial Sequence
  Description of Artificial Sequence: Synthetic oligonucleotide
  Antisense strand to SEQ ID NO: 2517448
aucucugcaggucaaacag

SEQ ID NO: 2517450 - RNA, 19 nt, Artificial Sequence
  Description of Artificial Sequence: Synthetic oligonucleotide
  Sense strand starting at position 1804 of SEQ ID NO: 1888190
guuugaccugcagagaucu

SEQ ID NO: 2517451 - RNA, 19 nt, Artificial Sequence
  Description of Artificial Sequence: Synthetic oligonucleotide
  Antisense strand to SEQ ID NO: 2517450
agaucucugcaggucaaac

SEQ ID NO: 2517452 - RNA, 19 nt, Artificial Sequence
  Description of Artificial Sequence: Synthetic oligonucleotide
  Sense strand starting at position 1991 of SEQ ID NO: 1888190
ccacauucucaugacgagu

SEQ ID NO: 2517453 - RNA, 19 nt, Artificial Sequence
  Description of Artificial Sequence: Synthetic oligonucleotide
  Antisense strand to SEQ ID NO: 2517452
acucgucaugagaaugugg

SEQ ID NO: 2517454 - RNA, 19 nt, Artificial Sequence
  Description of Artificial Sequence: Synthetic oligonucleotide
  Sense strand starting at position 2003 of SEQ ID NO: 1888190
gacgaguuucguguucgga

SEQ ID NO: 2517455 - RNA, 19 nt, Artificial Sequence
  Description of Artificial Sequence: Synthetic oligonucleotide
  Antisense strand to SEQ ID NO: 2517454
uccgaacacgaaacucguc

SEQ ID NO: 2517456 - RNA, 19 nt, Artificial Sequence
  Description of Artificial Sequence: Synthetic oligonucleotide
  Sense strand starting at position 2004 of SEQ ID NO: 1888190
acgaguuucguguucggau

SEQ ID NO: 2517457 - RNA, 19 nt, Artificial Sequence
  Description of Artificial Sequence: Synthetic oligonucleotide
  Antisense strand to SEQ ID NO: 2517456
auccgaacacgaaacucgu

SEQ ID NO: 2517458 - RNA, 19 nt, Artificial Sequence
  Description of Artificial Sequence: Synthetic oligonucleotide
  Sense strand starting at position 2115 of SEQ ID NO: 1888190
acaggcugucaguaaacuu

SEQ ID NO: 2517459 - RNA, 19 nt, Artificial Sequence
  Description of Artificial Sequence: Synthetic oligonucleotide
  Antisense strand to SEQ ID NO: 2517458
aaguuuacugacagccugu

SEQ ID NO: 2517460 - RNA, 19 nt, Artificial Sequence
  Description of Artificial Sequence: Synthetic oligonucleotide
  Sense strand starting at position 2140 of SEQ ID NO: 1888190
uaaauuugauggcggauuu

SEQ ID NO: 2517461 - RNA, 19 nt, Artificial Sequence
  Description of Artificial Sequence: Synthetic oligonucleotide
  Antisense strand to SEQ ID NO: 2517460
aaauccgccaucaaauuua

SEQ ID NO: 2517462 - RNA, 19 nt, Artificial Sequence
  Description of Artificial Sequence: Synthetic oligonucleotide
  Sense strand starting at position 2186 of SEQ ID NO: 1888190
uuggcaucuccucacagaa

SEQ ID NO: 2517463 - RNA, 19 nt, Artificial Sequence
  Description of Artificial Sequence: Synthetic oligonucleotide
  Antisense strand to SEQ ID NO: 2517462
uucugugaggagaugccaa

SEQ ID NO: 2517464 - RNA, 19 nt, Artificial Sequence
  Description of Artificial Sequence: Synthetic oligonucleotide
  Sense strand starting at position 2351 of SEQ ID NO: 1888190
ccaggaagguuagucacaa

SEQ ID NO: 2517465 - RNA, 19 nt, Artificial Sequence
  Description of Artificial Sequence: Synthetic oligonucleotide
  Antisense strand to SEQ ID NO: 2517464
uugugacuaaccuuccugg

SEQ ID NO: 2517466 - RNA, 19 nt, Artificial Sequence
  Description of Artificial Sequence: Synthetic oligonucleotide
  Sense strand starting at position 2352 of SEQ ID NO: 1888190
caggaagguuagucacaau

SEQ ID NO: 2517467 - RNA, 19 nt, Artificial Sequence
  Description of Artificial Sequence: Synthetic oligonucleotide
  Antisense strand to SEQ ID NO: 2517466
auugugacuaaccuuccug

SEQ ID NO: 2517468 - RNA, 19 nt, Artificial Sequence
  Description of Artificial Sequence: Synthetic oligonucleotide
  Sense strand starting at position 2386 of SEQ ID NO: 1888190
gauuaagugcuacacagua

SEQ ID NO: 2517469 - RNA, 19 nt, Artificial Sequence
  Description of Artificial Sequence: Synthetic oligonucleotide
  Antisense strand to SEQ ID NO: 2517468
uacuguguagcacuuaauc

SEQ ID NO: 2517470 - RNA, 19 nt, Artificial Sequence
  Description of Artificial Sequence: Synthetic oligonucleotide
  Sense strand starting at position 2405 of SEQ ID NO: 1888190
gauggaggcccuggaaauu

SEQ ID NO: 2517471 - RNA, 19 nt, Artificial Sequence
  Description of Artificial Sequence: Synthetic oligonucleotide
  Antisense strand to SEQ ID NO: 2517470
aauuuccagggccuccauc

SEQ ID NO: 2517472 - RNA, 19 nt, Artificial Sequence
  Description of Artificial Sequence: Synthetic oligonucleotide
  Sense strand starting at position 2484 of SEQ ID NO: 1888190
gaguuaguccuagagagcu

SEQ ID NO: 2517473 - RNA, 19 nt, Artificial Sequence
  Description of Artificial Sequence: Synthetic oligonucleotide
  Antisense strand to SEQ ID NO: 2517472
agcucucuaggacuaacuc

SEQ ID NO: 2517474 - RNA, 19 nt, Artificial Sequence
  Description of Artificial Sequence: Synthetic oligonucleotide
  Sense strand starting at position 2525 of SEQ ID NO: 1888190
cagagaugggcaggguuua

SEQ ID NO: 2517475 - RNA, 19 nt, Artificial Sequence
  Description of Artificial Sequence: Synthetic oligonucleotide
  Antisense strand to SEQ ID NO: 2517474
uaaacccugcccaucucug

SEQ ID NO: 2517476 - RNA, 19 nt, Artificial Sequence
  Description of Artificial Sequence: Synthetic oligonucleotide
  Sense strand starting at position 2526 of SEQ ID NO: 1888190
agagaugggcaggguuuaa

SEQ ID NO: 2517477 - RNA, 19 nt, Artificial Sequence
  Description of Artificial Sequence: Synthetic oligonucleotide
  Antisense strand to SEQ ID NO: 2517476
uuaaacccugcccaucucu

SEQ ID NO: 2517478 - RNA, 19 nt, Artificial Sequence
  Description of Artificial Sequence: Synthetic oligonucleotide
  Sense strand starting at position 2542 of SEQ ID NO: 1888190
uaagaaucacaguggcuua

SEQ ID NO: 2517479 - RNA, 19 nt, Artificial Sequence
  Description of Artificial Sequence: Synthetic oligonucleotide
  Antisense strand to SEQ ID NO: 2517478
uaagccacugugauucuua

SEQ ID NO: 2517480 - RNA, 19 nt, Artificial Sequence
  Description of Artificial Sequence: Synthetic oligonucleotide
  Sense strand starting at position 2754 of SEQ ID NO: 1888190
ggagguugaggcuaucuau

SEQ ID NO: 2517481 - RNA, 19 nt, Artificial Sequence
  Description of Artificial Sequence: Synthetic oligonucleotide
  Antisense strand to SEQ ID NO: 2517480
auagauagccucaaccucc

SEQ ID NO: 2517482 - RNA, 19 nt, Artificial Sequence
  Description of Artificial Sequence: Synthetic oligonucleotide
  Sense strand starting at position 2931 of SEQ ID NO: 1888190
aggaaaugcccagguauac

SEQ ID NO: 2517483 - RNA, 19 nt, Artificial Sequence
  Description of Artificial Sequence: Synthetic oligonucleotide
  Antisense strand to SEQ ID NO: 2517482
guauaccugggcauuuccu

SEQ ID NO: 2517484 - RNA, 19 nt, Artificial Sequence
  Description of Artificial Sequence: Synthetic oligonucleotide
  Sense strand starting at position 3078 of SEQ ID NO: 1888190
ucagaaaucuggccaccuu

SEQ ID NO: 2517485 - RNA, 19 nt, Artificial Sequence
  Description of Artificial Sequence: Synthetic oligonucleotide
  Antisense strand to SEQ ID NO: 2517484
aagguggccagauuucuga

SEQ ID NO: 2517486 - RNA, 19 nt, Artificial Sequence
  Description of Artificial Sequence: Synthetic oligonucleotide
  Sense strand starting at position 3399 of SEQ ID NO: 1888190
cugccucucuaaucagaga

SEQ ID NO: 2517487 - RNA, 19 nt, Artificial Sequence
  Description of Artificial Sequence: Synthetic oligonucleotide
  Antisense strand to SEQ ID NO: 2517486
ucucugauuagagaggcag

SEQ ID NO: 2517488 - RNA, 19 nt, Artificial Sequence
  Description of Artificial Sequence: Synthetic oligonucleotide
  Sense strand starting at position 3571 of SEQ ID NO: 1888190
agaguuaacccauaugugu

SEQ ID NO: 2517489 - RNA, 19 nt, Artificial Sequence
  Description of Artificial Sequence: Synthetic oligonucleotide
  Antisense strand to SEQ ID NO: 2517488
acacauauggguuaacucu

SEQ ID NO: 2517490 - RNA, 19 nt, Artificial Sequence
  Description of Artificial Sequence: Synthetic oligonucleotide
  Sense strand starting at position 3588 of SEQ ID NO: 1888190
guuuguggauucuccauuu

SEQ ID NO: 2517491 - RNA, 19 nt, Artificial Sequence
  Description of Artificial Sequence: Synthetic oligonucleotide
  Antisense strand to SEQ ID NO: 2517490
aaauggagaauccacaaac

SEQ ID NO: 2517492 - RNA, 19 nt, Artificial Sequence
  Description of Artificial Sequence: Synthetic oligonucleotide
  Sense strand starting at position 3937 of SEQ ID NO: 1888190
uggugaggucucgcuuugu

SEQ ID NO: 2517493 - RNA, 19 nt, Artificial Sequence
  Description of Artificial Sequence: Synthetic oligonucleotide
  Antisense strand to SEQ ID NO: 2517492
acaaagcgagaccucacca

SEQ ID NO: 2517494 - RNA, 19 nt, Artificial Sequence
  Description of Artificial Sequence: Synthetic oligonucleotide
  Sense strand starting at position 3968 of SEQ ID NO: 1888190
acucuauuaccguggagaa

SEQ ID NO: 2517495 - RNA, 19 nt, Artificial Sequence
  Description of Artificial Sequence: Synthetic oligonucleotide
  Antisense strand to SEQ ID NO: 2517494
uucuccacgguaauagagu

SEQ ID NO: 2517496 - RNA, 19 nt, Artificial Sequence
  Description of Artificial Sequence: Synthetic oligonucleotide
  Sense strand starting at position 3970 of SEQ ID NO: 1888190
ucuauuaccguggagaacu

SEQ ID NO: 2517497 - RNA, 19 nt, Artificial Sequence
  Description of Artificial Sequence: Synthetic oligonucleotide
  Antisense strand to SEQ ID NO: 2517496
aguucuccacgguaauaga

SEQ ID NO: 2517498 - RNA, 19 nt, Artificial Sequence
  Description of Artificial Sequence: Synthetic oligonucleotide
  Sense strand starting at position 271 of SEQ ID NO: 1888191
ugagcugggaguuaucuga

SEQ ID NO: 2517499 - RNA, 19 nt, Artificial Sequence
  Description of Artificial Sequence: Synthetic oligonucleotide
  Antisense strand to SEQ ID NO: 2517498
ucagauaacucccagcuca

SEQ ID NO: 2517500 - RNA, 19 nt, Artificial Sequence
  Description of Artificial Sequence: Synthetic oligonucleotide
  Sense strand starting at position 275 of SEQ ID NO: 1888191
cugggaguuaucugaauag

SEQ ID NO: 2517501 - RNA, 19 nt, Artificial Sequence
  Description of Artificial Sequence: Synthetic oligonucleotide
  Antisense strand to SEQ ID NO: 2517500
cuauucagauaacucccag

SEQ ID NO: 2517502 - RNA, 19 nt, Artificial Sequence
  Description of Artificial Sequence: Synthetic oligonucleotide
  Sense strand starting at position 313 of SEQ ID NO: 1888191
gggcuagacuccucaccau

SEQ ID NO: 2517503 - RNA, 19 nt, Artificial Sequence
  Description of Artificial Sequence: Synthetic oligonucleotide
  Antisense strand to SEQ ID NO: 2517502
auggugaggagucuagccc

SEQ ID NO: 2517504 - RNA, 19 nt, Artificial Sequence
  Description of Artificial Sequence: Synthetic oligonucleotide
  Sense strand starting at position 337 of SEQ ID NO: 1888191
uggaacauggcugggaaau

SEQ ID NO: 2517505 - RNA, 19 nt, Artificial Sequence
  Description of Artificial Sequence: Synthetic oligonucleotide
  Antisense strand to SEQ ID NO: 2517504
auuucccagccauguucca

SEQ ID NO: 2517506 - RNA, 19 nt, Artificial Sequence
  Description of Artificial Sequence: Synthetic oligonucleotide
  Sense strand starting at position 402 of SEQ ID NO: 1888191
gagaucuguccaggagacu

SEQ ID NO: 2517507 - RNA, 19 nt, Artificial Sequence
  Description of Artificial Sequence: Synthetic oligonucleotide
  Antisense strand to SEQ ID NO: 2517506
agucuccuggacagaucuc

SEQ ID NO: 2517508 - RNA, 19 nt, Artificial Sequence
  Description of Artificial Sequence: Synthetic oligonucleotide
  Sense strand starting at position 818 of SEQ ID NO: 1888191
auuguuugaaccgaacuga

SEQ ID NO: 2517509 - RNA, 19 nt, Artificial Sequence
  Description of Artificial Sequence: Synthetic oligonucleotide
  Antisense strand to SEQ ID NO: 2517508
ucaguucgguucaaacaau

SEQ ID NO: 2517510 - RNA, 19 nt, Artificial Sequence
  Description of Artificial Sequence: Synthetic oligonucleotide
  Sense strand starting at position 995 of SEQ ID NO: 1888191
augaguagccaaugaagua

SEQ ID NO: 2517511 - RNA, 19 nt, Artificial Sequence
  Description of Artificial Sequence: Synthetic oligonucleotide
  Antisense strand to SEQ ID NO: 2517510
uacuucauuggcuacucau

SEQ ID NO: 2517512 - RNA, 19 nt, Artificial Sequence
  Description of Artificial Sequence: Synthetic oligonucleotide
  Sense strand starting at position 1008 of SEQ ID NO: 1888191
gaaguaguggcucaguaaa

SEQ ID NO: 2517513 - RNA, 19 nt, Artificial Sequence
  Description of Artificial Sequence: Synthetic oligonucleotide
  Antisense strand to SEQ ID NO: 2517512
uuuacugagccacuacuuc

SEQ ID NO: 2517514 - RNA, 19 nt, Artificial Sequence
  Description of Artificial Sequence: Synthetic oligonucleotide
  Sense strand starting at position 1034 of SEQ ID NO: 1888191
cuguaaauggcaugagaug

SEQ ID NO: 2517515 - RNA, 19 nt, Artificial Sequence
  Description of Artificial Sequence: Synthetic oligonucleotide
  Antisense strand to SEQ ID NO: 2517514
caucucaugccauuuacag

SEQ ID NO: 2517516 - RNA, 19 nt, Artificial Sequence
  Description of Artificial Sequence: Synthetic oligonucleotide
  Sense strand starting at position 1101 of SEQ ID NO: 1888191
uagaguccagccugaagaa

SEQ ID NO: 2517517 - RNA, 19 nt, Artificial Sequence
  Description of Artificial Sequence: Synthetic oligonucleotide
  Antisense strand to SEQ ID NO: 2517516
uucuucaggcuggacucua

SEQ ID NO: 2517518 - RNA, 19 nt, Artificial Sequence
  Description of Artificial Sequence: Synthetic oligonucleotide
  Sense strand starting at position 1179 of SEQ ID NO: 1888191
gcagacauucucugcauuu

SEQ ID NO: 2517519 - RNA, 19 nt, Artificial Sequence
  Description of Artificial Sequence: Synthetic oligonucleotide
  Antisense strand to SEQ ID NO: 2517518
aaaugcagagaaugucugc

SEQ ID NO: 2517520 - RNA, 19 nt, Artificial Sequence
  Description of Artificial Sequence: Synthetic oligonucleotide
  Sense strand starting at position 1221 of SEQ ID NO: 1888191
gggauaauuugccacuaag

SEQ ID NO: 2517521 - RNA, 19 nt, Artificial Sequence
  Description of Artificial Sequence: Synthetic oligonucleotide
  Antisense strand to SEQ ID NO: 2517520
cuuaguggcaaauuauccc

SEQ ID NO: 2517522 - RNA, 19 nt, Artificial Sequence
  Description of Artificial Sequence: Synthetic oligonucleotide
  Sense strand starting at position 1250 of SEQ ID NO: 1888191
aaagaaagguugccaucuu

SEQ ID NO: 2517523 - RNA, 19 nt, Artificial Sequence
  Description of Artificial Sequence: Synthetic oligonucleotide
  Antisense strand to SEQ ID NO: 2517522
aagauggcaaccuuucuuu

SEQ ID NO: 2517524 - RNA, 19 nt, Artificial Sequence
  Description of Artificial Sequence: Synthetic oligonucleotide
  Sense strand starting at position 1523 of SEQ ID NO: 1888191
uacauaggacagugguuau

SEQ ID NO: 2517525 - RNA, 19 nt, Artificial Sequence
  Description of Artificial Sequence: Synthetic oligonucleotide
  Antisense strand to SEQ ID NO: 2517524
auaaccacuguccuaugua

SEQ ID NO: 2517526 - RNA, 19 nt, Artificial Sequence
  Description of Artificial Sequence: Synthetic oligonucleotide
  Sense strand starting at position 1534 of SEQ ID NO: 1888191
gugguuauuuaccauuuga

SEQ ID NO: 2517527 - RNA, 19 nt, Artificial Sequence
  Description of Artificial Sequence: Synthetic oligonucleotide
  Antisense strand to SEQ ID NO: 2517526
ucaaaugguaaauaaccac

SEQ ID NO: 2517528 - RNA, 19 nt, Artificial Sequence
  Description of Artificial Sequence: Synthetic oligonucleotide
  Sense strand starting at position 1573 of SEQ ID NO: 1888191
cagagaaagugcuuaaagu

SEQ ID NO: 2517529 - RNA, 19 nt, Artificial Sequence
  Description of Artificial Sequence: Synthetic oligonucleotide
  Antisense strand to SEQ ID NO: 2517528
acuuuaagcacuuucucug

SEQ ID NO: 2517530 - RNA, 19 nt, Artificial Sequence
  Description of Artificial Sequence: Synthetic oligonucleotide
  Sense strand starting at position 1612 of SEQ ID NO: 1888191
cuucuuacagcagagguaa

SEQ ID NO: 2517531 - RNA, 19 nt, Artificial Sequence
  Description of Artificial Sequence: Synthetic oligonucleotide
  Antisense strand to SEQ ID NO: 2517530
uuaccucugcuguaagaag

SEQ ID NO: 2517532 - RNA, 19 nt, Artificial Sequence
  Description of Artificial Sequence: Synthetic oligonucleotide
  Sense strand starting at position 1623 of SEQ ID NO: 1888191
agagguaacuguuccuuua

SEQ ID NO: 2517533 - RNA, 19 nt, Artificial Sequence
  Description of Artificial Sequence: Synthetic oligonucleotide
  Antisense strand to SEQ ID NO: 2517532
uaaaggaacaguuaccucu

SEQ ID NO: 2517534 - RNA, 19 nt, Artificial Sequence
  Description of Artificial Sequence: Synthetic oligonucleotide
  Sense strand starting at position 1767 of SEQ ID NO: 1888191
guguuacuagaaugaugac

SEQ ID NO: 2517535 - RNA, 19 nt, Artificial Sequence
  Description of Artificial Sequence: Synthetic oligonucleotide
  Antisense strand to SEQ ID NO: 2517534
gucaucauucuaguaacac

SEQ ID NO: 2517536 - RNA, 19 nt, Artificial Sequence
  Description of Artificial Sequence: Synthetic oligonucleotide
  Sense strand starting at position 1836 of SEQ ID NO: 1888191
gauccaggguucuuuacaa

SEQ ID NO: 2517537 - RNA, 19 nt, Artificial Sequence
  Description of Artificial Sequence: Synthetic oligonucleotide
  Antisense strand to SEQ ID NO: 2517536
uuguaaagaacccuggauc

SEQ ID NO: 2517538 - RNA, 19 nt, Artificial Sequence
  Description of Artificial Sequence: Synthetic oligonucleotide
  Sense strand starting at position 2104 of SEQ ID NO: 1888191
cuaauacugggucagguau

SEQ ID NO: 2517539 - RNA, 19 nt, Artificial Sequence
  Description of Artificial Sequence: Synthetic oligonucleotide
  Antisense strand to SEQ ID NO: 2517538
auaccugacccaguauuag

SEQ ID NO: 2517540 - RNA, 19 nt, Artificial Sequence
  Description of Artificial Sequence: Synthetic oligonucleotide
  Sense strand starting at position 2187 of SEQ ID NO: 1888191
ucuguugaaggcugaauga

SEQ ID NO: 2517541 - RNA, 19 nt, Artificial Sequence
  Description of Artificial Sequence: Synthetic oligonucleotide
  Antisense strand to SEQ ID NO: 2517540
ucauucagccuucaacaga

SEQ ID NO: 2517542 - RNA, 19 nt, Artificial Sequence
  Description of Artificial Sequence: Synthetic oligonucleotide
  Sense strand starting at position 2207 of SEQ ID NO: 1888191
ugaaacacuggguguagaa

SEQ ID NO: 2517543 - RNA, 19 nt, Artificial Sequence
  Description of Artificial Sequence: Synthetic oligonucleotide
  Antisense strand to SEQ ID NO: 2517542
uucuacacccaguguuuca

SEQ ID NO: 2517544 - RNA, 19 nt, Artificial Sequence
  Description of Artificial Sequence: Synthetic oligonucleotide
  Sense strand starting at position 2217 of SEQ ID NO: 1888191
gguguagaaauccaaaggu

SEQ ID NO: 2517545 - RNA, 19 nt, Artificial Sequence
  Description of Artificial Sequence: Synthetic oligonucleotide
  Antisense strand to SEQ ID NO: 2517544
accuuuggauuucuacacc

SEQ ID NO: 2517546 - RNA, 19 nt, Artificial Sequence
  Description of Artificial Sequence: Synthetic oligonucleotide
  Sense strand starting at position 2607 of SEQ ID NO: 1888191
cuacuaaugcguuucguga

SEQ ID NO: 2517547 - RNA, 19 nt, Artificial Sequence
  Description of Artificial Sequence: Synthetic oligonucleotide
  Antisense strand to SEQ ID NO: 2517546
ucacgaaacgcauuaguag

SEQ ID NO: 2517548 - RNA, 19 nt, Artificial Sequence
  Description of Artificial Sequence: Synthetic oligonucleotide
  Sense strand starting at position 2608 of SEQ ID NO: 1888191
uacuaaugcguuucgugau

SEQ ID NO: 2517549 - RNA, 19 nt, Artificial Sequence
  Description of Artificial Sequence: Synthetic oligonucleotide
  Antisense strand to SEQ ID NO: 2517548
aucacgaaacgcauuagua

SEQ ID NO: 2517550 - RNA, 19 nt, Artificial Sequence
  Description of Artificial Sequence: Synthetic oligonucleotide
  Sense strand starting at position 2616 of SEQ ID NO: 1888191
cguuucgugaucuugagca

SEQ ID NO: 2517551 - RNA, 19 nt, Artificial Sequence
  Description of Artificial Sequence: Synthetic oligonucleotide
  Antisense strand to SEQ ID NO: 2517550
ugcucaagaucacgaaacg

SEQ ID NO: 2517552 - RNA, 19 nt, Artificial Sequence
  Description of Artificial Sequence: Synthetic oligonucleotide
  Sense strand starting at position 2666 of SEQ ID NO: 1888191
ugaguuacacaguaugauc

SEQ ID NO: 2517553 - RNA, 19 nt, Artificial Sequence
  Description of Artificial Sequence: Synthetic oligonucleotide
  Antisense strand to SEQ ID NO: 2517552
gaucauacuguguaacuca

SEQ ID NO: 2517554 - RNA, 19 nt, Artificial Sequence
  Description of Artificial Sequence: Synthetic oligonucleotide
  Sense strand starting at position 2684 of SEQ ID NO: 1888191
cucagaaggucccuccauu

SEQ ID NO: 2517555 - RNA, 19 nt, Artificial Sequence
  Description of Artificial Sequence: Synthetic oligonucleotide
  Antisense strand to SEQ ID NO: 2517554
aauggagggaccuucugag

SEQ ID NO: 2517556 - RNA, 19 nt, Artificial Sequence
  Description of Artificial Sequence: Synthetic oligonucleotide
  Sense strand starting at position 2730 of SEQ ID NO: 1888191
ugugaaguccuagggauga

SEQ ID NO: 2517557 - RNA, 19 nt, Artificial Sequence
  Description of Artificial Sequence: Synthetic oligonucleotide
  Antisense strand to SEQ ID NO: 2517556
ucaucccuaggacuucaca

SEQ ID NO: 2517558 - RNA, 19 nt, Artificial Sequence
  Description of Artificial Sequence: Synthetic oligonucleotide
  Sense strand starting at position 2852 of SEQ ID NO: 1888191
agcccauugguuuacuuaa

SEQ ID NO: 2517559 - RNA, 19 nt, Artificial Sequence
  Description of Artificial Sequence: Synthetic oligonucleotide
  Antisense strand to SEQ ID NO: 2517558
uuaaguaaaccaaugggcu

SEQ ID NO: 2517560 - RNA, 19 nt, Artificial Sequence
  Description of Artificial Sequence: Synthetic oligonucleotide
  Sense strand starting at position 2888 of SEQ ID NO: 1888191
ccaagaauaaaucguaggu

SEQ ID NO: 2517561 - RNA, 19 nt, Artificial Sequence
  Description of Artificial Sequence: Synthetic oligonucleotide
  Antisense strand to SEQ ID NO: 2517560
accuacgauuuauucuugg

SEQ ID NO: 2517562 - RNA, 19 nt, Artificial Sequence
  Description of Artificial Sequence: Synthetic oligonucleotide
  Sense strand starting at position 2993 of SEQ ID NO: 1888191
ggaccaauuuauugggaac

SEQ ID NO: 2517563 - RNA, 19 nt, Artificial Sequence
  Description of Artificial Sequence: Synthetic oligonucleotide
  Antisense strand to SEQ ID NO: 2517562
guucccaauaaauuggucc

SEQ ID NO: 2517564 - RNA, 19 nt, Artificial Sequence
  Description of Artificial Sequence: Synthetic oligonucleotide
  Sense strand starting at position 2996 of SEQ ID NO: 1888191
ccaauuuauugggaacaga

SEQ ID NO: 2517565 - RNA, 19 nt, Artificial Sequence
  Description of Artificial Sequence: Synthetic oligonucleotide
  Antisense strand to SEQ ID NO: 2517564
ucuguucccaauaaauugg

SEQ ID NO: 2517566 - RNA, 19 nt, Artificial Sequence
  Description of Artificial Sequence: Synthetic oligonucleotide
  Sense strand starting at position 3065 of SEQ ID NO: 1888191
ccuguaucucugcugugua

SEQ ID NO: 2517567 - RNA, 19 nt, Artificial Sequence
  Description of Artificial Sequence: Synthetic oligonucleotide
  Antisense strand to SEQ ID NO: 2517566
uacacagcagagauacagg

SEQ ID NO: 2517568 - RNA, 19 nt, Artificial Sequence
  Description of Artificial Sequence: Synthetic oligonucleotide
  Sense strand starting at position 3348 of SEQ ID NO: 1888191
gcaccuauuuaccuguuau

SEQ ID NO: 2517569 - RNA, 19 nt, Artificial Sequence
  Description of Artificial Sequence: Synthetic oligonucleotide
  Antisense strand to SEQ ID NO: 2517568
auaacagguaaauaggugc

SEQ ID NO: 2517570 - RNA, 19 nt, Artificial Sequence
  Description of Artificial Sequence: Synthetic oligonucleotide
  Sense strand starting at position 3509 of SEQ ID NO: 1888191
ugcgacuccgaagacuaaa

SEQ ID NO: 2517571 - RNA, 19 nt, Artificial Sequence
  Description of Artificial Sequence: Synthetic oligonucleotide
  Antisense strand to SEQ ID NO: 2517570
uuuagucuucggagucgca

SEQ ID NO: 2517572 - RNA, 19 nt, Artificial Sequence
  Description of Artificial Sequence: Synthetic oligonucleotide
  Sense strand starting at position 3555 of SEQ ID NO: 1888191
aggagcugaugucuugaau

SEQ ID NO: 2517573 - RNA, 19 nt, Artificial Sequence
  Description of Artificial Sequence: Synthetic oligonucleotide
  Antisense strand to SEQ ID NO: 2517572
auucaagacaucagcuccu

SEQ ID NO: 2517574 - RNA, 19 nt, Artificial Sequence
  Description of Artificial Sequence: Synthetic oligonucleotide
  Sense strand starting at position 3561 of SEQ ID NO: 1888191
ugaugucuugaauggcaga

SEQ ID NO: 2517575 - RNA, 19 nt, Artificial Sequence
  Description of Artificial Sequence: Synthetic oligonucleotide
  Antisense strand to SEQ ID NO: 2517574
ucugccauucaagacauca

SEQ ID NO: 2517576 - RNA, 19 nt, Artificial Sequence
  Description of Artificial Sequence: Synthetic oligonucleotide
  Sense strand starting at position 3918 of SEQ ID NO: 1888191
agauuagcaagucagguuu

SEQ ID NO: 2517577 - RNA, 19 nt, Artificial Sequence
  Description of Artificial Sequence: Synthetic oligonucleotide
  Antisense strand to SEQ ID NO: 2517576
aaaccugacuugcuaaucu

SEQ ID NO: 2517578 - RNA, 19 nt, Artificial Sequence
  Description of Artificial Sequence: Synthetic oligonucleotide
  Sense strand starting at position 26 of SEQ ID NO: 1888192
gugcaauaugacugcauuu

SEQ ID NO: 2517579 - RNA, 19 nt, Artificial Sequence
  Description of Artificial Sequence: Synthetic oligonucleotide
  Antisense strand to SEQ ID NO: 2517578
aaaugcagucauauugcac

SEQ ID NO: 2517580 - RNA, 19 nt, Artificial Sequence
  Description of Artificial Sequence: Synthetic oligonucleotide
  Sense strand starting at position 43 of SEQ ID NO: 1888192
uuggaaauguggccucuaa

SEQ ID NO: 2517581 - RNA, 19 nt, Artificial Sequence
  Description of Artificial Sequence: Synthetic oligonucleotide
  Antisense strand to SEQ ID NO: 2517580
uuagaggccacauuuccaa

SEQ ID NO: 2517582 - RNA, 19 nt, Artificial Sequence
  Description of Artificial Sequence: Synthetic oligonucleotide
  Sense strand starting at position 89 of SEQ ID NO: 1888192
gguggaccuugaucugaua

SEQ ID NO: 2517583 - RNA, 19 nt, Artificial Sequence
  Description of Artificial Sequence: Synthetic oligonucleotide
  Antisense strand to SEQ ID NO: 2517582
uaucagaucaagguccacc

SEQ ID NO: 2517584 - RNA, 19 nt, Artificial Sequence
  Description of Artificial Sequence: Synthetic oligonucleotide
  Sense strand starting at position 201 of SEQ ID NO: 1888192
gccagaaagaguggucuca

SEQ ID NO: 2517585 - RNA, 19 nt, Artificial Sequence
  Description of Artificial Sequence: Synthetic oligonucleotide
  Antisense strand to SEQ ID NO: 2517584
ugagaccacucuuucuggc

SEQ ID NO: 2517586 - RNA, 19 nt, Artificial Sequence
  Description of Artificial Sequence: Synthetic oligonucleotide
  Sense strand starting at position 222 of SEQ ID NO: 1888192
agaaaugcaucggccagaa

SEQ ID NO: 2517587 - RNA, 19 nt, Artificial Sequence
  Description of Artificial Sequence: Synthetic oligonucleotide
  Antisense strand to SEQ ID NO: 2517586
uucuggccgaugcauuucu

SEQ ID NO: 2517588 - RNA, 19 nt, Artificial Sequence
  Description of Artificial Sequence: Synthetic oligonucleotide
  Sense strand starting at position 357 of SEQ ID NO: 1888192
ucuucuaguaagugggaga

SEQ ID NO: 2517589 - RNA, 19 nt, Artificial Sequence
  Description of Artificial Sequence: Synthetic oligonucleotide
  Antisense strand to SEQ ID NO: 2517588
ucucccacuuacuagaaga

SEQ ID NO: 2517590 - RNA, 19 nt, Artificial Sequence
  Description of Artificial Sequence: Synthetic oligonucleotide
  Sense strand starting at position 358 of SEQ ID NO: 1888192
cuucuaguaagugggagaa

SEQ ID NO: 2517591 - RNA, 19 nt, Artificial Sequence
  Description of Artificial Sequence: Synthetic oligonucleotide
  Antisense strand to SEQ ID NO: 2517590
uucucccacuuacuagaag

SEQ ID NO: 2517592 - RNA, 19 nt, Artificial Sequence
  Description of Artificial Sequence: Synthetic oligonucleotide
  Sense strand starting at position 380 of SEQ ID NO: 1888192
ggacuuaacccucgcaaac

SEQ ID NO: 2517593 - RNA, 19 nt, Artificial Sequence
  Description of Artificial Sequence: Synthetic oligonucleotide
  Antisense strand to SEQ ID NO: 2517592
guuugcgaggguuaagucc

SEQ ID NO: 2517594 - RNA, 19 nt, Artificial Sequence
  Description of Artificial Sequence: Synthetic oligonucleotide
  Sense strand starting at position 452 of SEQ ID NO: 1888192
ucuucugcuguauaaguga

SEQ ID NO: 2517595 - RNA, 19 nt, Artificial Sequence
  Description of Artificial Sequence: Synthetic oligonucleotide
  Antisense strand to SEQ ID NO: 2517594
ucacuuauacagcagaaga

SEQ ID NO: 2517596 - RNA, 19 nt, Artificial Sequence
  Description of Artificial Sequence: Synthetic oligonucleotide
  Sense strand starting at position 540 of SEQ ID NO: 1888192
ucauucuugcaaugagaaa

SEQ ID NO: 2517597 - RNA, 19 nt, Artificial Sequence
  Description of Artificial Sequence: Synthetic oligonucleotide
  Antisense strand to SEQ ID NO: 2517596
uuucucauugcaagaauga

SEQ ID NO: 2517598 - RNA, 19 nt, Artificial Sequence
  Description of Artificial Sequence: Synthetic oligonucleotide
  Sense strand starting at position 1056 of SEQ ID NO: 1888192
uguguucugauccaugagu

SEQ ID NO: 2517599 - RNA, 19 nt, Artificial Sequence
  Description of Artificial Sequence: Synthetic oligonucleotide
  Antisense strand to SEQ ID NO: 2517598
acucauggaucagaacaca

SEQ ID NO: 2517600 - RNA, 19 nt, Artificial Sequence
  Description of Artificial Sequence: Synthetic oligonucleotide
  Sense strand starting at position 1058 of SEQ ID NO: 1888192
uguucugauccaugaguga

SEQ ID NO: 2517601 - RNA, 19 nt, Artificial Sequence
  Description of Artificial Sequence: Synthetic oligonucleotide
  Antisense strand to SEQ ID NO: 2517600
ucacucauggaucagaaca

SEQ ID NO: 2517602 - RNA, 19 nt, Artificial Sequence
  Description of Artificial Sequence: Synthetic oligonucleotide
  Sense strand starting at position 1061 of SEQ ID NO: 1888192
ucugauccaugagugaauu

SEQ ID NO: 2517603 - RNA, 19 nt, Artificial Sequence
  Description of Artificial Sequence: Synthetic oligonucleotide
  Antisense strand to SEQ ID NO: 2517602
aauucacucauggaucaga

SEQ ID NO: 2517604 - RNA, 19 nt, Artificial Sequence
  Description of Artificial Sequence: Synthetic oligonucleotide
  Sense strand starting at position 1137 of SEQ ID NO: 1888192
ugucgccuccuuguaguua

SEQ ID NO: 2517605 - RNA, 19 nt, Artificial Sequence
  Description of Artificial Sequence: Synthetic oligonucleotide
  Antisense strand to SEQ ID NO: 2517604
uaacuacaaggaggcgaca

SEQ ID NO: 2517606 - RNA, 19 nt, Artificial Sequence
  Description of Artificial Sequence: Synthetic oligonucleotide
  Sense strand starting at position 1344 of SEQ ID NO: 1888192
cgaucaaugcaauggaaug

SEQ ID NO: 2517607 - RNA, 19 nt, Artificial Sequence
  Description of Artificial Sequence: Synthetic oligonucleotide
  Antisense strand to SEQ ID NO: 2517606
cauuccauugcauugaucg

SEQ ID NO: 2517608 - RNA, 19 nt, Artificial Sequence
  Description of Artificial Sequence: Synthetic oligonucleotide
  Sense strand starting at position 1775 of SEQ ID NO: 1888192
ugcacaaacggaugguaau

SEQ ID NO: 2517609 - RNA, 19 nt, Artificial Sequence
  Description of Artificial Sequence: Synthetic oligonucleotide
  Antisense strand to SEQ ID NO: 2517608
auuaccauccguuugugca

SEQ ID NO: 2517610 - RNA, 19 nt, Artificial Sequence
  Description of Artificial Sequence: Synthetic oligonucleotide
  Sense strand starting at position 1781 of SEQ ID NO: 1888192
aacggaugguaauccuaaa

SEQ ID NO: 2517611 - RNA, 19 nt, Artificial Sequence
  Description of Artificial Sequence: Synthetic oligonucleotide
  Antisense strand to SEQ ID NO: 2517610
uuuaggauuaccauccguu

SEQ ID NO: 2517612 - RNA, 19 nt, Artificial Sequence
  Description of Artificial Sequence: Synthetic oligonucleotide
  Sense strand starting at position 1841 of SEQ ID NO: 1888192
cauuguuaagugcaugaua

SEQ ID NO: 2517613 - RNA, 19 nt, Artificial Sequence
  Description of Artificial Sequence: Synthetic oligonucleotide
  Antisense strand to SEQ ID NO: 2517612
uaucaugcacuuaacaaug

SEQ ID NO: 2517614 - RNA, 19 nt, Artificial Sequence
  Description of Artificial Sequence: Synthetic oligonucleotide
  Sense strand starting at position 1844 of SEQ ID NO: 1888192
uguuaagugcaugauaauc

SEQ ID NO: 2517615 - RNA, 19 nt, Artificial Sequence
  Description of Artificial Sequence: Synthetic oligonucleotide
  Antisense strand to SEQ ID NO: 2517614
gauuaucaugcacuuaaca

SEQ ID NO: 2517616 - RNA, 19 nt, Artificial Sequence
  Description of Artificial Sequence: Synthetic oligonucleotide
  Sense strand starting at position 1854 of SEQ ID NO: 1888192
augauaaucgcagguaauu

SEQ ID NO: 2517617 - RNA, 19 nt, Artificial Sequence
  Description of Artificial Sequence: Synthetic oligonucleotide
  Antisense strand to SEQ ID NO: 2517616
aauuaccugcgauuaucau

SEQ ID NO: 2517618 - RNA, 19 nt, Artificial Sequence
  Description of Artificial Sequence: Synthetic oligonucleotide
  Sense strand starting at position 2182 of SEQ ID NO: 1888192
guccuacuugcccaagagu

SEQ ID NO: 2517619 - RNA, 19 nt, Artificial Sequence
  Description of Artificial Sequence: Synthetic oligonucleotide
  Antisense strand to SEQ ID NO: 2517618
acucuugggcaaguaggac

SEQ ID NO: 2517620 - RNA, 19 nt, Artificial Sequence
  Description of Artificial Sequence: Synthetic oligonucleotide
  Sense strand starting at position 2292 of SEQ ID NO: 1888192
ggcacuuggcuugaagaga

SEQ ID NO: 2517621 - RNA, 19 nt, Artificial Sequence
  Description of Artificial Sequence: Synthetic oligonucleotide
  Antisense strand to SEQ ID NO: 2517620
ucucuucaagccaagugcc

SEQ ID NO: 2517622 - RNA, 19 nt, Artificial Sequence
  Description of Artificial Sequence: Synthetic oligonucleotide
  Sense strand starting at position 2431 of SEQ ID NO: 1888192
aucucuugucaugguaaag

SEQ ID NO: 2517623 - RNA, 19 nt, Artificial Sequence
  Description of Artificial Sequence: Synthetic oligonucleotide
  Antisense strand to SEQ ID NO: 2517622
cuuuaccaugacaagagau

SEQ ID NO: 2517624 - RNA, 19 nt, Artificial Sequence
  Description of Artificial Sequence: Synthetic oligonucleotide
  Sense strand starting at position 2453 of SEQ ID NO: 1888192
gcagaauccaugggcuuua

SEQ ID NO: 2517625 - RNA, 19 nt, Artificial Sequence
  Description of Artificial Sequence: Synthetic oligonucleotide
  Antisense strand to SEQ ID NO: 2517624
uaaagcccauggauucugc

SEQ ID NO: 2517626 - RNA, 19 nt, Artificial Sequence
  Description of Artificial Sequence: Synthetic oligonucleotide
  Sense strand starting at position 2604 of SEQ ID NO: 1888192
augagaaacuacuuuagca

SEQ ID NO: 2517627 - RNA, 19 nt, Artificial Sequence
  Description of Artificial Sequence: Synthetic oligonucleotide
  Antisense strand to SEQ ID NO: 2517626
ugcuaaaguaguuucucau

SEQ ID NO: 2517628 - RNA, 19 nt, Artificial Sequence
  Description of Artificial Sequence: Synthetic oligonucleotide
  Sense strand starting at position 2634 of SEQ ID NO: 1888192
gucuguugucuuuauuuag

SEQ ID NO: 2517629 - RNA, 19 nt, Artificial Sequence
  Description of Artificial Sequence: Synthetic oligonucleotide
  Antisense strand to SEQ ID NO: 2517628
cuaaauaaagacaacagac

SEQ ID NO: 2517630 - RNA, 19 nt, Artificial Sequence
  Description of Artificial Sequence: Synthetic oligonucleotide
  Sense strand starting at position 2664 of SEQ ID NO: 1888192
cucuacauacccugaguau

SEQ ID NO: 2517631 - RNA, 19 nt, Artificial Sequence
  Description of Artificial Sequence: Synthetic oligonucleotide
  Antisense strand to SEQ ID NO: 2517630
auacucaggguauguagag

SEQ ID NO: 2517632 - RNA, 19 nt, Artificial Sequence
  Description of Artificial Sequence: Synthetic oligonucleotide
  Sense strand starting at position 2705 of SEQ ID NO: 1888192
cugugaucagcucaggauc

SEQ ID NO: 2517633 - RNA, 19 nt, Artificial Sequence
  Description of Artificial Sequence: Synthetic oligonucleotide
  Antisense strand to SEQ ID NO: 2517632
gauccugagcugaucacag

SEQ ID NO: 2517634 - RNA, 19 nt, Artificial Sequence
  Description of Artificial Sequence: Synthetic oligonucleotide
  Sense strand starting at position 2784 of SEQ ID NO: 1888192
aaagcucagccauggagau

SEQ ID NO: 2517635 - RNA, 19 nt, Artificial Sequence
  Description of Artificial Sequence: Synthetic oligonucleotide
  Antisense strand to SEQ ID NO: 2517634
aucuccauggcugagcuuu

SEQ ID NO: 2517636 - RNA, 19 nt, Artificial Sequence
  Description of Artificial Sequence: Synthetic oligonucleotide
  Sense strand starting at position 2942 of SEQ ID NO: 1888192
accguuuaucuccaugacu

SEQ ID NO: 2517637 - RNA, 19 nt, Artificial Sequence
  Description of Artificial Sequence: Synthetic oligonucleotide
  Antisense strand to SEQ ID NO: 2517636
agucauggagauaaacggu

SEQ ID NO: 2517638 - RNA, 19 nt, Artificial Sequence
  Description of Artificial Sequence: Synthetic oligonucleotide
  Sense strand starting at position 3163 of SEQ ID NO: 1888192
aagaguuacuaagugcaca

SEQ ID NO: 2517639 - RNA, 19 nt, Artificial Sequence
  Description of Artificial Sequence: Synthetic oligonucleotide
  Antisense strand to SEQ ID NO: 2517638
ugugcacuuaguaacucuu

SEQ ID NO: 2517640 - RNA, 19 nt, Artificial Sequence
  Description of Artificial Sequence: Synthetic oligonucleotide
  Sense strand starting at position 3168 of SEQ ID NO: 1888192
uuacuaagugcacagguau

SEQ ID NO: 2517641 - RNA, 19 nt, Artificial Sequence
  Description of Artificial Sequence: Synthetic oligonucleotide
  Antisense strand to SEQ ID NO: 2517640
auaccugugcacuuaguaa

SEQ ID NO: 2517642 - RNA, 19 nt, Artificial Sequence
  Description of Artificial Sequence: Synthetic oligonucleotide
  Sense strand starting at position 3180 of SEQ ID NO: 1888192
cagguauuuacgggcagua

SEQ ID NO: 2517643 - RNA, 19 nt, Artificial Sequence
  Description of Artificial Sequence: Synthetic oligonucleotide
  Antisense strand to SEQ ID NO: 2517642
uacugcccguaaauaccug

SEQ ID NO: 2517644 - RNA, 19 nt, Artificial Sequence
  Description of Artificial Sequence: Synthetic oligonucleotide
  Sense strand starting at position 3213 of SEQ ID NO: 1888192
cuuugaucucaguacuguu

SEQ ID NO: 2517645 - RNA, 19 nt, Artificial Sequence
  Description of Artificial Sequence: Synthetic oligonucleotide
  Antisense strand to SEQ ID NO: 2517644
aacaguacugagaucaaag

SEQ ID NO: 2517646 - RNA, 19 nt, Artificial Sequence
  Description of Artificial Sequence: Synthetic oligonucleotide
  Sense strand starting at position 3383 of SEQ ID NO: 1888192
gcaggaaacugguucagag

SEQ ID NO: 2517647 - RNA, 19 nt, Artificial Sequence
  Description of Artificial Sequence: Synthetic oligonucleotide
  Antisense strand to SEQ ID NO: 2517646
cucugaaccaguuuccugc

SEQ ID NO: 2517648 - RNA, 19 nt, Artificial Sequence
  Description of Artificial Sequence: Synthetic oligonucleotide
  Sense strand starting at position 3463 of SEQ ID NO: 1888192
ggucuugagcguuaaauaa

SEQ ID NO: 2517649 - RNA, 19 nt, Artificial Sequence
  Description of Artificial Sequence: Synthetic oligonucleotide
  Antisense strand to SEQ ID NO: 2517648
uuauuuaacgcucaagacc

SEQ ID NO: 2517650 - RNA, 19 nt, Artificial Sequence
  Description of Artificial Sequence: Synthetic oligonucleotide
  Sense strand starting at position 3467 of SEQ ID NO: 1888192
uugagcguuaaauaagauu

SEQ ID NO: 2517651 - RNA, 19 nt, Artificial Sequence
  Description of Artificial Sequence: Synthetic oligonucleotide
  Antisense strand to SEQ ID NO: 2517650
aaucuuauuuaacgcucaa

SEQ ID NO: 2517652 - RNA, 19 nt, Artificial Sequence
  Description of Artificial Sequence: Synthetic oligonucleotide
  Sense strand starting at position 3578 of SEQ ID NO: 1888192
cauucuugcccugacggau

SEQ ID NO: 2517653 - RNA, 19 nt, Artificial Sequence
  Description of Artificial Sequence: Synthetic oligonucleotide
  Antisense strand to SEQ ID NO: 2517652
auccgucagggcaagaaug

SEQ ID NO: 2517654 - RNA, 19 nt, Artificial Sequence
  Description of Artificial Sequence: Synthetic oligonucleotide
  Sense strand starting at position 3642 of SEQ ID NO: 1888192
uguccugugcuugaaauga

SEQ ID NO: 2517655 - RNA, 19 nt, Artificial Sequence
  Description of Artificial Sequence: Synthetic oligonucleotide
  Antisense strand to SEQ ID NO: 2517654
ucauuucaagcacaggaca

SEQ ID NO: 2517656 - RNA, 19 nt, Artificial Sequence
  Description of Artificial Sequence: Synthetic oligonucleotide
  Sense strand starting at position 3724 of SEQ ID NO: 1888192
gucauuugcuccuuguaaa

SEQ ID NO: 2517657 - RNA, 19 nt, Artificial Sequence
  Description of Artificial Sequence: Synthetic oligonucleotide
  Antisense strand to SEQ ID NO: 2517656
uuuacaaggagcaaaugac

SEQ ID NO: 2517658 - RNA, 19 nt, Artificial Sequence
  Description of Artificial Sequence: Synthetic oligonucleotide
  Sense strand starting at position 326 of SEQ ID NO: 1888193
ggcagucccugaggaugau

SEQ ID NO: 2517659 - RNA, 19 nt, Artificial Sequence
  Description of Artificial Sequence: Synthetic oligonucleotide
  Antisense strand to SEQ ID NO: 2517658
aucauccucagggacugcc

SEQ ID NO: 2517660 - RNA, 19 nt, Artificial Sequence
  Description of Artificial Sequence: Synthetic oligonucleotide
  Sense strand starting at position 987 of SEQ ID NO: 1888193
cacucuuaucucgagugcu

SEQ ID NO: 2517661 - RNA, 19 nt, Artificial Sequence
  Description of Artificial Sequence: Synthetic oligonucleotide
  Antisense strand to SEQ ID NO: 2517660
agcacucgagauaagagug

SEQ ID NO: 2517662 - RNA, 19 nt, Artificial Sequence
  Description of Artificial Sequence: Synthetic oligonucleotide
  Sense strand starting at position 1114 of SEQ ID NO: 1888193
ugagguuggugucucggaa

SEQ ID NO: 2517663 - RNA, 19 nt, Artificial Sequence
  Description of Artificial Sequence: Synthetic oligonucleotide
  Antisense strand to SEQ ID NO: 2517662
uuccgagacaccaaccuca

SEQ ID NO: 2517664 - RNA, 19 nt, Artificial Sequence
  Description of Artificial Sequence: Synthetic oligonucleotide
  Sense strand starting at position 1136 of SEQ ID NO: 1888193
ggcaacuuauccgcugaca

SEQ ID NO: 2517665 - RNA, 19 nt, Artificial Sequence
  Description of Artificial Sequence: Synthetic oligonucleotide
  Antisense strand to SEQ ID NO: 2517664
ugucagcggauaaguugcc

SEQ ID NO: 2517666 - RNA, 19 nt, Artificial Sequence
  Description of Artificial Sequence: Synthetic oligonucleotide
  Sense strand starting at position 1180 of SEQ ID NO: 1888193
gaacauguuguguggcauu

SEQ ID NO: 2517667 - RNA, 19 nt, Artificial Sequence
  Description of Artificial Sequence: Synthetic oligonucleotide
  Antisense strand to SEQ ID NO: 2517666
aaugccacacaacauguuc

SEQ ID NO: 2517668 - RNA, 19 nt, Artificial Sequence
  Description of Artificial Sequence: Synthetic oligonucleotide
  Sense strand starting at position 1183 of SEQ ID NO: 1888193
cauguuguguggcauuuau

SEQ ID NO: 2517669 - RNA, 19 nt, Artificial Sequence
  Description of Artificial Sequence: Synthetic oligonucleotide
  Antisense strand to SEQ ID NO: 2517668
auaaaugccacacaacaug

SEQ ID NO: 2517670 - RNA, 19 nt, Artificial Sequence
  Description of Artificial Sequence: Synthetic oligonucleotide
  Sense strand starting at position 1588 of SEQ ID NO: 1888193
gcaggugcuuuccugagca

SEQ ID NO: 2517671 - RNA, 19 nt, Artificial Sequence
  Description of Artificial Sequence: Synthetic oligonucleotide
  Antisense strand to SEQ ID NO: 2517670
ugcucaggaaagcaccugc

SEQ ID NO: 2517672 - RNA, 19 nt, Artificial Sequence
  Description of Artificial Sequence: Synthetic oligonucleotide
  Sense strand starting at position 1590 of SEQ ID NO: 1888193
aggugcuuuccugagcaca

SEQ ID NO: 2517673 - RNA, 19 nt, Artificial Sequence
  Description of Artificial Sequence: Synthetic oligonucleotide
  Antisense strand to SEQ ID NO: 2517672
ugugcucaggaaagcaccu

SEQ ID NO: 2517674 - RNA, 19 nt, Artificial Sequence
  Description of Artificial Sequence: Synthetic oligonucleotide
  Sense strand starting at position 1592 of SEQ ID NO: 1888193
gugcuuuccugagcacaug

SEQ ID NO: 2517675 - RNA, 19 nt, Artificial Sequence
  Description of Artificial Sequence: Synthetic oligonucleotide
  Antisense strand to SEQ ID NO: 2517674
caugugcucaggaaagcac

SEQ ID NO: 2517676 - RNA, 19 nt, Artificial Sequence
  Description of Artificial Sequence: Synthetic oligonucleotide
  Sense strand starting at position 2282 of SEQ ID NO: 1888193
cggacaucuccaggcaagu

SEQ ID NO: 2517677 - RNA, 19 nt, Artificial Sequence
  Description of Artificial Sequence: Synthetic oligonucleotide
  Antisense strand to SEQ ID NO: 2517676
acuugccuggagauguccg

SEQ ID NO: 2517678 - RNA, 19 nt, Artificial Sequence
  Description of Artificial Sequence: Synthetic oligonucleotide
  Sense strand starting at position 2604 of SEQ ID NO: 1888193
ggcuguuguccuggcgaca

SEQ ID NO: 2517679 - RNA, 19 nt, Artificial Sequence
  Description of Artificial Sequence: Synthetic oligonucleotide
  Antisense strand to SEQ ID NO: 2517678
ugucgccaggacaacagcc

SEQ ID NO: 2517680 - RNA, 19 nt, Artificial Sequence
  Description of Artificial Sequence: Synthetic oligonucleotide
  Sense strand starting at position 2812 of SEQ ID NO: 1888193
ccucacuugucgccagacu

SEQ ID NO: 2517681 - RNA, 19 nt, Artificial Sequence
  Description of Artificial Sequence: Synthetic oligonucleotide
  Antisense strand to SEQ ID NO: 2517680
agucuggcgacaagugagg

SEQ ID NO: 2517682 - RNA, 19 nt, Artificial Sequence
  Description of Artificial Sequence: Synthetic oligonucleotide
  Sense strand starting at position 3412 of SEQ ID NO: 1888193
cgguugacguaucggaaga

SEQ ID NO: 2517683 - RNA, 19 nt, Artificial Sequence
  Description of Artificial Sequence: Synthetic oligonucleotide
  Antisense strand to SEQ ID NO: 2517682
ucuuccgauacgucaaccg

SEQ ID NO: 2517684 - RNA, 19 nt, Artificial Sequence
  Description of Artificial Sequence: Synthetic oligonucleotide
  Sense strand starting at position 3661 of SEQ ID NO: 1888193
agcugaaguucucgaacuc

SEQ ID NO: 2517685 - RNA, 19 nt, Artificial Sequence
  Description of Artificial Sequence: Synthetic oligonucleotide
  Antisense strand to SEQ ID NO: 2517684
gaguucgagaacuucagcu

SEQ ID NO: 2517686 - RNA, 19 nt, Artificial Sequence
  Description of Artificial Sequence: Synthetic oligonucleotide
  Sense strand starting at position 320 of SEQ ID NO: 1888194
gcccacuucuaaguggaca

SEQ ID NO: 2517687 - RNA, 19 nt, Artificial Sequence
  Description of Artificial Sequence: Synthetic oligonucleotide
  Antisense strand to SEQ ID NO: 2517686
uguccacuuagaagugggc

SEQ ID NO: 2517688 - RNA, 19 nt, Artificial Sequence
  Description of Artificial Sequence: Synthetic oligonucleotide
  Sense strand starting at position 428 of SEQ ID NO: 1888194
accagacugugagauguuu

SEQ ID NO: 2517689 - RNA, 19 nt, Artificial Sequence
  Description of Artificial Sequence: Synthetic oligonucleotide
  Antisense strand to SEQ ID NO: 2517688
aaacaucucacagucuggu

SEQ ID NO: 2517690 - RNA, 19 nt, Artificial Sequence
  Description of Artificial Sequence: Synthetic oligonucleotide
  Sense strand starting at position 497 of SEQ ID NO: 1888194
gaacgaucuccaggccaga

SEQ ID NO: 2517691 - RNA, 19 nt, Artificial Sequence
  Description of Artificial Sequence: Synthetic oligonucleotide
  Antisense strand to SEQ ID NO: 2517690
ucuggccuggagaucguuc

SEQ ID NO: 2517692 - RNA, 19 nt, Artificial Sequence
  Description of Artificial Sequence: Synthetic oligonucleotide
  Sense strand starting at position 550 of SEQ ID NO: 1888194
gugugugcguguaugguau

SEQ ID NO: 2517693 - RNA, 19 nt, Artificial Sequence
  Description of Artificial Sequence: Synthetic oligonucleotide
  Antisense strand to SEQ ID NO: 2517692
auaccauacacgcacacac

SEQ ID NO: 2517694 - RNA, 19 nt, Artificial Sequence
  Description of Artificial Sequence: Synthetic oligonucleotide
  Sense strand starting at position 556 of SEQ ID NO: 1888194
gcguguaugguaucugugu

SEQ ID NO: 2517695 - RNA, 19 nt, Artificial Sequence
  Description of Artificial Sequence: Synthetic oligonucleotide
  Antisense strand to SEQ ID NO: 2517694
acacagauaccauacacgc

SEQ ID NO: 2517696 - RNA, 19 nt, Artificial Sequence
  Description of Artificial Sequence: Synthetic oligonucleotide
  Sense strand starting at position 562 of SEQ ID NO: 1888194
augguaucugugugaaccu

SEQ ID NO: 2517697 - RNA, 19 nt, Artificial Sequence
  Description of Artificial Sequence: Synthetic oligonucleotide
  Antisense strand to SEQ ID NO: 2517696
agguucacacagauaccau

SEQ ID NO: 2517698 - RNA, 19 nt, Artificial Sequence
  Description of Artificial Sequence: Synthetic oligonucleotide
  Sense strand starting at position 571 of SEQ ID NO: 1888194
gugugaaccucuguuuaca

SEQ ID NO: 2517699 - RNA, 19 nt, Artificial Sequence
  Description of Artificial Sequence: Synthetic oligonucleotide
  Antisense strand to SEQ ID NO: 2517698
uguaaacagagguucacac

SEQ ID NO: 2517700 - RNA, 19 nt, Artificial Sequence
  Description of Artificial Sequence: Synthetic oligonucleotide
  Sense strand starting at position 573 of SEQ ID NO: 1888194
gugaaccucuguuuacaaa

SEQ ID NO: 2517701 - RNA, 19 nt, Artificial Sequence
  Description of Artificial Sequence: Synthetic oligonucleotide
  Antisense strand to SEQ ID NO: 2517700
uuuguaaacagagguucac

SEQ ID NO: 2517702 - RNA, 19 nt, Artificial Sequence
  Description of Artificial Sequence: Synthetic oligonucleotide
  Sense strand starting at position 639 of SEQ ID NO: 1888194
gaugcuuguugcccauuga

SEQ ID NO: 2517703 - RNA, 19 nt, Artificial Sequence
  Description of Artificial Sequence: Synthetic oligonucleotide
  Antisense strand to SEQ ID NO: 2517702
ucaaugggcaacaagcauc

SEQ ID NO: 2517704 - RNA, 19 nt, Artificial Sequence
  Description of Artificial Sequence: Synthetic oligonucleotide
  Sense strand starting at position 714 of SEQ ID NO: 1888194
caugaagccucguccacau

SEQ ID NO: 2517705 - RNA, 19 nt, Artificial Sequence
  Description of Artificial Sequence: Synthetic oligonucleotide
  Antisense strand to SEQ ID NO: 2517704
auguggacgaggcuucaug

SEQ ID NO: 2517706 - RNA, 19 nt, Artificial Sequence
  Description of Artificial Sequence: Synthetic oligonucleotide
  Sense strand starting at position 718 of SEQ ID NO: 1888194
aagccucguccacaugauu

SEQ ID NO: 2517707 - RNA, 19 nt, Artificial Sequence
  Description of Artificial Sequence: Synthetic oligonucleotide
  Antisense strand to SEQ ID NO: 2517706
aaucauguggacgaggcuu

SEQ ID NO: 2517708 - RNA, 19 nt, Artificial Sequence
  Description of Artificial Sequence: Synthetic oligonucleotide
  Sense strand starting at position 779 of SEQ ID NO: 1888194
ugagcuccagauugauaau

SEQ ID NO: 2517709 - RNA, 19 nt, Artificial Sequence
  Description of Artificial Sequence: Synthetic oligonucleotide
  Antisense strand to SEQ ID NO: 2517708
auuaucaaucuggagcuca

SEQ ID NO: 2517710 - RNA, 19 nt, Artificial Sequence
  Description of Artificial Sequence: Synthetic oligonucleotide
  Sense strand starting at position 823 of SEQ ID NO: 1888194
ggaugucugcuggaggcau

SEQ ID NO: 2517711 - RNA, 19 nt, Artificial Sequence
  Description of Artificial Sequence: Synthetic oligonucleotide
  Antisense strand to SEQ ID NO: 2517710
augccuccagcagacaucc

SEQ ID NO: 2517712 - RNA, 19 nt, Artificial Sequence
  Description of Artificial Sequence: Synthetic oligonucleotide
  Sense strand starting at position 917 of SEQ ID NO: 1888194
uuuguagcucaguaaaucu

SEQ ID NO: 2517713 - RNA, 19 nt, Artificial Sequence
  Description of Artificial Sequence: Synthetic oligonucleotide
  Antisense strand to SEQ ID NO: 2517712
agauuuacugagcuacaaa

SEQ ID NO: 2517714 - RNA, 19 nt, Artificial Sequence
  Description of Artificial Sequence: Synthetic oligonucleotide
  Sense strand starting at position 996 of SEQ ID NO: 1888194
uccagaauuccauguccag

SEQ ID NO: 2517715 - RNA, 19 nt, Artificial Sequence
  Description of Artificial Sequence: Synthetic oligonucleotide
  Antisense strand to SEQ ID NO: 2517714
cuggacauggaauucugga

SEQ ID NO: 2517716 - RNA, 19 nt, Artificial Sequence
  Description of Artificial Sequence: Synthetic oligonucleotide
  Sense strand starting at position 1105 of SEQ ID NO: 1888194
ccaugucuugcugggauac

SEQ ID NO: 2517717 - RNA, 19 nt, Artificial Sequence
  Description of Artificial Sequence: Synthetic oligonucleotide
  Antisense strand to SEQ ID NO: 2517716
guaucccagcaagacaugg

SEQ ID NO: 2517718 - RNA, 19 nt, Artificial Sequence
  Description of Artificial Sequence: Synthetic oligonucleotide
  Sense strand starting at position 1173 of SEQ ID NO: 1888194
ucuguugggcucugauaug

SEQ ID NO: 2517719 - RNA, 19 nt, Artificial Sequence
  Description of Artificial Sequence: Synthetic oligonucleotide
  Antisense strand to SEQ ID NO: 2517718
cauaucagagcccaacaga

SEQ ID NO: 2517720 - RNA, 19 nt, Artificial Sequence
  Description of Artificial Sequence: Synthetic oligonucleotide
  Sense strand starting at position 1764 of SEQ ID NO: 1888194
ucauucuggugaugggaga

SEQ ID NO: 2517721 - RNA, 19 nt, Artificial Sequence
  Description of Artificial Sequence: Synthetic oligonucleotide
  Antisense strand to SEQ ID NO: 2517720
ucucccaucaccagaauga

SEQ ID NO: 2517722 - RNA, 19 nt, Artificial Sequence
  Description of Artificial Sequence: Synthetic oligonucleotide
  Sense strand starting at position 2038 of SEQ ID NO: 1888194
gagggucugucucccagau

SEQ ID NO: 2517723 - RNA, 19 nt, Artificial Sequence
  Description of Artificial Sequence: Synthetic oligonucleotide
  Antisense strand to SEQ ID NO: 2517722
aucugggagacagacccuc

SEQ ID NO: 2517724 - RNA, 19 nt, Artificial Sequence
  Description of Artificial Sequence: Synthetic oligonucleotide
  Sense strand starting at position 2205 of SEQ ID NO: 1888194
uggagaucuugucccucca

SEQ ID NO: 2517725 - RNA, 19 nt, Artificial Sequence
  Description of Artificial Sequence: Synthetic oligonucleotide
  Antisense strand to SEQ ID NO: 2517724
uggagggacaagaucucca

SEQ ID NO: 2517726 - RNA, 19 nt, Artificial Sequence
  Description of Artificial Sequence: Synthetic oligonucleotide
  Sense strand starting at position 3140 of SEQ ID NO: 1888194
gcagaaaugcaucguauga

SEQ ID NO: 2517727 - RNA, 19 nt, Artificial Sequence
  Description of Artificial Sequence: Synthetic oligonucleotide
  Antisense strand to SEQ ID NO: 2517726
ucauacgaugcauuucugc

SEQ ID NO: 2517728 - RNA, 19 nt, Artificial Sequence
  Description of Artificial Sequence: Synthetic oligonucleotide
  Sense strand starting at position 3142 of SEQ ID NO: 1888194
agaaaugcaucguaugaaa

SEQ ID NO: 2517729 - RNA, 19 nt, Artificial Sequence
  Description of Artificial Sequence: Synthetic oligonucleotide
  Antisense strand to SEQ ID NO: 2517728
uuucauacgaugcauuucu

SEQ ID NO: 2517730 - RNA, 19 nt, Artificial Sequence
  Description of Artificial Sequence: Synthetic oligonucleotide
  Sense strand starting at position 3144 of SEQ ID NO: 1888194
aaaugcaucguaugaaacu

SEQ ID NO: 2517731 - RNA, 19 nt, Artificial Sequence
  Description of Artificial Sequence: Synthetic oligonucleotide
  Antisense strand to SEQ ID NO: 2517730
aguuucauacgaugcauuu

SEQ ID NO: 2517732 - RNA, 19 nt, Artificial Sequence
  Description of Artificial Sequence: Synthetic oligonucleotide
  Sense strand starting at position 3153 of SEQ ID NO: 1888194
guaugaaacucauccacug

SEQ ID NO: 2517733 - RNA, 19 nt, Artificial Sequence
  Description of Artificial Sequence: Synthetic oligonucleotide
  Antisense strand to SEQ ID NO: 2517732
caguggaugaguuucauac

SEQ ID NO: 2517734 - RNA, 19 nt, Artificial Sequence
  Description of Artificial Sequence: Synthetic oligonucleotide
  Sense strand starting at position 3237 of SEQ ID NO: 1888194
ugaaaucugugucuauaaa

SEQ ID NO: 2517735 - RNA, 19 nt, Artificial Sequence
  Description of Artificial Sequence: Synthetic oligonucleotide
  Antisense strand to SEQ ID NO: 2517734
uuuauagacacagauuuca

SEQ ID NO: 2517736 - RNA, 19 nt, Artificial Sequence
  Description of Artificial Sequence: Synthetic oligonucleotide
  Sense strand starting at position 3573 of SEQ ID NO: 1888194
gauaaaggauuucgaggaa

SEQ ID NO: 2517737 - RNA, 19 nt, Artificial Sequence
  Description of Artificial Sequence: Synthetic oligonucleotide
  Antisense strand to SEQ ID NO: 2517736
uuccucgaaauccuuuauc

SEQ ID NO: 2517738 - RNA, 19 nt, Artificial Sequence
  Description of Artificial Sequence: Synthetic oligonucleotide
  Sense strand starting at position 3594 of SEQ ID NO: 1888194
gaaccuaagugucauguga

SEQ ID NO: 2517739 - RNA, 19 nt, Artificial Sequence
  Description of Artificial Sequence: Synthetic oligonucleotide
  Antisense strand to SEQ ID NO: 2517738
ucacaugacacuuagguuc

SEQ ID NO: 2517740 - RNA, 19 nt, Artificial Sequence
  Description of Artificial Sequence: Synthetic oligonucleotide
  Sense strand starting at position 3605 of SEQ ID NO: 1888194
ucaugugacuggcugugau

SEQ ID NO: 2517741 - RNA, 19 nt, Artificial Sequence
  Description of Artificial Sequence: Synthetic oligonucleotide
  Antisense strand to SEQ ID NO: 2517740
aucacagccagucacauga

SEQ ID NO: 2517742 - RNA, 19 nt, Artificial Sequence
  Description of Artificial Sequence: Synthetic oligonucleotide
  Sense strand starting at position 3609 of SEQ ID NO: 1888194
gugacuggcugugauagga

SEQ ID NO: 2517743 - RNA, 19 nt, Artificial Sequence
  Description of Artificial Sequence: Synthetic oligonucleotide
  Antisense strand to SEQ ID NO: 2517742
uccuaucacagccagucac

SEQ ID NO: 2517744 - RNA, 19 nt, Artificial Sequence
  Description of Artificial Sequence: Synthetic oligonucleotide
  Sense strand starting at position 3680 of SEQ ID NO: 1888194
uucuuuguacaauggguaa

SEQ ID NO: 2517745 - RNA, 19 nt, Artificial Sequence
  Description of Artificial Sequence: Synthetic oligonucleotide
  Antisense strand to SEQ ID NO: 2517744
uuacccauuguacaaagaa

SEQ ID NO: 2517746 - RNA, 19 nt, Artificial Sequence
  Description of Artificial Sequence: Synthetic oligonucleotide
  Sense strand starting at position 3683 of SEQ ID NO: 1888194
uuuguacaauggguaaaua

SEQ ID NO: 2517747 - RNA, 19 nt, Artificial Sequence
  Description of Artificial Sequence: Synthetic oligonucleotide
  Antisense strand to SEQ ID NO: 2517746
uauuuacccauuguacaaa

SEQ ID NO: 2517748 - RNA, 19 nt, Artificial Sequence
  Description of Artificial Sequence: Synthetic oligonucleotide
  Sense strand starting at position 3761 of SEQ ID NO: 1888194
guucuagggauccagugaa

SEQ ID NO: 2517749 - RNA, 19 nt, Artificial Sequence
  Description of Artificial Sequence: Synthetic oligonucleotide
  Antisense strand to SEQ ID NO: 2517748
uucacuggaucccuagaac

SEQ ID NO: 2517750 - RNA, 19 nt, Artificial Sequence
  Description of Artificial Sequence: Synthetic oligonucleotide
  Sense strand starting at position 3776 of SEQ ID NO: 1888194
ugaaauuguggcugcaaau

SEQ ID NO: 2517751 - RNA, 19 nt, Artificial Sequence
  Description of Artificial Sequence: Synthetic oligonucleotide
  Antisense strand to SEQ ID NO: 2517750
auuugcagccacaauuuca

SEQ ID NO: 2517752 - RNA, 19 nt, Artificial Sequence
  Description of Artificial Sequence: Synthetic oligonucleotide
  Sense strand starting at position 3797 of SEQ ID NO: 1888194
ggccuugugagcugcagaa

SEQ ID NO: 2517753 - RNA, 19 nt, Artificial Sequence
  Description of Artificial Sequence: Synthetic oligonucleotide
  Antisense strand to SEQ ID NO: 2517752
uucugcagcucacaaggcc

SEQ ID NO: 2517754 - RNA, 19 nt, Artificial Sequence
  Description of Artificial Sequence: Synthetic oligonucleotide
  Sense strand starting at position 3799 of SEQ ID NO: 1888194
ccuugugagcugcagaauu

SEQ ID NO: 2517755 - RNA, 19 nt, Artificial Sequence
  Description of Artificial Sequence: Synthetic oligonucleotide
  Antisense strand to SEQ ID NO: 2517754
aauucugcagcucacaagg

SEQ ID NO: 2517756 - RNA, 19 nt, Artificial Sequence
  Description of Artificial Sequence: Synthetic oligonucleotide
  Sense strand starting at position 3801 of SEQ ID NO: 1888194
uugugagcugcagaauucu

SEQ ID NO: 2517757 - RNA, 19 nt, Artificial Sequence
  Description of Artificial Sequence: Synthetic oligonucleotide
  Antisense strand to SEQ ID NO: 2517756
agaauucugcagcucacaa

SEQ ID NO: 2517758 - RNA, 19 nt, Artificial Sequence
  Description of Artificial Sequence: Synthetic oligonucleotide
  Sense strand starting at position 3810 of SEQ ID NO: 1888194
gcagaauucugagcaccca

SEQ ID NO: 2517759 - RNA, 19 nt, Artificial Sequence
  Description of Artificial Sequence: Synthetic oligonucleotide
  Antisense strand to SEQ ID NO: 2517758
ugggugcucagaauucugc

SEQ ID NO: 2517760 - RNA, 19 nt, Artificial Sequence
  Description of Artificial Sequence: Synthetic oligonucleotide
  Sense strand starting at position 3832 of SEQ ID NO: 1888194
ggagcuguuguccacagua

SEQ ID NO: 2517761 - RNA, 19 nt, Artificial Sequence
  Description of Artificial Sequence: Synthetic oligonucleotide
  Antisense strand to SEQ ID NO: 2517760
uacuguggacaacagcucc

SEQ ID NO: 2517762 - RNA, 19 nt, Artificial Sequence
  Description of Artificial Sequence: Synthetic oligonucleotide
  Sense strand starting at position 3834 of SEQ ID NO: 1888194
agcuguuguccacaguacu

SEQ ID NO: 2517763 - RNA, 19 nt, Artificial Sequence
  Description of Artificial Sequence: Synthetic oligonucleotide
  Antisense strand to SEQ ID NO: 2517762
aguacuguggacaacagcu

SEQ ID NO: 2517764 - RNA, 19 nt, Artificial Sequence
  Description of Artificial Sequence: Synthetic oligonucleotide
  Sense strand starting at position 3948 of SEQ ID NO: 1888194
gcacauaaacgcugucaca

SEQ ID NO: 2517765 - RNA, 19 nt, Artificial Sequence
  Description of Artificial Sequence: Synthetic oligonucleotide
  Antisense strand to SEQ ID NO: 2517764
ugugacagcguuuaugugc

SEQ ID NO: 2517766 - RNA, 19 nt, Artificial Sequence
  Description of Artificial Sequence: Synthetic oligonucleotide
  Sense strand starting at position 23 of SEQ ID NO: 1888195
gugugugagcagugugaau

SEQ ID NO: 2517767 - RNA, 19 nt, Artificial Sequence
  Description of Artificial Sequence: Synthetic oligonucleotide
  Antisense strand to SEQ ID NO: 2517766
auucacacugcucacacac

SEQ ID NO: 2517768 - RNA, 19 nt, Artificial Sequence
  Description of Artificial Sequence: Synthetic oligonucleotide
  Sense strand starting at position 72 of SEQ ID NO: 1888195
ccuccugggugcucagaau

SEQ ID NO: 2517769 - RNA, 19 nt, Artificial Sequence
  Description of Artificial Sequence: Synthetic oligonucleotide
  Antisense strand to SEQ ID NO: 2517768
auucugagcacccaggagg

SEQ ID NO: 2517770 - RNA, 19 nt, Artificial Sequence
  Description of Artificial Sequence: Synthetic oligonucleotide
  Sense strand starting at position 83 of SEQ ID NO: 1888195
cucagaauucugcagcuca

SEQ ID NO: 2517771 - RNA, 19 nt, Artificial Sequence
  Description of Artificial Sequence: Synthetic oligonucleotide
  Antisense strand to SEQ ID NO: 2517770
ugagcugcagaauucugag

SEQ ID NO: 2517772 - RNA, 19 nt, Artificial Sequence
  Description of Artificial Sequence: Synthetic oligonucleotide
  Sense strand starting at position 183 of SEQ ID NO: 1888195
gugauuguggaacauuaug

SEQ ID NO: 2517773 - RNA, 19 nt, Artificial Sequence
  Description of Artificial Sequence: Synthetic oligonucleotide
  Antisense strand to SEQ ID NO: 2517772
cauaauguuccacaaucac

SEQ ID NO: 2517774 - RNA, 19 nt, Artificial Sequence
  Description of Artificial Sequence: Synthetic oligonucleotide
  Sense strand starting at position 188 of SEQ ID NO: 1888195
uguggaacauuauguauau

SEQ ID NO: 2517775 - RNA, 19 nt, Artificial Sequence
  Description of Artificial Sequence: Synthetic oligonucleotide
  Antisense strand to SEQ ID NO: 2517774
auauacauaauguuccaca

SEQ ID NO: 2517776 - RNA, 19 nt, Artificial Sequence
  Description of Artificial Sequence: Synthetic oligonucleotide
  Sense strand starting at position 189 of SEQ ID NO: 1888195
guggaacauuauguauauu

SEQ ID NO: 2517777 - RNA, 19 nt, Artificial Sequence
  Description of Artificial Sequence: Synthetic oligonucleotide
  Antisense strand to SEQ ID NO: 2517776
aauauacauaauguuccac

SEQ ID NO: 2517778 - RNA, 19 nt, Artificial Sequence
  Description of Artificial Sequence: Synthetic oligonucleotide
  Sense strand starting at position 710 of SEQ ID NO: 1888195
ugcucauggcaagaguagu

SEQ ID NO: 2517779 - RNA, 19 nt, Artificial Sequence
  Description of Artificial Sequence: Synthetic oligonucleotide
  Antisense strand to SEQ ID NO: 2517778
acuacucuugccaugagca

SEQ ID NO: 2517780 - RNA, 19 nt, Artificial Sequence
  Description of Artificial Sequence: Synthetic oligonucleotide
  Sense strand starting at position 736 of SEQ ID NO: 1888195
guggaugaguuucauacga

SEQ ID NO: 2517781 - RNA, 19 nt, Artificial Sequence
  Description of Artificial Sequence: Synthetic oligonucleotide
  Antisense strand to SEQ ID NO: 2517780
ucguaugaaacucauccac

SEQ ID NO: 2517782 - RNA, 19 nt, Artificial Sequence
  Description of Artificial Sequence: Synthetic oligonucleotide
  Sense strand starting at position 738 of SEQ ID NO: 1888195
ggaugaguuucauacgaug

SEQ ID NO: 2517783 - RNA, 19 nt, Artificial Sequence
  Description of Artificial Sequence: Synthetic oligonucleotide
  Antisense strand to SEQ ID NO: 2517782
caucguaugaaacucaucc

SEQ ID NO: 2517784 - RNA, 19 nt, Artificial Sequence
  Description of Artificial Sequence: Synthetic oligonucleotide
  Sense strand starting at position 809 of SEQ ID NO: 1888195
auauuaugucagcacugaa

SEQ ID NO: 2517785 - RNA, 19 nt, Artificial Sequence
  Description of Artificial Sequence: Synthetic oligonucleotide
  Antisense strand to SEQ ID NO: 2517784
uucagugcugacauaauau

SEQ ID NO: 2517786 - RNA, 19 nt, Artificial Sequence
  Description of Artificial Sequence: Synthetic oligonucleotide
  Sense strand starting at position 859 of SEQ ID NO: 1888195
gacugaggcuuagugaugu

SEQ ID NO: 2517787 - RNA, 19 nt, Artificial Sequence
  Description of Artificial Sequence: Synthetic oligonucleotide
  Antisense strand to SEQ ID NO: 2517786
acaucacuaagccucaguc

SEQ ID NO: 2517788 - RNA, 19 nt, Artificial Sequence
  Description of Artificial Sequence: Synthetic oligonucleotide
  Sense strand starting at position 863 of SEQ ID NO: 1888195
gaggcuuagugaugucgga

SEQ ID NO: 2517789 - RNA, 19 nt, Artificial Sequence
  Description of Artificial Sequence: Synthetic oligonucleotide
  Antisense strand to SEQ ID NO: 2517788
uccgacaucacuaagccuc

SEQ ID NO: 2517790 - RNA, 19 nt, Artificial Sequence
  Description of Artificial Sequence: Synthetic oligonucleotide
  Sense strand starting at position 914 of SEQ ID NO: 1888195
augugaacuugauggcuuu

SEQ ID NO: 2517791 - RNA, 19 nt, Artificial Sequence
  Description of Artificial Sequence: Synthetic oligonucleotide
  Antisense strand to SEQ ID NO: 2517790
aaagccaucaaguucacau

SEQ ID NO: 2517792 - RNA, 19 nt, Artificial Sequence
  Description of Artificial Sequence: Synthetic oligonucleotide
  Sense strand starting at position 1008 of SEQ ID NO: 1888195
uggguuugccauuguuaga

SEQ ID NO: 2517793 - RNA, 19 nt, Artificial Sequence
  Description of Artificial Sequence: Synthetic oligonucleotide
  Antisense strand to SEQ ID NO: 2517792
ucuaacaauggcaaaccca

SEQ ID NO: 2517794 - RNA, 19 nt, Artificial Sequence
  Description of Artificial Sequence: Synthetic oligonucleotide
  Sense strand starting at position 1011 of SEQ ID NO: 1888195
guuugccauuguuagaagu

SEQ ID NO: 2517795 - RNA, 19 nt, Artificial Sequence
  Description of Artificial Sequence: Synthetic oligonucleotide
  Antisense strand to SEQ ID NO: 2517794
acuucuaacaauggcaaac

SEQ ID NO: 2517796 - RNA, 19 nt, Artificial Sequence
  Description of Artificial Sequence: Synthetic oligonucleotide
  Sense strand starting at position 1013 of SEQ ID NO: 1888195
uugccauuguuagaaguga

SEQ ID NO: 2517797 - RNA, 19 nt, Artificial Sequence
  Description of Artificial Sequence: Synthetic oligonucleotide
  Antisense strand to SEQ ID NO: 2517796
ucacuucuaacaauggcaa

SEQ ID NO: 2517798 - RNA, 19 nt, Artificial Sequence
  Description of Artificial Sequence: Synthetic oligonucleotide
  Sense strand starting at position 1101 of SEQ ID NO: 1888195
ggagauggguucuuggagu

SEQ ID NO: 2517799 - RNA, 19 nt, Artificial Sequence
  Description of Artificial Sequence: Synthetic oligonucleotide
  Antisense strand to SEQ ID NO: 2517798
acuccaagaacccaucucc

SEQ ID NO: 2517800 - RNA, 19 nt, Artificial Sequence
  Description of Artificial Sequence: Synthetic oligonucleotide
  Sense strand starting at position 1120 of SEQ ID NO: 1888195
ggguguggugucugaccau

SEQ ID NO: 2517801 - RNA, 19 nt, Artificial Sequence
  Description of Artificial Sequence: Synthetic oligonucleotide
  Antisense strand to SEQ ID NO: 2517800
auggucagacaccacaccc

SEQ ID NO: 2517802 - RNA, 19 nt, Artificial Sequence
  Description of Artificial Sequence: Synthetic oligonucleotide
  Sense strand starting at position 1719 of SEQ ID NO: 1888195
gagcgacauucccuggagu

SEQ ID NO: 2517803 - RNA, 19 nt, Artificial Sequence
  Description of Artificial Sequence: Synthetic oligonucleotide
  Antisense strand to SEQ ID NO: 2517802
acuccagggaaugucgcuc

SEQ ID NO: 2517804 - RNA, 19 nt, Artificial Sequence
  Description of Artificial Sequence: Synthetic oligonucleotide
  Sense strand starting at position 1721 of SEQ ID NO: 1888195
gcgacauucccuggaguga

SEQ ID NO: 2517805 - RNA, 19 nt, Artificial Sequence
  Description of Artificial Sequence: Synthetic oligonucleotide
  Antisense strand to SEQ ID NO: 2517804
ucacuccagggaaugucgc

SEQ ID NO: 2517806 - RNA, 19 nt, Artificial Sequence
  Description of Artificial Sequence: Synthetic oligonucleotide
  Sense strand starting at position 2088 of SEQ ID NO: 1888195
agacuuuggugguggugau

SEQ ID NO: 2517807 - RNA, 19 nt, Artificial Sequence
  Description of Artificial Sequence: Synthetic oligonucleotide
  Antisense strand to SEQ ID NO: 2517806
aucaccaccaccaaagucu

SEQ ID NO: 2517808 - RNA, 19 nt, Artificial Sequence
  Description of Artificial Sequence: Synthetic oligonucleotide
  Sense strand starting at position 2779 of SEQ ID NO: 1888195
cagguaucccagcaagaca

SEQ ID NO: 2517809 - RNA, 19 nt, Artificial Sequence
  Description of Artificial Sequence: Synthetic oligonucleotide
  Antisense strand to SEQ ID NO: 2517808
ugucuugcugggauaccug

SEQ ID NO: 2517810 - RNA, 19 nt, Artificial Sequence
  Description of Artificial Sequence: Synthetic oligonucleotide
  Sense strand starting at position 2898 of SEQ ID NO: 1888195
uggaauucuggaugcagaa

SEQ ID NO: 2517811 - RNA, 19 nt, Artificial Sequence
  Description of Artificial Sequence: Synthetic oligonucleotide
  Antisense strand to SEQ ID NO: 2517810
uucugcauccagaauucca

SEQ ID NO: 2517812 - RNA, 19 nt, Artificial Sequence
  Description of Artificial Sequence: Synthetic oligonucleotide
  Sense strand starting at position 2954 of SEQ ID NO: 1888195
gggagcuaccagugguaga

SEQ ID NO: 2517813 - RNA, 19 nt, Artificial Sequence
  Description of Artificial Sequence: Synthetic oligonucleotide
  Antisense strand to SEQ ID NO: 2517812
ucuaccacugguagcuccc

SEQ ID NO: 2517814 - RNA, 19 nt, Artificial Sequence
  Description of Artificial Sequence: Synthetic oligonucleotide
  Sense strand starting at position 2955 of SEQ ID NO: 1888195
ggagcuaccagugguagau

SEQ ID NO: 2517815 - RNA, 19 nt, Artificial Sequence
  Description of Artificial Sequence: Synthetic oligonucleotide
  Antisense strand to SEQ ID NO: 2517814
aucuaccacugguagcucc

SEQ ID NO: 2517816 - RNA, 19 nt, Artificial Sequence
  Description of Artificial Sequence: Synthetic oligonucleotide
  Sense strand starting at position 3044 of SEQ ID NO: 1888195
uugcguguaucagguuuga

SEQ ID NO: 2517817 - RNA, 19 nt, Artificial Sequence
  Description of Artificial Sequence: Synthetic oligonucleotide
  Antisense strand to SEQ ID NO: 2517816
ucaaaccugauacacgcaa

SEQ ID NO: 2517818 - RNA, 19 nt, Artificial Sequence
  Description of Artificial Sequence: Synthetic oligonucleotide
  Sense strand starting at position 3059 of SEQ ID NO: 1888195
uugaaaugccuccagcaga

SEQ ID NO: 2517819 - RNA, 19 nt, Artificial Sequence
  Description of Artificial Sequence: Synthetic oligonucleotide
  Antisense strand to SEQ ID NO: 2517818
ucugcuggaggcauuucaa

SEQ ID NO: 2517820 - RNA, 19 nt, Artificial Sequence
  Description of Artificial Sequence: Synthetic oligonucleotide
  Sense strand starting at position 3106 of SEQ ID NO: 1888195
ggauuaucaaucuggagcu

SEQ ID NO: 2517821 - RNA, 19 nt, Artificial Sequence
  Description of Artificial Sequence: Synthetic oligonucleotide
  Antisense strand to SEQ ID NO: 2517820
agcuccagauugauaaucc

SEQ ID NO: 2517822 - RNA, 19 nt, Artificial Sequence
  Description of Artificial Sequence: Synthetic oligonucleotide
  Sense strand starting at position 3153 of SEQ ID NO: 1888195
uugggaguugaacgagaau

SEQ ID NO: 2517823 - RNA, 19 nt, Artificial Sequence
  Description of Artificial Sequence: Synthetic oligonucleotide
  Antisense strand to SEQ ID NO: 2517822
auucucguucaacucccaa

SEQ ID NO: 2517824 - RNA, 19 nt, Artificial Sequence
  Description of Artificial Sequence: Synthetic oligonucleotide
  Sense strand starting at position 3162 of SEQ ID NO: 1888195
gaacgagaaucauguggac

SEQ ID NO: 2517825 - RNA, 19 nt, Artificial Sequence
  Description of Artificial Sequence: Synthetic oligonucleotide
  Antisense strand to SEQ ID NO: 2517824
guccacaugauucucguuc

SEQ ID NO: 2517826 - RNA, 19 nt, Artificial Sequence
  Description of Artificial Sequence: Synthetic oligonucleotide
  Sense strand starting at position 3164 of SEQ ID NO: 1888195
acgagaaucauguggacga

SEQ ID NO: 2517827 - RNA, 19 nt, Artificial Sequence
  Description of Artificial Sequence: Synthetic oligonucleotide
  Antisense strand to SEQ ID NO: 2517826
ucguccacaugauucucgu

SEQ ID NO: 2517828 - RNA, 19 nt, Artificial Sequence
  Description of Artificial Sequence: Synthetic oligonucleotide
  Sense strand starting at position 3283 of SEQ ID NO: 1888195
uccagaagucaugguguca

SEQ ID NO: 2517829 - RNA, 19 nt, Artificial Sequence
  Description of Artificial Sequence: Synthetic oligonucleotide
  Antisense strand to SEQ ID NO: 2517828
ugacaccaugacuucugga

SEQ ID NO: 2517830 - RNA, 19 nt, Artificial Sequence
  Description of Artificial Sequence: Synthetic oligonucleotide
  Sense strand starting at position 3294 of SEQ ID NO: 1888195
uggugucauccacacuauc

SEQ ID NO: 2517831 - RNA, 19 nt, Artificial Sequence
  Description of Artificial Sequence: Synthetic oligonucleotide
  Antisense strand to SEQ ID NO: 2517830
gauaguguggaugacacca

SEQ ID NO: 2517832 - RNA, 19 nt, Artificial Sequence
  Description of Artificial Sequence: Synthetic oligonucleotide
  Sense strand starting at position 3385 of SEQ ID NO: 1888195
aacagucuggccuggagau

SEQ ID NO: 2517833 - RNA, 19 nt, Artificial Sequence
  Description of Artificial Sequence: Synthetic oligonucleotide
  Antisense strand to SEQ ID NO: 2517832
aucuccaggccagacuguu

SEQ ID NO: 2517834 - RNA, 19 nt, Artificial Sequence
  Description of Artificial Sequence: Synthetic oligonucleotide
  Sense strand starting at position 3446 of SEQ ID NO: 1888195
uuucuuggcugugaaacau

SEQ ID NO: 2517835 - RNA, 19 nt, Artificial Sequence
  Description of Artificial Sequence: Synthetic oligonucleotide
  Antisense strand to SEQ ID NO: 2517834
auguuucacagccaagaaa

SEQ ID NO: 2517836 - RNA, 19 nt, Artificial Sequence
  Description of Artificial Sequence: Synthetic oligonucleotide
  Sense strand starting at position 3479 of SEQ ID NO: 1888195
gacugcaugcuuuguuuaa

SEQ ID NO: 2517837 - RNA, 19 nt, Artificial Sequence
  Description of Artificial Sequence: Synthetic oligonucleotide
  Antisense strand to SEQ ID NO: 2517836
uuaaacaaagcaugcaguc

SEQ ID NO: 2517838 - RNA, 19 nt, Artificial Sequence
  Description of Artificial Sequence: Synthetic oligonucleotide
  Sense strand starting at position 3480 of SEQ ID NO: 1888195
acugcaugcuuuguuuaau

SEQ ID NO: 2517839 - RNA, 19 nt, Artificial Sequence
  Description of Artificial Sequence: Synthetic oligonucleotide
  Antisense strand to SEQ ID NO: 2517838
auuaaacaaagcaugcagu

SEQ ID NO: 2517840 - RNA, 19 nt, Artificial Sequence
  Description of Artificial Sequence: Synthetic oligonucleotide
  Sense strand starting at position 3481 of SEQ ID NO: 1888195
cugcaugcuuuguuuaaug

SEQ ID NO: 2517841 - RNA, 19 nt, Artificial Sequence
  Description of Artificial Sequence: Synthetic oligonucleotide
  Antisense strand to SEQ ID NO: 2517840
cauuaaacaaagcaugcag

SEQ ID NO: 2517842 - RNA, 19 nt, Artificial Sequence
  Description of Artificial Sequence: Synthetic oligonucleotide
  Sense strand starting at position 3558 of SEQ ID NO: 1888195
cugugcauguguccacuua

SEQ ID NO: 2517843 - RNA, 19 nt, Artificial Sequence
  Description of Artificial Sequence: Synthetic oligonucleotide
  Antisense strand to SEQ ID NO: 2517842
uaaguggacacaugcacag

SEQ ID NO: 2517844 - RNA, 19 nt, Artificial Sequence
  Description of Artificial Sequence: Synthetic oligonucleotide
  Sense strand starting at position 118 of SEQ ID NO: 1888196
ugaaucucugggcaauuau

SEQ ID NO: 2517845 - RNA, 19 nt, Artificial Sequence
  Description of Artificial Sequence: Synthetic oligonucleotide
  Antisense strand to SEQ ID NO: 2517844
auaauugcccagagauuca

SEQ ID NO: 2517846 - RNA, 19 nt, Artificial Sequence
  Description of Artificial Sequence: Synthetic oligonucleotide
  Sense strand starting at position 232 of SEQ ID NO: 1888196
aagggacaaugugucauua

SEQ ID NO: 2517847 - RNA, 19 nt, Artificial Sequence
  Description of Artificial Sequence: Synthetic oligonucleotide
  Antisense strand to SEQ ID NO: 2517846
uaaugacacauugucccuu

SEQ ID NO: 2517848 - RNA, 19 nt, Artificial Sequence
  Description of Artificial Sequence: Synthetic oligonucleotide
  Sense strand starting at position 301 of SEQ ID NO: 1888196
uuaguccuaugauuaugau

SEQ ID NO: 2517849 - RNA, 19 nt, Artificial Sequence
  Description of Artificial Sequence: Synthetic oligonucleotide
  Antisense strand to SEQ ID NO: 2517848
aucauaaucauaggacuaa

SEQ ID NO: 2517850 - RNA, 19 nt, Artificial Sequence
  Description of Artificial Sequence: Synthetic oligonucleotide
  Sense strand starting at position 428 of SEQ ID NO: 1888196
ggugucacaucauuaaaua

SEQ ID NO: 2517851 - RNA, 19 nt, Artificial Sequence
  Description of Artificial Sequence: Synthetic oligonucleotide
  Antisense strand to SEQ ID NO: 2517850
uauuuaaugaugugacacc

SEQ ID NO: 2517852 - RNA, 19 nt, Artificial Sequence
  Description of Artificial Sequence: Synthetic oligonucleotide
  Sense strand starting at position 429 of SEQ ID NO: 1888196
gugucacaucauuaaauau

SEQ ID NO: 2517853 - RNA, 19 nt, Artificial Sequence
  Description of Artificial Sequence: Synthetic oligonucleotide
  Antisense strand to SEQ ID NO: 2517852
auauuuaaugaugugacac

SEQ ID NO: 2517854 - RNA, 19 nt, Artificial Sequence
  Description of Artificial Sequence: Synthetic oligonucleotide
  Sense strand starting at position 439 of SEQ ID NO: 1888196
auuaaauauccaggaggca

SEQ ID NO: 2517855 - RNA, 19 nt, Artificial Sequence
  Description of Artificial Sequence: Synthetic oligonucleotide
  Antisense strand to SEQ ID NO: 2517854
ugccuccuggauauuuaau

SEQ ID NO: 2517856 - RNA, 19 nt, Artificial Sequence
  Description of Artificial Sequence: Synthetic oligonucleotide
  Sense strand starting at position 546 of SEQ ID NO: 1888196
gcucacagcgucgucaaua

SEQ ID NO: 2517857 - RNA, 19 nt, Artificial Sequence
  Description of Artificial Sequence: Synthetic oligonucleotide
  Antisense strand to SEQ ID NO: 2517856
uauugacgacgcugugagc

SEQ ID NO: 2517858 - RNA, 19 nt, Artificial Sequence
  Description of Artificial Sequence: Synthetic oligonucleotide
  Sense strand starting at position 681 of SEQ ID NO: 1888196
uccagaggucuggauccuu

SEQ ID NO: 2517859 - RNA, 19 nt, Artificial Sequence
  Description of Artificial Sequence: Synthetic oligonucleotide
  Antisense strand to SEQ ID NO: 2517858
aaggauccagaccucugga

SEQ ID NO: 2517860 - RNA, 19 nt, Artificial Sequence
  Description of Artificial Sequence: Synthetic oligonucleotide
  Sense strand starting at position 1059 of SEQ ID NO: 1888196
agaacuuucgcacaucaua

SEQ ID NO: 2517861 - RNA, 19 nt, Artificial Sequence
  Description of Artificial Sequence: Synthetic oligonucleotide
  Antisense strand to SEQ ID NO: 2517860
uaugaugugcgaaaguucu

SEQ ID NO: 2517862 - RNA, 19 nt, Artificial Sequence
  Description of Artificial Sequence: Synthetic oligonucleotide
  Sense strand starting at position 1137 of SEQ ID NO: 1888196
gcuuccugugaucaggaga

SEQ ID NO: 2517863 - RNA, 19 nt, Artificial Sequence
  Description of Artificial Sequence: Synthetic oligonucleotide
  Antisense strand to SEQ ID NO: 2517862
ucuccugaucacaggaagc

SEQ ID NO: 2517864 - RNA, 19 nt, Artificial Sequence
  Description of Artificial Sequence: Synthetic oligonucleotide
  Sense strand starting at position 1226 of SEQ ID NO: 1888196
ugcuguguucuggcaagca

SEQ ID NO: 2517865 - RNA, 19 nt, Artificial Sequence
  Description of Artificial Sequence: Synthetic oligonucleotide
  Antisense strand to SEQ ID NO: 2517864
ugcuugccagaacacagca

SEQ ID NO: 2517866 - RNA, 19 nt, Artificial Sequence
  Description of Artificial Sequence: Synthetic oligonucleotide
  Sense strand starting at position 1311 of SEQ ID NO: 1888196
uuuaguccaggacaguaau

SEQ ID NO: 2517867 - RNA, 19 nt, Artificial Sequence
  Description of Artificial Sequence: Synthetic oligonucleotide
  Antisense strand to SEQ ID NO: 2517866
auuacuguccuggacuaaa

SEQ ID NO: 2517868 - RNA, 19 nt, Artificial Sequence
  Description of Artificial Sequence: Synthetic oligonucleotide
  Sense strand starting at position 1399 of SEQ ID NO: 1888196
gaaagcaauugccuggaaa

SEQ ID NO: 2517869 - RNA, 19 nt, Artificial Sequence
  Description of Artificial Sequence: Synthetic oligonucleotide
  Antisense strand to SEQ ID NO: 2517868
uuuccaggcaauugcuuuc

SEQ ID NO: 2517870 - RNA, 19 nt, Artificial Sequence
  Description of Artificial Sequence: Synthetic oligonucleotide
  Sense strand starting at position 1612 of SEQ ID NO: 1888196
guaacuuaggcacaauaau

SEQ ID NO: 2517871 - RNA, 19 nt, Artificial Sequence
  Description of Artificial Sequence: Synthetic oligonucleotide
  Antisense strand to SEQ ID NO: 2517870
auuauugugccuaaguuac

SEQ ID NO: 2517872 - RNA, 19 nt, Artificial Sequence
  Description of Artificial Sequence: Synthetic oligonucleotide
  Sense strand starting at position 1659 of SEQ ID NO: 1888196
ucaacaguauaucugugaa

SEQ ID NO: 2517873 - RNA, 19 nt, Artificial Sequence
  Description of Artificial Sequence: Synthetic oligonucleotide
  Antisense strand to SEQ ID NO: 2517872
uucacagauauacuguuga

SEQ ID NO: 2517874 - RNA, 19 nt, Artificial Sequence
  Description of Artificial Sequence: Synthetic oligonucleotide
  Sense strand starting at position 1661 of SEQ ID NO: 1888196
aacaguauaucugugaaag

SEQ ID NO: 2517875 - RNA, 19 nt, Artificial Sequence
  Description of Artificial Sequence: Synthetic oligonucleotide
  Antisense strand to SEQ ID NO: 2517874
cuuucacagauauacuguu

SEQ ID NO: 2517876 - RNA, 19 nt, Artificial Sequence
  Description of Artificial Sequence: Synthetic oligonucleotide
  Sense strand starting at position 1684 of SEQ ID NO: 1888196
uugcgagccagauauuugu

SEQ ID NO: 2517877 - RNA, 19 nt, Artificial Sequence
  Description of Artificial Sequence: Synthetic oligonucleotide
  Antisense strand to SEQ ID NO: 2517876
acaaauaucuggcucgcaa

SEQ ID NO: 2517878 - RNA, 19 nt, Artificial Sequence
  Description of Artificial Sequence: Synthetic oligonucleotide
  Sense strand starting at position 1690 of SEQ ID NO: 1888196
gccagauauuuguugucac

SEQ ID NO: 2517879 - RNA, 19 nt, Artificial Sequence
  Description of Artificial Sequence: Synthetic oligonucleotide
  Antisense strand to SEQ ID NO: 2517878
gugacaacaaauaucuggc

SEQ ID NO: 2517880 - RNA, 19 nt, Artificial Sequence
  Description of Artificial Sequence: Synthetic oligonucleotide
  Sense strand starting at position 1697 of SEQ ID NO: 1888196
auuuguugucacuauucgu

SEQ ID NO: 2517881 - RNA, 19 nt, Artificial Sequence
  Description of Artificial Sequence: Synthetic oligonucleotide
  Antisense strand to SEQ ID NO: 2517880
acgaauagugacaacaaau

SEQ ID NO: 2517882 - RNA, 19 nt, Artificial Sequence
  Description of Artificial Sequence: Synthetic oligonucleotide
  Sense strand starting at position 1926 of SEQ ID NO: 1888196
guguauuaggucgcugcaa

SEQ ID NO: 2517883 - RNA, 19 nt, Artificial Sequence
  Description of Artificial Sequence: Synthetic oligonucleotide
  Antisense strand to SEQ ID NO: 2517882
uugcagcgaccuaauacac

SEQ ID NO: 2517884 - RNA, 19 nt, Artificial Sequence
  Description of Artificial Sequence: Synthetic oligonucleotide
  Sense strand starting at position 2080 of SEQ ID NO: 1888196
cggagagugggcuaauuaa

SEQ ID NO: 2517885 - RNA, 19 nt, Artificial Sequence
  Description of Artificial Sequence: Synthetic oligonucleotide
  Antisense strand to SEQ ID NO: 2517884
uuaauuagcccacucuccg

SEQ ID NO: 2517886 - RNA, 19 nt, Artificial Sequence
  Description of Artificial Sequence: Synthetic oligonucleotide
  Sense strand starting at position 2223 of SEQ ID NO: 1888196
ggcuucgagcaugaauaau

SEQ ID NO: 2517887 - RNA, 19 nt, Artificial Sequence
  Description of Artificial Sequence: Synthetic oligonucleotide
  Antisense strand to SEQ ID NO: 2517886
auuauucaugcucgaagcc

SEQ ID NO: 2517888 - RNA, 19 nt, Artificial Sequence
  Description of Artificial Sequence: Synthetic oligonucleotide
  Sense strand starting at position 2436 of SEQ ID NO: 1888196
uuagcuuugucauuuauug

SEQ ID NO: 2517889 - RNA, 19 nt, Artificial Sequence
  Description of Artificial Sequence: Synthetic oligonucleotide
  Antisense strand to SEQ ID NO: 2517888
caauaaaugacaaagcuaa

SEQ ID NO: 2517890 - RNA, 19 nt, Artificial Sequence
  Description of Artificial Sequence: Synthetic oligonucleotide
  Sense strand starting at position 2613 of SEQ ID NO: 1888196
accguucuccacuaugaag

SEQ ID NO: 2517891 - RNA, 19 nt, Artificial Sequence
  Description of Artificial Sequence: Synthetic oligonucleotide
  Antisense strand to SEQ ID NO: 2517890
cuucauaguggagaacggu

SEQ ID NO: 2517892 - RNA, 19 nt, Artificial Sequence
  Description of Artificial Sequence: Synthetic oligonucleotide
  Sense strand starting at position 2693 of SEQ ID NO: 1888196
aacaucugcccagaagagu

SEQ ID NO: 2517893 - RNA, 19 nt, Artificial Sequence
  Description of Artificial Sequence: Synthetic oligonucleotide
  Antisense strand to SEQ ID NO: 2517892
acucuucugggcagauguu

SEQ ID NO: 2517894 - RNA, 19 nt, Artificial Sequence
  Description of Artificial Sequence: Synthetic oligonucleotide
  Sense strand starting at position 2702 of SEQ ID NO: 1888196
ccagaagagucucuaauua

SEQ ID NO: 2517895 - RNA, 19 nt, Artificial Sequence
  Description of Artificial Sequence: Synthetic oligonucleotide
  Antisense strand to SEQ ID NO: 2517894
uaauuagagacucuucugg

SEQ ID NO: 2517896 - RNA, 19 nt, Artificial Sequence
  Description of Artificial Sequence: Synthetic oligonucleotide
  Sense strand starting at position 2712 of SEQ ID NO: 1888196
cucuaauuacaagaagugu

SEQ ID NO: 2517897 - RNA, 19 nt, Artificial Sequence
  Description of Artificial Sequence: Synthetic oligonucleotide
  Antisense strand to SEQ ID NO: 2517896
acacuucuuguaauuagag

SEQ ID NO: 2517898 - RNA, 19 nt, Artificial Sequence
  Description of Artificial Sequence: Synthetic oligonucleotide
  Sense strand starting at position 2750 of SEQ ID NO: 1888196
ccgaauuaauuccugaaag

SEQ ID NO: 2517899 - RNA, 19 nt, Artificial Sequence
  Description of Artificial Sequence: Synthetic oligonucleotide
  Antisense strand to SEQ ID NO: 2517898
cuuucaggaauuaauucgg

SEQ ID NO: 2517900 - RNA, 19 nt, Artificial Sequence
  Description of Artificial Sequence: Synthetic oligonucleotide
  Sense strand starting at position 2839 of SEQ ID NO: 1888196
auagacugccagugaauaa

SEQ ID NO: 2517901 - RNA, 19 nt, Artificial Sequence
  Description of Artificial Sequence: Synthetic oligonucleotide
  Antisense strand to SEQ ID NO: 2517900
uuauucacuggcagucuau

SEQ ID NO: 2517902 - RNA, 19 nt, Artificial Sequence
  Description of Artificial Sequence: Synthetic oligonucleotide
  Sense strand starting at position 2884 of SEQ ID NO: 1888196
accagauuguuccuuugga

SEQ ID NO: 2517903 - RNA, 19 nt, Artificial Sequence
  Description of Artificial Sequence: Synthetic oligonucleotide
  Antisense strand to SEQ ID NO: 2517902
uccaaaggaacaaucuggu

SEQ ID NO: 2517904 - RNA, 19 nt, Artificial Sequence
  Description of Artificial Sequence: Synthetic oligonucleotide
  Sense strand starting at position 2885 of SEQ ID NO: 1888196
ccagauuguuccuuuggag

SEQ ID NO: 2517905 - RNA, 19 nt, Artificial Sequence
  Description of Artificial Sequence: Synthetic oligonucleotide
  Antisense strand to SEQ ID NO: 2517904
cuccaaaggaacaaucugg

SEQ ID NO: 2517906 - RNA, 19 nt, Artificial Sequence
  Description of Artificial Sequence: Synthetic oligonucleotide
  Sense strand starting at position 3039 of SEQ ID NO: 1888196
ugacacugugacugaaacu

SEQ ID NO: 2517907 - RNA, 19 nt, Artificial Sequence
  Description of Artificial Sequence: Synthetic oligonucleotide
  Antisense strand to SEQ ID NO: 2517906
aguuucagucacaguguca

SEQ ID NO: 2517908 - RNA, 19 nt, Artificial Sequence
  Description of Artificial Sequence: Synthetic oligonucleotide
  Sense strand starting at position 3308 of SEQ ID NO: 1888196
guaccacucguguucaguu

SEQ ID NO: 2517909 - RNA, 19 nt, Artificial Sequence
  Description of Artificial Sequence: Synthetic oligonucleotide
  Antisense strand to SEQ ID NO: 2517908
aacugaacacgagugguac

SEQ ID NO: 2517910 - RNA, 19 nt, Artificial Sequence
  Description of Artificial Sequence: Synthetic oligonucleotide
  Sense strand starting at position 3313 of SEQ ID NO: 1888196
acucguguucaguuuaugu

SEQ ID NO: 2517911 - RNA, 19 nt, Artificial Sequence
  Description of Artificial Sequence: Synthetic oligonucleotide
  Antisense strand to SEQ ID NO: 2517910
acauaaacugaacacgagu

SEQ ID NO: 2517912 - RNA, 19 nt, Artificial Sequence
  Description of Artificial Sequence: Synthetic oligonucleotide
  Sense strand starting at position 3341 of SEQ ID NO: 1888196
gcccauuucugcuuauuga

SEQ ID NO: 2517913 - RNA, 19 nt, Artificial Sequence
  Description of Artificial Sequence: Synthetic oligonucleotide
  Antisense strand to SEQ ID NO: 2517912
ucaauaagcagaaaugggc

SEQ ID NO: 2517914 - RNA, 19 nt, Artificial Sequence
  Description of Artificial Sequence: Synthetic oligonucleotide
  Sense strand starting at position 3440 of SEQ ID NO: 1888196
uuccuuuaggucugggaag

SEQ ID NO: 2517915 - RNA, 19 nt, Artificial Sequence
  Description of Artificial Sequence: Synthetic oligonucleotide
  Antisense strand to SEQ ID NO: 2517914
cuucccagaccuaaaggaa

SEQ ID NO: 2517916 - RNA, 19 nt, Artificial Sequence
  Description of Artificial Sequence: Synthetic oligonucleotide
  Sense strand starting at position 3442 of SEQ ID NO: 1888196
ccuuuaggucugggaagaa

SEQ ID NO: 2517917 - RNA, 19 nt, Artificial Sequence
  Description of Artificial Sequence: Synthetic oligonucleotide
  Antisense strand to SEQ ID NO: 2517916
uucuucccagaccuaaagg

SEQ ID NO: 2517918 - RNA, 19 nt, Artificial Sequence
  Description of Artificial Sequence: Synthetic oligonucleotide
  Sense strand starting at position 3461 of SEQ ID NO: 1888196
augaaacuguuagcuuaau

SEQ ID NO: 2517919 - RNA, 19 nt, Artificial Sequence
  Description of Artificial Sequence: Synthetic oligonucleotide
  Antisense strand to SEQ ID NO: 2517918
auuaagcuaacaguuucau

SEQ ID NO: 2517920 - RNA, 19 nt, Artificial Sequence
  Description of Artificial Sequence: Synthetic oligonucleotide
  Sense strand starting at position 3530 of SEQ ID NO: 1888196
gcuagauaaauccggagga

SEQ ID NO: 2517921 - RNA, 19 nt, Artificial Sequence
  Description of Artificial Sequence: Synthetic oligonucleotide
  Antisense strand to SEQ ID NO: 2517920
uccuccggauuuaucuagc

SEQ ID NO: 2517922 - RNA, 19 nt, Artificial Sequence
  Description of Artificial Sequence: Synthetic oligonucleotide
  Sense strand starting at position 3546 of SEQ ID NO: 1888196
ggacccguuaaguaaauga

SEQ ID NO: 2517923 - RNA, 19 nt, Artificial Sequence
  Description of Artificial Sequence: Synthetic oligonucleotide
  Antisense strand to SEQ ID NO: 2517922
ucauuuacuuaacgggucc

SEQ ID NO: 2517924 - RNA, 19 nt, Artificial Sequence
  Description of Artificial Sequence: Synthetic oligonucleotide
  Sense strand starting at position 3 of SEQ ID NO: 1888197
agauaucaggguugaguua

SEQ ID NO: 2517925 - RNA, 19 nt, Artificial Sequence
  Description of Artificial Sequence: Synthetic oligonucleotide
  Antisense strand to SEQ ID NO: 2517924
uaacucaacccugauaucu

SEQ ID NO: 2517926 - RNA, 19 nt, Artificial Sequence
  Description of Artificial Sequence: Synthetic oligonucleotide
  Sense strand starting at position 4 of SEQ ID NO: 1888197
gauaucaggguugaguuau

SEQ ID NO: 2517927 - RNA, 19 nt, Artificial Sequence
  Description of Artificial Sequence: Synthetic oligonucleotide
  Antisense strand to SEQ ID NO: 2517926
auaacucaacccugauauc

SEQ ID NO: 2517928 - RNA, 19 nt, Artificial Sequence
  Description of Artificial Sequence: Synthetic oligonucleotide
  Sense strand starting at position 10 of SEQ ID NO: 1888197
aggguugaguuauuaauuc

SEQ ID NO: 2517929 - RNA, 19 nt, Artificial Sequence
  Description of Artificial Sequence: Synthetic oligonucleotide
  Antisense strand to SEQ ID NO: 2517928
gaauuaauaacucaacccu

SEQ ID NO: 2517930 - RNA, 19 nt, Artificial Sequence
  Description of Artificial Sequence: Synthetic oligonucleotide
  Sense strand starting at position 71 of SEQ ID NO: 1888197
uugaaagugugcccuugaa

SEQ ID NO: 2517931 - RNA, 19 nt, Artificial Sequence
  Description of Artificial Sequence: Synthetic oligonucleotide
  Antisense strand to SEQ ID NO: 2517930
uucaagggcacacuuucaa

SEQ ID NO: 2517932 - RNA, 19 nt, Artificial Sequence
  Description of Artificial Sequence: Synthetic oligonucleotide
  Sense strand starting at position 75 of SEQ ID NO: 1888197
aagugugcccuugaaauaa

SEQ ID NO: 2517933 - RNA, 19 nt, Artificial Sequence
  Description of Artificial Sequence: Synthetic oligonucleotide
  Antisense strand to SEQ ID NO: 2517932
uuauuucaagggcacacuu

SEQ ID NO: 2517934 - RNA, 19 nt, Artificial Sequence
  Description of Artificial Sequence: Synthetic oligonucleotide
  Sense strand starting at position 167 of SEQ ID NO: 1888197
augagugaauggcugucaa

SEQ ID NO: 2517935 - RNA, 19 nt, Artificial Sequence
  Description of Artificial Sequence: Synthetic oligonucleotide
  Antisense strand to SEQ ID NO: 2517934
uugacagccauucacucau

SEQ ID NO: 2517936 - RNA, 19 nt, Artificial Sequence
  Description of Artificial Sequence: Synthetic oligonucleotide
  Sense strand starting at position 243 of SEQ ID NO: 1888197
uuauuauccuggcugacau

SEQ ID NO: 2517937 - RNA, 19 nt, Artificial Sequence
  Description of Artificial Sequence: Synthetic oligonucleotide
  Antisense strand to SEQ ID NO: 2517936
augucagccaggauaauaa

SEQ ID NO: 2517938 - RNA, 19 nt, Artificial Sequence
  Description of Artificial Sequence: Synthetic oligonucleotide
  Sense strand starting at position 310 of SEQ ID NO: 1888197
ugugacuaaccuuaaguau

SEQ ID NO: 2517939 - RNA, 19 nt, Artificial Sequence
  Description of Artificial Sequence: Synthetic oligonucleotide
  Antisense strand to SEQ ID NO: 2517938
auacuuaagguuagucaca

SEQ ID NO: 2517940 - RNA, 19 nt, Artificial Sequence
  Description of Artificial Sequence: Synthetic oligonucleotide
  Sense strand starting at position 433 of SEQ ID NO: 1888197
acaagacauugcuugguca

SEQ ID NO: 2517941 - RNA, 19 nt, Artificial Sequence
  Description of Artificial Sequence: Synthetic oligonucleotide
  Antisense strand to SEQ ID NO: 2517940
ugaccaagcaaugucuugu

SEQ ID NO: 2517942 - RNA, 19 nt, Artificial Sequence
  Description of Artificial Sequence: Synthetic oligonucleotide
  Sense strand starting at position 435 of SEQ ID NO: 1888197
aagacauugcuuggucaga

SEQ ID NO: 2517943 - RNA, 19 nt, Artificial Sequence
  Description of Artificial Sequence: Synthetic oligonucleotide
  Antisense strand to SEQ ID NO: 2517942
ucugaccaagcaaugucuu

SEQ ID NO: 2517944 - RNA, 19 nt, Artificial Sequence
  Description of Artificial Sequence: Synthetic oligonucleotide
  Sense strand starting at position 436 of SEQ ID NO: 1888197
agacauugcuuggucagaa

SEQ ID NO: 2517945 - RNA, 19 nt, Artificial Sequence
  Description of Artificial Sequence: Synthetic oligonucleotide
  Antisense strand to SEQ ID NO: 2517944
uucugaccaagcaaugucu

SEQ ID NO: 2517946 - RNA, 19 nt, Artificial Sequence
  Description of Artificial Sequence: Synthetic oligonucleotide
  Sense strand starting at position 437 of SEQ ID NO: 1888197
gacauugcuuggucagaaa

SEQ ID NO: 2517947 - RNA, 19 nt, Artificial Sequence
  Description of Artificial Sequence: Synthetic oligonucleotide
  Antisense strand to SEQ ID NO: 2517946
uuucugaccaagcaauguc

SEQ ID NO: 2517948 - RNA, 19 nt, Artificial Sequence
  Description of Artificial Sequence: Synthetic oligonucleotide
  Sense strand starting at position 478 of SEQ ID NO: 1888197
auuaaucuugcagguagga

SEQ ID NO: 2517949 - RNA, 19 nt, Artificial Sequence
  Description of Artificial Sequence: Synthetic oligonucleotide
  Antisense strand to SEQ ID NO: 2517948
uccuaccugcaagauuaau

SEQ ID NO: 2517950 - RNA, 19 nt, Artificial Sequence
  Description of Artificial Sequence: Synthetic oligonucleotide
  Sense strand starting at position 552 of SEQ ID NO: 1888197
aguaauauuuaccagucau

SEQ ID NO: 2517951 - RNA, 19 nt, Artificial Sequence
  Description of Artificial Sequence: Synthetic oligonucleotide
  Antisense strand to SEQ ID NO: 2517950
augacugguaaauauuacu

SEQ ID NO: 2517952 - RNA, 19 nt, Artificial Sequence
  Description of Artificial Sequence: Synthetic oligonucleotide
  Sense strand starting at position 879 of SEQ ID NO: 1888197
auagcauaacaauggugau

SEQ ID NO: 2517953 - RNA, 19 nt, Artificial Sequence
  Description of Artificial Sequence: Synthetic oligonucleotide
  Antisense strand to SEQ ID NO: 2517952
aucaccauuguuaugcuau

SEQ ID NO: 2517954 - RNA, 19 nt, Artificial Sequence
  Description of Artificial Sequence: Synthetic oligonucleotide
  Sense strand starting at position 1173 of SEQ ID NO: 1888197
uugcuaguugccucucagu

SEQ ID NO: 2517955 - RNA, 19 nt, Artificial Sequence
  Description of Artificial Sequence: Synthetic oligonucleotide
  Antisense strand to SEQ ID NO: 2517954
acugagaggcaacuagcaa

SEQ ID NO: 2517956 - RNA, 19 nt, Artificial Sequence
  Description of Artificial Sequence: Synthetic oligonucleotide
  Sense strand starting at position 1175 of SEQ ID NO: 1888197
gcuaguugccucucaguau

SEQ ID NO: 2517957 - RNA, 19 nt, Artificial Sequence
  Description of Artificial Sequence: Synthetic oligonucleotide
  Antisense strand to SEQ ID NO: 2517956
auacugagaggcaacuagc

SEQ ID NO: 2517958 - RNA, 19 nt, Artificial Sequence
  Description of Artificial Sequence: Synthetic oligonucleotide
  Sense strand starting at position 1204 of SEQ ID NO: 1888197
uuucuuccugaguaacaga

SEQ ID NO: 2517959 - RNA, 19 nt, Artificial Sequence
  Description of Artificial Sequence: Synthetic oligonucleotide
  Antisense strand to SEQ ID NO: 2517958
ucuguuacucaggaagaaa

SEQ ID NO: 2517960 - RNA, 19 nt, Artificial Sequence
  Description of Artificial Sequence: Synthetic oligonucleotide
  Sense strand starting at position 1332 of SEQ ID NO: 1888197
uuggguaggucuucuaaga

SEQ ID NO: 2517961 - RNA, 19 nt, Artificial Sequence
  Description of Artificial Sequence: Synthetic oligonucleotide
  Antisense strand to SEQ ID NO: 2517960
ucuuagaagaccuacccaa

SEQ ID NO: 2517962 - RNA, 19 nt, Artificial Sequence
  Description of Artificial Sequence: Synthetic oligonucleotide
  Sense strand starting at position 1556 of SEQ ID NO: 1888197
ucuuguuuacaauaggauu

SEQ ID NO: 2517963 - RNA, 19 nt, Artificial Sequence
  Description of Artificial Sequence: Synthetic oligonucleotide
  Antisense strand to SEQ ID NO: 2517962
aauccuauuguaaacaaga

SEQ ID NO: 2517964 - RNA, 19 nt, Artificial Sequence
  Description of Artificial Sequence: Synthetic oligonucleotide
  Sense strand starting at position 1818 of SEQ ID NO: 1888197
gauagcuaguaugcaugaa

SEQ ID NO: 2517965 - RNA, 19 nt, Artificial Sequence
  Description of Artificial Sequence: Synthetic oligonucleotide
  Antisense strand to SEQ ID NO: 2517964
uucaugcauacuagcuauc

SEQ ID NO: 2517966 - RNA, 19 nt, Artificial Sequence
  Description of Artificial Sequence: Synthetic oligonucleotide
  Sense strand starting at position 1822 of SEQ ID NO: 1888197
gcuaguaugcaugaacacu

SEQ ID NO: 2517967 - RNA, 19 nt, Artificial Sequence
  Description of Artificial Sequence: Synthetic oligonucleotide
  Antisense strand to SEQ ID NO: 2517966
aguguucaugcauacuagc

SEQ ID NO: 2517968 - RNA, 19 nt, Artificial Sequence
  Description of Artificial Sequence: Synthetic oligonucleotide
  Sense strand starting at position 2022 of SEQ ID NO: 1888197
acgauaacccucuggcuau

SEQ ID NO: 2517969 - RNA, 19 nt, Artificial Sequence
  Description of Artificial Sequence: Synthetic oligonucleotide
  Antisense strand to SEQ ID NO: 2517968
auagccagaggguuaucgu

SEQ ID NO: 2517970 - RNA, 19 nt, Artificial Sequence
  Description of Artificial Sequence: Synthetic oligonucleotide
  Sense strand starting at position 2064 of SEQ ID NO: 1888197
ccucgcuuguuauuuguca

SEQ ID NO: 2517971 - RNA, 19 nt, Artificial Sequence
  Description of Artificial Sequence: Synthetic oligonucleotide
  Antisense strand to SEQ ID NO: 2517970
ugacaaauaacaagcgagg

SEQ ID NO: 2517972 - RNA, 19 nt, Artificial Sequence
  Description of Artificial Sequence: Synthetic oligonucleotide
  Sense strand starting at position 2068 of SEQ ID NO: 1888197
gcuuguuauuugucaucaa

SEQ ID NO: 2517973 - RNA, 19 nt, Artificial Sequence
  Description of Artificial Sequence: Synthetic oligonucleotide
  Antisense strand to SEQ ID NO: 2517972
uugaugacaaauaacaagc

SEQ ID NO: 2517974 - RNA, 19 nt, Artificial Sequence
  Description of Artificial Sequence: Synthetic oligonucleotide
  Sense strand starting at position 2128 of SEQ ID NO: 1888197
aggguuagccucuagaguu

SEQ ID NO: 2517975 - RNA, 19 nt, Artificial Sequence
  Description of Artificial Sequence: Synthetic oligonucleotide
  Antisense strand to SEQ ID NO: 2517974
aacucuagaggcuaacccu

SEQ ID NO: 2517976 - RNA, 19 nt, Artificial Sequence
  Description of Artificial Sequence: Synthetic oligonucleotide
  Sense strand starting at position 2458 of SEQ ID NO: 1888197
ugugccuauuucucugauu

SEQ ID NO: 2517977 - RNA, 19 nt, Artificial Sequence
  Description of Artificial Sequence: Synthetic oligonucleotide
  Antisense strand to SEQ ID NO: 2517976
aaucagagaaauaggcaca

SEQ ID NO: 2517978 - RNA, 19 nt, Artificial Sequence
  Description of Artificial Sequence: Synthetic oligonucleotide
  Sense strand starting at position 2570 of SEQ ID NO: 1888197
cuacuccaagcaugagaau

SEQ ID NO: 2517979 - RNA, 19 nt, Artificial Sequence
  Description of Artificial Sequence: Synthetic oligonucleotide
  Antisense strand to SEQ ID NO: 2517978
auucucaugcuuggaguag

SEQ ID NO: 2517980 - RNA, 19 nt, Artificial Sequence
  Description of Artificial Sequence: Synthetic oligonucleotide
  Sense strand starting at position 2949 of SEQ ID NO: 1888197
aaaucaggauuaguguuaa

SEQ ID NO: 2517981 - RNA, 19 nt, Artificial Sequence
  Description of Artificial Sequence: Synthetic oligonucleotide
  Antisense strand to SEQ ID NO: 2517980
uuaacacuaauccugauuu

SEQ ID NO: 2517982 - RNA, 19 nt, Artificial Sequence
  Description of Artificial Sequence: Synthetic oligonucleotide
  Sense strand starting at position 2976 of SEQ ID NO: 1888197
uguuguguucauguguaug

SEQ ID NO: 2517983 - RNA, 19 nt, Artificial Sequence
  Description of Artificial Sequence: Synthetic oligonucleotide
  Antisense strand to SEQ ID NO: 2517982
cauacacaugaacacaaca

SEQ ID NO: 2517984 - RNA, 19 nt, Artificial Sequence
  Description of Artificial Sequence: Synthetic oligonucleotide
  Sense strand starting at position 3018 of SEQ ID NO: 1888197
cgguguauuuguguuugaa

SEQ ID NO: 2517985 - RNA, 19 nt, Artificial Sequence
  Description of Artificial Sequence: Synthetic oligonucleotide
  Antisense strand to SEQ ID NO: 2517984
uucaaacacaaauacaccg

SEQ ID NO: 2517986 - RNA, 19 nt, Artificial Sequence
  Description of Artificial Sequence: Synthetic oligonucleotide
  Sense strand starting at position 3020 of SEQ ID NO: 1888197
guguauuuguguuugaauu

SEQ ID NO: 2517987 - RNA, 19 nt, Artificial Sequence
  Description of Artificial Sequence: Synthetic oligonucleotide
  Antisense strand to SEQ ID NO: 2517986
aauucaaacacaaauacac

SEQ ID NO: 2517988 - RNA, 19 nt, Artificial Sequence
  Description of Artificial Sequence: Synthetic oligonucleotide
  Sense strand starting at position 3219 of SEQ ID NO: 1888197
aggaaucagugaucuauac

SEQ ID NO: 2517989 - RNA, 19 nt, Artificial Sequence
  Description of Artificial Sequence: Synthetic oligonucleotide
  Antisense strand to SEQ ID NO: 2517988
guauagaucacugauuccu

SEQ ID NO: 2517990 - RNA, 19 nt, Artificial Sequence
  Description of Artificial Sequence: Synthetic oligonucleotide
  Sense strand starting at position 3294 of SEQ ID NO: 1888197
acuguaauugcggaaagga

SEQ ID NO: 2517991 - RNA, 19 nt, Artificial Sequence
  Description of Artificial Sequence: Synthetic oligonucleotide
  Antisense strand to SEQ ID NO: 2517990
uccuuuccgcaauuacagu

SEQ ID NO: 2517992 - RNA, 19 nt, Artificial Sequence
  Description of Artificial Sequence: Synthetic oligonucleotide
  Sense strand starting at position 3352 of SEQ ID NO: 1888197
agcacacuguuuccauaga

SEQ ID NO: 2517993 - RNA, 19 nt, Artificial Sequence
  Description of Artificial Sequence: Synthetic oligonucleotide
  Antisense strand to SEQ ID NO: 2517992
ucuauggaaacagugugcu

SEQ ID NO: 2517994 - RNA, 19 nt, Artificial Sequence
  Description of Artificial Sequence: Synthetic oligonucleotide
  Sense strand starting at position 3404 of SEQ ID NO: 1888197
ggagauucgucuccagcag

SEQ ID NO: 2517995 - RNA, 19 nt, Artificial Sequence
  Description of Artificial Sequence: Synthetic oligonucleotide
  Antisense strand to SEQ ID NO: 2517994
cugcuggagacgaaucucc

SEQ ID NO: 2517996 - RNA, 19 nt, Artificial Sequence
  Description of Artificial Sequence: Synthetic oligonucleotide
  Sense strand starting at position 3505 of SEQ ID NO: 1888197
cccacagagcuuggcuaaa

SEQ ID NO: 2517997 - RNA, 19 nt, Artificial Sequence
  Description of Artificial Sequence: Synthetic oligonucleotide
  Antisense strand to SEQ ID NO: 2517996
uuuagccaagcucuguggg

SEQ ID NO: 2517998 - RNA, 19 nt, Artificial Sequence
  Description of Artificial Sequence: Synthetic oligonucleotide
  Sense strand starting at position 3525 of SEQ ID NO: 1888197
ucaugucuacuguaaauca

SEQ ID NO: 2517999 - RNA, 19 nt, Artificial Sequence
  Description of Artificial Sequence: Synthetic oligonucleotide
  Antisense strand to SEQ ID NO: 2517998
ugauuuacaguagacauga

SEQ ID NO: 2518000 - RNA, 19 nt, Artificial Sequence
  Description of Artificial Sequence: Synthetic oligonucleotide
  Sense strand starting at position 3569 of SEQ ID NO: 1888197
ccagcuucuccagagguaa

SEQ ID NO: 2518001 - RNA, 19 nt, Artificial Sequence
  Description of Artificial Sequence: Synthetic oligonucleotide
  Antisense strand to SEQ ID NO: 2518000
uuaccucuggagaagcugg

SEQ ID NO: 2518002 - RNA, 19 nt, Artificial Sequence
  Description of Artificial Sequence: Synthetic oligonucleotide
  Sense strand starting at position 3835 of SEQ ID NO: 1888197
acaagcauuugacaacagu

SEQ ID NO: 2518003 - RNA, 19 nt, Artificial Sequence
  Description of Artificial Sequence: Synthetic oligonucleotide
  Antisense strand to SEQ ID NO: 2518002
acuguugucaaaugcuugu

SEQ ID NO: 2518004 - RNA, 19 nt, Artificial Sequence
  Description of Artificial Sequence: Synthetic oligonucleotide
  Sense strand starting at position 303 of SEQ ID NO: 1888198
agcugagaguuucucauaa

SEQ ID NO: 2518005 - RNA, 19 nt, Artificial Sequence
  Description of Artificial Sequence: Synthetic oligonucleotide
  Antisense strand to SEQ ID NO: 2518004
uuaugagaaacucucagcu

SEQ ID NO: 2518006 - RNA, 19 nt, Artificial Sequence
  Description of Artificial Sequence: Synthetic oligonucleotide
  Sense strand starting at position 305 of SEQ ID NO: 1888198
cugagaguuucucauaaau

SEQ ID NO: 2518007 - RNA, 19 nt, Artificial Sequence
  Description of Artificial Sequence: Synthetic oligonucleotide
  Antisense strand to SEQ ID NO: 2518006
auuuaugagaaacucucag

SEQ ID NO: 2518008 - RNA, 19 nt, Artificial Sequence
  Description of Artificial Sequence: Synthetic oligonucleotide
  Sense strand starting at position 350 of SEQ ID NO: 1888198
uccugaaauuaucguauga

SEQ ID NO: 2518009 - RNA, 19 nt, Artificial Sequence
  Description of Artificial Sequence: Synthetic oligonucleotide
  Antisense strand to SEQ ID NO: 2518008
ucauacgauaauuucagga

SEQ ID NO: 2518010 - RNA, 19 nt, Artificial Sequence
  Description of Artificial Sequence: Synthetic oligonucleotide
  Sense strand starting at position 352 of SEQ ID NO: 1888198
cugaaauuaucguaugauu

SEQ ID NO: 2518011 - RNA, 19 nt, Artificial Sequence
  Description of Artificial Sequence: Synthetic oligonucleotide
  Antisense strand to SEQ ID NO: 2518010
aaucauacgauaauuucag

SEQ ID NO: 2518012 - RNA, 19 nt, Artificial Sequence
  Description of Artificial Sequence: Synthetic oligonucleotide
  Sense strand starting at position 715 of SEQ ID NO: 1888198
acuuauaaguuugaugaac

SEQ ID NO: 2518013 - RNA, 19 nt, Artificial Sequence
  Description of Artificial Sequence: Synthetic oligonucleotide
  Antisense strand to SEQ ID NO: 2518012
guucaucaaacuuauaagu

SEQ ID NO: 2518014 - RNA, 19 nt, Artificial Sequence
  Description of Artificial Sequence: Synthetic oligonucleotide
  Sense strand starting at position 717 of SEQ ID NO: 1888198
uuauaaguuugaugaaccu

SEQ ID NO: 2518015 - RNA, 19 nt, Artificial Sequence
  Description of Artificial Sequence: Synthetic oligonucleotide
  Antisense strand to SEQ ID NO: 2518014
agguucaucaaacuuauaa

SEQ ID NO: 2518016 - RNA, 19 nt, Artificial Sequence
  Description of Artificial Sequence: Synthetic oligonucleotide
  Sense strand starting at position 724 of SEQ ID NO: 1888198
uuugaugaaccuuaccagu

SEQ ID NO: 2518017 - RNA, 19 nt, Artificial Sequence
  Description of Artificial Sequence: Synthetic oligonucleotide
  Antisense strand to SEQ ID NO: 2518016
acugguaagguucaucaaa

SEQ ID NO: 2518018 - RNA, 19 nt, Artificial Sequence
  Description of Artificial Sequence: Synthetic oligonucleotide
  Sense strand starting at position 726 of SEQ ID NO: 1888198
ugaugaaccuuaccaguga

SEQ ID NO: 2518019 - RNA, 19 nt, Artificial Sequence
  Description of Artificial Sequence: Synthetic oligonucleotide
  Antisense strand to SEQ ID NO: 2518018
ucacugguaagguucauca

SEQ ID NO: 2518020 - RNA, 19 nt, Artificial Sequence
  Description of Artificial Sequence: Synthetic oligonucleotide
  Sense strand starting at position 1118 of SEQ ID NO: 1888198
uagggauauuuagacuuac

SEQ ID NO: 2518021 - RNA, 19 nt, Artificial Sequence
  Description of Artificial Sequence: Synthetic oligonucleotide
  Antisense strand to SEQ ID NO: 2518020
guaagucuaaauaucccua

SEQ ID NO: 2518022 - RNA, 19 nt, Artificial Sequence
  Description of Artificial Sequence: Synthetic oligonucleotide
  Sense strand starting at position 1199 of SEQ ID NO: 1888198
auguuaaaguuauuggcau

SEQ ID NO: 2518023 - RNA, 19 nt, Artificial Sequence
  Description of Artificial Sequence: Synthetic oligonucleotide
  Antisense strand to SEQ ID NO: 2518022
augccaauaacuuuaacau

SEQ ID NO: 2518024 - RNA, 19 nt, Artificial Sequence
  Description of Artificial Sequence: Synthetic oligonucleotide
  Sense strand starting at position 1286 of SEQ ID NO: 1888198
agguuuaauuacuaagggu

SEQ ID NO: 2518025 - RNA, 19 nt, Artificial Sequence
  Description of Artificial Sequence: Synthetic oligonucleotide
  Antisense strand to SEQ ID NO: 2518024
acccuuaguaauuaaaccu

SEQ ID NO: 2518026 - RNA, 19 nt, Artificial Sequence
  Description of Artificial Sequence: Synthetic oligonucleotide
  Sense strand starting at position 1293 of SEQ ID NO: 1888198
auuacuaaggguuguuaau

SEQ ID NO: 2518027 - RNA, 19 nt, Artificial Sequence
  Description of Artificial Sequence: Synthetic oligonucleotide
  Antisense strand to SEQ ID NO: 2518026
auuaacaacccuuaguaau

SEQ ID NO: 2518028 - RNA, 19 nt, Artificial Sequence
  Description of Artificial Sequence: Synthetic oligonucleotide
  Sense strand starting at position 1295 of SEQ ID NO: 1888198
uacuaaggguuguuaauau

SEQ ID NO: 2518029 - RNA, 19 nt, Artificial Sequence
  Description of Artificial Sequence: Synthetic oligonucleotide
  Antisense strand to SEQ ID NO: 2518028
auauuaacaacccuuagua

SEQ ID NO: 2518030 - RNA, 19 nt, Artificial Sequence
  Description of Artificial Sequence: Synthetic oligonucleotide
  Sense strand starting at position 1409 of SEQ ID NO: 1888198
guacuuacuuuagguuuaa

SEQ ID NO: 2518031 - RNA, 19 nt, Artificial Sequence
  Description of Artificial Sequence: Synthetic oligonucleotide
  Antisense strand to SEQ ID NO: 2518030
uuaaaccuaaaguaaguac

SEQ ID NO: 2518032 - RNA, 19 nt, Artificial Sequence
  Description of Artificial Sequence: Synthetic oligonucleotide
  Sense strand starting at position 1439 of SEQ ID NO: 1888198
uuucuagcaucugaaugua

SEQ ID NO: 2518033 - RNA, 19 nt, Artificial Sequence
  Description of Artificial Sequence: Synthetic oligonucleotide
  Antisense strand to SEQ ID NO: 2518032
uacauucagaugcuagaaa

SEQ ID NO: 2518034 - RNA, 19 nt, Artificial Sequence
  Description of Artificial Sequence: Synthetic oligonucleotide
  Sense strand starting at position 1514 of SEQ ID NO: 1888198
aaaguuucccgcugaagac

SEQ ID NO: 2518035 - RNA, 19 nt, Artificial Sequence
  Description of Artificial Sequence: Synthetic oligonucleotide
  Antisense strand to SEQ ID NO: 2518034
gucuucagcgggaaacuuu

SEQ ID NO: 2518036 - RNA, 19 nt, Artificial Sequence
  Description of Artificial Sequence: Synthetic oligonucleotide
  Sense strand starting at position 1515 of SEQ ID NO: 1888198
aaguuucccgcugaagacu

SEQ ID NO: 2518037 - RNA, 19 nt, Artificial Sequence
  Description of Artificial Sequence: Synthetic oligonucleotide
  Antisense strand to SEQ ID NO: 2518036
agucuucagcgggaaacuu

SEQ ID NO: 2518038 - RNA, 19 nt, Artificial Sequence
  Description of Artificial Sequence: Synthetic oligonucleotide
  Sense strand starting at position 1524 of SEQ ID NO: 1888198
gcugaagacuacuuuaguu

SEQ ID NO: 2518039 - RNA, 19 nt, Artificial Sequence
  Description of Artificial Sequence: Synthetic oligonucleotide
  Antisense strand to SEQ ID NO: 2518038
aacuaaaguagucuucagc

SEQ ID NO: 2518040 - RNA, 19 nt, Artificial Sequence
  Description of Artificial Sequence: Synthetic oligonucleotide
  Sense strand starting at position 1553 of SEQ ID NO: 1888198
aauugugauaugugguguu

SEQ ID NO: 2518041 - RNA, 19 nt, Artificial Sequence
  Description of Artificial Sequence: Synthetic oligonucleotide
  Antisense strand to SEQ ID NO: 2518040
aacaccacauaucacaauu

SEQ ID NO: 2518042 - RNA, 19 nt, Artificial Sequence
  Description of Artificial Sequence: Synthetic oligonucleotide
  Sense strand starting at position 1631 of SEQ ID NO: 1888198
augguaaugauguggugua

SEQ ID NO: 2518043 - RNA, 19 nt, Artificial Sequence
  Description of Artificial Sequence: Synthetic oligonucleotide
  Antisense strand to SEQ ID NO: 2518042
uacaccacaucauuaccau

SEQ ID NO: 2518044 - RNA, 19 nt, Artificial Sequence
  Description of Artificial Sequence: Synthetic oligonucleotide
  Sense strand starting at position 1647 of SEQ ID NO: 1888198
guaaguccugcuggacuau

SEQ ID NO: 2518045 - RNA, 19 nt, Artificial Sequence
  Description of Artificial Sequence: Synthetic oligonucleotide
  Antisense strand to SEQ ID NO: 2518044
auaguccagcaggacuuac

SEQ ID NO: 2518046 - RNA, 19 nt, Artificial Sequence
  Description of Artificial Sequence: Synthetic oligonucleotide
  Sense strand starting at position 1827 of SEQ ID NO: 1888198
auaccaaauuggccugauu

SEQ ID NO: 2518047 - RNA, 19 nt, Artificial Sequence
  Description of Artificial Sequence: Synthetic oligonucleotide
  Antisense strand to SEQ ID NO: 2518046
aaucaggccaauuugguau

SEQ ID NO: 2518048 - RNA, 19 nt, Artificial Sequence
  Description of Artificial Sequence: Synthetic oligonucleotide
  Sense strand starting at position 1871 of SEQ ID NO: 1888198
aguuguuaauguguagaag

SEQ ID NO: 2518049 - RNA, 19 nt, Artificial Sequence
  Description of Artificial Sequence: Synthetic oligonucleotide
  Antisense strand to SEQ ID NO: 2518048
cuucuacacauuaacaacu

SEQ ID NO: 2518050 - RNA, 19 nt, Artificial Sequence
  Description of Artificial Sequence: Synthetic oligonucleotide
  Sense strand starting at position 1872 of SEQ ID NO: 1888198
guuguuaauguguagaagu

SEQ ID NO: 2518051 - RNA, 19 nt, Artificial Sequence
  Description of Artificial Sequence: Synthetic oligonucleotide
  Antisense strand to SEQ ID NO: 2518050
acuucuacacauuaacaac

SEQ ID NO: 2518052 - RNA, 19 nt, Artificial Sequence
  Description of Artificial Sequence: Synthetic oligonucleotide
  Sense strand starting at position 1874 of SEQ ID NO: 1888198
uguuaauguguagaaguau

SEQ ID NO: 2518053 - RNA, 19 nt, Artificial Sequence
  Description of Artificial Sequence: Synthetic oligonucleotide
  Antisense strand to SEQ ID NO: 2518052
auacuucuacacauuaaca

SEQ ID NO: 2518054 - RNA, 19 nt, Artificial Sequence
  Description of Artificial Sequence: Synthetic oligonucleotide
  Sense strand starting at position 2049 of SEQ ID NO: 1888198
uugacuaaguaggauuuau

SEQ ID NO: 2518055 - RNA, 19 nt, Artificial Sequence
  Description of Artificial Sequence: Synthetic oligonucleotide
  Antisense strand to SEQ ID NO: 2518054
auaaauccuacuuagucaa

SEQ ID NO: 2518056 - RNA, 19 nt, Artificial Sequence
  Description of Artificial Sequence: Synthetic oligonucleotide
  Sense strand starting at position 2327 of SEQ ID NO: 1888198
ucuuuaagaugaggaacaa

SEQ ID NO: 2518057 - RNA, 19 nt, Artificial Sequence
  Description of Artificial Sequence: Synthetic oligonucleotide
  Antisense strand to SEQ ID NO: 2518056
uuguuccucaucuuaaaga

SEQ ID NO: 2518058 - RNA, 19 nt, Artificial Sequence
  Description of Artificial Sequence: Synthetic oligonucleotide
  Sense strand starting at position 2368 of SEQ ID NO: 1888198
acuuguagucaacauagua

SEQ ID NO: 2518059 - RNA, 19 nt, Artificial Sequence
  Description of Artificial Sequence: Synthetic oligonucleotide
  Antisense strand to SEQ ID NO: 2518058
uacuauguugacuacaagu

SEQ ID NO: 2518060 - RNA, 19 nt, Artificial Sequence
  Description of Artificial Sequence: Synthetic oligonucleotide
  Sense strand starting at position 2392 of SEQ ID NO: 1888198
aagcucuagccagaggaau

SEQ ID NO: 2518061 - RNA, 19 nt, Artificial Sequence
  Description of Artificial Sequence: Synthetic oligonucleotide
  Antisense strand to SEQ ID NO: 2518060
auuccucuggcuagagcuu

SEQ ID NO: 2518062 - RNA, 19 nt, Artificial Sequence
  Description of Artificial Sequence: Synthetic oligonucleotide
  Sense strand starting at position 2394 of SEQ ID NO: 1888198
gcucuagccagaggaauua

SEQ ID NO: 2518063 - RNA, 19 nt, Artificial Sequence
  Description of Artificial Sequence: Synthetic oligonucleotide
  Antisense strand to SEQ ID NO: 2518062
uaauuccucuggcuagagc

SEQ ID NO: 2518064 - RNA, 19 nt, Artificial Sequence
  Description of Artificial Sequence: Synthetic oligonucleotide
  Sense strand starting at position 2532 of SEQ ID NO: 1888198
cugccagaguaagugaauu

SEQ ID NO: 2518065 - RNA, 19 nt, Artificial Sequence
  Description of Artificial Sequence: Synthetic oligonucleotide
  Antisense strand to SEQ ID NO: 2518064
aauucacuuacucuggcag

SEQ ID NO: 2518066 - RNA, 19 nt, Artificial Sequence
  Description of Artificial Sequence: Synthetic oligonucleotide
  Sense strand starting at position 2828 of SEQ ID NO: 1888198
gauauugaaucuguauuga

SEQ ID NO: 2518067 - RNA, 19 nt, Artificial Sequence
  Description of Artificial Sequence: Synthetic oligonucleotide
  Antisense strand to SEQ ID NO: 2518066
ucaauacagauucaauauc

SEQ ID NO: 2518068 - RNA, 19 nt, Artificial Sequence
  Description of Artificial Sequence: Synthetic oligonucleotide
  Sense strand starting at position 2832 of SEQ ID NO: 1888198
uugaaucuguauugaucaa

SEQ ID NO: 2518069 - RNA, 19 nt, Artificial Sequence
  Description of Artificial Sequence: Synthetic oligonucleotide
  Antisense strand to SEQ ID NO: 2518068
uugaucaauacagauucaa

SEQ ID NO: 2518070 - RNA, 19 nt, Artificial Sequence
  Description of Artificial Sequence: Synthetic oligonucleotide
  Sense strand starting at position 3043 of SEQ ID NO: 1888198
aaagcuauagcgugguauu

SEQ ID NO: 2518071 - RNA, 19 nt, Artificial Sequence
  Description of Artificial Sequence: Synthetic oligonucleotide
  Antisense strand to SEQ ID NO: 2518070
aauaccacgcuauagcuuu

SEQ ID NO: 2518072 - RNA, 19 nt, Artificial Sequence
  Description of Artificial Sequence: Synthetic oligonucleotide
  Sense strand starting at position 3050 of SEQ ID NO: 1888198
uagcgugguauuggcaaau

SEQ ID NO: 2518073 - RNA, 19 nt, Artificial Sequence
  Description of Artificial Sequence: Synthetic oligonucleotide
  Antisense strand to SEQ ID NO: 2518072
auuugccaauaccacgcua

SEQ ID NO: 2518074 - RNA, 19 nt, Artificial Sequence
  Description of Artificial Sequence: Synthetic oligonucleotide
  Sense strand starting at position 3181 of SEQ ID NO: 1888198
aacaaauggugcuugggaa

SEQ ID NO: 2518075 - RNA, 19 nt, Artificial Sequence
  Description of Artificial Sequence: Synthetic oligonucleotide
  Antisense strand to SEQ ID NO: 2518074
uucccaagcaccauuuguu

SEQ ID NO: 2518076 - RNA, 19 nt, Artificial Sequence
  Description of Artificial Sequence: Synthetic oligonucleotide
  Sense strand starting at position 3182 of SEQ ID NO: 1888198
acaaauggugcuugggaaa

SEQ ID NO: 2518077 - RNA, 19 nt, Artificial Sequence
  Description of Artificial Sequence: Synthetic oligonucleotide
  Antisense strand to SEQ ID NO: 2518076
uuucccaagcaccauuugu

SEQ ID NO: 2518078 - RNA, 19 nt, Artificial Sequence
  Description of Artificial Sequence: Synthetic oligonucleotide
  Sense strand starting at position 3458 of SEQ ID NO: 1888198
cguguuggugcguagcuaa

SEQ ID NO: 2518079 - RNA, 19 nt, Artificial Sequence
  Description of Artificial Sequence: Synthetic oligonucleotide
  Antisense strand to SEQ ID NO: 2518078
uuagcuacgcaccaacacg

SEQ ID NO: 2518080 - RNA, 19 nt, Artificial Sequence
  Description of Artificial Sequence: Synthetic oligonucleotide
  Sense strand starting at position 3616 of SEQ ID NO: 1888198
agggcaaagcuuuaugaca

SEQ ID NO: 2518081 - RNA, 19 nt, Artificial Sequence
  Description of Artificial Sequence: Synthetic oligonucleotide
  Antisense strand to SEQ ID NO: 2518080
ugucauaaagcuuugcccu

SEQ ID NO: 2518082 - RNA, 19 nt, Artificial Sequence
  Description of Artificial Sequence: Synthetic oligonucleotide
  Sense strand starting at position 3618 of SEQ ID NO: 1888198
ggcaaagcuuuaugacacu

SEQ ID NO: 2518083 - RNA, 19 nt, Artificial Sequence
  Description of Artificial Sequence: Synthetic oligonucleotide
  Antisense strand to SEQ ID NO: 2518082
agugucauaaagcuuugcc

SEQ ID NO: 2518084 - RNA, 19 nt, Artificial Sequence
  Description of Artificial Sequence: Synthetic oligonucleotide
  Sense strand starting at position 29 of SEQ ID NO: 1888199
gcccuuagaaucugcgaga

SEQ ID NO: 2518085 - RNA, 19 nt, Artificial Sequence
  Description of Artificial Sequence: Synthetic oligonucleotide
  Antisense strand to SEQ ID NO: 2518084
ucucgcagauucuaagggc

SEQ ID NO: 2518086 - RNA, 19 nt, Artificial Sequence
  Description of Artificial Sequence: Synthetic oligonucleotide
  Sense strand starting at position 189 of SEQ ID NO: 1888199
gaguguucgcugucuucuu

SEQ ID NO: 2518087 - RNA, 19 nt, Artificial Sequence
  Description of Artificial Sequence: Synthetic oligonucleotide
  Antisense strand to SEQ ID NO: 2518086
aagaagacagcgaacacuc

SEQ ID NO: 2518088 - RNA, 19 nt, Artificial Sequence
  Description of Artificial Sequence: Synthetic oligonucleotide
  Sense strand starting at position 203 of SEQ ID NO: 1888199
uucuuagaccuuugggaua

SEQ ID NO: 2518089 - RNA, 19 nt, Artificial Sequence
  Description of Artificial Sequence: Synthetic oligonucleotide
  Antisense strand to SEQ ID NO: 2518088
uaucccaaaggucuaagaa

SEQ ID NO: 2518090 - RNA, 19 nt, Artificial Sequence
  Description of Artificial Sequence: Synthetic oligonucleotide
  Sense strand starting at position 206 of SEQ ID NO: 1888199
uuagaccuuugggauagaa

SEQ ID NO: 2518091 - RNA, 19 nt, Artificial Sequence
  Description of Artificial Sequence: Synthetic oligonucleotide
  Antisense strand to SEQ ID NO: 2518090
uucuaucccaaaggucuaa

SEQ ID NO: 2518092 - RNA, 19 nt, Artificial Sequence
  Description of Artificial Sequence: Synthetic oligonucleotide
  Sense strand starting at position 485 of SEQ ID NO: 1888199
uggacaagcucugcucaga

SEQ ID NO: 2518093 - RNA, 19 nt, Artificial Sequence
  Description of Artificial Sequence: Synthetic oligonucleotide
  Antisense strand to SEQ ID NO: 2518092
ucugagcagagcuugucca

SEQ ID NO: 2518094 - RNA, 19 nt, Artificial Sequence
  Description of Artificial Sequence: Synthetic oligonucleotide
  Sense strand starting at position 564 of SEQ ID NO: 1888199
ggcugaugagcacaaaucu

SEQ ID NO: 2518095 - RNA, 19 nt, Artificial Sequence
  Description of Artificial Sequence: Synthetic oligonucleotide
  Antisense strand to SEQ ID NO: 2518094
agauuugugcucaucagcc

SEQ ID NO: 2518096 - RNA, 19 nt, Artificial Sequence
  Description of Artificial Sequence: Synthetic oligonucleotide
  Sense strand starting at position 1338 of SEQ ID NO: 1888199
cuaggaucucgucaauaaa

SEQ ID NO: 2518097 - RNA, 19 nt, Artificial Sequence
  Description of Artificial Sequence: Synthetic oligonucleotide
  Antisense strand to SEQ ID NO: 2518096
uuuauugacgagauccuag

SEQ ID NO: 2518098 - RNA, 19 nt, Artificial Sequence
  Description of Artificial Sequence: Synthetic oligonucleotide
  Sense strand starting at position 1341 of SEQ ID NO: 1888199
ggaucucgucaauaaacug

SEQ ID NO: 2518099 - RNA, 19 nt, Artificial Sequence
  Description of Artificial Sequence: Synthetic oligonucleotide
  Antisense strand to SEQ ID NO: 2518098
caguuuauugacgagaucc

SEQ ID NO: 2518100 - RNA, 19 nt, Artificial Sequence
  Description of Artificial Sequence: Synthetic oligonucleotide
  Sense strand starting at position 1349 of SEQ ID NO: 1888199
ucaauaaacugcuaagaag

SEQ ID NO: 2518101 - RNA, 19 nt, Artificial Sequence
  Description of Artificial Sequence: Synthetic oligonucleotide
  Antisense strand to SEQ ID NO: 2518100
cuucuuagcaguuuauuga

SEQ ID NO: 2518102 - RNA, 19 nt, Artificial Sequence
  Description of Artificial Sequence: Synthetic oligonucleotide
  Sense strand starting at position 1401 of SEQ ID NO: 1888199
gaacgcaauugcuuuaaag

SEQ ID NO: 2518103 - RNA, 19 nt, Artificial Sequence
  Description of Artificial Sequence: Synthetic oligonucleotide
  Antisense strand to SEQ ID NO: 2518102
cuuuaaagcaauugcguuc

SEQ ID NO: 2518104 - RNA, 19 nt, Artificial Sequence
  Description of Artificial Sequence: Synthetic oligonucleotide
  Sense strand starting at position 1403 of SEQ ID NO: 1888199
acgcaauugcuuuaaagaa

SEQ ID NO: 2518105 - RNA, 19 nt, Artificial Sequence
  Description of Artificial Sequence: Synthetic oligonucleotide
  Antisense strand to SEQ ID NO: 2518104
uucuuuaaagcaauugcgu

SEQ ID NO: 2518106 - RNA, 19 nt, Artificial Sequence
  Description of Artificial Sequence: Synthetic oligonucleotide
  Sense strand starting at position 1460 of SEQ ID NO: 1888199
aaaccauguccugagaugu

SEQ ID NO: 2518107 - RNA, 19 nt, Artificial Sequence
  Description of Artificial Sequence: Synthetic oligonucleotide
  Antisense strand to SEQ ID NO: 2518106
acaucucaggacaugguuu

SEQ ID NO: 2518108 - RNA, 19 nt, Artificial Sequence
  Description of Artificial Sequence: Synthetic oligonucleotide
  Sense strand starting at position 1468 of SEQ ID NO: 1888199
uccugagaugucuguguua

SEQ ID NO: 2518109 - RNA, 19 nt, Artificial Sequence
  Description of Artificial Sequence: Synthetic oligonucleotide
  Antisense strand to SEQ ID NO: 2518108
uaacacagacaucucagga

SEQ ID NO: 2518110 - RNA, 19 nt, Artificial Sequence
  Description of Artificial Sequence: Synthetic oligonucleotide
  Sense strand starting at position 1470 of SEQ ID NO: 1888199
cugagaugucuguguuaau

SEQ ID NO: 2518111 - RNA, 19 nt, Artificial Sequence
  Description of Artificial Sequence: Synthetic oligonucleotide
  Antisense strand to SEQ ID NO: 2518110
auuaacacagacaucucag

SEQ ID NO: 2518112 - RNA, 19 nt, Artificial Sequence
  Description of Artificial Sequence: Synthetic oligonucleotide
  Sense strand starting at position 1471 of SEQ ID NO: 1888199
ugagaugucuguguuaaua

SEQ ID NO: 2518113 - RNA, 19 nt, Artificial Sequence
  Description of Artificial Sequence: Synthetic oligonucleotide
  Antisense strand to SEQ ID NO: 2518112
uauuaacacagacaucuca

SEQ ID NO: 2518114 - RNA, 19 nt, Artificial Sequence
  Description of Artificial Sequence: Synthetic oligonucleotide
  Sense strand starting at position 1481 of SEQ ID NO: 1888199
guguuaauagugcagagag

SEQ ID NO: 2518115 - RNA, 19 nt, Artificial Sequence
  Description of Artificial Sequence: Synthetic oligonucleotide
  Antisense strand to SEQ ID NO: 2518114
cucucugcacuauuaacac

SEQ ID NO: 2518116 - RNA, 19 nt, Artificial Sequence
  Description of Artificial Sequence: Synthetic oligonucleotide
  Sense strand starting at position 1522 of SEQ ID NO: 1888199
uagcaauggcauuggagaa

SEQ ID NO: 2518117 - RNA, 19 nt, Artificial Sequence
  Description of Artificial Sequence: Synthetic oligonucleotide
  Antisense strand to SEQ ID NO: 2518116
uucuccaaugccauugcua

SEQ ID NO: 2518118 - RNA, 19 nt, Artificial Sequence
  Description of Artificial Sequence: Synthetic oligonucleotide
  Sense strand starting at position 1546 of SEQ ID NO: 1888199
acuugaacauucucaucga

SEQ ID NO: 2518119 - RNA, 19 nt, Artificial Sequence
  Description of Artificial Sequence: Synthetic oligonucleotide
  Antisense strand to SEQ ID NO: 2518118
ucgaugagaauguucaagu

SEQ ID NO: 2518120 - RNA, 19 nt, Artificial Sequence
  Description of Artificial Sequence: Synthetic oligonucleotide
  Sense strand starting at position 1549 of SEQ ID NO: 1888199
ugaacauucucaucgauac

SEQ ID NO: 2518121 - RNA, 19 nt, Artificial Sequence
  Description of Artificial Sequence: Synthetic oligonucleotide
  Antisense strand to SEQ ID NO: 2518120
guaucgaugagaauguuca

SEQ ID NO: 2518122 - RNA, 19 nt, Artificial Sequence
  Description of Artificial Sequence: Synthetic oligonucleotide
  Sense strand starting at position 1559 of SEQ ID NO: 1888199
caucgauacuuccuggaca

SEQ ID NO: 2518123 - RNA, 19 nt, Artificial Sequence
  Description of Artificial Sequence: Synthetic oligonucleotide
  Antisense strand to SEQ ID NO: 2518122
uguccaggaaguaucgaug

SEQ ID NO: 2518124 - RNA, 19 nt, Artificial Sequence
  Description of Artificial Sequence: Synthetic oligonucleotide
  Sense strand starting at position 1561 of SEQ ID NO: 1888199
ucgauacuuccuggacaua

SEQ ID NO: 2518125 - RNA, 19 nt, Artificial Sequence
  Description of Artificial Sequence: Synthetic oligonucleotide
  Antisense strand to SEQ ID NO: 2518124
uauguccaggaaguaucga

SEQ ID NO: 2518126 - RNA, 19 nt, Artificial Sequence
  Description of Artificial Sequence: Synthetic oligonucleotide
  Sense strand starting at position 1562 of SEQ ID NO: 1888199
cgauacuuccuggacauau

SEQ ID NO: 2518127 - RNA, 19 nt, Artificial Sequence
  Description of Artificial Sequence: Synthetic oligonucleotide
  Antisense strand to SEQ ID NO: 2518126
auauguccaggaaguaucg

SEQ ID NO: 2518128 - RNA, 19 nt, Artificial Sequence
  Description of Artificial Sequence: Synthetic oligonucleotide
  Sense strand starting at position 1887 of SEQ ID NO: 1888199
ccaucugauuucuggcaaa

SEQ ID NO: 2518129 - RNA, 19 nt, Artificial Sequence
  Description of Artificial Sequence: Synthetic oligonucleotide
  Antisense strand to SEQ ID NO: 2518128
uuugccagaaaucagaugg

SEQ ID NO: 2518130 - RNA, 19 nt, Artificial Sequence
  Description of Artificial Sequence: Synthetic oligonucleotide
  Sense strand starting at position 2078 of SEQ ID NO: 1888199
gcaucagguucucuuagga

SEQ ID NO: 2518131 - RNA, 19 nt, Artificial Sequence
  Description of Artificial Sequence: Synthetic oligonucleotide
  Antisense strand to SEQ ID NO: 2518130
uccuaagagaaccugaugc

SEQ ID NO: 2518132 - RNA, 19 nt, Artificial Sequence
  Description of Artificial Sequence: Synthetic oligonucleotide
  Sense strand starting at position 2111 of SEQ ID NO: 1888199
gugaacugaaugugugcaa

SEQ ID NO: 2518133 - RNA, 19 nt, Artificial Sequence
  Description of Artificial Sequence: Synthetic oligonucleotide
  Antisense strand to SEQ ID NO: 2518132
uugcacacauucaguucac

SEQ ID NO: 2518134 - RNA, 19 nt, Artificial Sequence
  Description of Artificial Sequence: Synthetic oligonucleotide
  Sense strand starting at position 2115 of SEQ ID NO: 1888199
acugaaugugugcaagaga

SEQ ID NO: 2518135 - RNA, 19 nt, Artificial Sequence
  Description of Artificial Sequence: Synthetic oligonucleotide
  Antisense strand to SEQ ID NO: 2518134
ucucuugcacacauucagu

SEQ ID NO: 2518136 - RNA, 19 nt, Artificial Sequence
  Description of Artificial Sequence: Synthetic oligonucleotide
  Sense strand starting at position 2118 of SEQ ID NO: 1888199
gaaugugugcaagagauca

SEQ ID NO: 2518137 - RNA, 19 nt, Artificial Sequence
  Description of Artificial Sequence: Synthetic oligonucleotide
  Antisense strand to SEQ ID NO: 2518136
ugaucucuugcacacauuc

SEQ ID NO: 2518138 - RNA, 19 nt, Artificial Sequence
  Description of Artificial Sequence: Synthetic oligonucleotide
  Sense strand starting at position 2442 of SEQ ID NO: 1888199
cuuugaaacagucgaggaa

SEQ ID NO: 2518139 - RNA, 19 nt, Artificial Sequence
  Description of Artificial Sequence: Synthetic oligonucleotide
  Antisense strand to SEQ ID NO: 2518138
uuccucgacuguuucaaag

SEQ ID NO: 2518140 - RNA, 19 nt, Artificial Sequence
  Description of Artificial Sequence: Synthetic oligonucleotide
  Sense strand starting at position 2445 of SEQ ID NO: 1888199
ugaaacagucgaggaaacu

SEQ ID NO: 2518141 - RNA, 19 nt, Artificial Sequence
  Description of Artificial Sequence: Synthetic oligonucleotide
  Antisense strand to SEQ ID NO: 2518140
aguuuccucgacuguuuca

SEQ ID NO: 2518142 - RNA, 19 nt, Artificial Sequence
  Description of Artificial Sequence: Synthetic oligonucleotide
  Sense strand starting at position 2456 of SEQ ID NO: 1888199
aggaaacuucgaggguacu

SEQ ID NO: 2518143 - RNA, 19 nt, Artificial Sequence
  Description of Artificial Sequence: Synthetic oligonucleotide
  Antisense strand to SEQ ID NO: 2518142
aguacccucgaaguuuccu

SEQ ID NO: 2518144 - RNA, 19 nt, Artificial Sequence
  Description of Artificial Sequence: Synthetic oligonucleotide
  Sense strand starting at position 2640 of SEQ ID NO: 1888199
uacguacugagauguggua

SEQ ID NO: 2518145 - RNA, 19 nt, Artificial Sequence
  Description of Artificial Sequence: Synthetic oligonucleotide
  Antisense strand to SEQ ID NO: 2518144
uaccacaucucaguacgua

SEQ ID NO: 2518146 - RNA, 19 nt, Artificial Sequence
  Description of Artificial Sequence: Synthetic oligonucleotide
  Sense strand starting at position 2663 of SEQ ID NO: 1888199
uugugucuuacagguaauu

SEQ ID NO: 2518147 - RNA, 19 nt, Artificial Sequence
  Description of Artificial Sequence: Synthetic oligonucleotide
  Antisense strand to SEQ ID NO: 2518146
aauuaccuguaagacacaa

SEQ ID NO: 2518148 - RNA, 19 nt, Artificial Sequence
  Description of Artificial Sequence: Synthetic oligonucleotide
  Sense strand starting at position 2736 of SEQ ID NO: 1888199
acugguaaguuuguuaagu

SEQ ID NO: 2518149 - RNA, 19 nt, Artificial Sequence
  Description of Artificial Sequence: Synthetic oligonucleotide
  Antisense strand to SEQ ID NO: 2518148
acuuaacaaacuuaccagu

SEQ ID NO: 2518150 - RNA, 19 nt, Artificial Sequence
  Description of Artificial Sequence: Synthetic oligonucleotide
  Sense strand starting at position 2737 of SEQ ID NO: 1888199
cugguaaguuuguuaaguu

SEQ ID NO: 2518151 - RNA, 19 nt, Artificial Sequence
  Description of Artificial Sequence: Synthetic oligonucleotide
  Antisense strand to SEQ ID NO: 2518150
aacuuaacaaacuuaccag

SEQ ID NO: 2518152 - RNA, 19 nt, Artificial Sequence
  Description of Artificial Sequence: Synthetic oligonucleotide
  Sense strand starting at position 2751 of SEQ ID NO: 1888199
aaguuaucugagggcccua

SEQ ID NO: 2518153 - RNA, 19 nt, Artificial Sequence
  Description of Artificial Sequence: Synthetic oligonucleotide
  Antisense strand to SEQ ID NO: 2518152
uagggcccucagauaacuu

SEQ ID NO: 2518154 - RNA, 19 nt, Artificial Sequence
  Description of Artificial Sequence: Synthetic oligonucleotide
  Sense strand starting at position 2780 of SEQ ID NO: 1888199
gcgucaauuugggaaggaa

SEQ ID NO: 2518155 - RNA, 19 nt, Artificial Sequence
  Description of Artificial Sequence: Synthetic oligonucleotide
  Antisense strand to SEQ ID NO: 2518154
uuccuucccaaauugacgc

SEQ ID NO: 2518156 - RNA, 19 nt, Artificial Sequence
  Description of Artificial Sequence: Synthetic oligonucleotide
  Sense strand starting at position 2881 of SEQ ID NO: 1888199
ugagguuaauucuuagaag

SEQ ID NO: 2518157 - RNA, 19 nt, Artificial Sequence
  Description of Artificial Sequence: Synthetic oligonucleotide
  Antisense strand to SEQ ID NO: 2518156
cuucuaagaauuaaccuca

SEQ ID NO: 2518158 - RNA, 19 nt, Artificial Sequence
  Description of Artificial Sequence: Synthetic oligonucleotide
  Sense strand starting at position 2938 of SEQ ID NO: 1888199
ucacaucagcagggauaga

SEQ ID NO: 2518159 - RNA, 19 nt, Artificial Sequence
  Description of Artificial Sequence: Synthetic oligonucleotide
  Antisense strand to SEQ ID NO: 2518158
ucuaucccugcugauguga

SEQ ID NO: 2518160 - RNA, 19 nt, Artificial Sequence
  Description of Artificial Sequence: Synthetic oligonucleotide
  Sense strand starting at position 2964 of SEQ ID NO: 1888199
aggaguuacucauccuggu

SEQ ID NO: 2518161 - RNA, 19 nt, Artificial Sequence
  Description of Artificial Sequence: Synthetic oligonucleotide
  Antisense strand to SEQ ID NO: 2518160
accaggaugaguaacuccu

SEQ ID NO: 2518162 - RNA, 19 nt, Artificial Sequence
  Description of Artificial Sequence: Synthetic oligonucleotide
  Sense strand starting at position 2978 of SEQ ID NO: 1888199
cugguuuagcucuauuaag

SEQ ID NO: 2518163 - RNA, 19 nt, Artificial Sequence
  Description of Artificial Sequence: Synthetic oligonucleotide
  Antisense strand to SEQ ID NO: 2518162
cuuaauagagcuaaaccag

SEQ ID NO: 2518164 - RNA, 19 nt, Artificial Sequence
  Description of Artificial Sequence: Synthetic oligonucleotide
  Sense strand starting at position 232 of SEQ ID NO: 1888200
caccaugucccuugaggua

SEQ ID NO: 2518165 - RNA, 19 nt, Artificial Sequence
  Description of Artificial Sequence: Synthetic oligonucleotide
  Antisense strand to SEQ ID NO: 2518164
uaccucaagggacauggug

SEQ ID NO: 2518166 - RNA, 19 nt, Artificial Sequence
  Description of Artificial Sequence: Synthetic oligonucleotide
  Sense strand starting at position 245 of SEQ ID NO: 1888200
gagguaaacugccuugaga

SEQ ID NO: 2518167 - RNA, 19 nt, Artificial Sequence
  Description of Artificial Sequence: Synthetic oligonucleotide
  Antisense strand to SEQ ID NO: 2518166
ucucaaggcaguuuaccuc

SEQ ID NO: 2518168 - RNA, 19 nt, Artificial Sequence
  Description of Artificial Sequence: Synthetic oligonucleotide
  Sense strand starting at position 247 of SEQ ID NO: 1888200
gguaaacugccuugagauc

SEQ ID NO: 2518169 - RNA, 19 nt, Artificial Sequence
  Description of Artificial Sequence: Synthetic oligonucleotide
  Antisense strand to SEQ ID NO: 2518168
gaucucaaggcaguuuacc

SEQ ID NO: 2518170 - RNA, 19 nt, Artificial Sequence
  Description of Artificial Sequence: Synthetic oligonucleotide
  Sense strand starting at position 248 of SEQ ID NO: 1888200
guaaacugccuugagaucu

SEQ ID NO: 2518171 - RNA, 19 nt, Artificial Sequence
  Description of Artificial Sequence: Synthetic oligonucleotide
  Antisense strand to SEQ ID NO: 2518170
agaucucaaggcaguuuac

SEQ ID NO: 2518172 - RNA, 19 nt, Artificial Sequence
  Description of Artificial Sequence: Synthetic oligonucleotide
  Sense strand starting at position 328 of SEQ ID NO: 1888200
ugucguaagcaugagucua

SEQ ID NO: 2518173 - RNA, 19 nt, Artificial Sequence
  Description of Artificial Sequence: Synthetic oligonucleotide
  Antisense strand to SEQ ID NO: 2518172
uagacucaugcuuacgaca

SEQ ID NO: 2518174 - RNA, 19 nt, Artificial Sequence
  Description of Artificial Sequence: Synthetic oligonucleotide
  Sense strand starting at position 330 of SEQ ID NO: 1888200
ucguaagcaugagucuaau

SEQ ID NO: 2518175 - RNA, 19 nt, Artificial Sequence
  Description of Artificial Sequence: Synthetic oligonucleotide
  Antisense strand to SEQ ID NO: 2518174
auuagacucaugcuuacga

SEQ ID NO: 2518176 - RNA, 19 nt, Artificial Sequence
  Description of Artificial Sequence: Synthetic oligonucleotide
  Sense strand starting at position 333 of SEQ ID NO: 1888200
uaagcaugagucuaaugcu

SEQ ID NO: 2518177 - RNA, 19 nt, Artificial Sequence
  Description of Artificial Sequence: Synthetic oligonucleotide
  Antisense strand to SEQ ID NO: 2518176
agcauuagacucaugcuua

SEQ ID NO: 2518178 - RNA, 19 nt, Artificial Sequence
  Description of Artificial Sequence: Synthetic oligonucleotide
  Sense strand starting at position 355 of SEQ ID NO: 1888200
agcugagggcuuugacaca

SEQ ID NO: 2518179 - RNA, 19 nt, Artificial Sequence
  Description of Artificial Sequence: Synthetic oligonucleotide
  Antisense strand to SEQ ID NO: 2518178
ugugucaaagcccucagcu

SEQ ID NO: 2518180 - RNA, 19 nt, Artificial Sequence
  Description of Artificial Sequence: Synthetic oligonucleotide
  Sense strand starting at position 459 of SEQ ID NO: 1888200
cuggaaccguguccaauuu

SEQ ID NO: 2518181 - RNA, 19 nt, Artificial Sequence
  Description of Artificial Sequence: Synthetic oligonucleotide
  Antisense strand to SEQ ID NO: 2518180
aaauuggacacgguuccag

SEQ ID NO: 2518182 - RNA, 19 nt, Artificial Sequence
  Description of Artificial Sequence: Synthetic oligonucleotide
  Sense strand starting at position 500 of SEQ ID NO: 1888200
aucuuaaacugggaauaau

SEQ ID NO: 2518183 - RNA, 19 nt, Artificial Sequence
  Description of Artificial Sequence: Synthetic oligonucleotide
  Antisense strand to SEQ ID NO: 2518182
auuauucccaguuuaagau

SEQ ID NO: 2518184 - RNA, 19 nt, Artificial Sequence
  Description of Artificial Sequence: Synthetic oligonucleotide
  Sense strand starting at position 513 of SEQ ID NO: 1888200
aauaauacguauuccagga

SEQ ID NO: 2518185 - RNA, 19 nt, Artificial Sequence
  Description of Artificial Sequence: Synthetic oligonucleotide
  Antisense strand to SEQ ID NO: 2518184
uccuggaauacguauuauu

SEQ ID NO: 2518186 - RNA, 19 nt, Artificial Sequence
  Description of Artificial Sequence: Synthetic oligonucleotide
  Sense strand starting at position 517 of SEQ ID NO: 1888200
auacguauuccaggauagu

SEQ ID NO: 2518187 - RNA, 19 nt, Artificial Sequence
  Description of Artificial Sequence: Synthetic oligonucleotide
  Antisense strand to SEQ ID NO: 2518186
acuauccuggaauacguau

SEQ ID NO: 2518188 - RNA, 19 nt, Artificial Sequence
  Description of Artificial Sequence: Synthetic oligonucleotide
  Sense strand starting at position 518 of SEQ ID NO: 1888200
uacguauuccaggauaguu

SEQ ID NO: 2518189 - RNA, 19 nt, Artificial Sequence
  Description of Artificial Sequence: Synthetic oligonucleotide
  Antisense strand to SEQ ID NO: 2518188
aacuauccuggaauacgua

SEQ ID NO: 2518190 - RNA, 19 nt, Artificial Sequence
  Description of Artificial Sequence: Synthetic oligonucleotide
  Sense strand starting at position 523 of SEQ ID NO: 1888200
auuccaggauaguuugaaa

SEQ ID NO: 2518191 - RNA, 19 nt, Artificial Sequence
  Description of Artificial Sequence: Synthetic oligonucleotide
  Antisense strand to SEQ ID NO: 2518190
uuucaaacuauccuggaau

SEQ ID NO: 2518192 - RNA, 19 nt, Artificial Sequence
  Description of Artificial Sequence: Synthetic oligonucleotide
  Sense strand starting at position 748 of SEQ ID NO: 1888200
agccuacucuuggcuggaa

SEQ ID NO: 2518193 - RNA, 19 nt, Artificial Sequence
  Description of Artificial Sequence: Synthetic oligonucleotide
  Antisense strand to SEQ ID NO: 2518192
uuccagccaagaguaggcu

SEQ ID NO: 2518194 - RNA, 19 nt, Artificial Sequence
  Description of Artificial Sequence: Synthetic oligonucleotide
  Sense strand starting at position 821 of SEQ ID NO: 1888200
guguucuugcaauaaagcu

SEQ ID NO: 2518195 - RNA, 19 nt, Artificial Sequence
  Description of Artificial Sequence: Synthetic oligonucleotide
  Antisense strand to SEQ ID NO: 2518194
agcuuuauugcaagaacac

SEQ ID NO: 2518196 - RNA, 19 nt, Artificial Sequence
  Description of Artificial Sequence: Synthetic oligonucleotide
  Sense strand starting at position 1007 of SEQ ID NO: 1888200
uggucuuugcauugaguag

SEQ ID NO: 2518197 - RNA, 19 nt, Artificial Sequence
  Description of Artificial Sequence: Synthetic oligonucleotide
  Antisense strand to SEQ ID NO: 2518196
cuacucaaugcaaagacca

SEQ ID NO: 2518198 - RNA, 19 nt, Artificial Sequence
  Description of Artificial Sequence: Synthetic oligonucleotide
  Sense strand starting at position 1008 of SEQ ID NO: 1888200
ggucuuugcauugaguaga

SEQ ID NO: 2518199 - RNA, 19 nt, Artificial Sequence
  Description of Artificial Sequence: Synthetic oligonucleotide
  Antisense strand to SEQ ID NO: 2518198
ucuacucaaugcaaagacc

SEQ ID NO: 2518200 - RNA, 19 nt, Artificial Sequence
  Description of Artificial Sequence: Synthetic oligonucleotide
  Sense strand starting at position 1181 of SEQ ID NO: 1888200
agaauaauguaucuuugac

SEQ ID NO: 2518201 - RNA, 19 nt, Artificial Sequence
  Description of Artificial Sequence: Synthetic oligonucleotide
  Antisense strand to SEQ ID NO: 2518200
gucaaagauacauuauucu

SEQ ID NO: 2518202 - RNA, 19 nt, Artificial Sequence
  Description of Artificial Sequence: Synthetic oligonucleotide
  Sense strand starting at position 1245 of SEQ ID NO: 1888200
ggacucagauccuuugaua

SEQ ID NO: 2518203 - RNA, 19 nt, Artificial Sequence
  Description of Artificial Sequence: Synthetic oligonucleotide
  Antisense strand to SEQ ID NO: 2518202
uaucaaaggaucugagucc

SEQ ID NO: 2518204 - RNA, 19 nt, Artificial Sequence
  Description of Artificial Sequence: Synthetic oligonucleotide
  Sense strand starting at position 1460 of SEQ ID NO: 1888200
gaagaaaugcagugccagu

SEQ ID NO: 2518205 - RNA, 19 nt, Artificial Sequence
  Description of Artificial Sequence: Synthetic oligonucleotide
  Antisense strand to SEQ ID NO: 2518204
acuggcacugcauuucuuc

SEQ ID NO: 2518206 - RNA, 19 nt, Artificial Sequence
  Description of Artificial Sequence: Synthetic oligonucleotide
  Sense strand starting at position 1552 of SEQ ID NO: 1888200
cagcaucagacgugugaga

SEQ ID NO: 2518207 - RNA, 19 nt, Artificial Sequence
  Description of Artificial Sequence: Synthetic oligonucleotide
  Antisense strand to SEQ ID NO: 2518206
ucucacacgucugaugcug

SEQ ID NO: 2518208 - RNA, 19 nt, Artificial Sequence
  Description of Artificial Sequence: Synthetic oligonucleotide
  Sense strand starting at position 1554 of SEQ ID NO: 1888200
gcaucagacgugugagacu

SEQ ID NO: 2518209 - RNA, 19 nt, Artificial Sequence
  Description of Artificial Sequence: Synthetic oligonucleotide
  Antisense strand to SEQ ID NO: 2518208
agucucacacgucugaugc

SEQ ID NO: 2518210 - RNA, 19 nt, Artificial Sequence
  Description of Artificial Sequence: Synthetic oligonucleotide
  Sense strand starting at position 1871 of SEQ ID NO: 1888200
gcuacauucugaccugcau

SEQ ID NO: 2518211 - RNA, 19 nt, Artificial Sequence
  Description of Artificial Sequence: Synthetic oligonucleotide
  Antisense strand to SEQ ID NO: 2518210
augcaggucagaauguagc

SEQ ID NO: 2518212 - RNA, 19 nt, Artificial Sequence
  Description of Artificial Sequence: Synthetic oligonucleotide
  Sense strand starting at position 2056 of SEQ ID NO: 1888200
gcuacacagugcucgagaa

SEQ ID NO: 2518213 - RNA, 19 nt, Artificial Sequence
  Description of Artificial Sequence: Synthetic oligonucleotide
  Antisense strand to SEQ ID NO: 2518212
uucucgagcacuguguagc

SEQ ID NO: 2518214 - RNA, 19 nt, Artificial Sequence
  Description of Artificial Sequence: Synthetic oligonucleotide
  Sense strand starting at position 2057 of SEQ ID NO: 1888200
cuacacagugcucgagaaa

SEQ ID NO: 2518215 - RNA, 19 nt, Artificial Sequence
  Description of Artificial Sequence: Synthetic oligonucleotide
  Antisense strand to SEQ ID NO: 2518214
uuucucgagcacuguguag

SEQ ID NO: 2518216 - RNA, 19 nt, Artificial Sequence
  Description of Artificial Sequence: Synthetic oligonucleotide
  Sense strand starting at position 2179 of SEQ ID NO: 1888200
cugugucaugagugaacuc

SEQ ID NO: 2518217 - RNA, 19 nt, Artificial Sequence
  Description of Artificial Sequence: Synthetic oligonucleotide
  Antisense strand to SEQ ID NO: 2518216
gaguucacucaugacacag

SEQ ID NO: 2518218 - RNA, 19 nt, Artificial Sequence
  Description of Artificial Sequence: Synthetic oligonucleotide
  Sense strand starting at position 2186 of SEQ ID NO: 1888200
augagugaacucugacagu

SEQ ID NO: 2518219 - RNA, 19 nt, Artificial Sequence
  Description of Artificial Sequence: Synthetic oligonucleotide
  Antisense strand to SEQ ID NO: 2518218
acugucagaguucacucau

SEQ ID NO: 2518220 - RNA, 19 nt, Artificial Sequence
  Description of Artificial Sequence: Synthetic oligonucleotide
  Sense strand starting at position 2253 of SEQ ID NO: 1888200
uugucaugacaaugucauc

SEQ ID NO: 2518221 - RNA, 19 nt, Artificial Sequence
  Description of Artificial Sequence: Synthetic oligonucleotide
  Antisense strand to SEQ ID NO: 2518220
gaugacauugucaugacaa

SEQ ID NO: 2518222 - RNA, 19 nt, Artificial Sequence
  Description of Artificial Sequence: Synthetic oligonucleotide
  Sense strand starting at position 2881 of SEQ ID NO: 1888200
agcgaucacaccuggcaaa

SEQ ID NO: 2518223 - RNA, 19 nt, Artificial Sequence
  Description of Artificial Sequence: Synthetic oligonucleotide
  Antisense strand to SEQ ID NO: 2518222
uuugccaggugugaucgcu

SEQ ID NO: 2518224 - RNA, 19 nt, Artificial Sequence
  Description of Artificial Sequence: Synthetic oligonucleotide
  Sense strand starting at position 2910 of SEQ ID NO: 1888200
uaagcuaaagugugaaauc

SEQ ID NO: 2518225 - RNA, 19 nt, Artificial Sequence
  Description of Artificial Sequence: Synthetic oligonucleotide
  Antisense strand to SEQ ID NO: 2518224
gauuucacacuuuagcuua

SEQ ID NO: 2518226 - RNA, 19 nt, Artificial Sequence
  Description of Artificial Sequence: Synthetic oligonucleotide
  Sense strand starting at position 3372 of SEQ ID NO: 1888200
ucugguuugcuuugauuaa

SEQ ID NO: 2518227 - RNA, 19 nt, Artificial Sequence
  Description of Artificial Sequence: Synthetic oligonucleotide
  Antisense strand to SEQ ID NO: 2518226
uuaaucaaagcaaaccaga

SEQ ID NO: 2518228 - RNA, 19 nt, Artificial Sequence
  Description of Artificial Sequence: Synthetic oligonucleotide
  Sense strand starting at position 3376 of SEQ ID NO: 1888200
guuugcuuugauuaacauu

SEQ ID NO: 2518229 - RNA, 19 nt, Artificial Sequence
  Description of Artificial Sequence: Synthetic oligonucleotide
  Antisense strand to SEQ ID NO: 2518228
aauguuaaucaaagcaaac

SEQ ID NO: 2518230 - RNA, 19 nt, Artificial Sequence
  Description of Artificial Sequence: Synthetic oligonucleotide
  Sense strand starting at position 3478 of SEQ ID NO: 1888200
cagggucagauucguaauu

SEQ ID NO: 2518231 - RNA, 19 nt, Artificial Sequence
  Description of Artificial Sequence: Synthetic oligonucleotide
  Antisense strand to SEQ ID NO: 2518230
aauuacgaaucugacccug

SEQ ID NO: 2518232 - RNA, 19 nt, Artificial Sequence
  Description of Artificial Sequence: Synthetic oligonucleotide
  Sense strand starting at position 3479 of SEQ ID NO: 1888200
agggucagauucguaauua

SEQ ID NO: 2518233 - RNA, 19 nt, Artificial Sequence
  Description of Artificial Sequence: Synthetic oligonucleotide
  Antisense strand to SEQ ID NO: 2518232
uaauuacgaaucugacccu

SEQ ID NO: 2518234 - RNA, 19 nt, Artificial Sequence
  Description of Artificial Sequence: Synthetic oligonucleotide
  Sense strand starting at position 3483 of SEQ ID NO: 1888200
ucagauucguaauuagaac

SEQ ID NO: 2518235 - RNA, 19 nt, Artificial Sequence
  Description of Artificial Sequence: Synthetic oligonucleotide
  Antisense strand to SEQ ID NO: 2518234
guucuaauuacgaaucuga

SEQ ID NO: 2518236 - RNA, 19 nt, Artificial Sequence
  Description of Artificial Sequence: Synthetic oligonucleotide
  Sense strand starting at position 3544 of SEQ ID NO: 1888200
caagcaacacgauguuauu

SEQ ID NO: 2518237 - RNA, 19 nt, Artificial Sequence
  Description of Artificial Sequence: Synthetic oligonucleotide
  Antisense strand to SEQ ID NO: 2518236
aauaacaucguguugcuug

SEQ ID NO: 2518238 - RNA, 19 nt, Artificial Sequence
  Description of Artificial Sequence: Synthetic oligonucleotide
  Sense strand starting at position 3747 of SEQ ID NO: 1888200
ggcucacagugcuuugaau

SEQ ID NO: 2518239 - RNA, 19 nt, Artificial Sequence
  Description of Artificial Sequence: Synthetic oligonucleotide
  Antisense strand to SEQ ID NO: 2518238
auucaaagcacugugagcc

SEQ ID NO: 2518240 - RNA, 19 nt, Artificial Sequence
  Description of Artificial Sequence: Synthetic oligonucleotide
  Sense strand starting at position 3749 of SEQ ID NO: 1888200
cucacagugcuuugaauaa

SEQ ID NO: 2518241 - RNA, 19 nt, Artificial Sequence
  Description of Artificial Sequence: Synthetic oligonucleotide
  Antisense strand to SEQ ID NO: 2518240
uuauucaaagcacugugag

SEQ ID NO: 2518242 - RNA, 19 nt, Artificial Sequence
  Description of Artificial Sequence: Synthetic oligonucleotide
  Sense strand starting at position 3811 of SEQ ID NO: 1888200
ugccaauccucguuaggga

SEQ ID NO: 2518243 - RNA, 19 nt, Artificial Sequence
  Description of Artificial Sequence: Synthetic oligonucleotide
  Antisense strand to SEQ ID NO: 2518242
ucccuaacgaggauuggca

SEQ ID NO: 2518244 - RNA, 19 nt, Artificial Sequence
  Description of Artificial Sequence: Synthetic oligonucleotide
  Sense strand starting at position 62 of SEQ ID NO: 1888201
agguuucuugauggaaauu

SEQ ID NO: 2518245 - RNA, 19 nt, Artificial Sequence
  Description of Artificial Sequence: Synthetic oligonucleotide
  Antisense strand to SEQ ID NO: 2518244
aauuuccaucaagaaaccu

SEQ ID NO: 2518246 - RNA, 19 nt, Artificial Sequence
  Description of Artificial Sequence: Synthetic oligonucleotide
  Sense strand starting at position 99 of SEQ ID NO: 1888201
uugguuuaaucauuguuag

SEQ ID NO: 2518247 - RNA, 19 nt, Artificial Sequence
  Description of Artificial Sequence: Synthetic oligonucleotide
  Antisense strand to SEQ ID NO: 2518246
cuaacaaugauuaaaccaa

SEQ ID NO: 2518248 - RNA, 19 nt, Artificial Sequence
  Description of Artificial Sequence: Synthetic oligonucleotide
  Sense strand starting at position 336 of SEQ ID NO: 1888201
aaagaagucuguuccaaga

SEQ ID NO: 2518249 - RNA, 19 nt, Artificial Sequence
  Description of Artificial Sequence: Synthetic oligonucleotide
  Antisense strand to SEQ ID NO: 2518248
ucuuggaacagacuucuuu

SEQ ID NO: 2518250 - RNA, 19 nt, Artificial Sequence
  Description of Artificial Sequence: Synthetic oligonucleotide
  Sense strand starting at position 434 of SEQ ID NO: 1888201
cuggccucuccaggagaau

SEQ ID NO: 2518251 - RNA, 19 nt, Artificial Sequence
  Description of Artificial Sequence: Synthetic oligonucleotide
  Antisense strand to SEQ ID NO: 2518250
auucuccuggagaggccag

SEQ ID NO: 2518252 - RNA, 19 nt, Artificial Sequence
  Description of Artificial Sequence: Synthetic oligonucleotide
  Sense strand starting at position 445 of SEQ ID NO: 1888201
aggagaaugcaauguccca

SEQ ID NO: 2518253 - RNA, 19 nt, Artificial Sequence
  Description of Artificial Sequence: Synthetic oligonucleotide
  Antisense strand to SEQ ID NO: 2518252
ugggacauugcauucuccu

SEQ ID NO: 2518254 - RNA, 19 nt, Artificial Sequence
  Description of Artificial Sequence: Synthetic oligonucleotide
  Sense strand starting at position 558 of SEQ ID NO: 1888201
cuggcaacagugugaugaa

SEQ ID NO: 2518255 - RNA, 19 nt, Artificial Sequence
  Description of Artificial Sequence: Synthetic oligonucleotide
  Antisense strand to SEQ ID NO: 2518254
uucaucacacuguugccag

SEQ ID NO: 2518256 - RNA, 19 nt, Artificial Sequence
  Description of Artificial Sequence: Synthetic oligonucleotide
  Sense strand starting at position 683 of SEQ ID NO: 1888201
ugugucaucggcccagcaa

SEQ ID NO: 2518257 - RNA, 19 nt, Artificial Sequence
  Description of Artificial Sequence: Synthetic oligonucleotide
  Antisense strand to SEQ ID NO: 2518256
uugcugggccgaugacaca

SEQ ID NO: 2518258 - RNA, 19 nt, Artificial Sequence
  Description of Artificial Sequence: Synthetic oligonucleotide
  Sense strand starting at position 697 of SEQ ID NO: 1888201
agcaaucagacauguggaa

SEQ ID NO: 2518259 - RNA, 19 nt, Artificial Sequence
  Description of Artificial Sequence: Synthetic oligonucleotide
  Antisense strand to SEQ ID NO: 2518258
uuccacaugucugauugcu

SEQ ID NO: 2518260 - RNA, 19 nt, Artificial Sequence
  Description of Artificial Sequence: Synthetic oligonucleotide
  Sense strand starting at position 710 of SEQ ID NO: 1888201
guggaaaucuguccuaacg

SEQ ID NO: 2518261 - RNA, 19 nt, Artificial Sequence
  Description of Artificial Sequence: Synthetic oligonucleotide
  Antisense strand to SEQ ID NO: 2518260
cguuaggacagauuuccac

SEQ ID NO: 2518262 - RNA, 19 nt, Artificial Sequence
  Description of Artificial Sequence: Synthetic oligonucleotide
  Sense strand starting at position 827 of SEQ ID NO: 1888201
auacuaacugcucaguguu

SEQ ID NO: 2518263 - RNA, 19 nt, Artificial Sequence
  Description of Artificial Sequence: Synthetic oligonucleotide
  Antisense strand to SEQ ID NO: 2518262
aacacugagcaguuaguau

SEQ ID NO: 2518264 - RNA, 19 nt, Artificial Sequence
  Description of Artificial Sequence: Synthetic oligonucleotide
  Sense strand starting at position 968 of SEQ ID NO: 1888201
aguaauaaaccuugggcaa

SEQ ID NO: 2518265 - RNA, 19 nt, Artificial Sequence
  Description of Artificial Sequence: Synthetic oligonucleotide
  Antisense strand to SEQ ID NO: 2518264
uugcccaagguuuauuacu

SEQ ID NO: 2518266 - RNA, 19 nt, Artificial Sequence
  Description of Artificial Sequence: Synthetic oligonucleotide
  Sense strand starting at position 969 of SEQ ID NO: 1888201
guaauaaaccuugggcaaa

SEQ ID NO: 2518267 - RNA, 19 nt, Artificial Sequence
  Description of Artificial Sequence: Synthetic oligonucleotide
  Antisense strand to SEQ ID NO: 2518266
uuugcccaagguuuauuac

SEQ ID NO: 2518268 - RNA, 19 nt, Artificial Sequence
  Description of Artificial Sequence: Synthetic oligonucleotide
  Sense strand starting at position 1013 of SEQ ID NO: 1888201
uagugcuaucauuaagaug

SEQ ID NO: 2518269 - RNA, 19 nt, Artificial Sequence
  Description of Artificial Sequence: Synthetic oligonucleotide
  Antisense strand to SEQ ID NO: 2518268
caucuuaaugauagcacua

SEQ ID NO: 2518270 - RNA, 19 nt, Artificial Sequence
  Description of Artificial Sequence: Synthetic oligonucleotide
  Sense strand starting at position 1211 of SEQ ID NO: 1888201
agcacuagcccucauguga

SEQ ID NO: 2518271 - RNA, 19 nt, Artificial Sequence
  Description of Artificial Sequence: Synthetic oligonucleotide
  Antisense strand to SEQ ID NO: 2518270
ucacaugagggcuagugcu

SEQ ID NO: 2518272 - RNA, 19 nt, Artificial Sequence
  Description of Artificial Sequence: Synthetic oligonucleotide
  Sense strand starting at position 1402 of SEQ ID NO: 1888201
agagcaaacuugcuaaaua

SEQ ID NO: 2518273 - RNA, 19 nt, Artificial Sequence
  Description of Artificial Sequence: Synthetic oligonucleotide
  Antisense strand to SEQ ID NO: 2518272
uauuuagcaaguuugcucu

SEQ ID NO: 2518274 - RNA, 19 nt, Artificial Sequence
  Description of Artificial Sequence: Synthetic oligonucleotide
  Sense strand starting at position 1561 of SEQ ID NO: 1888201
ggcugaccugcgcucauua

SEQ ID NO: 2518275 - RNA, 19 nt, Artificial Sequence
  Description of Artificial Sequence: Synthetic oligonucleotide
  Antisense strand to SEQ ID NO: 2518274
uaaugagcgcaggucagcc

SEQ ID NO: 2518276 - RNA, 19 nt, Artificial Sequence
  Description of Artificial Sequence: Synthetic oligonucleotide
  Sense strand starting at position 1566 of SEQ ID NO: 1888201
accugcgcucauuagaaua

SEQ ID NO: 2518277 - RNA, 19 nt, Artificial Sequence
  Description of Artificial Sequence: Synthetic oligonucleotide
  Antisense strand to SEQ ID NO: 2518276
uauucuaaugagcgcaggu

SEQ ID NO: 2518278 - RNA, 19 nt, Artificial Sequence
  Description of Artificial Sequence: Synthetic oligonucleotide
  Sense strand starting at position 1571 of SEQ ID NO: 1888201
cgcucauuagaauacuaaa

SEQ ID NO: 2518279 - RNA, 19 nt, Artificial Sequence
  Description of Artificial Sequence: Synthetic oligonucleotide
  Antisense strand to SEQ ID NO: 2518278
uuuaguauucuaaugagcg

SEQ ID NO: 2518280 - RNA, 19 nt, Artificial Sequence
  Description of Artificial Sequence: Synthetic oligonucleotide
  Sense strand starting at position 2273 of SEQ ID NO: 1888201
cauauaauuucgguugcac

SEQ ID NO: 2518281 - RNA, 19 nt, Artificial Sequence
  Description of Artificial Sequence: Synthetic oligonucleotide
  Antisense strand to SEQ ID NO: 2518280
gugcaaccgaaauuauaug

SEQ ID NO: 2518282 - RNA, 19 nt, Artificial Sequence
  Description of Artificial Sequence: Synthetic oligonucleotide
  Sense strand starting at position 2275 of SEQ ID NO: 1888201
uauaauuucgguugcacaa

SEQ ID NO: 2518283 - RNA, 19 nt, Artificial Sequence
  Description of Artificial Sequence: Synthetic oligonucleotide
  Antisense strand to SEQ ID NO: 2518282
uugugcaaccgaaauuaua

SEQ ID NO: 2518284 - RNA, 19 nt, Artificial Sequence
  Description of Artificial Sequence: Synthetic oligonucleotide
  Sense strand starting at position 2414 of SEQ ID NO: 1888201
uauagcuuggagugagaga

SEQ ID NO: 2518285 - RNA, 19 nt, Artificial Sequence
  Description of Artificial Sequence: Synthetic oligonucleotide
  Antisense strand to SEQ ID NO: 2518284
ucucucacuccaagcuaua

SEQ ID NO: 2518286 - RNA, 19 nt, Artificial Sequence
  Description of Artificial Sequence: Synthetic oligonucleotide
  Sense strand starting at position 2448 of SEQ ID NO: 1888201
guuaacuaucacuguauca

SEQ ID NO: 2518287 - RNA, 19 nt, Artificial Sequence
  Description of Artificial Sequence: Synthetic oligonucleotide
  Antisense strand to SEQ ID NO: 2518286
ugauacagugauaguuaac

SEQ ID NO: 2518288 - RNA, 19 nt, Artificial Sequence
  Description of Artificial Sequence: Synthetic oligonucleotide
  Sense strand starting at position 2572 of SEQ ID NO: 1888201
cugcuaugugcucagaaua

SEQ ID NO: 2518289 - RNA, 19 nt, Artificial Sequence
  Description of Artificial Sequence: Synthetic oligonucleotide
  Antisense strand to SEQ ID NO: 2518288
uauucugagcacauagcag

SEQ ID NO: 2518290 - RNA, 19 nt, Artificial Sequence
  Description of Artificial Sequence: Synthetic oligonucleotide
  Sense strand starting at position 2594 of SEQ ID NO: 1888201
agcacauacuagguuugaa

SEQ ID NO: 2518291 - RNA, 19 nt, Artificial Sequence
  Description of Artificial Sequence: Synthetic oligonucleotide
  Antisense strand to SEQ ID NO: 2518290
uucaaaccuaguaugugcu

SEQ ID NO: 2518292 - RNA, 19 nt, Artificial Sequence
  Description of Artificial Sequence: Synthetic oligonucleotide
  Sense strand starting at position 2679 of SEQ ID NO: 1888201
gcacuuugauuacuuaaug

SEQ ID NO: 2518293 - RNA, 19 nt, Artificial Sequence
  Description of Artificial Sequence: Synthetic oligonucleotide
  Antisense strand to SEQ ID NO: 2518292
cauuaaguaaucaaagugc

SEQ ID NO: 2518294 - RNA, 19 nt, Artificial Sequence
  Description of Artificial Sequence: Synthetic oligonucleotide
  Sense strand starting at position 2799 of SEQ ID NO: 1888201
auuggagacaucugaguuu

SEQ ID NO: 2518295 - RNA, 19 nt, Artificial Sequence
  Description of Artificial Sequence: Synthetic oligonucleotide
  Antisense strand to SEQ ID NO: 2518294
aaacucagaugucuccaau

SEQ ID NO: 2518296 - RNA, 19 nt, Artificial Sequence
  Description of Artificial Sequence: Synthetic oligonucleotide
  Sense strand starting at position 3067 of SEQ ID NO: 1888201
gaaggucaugcccauaaau

SEQ ID NO: 2518297 - RNA, 19 nt, Artificial Sequence
  Description of Artificial Sequence: Synthetic oligonucleotide
  Antisense strand to SEQ ID NO: 2518296
auuuaugggcaugaccuuc

SEQ ID NO: 2518298 - RNA, 19 nt, Artificial Sequence
  Description of Artificial Sequence: Synthetic oligonucleotide
  Sense strand starting at position 3069 of SEQ ID NO: 1888201
aggucaugcccauaaauca

SEQ ID NO: 2518299 - RNA, 19 nt, Artificial Sequence
  Description of Artificial Sequence: Synthetic oligonucleotide
  Antisense strand to SEQ ID NO: 2518298
ugauuuaugggcaugaccu

SEQ ID NO: 2518300 - RNA, 19 nt, Artificial Sequence
  Description of Artificial Sequence: Synthetic oligonucleotide
  Sense strand starting at position 3289 of SEQ ID NO: 1888201
gguuuccuccucugacaug

SEQ ID NO: 2518301 - RNA, 19 nt, Artificial Sequence
  Description of Artificial Sequence: Synthetic oligonucleotide
  Antisense strand to SEQ ID NO: 2518300
caugucagaggaggaaacc

SEQ ID NO: 2518302 - RNA, 19 nt, Artificial Sequence
  Description of Artificial Sequence: Synthetic oligonucleotide
  Sense strand starting at position 3307 of SEQ ID NO: 1888201
gcuuccuaauuuguagauu

SEQ ID NO: 2518303 - RNA, 19 nt, Artificial Sequence
  Description of Artificial Sequence: Synthetic oligonucleotide
  Antisense strand to SEQ ID NO: 2518302
aaucuacaaauuaggaagc

SEQ ID NO: 2518304 - RNA, 19 nt, Artificial Sequence
  Description of Artificial Sequence: Synthetic oligonucleotide
  Sense strand starting at position 3355 of SEQ ID NO: 1888201
acauuacucugauugguaa

SEQ ID NO: 2518305 - RNA, 19 nt, Artificial Sequence
  Description of Artificial Sequence: Synthetic oligonucleotide
  Antisense strand to SEQ ID NO: 2518304
uuaccaaucagaguaaugu

SEQ ID NO: 2518306 - RNA, 19 nt, Artificial Sequence
  Description of Artificial Sequence: Synthetic oligonucleotide
  Sense strand starting at position 3358 of SEQ ID NO: 1888201
uuacucugauugguaauau

SEQ ID NO: 2518307 - RNA, 19 nt, Artificial Sequence
  Description of Artificial Sequence: Synthetic oligonucleotide
  Antisense strand to SEQ ID NO: 2518306
auauuaccaaucagaguaa

SEQ ID NO: 2518308 - RNA, 19 nt, Artificial Sequence
  Description of Artificial Sequence: Synthetic oligonucleotide
  Sense strand starting at position 3497 of SEQ ID NO: 1888201
gcuuaauugcuagaauaau

SEQ ID NO: 2518309 - RNA, 19 nt, Artificial Sequence
  Description of Artificial Sequence: Synthetic oligonucleotide
  Antisense strand to SEQ ID NO: 2518308
auuauucuagcaauuaagc

SEQ ID NO: 2518310 - RNA, 19 nt, Artificial Sequence
  Description of Artificial Sequence: Synthetic oligonucleotide
  Sense strand starting at position 3507 of SEQ ID NO: 1888201
uagaauaaugcagggcaau

SEQ ID NO: 2518311 - RNA, 19 nt, Artificial Sequence
  Description of Artificial Sequence: Synthetic oligonucleotide
  Antisense strand to SEQ ID NO: 2518310
auugcccugcauuauucua

SEQ ID NO: 2518312 - RNA, 19 nt, Artificial Sequence
  Description of Artificial Sequence: Synthetic oligonucleotide
  Sense strand starting at position 3508 of SEQ ID NO: 1888201
agaauaaugcagggcaauu

SEQ ID NO: 2518313 - RNA, 19 nt, Artificial Sequence
  Description of Artificial Sequence: Synthetic oligonucleotide
  Antisense strand to SEQ ID NO: 2518312
aauugcccugcauuauucu

SEQ ID NO: 2518314 - RNA, 19 nt, Artificial Sequence
  Description of Artificial Sequence: Synthetic oligonucleotide
  Sense strand starting at position 3547 of SEQ ID NO: 1888201
ucaugucuggcauacacau

SEQ ID NO: 2518315 - RNA, 19 nt, Artificial Sequence
  Description of Artificial Sequence: Synthetic oligonucleotide
  Antisense strand to SEQ ID NO: 2518314
auguguaugccagacauga

SEQ ID NO: 2518316 - RNA, 19 nt, Artificial Sequence
  Description of Artificial Sequence: Synthetic oligonucleotide
  Sense strand starting at position 3740 of SEQ ID NO: 1888201
aagccaagggucugagaga

SEQ ID NO: 2518317 - RNA, 19 nt, Artificial Sequence
  Description of Artificial Sequence: Synthetic oligonucleotide
  Antisense strand to SEQ ID NO: 2518316
ucucucagacccuuggcuu

SEQ ID NO: 2518318 - RNA, 19 nt, Artificial Sequence
  Description of Artificial Sequence: Synthetic oligonucleotide
  Sense strand starting at position 3770 of SEQ ID NO: 1888201
guuguccucgcuguuuaau

SEQ ID NO: 2518319 - RNA, 19 nt, Artificial Sequence
  Description of Artificial Sequence: Synthetic oligonucleotide
  Antisense strand to SEQ ID NO: 2518318
auuaaacagcgaggacaac

SEQ ID NO: 2518320 - RNA, 19 nt, Artificial Sequence
  Description of Artificial Sequence: Synthetic oligonucleotide
  Sense strand starting at position 3771 of SEQ ID NO: 1888201
uuguccucgcuguuuaauu

SEQ ID NO: 2518321 - RNA, 19 nt, Artificial Sequence
  Description of Artificial Sequence: Synthetic oligonucleotide
  Antisense strand to SEQ ID NO: 2518320
aauuaaacagcgaggacaa

SEQ ID NO: 2518322 - RNA, 19 nt, Artificial Sequence
  Description of Artificial Sequence: Synthetic oligonucleotide
  Sense strand starting at position 3881 of SEQ ID NO: 1888201
cagugaacacuaggcuuau

SEQ ID NO: 2518323 - RNA, 19 nt, Artificial Sequence
  Description of Artificial Sequence: Synthetic oligonucleotide
  Antisense strand to SEQ ID NO: 2518322
auaagccuaguguucacug

SEQ ID NO: 2518324 - RNA, 19 nt, Artificial Sequence
  Description of Artificial Sequence: Synthetic oligonucleotide
  Sense strand starting at position 265 of SEQ ID NO: 1888202
gcaucagucucuuggagua

SEQ ID NO: 2518325 - RNA, 19 nt, Artificial Sequence
  Description of Artificial Sequence: Synthetic oligonucleotide
  Antisense strand to SEQ ID NO: 2518324
uacuccaagagacugaugc

SEQ ID NO: 2518326 - RNA, 19 nt, Artificial Sequence
  Description of Artificial Sequence: Synthetic oligonucleotide
  Sense strand starting at position 267 of SEQ ID NO: 1888202
aucagucucuuggaguaga

SEQ ID NO: 2518327 - RNA, 19 nt, Artificial Sequence
  Description of Artificial Sequence: Synthetic oligonucleotide
  Antisense strand to SEQ ID NO: 2518326
ucuacuccaagagacugau

SEQ ID NO: 2518328 - RNA, 19 nt, Artificial Sequence
  Description of Artificial Sequence: Synthetic oligonucleotide
  Sense strand starting at position 286 of SEQ ID NO: 1888202
agaugaacucgucgcgacu

SEQ ID NO: 2518329 - RNA, 19 nt, Artificial Sequence
  Description of Artificial Sequence: Synthetic oligonucleotide
  Antisense strand to SEQ ID NO: 2518328
agucgcgacgaguucaucu

SEQ ID NO: 2518330 - RNA, 19 nt, Artificial Sequence
  Description of Artificial Sequence: Synthetic oligonucleotide
  Sense strand starting at position 382 of SEQ ID NO: 1888202
accugaugauggugugcau

SEQ ID NO: 2518331 - RNA, 19 nt, Artificial Sequence
  Description of Artificial Sequence: Synthetic oligonucleotide
  Antisense strand to SEQ ID NO: 2518330
augcacaccaucaucaggu

SEQ ID NO: 2518332 - RNA, 19 nt, Artificial Sequence
  Description of Artificial Sequence: Synthetic oligonucleotide
  Sense strand starting at position 677 of SEQ ID NO: 1888202
gaaagauggcggcgaacaa

SEQ ID NO: 2518333 - RNA, 19 nt, Artificial Sequence
  Description of Artificial Sequence: Synthetic oligonucleotide
  Antisense strand to SEQ ID NO: 2518332
uuguucgccgccaucuuuc

SEQ ID NO: 2518334 - RNA, 19 nt, Artificial Sequence
  Description of Artificial Sequence: Synthetic oligonucleotide
  Sense strand starting at position 817 of SEQ ID NO: 1888202
cgugcugauaggugucaua

SEQ ID NO: 2518335 - RNA, 19 nt, Artificial Sequence
  Description of Artificial Sequence: Synthetic oligonucleotide
  Antisense strand to SEQ ID NO: 2518334
uaugacaccuaucagcacg

SEQ ID NO: 2518336 - RNA, 19 nt, Artificial Sequence
  Description of Artificial Sequence: Synthetic oligonucleotide
  Sense strand starting at position 1186 of SEQ ID NO: 1888202
cacagaauuggguguggca

SEQ ID NO: 2518337 - RNA, 19 nt, Artificial Sequence
  Description of Artificial Sequence: Synthetic oligonucleotide
  Antisense strand to SEQ ID NO: 2518336
ugccacacccaauucugug

SEQ ID NO: 2518338 - RNA, 19 nt, Artificial Sequence
  Description of Artificial Sequence: Synthetic oligonucleotide
  Sense strand starting at position 1728 of SEQ ID NO: 1888202
ggagcacacugcucacaua

SEQ ID NO: 2518339 - RNA, 19 nt, Artificial Sequence
  Description of Artificial Sequence: Synthetic oligonucleotide
  Antisense strand to SEQ ID NO: 2518338
uaugugagcagugugcucc

SEQ ID NO: 2518340 - RNA, 19 nt, Artificial Sequence
  Description of Artificial Sequence: Synthetic oligonucleotide
  Sense strand starting at position 1738 of SEQ ID NO: 1888202
gcucacauaucccaacgua

SEQ ID NO: 2518341 - RNA, 19 nt, Artificial Sequence
  Description of Artificial Sequence: Synthetic oligonucleotide
  Antisense strand to SEQ ID NO: 2518340
uacguugggauaugugagc

SEQ ID NO: 2518342 - RNA, 19 nt, Artificial Sequence
  Description of Artificial Sequence: Synthetic oligonucleotide
  Sense strand starting at position 2054 of SEQ ID NO: 1888202
guuugaaacccuggaaagu

SEQ ID NO: 2518343 - RNA, 19 nt, Artificial Sequence
  Description of Artificial Sequence: Synthetic oligonucleotide
  Antisense strand to SEQ ID NO: 2518342
acuuuccaggguuucaaac

SEQ ID NO: 2518344 - RNA, 19 nt, Artificial Sequence
  Description of Artificial Sequence: Synthetic oligonucleotide
  Sense strand starting at position 2230 of SEQ ID NO: 1888202
uuuggagggcucugaaugu

SEQ ID NO: 2518345 - RNA, 19 nt, Artificial Sequence
  Description of Artificial Sequence: Synthetic oligonucleotide
  Antisense strand to SEQ ID NO: 2518344
acauucagagcccuccaaa

SEQ ID NO: 2518346 - RNA, 19 nt, Artificial Sequence
  Description of Artificial Sequence: Synthetic oligonucleotide
  Sense strand starting at position 2407 of SEQ ID NO: 1888202
cccaguuccugcuggcaga

SEQ ID NO: 2518347 - RNA, 19 nt, Artificial Sequence
  Description of Artificial Sequence: Synthetic oligonucleotide
  Antisense strand to SEQ ID NO: 2518346
ucugccagcaggaacuggg

SEQ ID NO: 2518348 - RNA, 19 nt, Artificial Sequence
  Description of Artificial Sequence: Synthetic oligonucleotide
  Sense strand starting at position 2571 of SEQ ID NO: 1888202
gggacaugucuguagucac

SEQ ID NO: 2518349 - RNA, 19 nt, Artificial Sequence
  Description of Artificial Sequence: Synthetic oligonucleotide
  Antisense strand to SEQ ID NO: 2518348
gugacuacagacauguccc

SEQ ID NO: 2518350 - RNA, 19 nt, Artificial Sequence
  Description of Artificial Sequence: Synthetic oligonucleotide
  Sense strand starting at position 2912 of SEQ ID NO: 1888202
cugugcaagucuuaccuga

SEQ ID NO: 2518351 - RNA, 19 nt, Artificial Sequence
  Description of Artificial Sequence: Synthetic oligonucleotide
  Antisense strand to SEQ ID NO: 2518350
ucagguaagacuugcacag

SEQ ID NO: 2518352 - RNA, 19 nt, Artificial Sequence
  Description of Artificial Sequence: Synthetic oligonucleotide
  Sense strand starting at position 2916 of SEQ ID NO: 1888202
gcaagucuuaccugacgcu

SEQ ID NO: 2518353 - RNA, 19 nt, Artificial Sequence
  Description of Artificial Sequence: Synthetic oligonucleotide
  Antisense strand to SEQ ID NO: 2518352
agcgucagguaagacuugc

SEQ ID NO: 2518354 - RNA, 19 nt, Artificial Sequence
  Description of Artificial Sequence: Synthetic oligonucleotide
  Sense strand starting at position 3506 of SEQ ID NO: 1888202
ggacaaucugacuggccaa

SEQ ID NO: 2518355 - RNA, 19 nt, Artificial Sequence
  Description of Artificial Sequence: Synthetic oligonucleotide
  Antisense strand to SEQ ID NO: 2518354
uuggccagucagauugucc

SEQ ID NO: 2518356 - RNA, 19 nt, Artificial Sequence
  Description of Artificial Sequence: Synthetic oligonucleotide
  Sense strand starting at position 3855 of SEQ ID NO: 1888202
gcuggauguacuggucgaa

SEQ ID NO: 2518357 - RNA, 19 nt, Artificial Sequence
  Description of Artificial Sequence: Synthetic oligonucleotide
  Antisense strand to SEQ ID NO: 2518356
uucgaccaguacauccagc

SEQ ID NO: 2518358 - RNA, 19 nt, Artificial Sequence
  Description of Artificial Sequence: Synthetic oligonucleotide
  Sense strand starting at position 3858 of SEQ ID NO: 1888202
ggauguacuggucgaagga

SEQ ID NO: 2518359 - RNA, 19 nt, Artificial Sequence
  Description of Artificial Sequence: Synthetic oligonucleotide
  Antisense strand to SEQ ID NO: 2518358
uccuucgaccaguacaucc

SEQ ID NO: 2518360 - RNA, 19 nt, Artificial Sequence
  Description of Artificial Sequence: Synthetic oligonucleotide
  Sense strand starting at position 3881 of SEQ ID NO: 1888202
uugacaaacuuguuguacu

SEQ ID NO: 2518361 - RNA, 19 nt, Artificial Sequence
  Description of Artificial Sequence: Synthetic oligonucleotide
  Antisense strand to SEQ ID NO: 2518360
aguacaacaaguuugucaa

SEQ ID NO: 2518362 - RNA, 19 nt, Artificial Sequence
  Description of Artificial Sequence: Synthetic oligonucleotide
  Sense strand starting at position 3892 of SEQ ID NO: 1888202
guuguacugcuugaugaca

SEQ ID NO: 2518363 - RNA, 19 nt, Artificial Sequence
  Description of Artificial Sequence: Synthetic oligonucleotide
  Antisense strand to SEQ ID NO: 2518362
ugucaucaagcaguacaac

SEQ ID NO: 2518364 - RNA, 19 nt, Artificial Sequence
  Description of Artificial Sequence: Synthetic oligonucleotide
  Sense strand starting at position 3972 of SEQ ID NO: 1888202
cggagucuguguccacaaa

SEQ ID NO: 2518365 - RNA, 19 nt, Artificial Sequence
  Description of Artificial Sequence: Synthetic oligonucleotide
  Antisense strand to SEQ ID NO: 2518364
uuuguggacacagacuccg

SEQ ID NO: 2518366 - RNA, 19 nt, Artificial Sequence
  Description of Artificial Sequence: Synthetic oligonucleotide
  Sense strand starting at position 96 of SEQ ID NO: 1888203
ggcauacaaacaugugagu

SEQ ID NO: 2518367 - RNA, 19 nt, Artificial Sequence
  Description of Artificial Sequence: Synthetic oligonucleotide
  Antisense strand to SEQ ID NO: 2518366
acucacauguuuguaugcc

SEQ ID NO: 2518368 - RNA, 19 nt, Artificial Sequence
  Description of Artificial Sequence: Synthetic oligonucleotide
  Sense strand starting at position 107 of SEQ ID NO: 1888203
augugaguccuguaucauu

SEQ ID NO: 2518369 - RNA, 19 nt, Artificial Sequence
  Description of Artificial Sequence: Synthetic oligonucleotide
  Antisense strand to SEQ ID NO: 2518368
aaugauacaggacucacau

SEQ ID NO: 2518370 - RNA, 19 nt, Artificial Sequence
  Description of Artificial Sequence: Synthetic oligonucleotide
  Sense strand starting at position 110 of SEQ ID NO: 1888203
ugaguccuguaucauuuau

SEQ ID NO: 2518371 - RNA, 19 nt, Artificial Sequence
  Description of Artificial Sequence: Synthetic oligonucleotide
  Antisense strand to SEQ ID NO: 2518370
auaaaugauacaggacuca

SEQ ID NO: 2518372 - RNA, 19 nt, Artificial Sequence
  Description of Artificial Sequence: Synthetic oligonucleotide
  Sense strand starting at position 240 of SEQ ID NO: 1888203
gggcauuucugccugguaa

SEQ ID NO: 2518373 - RNA, 19 nt, Artificial Sequence
  Description of Artificial Sequence: Synthetic oligonucleotide
  Antisense strand to SEQ ID NO: 2518372
uuaccaggcagaaaugccc

SEQ ID NO: 2518374 - RNA, 19 nt, Artificial Sequence
  Description of Artificial Sequence: Synthetic oligonucleotide
  Sense strand starting at position 241 of SEQ ID NO: 1888203
ggcauuucugccugguaaa

SEQ ID NO: 2518375 - RNA, 19 nt, Artificial Sequence
  Description of Artificial Sequence: Synthetic oligonucleotide
  Antisense strand to SEQ ID NO: 2518374
uuuaccaggcagaaaugcc

SEQ ID NO: 2518376 - RNA, 19 nt, Artificial Sequence
  Description of Artificial Sequence: Synthetic oligonucleotide
  Sense strand starting at position 242 of SEQ ID NO: 1888203
gcauuucugccugguaaau

SEQ ID NO: 2518377 - RNA, 19 nt, Artificial Sequence
  Description of Artificial Sequence: Synthetic oligonucleotide
  Antisense strand to SEQ ID NO: 2518376
auuuaccaggcagaaaugc

SEQ ID NO: 2518378 - RNA, 19 nt, Artificial Sequence
  Description of Artificial Sequence: Synthetic oligonucleotide
  Sense strand starting at position 244 of SEQ ID NO: 1888203
auuucugccugguaaauuu

SEQ ID NO: 2518379 - RNA, 19 nt, Artificial Sequence
  Description of Artificial Sequence: Synthetic oligonucleotide
  Antisense strand to SEQ ID NO: 2518378
aaauuuaccaggcagaaau

SEQ ID NO: 2518380 - RNA, 19 nt, Artificial Sequence
  Description of Artificial Sequence: Synthetic oligonucleotide
  Sense strand starting at position 538 of SEQ ID NO: 1888203
gggcuaauuugugaaguaa

SEQ ID NO: 2518381 - RNA, 19 nt, Artificial Sequence
  Description of Artificial Sequence: Synthetic oligonucleotide
  Antisense strand to SEQ ID NO: 2518380
uuacuucacaaauuagccc

SEQ ID NO: 2518382 - RNA, 19 nt, Artificial Sequence
  Description of Artificial Sequence: Synthetic oligonucleotide
  Sense strand starting at position 550 of SEQ ID NO: 1888203
gaaguaaauuuggaagcua

SEQ ID NO: 2518383 - RNA, 19 nt, Artificial Sequence
  Description of Artificial Sequence: Synthetic oligonucleotide
  Antisense strand to SEQ ID NO: 2518382
uagcuuccaaauuuacuuc

SEQ ID NO: 2518384 - RNA, 19 nt, Artificial Sequence
  Description of Artificial Sequence: Synthetic oligonucleotide
  Sense strand starting at position 671 of SEQ ID NO: 1888203
ucagguaaugccuaaugau

SEQ ID NO: 2518385 - RNA, 19 nt, Artificial Sequence
  Description of Artificial Sequence: Synthetic oligonucleotide
  Antisense strand to SEQ ID NO: 2518384
aucauuaggcauuaccuga

SEQ ID NO: 2518386 - RNA, 19 nt, Artificial Sequence
  Description of Artificial Sequence: Synthetic oligonucleotide
  Sense strand starting at position 680 of SEQ ID NO: 1888203
gccuaaugauaucucauug

SEQ ID NO: 2518387 - RNA, 19 nt, Artificial Sequence
  Description of Artificial Sequence: Synthetic oligonucleotide
  Antisense strand to SEQ ID NO: 2518386
caaugagauaucauuaggc

SEQ ID NO: 2518388 - RNA, 19 nt, Artificial Sequence
  Description of Artificial Sequence: Synthetic oligonucleotide
  Sense strand starting at position 698 of SEQ ID NO: 1888203
gaacauguauuagaaauug

SEQ ID NO: 2518389 - RNA, 19 nt, Artificial Sequence
  Description of Artificial Sequence: Synthetic oligonucleotide
  Antisense strand to SEQ ID NO: 2518388
caauuucuaauacauguuc

SEQ ID NO: 2518390 - RNA, 19 nt, Artificial Sequence
  Description of Artificial Sequence: Synthetic oligonucleotide
  Sense strand starting at position 792 of SEQ ID NO: 1888203
cuagacuuacgguggucau

SEQ ID NO: 2518391 - RNA, 19 nt, Artificial Sequence
  Description of Artificial Sequence: Synthetic oligonucleotide
  Antisense strand to SEQ ID NO: 2518390
augaccaccguaagucuag

SEQ ID NO: 2518392 - RNA, 19 nt, Artificial Sequence
  Description of Artificial Sequence: Synthetic oligonucleotide
  Sense strand starting at position 795 of SEQ ID NO: 1888203
gacuuacgguggucaucaa

SEQ ID NO: 2518393 - RNA, 19 nt, Artificial Sequence
  Description of Artificial Sequence: Synthetic oligonucleotide
  Antisense strand to SEQ ID NO: 2518392
uugaugaccaccguaaguc

SEQ ID NO: 2518394 - RNA, 19 nt, Artificial Sequence
  Description of Artificial Sequence: Synthetic oligonucleotide
  Sense strand starting at position 832 of SEQ ID NO: 1888203
uacauagaaugguuaguuu

SEQ ID NO: 2518395 - RNA, 19 nt, Artificial Sequence
  Description of Artificial Sequence: Synthetic oligonucleotide
  Antisense strand to SEQ ID NO: 2518394
aaacuaaccauucuaugua

SEQ ID NO: 2518396 - RNA, 19 nt, Artificial Sequence
  Description of Artificial Sequence: Synthetic oligonucleotide
  Sense strand starting at position 1080 of SEQ ID NO: 1888203
cuugacagcagucgaauua

SEQ ID NO: 2518397 - RNA, 19 nt, Artificial Sequence
  Description of Artificial Sequence: Synthetic oligonucleotide
  Antisense strand to SEQ ID NO: 2518396
uaauucgacugcugucaag

SEQ ID NO: 2518398 - RNA, 19 nt, Artificial Sequence
  Description of Artificial Sequence: Synthetic oligonucleotide
  Sense strand starting at position 1089 of SEQ ID NO: 1888203
agucgaauuacgggaaauu

SEQ ID NO: 2518399 - RNA, 19 nt, Artificial Sequence
  Description of Artificial Sequence: Synthetic oligonucleotide
  Antisense strand to SEQ ID NO: 2518398
aauuucccguaauucgacu

SEQ ID NO: 2518400 - RNA, 19 nt, Artificial Sequence
  Description of Artificial Sequence: Synthetic oligonucleotide
  Sense strand starting at position 1090 of SEQ ID NO: 1888203
gucgaauuacgggaaauug

SEQ ID NO: 2518401 - RNA, 19 nt, Artificial Sequence
  Description of Artificial Sequence: Synthetic oligonucleotide
  Antisense strand to SEQ ID NO: 2518400
caauuucccguaauucgac

SEQ ID NO: 2518402 - RNA, 19 nt, Artificial Sequence
  Description of Artificial Sequence: Synthetic oligonucleotide
  Sense strand starting at position 1148 of SEQ ID NO: 1888203
cuuacuuuauaagaaggaa

SEQ ID NO: 2518403 - RNA, 19 nt, Artificial Sequence
  Description of Artificial Sequence: Synthetic oligonucleotide
  Antisense strand to SEQ ID NO: 2518402
uuccuucuuauaaaguaag

SEQ ID NO: 2518404 - RNA, 19 nt, Artificial Sequence
  Description of Artificial Sequence: Synthetic oligonucleotide
  Sense strand starting at position 1251 of SEQ ID NO: 1888203
uguuacuauucucuuauga

SEQ ID NO: 2518405 - RNA, 19 nt, Artificial Sequence
  Description of Artificial Sequence: Synthetic oligonucleotide
  Antisense strand to SEQ ID NO: 2518404
ucauaagagaauaguaaca

SEQ ID NO: 2518406 - RNA, 19 nt, Artificial Sequence
  Description of Artificial Sequence: Synthetic oligonucleotide
  Sense strand starting at position 1334 of SEQ ID NO: 1888203
uugccuuucugcuuaggau

SEQ ID NO: 2518407 - RNA, 19 nt, Artificial Sequence
  Description of Artificial Sequence: Synthetic oligonucleotide
  Antisense strand to SEQ ID NO: 2518406
auccuaagcagaaaggcaa

SEQ ID NO: 2518408 - RNA, 19 nt, Artificial Sequence
  Description of Artificial Sequence: Synthetic oligonucleotide
  Sense strand starting at position 1335 of SEQ ID NO: 1888203
ugccuuucugcuuaggauu

SEQ ID NO: 2518409 - RNA, 19 nt, Artificial Sequence
  Description of Artificial Sequence: Synthetic oligonucleotide
  Antisense strand to SEQ ID NO: 2518408
aauccuaagcagaaaggca

SEQ ID NO: 2518410 - RNA, 19 nt, Artificial Sequence
  Description of Artificial Sequence: Synthetic oligonucleotide
  Sense strand starting at position 1604 of SEQ ID NO: 1888203
aaaguuacauaguuugagu

SEQ ID NO: 2518411 - RNA, 19 nt, Artificial Sequence
  Description of Artificial Sequence: Synthetic oligonucleotide
  Antisense strand to SEQ ID NO: 2518410
acucaaacuauguaacuuu

SEQ ID NO: 2518412 - RNA, 19 nt, Artificial Sequence
  Description of Artificial Sequence: Synthetic oligonucleotide
  Sense strand starting at position 1606 of SEQ ID NO: 1888203
aguuacauaguuugaguuu

SEQ ID NO: 2518413 - RNA, 19 nt, Artificial Sequence
  Description of Artificial Sequence: Synthetic oligonucleotide
  Antisense strand to SEQ ID NO: 2518412
aaacucaaacuauguaacu

SEQ ID NO: 2518414 - RNA, 19 nt, Artificial Sequence
  Description of Artificial Sequence: Synthetic oligonucleotide
  Sense strand starting at position 1637 of SEQ ID NO: 1888203
cuguuucugcacuaaagca

SEQ ID NO: 2518415 - RNA, 19 nt, Artificial Sequence
  Description of Artificial Sequence: Synthetic oligonucleotide
  Antisense strand to SEQ ID NO: 2518414
ugcuuuagugcagaaacag

SEQ ID NO: 2518416 - RNA, 19 nt, Artificial Sequence
  Description of Artificial Sequence: Synthetic oligonucleotide
  Sense strand starting at position 1673 of SEQ ID NO: 1888203
aguaucaugucugauuuaa

SEQ ID NO: 2518417 - RNA, 19 nt, Artificial Sequence
  Description of Artificial Sequence: Synthetic oligonucleotide
  Antisense strand to SEQ ID NO: 2518416
uuaaaucagacaugauacu

SEQ ID NO: 2518418 - RNA, 19 nt, Artificial Sequence
  Description of Artificial Sequence: Synthetic oligonucleotide
  Sense strand starting at position 2088 of SEQ ID NO: 1888203
gggccacaucgcucgugau

SEQ ID NO: 2518419 - RNA, 19 nt, Artificial Sequence
  Description of Artificial Sequence: Synthetic oligonucleotide
  Antisense strand to SEQ ID NO: 2518418
aucacgagcgauguggccc

SEQ ID NO: 2518420 - RNA, 19 nt, Artificial Sequence
  Description of Artificial Sequence: Synthetic oligonucleotide
  Sense strand starting at position 2586 of SEQ ID NO: 1888203
ccucuuggaucgcuagaga

SEQ ID NO: 2518421 - RNA, 19 nt, Artificial Sequence
  Description of Artificial Sequence: Synthetic oligonucleotide
  Antisense strand to SEQ ID NO: 2518420
ucucuagcgauccaagagg

SEQ ID NO: 2518422 - RNA, 19 nt, Artificial Sequence
  Description of Artificial Sequence: Synthetic oligonucleotide
  Sense strand starting at position 2604 of SEQ ID NO: 1888203
aaggcuuucucaccgagga

SEQ ID NO: 2518423 - RNA, 19 nt, Artificial Sequence
  Description of Artificial Sequence: Synthetic oligonucleotide
  Antisense strand to SEQ ID NO: 2518422
uccucggugagaaagccuu

SEQ ID NO: 2518424 - RNA, 19 nt, Artificial Sequence
  Description of Artificial Sequence: Synthetic oligonucleotide
  Sense strand starting at position 2605 of SEQ ID NO: 1888203
aggcuuucucaccgaggau

SEQ ID NO: 2518425 - RNA, 19 nt, Artificial Sequence
  Description of Artificial Sequence: Synthetic oligonucleotide
  Antisense strand to SEQ ID NO: 2518424
auccucggugagaaagccu

SEQ ID NO: 2518426 - RNA, 19 nt, Artificial Sequence
  Description of Artificial Sequence: Synthetic oligonucleotide
  Sense strand starting at position 2606 of SEQ ID NO: 1888203
ggcuuucucaccgaggaug

SEQ ID NO: 2518427 - RNA, 19 nt, Artificial Sequence
  Description of Artificial Sequence: Synthetic oligonucleotide
  Antisense strand to SEQ ID NO: 2518426
cauccucggugagaaagcc

SEQ ID NO: 2518428 - RNA, 19 nt, Artificial Sequence
  Description of Artificial Sequence: Synthetic oligonucleotide
  Sense strand starting at position 3523 of SEQ ID NO: 1888203
ggucccauucgccacgaau

SEQ ID NO: 2518429 - RNA, 19 nt, Artificial Sequence
  Description of Artificial Sequence: Synthetic oligonucleotide
  Antisense strand to SEQ ID NO: 2518428
auucguggcgaaugggacc

SEQ ID NO: 2518430 - RNA, 19 nt, Artificial Sequence
  Description of Artificial Sequence: Synthetic oligonucleotide
  Sense strand starting at position 3626 of SEQ ID NO: 1888203
guaagugucaaugaauguu

SEQ ID NO: 2518431 - RNA, 19 nt, Artificial Sequence
  Description of Artificial Sequence: Synthetic oligonucleotide
  Antisense strand to SEQ ID NO: 2518430
aacauucauugacacuuac

SEQ ID NO: 2518432 - RNA, 19 nt, Artificial Sequence
  Description of Artificial Sequence: Synthetic oligonucleotide
  Sense strand starting at position 3632 of SEQ ID NO: 1888203
gucaaugaauguuugugaa

SEQ ID NO: 2518433 - RNA, 19 nt, Artificial Sequence
  Description of Artificial Sequence: Synthetic oligonucleotide
  Antisense strand to SEQ ID NO: 2518432
uucacaaacauucauugac

SEQ ID NO: 2518434 - RNA, 19 nt, Artificial Sequence
  Description of Artificial Sequence: Synthetic oligonucleotide
  Sense strand starting at position 3647 of SEQ ID NO: 1888203
ugaaauaaaugagggacua

SEQ ID NO: 2518435 - RNA, 19 nt, Artificial Sequence
  Description of Artificial Sequence: Synthetic oligonucleotide
  Antisense strand to SEQ ID NO: 2518434
uagucccucauuuauuuca

SEQ ID NO: 2518436 - RNA, 19 nt, Artificial Sequence
  Description of Artificial Sequence: Synthetic oligonucleotide
  Sense strand starting at position 3660 of SEQ ID NO: 1888203
ggacuaaaggagugaucga

SEQ ID NO: 2518437 - RNA, 19 nt, Artificial Sequence
  Description of Artificial Sequence: Synthetic oligonucleotide
  Antisense strand to SEQ ID NO: 2518436
ucgaucacuccuuuagucc

SEQ ID NO: 2518438 - RNA, 19 nt, Artificial Sequence
  Description of Artificial Sequence: Synthetic oligonucleotide
  Sense strand starting at position 3689 of SEQ ID NO: 1888203
auaaguuaucuguguguau

SEQ ID NO: 2518439 - RNA, 19 nt, Artificial Sequence
  Description of Artificial Sequence: Synthetic oligonucleotide
  Antisense strand to SEQ ID NO: 2518438
auacacacagauaacuuau

SEQ ID NO: 2518440 - RNA, 19 nt, Artificial Sequence
  Description of Artificial Sequence: Synthetic oligonucleotide
  Sense strand starting at position 3691 of SEQ ID NO: 1888203
aaguuaucuguguguauug

SEQ ID NO: 2518441 - RNA, 19 nt, Artificial Sequence
  Description of Artificial Sequence: Synthetic oligonucleotide
  Antisense strand to SEQ ID NO: 2518440
caauacacacagauaacuu

SEQ ID NO: 2518442 - RNA, 19 nt, Artificial Sequence
  Description of Artificial Sequence: Synthetic oligonucleotide
  Sense strand starting at position 3772 of SEQ ID NO: 1888203
auacauaagguuuauagca

SEQ ID NO: 2518443 - RNA, 19 nt, Artificial Sequence
  Description of Artificial Sequence: Synthetic oligonucleotide
  Antisense strand to SEQ ID NO: 2518442
ugcuauaaaccuuauguau

SEQ ID NO: 2518444 - RNA, 19 nt, Artificial Sequence
  Description of Artificial Sequence: Synthetic oligonucleotide
  Sense strand starting at position 3780 of SEQ ID NO: 1888203
gguuuauagcaaugaggua

SEQ ID NO: 2518445 - RNA, 19 nt, Artificial Sequence
  Description of Artificial Sequence: Synthetic oligonucleotide
  Antisense strand to SEQ ID NO: 2518444
uaccucauugcuauaaacc

SEQ ID NO: 2518446 - RNA, 19 nt, Artificial Sequence
  Description of Artificial Sequence: Synthetic oligonucleotide
  Sense strand starting at position 125 of SEQ ID NO: 1888204
cuugacagcagucgaauua

SEQ ID NO: 2518447 - RNA, 19 nt, Artificial Sequence
  Description of Artificial Sequence: Synthetic oligonucleotide
  Antisense strand to SEQ ID NO: 2518446
uaauucgacugcugucaag

SEQ ID NO: 2518448 - RNA, 19 nt, Artificial Sequence
  Description of Artificial Sequence: Synthetic oligonucleotide
  Sense strand starting at position 134 of SEQ ID NO: 1888204
agucgaauuacgggaaauu

SEQ ID NO: 2518449 - RNA, 19 nt, Artificial Sequence
  Description of Artificial Sequence: Synthetic oligonucleotide
  Antisense strand to SEQ ID NO: 2518448
aauuucccguaauucgacu

SEQ ID NO: 2518450 - RNA, 19 nt, Artificial Sequence
  Description of Artificial Sequence: Synthetic oligonucleotide
  Sense strand starting at position 135 of SEQ ID NO: 1888204
gucgaauuacgggaaauug

SEQ ID NO: 2518451 - RNA, 19 nt, Artificial Sequence
  Description of Artificial Sequence: Synthetic oligonucleotide
  Antisense strand to SEQ ID NO: 2518450
caauuucccguaauucgac

SEQ ID NO: 2518452 - RNA, 19 nt, Artificial Sequence
  Description of Artificial Sequence: Synthetic oligonucleotide
  Sense strand starting at position 193 of SEQ ID NO: 1888204
cuuacuuuauaagaaggaa

SEQ ID NO: 2518453 - RNA, 19 nt, Artificial Sequence
  Description of Artificial Sequence: Synthetic oligonucleotide
  Antisense strand to SEQ ID NO: 2518452
uuccuucuuauaaaguaag

SEQ ID NO: 2518454 - RNA, 19 nt, Artificial Sequence
  Description of Artificial Sequence: Synthetic oligonucleotide
  Sense strand starting at position 296 of SEQ ID NO: 1888204
uguuacuauucucuuauga

SEQ ID NO: 2518455 - RNA, 19 nt, Artificial Sequence
  Description of Artificial Sequence: Synthetic oligonucleotide
  Antisense strand to SEQ ID NO: 2518454
ucauaagagaauaguaaca

SEQ ID NO: 2518456 - RNA, 19 nt, Artificial Sequence
  Description of Artificial Sequence: Synthetic oligonucleotide
  Sense strand starting at position 379 of SEQ ID NO: 1888204
uugccuuucugcuuaggau

SEQ ID NO: 2518457 - RNA, 19 nt, Artificial Sequence
  Description of Artificial Sequence: Synthetic oligonucleotide
  Antisense strand to SEQ ID NO: 2518456
auccuaagcagaaaggcaa

SEQ ID NO: 2518458 - RNA, 19 nt, Artificial Sequence
  Description of Artificial Sequence: Synthetic oligonucleotide
  Sense strand starting at position 380 of SEQ ID NO: 1888204
ugccuuucugcuuaggauu

SEQ ID NO: 2518459 - RNA, 19 nt, Artificial Sequence
  Description of Artificial Sequence: Synthetic oligonucleotide
  Antisense strand to SEQ ID NO: 2518458
aauccuaagcagaaaggca

SEQ ID NO: 2518460 - RNA, 19 nt, Artificial Sequence
  Description of Artificial Sequence: Synthetic oligonucleotide
  Sense strand starting at position 649 of SEQ ID NO: 1888204
aaaguuacauaguuugagu

SEQ ID NO: 2518461 - RNA, 19 nt, Artificial Sequence
  Description of Artificial Sequence: Synthetic oligonucleotide
  Antisense strand to SEQ ID NO: 2518460
acucaaacuauguaacuuu

SEQ ID NO: 2518462 - RNA, 19 nt, Artificial Sequence
  Description of Artificial Sequence: Synthetic oligonucleotide
  Sense strand starting at position 651 of SEQ ID NO: 1888204
aguuacauaguuugaguuu

SEQ ID NO: 2518463 - RNA, 19 nt, Artificial Sequence
  Description of Artificial Sequence: Synthetic oligonucleotide
  Antisense strand to SEQ ID NO: 2518462
aaacucaaacuauguaacu

SEQ ID NO: 2518464 - RNA, 19 nt, Artificial Sequence
  Description of Artificial Sequence: Synthetic oligonucleotide
  Sense strand starting at position 682 of SEQ ID NO: 1888204
cuguuucugcacuaaagca

SEQ ID NO: 2518465 - RNA, 19 nt, Artificial Sequence
  Description of Artificial Sequence: Synthetic oligonucleotide
  Antisense strand to SEQ ID NO: 2518464
ugcuuuagugcagaaacag

SEQ ID NO: 2518466 - RNA, 19 nt, Artificial Sequence
  Description of Artificial Sequence: Synthetic oligonucleotide
  Sense strand starting at position 718 of SEQ ID NO: 1888204
aguaucaugucugauuuaa

SEQ ID NO: 2518467 - RNA, 19 nt, Artificial Sequence
  Description of Artificial Sequence: Synthetic oligonucleotide
  Antisense strand to SEQ ID NO: 2518466
uuaaaucagacaugauacu

SEQ ID NO: 2518468 - RNA, 19 nt, Artificial Sequence
  Description of Artificial Sequence: Synthetic oligonucleotide
  Sense strand starting at position 1133 of SEQ ID NO: 1888204
gggccacaucgcucgugau

SEQ ID NO: 2518469 - RNA, 19 nt, Artificial Sequence
  Description of Artificial Sequence: Synthetic oligonucleotide
  Antisense strand to SEQ ID NO: 2518468
aucacgagcgauguggccc

SEQ ID NO: 2518470 - RNA, 19 nt, Artificial Sequence
  Description of Artificial Sequence: Synthetic oligonucleotide
  Sense strand starting at position 1631 of SEQ ID NO: 1888204
ccucuuggaucgcuagaga

SEQ ID NO: 2518471 - RNA, 19 nt, Artificial Sequence
  Description of Artificial Sequence: Synthetic oligonucleotide
  Antisense strand to SEQ ID NO: 2518470
ucucuagcgauccaagagg

SEQ ID NO: 2518472 - RNA, 19 nt, Artificial Sequence
  Description of Artificial Sequence: Synthetic oligonucleotide
  Sense strand starting at position 1649 of SEQ ID NO: 1888204
aaggcuuucucaccgagga

SEQ ID NO: 2518473 - RNA, 19 nt, Artificial Sequence
  Description of Artificial Sequence: Synthetic oligonucleotide
  Antisense strand to SEQ ID NO: 2518472
uccucggugagaaagccuu

SEQ ID NO: 2518474 - RNA, 19 nt, Artificial Sequence
  Description of Artificial Sequence: Synthetic oligonucleotide
  Sense strand starting at position 1650 of SEQ ID NO: 1888204
aggcuuucucaccgaggau

SEQ ID NO: 2518475 - RNA, 19 nt, Artificial Sequence
  Description of Artificial Sequence: Synthetic oligonucleotide
  Antisense strand to SEQ ID NO: 2518474
auccucggugagaaagccu

SEQ ID NO: 2518476 - RNA, 19 nt, Artificial Sequence
  Description of Artificial Sequence: Synthetic oligonucleotide
  Sense strand starting at position 1651 of SEQ ID NO: 1888204
ggcuuucucaccgaggaug

SEQ ID NO: 2518477 - RNA, 19 nt, Artificial Sequence
  Description of Artificial Sequence: Synthetic oligonucleotide
  Antisense strand to SEQ ID NO: 2518476
cauccucggugagaaagcc

SEQ ID NO: 2518478 - RNA, 19 nt, Artificial Sequence
  Description of Artificial Sequence: Synthetic oligonucleotide
  Sense strand starting at position 2568 of SEQ ID NO: 1888204
ggucccauucgccacgaau

SEQ ID NO: 2518479 - RNA, 19 nt, Artificial Sequence
  Description of Artificial Sequence: Synthetic oligonucleotide
  Antisense strand to SEQ ID NO: 2518478
auucguggcgaaugggacc

SEQ ID NO: 2518480 - RNA, 19 nt, Artificial Sequence
  Description of Artificial Sequence: Synthetic oligonucleotide
  Sense strand starting at position 2671 of SEQ ID NO: 1888204
guaagugucaaugaauguu

SEQ ID NO: 2518481 - RNA, 19 nt, Artificial Sequence
  Description of Artificial Sequence: Synthetic oligonucleotide
  Antisense strand to SEQ ID NO: 2518480
aacauucauugacacuuac

SEQ ID NO: 2518482 - RNA, 19 nt, Artificial Sequence
  Description of Artificial Sequence: Synthetic oligonucleotide
  Sense strand starting at position 2677 of SEQ ID NO: 1888204
gucaaugaauguuugugaa

SEQ ID NO: 2518483 - RNA, 19 nt, Artificial Sequence
  Description of Artificial Sequence: Synthetic oligonucleotide
  Antisense strand to SEQ ID NO: 2518482
uucacaaacauucauugac

SEQ ID NO: 2518484 - RNA, 19 nt, Artificial Sequence
  Description of Artificial Sequence: Synthetic oligonucleotide
  Sense strand starting at position 2692 of SEQ ID NO: 1888204
ugaaauaaaugagggacua

SEQ ID NO: 2518485 - RNA, 19 nt, Artificial Sequence
  Description of Artificial Sequence: Synthetic oligonucleotide
  Antisense strand to SEQ ID NO: 2518484
uagucccucauuuauuuca

SEQ ID NO: 2518486 - RNA, 19 nt, Artificial Sequence
  Description of Artificial Sequence: Synthetic oligonucleotide
  Sense strand starting at position 2705 of SEQ ID NO: 1888204
ggacuaaaggagugaucga

SEQ ID NO: 2518487 - RNA, 19 nt, Artificial Sequence
  Description of Artificial Sequence: Synthetic oligonucleotide
  Antisense strand to SEQ ID NO: 2518486
ucgaucacuccuuuagucc

SEQ ID NO: 2518488 - RNA, 19 nt, Artificial Sequence
  Description of Artificial Sequence: Synthetic oligonucleotide
  Sense strand starting at position 2734 of SEQ ID NO: 1888204
auaaguuaucuguguguau

SEQ ID NO: 2518489 - RNA, 19 nt, Artificial Sequence
  Description of Artificial Sequence: Synthetic oligonucleotide
  Antisense strand to SEQ ID NO: 2518488
auacacacagauaacuuau

SEQ ID NO: 2518490 - RNA, 19 nt, Artificial Sequence
  Description of Artificial Sequence: Synthetic oligonucleotide
  Sense strand starting at position 2736 of SEQ ID NO: 1888204
aaguuaucuguguguauug

SEQ ID NO: 2518491 - RNA, 19 nt, Artificial Sequence
  Description of Artificial Sequence: Synthetic oligonucleotide
  Antisense strand to SEQ ID NO: 2518490
caauacacacagauaacuu

SEQ ID NO: 2518492 - RNA, 19 nt, Artificial Sequence
  Description of Artificial Sequence: Synthetic oligonucleotide
  Sense strand starting at position 2817 of SEQ ID NO: 1888204
auacauaagguuuauagca

SEQ ID NO: 2518493 - RNA, 19 nt, Artificial Sequence
  Description of Artificial Sequence: Synthetic oligonucleotide
  Antisense strand to SEQ ID NO: 2518492
ugcuauaaaccuuauguau

SEQ ID NO: 2518494 - RNA, 19 nt, Artificial Sequence
  Description of Artificial Sequence: Synthetic oligonucleotide
  Sense strand starting at position 2825 of SEQ ID NO: 1888204
gguuuauagcaaugaggua

SEQ ID NO: 2518495 - RNA, 19 nt, Artificial Sequence
  Description of Artificial Sequence: Synthetic oligonucleotide
  Antisense strand to SEQ ID NO: 2518494
uaccucauugcuauaaacc

SEQ ID NO: 2518496 - RNA, 19 nt, Artificial Sequence
  Description of Artificial Sequence: Synthetic oligonucleotide
  Sense strand starting at position 3095 of SEQ ID NO: 1888204
uuaagaugcuguuuguaca

SEQ ID NO: 2518497 - RNA, 19 nt, Artificial Sequence
  Description of Artificial Sequence: Synthetic oligonucleotide
  Antisense strand to SEQ ID NO: 2518496
uguacaaacagcaucuuaa

SEQ ID NO: 2518498 - RNA, 19 nt, Artificial Sequence
  Description of Artificial Sequence: Synthetic oligonucleotide
  Sense strand starting at position 3103 of SEQ ID NO: 1888204
cuguuuguacaguauauaa

SEQ ID NO: 2518499 - RNA, 19 nt, Artificial Sequence
  Description of Artificial Sequence: Synthetic oligonucleotide
  Antisense strand to SEQ ID NO: 2518498
uuauauacuguacaaacag

SEQ ID NO: 2518500 - RNA, 19 nt, Artificial Sequence
  Description of Artificial Sequence: Synthetic oligonucleotide
  Sense strand starting at position 3138 of SEQ ID NO: 1888204
cuagcaauuugacaagaaa

SEQ ID NO: 2518501 - RNA, 19 nt, Artificial Sequence
  Description of Artificial Sequence: Synthetic oligonucleotide
  Antisense strand to SEQ ID NO: 2518500
uuucuugucaaauugcuag

SEQ ID NO: 2518502 - RNA, 19 nt, Artificial Sequence
  Description of Artificial Sequence: Synthetic oligonucleotide
  Sense strand starting at position 3182 of SEQ ID NO: 1888204
acacaaguuuagcuaauga

SEQ ID NO: 2518503 - RNA, 19 nt, Artificial Sequence
  Description of Artificial Sequence: Synthetic oligonucleotide
  Antisense strand to SEQ ID NO: 2518502
ucauuagcuaaacuugugu

SEQ ID NO: 2518504 - RNA, 19 nt, Artificial Sequence
  Description of Artificial Sequence: Synthetic oligonucleotide
  Sense strand starting at position 3189 of SEQ ID NO: 1888204
uuuagcuaaugaucuggaa

SEQ ID NO: 2518505 - RNA, 19 nt, Artificial Sequence
  Description of Artificial Sequence: Synthetic oligonucleotide
  Antisense strand to SEQ ID NO: 2518504
uuccagaucauuagcuaaa

SEQ ID NO: 2518506 - RNA, 19 nt, Artificial Sequence
  Description of Artificial Sequence: Synthetic oligonucleotide
  Sense strand starting at position 3359 of SEQ ID NO: 1888204
acaaucaaguuggacauua

SEQ ID NO: 2518507 - RNA, 19 nt, Artificial Sequence
  Description of Artificial Sequence: Synthetic oligonucleotide
  Antisense strand to SEQ ID NO: 2518506
uaauguccaacuugauugu

SEQ ID NO: 2518508 - RNA, 19 nt, Artificial Sequence
  Description of Artificial Sequence: Synthetic oligonucleotide
  Sense strand starting at position 3442 of SEQ ID NO: 1888204
ugucaaugacuuuaaagug

SEQ ID NO: 2518509 - RNA, 19 nt, Artificial Sequence
  Description of Artificial Sequence: Synthetic oligonucleotide
  Antisense strand to SEQ ID NO: 2518508
cacuuuaaagucauugaca

SEQ ID NO: 2518510 - RNA, 19 nt, Artificial Sequence
  Description of Artificial Sequence: Synthetic oligonucleotide
  Sense strand starting at position 3507 of SEQ ID NO: 1888204
gcaguaacuuauguagaaa

SEQ ID NO: 2518511 - RNA, 19 nt, Artificial Sequence
  Description of Artificial Sequence: Synthetic oligonucleotide
  Antisense strand to SEQ ID NO: 2518510
uuucuacauaaguuacugc

SEQ ID NO: 2518512 - RNA, 19 nt, Artificial Sequence
  Description of Artificial Sequence: Synthetic oligonucleotide
  Sense strand starting at position 3510 of SEQ ID NO: 1888204
guaacuuauguagaaagcu

SEQ ID NO: 2518513 - RNA, 19 nt, Artificial Sequence
  Description of Artificial Sequence: Synthetic oligonucleotide
  Antisense strand to SEQ ID NO: 2518512
agcuuucuacauaaguuac

SEQ ID NO: 2518514 - RNA, 19 nt, Artificial Sequence
  Description of Artificial Sequence: Synthetic oligonucleotide
  Sense strand starting at position 3519 of SEQ ID NO: 1888204
guagaaagcuuagcauaaa

SEQ ID NO: 2518515 - RNA, 19 nt, Artificial Sequence
  Description of Artificial Sequence: Synthetic oligonucleotide
  Antisense strand to SEQ ID NO: 2518514
uuuaugcuaagcuuucuac

SEQ ID NO: 2518516 - RNA, 19 nt, Artificial Sequence
  Description of Artificial Sequence: Synthetic oligonucleotide
  Sense strand starting at position 3656 of SEQ ID NO: 1888204
uugauaugguuauuagcau

SEQ ID NO: 2518517 - RNA, 19 nt, Artificial Sequence
  Description of Artificial Sequence: Synthetic oligonucleotide
  Antisense strand to SEQ ID NO: 2518516
augcuaauaaccauaucaa

SEQ ID NO: 2518518 - RNA, 19 nt, Artificial Sequence
  Description of Artificial Sequence: Synthetic oligonucleotide
  Sense strand starting at position 3662 of SEQ ID NO: 1888204
ugguuauuagcauaguaau

SEQ ID NO: 2518519 - RNA, 19 nt, Artificial Sequence
  Description of Artificial Sequence: Synthetic oligonucleotide
  Antisense strand to SEQ ID NO: 2518518
auuacuaugcuaauaacca

SEQ ID NO: 2518520 - RNA, 19 nt, Artificial Sequence
  Description of Artificial Sequence: Synthetic oligonucleotide
  Sense strand starting at position 3765 of SEQ ID NO: 1888204
guauacaauuaccuggaau

SEQ ID NO: 2518521 - RNA, 19 nt, Artificial Sequence
  Description of Artificial Sequence: Synthetic oligonucleotide
  Antisense strand to SEQ ID NO: 2518520
auuccagguaauuguauac

SEQ ID NO: 2518522 - RNA, 19 nt, Artificial Sequence
  Description of Artificial Sequence: Synthetic oligonucleotide
  Sense strand starting at position 3839 of SEQ ID NO: 1888204
gguaguuuguaagauauuu

SEQ ID NO: 2518523 - RNA, 19 nt, Artificial Sequence
  Description of Artificial Sequence: Synthetic oligonucleotide
  Antisense strand to SEQ ID NO: 2518522
aaauaucuuacaaacuacc

SEQ ID NO: 2518524 - RNA, 19 nt, Artificial Sequence
  Description of Artificial Sequence: Synthetic oligonucleotide
  Sense strand starting at position 3874 of SEQ ID NO: 1888204
ggccuugcacacuaaguua

SEQ ID NO: 2518525 - RNA, 19 nt, Artificial Sequence
  Description of Artificial Sequence: Synthetic oligonucleotide
  Antisense strand to SEQ ID NO: 2518524
uaacuuagugugcaaggcc

SEQ ID NO: 2518526 - RNA, 19 nt, Artificial Sequence
  Description of Artificial Sequence: Synthetic oligonucleotide
  Sense strand starting at position 58 of SEQ ID NO: 1888205
ugauaaggaacacguguua

SEQ ID NO: 2518527 - RNA, 19 nt, Artificial Sequence
  Description of Artificial Sequence: Synthetic oligonucleotide
  Antisense strand to SEQ ID NO: 2518526
uaacacguguuccuuauca

SEQ ID NO: 2518528 - RNA, 19 nt, Artificial Sequence
  Description of Artificial Sequence: Synthetic oligonucleotide
  Sense strand starting at position 69 of SEQ ID NO: 1888205
acguguuaaguccaaggca

SEQ ID NO: 2518529 - RNA, 19 nt, Artificial Sequence
  Description of Artificial Sequence: Synthetic oligonucleotide
  Antisense strand to SEQ ID NO: 2518528
ugccuuggacuuaacacgu

SEQ ID NO: 2518530 - RNA, 19 nt, Artificial Sequence
  Description of Artificial Sequence: Synthetic oligonucleotide
  Sense strand starting at position 124 of SEQ ID NO: 1888205
gggaaacuucccggaggca

SEQ ID NO: 2518531 - RNA, 19 nt, Artificial Sequence
  Description of Artificial Sequence: Synthetic oligonucleotide
  Antisense strand to SEQ ID NO: 2518530
ugccuccgggaaguuuccc

SEQ ID NO: 2518532 - RNA, 19 nt, Artificial Sequence
  Description of Artificial Sequence: Synthetic oligonucleotide
  Sense strand starting at position 500 of SEQ ID NO: 1888205
uugagaggugugcaugguu

SEQ ID NO: 2518533 - RNA, 19 nt, Artificial Sequence
  Description of Artificial Sequence: Synthetic oligonucleotide
  Antisense strand to SEQ ID NO: 2518532
aaccaugcacaccucucaa

SEQ ID NO: 2518534 - RNA, 19 nt, Artificial Sequence
  Description of Artificial Sequence: Synthetic oligonucleotide
  Sense strand starting at position 519 of SEQ ID NO: 1888205
gguggaauagggcauucua

SEQ ID NO: 2518535 - RNA, 19 nt, Artificial Sequence
  Description of Artificial Sequence: Synthetic oligonucleotide
  Antisense strand to SEQ ID NO: 2518534
uagaaugcccuauuccacc

SEQ ID NO: 2518536 - RNA, 19 nt, Artificial Sequence
  Description of Artificial Sequence: Synthetic oligonucleotide
  Sense strand starting at position 611 of SEQ ID NO: 1888205
ccaagugugccagaggaaa

SEQ ID NO: 2518537 - RNA, 19 nt, Artificial Sequence
  Description of Artificial Sequence: Synthetic oligonucleotide
  Antisense strand to SEQ ID NO: 2518536
uuuccucuggcacacuugg

SEQ ID NO: 2518538 - RNA, 19 nt, Artificial Sequence
  Description of Artificial Sequence: Synthetic oligonucleotide
  Sense strand starting at position 677 of SEQ ID NO: 1888205
uacagaaauccaggguuau

SEQ ID NO: 2518539 - RNA, 19 nt, Artificial Sequence
  Description of Artificial Sequence: Synthetic oligonucleotide
  Antisense strand to SEQ ID NO: 2518538
auaacccuggauuucugua

SEQ ID NO: 2518540 - RNA, 19 nt, Artificial Sequence
  Description of Artificial Sequence: Synthetic oligonucleotide
  Sense strand starting at position 688 of SEQ ID NO: 1888205
aggguuauguaaccagcaa

SEQ ID NO: 2518541 - RNA, 19 nt, Artificial Sequence
  Description of Artificial Sequence: Synthetic oligonucleotide
  Antisense strand to SEQ ID NO: 2518540
uugcugguuacauaacccu

SEQ ID NO: 2518542 - RNA, 19 nt, Artificial Sequence
  Description of Artificial Sequence: Synthetic oligonucleotide
  Sense strand starting at position 689 of SEQ ID NO: 1888205
ggguuauguaaccagcaag

SEQ ID NO: 2518543 - RNA, 19 nt, Artificial Sequence
  Description of Artificial Sequence: Synthetic oligonucleotide
  Antisense strand to SEQ ID NO: 2518542
cuugcugguuacauaaccc

SEQ ID NO: 2518544 - RNA, 19 nt, Artificial Sequence
  Description of Artificial Sequence: Synthetic oligonucleotide
  Sense strand starting at position 790 of SEQ ID NO: 1888205
uccugagaagccugcuaaa

SEQ ID NO: 2518545 - RNA, 19 nt, Artificial Sequence
  Description of Artificial Sequence: Synthetic oligonucleotide
  Antisense strand to SEQ ID NO: 2518544
uuuagcaggcuucucagga

SEQ ID NO: 2518546 - RNA, 19 nt, Artificial Sequence
  Description of Artificial Sequence: Synthetic oligonucleotide
  Sense strand starting at position 1011 of SEQ ID NO: 1888205
uuuccauggccauggauua

SEQ ID NO: 2518547 - RNA, 19 nt, Artificial Sequence
  Description of Artificial Sequence: Synthetic oligonucleotide
  Antisense strand to SEQ ID NO: 2518546
uaauccauggccauggaaa

SEQ ID NO: 2518548 - RNA, 19 nt, Artificial Sequence
  Description of Artificial Sequence: Synthetic oligonucleotide
  Sense strand starting at position 1012 of SEQ ID NO: 1888205
uuccauggccauggauuau

SEQ ID NO: 2518549 - RNA, 19 nt, Artificial Sequence
  Description of Artificial Sequence: Synthetic oligonucleotide
  Antisense strand to SEQ ID NO: 2518548
auaauccauggccauggaa

SEQ ID NO: 2518550 - RNA, 19 nt, Artificial Sequence
  Description of Artificial Sequence: Synthetic oligonucleotide
  Sense strand starting at position 1233 of SEQ ID NO: 1888205
agcucuucccaggacucaa

SEQ ID NO: 2518551 - RNA, 19 nt, Artificial Sequence
  Description of Artificial Sequence: Synthetic oligonucleotide
  Antisense strand to SEQ ID NO: 2518550
uugaguccugggaagagcu

SEQ ID NO: 2518552 - RNA, 19 nt, Artificial Sequence
  Description of Artificial Sequence: Synthetic oligonucleotide
  Sense strand starting at position 1996 of SEQ ID NO: 1888205
uccucauuccggcaguauu

SEQ ID NO: 2518553 - RNA, 19 nt, Artificial Sequence
  Description of Artificial Sequence: Synthetic oligonucleotide
  Antisense strand to SEQ ID NO: 2518552
aauacugccggaaugagga

SEQ ID NO: 2518554 - RNA, 19 nt, Artificial Sequence
  Description of Artificial Sequence: Synthetic oligonucleotide
  Sense strand starting at position 2006 of SEQ ID NO: 1888205
ggcaguauugggcaaugca

SEQ ID NO: 2518555 - RNA, 19 nt, Artificial Sequence
  Description of Artificial Sequence: Synthetic oligonucleotide
  Antisense strand to SEQ ID NO: 2518554
ugcauugcccaauacugcc

SEQ ID NO: 2518556 - RNA, 19 nt, Artificial Sequence
  Description of Artificial Sequence: Synthetic oligonucleotide
  Sense strand starting at position 2022 of SEQ ID NO: 1888205
gcaacacaguguuuccaau

SEQ ID NO: 2518557 - RNA, 19 nt, Artificial Sequence
  Description of Artificial Sequence: Synthetic oligonucleotide
  Antisense strand to SEQ ID NO: 2518556
auuggaaacacuguguugc

SEQ ID NO: 2518558 - RNA, 19 nt, Artificial Sequence
  Description of Artificial Sequence: Synthetic oligonucleotide
  Sense strand starting at position 2039 of SEQ ID NO: 1888205
auguucucuuaggcucaaa

SEQ ID NO: 2518559 - RNA, 19 nt, Artificial Sequence
  Description of Artificial Sequence: Synthetic oligonucleotide
  Antisense strand to SEQ ID NO: 2518558
uuugagccuaagagaacau

SEQ ID NO: 2518560 - RNA, 19 nt, Artificial Sequence
  Description of Artificial Sequence: Synthetic oligonucleotide
  Sense strand starting at position 2399 of SEQ ID NO: 1888205
aagagagacgccugguguu

SEQ ID NO: 2518561 - RNA, 19 nt, Artificial Sequence
  Description of Artificial Sequence: Synthetic oligonucleotide
  Antisense strand to SEQ ID NO: 2518560
aacaccaggcgucucucuu

SEQ ID NO: 2518562 - RNA, 19 nt, Artificial Sequence
  Description of Artificial Sequence: Synthetic oligonucleotide
  Sense strand starting at position 2573 of SEQ ID NO: 1888205
ccuucuagacuguaagcaa

SEQ ID NO: 2518563 - RNA, 19 nt, Artificial Sequence
  Description of Artificial Sequence: Synthetic oligonucleotide
  Antisense strand to SEQ ID NO: 2518562
uugcuuacagucuagaagg

SEQ ID NO: 2518564 - RNA, 19 nt, Artificial Sequence
  Description of Artificial Sequence: Synthetic oligonucleotide
  Sense strand starting at position 2656 of SEQ ID NO: 1888205
gcauuugauaagugcuuga

SEQ ID NO: 2518565 - RNA, 19 nt, Artificial Sequence
  Description of Artificial Sequence: Synthetic oligonucleotide
  Antisense strand to SEQ ID NO: 2518564
ucaagcacuuaucaaaugc

SEQ ID NO: 2518566 - RNA, 19 nt, Artificial Sequence
  Description of Artificial Sequence: Synthetic oligonucleotide
  Sense strand starting at position 2659 of SEQ ID NO: 1888205
uuugauaagugcuugauua

SEQ ID NO: 2518567 - RNA, 19 nt, Artificial Sequence
  Description of Artificial Sequence: Synthetic oligonucleotide
  Antisense strand to SEQ ID NO: 2518566
uaaucaagcacuuaucaaa

SEQ ID NO: 2518568 - RNA, 19 nt, Artificial Sequence
  Description of Artificial Sequence: Synthetic oligonucleotide
  Sense strand starting at position 2660 of SEQ ID NO: 1888205
uugauaagugcuugauuaa

SEQ ID NO: 2518569 - RNA, 19 nt, Artificial Sequence
  Description of Artificial Sequence: Synthetic oligonucleotide
  Antisense strand to SEQ ID NO: 2518568
uuaaucaagcacuuaucaa

SEQ ID NO: 2518570 - RNA, 19 nt, Artificial Sequence
  Description of Artificial Sequence: Synthetic oligonucleotide
  Sense strand starting at position 2661 of SEQ ID NO: 1888205
ugauaagugcuugauuaaa

SEQ ID NO: 2518571 - RNA, 19 nt, Artificial Sequence
  Description of Artificial Sequence: Synthetic oligonucleotide
  Antisense strand to SEQ ID NO: 2518570
uuuaaucaagcacuuauca

SEQ ID NO: 2518572 - RNA, 19 nt, Artificial Sequence
  Description of Artificial Sequence: Synthetic oligonucleotide
  Sense strand starting at position 2696 of SEQ ID NO: 1888205
gaaguaaauguaggcugua

SEQ ID NO: 2518573 - RNA, 19 nt, Artificial Sequence
  Description of Artificial Sequence: Synthetic oligonucleotide
  Antisense strand to SEQ ID NO: 2518572
uacagccuacauuuacuuc

SEQ ID NO: 2518574 - RNA, 19 nt, Artificial Sequence
  Description of Artificial Sequence: Synthetic oligonucleotide
  Sense strand starting at position 2697 of SEQ ID NO: 1888205
aaguaaauguaggcuguaa

SEQ ID NO: 2518575 - RNA, 19 nt, Artificial Sequence
  Description of Artificial Sequence: Synthetic oligonucleotide
  Antisense strand to SEQ ID NO: 2518574
uuacagccuacauuuacuu

SEQ ID NO: 2518576 - RNA, 19 nt, Artificial Sequence
  Description of Artificial Sequence: Synthetic oligonucleotide
  Sense strand starting at position 2721 of SEQ ID NO: 1888205
aguauucuucuagaagcac

SEQ ID NO: 2518577 - RNA, 19 nt, Artificial Sequence
  Description of Artificial Sequence: Synthetic oligonucleotide
  Antisense strand to SEQ ID NO: 2518576
gugcuucuagaagaauacu

SEQ ID NO: 2518578 - RNA, 19 nt, Artificial Sequence
  Description of Artificial Sequence: Synthetic oligonucleotide
  Sense strand starting at position 2893 of SEQ ID NO: 1888205
agcugaggauguguuauca

SEQ ID NO: 2518579 - RNA, 19 nt, Artificial Sequence
  Description of Artificial Sequence: Synthetic oligonucleotide
  Antisense strand to SEQ ID NO: 2518578
ugauaacacauccucagcu

SEQ ID NO: 2518580 - RNA, 19 nt, Artificial Sequence
  Description of Artificial Sequence: Synthetic oligonucleotide
  Sense strand starting at position 2897 of SEQ ID NO: 1888205
gaggauguguuaucaguga

SEQ ID NO: 2518581 - RNA, 19 nt, Artificial Sequence
  Description of Artificial Sequence: Synthetic oligonucleotide
  Antisense strand to SEQ ID NO: 2518580
ucacugauaacacauccuc

SEQ ID NO: 2518582 - RNA, 19 nt, Artificial Sequence
  Description of Artificial Sequence: Synthetic oligonucleotide
  Sense strand starting at position 2902 of SEQ ID NO: 1888205
uguguuaucagugagugug

SEQ ID NO: 2518583 - RNA, 19 nt, Artificial Sequence
  Description of Artificial Sequence: Synthetic oligonucleotide
  Antisense strand to SEQ ID NO: 2518582
cacacucacugauaacaca

SEQ ID NO: 2518584 - RNA, 19 nt, Artificial Sequence
  Description of Artificial Sequence: Synthetic oligonucleotide
  Sense strand starting at position 3463 of SEQ ID NO: 1888205
ggauguuuccagggcagug

SEQ ID NO: 2518585 - RNA, 19 nt, Artificial Sequence
  Description of Artificial Sequence: Synthetic oligonucleotide
  Antisense strand to SEQ ID NO: 2518584
cacugcccuggaaacaucc

SEQ ID NO: 2518586 - RNA, 19 nt, Artificial Sequence
  Description of Artificial Sequence: Synthetic oligonucleotide
  Sense strand starting at position 3477 of SEQ ID NO: 1888205
cagugaucccaggaugcga

SEQ ID NO: 2518587 - RNA, 19 nt, Artificial Sequence
  Description of Artificial Sequence: Synthetic oligonucleotide
  Antisense strand to SEQ ID NO: 2518586
ucgcauccugggaucacug

SEQ ID NO: 2518588 - RNA, 19 nt, Artificial Sequence
  Description of Artificial Sequence: Synthetic oligonucleotide
  Sense strand starting at position 3492 of SEQ ID NO: 1888205
gcgaucaagagagguuguu

SEQ ID NO: 2518589 - RNA, 19 nt, Artificial Sequence
  Description of Artificial Sequence: Synthetic oligonucleotide
  Antisense strand to SEQ ID NO: 2518588
aacaaccucucuugaucgc

SEQ ID NO: 2518590 - RNA, 19 nt, Artificial Sequence
  Description of Artificial Sequence: Synthetic oligonucleotide
  Sense strand starting at position 3517 of SEQ ID NO: 1888205
gcugcagauggcuaaucaa

SEQ ID NO: 2518591 - RNA, 19 nt, Artificial Sequence
  Description of Artificial Sequence: Synthetic oligonucleotide
  Antisense strand to SEQ ID NO: 2518590
uugauuagccaucugcagc

SEQ ID NO: 2518592 - RNA, 19 nt, Artificial Sequence
  Description of Artificial Sequence: Synthetic oligonucleotide
  Sense strand starting at position 3520 of SEQ ID NO: 1888205
gcagauggcuaaucaaucu

SEQ ID NO: 2518593 - RNA, 19 nt, Artificial Sequence
  Description of Artificial Sequence: Synthetic oligonucleotide
  Antisense strand to SEQ ID NO: 2518592
agauugauuagccaucugc

SEQ ID NO: 2518594 - RNA, 19 nt, Artificial Sequence
  Description of Artificial Sequence: Synthetic oligonucleotide
  Sense strand starting at position 3575 of SEQ ID NO: 1888205
ccugaugugacgcaagaag

SEQ ID NO: 2518595 - RNA, 19 nt, Artificial Sequence
  Description of Artificial Sequence: Synthetic oligonucleotide
  Antisense strand to SEQ ID NO: 2518594
cuucuugcgucacaucagg

SEQ ID NO: 2518596 - RNA, 19 nt, Artificial Sequence
  Description of Artificial Sequence: Synthetic oligonucleotide
  Sense strand starting at position 3639 of SEQ ID NO: 1888205
acaugaaucuaaucagguu

SEQ ID NO: 2518597 - RNA, 19 nt, Artificial Sequence
  Description of Artificial Sequence: Synthetic oligonucleotide
  Antisense strand to SEQ ID NO: 2518596
aaccugauuagauucaugu

SEQ ID NO: 2518598 - RNA, 19 nt, Artificial Sequence
  Description of Artificial Sequence: Synthetic oligonucleotide
  Sense strand starting at position 3703 of SEQ ID NO: 1888205
uguguuaaacacuagcaca

SEQ ID NO: 2518599 - RNA, 19 nt, Artificial Sequence
  Description of Artificial Sequence: Synthetic oligonucleotide
  Antisense strand to SEQ ID NO: 2518598
ugugcuaguguuuaacaca

SEQ ID NO: 2518600 - RNA, 19 nt, Artificial Sequence
  Description of Artificial Sequence: Synthetic oligonucleotide
  Sense strand starting at position 3877 of SEQ ID NO: 1888205
gggacauucugggugugga

SEQ ID NO: 2518601 - RNA, 19 nt, Artificial Sequence
  Description of Artificial Sequence: Synthetic oligonucleotide
  Antisense strand to SEQ ID NO: 2518600
uccacacccagaauguccc

SEQ ID NO: 2518602 - RNA, 19 nt, Artificial Sequence
  Description of Artificial Sequence: Synthetic oligonucleotide
  Sense strand starting at position 3953 of SEQ ID NO: 1888205
cugcucuaagaauagucua

SEQ ID NO: 2518603 - RNA, 19 nt, Artificial Sequence
  Description of Artificial Sequence: Synthetic oligonucleotide
  Antisense strand to SEQ ID NO: 2518602
uagacuauucuuagagcag

SEQ ID NO: 2518604 - RNA, 19 nt, Artificial Sequence
  Description of Artificial Sequence: Synthetic oligonucleotide
  Sense strand starting at position 3956 of SEQ ID NO: 1888205
cucuaagaauagucuagua

SEQ ID NO: 2518605 - RNA, 19 nt, Artificial Sequence
  Description of Artificial Sequence: Synthetic oligonucleotide
  Antisense strand to SEQ ID NO: 2518604
uacuagacuauucuuagag

SEQ ID NO: 2518606 - RNA, 19 nt, Artificial Sequence
  Description of Artificial Sequence: Synthetic oligonucleotide
  Sense strand starting at position 59 of SEQ ID NO: 1888206
gggucaugugccugggaac

SEQ ID NO: 2518607 - RNA, 19 nt, Artificial Sequence
  Description of Artificial Sequence: Synthetic oligonucleotide
  Antisense strand to SEQ ID NO: 2518606
guucccaggcacaugaccc

SEQ ID NO: 2518608 - RNA, 19 nt, Artificial Sequence
  Description of Artificial Sequence: Synthetic oligonucleotide
  Sense strand starting at position 60 of SEQ ID NO: 1888206
ggucaugugccugggaaca

SEQ ID NO: 2518609 - RNA, 19 nt, Artificial Sequence
  Description of Artificial Sequence: Synthetic oligonucleotide
  Antisense strand to SEQ ID NO: 2518608
uguucccaggcacaugacc

SEQ ID NO: 2518610 - RNA, 19 nt, Artificial Sequence
  Description of Artificial Sequence: Synthetic oligonucleotide
  Sense strand starting at position 148 of SEQ ID NO: 1888206
augggaaugugccugggaa

SEQ ID NO: 2518611 - RNA, 19 nt, Artificial Sequence
  Description of Artificial Sequence: Synthetic oligonucleotide
  Antisense strand to SEQ ID NO: 2518610
uucccaggcacauucccau

SEQ ID NO: 2518612 - RNA, 19 nt, Artificial Sequence
  Description of Artificial Sequence: Synthetic oligonucleotide
  Sense strand starting at position 149 of SEQ ID NO: 1888206
ugggaaugugccugggaac

SEQ ID NO: 2518613 - RNA, 19 nt, Artificial Sequence
  Description of Artificial Sequence: Synthetic oligonucleotide
  Antisense strand to SEQ ID NO: 2518612
guucccaggcacauuccca

SEQ ID NO: 2518614 - RNA, 19 nt, Artificial Sequence
  Description of Artificial Sequence: Synthetic oligonucleotide
  Sense strand starting at position 150 of SEQ ID NO: 1888206
gggaaugugccugggaaca

SEQ ID NO: 2518615 - RNA, 19 nt, Artificial Sequence
  Description of Artificial Sequence: Synthetic oligonucleotide
  Antisense strand to SEQ ID NO: 2518614
uguucccaggcacauuccc

SEQ ID NO: 2518616 - RNA, 19 nt, Artificial Sequence
  Description of Artificial Sequence: Synthetic oligonucleotide
  Sense strand starting at position 327 of SEQ ID NO: 1888206
ccgguugucucaagggaag

SEQ ID NO: 2518617 - RNA, 19 nt, Artificial Sequence
  Description of Artificial Sequence: Synthetic oligonucleotide
  Antisense strand to SEQ ID NO: 2518616
cuucccuugagacaaccgg

SEQ ID NO: 2518618 - RNA, 19 nt, Artificial Sequence
  Description of Artificial Sequence: Synthetic oligonucleotide
  Sense strand starting at position 329 of SEQ ID NO: 1888206
gguugucucaagggaagca

SEQ ID NO: 2518619 - RNA, 19 nt, Artificial Sequence
  Description of Artificial Sequence: Synthetic oligonucleotide
  Antisense strand to SEQ ID NO: 2518618
ugcuucccuugagacaacc

SEQ ID NO: 2518620 - RNA, 19 nt, Artificial Sequence
  Description of Artificial Sequence: Synthetic oligonucleotide
  Sense strand starting at position 449 of SEQ ID NO: 1888206
acccaaacguccugacaga

SEQ ID NO: 2518621 - RNA, 19 nt, Artificial Sequence
  Description of Artificial Sequence: Synthetic oligonucleotide
  Antisense strand to SEQ ID NO: 2518620
ucugucaggacguuugggu

SEQ ID NO: 2518622 - RNA, 19 nt, Artificial Sequence
  Description of Artificial Sequence: Synthetic oligonucleotide
  Sense strand starting at position 450 of SEQ ID NO: 1888206
cccaaacguccugacagaa

SEQ ID NO: 2518623 - RNA, 19 nt, Artificial Sequence
  Description of Artificial Sequence: Synthetic oligonucleotide
  Antisense strand to SEQ ID NO: 2518622
uucugucaggacguuuggg

SEQ ID NO: 2518624 - RNA, 19 nt, Artificial Sequence
  Description of Artificial Sequence: Synthetic oligonucleotide
  Sense strand starting at position 610 of SEQ ID NO: 1888206
gcuucugcaaggugugaaa

SEQ ID NO: 2518625 - RNA, 19 nt, Artificial Sequence
  Description of Artificial Sequence: Synthetic oligonucleotide
  Antisense strand to SEQ ID NO: 2518624
uuucacaccuugcagaagc

SEQ ID NO: 2518626 - RNA, 19 nt, Artificial Sequence
  Description of Artificial Sequence: Synthetic oligonucleotide
  Sense strand starting at position 757 of SEQ ID NO: 1888206
ccgggaagcucuuggccau

SEQ ID NO: 2518627 - RNA, 19 nt, Artificial Sequence
  Description of Artificial Sequence: Synthetic oligonucleotide
  Antisense strand to SEQ ID NO: 2518626
auggccaagagcuucccgg

SEQ ID NO: 2518628 - RNA, 19 nt, Artificial Sequence
  Description of Artificial Sequence: Synthetic oligonucleotide
  Sense strand starting at position 1304 of SEQ ID NO: 1888206
guacgagagccauacauga

SEQ ID NO: 2518629 - RNA, 19 nt, Artificial Sequence
  Description of Artificial Sequence: Synthetic oligonucleotide
  Antisense strand to SEQ ID NO: 2518628
ucauguauggcucucguac

SEQ ID NO: 2518630 - RNA, 19 nt, Artificial Sequence
  Description of Artificial Sequence: Synthetic oligonucleotide
  Sense strand starting at position 1581 of SEQ ID NO: 1888206
gcuguaucaugacuggaca

SEQ ID NO: 2518631 - RNA, 19 nt, Artificial Sequence
  Description of Artificial Sequence: Synthetic oligonucleotide
  Antisense strand to SEQ ID NO: 2518630
uguccagucaugauacagc

SEQ ID NO: 2518632 - RNA, 19 nt, Artificial Sequence
  Description of Artificial Sequence: Synthetic oligonucleotide
  Sense strand starting at position 1582 of SEQ ID NO: 1888206
cuguaucaugacuggacau

SEQ ID NO: 2518633 - RNA, 19 nt, Artificial Sequence
  Description of Artificial Sequence: Synthetic oligonucleotide
  Antisense strand to SEQ ID NO: 2518632
auguccagucaugauacag

SEQ ID NO: 2518634 - RNA, 19 nt, Artificial Sequence
  Description of Artificial Sequence: Synthetic oligonucleotide
  Sense strand starting at position 1955 of SEQ ID NO: 1888206
gggccaagguucugacuga

SEQ ID NO: 2518635 - RNA, 19 nt, Artificial Sequence
  Description of Artificial Sequence: Synthetic oligonucleotide
  Antisense strand to SEQ ID NO: 2518634
ucagucagaaccuuggccc

SEQ ID NO: 2518636 - RNA, 19 nt, Artificial Sequence
  Description of Artificial Sequence: Synthetic oligonucleotide
  Sense strand starting at position 1959 of SEQ ID NO: 1888206
caagguucugacugagaac

SEQ ID NO: 2518637 - RNA, 19 nt, Artificial Sequence
  Description of Artificial Sequence: Synthetic oligonucleotide
  Antisense strand to SEQ ID NO: 2518636
guucucagucagaaccuug

SEQ ID NO: 2518638 - RNA, 19 nt, Artificial Sequence
  Description of Artificial Sequence: Synthetic oligonucleotide
  Sense strand starting at position 2377 of SEQ ID NO: 1888206
guggcuucccaccaagagu

SEQ ID NO: 2518639 - RNA, 19 nt, Artificial Sequence
  Description of Artificial Sequence: Synthetic oligonucleotide
  Antisense strand to SEQ ID NO: 2518638
acucuuggugggaagccac

SEQ ID NO: 2518640 - RNA, 19 nt, Artificial Sequence
  Description of Artificial Sequence: Synthetic oligonucleotide
  Sense strand starting at position 2601 of SEQ ID NO: 1888206
gccucuaggcugugaaacu

SEQ ID NO: 2518641 - RNA, 19 nt, Artificial Sequence
  Description of Artificial Sequence: Synthetic oligonucleotide
  Antisense strand to SEQ ID NO: 2518640
aguuucacagccuagaggc

SEQ ID NO: 2518642 - RNA, 19 nt, Artificial Sequence
  Description of Artificial Sequence: Synthetic oligonucleotide
  Sense strand starting at position 2610 of SEQ ID NO: 1888206
cugugaaacugcuguggaa

SEQ ID NO: 2518643 - RNA, 19 nt, Artificial Sequence
  Description of Artificial Sequence: Synthetic oligonucleotide
  Antisense strand to SEQ ID NO: 2518642
uuccacagcaguuucacag

SEQ ID NO: 2518644 - RNA, 19 nt, Artificial Sequence
  Description of Artificial Sequence: Synthetic oligonucleotide
  Sense strand starting at position 2740 of SEQ ID NO: 1888206
gcaugucccucccagcauu

SEQ ID NO: 2518645 - RNA, 19 nt, Artificial Sequence
  Description of Artificial Sequence: Synthetic oligonucleotide
  Antisense strand to SEQ ID NO: 2518644
aaugcugggagggacaugc

SEQ ID NO: 2518646 - RNA, 19 nt, Artificial Sequence
  Description of Artificial Sequence: Synthetic oligonucleotide
  Sense strand starting at position 2844 of SEQ ID NO: 1888206
ccaagucuccuugggcgau

SEQ ID NO: 2518647 - RNA, 19 nt, Artificial Sequence
  Description of Artificial Sequence: Synthetic oligonucleotide
  Antisense strand to SEQ ID NO: 2518646
aucgcccaaggagacuugg

SEQ ID NO: 2518648 - RNA, 19 nt, Artificial Sequence
  Description of Artificial Sequence: Synthetic oligonucleotide
  Sense strand starting at position 3142 of SEQ ID NO: 1888206
gcuggaguucugcacucuu

SEQ ID NO: 2518649 - RNA, 19 nt, Artificial Sequence
  Description of Artificial Sequence: Synthetic oligonucleotide
  Antisense strand to SEQ ID NO: 2518648
aagagugcagaacuccagc

SEQ ID NO: 2518650 - RNA, 19 nt, Artificial Sequence
  Description of Artificial Sequence: Synthetic oligonucleotide
  Sense strand starting at position 3263 of SEQ ID NO: 1888206
ggcccaguuuccucugaga

SEQ ID NO: 2518651 - RNA, 19 nt, Artificial Sequence
  Description of Artificial Sequence: Synthetic oligonucleotide
  Antisense strand to SEQ ID NO: 2518650
ucucagaggaaacugggcc

SEQ ID NO: 2518652 - RNA, 19 nt, Artificial Sequence
  Description of Artificial Sequence: Synthetic oligonucleotide
  Sense strand starting at position 3265 of SEQ ID NO: 1888206
cccaguuuccucugagacu

SEQ ID NO: 2518653 - RNA, 19 nt, Artificial Sequence
  Description of Artificial Sequence: Synthetic oligonucleotide
  Antisense strand to SEQ ID NO: 2518652
agucucagaggaaacuggg

SEQ ID NO: 2518654 - RNA, 19 nt, Artificial Sequence
  Description of Artificial Sequence: Synthetic oligonucleotide
  Sense strand starting at position 3266 of SEQ ID NO: 1888206
ccaguuuccucugagacug

SEQ ID NO: 2518655 - RNA, 19 nt, Artificial Sequence
  Description of Artificial Sequence: Synthetic oligonucleotide
  Antisense strand to SEQ ID NO: 2518654
cagucucagaggaaacugg

SEQ ID NO: 2518656 - RNA, 19 nt, Artificial Sequence
  Description of Artificial Sequence: Synthetic oligonucleotide
  Sense strand starting at position 3297 of SEQ ID NO: 1888206
gcuccuagcaaguagauga

SEQ ID NO: 2518657 - RNA, 19 nt, Artificial Sequence
  Description of Artificial Sequence: Synthetic oligonucleotide
  Antisense strand to SEQ ID NO: 2518656
ucaucuacuugcuaggagc

SEQ ID NO: 2518658 - RNA, 19 nt, Artificial Sequence
  Description of Artificial Sequence: Synthetic oligonucleotide
  Sense strand starting at position 3355 of SEQ ID NO: 1888206
gggucaaguuucuagggaa

SEQ ID NO: 2518659 - RNA, 19 nt, Artificial Sequence
  Description of Artificial Sequence: Synthetic oligonucleotide
  Antisense strand to SEQ ID NO: 2518658
uucccuagaaacuugaccc

SEQ ID NO: 2518660 - RNA, 19 nt, Artificial Sequence
  Description of Artificial Sequence: Synthetic oligonucleotide
  Sense strand starting at position 3358 of SEQ ID NO: 1888206
ucaaguuucuagggaaagg

SEQ ID NO: 2518661 - RNA, 19 nt, Artificial Sequence
  Description of Artificial Sequence: Synthetic oligonucleotide
  Antisense strand to SEQ ID NO: 2518660
ccuuucccuagaaacuuga

SEQ ID NO: 2518662 - RNA, 19 nt, Artificial Sequence
  Description of Artificial Sequence: Synthetic oligonucleotide
  Sense strand starting at position 3764 of SEQ ID NO: 1888206
ggguccuccugcuugucaa

SEQ ID NO: 2518663 - RNA, 19 nt, Artificial Sequence
  Description of Artificial Sequence: Synthetic oligonucleotide
  Antisense strand to SEQ ID NO: 2518662
uugacaagcaggaggaccc

SEQ ID NO: 2518664 - RNA, 19 nt, Artificial Sequence
  Description of Artificial Sequence: Synthetic oligonucleotide
  Sense strand starting at position 3828 of SEQ ID NO: 1888206
ccaagucugggaugggaua

SEQ ID NO: 2518665 - RNA, 19 nt, Artificial Sequence
  Description of Artificial Sequence: Synthetic oligonucleotide
  Antisense strand to SEQ ID NO: 2518664
uaucccaucccagacuugg

SEQ ID NO: 2518666 - RNA, 19 nt, Artificial Sequence
  Description of Artificial Sequence: Synthetic oligonucleotide
  Sense strand starting at position 3902 of SEQ ID NO: 1888206
ugccgcuuugcuccacaga

SEQ ID NO: 2518667 - RNA, 19 nt, Artificial Sequence
  Description of Artificial Sequence: Synthetic oligonucleotide
  Antisense strand to SEQ ID NO: 2518666
ucuguggagcaaagcggca

SEQ ID NO: 2518668 - RNA, 19 nt, Artificial Sequence
  Description of Artificial Sequence: Synthetic oligonucleotide
  Sense strand starting at position 3903 of SEQ ID NO: 1888206
gccgcuuugcuccacagaa

SEQ ID NO: 2518669 - RNA, 19 nt, Artificial Sequence
  Description of Artificial Sequence: Synthetic oligonucleotide
  Antisense strand to SEQ ID NO: 2518668
uucuguggagcaaagcggc

SEQ ID NO: 2518670 - RNA, 19 nt, Artificial Sequence
  Description of Artificial Sequence: Synthetic oligonucleotide
  Sense strand starting at position 29 of SEQ ID NO: 1888207
augaccaucuguucucaua

SEQ ID NO: 2518671 - RNA, 19 nt, Artificial Sequence
  Description of Artificial Sequence: Synthetic oligonucleotide
  Antisense strand to SEQ ID NO: 2518670
uaugagaacagauggucau

SEQ ID NO: 2518672 - RNA, 19 nt, Artificial Sequence
  Description of Artificial Sequence: Synthetic oligonucleotide
  Sense strand starting at position 351 of SEQ ID NO: 1888207
ucauccuuccgaugacaaa

SEQ ID NO: 2518673 - RNA, 19 nt, Artificial Sequence
  Description of Artificial Sequence: Synthetic oligonucleotide
  Antisense strand to SEQ ID NO: 2518672
uuugucaucggaaggauga

SEQ ID NO: 2518674 - RNA, 19 nt, Artificial Sequence
  Description of Artificial Sequence: Synthetic oligonucleotide
  Sense strand starting at position 522 of SEQ ID NO: 1888207
acuccuccuuuggcagaau

SEQ ID NO: 2518675 - RNA, 19 nt, Artificial Sequence
  Description of Artificial Sequence: Synthetic oligonucleotide
  Antisense strand to SEQ ID NO: 2518674
auucugccaaaggaggagu

SEQ ID NO: 2518676 - RNA, 19 nt, Artificial Sequence
  Description of Artificial Sequence: Synthetic oligonucleotide
  Sense strand starting at position 679 of SEQ ID NO: 1888207
gagggaucccuccauguuu

SEQ ID NO: 2518677 - RNA, 19 nt, Artificial Sequence
  Description of Artificial Sequence: Synthetic oligonucleotide
  Antisense strand to SEQ ID NO: 2518676
aaacauggagggaucccuc

SEQ ID NO: 2518678 - RNA, 19 nt, Artificial Sequence
  Description of Artificial Sequence: Synthetic oligonucleotide
  Sense strand starting at position 696 of SEQ ID NO: 1888207
uuccaugauuuggaagaga

SEQ ID NO: 2518679 - RNA, 19 nt, Artificial Sequence
  Description of Artificial Sequence: Synthetic oligonucleotide
  Antisense strand to SEQ ID NO: 2518678
ucucuuccaaaucauggaa

SEQ ID NO: 2518680 - RNA, 19 nt, Artificial Sequence
  Description of Artificial Sequence: Synthetic oligonucleotide
  Sense strand starting at position 870 of SEQ ID NO: 1888207
gagggaagguuauucguau

SEQ ID NO: 2518681 - RNA, 19 nt, Artificial Sequence
  Description of Artificial Sequence: Synthetic oligonucleotide
  Antisense strand to SEQ ID NO: 2518680
auacgaauaaccuucccuc

SEQ ID NO: 2518682 - RNA, 19 nt, Artificial Sequence
  Description of Artificial Sequence: Synthetic oligonucleotide
  Sense strand starting at position 871 of SEQ ID NO: 1888207
agggaagguuauucguauc

SEQ ID NO: 2518683 - RNA, 19 nt, Artificial Sequence
  Description of Artificial Sequence: Synthetic oligonucleotide
  Antisense strand to SEQ ID NO: 2518682
gauacgaauaaccuucccu

SEQ ID NO: 2518684 - RNA, 19 nt, Artificial Sequence
  Description of Artificial Sequence: Synthetic oligonucleotide
  Sense strand starting at position 1035 of SEQ ID NO: 1888207
cgacucugaugucugaauu

SEQ ID NO: 2518685 - RNA, 19 nt, Artificial Sequence
  Description of Artificial Sequence: Synthetic oligonucleotide
  Antisense strand to SEQ ID NO: 2518684
aauucagacaucagagucg

SEQ ID NO: 2518686 - RNA, 19 nt, Artificial Sequence
  Description of Artificial Sequence: Synthetic oligonucleotide
  Sense strand starting at position 1036 of SEQ ID NO: 1888207
gacucugaugucugaauuc

SEQ ID NO: 2518687 - RNA, 19 nt, Artificial Sequence
  Description of Artificial Sequence: Synthetic oligonucleotide
  Antisense strand to SEQ ID NO: 2518686
gaauucagacaucagaguc

SEQ ID NO: 2518688 - RNA, 19 nt, Artificial Sequence
  Description of Artificial Sequence: Synthetic oligonucleotide
  Sense strand starting at position 1092 of SEQ ID NO: 1888207
cuuguauuaucacuaugua

SEQ ID NO: 2518689 - RNA, 19 nt, Artificial Sequence
  Description of Artificial Sequence: Synthetic oligonucleotide
  Antisense strand to SEQ ID NO: 2518688
uacauagugauaauacaag

SEQ ID NO: 2518690 - RNA, 19 nt, Artificial Sequence
  Description of Artificial Sequence: Synthetic oligonucleotide
  Sense strand starting at position 1227 of SEQ ID NO: 1888207
gagccuuggauuuguaagu

SEQ ID NO: 2518691 - RNA, 19 nt, Artificial Sequence
  Description of Artificial Sequence: Synthetic oligonucleotide
  Antisense strand to SEQ ID NO: 2518690
acuuacaaauccaaggcuc

SEQ ID NO: 2518692 - RNA, 19 nt, Artificial Sequence
  Description of Artificial Sequence: Synthetic oligonucleotide
  Sense strand starting at position 1233 of SEQ ID NO: 1888207
uggauuuguaaguggcuca

SEQ ID NO: 2518693 - RNA, 19 nt, Artificial Sequence
  Description of Artificial Sequence: Synthetic oligonucleotide
  Antisense strand to SEQ ID NO: 2518692
ugagccacuuacaaaucca

SEQ ID NO: 2518694 - RNA, 19 nt, Artificial Sequence
  Description of Artificial Sequence: Synthetic oligonucleotide
  Sense strand starting at position 1306 of SEQ ID NO: 1888207
gggccaaagcaaugacuua

SEQ ID NO: 2518695 - RNA, 19 nt, Artificial Sequence
  Description of Artificial Sequence: Synthetic oligonucleotide
  Antisense strand to SEQ ID NO: 2518694
uaagucauugcuuuggccc

SEQ ID NO: 2518696 - RNA, 19 nt, Artificial Sequence
  Description of Artificial Sequence: Synthetic oligonucleotide
  Sense strand starting at position 1391 of SEQ ID NO: 1888207
cucugcagacucggaauua

SEQ ID NO: 2518697 - RNA, 19 nt, Artificial Sequence
  Description of Artificial Sequence: Synthetic oligonucleotide
  Antisense strand to SEQ ID NO: 2518696
uaauuccgagucugcagag

SEQ ID NO: 2518698 - RNA, 19 nt, Artificial Sequence
  Description of Artificial Sequence: Synthetic oligonucleotide
  Sense strand starting at position 1517 of SEQ ID NO: 1888207
aagugugaccuugggaaag

SEQ ID NO: 2518699 - RNA, 19 nt, Artificial Sequence
  Description of Artificial Sequence: Synthetic oligonucleotide
  Antisense strand to SEQ ID NO: 2518698
cuuucccaaggucacacuu

SEQ ID NO: 2518700 - RNA, 19 nt, Artificial Sequence
  Description of Artificial Sequence: Synthetic oligonucleotide
  Sense strand starting at position 1550 of SEQ ID NO: 1888207
agugacuucgccucgccaa

SEQ ID NO: 2518701 - RNA, 19 nt, Artificial Sequence
  Description of Artificial Sequence: Synthetic oligonucleotide
  Antisense strand to SEQ ID NO: 2518700
uuggcgaggcgaagucacu

SEQ ID NO: 2518702 - RNA, 19 nt, Artificial Sequence
  Description of Artificial Sequence: Synthetic oligonucleotide
  Sense strand starting at position 1607 of SEQ ID NO: 1888207
gcaucuaaggugcagaaau

SEQ ID NO: 2518703 - RNA, 19 nt, Artificial Sequence
  Description of Artificial Sequence: Synthetic oligonucleotide
  Antisense strand to SEQ ID NO: 2518702
auuucugcaccuuagaugc

SEQ ID NO: 2518704 - RNA, 19 nt, Artificial Sequence
  Description of Artificial Sequence: Synthetic oligonucleotide
  Sense strand starting at position 2288 of SEQ ID NO: 1888207
uguguuugccgggugacuu

SEQ ID NO: 2518705 - RNA, 19 nt, Artificial Sequence
  Description of Artificial Sequence: Synthetic oligonucleotide
  Antisense strand to SEQ ID NO: 2518704
aagucacccggcaaacaca

SEQ ID NO: 2518706 - RNA, 19 nt, Artificial Sequence
  Description of Artificial Sequence: Synthetic oligonucleotide
  Sense strand starting at position 2359 of SEQ ID NO: 1888207
gcccaaagaaugggaguaa

SEQ ID NO: 2518707 - RNA, 19 nt, Artificial Sequence
  Description of Artificial Sequence: Synthetic oligonucleotide
  Antisense strand to SEQ ID NO: 2518706
uuacucccauucuuugggc

SEQ ID NO: 2518708 - RNA, 19 nt, Artificial Sequence
  Description of Artificial Sequence: Synthetic oligonucleotide
  Sense strand starting at position 2406 of SEQ ID NO: 1888207
ggugacugucaucagguuu

SEQ ID NO: 2518709 - RNA, 19 nt, Artificial Sequence
  Description of Artificial Sequence: Synthetic oligonucleotide
  Antisense strand to SEQ ID NO: 2518708
aaaccugaugacagucacc

SEQ ID NO: 2518710 - RNA, 19 nt, Artificial Sequence
  Description of Artificial Sequence: Synthetic oligonucleotide
  Sense strand starting at position 2442 of SEQ ID NO: 1888207
guuacucauccugggaaga

SEQ ID NO: 2518711 - RNA, 19 nt, Artificial Sequence
  Description of Artificial Sequence: Synthetic oligonucleotide
  Antisense strand to SEQ ID NO: 2518710
ucuucccaggaugaguaac

SEQ ID NO: 2518712 - RNA, 19 nt, Artificial Sequence
  Description of Artificial Sequence: Synthetic oligonucleotide
  Sense strand starting at position 2510 of SEQ ID NO: 1888207
uuauaaguggcucaagguu

SEQ ID NO: 2518713 - RNA, 19 nt, Artificial Sequence
  Description of Artificial Sequence: Synthetic oligonucleotide
  Antisense strand to SEQ ID NO: 2518712
aaccuugagccacuuauaa

SEQ ID NO: 2518714 - RNA, 19 nt, Artificial Sequence
  Description of Artificial Sequence: Synthetic oligonucleotide
  Sense strand starting at position 2554 of SEQ ID NO: 1888207
ggaggaguuguccaaauuc

SEQ ID NO: 2518715 - RNA, 19 nt, Artificial Sequence
  Description of Artificial Sequence: Synthetic oligonucleotide
  Antisense strand to SEQ ID NO: 2518714
gaauuuggacaacuccucc

SEQ ID NO: 2518716 - RNA, 19 nt, Artificial Sequence
  Description of Artificial Sequence: Synthetic oligonucleotide
  Sense strand starting at position 2602 of SEQ ID NO: 1888207
auucuuauugagcauguga

SEQ ID NO: 2518717 - RNA, 19 nt, Artificial Sequence
  Description of Artificial Sequence: Synthetic oligonucleotide
  Antisense strand to SEQ ID NO: 2518716
ucacaugcucaauaagaau

SEQ ID NO: 2518718 - RNA, 19 nt, Artificial Sequence
  Description of Artificial Sequence: Synthetic oligonucleotide
  Sense strand starting at position 2604 of SEQ ID NO: 1888207
ucuuauugagcaugugaaa

SEQ ID NO: 2518719 - RNA, 19 nt, Artificial Sequence
  Description of Artificial Sequence: Synthetic oligonucleotide
  Antisense strand to SEQ ID NO: 2518718
uuucacaugcucaauaaga

SEQ ID NO: 2518720 - RNA, 19 nt, Artificial Sequence
  Description of Artificial Sequence: Synthetic oligonucleotide
  Sense strand starting at position 2613 of SEQ ID NO: 1888207
gcaugugaaaguugauaau

SEQ ID NO: 2518721 - RNA, 19 nt, Artificial Sequence
  Description of Artificial Sequence: Synthetic oligonucleotide
  Antisense strand to SEQ ID NO: 2518720
auuaucaacuuucacaugc

SEQ ID NO: 2518722 - RNA, 19 nt, Artificial Sequence
  Description of Artificial Sequence: Synthetic oligonucleotide
  Sense strand starting at position 2962 of SEQ ID NO: 1888207
guaugcuccgaguugcgau

SEQ ID NO: 2518723 - RNA, 19 nt, Artificial Sequence
  Description of Artificial Sequence: Synthetic oligonucleotide
  Antisense strand to SEQ ID NO: 2518722
aucgcaacucggagcauac

SEQ ID NO: 2518724 - RNA, 19 nt, Artificial Sequence
  Description of Artificial Sequence: Synthetic oligonucleotide
  Sense strand starting at position 3093 of SEQ ID NO: 1888207
cggugaaggagucagacuu

SEQ ID NO: 2518725 - RNA, 19 nt, Artificial Sequence
  Description of Artificial Sequence: Synthetic oligonucleotide
  Antisense strand to SEQ ID NO: 2518724
aagucugacuccuucaccg

SEQ ID NO: 2518726 - RNA, 19 nt, Artificial Sequence
  Description of Artificial Sequence: Synthetic oligonucleotide
  Sense strand starting at position 3124 of SEQ ID NO: 1888207
cacagaaucuacguaugau

SEQ ID NO: 2518727 - RNA, 19 nt, Artificial Sequence
  Description of Artificial Sequence: Synthetic oligonucleotide
  Antisense strand to SEQ ID NO: 2518726
aucauacguagauucugug

SEQ ID NO: 2518728 - RNA, 19 nt, Artificial Sequence
  Description of Artificial Sequence: Synthetic oligonucleotide
  Sense strand starting at position 3132 of SEQ ID NO: 1888207
cuacguaugaugugggaga

SEQ ID NO: 2518729 - RNA, 19 nt, Artificial Sequence
  Description of Artificial Sequence: Synthetic oligonucleotide
  Antisense strand to SEQ ID NO: 2518728
ucucccacaucauacguag

SEQ ID NO: 2518730 - RNA, 19 nt, Artificial Sequence
  Description of Artificial Sequence: Synthetic oligonucleotide
  Sense strand starting at position 3134 of SEQ ID NO: 1888207
acguaugaugugggagaga

SEQ ID NO: 2518731 - RNA, 19 nt, Artificial Sequence
  Description of Artificial Sequence: Synthetic oligonucleotide
  Antisense strand to SEQ ID NO: 2518730
ucucucccacaucauacgu

SEQ ID NO: 2518732 - RNA, 19 nt, Artificial Sequence
  Description of Artificial Sequence: Synthetic oligonucleotide
  Sense strand starting at position 3262 of SEQ ID NO: 1888207
agagaugccucacuuaguc

SEQ ID NO: 2518733 - RNA, 19 nt, Artificial Sequence
  Description of Artificial Sequence: Synthetic oligonucleotide
  Antisense strand to SEQ ID NO: 2518732
gacuaagugaggcaucucu

SEQ ID NO: 2518734 - RNA, 19 nt, Artificial Sequence
  Description of Artificial Sequence: Synthetic oligonucleotide
  Sense strand starting at position 3279 of SEQ ID NO: 1888207
ucuggaauguggucagaua

SEQ ID NO: 2518735 - RNA, 19 nt, Artificial Sequence
  Description of Artificial Sequence: Synthetic oligonucleotide
  Antisense strand to SEQ ID NO: 2518734
uaucugaccacauuccaga

SEQ ID NO: 2518736 - RNA, 19 nt, Artificial Sequence
  Description of Artificial Sequence: Synthetic oligonucleotide
  Sense strand starting at position 3280 of SEQ ID NO: 1888207
cuggaauguggucagauau

SEQ ID NO: 2518737 - RNA, 19 nt, Artificial Sequence
  Description of Artificial Sequence: Synthetic oligonucleotide
  Antisense strand to SEQ ID NO: 2518736
auaucugaccacauuccag

SEQ ID NO: 2518738 - RNA, 19 nt, Artificial Sequence
  Description of Artificial Sequence: Synthetic oligonucleotide
  Sense strand starting at position 3301 of SEQ ID NO: 1888207
cccugaguuagccagguuu

SEQ ID NO: 2518739 - RNA, 19 nt, Artificial Sequence
  Description of Artificial Sequence: Synthetic oligonucleotide
  Antisense strand to SEQ ID NO: 2518738
aaaccuggcuaacucaggg

SEQ ID NO: 2518740 - RNA, 19 nt, Artificial Sequence
  Description of Artificial Sequence: Synthetic oligonucleotide
  Sense strand starting at position 3324 of SEQ ID NO: 1888207
agguuuagccaagguuaga

SEQ ID NO: 2518741 - RNA, 19 nt, Artificial Sequence
  Description of Artificial Sequence: Synthetic oligonucleotide
  Antisense strand to SEQ ID NO: 2518740
ucuaaccuuggcuaaaccu

SEQ ID NO: 2518742 - RNA, 19 nt, Artificial Sequence
  Description of Artificial Sequence: Synthetic oligonucleotide
  Sense strand starting at position 3412 of SEQ ID NO: 1888207
gcaagagaacacugugaca

SEQ ID NO: 2518743 - RNA, 19 nt, Artificial Sequence
  Description of Artificial Sequence: Synthetic oligonucleotide
  Antisense strand to SEQ ID NO: 2518742
ugucacaguguucucuugc

SEQ ID NO: 2518744 - RNA, 19 nt, Artificial Sequence
  Description of Artificial Sequence: Synthetic oligonucleotide
  Sense strand starting at position 3424 of SEQ ID NO: 1888207
ugugacauggucuaggaca

SEQ ID NO: 2518745 - RNA, 19 nt, Artificial Sequence
  Description of Artificial Sequence: Synthetic oligonucleotide
  Antisense strand to SEQ ID NO: 2518744
uguccuagaccaugucaca

SEQ ID NO: 2518746 - RNA, 19 nt, Artificial Sequence
  Description of Artificial Sequence: Synthetic oligonucleotide
  Sense strand starting at position 3426 of SEQ ID NO: 1888207
ugacauggucuaggacaua

SEQ ID NO: 2518747 - RNA, 19 nt, Artificial Sequence
  Description of Artificial Sequence: Synthetic oligonucleotide
  Antisense strand to SEQ ID NO: 2518746
uauguccuagaccauguca

SEQ ID NO: 2518748 - RNA, 19 nt, Artificial Sequence
  Description of Artificial Sequence: Synthetic oligonucleotide
  Sense strand starting at position 3449 of SEQ ID NO: 1888207
ggcacaugugacuaaucuu

SEQ ID NO: 2518749 - RNA, 19 nt, Artificial Sequence
  Description of Artificial Sequence: Synthetic oligonucleotide
  Antisense strand to SEQ ID NO: 2518748
aagauuagucacaugugcc

SEQ ID NO: 2518750 - RNA, 19 nt, Artificial Sequence
  Description of Artificial Sequence: Synthetic oligonucleotide
  Sense strand starting at position 151 of SEQ ID NO: 1888208
agagguccuccucaccaau

SEQ ID NO: 2518751 - RNA, 19 nt, Artificial Sequence
  Description of Artificial Sequence: Synthetic oligonucleotide
  Antisense strand to SEQ ID NO: 2518750
auuggugaggaggaccucu

SEQ ID NO: 2518752 - RNA, 19 nt, Artificial Sequence
  Description of Artificial Sequence: Synthetic oligonucleotide
  Sense strand starting at position 407 of SEQ ID NO: 1888208
gauguccagcugcaaauau

SEQ ID NO: 2518753 - RNA, 19 nt, Artificial Sequence
  Description of Artificial Sequence: Synthetic oligonucleotide
  Antisense strand to SEQ ID NO: 2518752
auauuugcagcuggacauc

SEQ ID NO: 2518754 - RNA, 19 nt, Artificial Sequence
  Description of Artificial Sequence: Synthetic oligonucleotide
  Sense strand starting at position 712 of SEQ ID NO: 1888208
agcagagacucucucauca

SEQ ID NO: 2518755 - RNA, 19 nt, Artificial Sequence
  Description of Artificial Sequence: Synthetic oligonucleotide
  Antisense strand to SEQ ID NO: 2518754
ugaugagagagucucugcu

SEQ ID NO: 2518756 - RNA, 19 nt, Artificial Sequence
  Description of Artificial Sequence: Synthetic oligonucleotide
  Sense strand starting at position 725 of SEQ ID NO: 1888208
ucaucaauaggauguuaau

SEQ ID NO: 2518757 - RNA, 19 nt, Artificial Sequence
  Description of Artificial Sequence: Synthetic oligonucleotide
  Antisense strand to SEQ ID NO: 2518756
auuaacauccuauugauga

SEQ ID NO: 2518758 - RNA, 19 nt, Artificial Sequence
  Description of Artificial Sequence: Synthetic oligonucleotide
  Sense strand starting at position 1089 of SEQ ID NO: 1888208
gggcuucagcgguuuagca

SEQ ID NO: 2518759 - RNA, 19 nt, Artificial Sequence
  Description of Artificial Sequence: Synthetic oligonucleotide
  Antisense strand to SEQ ID NO: 2518758
ugcuaaaccgcugaagccc

SEQ ID NO: 2518760 - RNA, 19 nt, Artificial Sequence
  Description of Artificial Sequence: Synthetic oligonucleotide
  Sense strand starting at position 1090 of SEQ ID NO: 1888208
ggcuucagcgguuuagcau

SEQ ID NO: 2518761 - RNA, 19 nt, Artificial Sequence
  Description of Artificial Sequence: Synthetic oligonucleotide
  Antisense strand to SEQ ID NO: 2518760
augcuaaaccgcugaagcc

SEQ ID NO: 2518762 - RNA, 19 nt, Artificial Sequence
  Description of Artificial Sequence: Synthetic oligonucleotide
  Sense strand starting at position 1146 of SEQ ID NO: 1888208
augcuaaaccucugaaagu

SEQ ID NO: 2518763 - RNA, 19 nt, Artificial Sequence
  Description of Artificial Sequence: Synthetic oligonucleotide
  Antisense strand to SEQ ID NO: 2518762
acuuucagagguuuagcau

SEQ ID NO: 2518764 - RNA, 19 nt, Artificial Sequence
  Description of Artificial Sequence: Synthetic oligonucleotide
  Sense strand starting at position 1153 of SEQ ID NO: 1888208
accucugaaagugguuaga

SEQ ID NO: 2518765 - RNA, 19 nt, Artificial Sequence
  Description of Artificial Sequence: Synthetic oligonucleotide
  Antisense strand to SEQ ID NO: 2518764
ucuaaccacuuucagaggu

SEQ ID NO: 2518766 - RNA, 19 nt, Artificial Sequence
  Description of Artificial Sequence: Synthetic oligonucleotide
  Sense strand starting at position 1392 of SEQ ID NO: 1888208
ggccaaggcagucauuaau

SEQ ID NO: 2518767 - RNA, 19 nt, Artificial Sequence
  Description of Artificial Sequence: Synthetic oligonucleotide
  Antisense strand to SEQ ID NO: 2518766
auuaaugacugccuuggcc

SEQ ID NO: 2518768 - RNA, 19 nt, Artificial Sequence
  Description of Artificial Sequence: Synthetic oligonucleotide
  Sense strand starting at position 1441 of SEQ ID NO: 1888208
agagguaauuuacagugaa

SEQ ID NO: 2518769 - RNA, 19 nt, Artificial Sequence
  Description of Artificial Sequence: Synthetic oligonucleotide
  Antisense strand to SEQ ID NO: 2518768
uucacuguaaauuaccucu

SEQ ID NO: 2518770 - RNA, 19 nt, Artificial Sequence
  Description of Artificial Sequence: Synthetic oligonucleotide
  Sense strand starting at position 1453 of SEQ ID NO: 1888208
cagugaaauugggcuuaau

SEQ ID NO: 2518771 - RNA, 19 nt, Artificial Sequence
  Description of Artificial Sequence: Synthetic oligonucleotide
  Antisense strand to SEQ ID NO: 2518770
auuaagcccaauuucacug

SEQ ID NO: 2518772 - RNA, 19 nt, Artificial Sequence
  Description of Artificial Sequence: Synthetic oligonucleotide
  Sense strand starting at position 1478 of SEQ ID NO: 1888208
gccuucucagcucaggaua

SEQ ID NO: 2518773 - RNA, 19 nt, Artificial Sequence
  Description of Artificial Sequence: Synthetic oligonucleotide
  Antisense strand to SEQ ID NO: 2518772
uauccugagcugagaaggc

SEQ ID NO: 2518774 - RNA, 19 nt, Artificial Sequence
  Description of Artificial Sequence: Synthetic oligonucleotide
  Sense strand starting at position 1481 of SEQ ID NO: 1888208
uucucagcucaggauagau

SEQ ID NO: 2518775 - RNA, 19 nt, Artificial Sequence
  Description of Artificial Sequence: Synthetic oligonucleotide
  Antisense strand to SEQ ID NO: 2518774
aucuauccugagcugagaa

SEQ ID NO: 2518776 - RNA, 19 nt, Artificial Sequence
  Description of Artificial Sequence: Synthetic oligonucleotide
  Sense strand starting at position 1510 of SEQ ID NO: 1888208
ucagauuuccugugugcuu

SEQ ID NO: 2518777 - RNA, 19 nt, Artificial Sequence
  Description of Artificial Sequence: Synthetic oligonucleotide
  Antisense strand to SEQ ID NO: 2518776
aagcacacaggaaaucuga

SEQ ID NO: 2518778 - RNA, 19 nt, Artificial Sequence
  Description of Artificial Sequence: Synthetic oligonucleotide
  Sense strand starting at position 1511 of SEQ ID NO: 1888208
cagauuuccugugugcuuu

SEQ ID NO: 2518779 - RNA, 19 nt, Artificial Sequence
  Description of Artificial Sequence: Synthetic oligonucleotide
  Antisense strand to SEQ ID NO: 2518778
aaagcacacaggaaaucug

SEQ ID NO: 2518780 - RNA, 19 nt, Artificial Sequence
  Description of Artificial Sequence: Synthetic oligonucleotide
  Sense strand starting at position 1526 of SEQ ID NO: 1888208
cuuuccgugagauaagguu

SEQ ID NO: 2518781 - RNA, 19 nt, Artificial Sequence
  Description of Artificial Sequence: Synthetic oligonucleotide
  Antisense strand to SEQ ID NO: 2518780
aaccuuaucucacggaaag

SEQ ID NO: 2518782 - RNA, 19 nt, Artificial Sequence
  Description of Artificial Sequence: Synthetic oligonucleotide
  Sense strand starting at position 1622 of SEQ ID NO: 1888208
aucagaauauggcugguuu

SEQ ID NO: 2518783 - RNA, 19 nt, Artificial Sequence
  Description of Artificial Sequence: Synthetic oligonucleotide
  Antisense strand to SEQ ID NO: 2518782
aaaccagccauauucugau

SEQ ID NO: 2518784 - RNA, 19 nt, Artificial Sequence
  Description of Artificial Sequence: Synthetic oligonucleotide
  Sense strand starting at position 1645 of SEQ ID NO: 1888208
agcuaaugagccugauaaa

SEQ ID NO: 2518785 - RNA, 19 nt, Artificial Sequence
  Description of Artificial Sequence: Synthetic oligonucleotide
  Antisense strand to SEQ ID NO: 2518784
uuuaucaggcucauuagcu

SEQ ID NO: 2518786 - RNA, 19 nt, Artificial Sequence
  Description of Artificial Sequence: Synthetic oligonucleotide
  Sense strand starting at position 1646 of SEQ ID NO: 1888208
gcuaaugagccugauaaag

SEQ ID NO: 2518787 - RNA, 19 nt, Artificial Sequence
  Description of Artificial Sequence: Synthetic oligonucleotide
  Antisense strand to SEQ ID NO: 2518786
cuuuaucaggcucauuagc

SEQ ID NO: 2518788 - RNA, 19 nt, Artificial Sequence
  Description of Artificial Sequence: Synthetic oligonucleotide
  Sense strand starting at position 1931 of SEQ ID NO: 1888208
ucauuugcaucugaaagga

SEQ ID NO: 2518789 - RNA, 19 nt, Artificial Sequence
  Description of Artificial Sequence: Synthetic oligonucleotide
  Antisense strand to SEQ ID NO: 2518788
uccuuucagaugcaaauga

SEQ ID NO: 2518790 - RNA, 19 nt, Artificial Sequence
  Description of Artificial Sequence: Synthetic oligonucleotide
  Sense strand starting at position 2023 of SEQ ID NO: 1888208
guuugucugagacaugaga

SEQ ID NO: 2518791 - RNA, 19 nt, Artificial Sequence
  Description of Artificial Sequence: Synthetic oligonucleotide
  Antisense strand to SEQ ID NO: 2518790
ucucaugucucagacaaac

SEQ ID NO: 2518792 - RNA, 19 nt, Artificial Sequence
  Description of Artificial Sequence: Synthetic oligonucleotide
  Sense strand starting at position 2025 of SEQ ID NO: 1888208
uugucugagacaugagaca

SEQ ID NO: 2518793 - RNA, 19 nt, Artificial Sequence
  Description of Artificial Sequence: Synthetic oligonucleotide
  Antisense strand to SEQ ID NO: 2518792
ugucucaugucucagacaa

SEQ ID NO: 2518794 - RNA, 19 nt, Artificial Sequence
  Description of Artificial Sequence: Synthetic oligonucleotide
  Sense strand starting at position 2071 of SEQ ID NO: 1888208
acuagagguucccucuauu

SEQ ID NO: 2518795 - RNA, 19 nt, Artificial Sequence
  Description of Artificial Sequence: Synthetic oligonucleotide
  Antisense strand to SEQ ID NO: 2518794
aauagagggaaccucuagu

SEQ ID NO: 2518796 - RNA, 19 nt, Artificial Sequence
  Description of Artificial Sequence: Synthetic oligonucleotide
  Sense strand starting at position 2220 of SEQ ID NO: 1888208
agccuaguugcugggauuu

SEQ ID NO: 2518797 - RNA, 19 nt, Artificial Sequence
  Description of Artificial Sequence: Synthetic oligonucleotide
  Antisense strand to SEQ ID NO: 2518796
aaaucccagcaacuaggcu

SEQ ID NO: 2518798 - RNA, 19 nt, Artificial Sequence
  Description of Artificial Sequence: Synthetic oligonucleotide
  Sense strand starting at position 2303 of SEQ ID NO: 1888208
ugaacacuccucggacaga

SEQ ID NO: 2518799 - RNA, 19 nt, Artificial Sequence
  Description of Artificial Sequence: Synthetic oligonucleotide
  Antisense strand to SEQ ID NO: 2518798
ucuguccgaggaguguuca

SEQ ID NO: 2518800 - RNA, 19 nt, Artificial Sequence
  Description of Artificial Sequence: Synthetic oligonucleotide
  Sense strand starting at position 2432 of SEQ ID NO: 1888208
uacuucuuagcaugaugga

SEQ ID NO: 2518801 - RNA, 19 nt, Artificial Sequence
  Description of Artificial Sequence: Synthetic oligonucleotide
  Antisense strand to SEQ ID NO: 2518800
uccaucaugcuaagaagua

SEQ ID NO: 2518802 - RNA, 19 nt, Artificial Sequence
  Description of Artificial Sequence: Synthetic oligonucleotide
  Sense strand starting at position 2474 of SEQ ID NO: 1888208
cacgcucgucuucuguaau

SEQ ID NO: 2518803 - RNA, 19 nt, Artificial Sequence
  Description of Artificial Sequence: Synthetic oligonucleotide
  Antisense strand to SEQ ID NO: 2518802
auuacagaagacgagcgug

SEQ ID NO: 2518804 - RNA, 19 nt, Artificial Sequence
  Description of Artificial Sequence: Synthetic oligonucleotide
  Sense strand starting at position 2594 of SEQ ID NO: 1888208
acuuaaauccguuaaccag

SEQ ID NO: 2518805 - RNA, 19 nt, Artificial Sequence
  Description of Artificial Sequence: Synthetic oligonucleotide
  Antisense strand to SEQ ID NO: 2518804
cugguuaacggauuuaagu

SEQ ID NO: 2518806 - RNA, 19 nt, Artificial Sequence
  Description of Artificial Sequence: Synthetic oligonucleotide
  Sense strand starting at position 2647 of SEQ ID NO: 1888208
ggagaacagucaucaaugu

SEQ ID NO: 2518807 - RNA, 19 nt, Artificial Sequence
  Description of Artificial Sequence: Synthetic oligonucleotide
  Antisense strand to SEQ ID NO: 2518806
acauugaugacuguucucc

SEQ ID NO: 2518808 - RNA, 19 nt, Artificial Sequence
  Description of Artificial Sequence: Synthetic oligonucleotide
  Sense strand starting at position 2658 of SEQ ID NO: 1888208
aucaaugucuggucaacaa

SEQ ID NO: 2518809 - RNA, 19 nt, Artificial Sequence
  Description of Artificial Sequence: Synthetic oligonucleotide
  Antisense strand to SEQ ID NO: 2518808
uuguugaccagacauugau

SEQ ID NO: 2518810 - RNA, 19 nt, Artificial Sequence
  Description of Artificial Sequence: Synthetic oligonucleotide
  Sense strand starting at position 2943 of SEQ ID NO: 1888208
ggacaucucuaucugccua

SEQ ID NO: 2518811 - RNA, 19 nt, Artificial Sequence
  Description of Artificial Sequence: Synthetic oligonucleotide
  Antisense strand to SEQ ID NO: 2518810
uaggcagauagagaugucc

SEQ ID NO: 2518812 - RNA, 19 nt, Artificial Sequence
  Description of Artificial Sequence: Synthetic oligonucleotide
  Sense strand starting at position 3062 of SEQ ID NO: 1888208
cuuacagaguuugcccaaa

SEQ ID NO: 2518813 - RNA, 19 nt, Artificial Sequence
  Description of Artificial Sequence: Synthetic oligonucleotide
  Antisense strand to SEQ ID NO: 2518812
uuugggcaaacucuguaag

SEQ ID NO: 2518814 - RNA, 19 nt, Artificial Sequence
  Description of Artificial Sequence: Synthetic oligonucleotide
  Sense strand starting at position 3167 of SEQ ID NO: 1888208
uuaugacaaccucggagau

SEQ ID NO: 2518815 - RNA, 19 nt, Artificial Sequence
  Description of Artificial Sequence: Synthetic oligonucleotide
  Antisense strand to SEQ ID NO: 2518814
aucuccgagguugucauaa

SEQ ID NO: 2518816 - RNA, 19 nt, Artificial Sequence
  Description of Artificial Sequence: Synthetic oligonucleotide
  Sense strand starting at position 3359 of SEQ ID NO: 1888208
ugcagaauuccagaaguuu

SEQ ID NO: 2518817 - RNA, 19 nt, Artificial Sequence
  Description of Artificial Sequence: Synthetic oligonucleotide
  Antisense strand to SEQ ID NO: 2518816
aaacuucuggaauucugca

SEQ ID NO: 2518818 - RNA, 19 nt, Artificial Sequence
  Description of Artificial Sequence: Synthetic oligonucleotide
  Sense strand starting at position 3422 of SEQ ID NO: 1888208
cccagagauuuacacugua

SEQ ID NO: 2518819 - RNA, 19 nt, Artificial Sequence
  Description of Artificial Sequence: Synthetic oligonucleotide
  Antisense strand to SEQ ID NO: 2518818
uacaguguaaaucucuggg

SEQ ID NO: 2518820 - RNA, 19 nt, Artificial Sequence
  Description of Artificial Sequence: Synthetic oligonucleotide
  Sense strand starting at position 3662 of SEQ ID NO: 1888208
cguuccuuccaagaacaga

SEQ ID NO: 2518821 - RNA, 19 nt, Artificial Sequence
  Description of Artificial Sequence: Synthetic oligonucleotide
  Antisense strand to SEQ ID NO: 2518820
ucuguucuuggaaggaacg

SEQ ID NO: 2518822 - RNA, 19 nt, Artificial Sequence
  Description of Artificial Sequence: Synthetic oligonucleotide
  Sense strand starting at position 3832 of SEQ ID NO: 1888208
gguaucuuggcacaaggau

SEQ ID NO: 2518823 - RNA, 19 nt, Artificial Sequence
  Description of Artificial Sequence: Synthetic oligonucleotide
  Antisense strand to SEQ ID NO: 2518822
auccuugugccaagauacc

SEQ ID NO: 2518824 - RNA, 19 nt, Artificial Sequence
  Description of Artificial Sequence: Synthetic oligonucleotide
  Sense strand starting at position 3841 of SEQ ID NO: 1888208
gcacaaggauccuuagaau

SEQ ID NO: 2518825 - RNA, 19 nt, Artificial Sequence
  Description of Artificial Sequence: Synthetic oligonucleotide
  Antisense strand to SEQ ID NO: 2518824
auucuaaggauccuugugc

SEQ ID NO: 2518826 - RNA, 19 nt, Artificial Sequence
  Description of Artificial Sequence: Synthetic oligonucleotide
  Sense strand starting at position 3875 of SEQ ID NO: 1888208
auuggacuuacuuguagag

SEQ ID NO: 2518827 - RNA, 19 nt, Artificial Sequence
  Description of Artificial Sequence: Synthetic oligonucleotide
  Antisense strand to SEQ ID NO: 2518826
cucuacaaguaaguccaau

SEQ ID NO: 2518828 - RNA, 19 nt, Artificial Sequence
  Description of Artificial Sequence: Synthetic oligonucleotide
  Sense strand starting at position 3962 of SEQ ID NO: 1888208
ucuguugugacagggauca

SEQ ID NO: 2518829 - RNA, 19 nt, Artificial Sequence
  Description of Artificial Sequence: Synthetic oligonucleotide
  Antisense strand to SEQ ID NO: 2518828
ugaucccugucacaacaga

SEQ ID NO: 2518830 - RNA, 19 nt, Artificial Sequence
  Description of Artificial Sequence: Synthetic oligonucleotide
  Sense strand starting at position 245 of SEQ ID NO: 1888209
cuugcaaguucuuaucguu

SEQ ID NO: 2518831 - RNA, 19 nt, Artificial Sequence
  Description of Artificial Sequence: Synthetic oligonucleotide
  Antisense strand to SEQ ID NO: 2518830
aacgauaagaacuugcaag

SEQ ID NO: 2518832 - RNA, 19 nt, Artificial Sequence
  Description of Artificial Sequence: Synthetic oligonucleotide
  Sense strand starting at position 360 of SEQ ID NO: 1888209
gcccaugccuucucauaug

SEQ ID NO: 2518833 - RNA, 19 nt, Artificial Sequence
  Description of Artificial Sequence: Synthetic oligonucleotide
  Antisense strand to SEQ ID NO: 2518832
cauaugagaaggcaugggc

SEQ ID NO: 2518834 - RNA, 19 nt, Artificial Sequence
  Description of Artificial Sequence: Synthetic oligonucleotide
  Sense strand starting at position 398 of SEQ ID NO: 1888209
aaguucucuuccuaugcga

SEQ ID NO: 2518835 - RNA, 19 nt, Artificial Sequence
  Description of Artificial Sequence: Synthetic oligonucleotide
  Antisense strand to SEQ ID NO: 2518834
ucgcauaggaagagaacuu

SEQ ID NO: 2518836 - RNA, 19 nt, Artificial Sequence
  Description of Artificial Sequence: Synthetic oligonucleotide
  Sense strand starting at position 400 of SEQ ID NO: 1888209
guucucuuccuaugcgaca

SEQ ID NO: 2518837 - RNA, 19 nt, Artificial Sequence
  Description of Artificial Sequence: Synthetic oligonucleotide
  Antisense strand to SEQ ID NO: 2518836
ugucgcauaggaagagaac

SEQ ID NO: 2518838 - RNA, 19 nt, Artificial Sequence
  Description of Artificial Sequence: Synthetic oligonucleotide
  Sense strand starting at position 489 of SEQ ID NO: 1888209
ucuggucuuguguauccaa

SEQ ID NO: 2518839 - RNA, 19 nt, Artificial Sequence
  Description of Artificial Sequence: Synthetic oligonucleotide
  Antisense strand to SEQ ID NO: 2518838
uuggauacacaagaccaga

SEQ ID NO: 2518840 - RNA, 19 nt, Artificial Sequence
  Description of Artificial Sequence: Synthetic oligonucleotide
  Sense strand starting at position 492 of SEQ ID NO: 1888209
ggucuuguguauccaauug

SEQ ID NO: 2518841 - RNA, 19 nt, Artificial Sequence
  Description of Artificial Sequence: Synthetic oligonucleotide
  Antisense strand to SEQ ID NO: 2518840
caauuggauacacaagacc

SEQ ID NO: 2518842 - RNA, 19 nt, Artificial Sequence
  Description of Artificial Sequence: Synthetic oligonucleotide
  Sense strand starting at position 581 of SEQ ID NO: 1888209
gcaucuuaugugucuguuu

SEQ ID NO: 2518843 - RNA, 19 nt, Artificial Sequence
  Description of Artificial Sequence: Synthetic oligonucleotide
  Antisense strand to SEQ ID NO: 2518842
aaacagacacauaagaugc

SEQ ID NO: 2518844 - RNA, 19 nt, Artificial Sequence
  Description of Artificial Sequence: Synthetic oligonucleotide
  Sense strand starting at position 584 of SEQ ID NO: 1888209
ucuuaugugucuguuucuu

SEQ ID NO: 2518845 - RNA, 19 nt, Artificial Sequence
  Description of Artificial Sequence: Synthetic oligonucleotide
  Antisense strand to SEQ ID NO: 2518844
aagaaacagacacauaaga

SEQ ID NO: 2518846 - RNA, 19 nt, Artificial Sequence
  Description of Artificial Sequence: Synthetic oligonucleotide
  Sense strand starting at position 987 of SEQ ID NO: 1888209
uggcucaaaugaguucuau

SEQ ID NO: 2518847 - RNA, 19 nt, Artificial Sequence
  Description of Artificial Sequence: Synthetic oligonucleotide
  Antisense strand to SEQ ID NO: 2518846
auagaacucauuugagcca

SEQ ID NO: 2518848 - RNA, 19 nt, Artificial Sequence
  Description of Artificial Sequence: Synthetic oligonucleotide
  Sense strand starting at position 996 of SEQ ID NO: 1888209
ugaguucuaucucauccca

SEQ ID NO: 2518849 - RNA, 19 nt, Artificial Sequence
  Description of Artificial Sequence: Synthetic oligonucleotide
  Antisense strand to SEQ ID NO: 2518848
ugggaugagauagaacuca

SEQ ID NO: 2518850 - RNA, 19 nt, Artificial Sequence
  Description of Artificial Sequence: Synthetic oligonucleotide
  Sense strand starting at position 1057 of SEQ ID NO: 1888209
uggcccauuugacagauga

SEQ ID NO: 2518851 - RNA, 19 nt, Artificial Sequence
  Description of Artificial Sequence: Synthetic oligonucleotide
  Antisense strand to SEQ ID NO: 2518850
ucaucugucaaaugggcca

SEQ ID NO: 2518852 - RNA, 19 nt, Artificial Sequence
  Description of Artificial Sequence: Synthetic oligonucleotide
  Sense strand starting at position 1115 of SEQ ID NO: 1888209
gagccaguguuccaacuca

SEQ ID NO: 2518853 - RNA, 19 nt, Artificial Sequence
  Description of Artificial Sequence: Synthetic oligonucleotide
  Antisense strand to SEQ ID NO: 2518852
ugaguuggaacacuggcuc

SEQ ID NO: 2518854 - RNA, 19 nt, Artificial Sequence
  Description of Artificial Sequence: Synthetic oligonucleotide
  Sense strand starting at position 1193 of SEQ ID NO: 1888209
cugucacaucccuguggua

SEQ ID NO: 2518855 - RNA, 19 nt, Artificial Sequence
  Description of Artificial Sequence: Synthetic oligonucleotide
  Antisense strand to SEQ ID NO: 2518854
uaccacagggaugugacag

SEQ ID NO: 2518856 - RNA, 19 nt, Artificial Sequence
  Description of Artificial Sequence: Synthetic oligonucleotide
  Sense strand starting at position 1195 of SEQ ID NO: 1888209
gucacaucccugugguaca

SEQ ID NO: 2518857 - RNA, 19 nt, Artificial Sequence
  Description of Artificial Sequence: Synthetic oligonucleotide
  Antisense strand to SEQ ID NO: 2518856
uguaccacagggaugugac

SEQ ID NO: 2518858 - RNA, 19 nt, Artificial Sequence
  Description of Artificial Sequence: Synthetic oligonucleotide
  Sense strand starting at position 1196 of SEQ ID NO: 1888209
ucacaucccugugguacaa

SEQ ID NO: 2518859 - RNA, 19 nt, Artificial Sequence
  Description of Artificial Sequence: Synthetic oligonucleotide
  Antisense strand to SEQ ID NO: 2518858
uuguaccacagggauguga

SEQ ID NO: 2518860 - RNA, 19 nt, Artificial Sequence
  Description of Artificial Sequence: Synthetic oligonucleotide
  Sense strand starting at position 1315 of SEQ ID NO: 1888209
caaagcugacagugacaaa

SEQ ID NO: 2518861 - RNA, 19 nt, Artificial Sequence
  Description of Artificial Sequence: Synthetic oligonucleotide
  Antisense strand to SEQ ID NO: 2518860
uuugucacugucagcuuug

SEQ ID NO: 2518862 - RNA, 19 nt, Artificial Sequence
  Description of Artificial Sequence: Synthetic oligonucleotide
  Sense strand starting at position 1559 of SEQ ID NO: 1888209
guccaagugcugugggaag

SEQ ID NO: 2518863 - RNA, 19 nt, Artificial Sequence
  Description of Artificial Sequence: Synthetic oligonucleotide
  Antisense strand to SEQ ID NO: 2518862
cuucccacagcacuuggac

SEQ ID NO: 2518864 - RNA, 19 nt, Artificial Sequence
  Description of Artificial Sequence: Synthetic oligonucleotide
  Sense strand starting at position 1630 of SEQ ID NO: 1888209
ccgugugcaugggacaaau

SEQ ID NO: 2518865 - RNA, 19 nt, Artificial Sequence
  Description of Artificial Sequence: Synthetic oligonucleotide
  Antisense strand to SEQ ID NO: 2518864
auuugucccaugcacacgg

SEQ ID NO: 2518866 - RNA, 19 nt, Artificial Sequence
  Description of Artificial Sequence: Synthetic oligonucleotide
  Sense strand starting at position 1646 of SEQ ID NO: 1888209
aauacaucuugugggugua

SEQ ID NO: 2518867 - RNA, 19 nt, Artificial Sequence
  Description of Artificial Sequence: Synthetic oligonucleotide
  Antisense strand to SEQ ID NO: 2518866
uacacccacaagauguauu

SEQ ID NO: 2518868 - RNA, 19 nt, Artificial Sequence
  Description of Artificial Sequence: Synthetic oligonucleotide
  Sense strand starting at position 1664 of SEQ ID NO: 1888209
accugugacugccaaaugu

SEQ ID NO: 2518869 - RNA, 19 nt, Artificial Sequence
  Description of Artificial Sequence: Synthetic oligonucleotide
  Antisense strand to SEQ ID NO: 2518868
acauuuggcagucacaggu

SEQ ID NO: 2518870 - RNA, 19 nt, Artificial Sequence
  Description of Artificial Sequence: Synthetic oligonucleotide
  Sense strand starting at position 1686 of SEQ ID NO: 1888209
acagguauaugggagacua

SEQ ID NO: 2518871 - RNA, 19 nt, Artificial Sequence
  Description of Artificial Sequence: Synthetic oligonucleotide
  Antisense strand to SEQ ID NO: 2518870
uagucucccauauaccugu

SEQ ID NO: 2518872 - RNA, 19 nt, Artificial Sequence
  Description of Artificial Sequence: Synthetic oligonucleotide
  Sense strand starting at position 1740 of SEQ ID NO: 1888209
gugacaggugucugugcau

SEQ ID NO: 2518873 - RNA, 19 nt, Artificial Sequence
  Description of Artificial Sequence: Synthetic oligonucleotide
  Antisense strand to SEQ ID NO: 2518872
augcacagacaccugucac

SEQ ID NO: 2518874 - RNA, 19 nt, Artificial Sequence
  Description of Artificial Sequence: Synthetic oligonucleotide
  Sense strand starting at position 1829 of SEQ ID NO: 1888209
ucaggugguucuggucuua

SEQ ID NO: 2518875 - RNA, 19 nt, Artificial Sequence
  Description of Artificial Sequence: Synthetic oligonucleotide
  Antisense strand to SEQ ID NO: 2518874
uaagaccagaaccaccuga

SEQ ID NO: 2518876 - RNA, 19 nt, Artificial Sequence
  Description of Artificial Sequence: Synthetic oligonucleotide
  Sense strand starting at position 2402 of SEQ ID NO: 1888209
uaguuauaguucuuguuac

SEQ ID NO: 2518877 - RNA, 19 nt, Artificial Sequence
  Description of Artificial Sequence: Synthetic oligonucleotide
  Antisense strand to SEQ ID NO: 2518876
guaacaagaacuauaacua

SEQ ID NO: 2518878 - RNA, 19 nt, Artificial Sequence
  Description of Artificial Sequence: Synthetic oligonucleotide
  Sense strand starting at position 2403 of SEQ ID NO: 1888209
aguuauaguucuuguuacu

SEQ ID NO: 2518879 - RNA, 19 nt, Artificial Sequence
  Description of Artificial Sequence: Synthetic oligonucleotide
  Antisense strand to SEQ ID NO: 2518878
aguaacaagaacuauaacu

SEQ ID NO: 2518880 - RNA, 19 nt, Artificial Sequence
  Description of Artificial Sequence: Synthetic oligonucleotide
  Sense strand starting at position 2465 of SEQ ID NO: 1888209
ggccucugccagugaaaua

SEQ ID NO: 2518881 - RNA, 19 nt, Artificial Sequence
  Description of Artificial Sequence: Synthetic oligonucleotide
  Antisense strand to SEQ ID NO: 2518880
uauuucacuggcagaggcc

SEQ ID NO: 2518882 - RNA, 19 nt, Artificial Sequence
  Description of Artificial Sequence: Synthetic oligonucleotide
  Sense strand starting at position 2645 of SEQ ID NO: 1888209
accacucaucugugaagug

SEQ ID NO: 2518883 - RNA, 19 nt, Artificial Sequence
  Description of Artificial Sequence: Synthetic oligonucleotide
  Antisense strand to SEQ ID NO: 2518882
cacuucacagaugaguggu

SEQ ID NO: 2518884 - RNA, 19 nt, Artificial Sequence
  Description of Artificial Sequence: Synthetic oligonucleotide
  Sense strand starting at position 2650 of SEQ ID NO: 1888209
ucaucugugaaguggaaag

SEQ ID NO: 2518885 - RNA, 19 nt, Artificial Sequence
  Description of Artificial Sequence: Synthetic oligonucleotide
  Antisense strand to SEQ ID NO: 2518884
cuuuccacuucacagauga

SEQ ID NO: 2518886 - RNA, 19 nt, Artificial Sequence
  Description of Artificial Sequence: Synthetic oligonucleotide
  Sense strand starting at position 2874 of SEQ ID NO: 1888209
agggucacugcugacuuaa

SEQ ID NO: 2518887 - RNA, 19 nt, Artificial Sequence
  Description of Artificial Sequence: Synthetic oligonucleotide
  Antisense strand to SEQ ID NO: 2518886
uuaagucagcagugacccu

SEQ ID NO: 2518888 - RNA, 19 nt, Artificial Sequence
  Description of Artificial Sequence: Synthetic oligonucleotide
  Sense strand starting at position 3085 of SEQ ID NO: 1888209
ugagcuguaccuugaaagu

SEQ ID NO: 2518889 - RNA, 19 nt, Artificial Sequence
  Description of Artificial Sequence: Synthetic oligonucleotide
  Antisense strand to SEQ ID NO: 2518888
acuuucaagguacagcuca

SEQ ID NO: 2518890 - RNA, 19 nt, Artificial Sequence
  Description of Artificial Sequence: Synthetic oligonucleotide
  Sense strand starting at position 3290 of SEQ ID NO: 1888209
cagggauccuucgaccuca

SEQ ID NO: 2518891 - RNA, 19 nt, Artificial Sequence
  Description of Artificial Sequence: Synthetic oligonucleotide
  Antisense strand to SEQ ID NO: 2518890
ugaggucgaaggaucccug

SEQ ID NO: 2518892 - RNA, 19 nt, Artificial Sequence
  Description of Artificial Sequence: Synthetic oligonucleotide
  Sense strand starting at position 3430 of SEQ ID NO: 1888209
ccaaguauuucugagcuau

SEQ ID NO: 2518893 - RNA, 19 nt, Artificial Sequence
  Description of Artificial Sequence: Synthetic oligonucleotide
  Antisense strand to SEQ ID NO: 2518892
auagcucagaaauacuugg

SEQ ID NO: 2518894 - RNA, 19 nt, Artificial Sequence
  Description of Artificial Sequence: Synthetic oligonucleotide
  Sense strand starting at position 3432 of SEQ ID NO: 1888209
aaguauuucugagcuaugu

SEQ ID NO: 2518895 - RNA, 19 nt, Artificial Sequence
  Description of Artificial Sequence: Synthetic oligonucleotide
  Antisense strand to SEQ ID NO: 2518894
acauagcucagaaauacuu

SEQ ID NO: 2518896 - RNA, 19 nt, Artificial Sequence
  Description of Artificial Sequence: Synthetic oligonucleotide
  Sense strand starting at position 3659 of SEQ ID NO: 1888209
cugaucuucugguccuaga

SEQ ID NO: 2518897 - RNA, 19 nt, Artificial Sequence
  Description of Artificial Sequence: Synthetic oligonucleotide
  Antisense strand to SEQ ID NO: 2518896
ucuaggaccagaagaucag

SEQ ID NO: 2518898 - RNA, 19 nt, Artificial Sequence
  Description of Artificial Sequence: Synthetic oligonucleotide
  Sense strand starting at position 3717 of SEQ ID NO: 1888209
ugccauggguccugacuuu

SEQ ID NO: 2518899 - RNA, 19 nt, Artificial Sequence
  Description of Artificial Sequence: Synthetic oligonucleotide
  Antisense strand to SEQ ID NO: 2518898
aaagucaggacccauggca

SEQ ID NO: 2518900 - RNA, 19 nt, Artificial Sequence
  Description of Artificial Sequence: Synthetic oligonucleotide
  Sense strand starting at position 3822 of SEQ ID NO: 1888209
ucucaucugcccuaggaca

SEQ ID NO: 2518901 - RNA, 19 nt, Artificial Sequence
  Description of Artificial Sequence: Synthetic oligonucleotide
  Antisense strand to SEQ ID NO: 2518900
uguccuagggcagaugaga

SEQ ID NO: 2518902 - RNA, 19 nt, Artificial Sequence
  Description of Artificial Sequence: Synthetic oligonucleotide
  Sense strand starting at position 3860 of SEQ ID NO: 1888209
guggaugaguuuccacugu

SEQ ID NO: 2518903 - RNA, 19 nt, Artificial Sequence
  Description of Artificial Sequence: Synthetic oligonucleotide
  Antisense strand to SEQ ID NO: 2518902
acaguggaaacucauccac

SEQ ID NO: 2518904 - RNA, 19 nt, Artificial Sequence
  Description of Artificial Sequence: Synthetic oligonucleotide
  Sense strand starting at position 3933 of SEQ ID NO: 1888209
ugaggaacccucugcuuau

SEQ ID NO: 2518905 - RNA, 19 nt, Artificial Sequence
  Description of Artificial Sequence: Synthetic oligonucleotide
  Antisense strand to SEQ ID NO: 2518904
auaagcagaggguuccuca

SEQ ID NO: 2518906 - RNA, 19 nt, Artificial Sequence
  Description of Artificial Sequence: Synthetic oligonucleotide
  Sense strand starting at position 3934 of SEQ ID NO: 1888209
gaggaacccucugcuuaug

SEQ ID NO: 2518907 - RNA, 19 nt, Artificial Sequence
  Description of Artificial Sequence: Synthetic oligonucleotide
  Antisense strand to SEQ ID NO: 2518906
cauaagcagaggguuccuc

SEQ ID NO: 2518908 - RNA, 19 nt, Artificial Sequence
  Description of Artificial Sequence: Synthetic oligonucleotide
  Sense strand starting at position 3969 of SEQ ID NO: 1888209
uaaagaugcugcucagaug

SEQ ID NO: 2518909 - RNA, 19 nt, Artificial Sequence
  Description of Artificial Sequence: Synthetic oligonucleotide
  Antisense strand to SEQ ID NO: 2518908
caucugagcagcaucuuua

SEQ ID NO: 2518910 - RNA, 19 nt, Artificial Sequence
  Description of Artificial Sequence: Synthetic oligonucleotide
  Sense strand starting at position 382 of SEQ ID NO: 1888210
ggcugcuguggugagaaau

SEQ ID NO: 2518911 - RNA, 19 nt, Artificial Sequence
  Description of Artificial Sequence: Synthetic oligonucleotide
  Antisense strand to SEQ ID NO: 2518910
auuucucaccacagcagcc

SEQ ID NO: 2518912 - RNA, 19 nt, Artificial Sequence
  Description of Artificial Sequence: Synthetic oligonucleotide
  Sense strand starting at position 383 of SEQ ID NO: 1888210
gcugcuguggugagaaaug

SEQ ID NO: 2518913 - RNA, 19 nt, Artificial Sequence
  Description of Artificial Sequence: Synthetic oligonucleotide
  Antisense strand to SEQ ID NO: 2518912
cauuucucaccacagcagc

SEQ ID NO: 2518914 - RNA, 19 nt, Artificial Sequence
  Description of Artificial Sequence: Synthetic oligonucleotide
  Sense strand starting at position 418 of SEQ ID NO: 1888210
gugccuuauagagaguauu

SEQ ID NO: 2518915 - RNA, 19 nt, Artificial Sequence
  Description of Artificial Sequence: Synthetic oligonucleotide
  Antisense strand to SEQ ID NO: 2518914
aauacucucuauaaggcac

SEQ ID NO: 2518916 - RNA, 19 nt, Artificial Sequence
  Description of Artificial Sequence: Synthetic oligonucleotide
  Sense strand starting at position 421 of SEQ ID NO: 1888210
ccuuauagagaguauugua

SEQ ID NO: 2518917 - RNA, 19 nt, Artificial Sequence
  Description of Artificial Sequence: Synthetic oligonucleotide
  Antisense strand to SEQ ID NO: 2518916
uacaauacucucuauaagg

SEQ ID NO: 2518918 - RNA, 19 nt, Artificial Sequence
  Description of Artificial Sequence: Synthetic oligonucleotide
  Sense strand starting at position 507 of SEQ ID NO: 1888210
aagauaggcugcuugaauu

SEQ ID NO: 2518919 - RNA, 19 nt, Artificial Sequence
  Description of Artificial Sequence: Synthetic oligonucleotide
  Antisense strand to SEQ ID NO: 2518918
aauucaagcagccuaucuu

SEQ ID NO: 2518920 - RNA, 19 nt, Artificial Sequence
  Description of Artificial Sequence: Synthetic oligonucleotide
  Sense strand starting at position 552 of SEQ ID NO: 1888210
gguuaugaccuuugggaag

SEQ ID NO: 2518921 - RNA, 19 nt, Artificial Sequence
  Description of Artificial Sequence: Synthetic oligonucleotide
  Antisense strand to SEQ ID NO: 2518920
cuucccaaaggucauaacc

SEQ ID NO: 2518922 - RNA, 19 nt, Artificial Sequence
  Description of Artificial Sequence: Synthetic oligonucleotide
  Sense strand starting at position 622 of SEQ ID NO: 1888210
cuaguuuaaccucauagug

SEQ ID NO: 2518923 - RNA, 19 nt, Artificial Sequence
  Description of Artificial Sequence: Synthetic oligonucleotide
  Antisense strand to SEQ ID NO: 2518922
cacuaugagguuaaacuag

SEQ ID NO: 2518924 - RNA, 19 nt, Artificial Sequence
  Description of Artificial Sequence: Synthetic oligonucleotide
  Sense strand starting at position 685 of SEQ ID NO: 1888210
uuaaguacucaguaaggcu

SEQ ID NO: 2518925 - RNA, 19 nt, Artificial Sequence
  Description of Artificial Sequence: Synthetic oligonucleotide
  Antisense strand to SEQ ID NO: 2518924
agccuuacugaguacuuaa

SEQ ID NO: 2518926 - RNA, 19 nt, Artificial Sequence
  Description of Artificial Sequence: Synthetic oligonucleotide
  Sense strand starting at position 1113 of SEQ ID NO: 1888210
ggaauuaagcauugcagug

SEQ ID NO: 2518927 - RNA, 19 nt, Artificial Sequence
  Description of Artificial Sequence: Synthetic oligonucleotide
  Antisense strand to SEQ ID NO: 2518926
cacugcaaugcuuaauucc

SEQ ID NO: 2518928 - RNA, 19 nt, Artificial Sequence
  Description of Artificial Sequence: Synthetic oligonucleotide
  Sense strand starting at position 1118 of SEQ ID NO: 1888210
uaagcauugcagugggaau

SEQ ID NO: 2518929 - RNA, 19 nt, Artificial Sequence
  Description of Artificial Sequence: Synthetic oligonucleotide
  Antisense strand to SEQ ID NO: 2518928
auucccacugcaaugcuua

SEQ ID NO: 2518930 - RNA, 19 nt, Artificial Sequence
  Description of Artificial Sequence: Synthetic oligonucleotide
  Sense strand starting at position 1120 of SEQ ID NO: 1888210
agcauugcagugggaauua

SEQ ID NO: 2518931 - RNA, 19 nt, Artificial Sequence
  Description of Artificial Sequence: Synthetic oligonucleotide
  Antisense strand to SEQ ID NO: 2518930
uaauucccacugcaaugcu

SEQ ID NO: 2518932 - RNA, 19 nt, Artificial Sequence
  Description of Artificial Sequence: Synthetic oligonucleotide
  Sense strand starting at position 1138 of SEQ ID NO: 1888210
acccauaugccauaguaag

SEQ ID NO: 2518933 - RNA, 19 nt, Artificial Sequence
  Description of Artificial Sequence: Synthetic oligonucleotide
  Antisense strand to SEQ ID NO: 2518932
cuuacuauggcauaugggu

SEQ ID NO: 2518934 - RNA, 19 nt, Artificial Sequence
  Description of Artificial Sequence: Synthetic oligonucleotide
  Sense strand starting at position 1150 of SEQ ID NO: 1888210
uaguaagcgaugugcauuu

SEQ ID NO: 2518935 - RNA, 19 nt, Artificial Sequence
  Description of Artificial Sequence: Synthetic oligonucleotide
  Antisense strand to SEQ ID NO: 2518934
aaaugcacaucgcuuacua

SEQ ID NO: 2518936 - RNA, 19 nt, Artificial Sequence
  Description of Artificial Sequence: Synthetic oligonucleotide
  Sense strand starting at position 1240 of SEQ ID NO: 1888210
auuauucuugauugcaaag

SEQ ID NO: 2518937 - RNA, 19 nt, Artificial Sequence
  Description of Artificial Sequence: Synthetic oligonucleotide
  Antisense strand to SEQ ID NO: 2518936
cuuugcaaucaagaauaau

SEQ ID NO: 2518938 - RNA, 19 nt, Artificial Sequence
  Description of Artificial Sequence: Synthetic oligonucleotide
  Sense strand starting at position 1424 of SEQ ID NO: 1888210
cuuauuuguuaugcaagca

SEQ ID NO: 2518939 - RNA, 19 nt, Artificial Sequence
  Description of Artificial Sequence: Synthetic oligonucleotide
  Antisense strand to SEQ ID NO: 2518938
ugcuugcauaacaaauaag

SEQ ID NO: 2518940 - RNA, 19 nt, Artificial Sequence
  Description of Artificial Sequence: Synthetic oligonucleotide
  Sense strand starting at position 1548 of SEQ ID NO: 1888210
cucucuugggaguauauua

SEQ ID NO: 2518941 - RNA, 19 nt, Artificial Sequence
  Description of Artificial Sequence: Synthetic oligonucleotide
  Antisense strand to SEQ ID NO: 2518940
uaauauacucccaagagag

SEQ ID NO: 2518942 - RNA, 19 nt, Artificial Sequence
  Description of Artificial Sequence: Synthetic oligonucleotide
  Sense strand starting at position 1630 of SEQ ID NO: 1888210
uguugaguaccaugauagu

SEQ ID NO: 2518943 - RNA, 19 nt, Artificial Sequence
  Description of Artificial Sequence: Synthetic oligonucleotide
  Antisense strand to SEQ ID NO: 2518942
acuaucaugguacucaaca

SEQ ID NO: 2518944 - RNA, 19 nt, Artificial Sequence
  Description of Artificial Sequence: Synthetic oligonucleotide
  Sense strand starting at position 1639 of SEQ ID NO: 1888210
ccaugauaguaccuauuau

SEQ ID NO: 2518945 - RNA, 19 nt, Artificial Sequence
  Description of Artificial Sequence: Synthetic oligonucleotide
  Antisense strand to SEQ ID NO: 2518944
auaauagguacuaucaugg

SEQ ID NO: 2518946 - RNA, 19 nt, Artificial Sequence
  Description of Artificial Sequence: Synthetic oligonucleotide
  Sense strand starting at position 1702 of SEQ ID NO: 1888210
gaggucacacagugaguaa

SEQ ID NO: 2518947 - RNA, 19 nt, Artificial Sequence
  Description of Artificial Sequence: Synthetic oligonucleotide
  Antisense strand to SEQ ID NO: 2518946
uuacucacugugugaccuc

SEQ ID NO: 2518948 - RNA, 19 nt, Artificial Sequence
  Description of Artificial Sequence: Synthetic oligonucleotide
  Sense strand starting at position 1868 of SEQ ID NO: 1888210
agaccuaagcucuggaacu

SEQ ID NO: 2518949 - RNA, 19 nt, Artificial Sequence
  Description of Artificial Sequence: Synthetic oligonucleotide
  Antisense strand to SEQ ID NO: 2518948
aguuccagagcuuaggucu

SEQ ID NO: 2518950 - RNA, 19 nt, Artificial Sequence
  Description of Artificial Sequence: Synthetic oligonucleotide
  Sense strand starting at position 1932 of SEQ ID NO: 1888210
cuuggcgucagcuuucuua

SEQ ID NO: 2518951 - RNA, 19 nt, Artificial Sequence
  Description of Artificial Sequence: Synthetic oligonucleotide
  Antisense strand to SEQ ID NO: 2518950
uaagaaagcugacgccaag

SEQ ID NO: 2518952 - RNA, 19 nt, Artificial Sequence
  Description of Artificial Sequence: Synthetic oligonucleotide
  Sense strand starting at position 1934 of SEQ ID NO: 1888210
uggcgucagcuuucuuauc

SEQ ID NO: 2518953 - RNA, 19 nt, Artificial Sequence
  Description of Artificial Sequence: Synthetic oligonucleotide
  Antisense strand to SEQ ID NO: 2518952
gauaagaaagcugacgcca

SEQ ID NO: 2518954 - RNA, 19 nt, Artificial Sequence
  Description of Artificial Sequence: Synthetic oligonucleotide
  Sense strand starting at position 2022 of SEQ ID NO: 1888210
uuaucuuuccaaugggaau

SEQ ID NO: 2518955 - RNA, 19 nt, Artificial Sequence
  Description of Artificial Sequence: Synthetic oligonucleotide
  Antisense strand to SEQ ID NO: 2518954
auucccauuggaaagauaa

SEQ ID NO: 2518956 - RNA, 19 nt, Artificial Sequence
  Description of Artificial Sequence: Synthetic oligonucleotide
  Sense strand starting at position 2111 of SEQ ID NO: 1888210
gcaguuagaaacuguaaag

SEQ ID NO: 2518957 - RNA, 19 nt, Artificial Sequence
  Description of Artificial Sequence: Synthetic oligonucleotide
  Antisense strand to SEQ ID NO: 2518956
cuuuacaguuucuaacugc

SEQ ID NO: 2518958 - RNA, 19 nt, Artificial Sequence
  Description of Artificial Sequence: Synthetic oligonucleotide
  Sense strand starting at position 2445 of SEQ ID NO: 1888210
gacucugcucuggauguga

SEQ ID NO: 2518959 - RNA, 19 nt, Artificial Sequence
  Description of Artificial Sequence: Synthetic oligonucleotide
  Antisense strand to SEQ ID NO: 2518958
ucacauccagagcagaguc

SEQ ID NO: 2518960 - RNA, 19 nt, Artificial Sequence
  Description of Artificial Sequence: Synthetic oligonucleotide
  Sense strand starting at position 2447 of SEQ ID NO: 1888210
cucugcucuggaugugaaa

SEQ ID NO: 2518961 - RNA, 19 nt, Artificial Sequence
  Description of Artificial Sequence: Synthetic oligonucleotide
  Antisense strand to SEQ ID NO: 2518960
uuucacauccagagcagag

SEQ ID NO: 2518962 - RNA, 19 nt, Artificial Sequence
  Description of Artificial Sequence: Synthetic oligonucleotide
  Sense strand starting at position 2621 of SEQ ID NO: 1888210
agcuuauauuauuccugga

SEQ ID NO: 2518963 - RNA, 19 nt, Artificial Sequence
  Description of Artificial Sequence: Synthetic oligonucleotide
  Antisense strand to SEQ ID NO: 2518962
uccaggaauaauauaagcu

SEQ ID NO: 2518964 - RNA, 19 nt, Artificial Sequence
  Description of Artificial Sequence: Synthetic oligonucleotide
  Sense strand starting at position 2635 of SEQ ID NO: 1888210
cuggacuagcuccaaacau

SEQ ID NO: 2518965 - RNA, 19 nt, Artificial Sequence
  Description of Artificial Sequence: Synthetic oligonucleotide
  Antisense strand to SEQ ID NO: 2518964
auguuuggagcuaguccag

SEQ ID NO: 2518966 - RNA, 19 nt, Artificial Sequence
  Description of Artificial Sequence: Synthetic oligonucleotide
  Sense strand starting at position 2760 of SEQ ID NO: 1888210
agaugaagugcuuaguaaa

SEQ ID NO: 2518967 - RNA, 19 nt, Artificial Sequence
  Description of Artificial Sequence: Synthetic oligonucleotide
  Antisense strand to SEQ ID NO: 2518966
uuuacuaagcacuucaucu

SEQ ID NO: 2518968 - RNA, 19 nt, Artificial Sequence
  Description of Artificial Sequence: Synthetic oligonucleotide
  Sense strand starting at position 2772 of SEQ ID NO: 1888210
uaguaaaugucagcggaag

SEQ ID NO: 2518969 - RNA, 19 nt, Artificial Sequence
  Description of Artificial Sequence: Synthetic oligonucleotide
  Antisense strand to SEQ ID NO: 2518968
cuuccgcugacauuuacua

SEQ ID NO: 2518970 - RNA, 19 nt, Artificial Sequence
  Description of Artificial Sequence: Synthetic oligonucleotide
  Sense strand starting at position 2783 of SEQ ID NO: 1888210
agcggaagugguuggagau

SEQ ID NO: 2518971 - RNA, 19 nt, Artificial Sequence
  Description of Artificial Sequence: Synthetic oligonucleotide
  Antisense strand to SEQ ID NO: 2518970
aucuccaaccacuuccgcu

SEQ ID NO: 2518972 - RNA, 19 nt, Artificial Sequence
  Description of Artificial Sequence: Synthetic oligonucleotide
  Sense strand starting at position 2793 of SEQ ID NO: 1888210
guuggagaugguggauaua

SEQ ID NO: 2518973 - RNA, 19 nt, Artificial Sequence
  Description of Artificial Sequence: Synthetic oligonucleotide
  Antisense strand to SEQ ID NO: 2518972
uauauccaccaucuccaac

SEQ ID NO: 2518974 - RNA, 19 nt, Artificial Sequence
  Description of Artificial Sequence: Synthetic oligonucleotide
  Sense strand starting at position 2804 of SEQ ID NO: 1888210
uggauauaggcucaaaugu

SEQ ID NO: 2518975 - RNA, 19 nt, Artificial Sequence
  Description of Artificial Sequence: Synthetic oligonucleotide
  Antisense strand to SEQ ID NO: 2518974
acauuugagccuauaucca

SEQ ID NO: 2518976 - RNA, 19 nt, Artificial Sequence
  Description of Artificial Sequence: Synthetic oligonucleotide
  Sense strand starting at position 2820 of SEQ ID NO: 1888210
uguauaugaccuugaacac

SEQ ID NO: 2518977 - RNA, 19 nt, Artificial Sequence
  Description of Artificial Sequence: Synthetic oligonucleotide
  Antisense strand to SEQ ID NO: 2518976
guguucaaggucauauaca

SEQ ID NO: 2518978 - RNA, 19 nt, Artificial Sequence
  Description of Artificial Sequence: Synthetic oligonucleotide
  Sense strand starting at position 2921 of SEQ ID NO: 1888210
gggauugaaugggaacaga

SEQ ID NO: 2518979 - RNA, 19 nt, Artificial Sequence
  Description of Artificial Sequence: Synthetic oligonucleotide
  Antisense strand to SEQ ID NO: 2518978
ucuguucccauucaauccc

SEQ ID NO: 2518980 - RNA, 19 nt, Artificial Sequence
  Description of Artificial Sequence: Synthetic oligonucleotide
  Sense strand starting at position 3094 of SEQ ID NO: 1888210
ggcugcguagaggauuaua

SEQ ID NO: 2518981 - RNA, 19 nt, Artificial Sequence
  Description of Artificial Sequence: Synthetic oligonucleotide
  Antisense strand to SEQ ID NO: 2518980
uauaauccucuacgcagcc

SEQ ID NO: 2518982 - RNA, 19 nt, Artificial Sequence
  Description of Artificial Sequence: Synthetic oligonucleotide
  Sense strand starting at position 3244 of SEQ ID NO: 1888210
agccaagaacucugguauc

SEQ ID NO: 2518983 - RNA, 19 nt, Artificial Sequence
  Description of Artificial Sequence: Synthetic oligonucleotide
  Antisense strand to SEQ ID NO: 2518982
gauaccagaguucuuggcu

SEQ ID NO: 2518984 - RNA, 19 nt, Artificial Sequence
  Description of Artificial Sequence: Synthetic oligonucleotide
  Sense strand starting at position 3399 of SEQ ID NO: 1888210
gaguucugccugcaaggaa

SEQ ID NO: 2518985 - RNA, 19 nt, Artificial Sequence
  Description of Artificial Sequence: Synthetic oligonucleotide
  Antisense strand to SEQ ID NO: 2518984
uuccuugcaggcagaacuc

SEQ ID NO: 2518986 - RNA, 19 nt, Artificial Sequence
  Description of Artificial Sequence: Synthetic oligonucleotide
  Sense strand starting at position 3557 of SEQ ID NO: 1888210
uguuauugugucgcuccaa

SEQ ID NO: 2518987 - RNA, 19 nt, Artificial Sequence
  Description of Artificial Sequence: Synthetic oligonucleotide
  Antisense strand to SEQ ID NO: 2518986
uuggagcgacacaauaaca

SEQ ID NO: 2518988 - RNA, 19 nt, Artificial Sequence
  Description of Artificial Sequence: Synthetic oligonucleotide
  Sense strand starting at position 3601 of SEQ ID NO: 1888210
aguaccucagaauguaaua

SEQ ID NO: 2518989 - RNA, 19 nt, Artificial Sequence
  Description of Artificial Sequence: Synthetic oligonucleotide
  Antisense strand to SEQ ID NO: 2518988
uauuacauucugagguacu

SEQ ID NO: 2518990 - RNA, 19 nt, Artificial Sequence
  Description of Artificial Sequence: Synthetic oligonucleotide
  Sense strand starting at position 15 of SEQ ID NO: 1888211
gugauaaaguuuccuuaga

SEQ ID NO: 2518991 - RNA, 19 nt, Artificial Sequence
  Description of Artificial Sequence: Synthetic oligonucleotide
  Antisense strand to SEQ ID NO: 2518990
ucuaaggaaacuuuaucac

SEQ ID NO: 2518992 - RNA, 19 nt, Artificial Sequence
  Description of Artificial Sequence: Synthetic oligonucleotide
  Sense strand starting at position 16 of SEQ ID NO: 1888211
ugauaaaguuuccuuagag

SEQ ID NO: 2518993 - RNA, 19 nt, Artificial Sequence
  Description of Artificial Sequence: Synthetic oligonucleotide
  Antisense strand to SEQ ID NO: 2518992
cucuaaggaaacuuuauca

SEQ ID NO: 2518994 - RNA, 19 nt, Artificial Sequence
  Description of Artificial Sequence: Synthetic oligonucleotide
  Sense strand starting at position 17 of SEQ ID NO: 1888211
gauaaaguuuccuuagaga

SEQ ID NO: 2518995 - RNA, 19 nt, Artificial Sequence
  Description of Artificial Sequence: Synthetic oligonucleotide
  Antisense strand to SEQ ID NO: 2518994
ucucuaaggaaacuuuauc

SEQ ID NO: 2518996 - RNA, 19 nt, Artificial Sequence
  Description of Artificial Sequence: Synthetic oligonucleotide
  Sense strand starting at position 212 of SEQ ID NO: 1888211
cacuguuaaugagcagaaa

SEQ ID NO: 2518997 - RNA, 19 nt, Artificial Sequence
  Description of Artificial Sequence: Synthetic oligonucleotide
  Antisense strand to SEQ ID NO: 2518996
uuucugcucauuaacagug

SEQ ID NO: 2518998 - RNA, 19 nt, Artificial Sequence
  Description of Artificial Sequence: Synthetic oligonucleotide
  Sense strand starting at position 255 of SEQ ID NO: 1888211
aaaguugaucauugguaga

SEQ ID NO: 2518999 - RNA, 19 nt, Artificial Sequence
  Description of Artificial Sequence: Synthetic oligonucleotide
  Antisense strand to SEQ ID NO: 2518998
ucuaccaaugaucaacuuu

SEQ ID NO: 2519000 - RNA, 19 nt, Artificial Sequence
  Description of Artificial Sequence: Synthetic oligonucleotide
  Sense strand starting at position 257 of SEQ ID NO: 1888211
aguugaucauugguagaau

SEQ ID NO: 2519001 - RNA, 19 nt, Artificial Sequence
  Description of Artificial Sequence: Synthetic oligonucleotide
  Antisense strand to SEQ ID NO: 2519000
auucuaccaaugaucaacu

SEQ ID NO: 2519002 - RNA, 19 nt, Artificial Sequence
  Description of Artificial Sequence: Synthetic oligonucleotide
  Sense strand starting at position 403 of SEQ ID NO: 1888211
ccuaaaugagcugacuacu

SEQ ID NO: 2519003 - RNA, 19 nt, Artificial Sequence
  Description of Artificial Sequence: Synthetic oligonucleotide
  Antisense strand to SEQ ID NO: 2519002
aguagucagcucauuuagg

SEQ ID NO: 2519004 - RNA, 19 nt, Artificial Sequence
  Description of Artificial Sequence: Synthetic oligonucleotide
  Sense strand starting at position 692 of SEQ ID NO: 1888211
ucucauucucaauaggguu

SEQ ID NO: 2519005 - RNA, 19 nt, Artificial Sequence
  Description of Artificial Sequence: Synthetic oligonucleotide
  Antisense strand to SEQ ID NO: 2519004
aacccuauugagaaugaga

SEQ ID NO: 2519006 - RNA, 19 nt, Artificial Sequence
  Description of Artificial Sequence: Synthetic oligonucleotide
  Sense strand starting at position 1275 of SEQ ID NO: 1888211
cccaguuuagucuauugau

SEQ ID NO: 2519007 - RNA, 19 nt, Artificial Sequence
  Description of Artificial Sequence: Synthetic oligonucleotide
  Antisense strand to SEQ ID NO: 2519006
aucaauagacuaaacuggg

SEQ ID NO: 2519008 - RNA, 19 nt, Artificial Sequence
  Description of Artificial Sequence: Synthetic oligonucleotide
  Sense strand starting at position 1321 of SEQ ID NO: 1888211
ugaacuaggucaucggaau

SEQ ID NO: 2519009 - RNA, 19 nt, Artificial Sequence
  Description of Artificial Sequence: Synthetic oligonucleotide
  Antisense strand to SEQ ID NO: 2519008
auuccgaugaccuaguuca

SEQ ID NO: 2519010 - RNA, 19 nt, Artificial Sequence
  Description of Artificial Sequence: Synthetic oligonucleotide
  Sense strand starting at position 1322 of SEQ ID NO: 1888211
gaacuaggucaucggaaua

SEQ ID NO: 2519011 - RNA, 19 nt, Artificial Sequence
  Description of Artificial Sequence: Synthetic oligonucleotide
  Antisense strand to SEQ ID NO: 2519010
uauuccgaugaccuaguuc

SEQ ID NO: 2519012 - RNA, 19 nt, Artificial Sequence
  Description of Artificial Sequence: Synthetic oligonucleotide
  Sense strand starting at position 1327 of SEQ ID NO: 1888211
aggucaucggaauaacucu

SEQ ID NO: 2519013 - RNA, 19 nt, Artificial Sequence
  Description of Artificial Sequence: Synthetic oligonucleotide
  Antisense strand to SEQ ID NO: 2519012
agaguuauuccgaugaccu

SEQ ID NO: 2519014 - RNA, 19 nt, Artificial Sequence
  Description of Artificial Sequence: Synthetic oligonucleotide
  Sense strand starting at position 1375 of SEQ ID NO: 1888211
acagacauuugagaauagu

SEQ ID NO: 2519015 - RNA, 19 nt, Artificial Sequence
  Description of Artificial Sequence: Synthetic oligonucleotide
  Antisense strand to SEQ ID NO: 2519014
acuauucucaaaugucugu

SEQ ID NO: 2519016 - RNA, 19 nt, Artificial Sequence
  Description of Artificial Sequence: Synthetic oligonucleotide
  Sense strand starting at position 1485 of SEQ ID NO: 1888211
ucugcaguucuccaagaca

SEQ ID NO: 2519017 - RNA, 19 nt, Artificial Sequence
  Description of Artificial Sequence: Synthetic oligonucleotide
  Antisense strand to SEQ ID NO: 2519016
ugucuuggagaacugcaga

SEQ ID NO: 2519018 - RNA, 19 nt, Artificial Sequence
  Description of Artificial Sequence: Synthetic oligonucleotide
  Sense strand starting at position 1488 of SEQ ID NO: 1888211
gcaguucuccaagacaacu

SEQ ID NO: 2519019 - RNA, 19 nt, Artificial Sequence
  Description of Artificial Sequence: Synthetic oligonucleotide
  Antisense strand to SEQ ID NO: 2519018
aguugucuuggagaacugc

SEQ ID NO: 2519020 - RNA, 19 nt, Artificial Sequence
  Description of Artificial Sequence: Synthetic oligonucleotide
  Sense strand starting at position 1552 of SEQ ID NO: 1888211
guaagaguuuggcuaaaga

SEQ ID NO: 2519021 - RNA, 19 nt, Artificial Sequence
  Description of Artificial Sequence: Synthetic oligonucleotide
  Antisense strand to SEQ ID NO: 2519020
ucuuuagccaaacucuuac

SEQ ID NO: 2519022 - RNA, 19 nt, Artificial Sequence
  Description of Artificial Sequence: Synthetic oligonucleotide
  Sense strand starting at position 1616 of SEQ ID NO: 1888211
agcuguuugcucccuguua

SEQ ID NO: 2519023 - RNA, 19 nt, Artificial Sequence
  Description of Artificial Sequence: Synthetic oligonucleotide
  Antisense strand to SEQ ID NO: 2519022
uaacagggagcaaacagcu

SEQ ID NO: 2519024 - RNA, 19 nt, Artificial Sequence
  Description of Artificial Sequence: Synthetic oligonucleotide
  Sense strand starting at position 1640 of SEQ ID NO: 1888211
uagagaaugauguguucug

SEQ ID NO: 2519025 - RNA, 19 nt, Artificial Sequence
  Description of Artificial Sequence: Synthetic oligonucleotide
  Antisense strand to SEQ ID NO: 2519024
cagaacacaucauucucua

SEQ ID NO: 2519026 - RNA, 19 nt, Artificial Sequence
  Description of Artificial Sequence: Synthetic oligonucleotide
  Sense strand starting at position 1663 of SEQ ID NO: 1888211
ggcuuaagugcucugcugu

SEQ ID NO: 2519027 - RNA, 19 nt, Artificial Sequence
  Description of Artificial Sequence: Synthetic oligonucleotide
  Antisense strand to SEQ ID NO: 2519026
acagcagagcacuuaagcc

SEQ ID NO: 2519028 - RNA, 19 nt, Artificial Sequence
  Description of Artificial Sequence: Synthetic oligonucleotide
  Sense strand starting at position 1666 of SEQ ID NO: 1888211
uuaagugcucugcugugua

SEQ ID NO: 2519029 - RNA, 19 nt, Artificial Sequence
  Description of Artificial Sequence: Synthetic oligonucleotide
  Antisense strand to SEQ ID NO: 2519028
uacacagcagagcacuuaa

SEQ ID NO: 2519030 - RNA, 19 nt, Artificial Sequence
  Description of Artificial Sequence: Synthetic oligonucleotide
  Sense strand starting at position 1703 of SEQ ID NO: 1888211
gagucuuaacagcaugagu

SEQ ID NO: 2519031 - RNA, 19 nt, Artificial Sequence
  Description of Artificial Sequence: Synthetic oligonucleotide
  Antisense strand to SEQ ID NO: 2519030
acucaugcuguuaagacuc

SEQ ID NO: 2519032 - RNA, 19 nt, Artificial Sequence
  Description of Artificial Sequence: Synthetic oligonucleotide
  Sense strand starting at position 1813 of SEQ ID NO: 1888211
ggaauuagguuauugccaa

SEQ ID NO: 2519033 - RNA, 19 nt, Artificial Sequence
  Description of Artificial Sequence: Synthetic oligonucleotide
  Antisense strand to SEQ ID NO: 2519032
uuggcaauaaccuaauucc

SEQ ID NO: 2519034 - RNA, 19 nt, Artificial Sequence
  Description of Artificial Sequence: Synthetic oligonucleotide
  Sense strand starting at position 1851 of SEQ ID NO: 1888211
ugaucaugaucccugugau

SEQ ID NO: 2519035 - RNA, 19 nt, Artificial Sequence
  Description of Artificial Sequence: Synthetic oligonucleotide
  Antisense strand to SEQ ID NO: 2519034
aucacagggaucaugauca

SEQ ID NO: 2519036 - RNA, 19 nt, Artificial Sequence
  Description of Artificial Sequence: Synthetic oligonucleotide
  Sense strand starting at position 1852 of SEQ ID NO: 1888211
gaucaugaucccugugauu

SEQ ID NO: 2519037 - RNA, 19 nt, Artificial Sequence
  Description of Artificial Sequence: Synthetic oligonucleotide
  Antisense strand to SEQ ID NO: 2519036
aaucacagggaucaugauc

SEQ ID NO: 2519038 - RNA, 19 nt, Artificial Sequence
  Description of Artificial Sequence: Synthetic oligonucleotide
  Sense strand starting at position 2047 of SEQ ID NO: 1888211
ugggaugcugcaugagaga

SEQ ID NO: 2519039 - RNA, 19 nt, Artificial Sequence
  Description of Artificial Sequence: Synthetic oligonucleotide
  Antisense strand to SEQ ID NO: 2519038
ucucucaugcagcauccca

SEQ ID NO: 2519040 - RNA, 19 nt, Artificial Sequence
  Description of Artificial Sequence: Synthetic oligonucleotide
  Sense strand starting at position 2369 of SEQ ID NO: 1888211
acaugucaauguuuggaca

SEQ ID NO: 2519041 - RNA, 19 nt, Artificial Sequence
  Description of Artificial Sequence: Synthetic oligonucleotide
  Antisense strand to SEQ ID NO: 2519040
uguccaaacauugacaugu

SEQ ID NO: 2519042 - RNA, 19 nt, Artificial Sequence
  Description of Artificial Sequence: Synthetic oligonucleotide
  Sense strand starting at position 2731 of SEQ ID NO: 1888211
gagacuauuccgcacauug

SEQ ID NO: 2519043 - RNA, 19 nt, Artificial Sequence
  Description of Artificial Sequence: Synthetic oligonucleotide
  Antisense strand to SEQ ID NO: 2519042
caaugugcggaauagucuc

SEQ ID NO: 2519044 - RNA, 19 nt, Artificial Sequence
  Description of Artificial Sequence: Synthetic oligonucleotide
  Sense strand starting at position 2768 of SEQ ID NO: 1888211
agguccuacucacugaaua

SEQ ID NO: 2519045 - RNA, 19 nt, Artificial Sequence
  Description of Artificial Sequence: Synthetic oligonucleotide
  Antisense strand to SEQ ID NO: 2519044
uauucagugaguaggaccu

SEQ ID NO: 2519046 - RNA, 19 nt, Artificial Sequence
  Description of Artificial Sequence: Synthetic oligonucleotide
  Sense strand starting at position 2769 of SEQ ID NO: 1888211
gguccuacucacugaauac

SEQ ID NO: 2519047 - RNA, 19 nt, Artificial Sequence
  Description of Artificial Sequence: Synthetic oligonucleotide
  Antisense strand to SEQ ID NO: 2519046
guauucagugaguaggacc

SEQ ID NO: 2519048 - RNA, 19 nt, Artificial Sequence
  Description of Artificial Sequence: Synthetic oligonucleotide
  Sense strand starting at position 2813 of SEQ ID NO: 1888211
ucuucuaaugccuaaggau

SEQ ID NO: 2519049 - RNA, 19 nt, Artificial Sequence
  Description of Artificial Sequence: Synthetic oligonucleotide
  Antisense strand to SEQ ID NO: 2519048
auccuuaggcauuagaaga

SEQ ID NO: 2519050 - RNA, 19 nt, Artificial Sequence
  Description of Artificial Sequence: Synthetic oligonucleotide
  Sense strand starting at position 2905 of SEQ ID NO: 1888211
agguaaacauguuccauag

SEQ ID NO: 2519051 - RNA, 19 nt, Artificial Sequence
  Description of Artificial Sequence: Synthetic oligonucleotide
  Antisense strand to SEQ ID NO: 2519050
cuauggaacauguuuaccu

SEQ ID NO: 2519052 - RNA, 19 nt, Artificial Sequence
  Description of Artificial Sequence: Synthetic oligonucleotide
  Sense strand starting at position 3075 of SEQ ID NO: 1888211
cccacuuaucagugaggac

SEQ ID NO: 2519053 - RNA, 19 nt, Artificial Sequence
  Description of Artificial Sequence: Synthetic oligonucleotide
  Antisense strand to SEQ ID NO: 2519052
guccucacugauaaguggg

SEQ ID NO: 2519054 - RNA, 19 nt, Artificial Sequence
  Description of Artificial Sequence: Synthetic oligonucleotide
  Sense strand starting at position 3200 of SEQ ID NO: 1888211
auuguauuccauggaguaa

SEQ ID NO: 2519055 - RNA, 19 nt, Artificial Sequence
  Description of Artificial Sequence: Synthetic oligonucleotide
  Antisense strand to SEQ ID NO: 2519054
uuacuccauggaauacaau

SEQ ID NO: 2519056 - RNA, 19 nt, Artificial Sequence
  Description of Artificial Sequence: Synthetic oligonucleotide
  Sense strand starting at position 3515 of SEQ ID NO: 1888211
uucuguggcccauaaacau

SEQ ID NO: 2519057 - RNA, 19 nt, Artificial Sequence
  Description of Artificial Sequence: Synthetic oligonucleotide
  Antisense strand to SEQ ID NO: 2519056
auguuuaugggccacagaa

SEQ ID NO: 2519058 - RNA, 19 nt, Artificial Sequence
  Description of Artificial Sequence: Synthetic oligonucleotide
  Sense strand starting at position 3708 of SEQ ID NO: 1888211
gcugaacuaguauaucuaa

SEQ ID NO: 2519059 - RNA, 19 nt, Artificial Sequence
  Description of Artificial Sequence: Synthetic oligonucleotide
  Antisense strand to SEQ ID NO: 2519058
uuagauauacuaguucagc

SEQ ID NO: 2519060 - RNA, 19 nt, Artificial Sequence
  Description of Artificial Sequence: Synthetic oligonucleotide
  Sense strand starting at position 3800 of SEQ ID NO: 1888211
uccuaugcugaguagagau

SEQ ID NO: 2519061 - RNA, 19 nt, Artificial Sequence
  Description of Artificial Sequence: Synthetic oligonucleotide
  Antisense strand to SEQ ID NO: 2519060
aucucuacucagcauagga

SEQ ID NO: 2519062 - RNA, 19 nt, Artificial Sequence
  Description of Artificial Sequence: Synthetic oligonucleotide
  Sense strand starting at position 3807 of SEQ ID NO: 1888211
cugaguagagauugguuau

SEQ ID NO: 2519063 - RNA, 19 nt, Artificial Sequence
  Description of Artificial Sequence: Synthetic oligonucleotide
  Antisense strand to SEQ ID NO: 2519062
auaaccaaucucuacucag

SEQ ID NO: 2519064 - RNA, 19 nt, Artificial Sequence
  Description of Artificial Sequence: Synthetic oligonucleotide
  Sense strand starting at position 3808 of SEQ ID NO: 1888211
ugaguagagauugguuauc

SEQ ID NO: 2519065 - RNA, 19 nt, Artificial Sequence
  Description of Artificial Sequence: Synthetic oligonucleotide
  Antisense strand to SEQ ID NO: 2519064
gauaaccaaucucuacuca

SEQ ID NO: 2519066 - RNA, 19 nt, Artificial Sequence
  Description of Artificial Sequence: Synthetic oligonucleotide
  Sense strand starting at position 3810 of SEQ ID NO: 1888211
aguagagauugguuaucag

SEQ ID NO: 2519067 - RNA, 19 nt, Artificial Sequence
  Description of Artificial Sequence: Synthetic oligonucleotide
  Antisense strand to SEQ ID NO: 2519066
cugauaaccaaucucuacu

SEQ ID NO: 2519068 - RNA, 19 nt, Artificial Sequence
  Description of Artificial Sequence: Synthetic oligonucleotide
  Sense strand starting at position 3813 of SEQ ID NO: 1888211
agagauugguuaucagacu

SEQ ID NO: 2519069 - RNA, 19 nt, Artificial Sequence
  Description of Artificial Sequence: Synthetic oligonucleotide
  Antisense strand to SEQ ID NO: 2519068
agucugauaaccaaucucu

SEQ ID NO: 2519070 - RNA, 19 nt, Artificial Sequence
  Description of Artificial Sequence: Synthetic oligonucleotide
  Sense strand starting at position 424 of SEQ ID NO: 1888212
gcguaacaauagugaaacu

SEQ ID NO: 2519071 - RNA, 19 nt, Artificial Sequence
  Description of Artificial Sequence: Synthetic oligonucleotide
  Antisense strand to SEQ ID NO: 2519070
aguuucacuauuguuacgc

SEQ ID NO: 2519072 - RNA, 19 nt, Artificial Sequence
  Description of Artificial Sequence: Synthetic oligonucleotide
  Sense strand starting at position 2097 of SEQ ID NO: 1888212
acaguuacgaugcaucgau

SEQ ID NO: 2519073 - RNA, 19 nt, Artificial Sequence
  Description of Artificial Sequence: Synthetic oligonucleotide
  Antisense strand to SEQ ID NO: 2519072
aucgaugcaucguaacugu

SEQ ID NO: 2519074 - RNA, 19 nt, Artificial Sequence
  Description of Artificial Sequence: Synthetic oligonucleotide
  Sense strand starting at position 2101 of SEQ ID NO: 1888212
uuacgaugcaucgaucaca

SEQ ID NO: 2519075 - RNA, 19 nt, Artificial Sequence
  Description of Artificial Sequence: Synthetic oligonucleotide
  Antisense strand to SEQ ID NO: 2519074
ugugaucgaugcaucguaa

SEQ ID NO: 2519076 - RNA, 19 nt, Artificial Sequence
  Description of Artificial Sequence: Synthetic oligonucleotide
  Sense strand starting at position 2144 of SEQ ID NO: 1888212
gggacucagugguaacaaa

SEQ ID NO: 2519077 - RNA, 19 nt, Artificial Sequence
  Description of Artificial Sequence: Synthetic oligonucleotide
  Antisense strand to SEQ ID NO: 2519076
uuuguuaccacugaguccc

SEQ ID NO: 2519078 - RNA, 19 nt, Artificial Sequence
  Description of Artificial Sequence: Synthetic oligonucleotide
  Sense strand starting at position 2213 of SEQ ID NO: 1888212
ggucccugcuccucagaau

SEQ ID NO: 2519079 - RNA, 19 nt, Artificial Sequence
  Description of Artificial Sequence: Synthetic oligonucleotide
  Antisense strand to SEQ ID NO: 2519078
auucugaggagcagggacc

SEQ ID NO: 2519080 - RNA, 19 nt, Artificial Sequence
  Description of Artificial Sequence: Synthetic oligonucleotide
  Sense strand starting at position 2253 of SEQ ID NO: 1888212
gguccaugcuccucagaag

SEQ ID NO: 2519081 - RNA, 19 nt, Artificial Sequence
  Description of Artificial Sequence: Synthetic oligonucleotide
  Antisense strand to SEQ ID NO: 2519080
cuucugaggagcauggacc

SEQ ID NO: 2519082 - RNA, 19 nt, Artificial Sequence
  Description of Artificial Sequence: Synthetic oligonucleotide
  Sense strand starting at position 2254 of SEQ ID NO: 1888212
guccaugcuccucagaaga

SEQ ID NO: 2519083 - RNA, 19 nt, Artificial Sequence
  Description of Artificial Sequence: Synthetic oligonucleotide
  Antisense strand to SEQ ID NO: 2519082
ucuucugaggagcauggac

SEQ ID NO: 2519084 - RNA, 19 nt, Artificial Sequence
  Description of Artificial Sequence: Synthetic oligonucleotide
  Sense strand starting at position 2256 of SEQ ID NO: 1888212
ccaugcuccucagaagacu

SEQ ID NO: 2519085 - RNA, 19 nt, Artificial Sequence
  Description of Artificial Sequence: Synthetic oligonucleotide
  Antisense strand to SEQ ID NO: 2519084
agucuucugaggagcaugg

SEQ ID NO: 2519086 - RNA, 19 nt, Artificial Sequence
  Description of Artificial Sequence: Synthetic oligonucleotide
  Sense strand starting at position 2306 of SEQ ID NO: 1888212
aaauacguguguucuuauu

SEQ ID NO: 2519087 - RNA, 19 nt, Artificial Sequence
  Description of Artificial Sequence: Synthetic oligonucleotide
  Antisense strand to SEQ ID NO: 2519086
aauaagaacacacguauuu

SEQ ID NO: 2519088 - RNA, 19 nt, Artificial Sequence
  Description of Artificial Sequence: Synthetic oligonucleotide
  Sense strand starting at position 2308 of SEQ ID NO: 1888212
auacguguguucuuauuuc

SEQ ID NO: 2519089 - RNA, 19 nt, Artificial Sequence
  Description of Artificial Sequence: Synthetic oligonucleotide
  Antisense strand to SEQ ID NO: 2519088
gaaauaagaacacacguau

SEQ ID NO: 2519090 - RNA, 19 nt, Artificial Sequence
  Description of Artificial Sequence: Synthetic oligonucleotide
  Sense strand starting at position 2312 of SEQ ID NO: 1888212
guguguucuuauuucugua

SEQ ID NO: 2519091 - RNA, 19 nt, Artificial Sequence
  Description of Artificial Sequence: Synthetic oligonucleotide
  Antisense strand to SEQ ID NO: 2519090
uacagaaauaagaacacac

SEQ ID NO: 2519092 - RNA, 19 nt, Artificial Sequence
  Description of Artificial Sequence: Synthetic oligonucleotide
  Sense strand starting at position 2315 of SEQ ID NO: 1888212
uguucuuauuucuguacuu

SEQ ID NO: 2519093 - RNA, 19 nt, Artificial Sequence
  Description of Artificial Sequence: Synthetic oligonucleotide
  Antisense strand to SEQ ID NO: 2519092
aaguacagaaauaagaaca

SEQ ID NO: 2519094 - RNA, 19 nt, Artificial Sequence
  Description of Artificial Sequence: Synthetic oligonucleotide
  Sense strand starting at position 2325 of SEQ ID NO: 1888212
ucuguacuuccaggugcaa

SEQ ID NO: 2519095 - RNA, 19 nt, Artificial Sequence
  Description of Artificial Sequence: Synthetic oligonucleotide
  Antisense strand to SEQ ID NO: 2519094
uugcaccuggaaguacaga

SEQ ID NO: 2519096 - RNA, 19 nt, Artificial Sequence
  Description of Artificial Sequence: Synthetic oligonucleotide
  Sense strand starting at position 2414 of SEQ ID NO: 1888212
guggccaacuuuguaagaa

SEQ ID NO: 2519097 - RNA, 19 nt, Artificial Sequence
  Description of Artificial Sequence: Synthetic oligonucleotide
  Antisense strand to SEQ ID NO: 2519096
uucuuacaaaguuggccac

SEQ ID NO: 2519098 - RNA, 19 nt, Artificial Sequence
  Description of Artificial Sequence: Synthetic oligonucleotide
  Sense strand starting at position 2418 of SEQ ID NO: 1888212
ccaacuuuguaagaacaga

SEQ ID NO: 2519099 - RNA, 19 nt, Artificial Sequence
  Description of Artificial Sequence: Synthetic oligonucleotide
  Antisense strand to SEQ ID NO: 2519098
ucuguucuuacaaaguugg

SEQ ID NO: 2519100 - RNA, 19 nt, Artificial Sequence
  Description of Artificial Sequence: Synthetic oligonucleotide
  Sense strand starting at position 2717 of SEQ ID NO: 1888212
ggcggagaaugguguaaac

SEQ ID NO: 2519101 - RNA, 19 nt, Artificial Sequence
  Description of Artificial Sequence: Synthetic oligonucleotide
  Antisense strand to SEQ ID NO: 2519100
guuuacaccauucuccgcc

SEQ ID NO: 2519102 - RNA, 19 nt, Artificial Sequence
  Description of Artificial Sequence: Synthetic oligonucleotide
  Sense strand starting at position 2719 of SEQ ID NO: 1888212
cggagaaugguguaaaccu

SEQ ID NO: 2519103 - RNA, 19 nt, Artificial Sequence
  Description of Artificial Sequence: Synthetic oligonucleotide
  Antisense strand to SEQ ID NO: 2519102
agguuuacaccauucuccg

SEQ ID NO: 2519104 - RNA, 19 nt, Artificial Sequence
  Description of Artificial Sequence: Synthetic oligonucleotide
  Sense strand starting at position 2727 of SEQ ID NO: 1888212
gguguaaaccugggaggua

SEQ ID NO: 2519105 - RNA, 19 nt, Artificial Sequence
  Description of Artificial Sequence: Synthetic oligonucleotide
  Antisense strand to SEQ ID NO: 2519104
uaccucccagguuuacacc

SEQ ID NO: 2519106 - RNA, 19 nt, Artificial Sequence
  Description of Artificial Sequence: Synthetic oligonucleotide
  Sense strand starting at position 2899 of SEQ ID NO: 1888212
aucaauaacuuggaaguuu

SEQ ID NO: 2519107 - RNA, 19 nt, Artificial Sequence
  Description of Artificial Sequence: Synthetic oligonucleotide
  Antisense strand to SEQ ID NO: 2519106
aaacuuccaaguuauugau

SEQ ID NO: 2519108 - RNA, 19 nt, Artificial Sequence
  Description of Artificial Sequence: Synthetic oligonucleotide
  Sense strand starting at position 3028 of SEQ ID NO: 1888212
cggccuagcacuggauuua

SEQ ID NO: 2519109 - RNA, 19 nt, Artificial Sequence
  Description of Artificial Sequence: Synthetic oligonucleotide
  Antisense strand to SEQ ID NO: 2519108
uaaauccagugcuaggccg

SEQ ID NO: 2519110 - RNA, 19 nt, Artificial Sequence
  Description of Artificial Sequence: Synthetic oligonucleotide
  Sense strand starting at position 3207 of SEQ ID NO: 1888212
acgccuacguuccuaagau

SEQ ID NO: 2519111 - RNA, 19 nt, Artificial Sequence
  Description of Artificial Sequence: Synthetic oligonucleotide
  Antisense strand to SEQ ID NO: 2519110
aucuuaggaacguaggcgu

SEQ ID NO: 2519112 - RNA, 19 nt, Artificial Sequence
  Description of Artificial Sequence: Synthetic oligonucleotide
  Sense strand starting at position 3208 of SEQ ID NO: 1888212
cgccuacguuccuaagauu

SEQ ID NO: 2519113 - RNA, 19 nt, Artificial Sequence
  Description of Artificial Sequence: Synthetic oligonucleotide
  Antisense strand to SEQ ID NO: 2519112
aaucuuaggaacguaggcg

SEQ ID NO: 2519114 - RNA, 19 nt, Artificial Sequence
  Description of Artificial Sequence: Synthetic oligonucleotide
  Sense strand starting at position 3211 of SEQ ID NO: 1888212
cuacguuccuaagauucgu

SEQ ID NO: 2519115 - RNA, 19 nt, Artificial Sequence
  Description of Artificial Sequence: Synthetic oligonucleotide
  Antisense strand to SEQ ID NO: 2519114
acgaaucuuaggaacguag

SEQ ID NO: 2519116 - RNA, 19 nt, Artificial Sequence
  Description of Artificial Sequence: Synthetic oligonucleotide
  Sense strand starting at position 3216 of SEQ ID NO: 1888212
uuccuaagauucgucuaca

SEQ ID NO: 2519117 - RNA, 19 nt, Artificial Sequence
  Description of Artificial Sequence: Synthetic oligonucleotide
  Antisense strand to SEQ ID NO: 2519116
uguagacgaaucuuaggaa

SEQ ID NO: 2519118 - RNA, 19 nt, Artificial Sequence
  Description of Artificial Sequence: Synthetic oligonucleotide
  Sense strand starting at position 3217 of SEQ ID NO: 1888212
uccuaagauucgucuacac

SEQ ID NO: 2519119 - RNA, 19 nt, Artificial Sequence
  Description of Artificial Sequence: Synthetic oligonucleotide
  Antisense strand to SEQ ID NO: 2519118
guguagacgaaucuuagga

SEQ ID NO: 2519120 - RNA, 19 nt, Artificial Sequence
  Description of Artificial Sequence: Synthetic oligonucleotide
  Sense strand starting at position 3219 of SEQ ID NO: 1888212
cuaagauucgucuacacug

SEQ ID NO: 2519121 - RNA, 19 nt, Artificial Sequence
  Description of Artificial Sequence: Synthetic oligonucleotide
  Antisense strand to SEQ ID NO: 2519120
caguguagacgaaucuuag

SEQ ID NO: 2519122 - RNA, 19 nt, Artificial Sequence
  Description of Artificial Sequence: Synthetic oligonucleotide
  Sense strand starting at position 3236 of SEQ ID NO: 1888212
ugcagauuguagcuacaau

SEQ ID NO: 2519123 - RNA, 19 nt, Artificial Sequence
  Description of Artificial Sequence: Synthetic oligonucleotide
  Antisense strand to SEQ ID NO: 2519122
auuguagcuacaaucugca

SEQ ID NO: 2519124 - RNA, 19 nt, Artificial Sequence
  Description of Artificial Sequence: Synthetic oligonucleotide
  Sense strand starting at position 3262 of SEQ ID NO: 1888212
ucuccaguguggucacauu

SEQ ID NO: 2519125 - RNA, 19 nt, Artificial Sequence
  Description of Artificial Sequence: Synthetic oligonucleotide
  Antisense strand to SEQ ID NO: 2519124
aaugugaccacacuggaga

SEQ ID NO: 2519126 - RNA, 19 nt, Artificial Sequence
  Description of Artificial Sequence: Synthetic oligonucleotide
  Sense strand starting at position 3361 of SEQ ID NO: 1888212
ccaaguugcuuggaacauu

SEQ ID NO: 2519127 - RNA, 19 nt, Artificial Sequence
  Description of Artificial Sequence: Synthetic oligonucleotide
  Antisense strand to SEQ ID NO: 2519126
aauguuccaagcaacuugg

SEQ ID NO: 2519128 - RNA, 19 nt, Artificial Sequence
  Description of Artificial Sequence: Synthetic oligonucleotide
  Sense strand starting at position 3701 of SEQ ID NO: 1888212
aaauuaccucggugugaug

SEQ ID NO: 2519129 - RNA, 19 nt, Artificial Sequence
  Description of Artificial Sequence: Synthetic oligonucleotide
  Antisense strand to SEQ ID NO: 2519128
caucacaccgagguaauuu

SEQ ID NO: 2519130 - RNA, 19 nt, Artificial Sequence
  Description of Artificial Sequence: Synthetic oligonucleotide
  Sense strand starting at position 536 of SEQ ID NO: 1888213
gcguaacaauagugaaacu

SEQ ID NO: 2519131 - RNA, 19 nt, Artificial Sequence
  Description of Artificial Sequence: Synthetic oligonucleotide
  Antisense strand to SEQ ID NO: 2519130
aguuucacuauuguuacgc

SEQ ID NO: 2519132 - RNA, 19 nt, Artificial Sequence
  Description of Artificial Sequence: Synthetic oligonucleotide
  Sense strand starting at position 2209 of SEQ ID NO: 1888213
acaguuacgaugcaucgau

SEQ ID NO: 2519133 - RNA, 19 nt, Artificial Sequence
  Description of Artificial Sequence: Synthetic oligonucleotide
  Antisense strand to SEQ ID NO: 2519132
aucgaugcaucguaacugu

SEQ ID NO: 2519134 - RNA, 19 nt, Artificial Sequence
  Description of Artificial Sequence: Synthetic oligonucleotide
  Sense strand starting at position 2213 of SEQ ID NO: 1888213
uuacgaugcaucgaucaca

SEQ ID NO: 2519135 - RNA, 19 nt, Artificial Sequence
  Description of Artificial Sequence: Synthetic oligonucleotide
  Antisense strand to SEQ ID NO: 2519134
ugugaucgaugcaucguaa

SEQ ID NO: 2519136 - RNA, 19 nt, Artificial Sequence
  Description of Artificial Sequence: Synthetic oligonucleotide
  Sense strand starting at position 2256 of SEQ ID NO: 1888213
gggacucagugguaacaaa

SEQ ID NO: 2519137 - RNA, 19 nt, Artificial Sequence
  Description of Artificial Sequence: Synthetic oligonucleotide
  Antisense strand to SEQ ID NO: 2519136
uuuguuaccacugaguccc

SEQ ID NO: 2519138 - RNA, 19 nt, Artificial Sequence
  Description of Artificial Sequence: Synthetic oligonucleotide
  Sense strand starting at position 2325 of SEQ ID NO: 1888213
ggucccugcuccucagaau

SEQ ID NO: 2519139 - RNA, 19 nt, Artificial Sequence
  Description of Artificial Sequence: Synthetic oligonucleotide
  Antisense strand to SEQ ID NO: 2519138
auucugaggagcagggacc

SEQ ID NO: 2519140 - RNA, 19 nt, Artificial Sequence
  Description of Artificial Sequence: Synthetic oligonucleotide
  Sense strand starting at position 2365 of SEQ ID NO: 1888213
gguccaugcuccucagaag

SEQ ID NO: 2519141 - RNA, 19 nt, Artificial Sequence
  Description of Artificial Sequence: Synthetic oligonucleotide
  Antisense strand to SEQ ID NO: 2519140
cuucugaggagcauggacc

SEQ ID NO: 2519142 - RNA, 19 nt, Artificial Sequence
  Description of Artificial Sequence: Synthetic oligonucleotide
  Sense strand starting at position 2366 of SEQ ID NO: 1888213
guccaugcuccucagaaga

SEQ ID NO: 2519143 - RNA, 19 nt, Artificial Sequence
  Description of Artificial Sequence: Synthetic oligonucleotide
  Antisense strand to SEQ ID NO: 2519142
ucuucugaggagcauggac

SEQ ID NO: 2519144 - RNA, 19 nt, Artificial Sequence
  Description of Artificial Sequence: Synthetic oligonucleotide
  Sense strand starting at position 2368 of SEQ ID NO: 1888213
ccaugcuccucagaagacu

SEQ ID NO: 2519145 - RNA, 19 nt, Artificial Sequence
  Description of Artificial Sequence: Synthetic oligonucleotide
  Antisense strand to SEQ ID NO: 2519144
agucuucugaggagcaugg

SEQ ID NO: 2519146 - RNA, 19 nt, Artificial Sequence
  Description of Artificial Sequence: Synthetic oligonucleotide
  Sense strand starting at position 2418 of SEQ ID NO: 1888213
aaauacguguguucuuauu

SEQ ID NO: 2519147 - RNA, 19 nt, Artificial Sequence
  Description of Artificial Sequence: Synthetic oligonucleotide
  Antisense strand to SEQ ID NO: 2519146
aauaagaacacacguauuu

SEQ ID NO: 2519148 - RNA, 19 nt, Artificial Sequence
  Description of Artificial Sequence: Synthetic oligonucleotide
  Sense strand starting at position 2420 of SEQ ID NO: 1888213
auacguguguucuuauuuc

SEQ ID NO: 2519149 - RNA, 19 nt, Artificial Sequence
  Description of Artificial Sequence: Synthetic oligonucleotide
  Antisense strand to SEQ ID NO: 2519148
gaaauaagaacacacguau

SEQ ID NO: 2519150 - RNA, 19 nt, Artificial Sequence
  Description of Artificial Sequence: Synthetic oligonucleotide
  Sense strand starting at position 2424 of SEQ ID NO: 1888213
guguguucuuauuucugua

SEQ ID NO: 2519151 - RNA, 19 nt, Artificial Sequence
  Description of Artificial Sequence: Synthetic oligonucleotide
  Antisense strand to SEQ ID NO: 2519150
uacagaaauaagaacacac

SEQ ID NO: 2519152 - RNA, 19 nt, Artificial Sequence
  Description of Artificial Sequence: Synthetic oligonucleotide
  Sense strand starting at position 2427 of SEQ ID NO: 1888213
uguucuuauuucuguacuu

SEQ ID NO: 2519153 - RNA, 19 nt, Artificial Sequence
  Description of Artificial Sequence: Synthetic oligonucleotide
  Antisense strand to SEQ ID NO: 2519152
aaguacagaaauaagaaca

SEQ ID NO: 2519154 - RNA, 19 nt, Artificial Sequence
  Description of Artificial Sequence: Synthetic oligonucleotide
  Sense strand starting at position 2437 of SEQ ID NO: 1888213
ucuguacuuccaggugcaa

SEQ ID NO: 2519155 - RNA, 19 nt, Artificial Sequence
  Description of Artificial Sequence: Synthetic oligonucleotide
  Antisense strand to SEQ ID NO: 2519154
uugcaccuggaaguacaga

SEQ ID NO: 2519156 - RNA, 19 nt, Artificial Sequence
  Description of Artificial Sequence: Synthetic oligonucleotide
  Sense strand starting at position 2526 of SEQ ID NO: 1888213
guggccaacuuuguaagaa

SEQ ID NO: 2519157 - RNA, 19 nt, Artificial Sequence
  Description of Artificial Sequence: Synthetic oligonucleotide
  Antisense strand to SEQ ID NO: 2519156
uucuuacaaaguuggccac

SEQ ID NO: 2519158 - RNA, 19 nt, Artificial Sequence
  Description of Artificial Sequence: Synthetic oligonucleotide
  Sense strand starting at position 2530 of SEQ ID NO: 1888213
ccaacuuuguaagaacaga

SEQ ID NO: 2519159 - RNA, 19 nt, Artificial Sequence
  Description of Artificial Sequence: Synthetic oligonucleotide
  Antisense strand to SEQ ID NO: 2519158
ucuguucuuacaaaguugg

SEQ ID NO: 2519160 - RNA, 19 nt, Artificial Sequence
  Description of Artificial Sequence: Synthetic oligonucleotide
  Sense strand starting at position 2829 of SEQ ID NO: 1888213
ggcggagaaugguguaaac

SEQ ID NO: 2519161 - RNA, 19 nt, Artificial Sequence
  Description of Artificial Sequence: Synthetic oligonucleotide
  Antisense strand to SEQ ID NO: 2519160
guuuacaccauucuccgcc

SEQ ID NO: 2519162 - RNA, 19 nt, Artificial Sequence
  Description of Artificial Sequence: Synthetic oligonucleotide
  Sense strand starting at position 2831 of SEQ ID NO: 1888213
cggagaaugguguaaaccu

SEQ ID NO: 2519163 - RNA, 19 nt, Artificial Sequence
  Description of Artificial Sequence: Synthetic oligonucleotide
  Antisense strand to SEQ ID NO: 2519162
agguuuacaccauucuccg

SEQ ID NO: 2519164 - RNA, 19 nt, Artificial Sequence
  Description of Artificial Sequence: Synthetic oligonucleotide
  Sense strand starting at position 2839 of SEQ ID NO: 1888213
gguguaaaccugggaggua

SEQ ID NO: 2519165 - RNA, 19 nt, Artificial Sequence
  Description of Artificial Sequence: Synthetic oligonucleotide
  Antisense strand to SEQ ID NO: 2519164
uaccucccagguuuacacc

SEQ ID NO: 2519166 - RNA, 19 nt, Artificial Sequence
  Description of Artificial Sequence: Synthetic oligonucleotide
  Sense strand starting at position 3011 of SEQ ID NO: 1888213
aucaauaacuuggaaguuu

SEQ ID NO: 2519167 - RNA, 19 nt, Artificial Sequence
  Description of Artificial Sequence: Synthetic oligonucleotide
  Antisense strand to SEQ ID NO: 2519166
aaacuuccaaguuauugau

SEQ ID NO: 2519168 - RNA, 19 nt, Artificial Sequence
  Description of Artificial Sequence: Synthetic oligonucleotide
  Sense strand starting at position 3140 of SEQ ID NO: 1888213
cggccuagcacuggauuua

SEQ ID NO: 2519169 - RNA, 19 nt, Artificial Sequence
  Description of Artificial Sequence: Synthetic oligonucleotide
  Antisense strand to SEQ ID NO: 2519168
uaaauccagugcuaggccg

SEQ ID NO: 2519170 - RNA, 19 nt, Artificial Sequence
  Description of Artificial Sequence: Synthetic oligonucleotide
  Sense strand starting at position 3319 of SEQ ID NO: 1888213
acgccuacguuccuaagau

SEQ ID NO: 2519171 - RNA, 19 nt, Artificial Sequence
  Description of Artificial Sequence: Synthetic oligonucleotide
  Antisense strand to SEQ ID NO: 2519170
aucuuaggaacguaggcgu

SEQ ID NO: 2519172 - RNA, 19 nt, Artificial Sequence
  Description of Artificial Sequence: Synthetic oligonucleotide
  Sense strand starting at position 3320 of SEQ ID NO: 1888213
cgccuacguuccuaagauu

SEQ ID NO: 2519173 - RNA, 19 nt, Artificial Sequence
  Description of Artificial Sequence: Synthetic oligonucleotide
  Antisense strand to SEQ ID NO: 2519172
aaucuuaggaacguaggcg

SEQ ID NO: 2519174 - RNA, 19 nt, Artificial Sequence
  Description of Artificial Sequence: Synthetic oligonucleotide
  Sense strand starting at position 3323 of SEQ ID NO: 1888213
cuacguuccuaagauucgu

SEQ ID NO: 2519175 - RNA, 19 nt, Artificial Sequence
  Description of Artificial Sequence: Synthetic oligonucleotide
  Antisense strand to SEQ ID NO: 2519174
acgaaucuuaggaacguag

SEQ ID NO: 2519176 - RNA, 19 nt, Artificial Sequence
  Description of Artificial Sequence: Synthetic oligonucleotide
  Sense strand starting at position 3328 of SEQ ID NO: 1888213
uuccuaagauucgucuaca

SEQ ID NO: 2519177 - RNA, 19 nt, Artificial Sequence
  Description of Artificial Sequence: Synthetic oligonucleotide
  Antisense strand to SEQ ID NO: 2519176
uguagacgaaucuuaggaa

SEQ ID NO: 2519178 - RNA, 19 nt, Artificial Sequence
  Description of Artificial Sequence: Synthetic oligonucleotide
  Sense strand starting at position 3329 of SEQ ID NO: 1888213
uccuaagauucgucuacac

SEQ ID NO: 2519179 - RNA, 19 nt, Artificial Sequence
  Description of Artificial Sequence: Synthetic oligonucleotide
  Antisense strand to SEQ ID NO: 2519178
guguagacgaaucuuagga

SEQ ID NO: 2519180 - RNA, 19 nt, Artificial Sequence
  Description of Artificial Sequence: Synthetic oligonucleotide
  Sense strand starting at position 3331 of SEQ ID NO: 1888213
cuaagauucgucuacacug

SEQ ID NO: 2519181 - RNA, 19 nt, Artificial Sequence
  Description of Artificial Sequence: Synthetic oligonucleotide
  Antisense strand to SEQ ID NO: 2519180
caguguagacgaaucuuag

SEQ ID NO: 2519182 - RNA, 19 nt, Artificial Sequence
  Description of Artificial Sequence: Synthetic oligonucleotide
  Sense strand starting at position 3348 of SEQ ID NO: 1888213
ugcagauuguagcuacaau

SEQ ID NO: 2519183 - RNA, 19 nt, Artificial Sequence
  Description of Artificial Sequence: Synthetic oligonucleotide
  Antisense strand to SEQ ID NO: 2519182
auuguagcuacaaucugca

SEQ ID NO: 2519184 - RNA, 19 nt, Artificial Sequence
  Description of Artificial Sequence: Synthetic oligonucleotide
  Sense strand starting at position 3374 of SEQ ID NO: 1888213
ucuccaguguggucacauu

SEQ ID NO: 2519185 - RNA, 19 nt, Artificial Sequence
  Description of Artificial Sequence: Synthetic oligonucleotide
  Antisense strand to SEQ ID NO: 2519184
aaugugaccacacuggaga

SEQ ID NO: 2519186 - RNA, 19 nt, Artificial Sequence
  Description of Artificial Sequence: Synthetic oligonucleotide
  Sense strand starting at position 3473 of SEQ ID NO: 1888213
ccaaguugcuuggaacauu

SEQ ID NO: 2519187 - RNA, 19 nt, Artificial Sequence
  Description of Artificial Sequence: Synthetic oligonucleotide
  Antisense strand to SEQ ID NO: 2519186
aauguuccaagcaacuugg

SEQ ID NO: 2519188 - RNA, 19 nt, Artificial Sequence
  Description of Artificial Sequence: Synthetic oligonucleotide
  Sense strand starting at position 3813 of SEQ ID NO: 1888213
aaauuaccucggugugaug

SEQ ID NO: 2519189 - RNA, 19 nt, Artificial Sequence
  Description of Artificial Sequence: Synthetic oligonucleotide
  Antisense strand to SEQ ID NO: 2519188
caucacaccgagguaauuu

SEQ ID NO: 2519190 - RNA, 19 nt, Artificial Sequence
  Description of Artificial Sequence: Synthetic oligonucleotide
  Sense strand starting at position 2209 of SEQ ID NO: 1888214
acaguuacgaugcaucgau

SEQ ID NO: 2519191 - RNA, 19 nt, Artificial Sequence
  Description of Artificial Sequence: Synthetic oligonucleotide
  Antisense strand to SEQ ID NO: 2519190
aucgaugcaucguaacugu

SEQ ID NO: 2519192 - RNA, 19 nt, Artificial Sequence
  Description of Artificial Sequence: Synthetic oligonucleotide
  Sense strand starting at position 2213 of SEQ ID NO: 1888214
uuacgaugcaucgaucaca

SEQ ID NO: 2519193 - RNA, 19 nt, Artificial Sequence
  Description of Artificial Sequence: Synthetic oligonucleotide
  Antisense strand to SEQ ID NO: 2519192
ugugaucgaugcaucguaa

SEQ ID NO: 2519194 - RNA, 19 nt, Artificial Sequence
  Description of Artificial Sequence: Synthetic oligonucleotide
  Sense strand starting at position 2325 of SEQ ID NO: 1888214
ggucccugcuccucagaau

SEQ ID NO: 2519195 - RNA, 19 nt, Artificial Sequence
  Description of Artificial Sequence: Synthetic oligonucleotide
  Antisense strand to SEQ ID NO: 2519194
auucugaggagcagggacc

SEQ ID NO: 2519196 - RNA, 19 nt, Artificial Sequence
  Description of Artificial Sequence: Synthetic oligonucleotide
  Sense strand starting at position 2365 of SEQ ID NO: 1888214
gguccaugcuccucagaag

SEQ ID NO: 2519197 - RNA, 19 nt, Artificial Sequence
  Description of Artificial Sequence: Synthetic oligonucleotide
  Antisense strand to SEQ ID NO: 2519196
cuucugaggagcauggacc

SEQ ID NO: 2519198 - RNA, 19 nt, Artificial Sequence
  Description of Artificial Sequence: Synthetic oligonucleotide
  Sense strand starting at position 2366 of SEQ ID NO: 1888214
guccaugcuccucagaaga

SEQ ID NO: 2519199 - RNA, 19 nt, Artificial Sequence
  Description of Artificial Sequence: Synthetic oligonucleotide
  Antisense strand to SEQ ID NO: 2519198
ucuucugaggagcauggac

SEQ ID NO: 2519200 - RNA, 19 nt, Artificial Sequence
  Description of Artificial Sequence: Synthetic oligonucleotide
  Sense strand starting at position 2418 of SEQ ID NO: 1888214
aaauacguguguucuuauu

SEQ ID NO: 2519201 - RNA, 19 nt, Artificial Sequence
  Description of Artificial Sequence: Synthetic oligonucleotide
  Antisense strand to SEQ ID NO: 2519200
aauaagaacacacguauuu

SEQ ID NO: 2519202 - RNA, 19 nt, Artificial Sequence
  Description of Artificial Sequence: Synthetic oligonucleotide
  Sense strand starting at position 2420 of SEQ ID NO: 1888214
auacguguguucuuauuuc

SEQ ID NO: 2519203 - RNA, 19 nt, Artificial Sequence
  Description of Artificial Sequence: Synthetic oligonucleotide
  Antisense strand to SEQ ID NO: 2519202
gaaauaagaacacacguau

SEQ ID NO: 2519204 - RNA, 19 nt, Artificial Sequence
  Description of Artificial Sequence: Synthetic oligonucleotide
  Sense strand starting at position 2424 of SEQ ID NO: 1888214
guguguucuuauuucugua

SEQ ID NO: 2519205 - RNA, 19 nt, Artificial Sequence
  Description of Artificial Sequence: Synthetic oligonucleotide
  Antisense strand to SEQ ID NO: 2519204
uacagaaauaagaacacac

SEQ ID NO: 2519206 - RNA, 19 nt, Artificial Sequence
  Description of Artificial Sequence: Synthetic oligonucleotide
  Sense strand starting at position 2437 of SEQ ID NO: 1888214
ucuguacuuccaggugcaa

SEQ ID NO: 2519207 - RNA, 19 nt, Artificial Sequence
  Description of Artificial Sequence: Synthetic oligonucleotide
  Antisense strand to SEQ ID NO: 2519206
uugcaccuggaaguacaga

SEQ ID NO: 2519208 - RNA, 19 nt, Artificial Sequence
  Description of Artificial Sequence: Synthetic oligonucleotide
  Sense strand starting at position 2526 of SEQ ID NO: 1888214
guggccaacuuuguaagaa

SEQ ID NO: 2519209 - RNA, 19 nt, Artificial Sequence
  Description of Artificial Sequence: Synthetic oligonucleotide
  Antisense strand to SEQ ID NO: 2519208
uucuuacaaaguuggccac

SEQ ID NO: 2519210 - RNA, 19 nt, Artificial Sequence
  Description of Artificial Sequence: Synthetic oligonucleotide
  Sense strand starting at position 2530 of SEQ ID NO: 1888214
ccaacuuuguaagaacaga

SEQ ID NO: 2519211 - RNA, 19 nt, Artificial Sequence
  Description of Artificial Sequence: Synthetic oligonucleotide
  Antisense strand to SEQ ID NO: 2519210
ucuguucuuacaaaguugg

SEQ ID NO: 2519212 - RNA, 19 nt, Artificial Sequence
  Description of Artificial Sequence: Synthetic oligonucleotide
  Sense strand starting at position 2831 of SEQ ID NO: 1888214
cggagaaugguguaaaccu

SEQ ID NO: 2519213 - RNA, 19 nt, Artificial Sequence
  Description of Artificial Sequence: Synthetic oligonucleotide
  Antisense strand to SEQ ID NO: 2519212
agguuuacaccauucuccg

SEQ ID NO: 2519214 - RNA, 19 nt, Artificial Sequence
  Description of Artificial Sequence: Synthetic oligonucleotide
  Sense strand starting at position 2839 of SEQ ID NO: 1888214
gguguaaaccugggaggua

SEQ ID NO: 2519215 - RNA, 19 nt, Artificial Sequence
  Description of Artificial Sequence: Synthetic oligonucleotide
  Antisense strand to SEQ ID NO: 2519214
uaccucccagguuuacacc

SEQ ID NO: 2519216 - RNA, 19 nt, Artificial Sequence
  Description of Artificial Sequence: Synthetic oligonucleotide
  Sense strand starting at position 3140 of SEQ ID NO: 1888214
cggccuagcacuggauuua

SEQ ID NO: 2519217 - RNA, 19 nt, Artificial Sequence
  Description of Artificial Sequence: Synthetic oligonucleotide
  Antisense strand to SEQ ID NO: 2519216
uaaauccagugcuaggccg

SEQ ID NO: 2519218 - RNA, 19 nt, Artificial Sequence
  Description of Artificial Sequence: Synthetic oligonucleotide
  Sense strand starting at position 3328 of SEQ ID NO: 1888214
uuccuaagauucgucuaca

SEQ ID NO: 2519219 - RNA, 19 nt, Artificial Sequence
  Description of Artificial Sequence: Synthetic oligonucleotide
  Antisense strand to SEQ ID NO: 2519218
uguagacgaaucuuaggaa

SEQ ID NO: 2519220 - RNA, 19 nt, Artificial Sequence
  Description of Artificial Sequence: Synthetic oligonucleotide
  Sense strand starting at position 3329 of SEQ ID NO: 1888214
uccuaagauucgucuacac

SEQ ID NO: 2519221 - RNA, 19 nt, Artificial Sequence
  Description of Artificial Sequence: Synthetic oligonucleotide
  Antisense strand to SEQ ID NO: 2519220
guguagacgaaucuuagga

SEQ ID NO: 2519222 - RNA, 19 nt, Artificial Sequence
  Description of Artificial Sequence: Synthetic oligonucleotide
  Sense strand starting at position 3331 of SEQ ID NO: 1888214
cuaagauucgucuacacug

SEQ ID NO: 2519223 - RNA, 19 nt, Artificial Sequence
  Description of Artificial Sequence: Synthetic oligonucleotide
  Antisense strand to SEQ ID NO: 2519222
caguguagacgaaucuuag

SEQ ID NO: 2519224 - RNA, 19 nt, Artificial Sequence
  Description of Artificial Sequence: Synthetic oligonucleotide
  Sense strand starting at position 3348 of SEQ ID NO: 1888214
ugcagauuguagcuacaau

SEQ ID NO: 2519225 - RNA, 19 nt, Artificial Sequence
  Description of Artificial Sequence: Synthetic oligonucleotide
  Antisense strand to SEQ ID NO: 2519224
auuguagcuacaaucugca

SEQ ID NO: 2519226 - RNA, 19 nt, Artificial Sequence
  Description of Artificial Sequence: Synthetic oligonucleotide
  Sense strand starting at position 3374 of SEQ ID NO: 1888214
ucuccaguguggucacauu

SEQ ID NO: 2519227 - RNA, 19 nt, Artificial Sequence
  Description of Artificial Sequence: Synthetic oligonucleotide
  Antisense strand to SEQ ID NO: 2519226
aaugugaccacacuggaga

SEQ ID NO: 2519228 - RNA, 19 nt, Artificial Sequence
  Description of Artificial Sequence: Synthetic oligonucleotide
  Sense strand starting at position 3813 of SEQ ID NO: 1888214
aaauuaccucggugugaug

SEQ ID NO: 2519229 - RNA, 19 nt, Artificial Sequence
  Description of Artificial Sequence: Synthetic oligonucleotide
  Antisense strand to SEQ ID NO: 2519228
caucacaccgagguaauuu

SEQ ID NO: 2519230 - RNA, 19 nt, Artificial Sequence
  Description of Artificial Sequence: Synthetic oligonucleotide
  Sense strand starting at position 71 of SEQ ID NO: 1888215
gcguuauucgcagucuuca

SEQ ID NO: 2519231 - RNA, 19 nt, Artificial Sequence
  Description of Artificial Sequence: Synthetic oligonucleotide
  Antisense strand to SEQ ID NO: 2519230
ugaagacugcgaauaacgc

SEQ ID NO: 2519232 - RNA, 19 nt, Artificial Sequence
  Description of Artificial Sequence: Synthetic oligonucleotide
  Sense strand starting at position 2404 of SEQ ID NO: 1888215
acaguuacgaugcaucgau

SEQ ID NO: 2519233 - RNA, 19 nt, Artificial Sequence
  Description of Artificial Sequence: Synthetic oligonucleotide
  Antisense strand to SEQ ID NO: 2519232
aucgaugcaucguaacugu

SEQ ID NO: 2519234 - RNA, 19 nt, Artificial Sequence
  Description of Artificial Sequence: Synthetic oligonucleotide
  Sense strand starting at position 2408 of SEQ ID NO: 1888215
uuacgaugcaucgaucaca

SEQ ID NO: 2519235 - RNA, 19 nt, Artificial Sequence
  Description of Artificial Sequence: Synthetic oligonucleotide
  Antisense strand to SEQ ID NO: 2519234
ugugaucgaugcaucguaa

SEQ ID NO: 2519236 - RNA, 19 nt, Artificial Sequence
  Description of Artificial Sequence: Synthetic oligonucleotide
  Sense strand starting at position 2520 of SEQ ID NO: 1888215
ggucccugcuccucagaau

SEQ ID NO: 2519237 - RNA, 19 nt, Artificial Sequence
  Description of Artificial Sequence: Synthetic oligonucleotide
  Antisense strand to SEQ ID NO: 2519236
auucugaggagcagggacc

SEQ ID NO: 2519238 - RNA, 19 nt, Artificial Sequence
  Description of Artificial Sequence: Synthetic oligonucleotide
  Sense strand starting at position 2560 of SEQ ID NO: 1888215
gguccaugcuccucagaag

SEQ ID NO: 2519239 - RNA, 19 nt, Artificial Sequence
  Description of Artificial Sequence: Synthetic oligonucleotide
  Antisense strand to SEQ ID NO: 2519238
cuucugaggagcauggacc

SEQ ID NO: 2519240 - RNA, 19 nt, Artificial Sequence
  Description of Artificial Sequence: Synthetic oligonucleotide
  Sense strand starting at position 2561 of SEQ ID NO: 1888215
guccaugcuccucagaaga

SEQ ID NO: 2519241 - RNA, 19 nt, Artificial Sequence
  Description of Artificial Sequence: Synthetic oligonucleotide
  Antisense strand to SEQ ID NO: 2519240
ucuucugaggagcauggac

SEQ ID NO: 2519242 - RNA, 19 nt, Artificial Sequence
  Description of Artificial Sequence: Synthetic oligonucleotide
  Sense strand starting at position 2613 of SEQ ID NO: 1888215
aaauacguguguucuuauu

SEQ ID NO: 2519243 - RNA, 19 nt, Artificial Sequence
  Description of Artificial Sequence: Synthetic oligonucleotide
  Antisense strand to SEQ ID NO: 2519242
aauaagaacacacguauuu

SEQ ID NO: 2519244 - RNA, 19 nt, Artificial Sequence
  Description of Artificial Sequence: Synthetic oligonucleotide
  Sense strand starting at position 2615 of SEQ ID NO: 1888215
auacguguguucuuauuuc

SEQ ID NO: 2519245 - RNA, 19 nt, Artificial Sequence
  Description of Artificial Sequence: Synthetic oligonucleotide
  Antisense strand to SEQ ID NO: 2519244
gaaauaagaacacacguau

SEQ ID NO: 2519246 - RNA, 19 nt, Artificial Sequence
  Description of Artificial Sequence: Synthetic oligonucleotide
  Sense strand starting at position 2619 of SEQ ID NO: 1888215
guguguucuuauuucugua

SEQ ID NO: 2519247 - RNA, 19 nt, Artificial Sequence
  Description of Artificial Sequence: Synthetic oligonucleotide
  Antisense strand to SEQ ID NO: 2519246
uacagaaauaagaacacac

SEQ ID NO: 2519248 - RNA, 19 nt, Artificial Sequence
  Description of Artificial Sequence: Synthetic oligonucleotide
  Sense strand starting at position 2632 of SEQ ID NO: 1888215
ucuguacuuccaggugcaa

SEQ ID NO: 2519249 - RNA, 19 nt, Artificial Sequence
  Description of Artificial Sequence: Synthetic oligonucleotide
  Antisense strand to SEQ ID NO: 2519248
uugcaccuggaaguacaga

SEQ ID NO: 2519250 - RNA, 19 nt, Artificial Sequence
  Description of Artificial Sequence: Synthetic oligonucleotide
  Sense strand starting at position 2721 of SEQ ID NO: 1888215
guggccaacuuuguaagaa

SEQ ID NO: 2519251 - RNA, 19 nt, Artificial Sequence
  Description of Artificial Sequence: Synthetic oligonucleotide
  Antisense strand to SEQ ID NO: 2519250
uucuuacaaaguuggccac

SEQ ID NO: 2519252 - RNA, 19 nt, Artificial Sequence
  Description of Artificial Sequence: Synthetic oligonucleotide
  Sense strand starting at position 2725 of SEQ ID NO: 1888215
ccaacuuuguaagaacaga

SEQ ID NO: 2519253 - RNA, 19 nt, Artificial Sequence
  Description of Artificial Sequence: Synthetic oligonucleotide
  Antisense strand to SEQ ID NO: 2519252
ucuguucuuacaaaguugg

SEQ ID NO: 2519254 - RNA, 19 nt, Artificial Sequence
  Description of Artificial Sequence: Synthetic oligonucleotide
  Sense strand starting at position 3026 of SEQ ID NO: 1888215
cggagaaugguguaaaccu

SEQ ID NO: 2519255 - RNA, 19 nt, Artificial Sequence
  Description of Artificial Sequence: Synthetic oligonucleotide
  Antisense strand to SEQ ID NO: 2519254
agguuuacaccauucuccg

SEQ ID NO: 2519256 - RNA, 19 nt, Artificial Sequence
  Description of Artificial Sequence: Synthetic oligonucleotide
  Sense strand starting at position 3034 of SEQ ID NO: 1888215
gguguaaaccugggaggua

SEQ ID NO: 2519257 - RNA, 19 nt, Artificial Sequence
  Description of Artificial Sequence: Synthetic oligonucleotide
  Antisense strand to SEQ ID NO: 2519256
uaccucccagguuuacacc

SEQ ID NO: 2519258 - RNA, 19 nt, Artificial Sequence
  Description of Artificial Sequence: Synthetic oligonucleotide
  Sense strand starting at position 3335 of SEQ ID NO: 1888215
cggccuagcacuggauuua

SEQ ID NO: 2519259 - RNA, 19 nt, Artificial Sequence
  Description of Artificial Sequence: Synthetic oligonucleotide
  Antisense strand to SEQ ID NO: 2519258
uaaauccagugcuaggccg

SEQ ID NO: 2519260 - RNA, 19 nt, Artificial Sequence
  Description of Artificial Sequence: Synthetic oligonucleotide
  Sense strand starting at position 3523 of SEQ ID NO: 1888215
uuccuaagauucgucuaca

SEQ ID NO: 2519261 - RNA, 19 nt, Artificial Sequence
  Description of Artificial Sequence: Synthetic oligonucleotide
  Antisense strand to SEQ ID NO: 2519260
uguagacgaaucuuaggaa

SEQ ID NO: 2519262 - RNA, 19 nt, Artificial Sequence
  Description of Artificial Sequence: Synthetic oligonucleotide
  Sense strand starting at position 3524 of SEQ ID NO: 1888215
uccuaagauucgucuacac

SEQ ID NO: 2519263 - RNA, 19 nt, Artificial Sequence
  Description of Artificial Sequence: Synthetic oligonucleotide
  Antisense strand to SEQ ID NO: 2519262
guguagacgaaucuuagga

SEQ ID NO: 2519264 - RNA, 19 nt, Artificial Sequence
  Description of Artificial Sequence: Synthetic oligonucleotide
  Sense strand starting at position 3526 of SEQ ID NO: 1888215
cuaagauucgucuacacug

SEQ ID NO: 2519265 - RNA, 19 nt, Artificial Sequence
  Description of Artificial Sequence: Synthetic oligonucleotide
  Antisense strand to SEQ ID NO: 2519264
caguguagacgaaucuuag

SEQ ID NO: 2519266 - RNA, 19 nt, Artificial Sequence
  Description of Artificial Sequence: Synthetic oligonucleotide
  Sense strand starting at position 3543 of SEQ ID NO: 1888215
ugcagauuguagcuacaau

SEQ ID NO: 2519267 - RNA, 19 nt, Artificial Sequence
  Description of Artificial Sequence: Synthetic oligonucleotide
  Antisense strand to SEQ ID NO: 2519266
auuguagcuacaaucugca

SEQ ID NO: 2519268 - RNA, 19 nt, Artificial Sequence
  Description of Artificial Sequence: Synthetic oligonucleotide
  Sense strand starting at position 3569 of SEQ ID NO: 1888215
ucuccaguguggucacauu

SEQ ID NO: 2519269 - RNA, 19 nt, Artificial Sequence
  Description of Artificial Sequence: Synthetic oligonucleotide
  Antisense strand to SEQ ID NO: 2519268
aaugugaccacacuggaga

SEQ ID NO: 2519270 - RNA, 19 nt, Artificial Sequence
  Description of Artificial Sequence: Synthetic oligonucleotide
  Sense strand starting at position 2212 of SEQ ID NO: 1888216
acaguuacgaugcaucgau

SEQ ID NO: 2519271 - RNA, 19 nt, Artificial Sequence
  Description of Artificial Sequence: Synthetic oligonucleotide
  Antisense strand to SEQ ID NO: 2519270
aucgaugcaucguaacugu

SEQ ID NO: 2519272 - RNA, 19 nt, Artificial Sequence
  Description of Artificial Sequence: Synthetic oligonucleotide
  Sense strand starting at position 2216 of SEQ ID NO: 1888216
uuacgaugcaucgaucaca

SEQ ID NO: 2519273 - RNA, 19 nt, Artificial Sequence
  Description of Artificial Sequence: Synthetic oligonucleotide
  Antisense strand to SEQ ID NO: 2519272
ugugaucgaugcaucguaa

SEQ ID NO: 2519274 - RNA, 19 nt, Artificial Sequence
  Description of Artificial Sequence: Synthetic oligonucleotide
  Sense strand starting at position 2328 of SEQ ID NO: 1888216
ggucccugcuccucagaau

SEQ ID NO: 2519275 - RNA, 19 nt, Artificial Sequence
  Description of Artificial Sequence: Synthetic oligonucleotide
  Antisense strand to SEQ ID NO: 2519274
auucugaggagcagggacc

SEQ ID NO: 2519276 - RNA, 19 nt, Artificial Sequence
  Description of Artificial Sequence: Synthetic oligonucleotide
  Sense strand starting at position 2368 of SEQ ID NO: 1888216
gguccaugcuccucagaag

SEQ ID NO: 2519277 - RNA, 19 nt, Artificial Sequence
  Description of Artificial Sequence: Synthetic oligonucleotide
  Antisense strand to SEQ ID NO: 2519276
cuucugaggagcauggacc

SEQ ID NO: 2519278 - RNA, 19 nt, Artificial Sequence
  Description of Artificial Sequence: Synthetic oligonucleotide
  Sense strand starting at position 2369 of SEQ ID NO: 1888216
guccaugcuccucagaaga

SEQ ID NO: 2519279 - RNA, 19 nt, Artificial Sequence
  Description of Artificial Sequence: Synthetic oligonucleotide
  Antisense strand to SEQ ID NO: 2519278
ucuucugaggagcauggac

SEQ ID NO: 2519280 - RNA, 19 nt, Artificial Sequence
  Description of Artificial Sequence: Synthetic oligonucleotide
  Sense strand starting at position 2421 of SEQ ID NO: 1888216
aaauacguguguucuuauu

SEQ ID NO: 2519281 - RNA, 19 nt, Artificial Sequence
  Description of Artificial Sequence: Synthetic oligonucleotide
  Antisense strand to SEQ ID NO: 2519280
aauaagaacacacguauuu

SEQ ID NO: 2519282 - RNA, 19 nt, Artificial Sequence
  Description of Artificial Sequence: Synthetic oligonucleotide
  Sense strand starting at position 2423 of SEQ ID NO: 1888216
auacguguguucuuauuuc

SEQ ID NO: 2519283 - RNA, 19 nt, Artificial Sequence
  Description of Artificial Sequence: Synthetic oligonucleotide
  Antisense strand to SEQ ID NO: 2519282
gaaauaagaacacacguau

SEQ ID NO: 2519284 - RNA, 19 nt, Artificial Sequence
  Description of Artificial Sequence: Synthetic oligonucleotide
  Sense strand starting at position 2427 of SEQ ID NO: 1888216
guguguucuuauuucugua

SEQ ID NO: 2519285 - RNA, 19 nt, Artificial Sequence
  Description of Artificial Sequence: Synthetic oligonucleotide
  Antisense strand to SEQ ID NO: 2519284
uacagaaauaagaacacac

SEQ ID NO: 2519286 - RNA, 19 nt, Artificial Sequence
  Description of Artificial Sequence: Synthetic oligonucleotide
  Sense strand starting at position 2440 of SEQ ID NO: 1888216
ucuguacuuccaggugcaa

SEQ ID NO: 2519287 - RNA, 19 nt, Artificial Sequence
  Description of Artificial Sequence: Synthetic oligonucleotide
  Antisense strand to SEQ ID NO: 2519286
uugcaccuggaaguacaga

SEQ ID NO: 2519288 - RNA, 19 nt, Artificial Sequence
  Description of Artificial Sequence: Synthetic oligonucleotide
  Sense strand starting at position 2529 of SEQ ID NO: 1888216
guggccaacuuuguaagaa

SEQ ID NO: 2519289 - RNA, 19 nt, Artificial Sequence
  Description of Artificial Sequence: Synthetic oligonucleotide
  Antisense strand to SEQ ID NO: 2519288
uucuuacaaaguuggccac

SEQ ID NO: 2519290 - RNA, 19 nt, Artificial Sequence
  Description of Artificial Sequence: Synthetic oligonucleotide
  Sense strand starting at position 2533 of SEQ ID NO: 1888216
ccaacuuuguaagaacaga

SEQ ID NO: 2519291 - RNA, 19 nt, Artificial Sequence
  Description of Artificial Sequence: Synthetic oligonucleotide
  Antisense strand to SEQ ID NO: 2519290
ucuguucuuacaaaguugg

SEQ ID NO: 2519292 - RNA, 19 nt, Artificial Sequence
  Description of Artificial Sequence: Synthetic oligonucleotide
  Sense strand starting at position 2834 of SEQ ID NO: 1888216
cggagaaugguguaaaccu

SEQ ID NO: 2519293 - RNA, 19 nt, Artificial Sequence
  Description of Artificial Sequence: Synthetic oligonucleotide
  Antisense strand to SEQ ID NO: 2519292
agguuuacaccauucuccg

SEQ ID NO: 2519294 - RNA, 19 nt, Artificial Sequence
  Description of Artificial Sequence: Synthetic oligonucleotide
  Sense strand starting at position 2842 of SEQ ID NO: 1888216
gguguaaaccugggaggua

SEQ ID NO: 2519295 - RNA, 19 nt, Artificial Sequence
  Description of Artificial Sequence: Synthetic oligonucleotide
  Antisense strand to SEQ ID NO: 2519294
uaccucccagguuuacacc

SEQ ID NO: 2519296 - RNA, 19 nt, Artificial Sequence
  Description of Artificial Sequence: Synthetic oligonucleotide
  Sense strand starting at position 3143 of SEQ ID NO: 1888216
cggccuagcacuggauuua

SEQ ID NO: 2519297 - RNA, 19 nt, Artificial Sequence
  Description of Artificial Sequence: Synthetic oligonucleotide
  Antisense strand to SEQ ID NO: 2519296
uaaauccagugcuaggccg

SEQ ID NO: 2519298 - RNA, 19 nt, Artificial Sequence
  Description of Artificial Sequence: Synthetic oligonucleotide
  Sense strand starting at position 3331 of SEQ ID NO: 1888216
uuccuaagauucgucuaca

SEQ ID NO: 2519299 - RNA, 19 nt, Artificial Sequence
  Description of Artificial Sequence: Synthetic oligonucleotide
  Antisense strand to SEQ ID NO: 2519298
uguagacgaaucuuaggaa

SEQ ID NO: 2519300 - RNA, 19 nt, Artificial Sequence
  Description of Artificial Sequence: Synthetic oligonucleotide
  Sense strand starting at position 3332 of SEQ ID NO: 1888216
uccuaagauucgucuacac

SEQ ID NO: 2519301 - RNA, 19 nt, Artificial Sequence
  Description of Artificial Sequence: Synthetic oligonucleotide
  Antisense strand to SEQ ID NO: 2519300
guguagacgaaucuuagga

SEQ ID NO: 2519302 - RNA, 19 nt, Artificial Sequence
  Description of Artificial Sequence: Synthetic oligonucleotide
  Sense strand starting at position 3334 of SEQ ID NO: 1888216
cuaagauucgucuacacug

SEQ ID NO: 2519303 - RNA, 19 nt, Artificial Sequence
  Description of Artificial Sequence: Synthetic oligonucleotide
  Antisense strand to SEQ ID NO: 2519302
caguguagacgaaucuuag

SEQ ID NO: 2519304 - RNA, 19 nt, Artificial Sequence
  Description of Artificial Sequence: Synthetic oligonucleotide
  Sense strand starting at position 3351 of SEQ ID NO: 1888216
ugcagauuguagcuacaau

SEQ ID NO: 2519305 - RNA, 19 nt, Artificial Sequence
  Description of Artificial Sequence: Synthetic oligonucleotide
  Antisense strand to SEQ ID NO: 2519304
auuguagcuacaaucugca

SEQ ID NO: 2519306 - RNA, 19 nt, Artificial Sequence
  Description of Artificial Sequence: Synthetic oligonucleotide
  Sense strand starting at position 3377 of SEQ ID NO: 1888216
ucuccaguguggucacauu

SEQ ID NO: 2519307 - RNA, 19 nt, Artificial Sequence
  Description of Artificial Sequence: Synthetic oligonucleotide
  Antisense strand to SEQ ID NO: 2519306
aaugugaccacacuggaga

SEQ ID NO: 2519308 - RNA, 19 nt, Artificial Sequence
  Description of Artificial Sequence: Synthetic oligonucleotide
  Sense strand starting at position 3816 of SEQ ID NO: 1888216
aaauuaccucggugugaug

SEQ ID NO: 2519309 - RNA, 19 nt, Artificial Sequence
  Description of Artificial Sequence: Synthetic oligonucleotide
  Antisense strand to SEQ ID NO: 2519308
caucacaccgagguaauuu

SEQ ID NO: 2519310 - RNA, 19 nt, Artificial Sequence
  Description of Artificial Sequence: Synthetic oligonucleotide
  Sense strand starting at position 82 of SEQ ID NO: 1888217
acagaaagguuauaacaca

SEQ ID NO: 2519311 - RNA, 19 nt, Artificial Sequence
  Description of Artificial Sequence: Synthetic oligonucleotide
  Antisense strand to SEQ ID NO: 2519310
uguguuauaaccuuucugu

SEQ ID NO: 2519312 - RNA, 19 nt, Artificial Sequence
  Description of Artificial Sequence: Synthetic oligonucleotide
  Sense strand starting at position 183 of SEQ ID NO: 1888217
gcguuauucgcagucuuca

SEQ ID NO: 2519313 - RNA, 19 nt, Artificial Sequence
  Description of Artificial Sequence: Synthetic oligonucleotide
  Antisense strand to SEQ ID NO: 2519312
ugaagacugcgaauaacgc

SEQ ID NO: 2519314 - RNA, 19 nt, Artificial Sequence
  Description of Artificial Sequence: Synthetic oligonucleotide
  Sense strand starting at position 2516 of SEQ ID NO: 1888217
acaguuacgaugcaucgau

SEQ ID NO: 2519315 - RNA, 19 nt, Artificial Sequence
  Description of Artificial Sequence: Synthetic oligonucleotide
  Antisense strand to SEQ ID NO: 2519314
aucgaugcaucguaacugu

SEQ ID NO: 2519316 - RNA, 19 nt, Artificial Sequence
  Description of Artificial Sequence: Synthetic oligonucleotide
  Sense strand starting at position 2520 of SEQ ID NO: 1888217
uuacgaugcaucgaucaca

SEQ ID NO: 2519317 - RNA, 19 nt, Artificial Sequence
  Description of Artificial Sequence: Synthetic oligonucleotide
  Antisense strand to SEQ ID NO: 2519316
ugugaucgaugcaucguaa

SEQ ID NO: 2519318 - RNA, 19 nt, Artificial Sequence
  Description of Artificial Sequence: Synthetic oligonucleotide
  Sense strand starting at position 2632 of SEQ ID NO: 1888217
ggucccugcuccucagaau

SEQ ID NO: 2519319 - RNA, 19 nt, Artificial Sequence
  Description of Artificial Sequence: Synthetic oligonucleotide
  Antisense strand to SEQ ID NO: 2519318
auucugaggagcagggacc

SEQ ID NO: 2519320 - RNA, 19 nt, Artificial Sequence
  Description of Artificial Sequence: Synthetic oligonucleotide
  Sense strand starting at position 2672 of SEQ ID NO: 1888217
gguccaugcuccucagaag

SEQ ID NO: 2519321 - RNA, 19 nt, Artificial Sequence
  Description of Artificial Sequence: Synthetic oligonucleotide
  Antisense strand to SEQ ID NO: 2519320
cuucugaggagcauggacc

SEQ ID NO: 2519322 - RNA, 19 nt, Artificial Sequence
  Description of Artificial Sequence: Synthetic oligonucleotide
  Sense strand starting at position 2673 of SEQ ID NO: 1888217
guccaugcuccucagaaga

SEQ ID NO: 2519323 - RNA, 19 nt, Artificial Sequence
  Description of Artificial Sequence: Synthetic oligonucleotide
  Antisense strand to SEQ ID NO: 2519322
ucuucugaggagcauggac

SEQ ID NO: 2519324 - RNA, 19 nt, Artificial Sequence
  Description of Artificial Sequence: Synthetic oligonucleotide
  Sense strand starting at position 2725 of SEQ ID NO: 1888217
aaauacguguguucuuauu

SEQ ID NO: 2519325 - RNA, 19 nt, Artificial Sequence
  Description of Artificial Sequence: Synthetic oligonucleotide
  Antisense strand to SEQ ID NO: 2519324
aauaagaacacacguauuu

SEQ ID NO: 2519326 - RNA, 19 nt, Artificial Sequence
  Description of Artificial Sequence: Synthetic oligonucleotide
  Sense strand starting at position 2727 of SEQ ID NO: 1888217
auacguguguucuuauuuc

SEQ ID NO: 2519327 - RNA, 19 nt, Artificial Sequence
  Description of Artificial Sequence: Synthetic oligonucleotide
  Antisense strand to SEQ ID NO: 2519326
gaaauaagaacacacguau

SEQ ID NO: 2519328 - RNA, 19 nt, Artificial Sequence
  Description of Artificial Sequence: Synthetic oligonucleotide
  Sense strand starting at position 2731 of SEQ ID NO: 1888217
guguguucuuauuucugua

SEQ ID NO: 2519329 - RNA, 19 nt, Artificial Sequence
  Description of Artificial Sequence: Synthetic oligonucleotide
  Antisense strand to SEQ ID NO: 2519328
uacagaaauaagaacacac

SEQ ID NO: 2519330 - RNA, 19 nt, Artificial Sequence
  Description of Artificial Sequence: Synthetic oligonucleotide
  Sense strand starting at position 2744 of SEQ ID NO: 1888217
ucuguacuuccaggugcaa

SEQ ID NO: 2519331 - RNA, 19 nt, Artificial Sequence
  Description of Artificial Sequence: Synthetic oligonucleotide
  Antisense strand to SEQ ID NO: 2519330
uugcaccuggaaguacaga

SEQ ID NO: 2519332 - RNA, 19 nt, Artificial Sequence
  Description of Artificial Sequence: Synthetic oligonucleotide
  Sense strand starting at position 2833 of SEQ ID NO: 1888217
guggccaacuuuguaagaa

SEQ ID NO: 2519333 - RNA, 19 nt, Artificial Sequence
  Description of Artificial Sequence: Synthetic oligonucleotide
  Antisense strand to SEQ ID NO: 2519332
uucuuacaaaguuggccac

SEQ ID NO: 2519334 - RNA, 19 nt, Artificial Sequence
  Description of Artificial Sequence: Synthetic oligonucleotide
  Sense strand starting at position 3138 of SEQ ID NO: 1888217
cggagaaugguguaaaccu

SEQ ID NO: 2519335 - RNA, 19 nt, Artificial Sequence
  Description of Artificial Sequence: Synthetic oligonucleotide
  Antisense strand to SEQ ID NO: 2519334
agguuuacaccauucuccg

SEQ ID NO: 2519336 - RNA, 19 nt, Artificial Sequence
  Description of Artificial Sequence: Synthetic oligonucleotide
  Sense strand starting at position 3146 of SEQ ID NO: 1888217
gguguaaaccugggaggua

SEQ ID NO: 2519337 - RNA, 19 nt, Artificial Sequence
  Description of Artificial Sequence: Synthetic oligonucleotide
  Antisense strand to SEQ ID NO: 2519336
uaccucccagguuuacacc

SEQ ID NO: 2519338 - RNA, 19 nt, Artificial Sequence
  Description of Artificial Sequence: Synthetic oligonucleotide
  Sense strand starting at position 3447 of SEQ ID NO: 1888217
cggccuagcacuggauuua

SEQ ID NO: 2519339 - RNA, 19 nt, Artificial Sequence
  Description of Artificial Sequence: Synthetic oligonucleotide
  Antisense strand to SEQ ID NO: 2519338
uaaauccagugcuaggccg

SEQ ID NO: 2519340 - RNA, 19 nt, Artificial Sequence
  Description of Artificial Sequence: Synthetic oligonucleotide
  Sense strand starting at position 3635 of SEQ ID NO: 1888217
uuccuaagauucgucuaca

SEQ ID NO: 2519341 - RNA, 19 nt, Artificial Sequence
  Description of Artificial Sequence: Synthetic oligonucleotide
  Antisense strand to SEQ ID NO: 2519340
uguagacgaaucuuaggaa

SEQ ID NO: 2519342 - RNA, 19 nt, Artificial Sequence
  Description of Artificial Sequence: Synthetic oligonucleotide
  Sense strand starting at position 3636 of SEQ ID NO: 1888217
uccuaagauucgucuacac

SEQ ID NO: 2519343 - RNA, 19 nt, Artificial Sequence
  Description of Artificial Sequence: Synthetic oligonucleotide
  Antisense strand to SEQ ID NO: 2519342
guguagacgaaucuuagga

SEQ ID NO: 2519344 - RNA, 19 nt, Artificial Sequence
  Description of Artificial Sequence: Synthetic oligonucleotide
  Sense strand starting at position 3638 of SEQ ID NO: 1888217
cuaagauucgucuacacug

SEQ ID NO: 2519345 - RNA, 19 nt, Artificial Sequence
  Description of Artificial Sequence: Synthetic oligonucleotide
  Antisense strand to SEQ ID NO: 2519344
caguguagacgaaucuuag

SEQ ID NO: 2519346 - RNA, 19 nt, Artificial Sequence
  Description of Artificial Sequence: Synthetic oligonucleotide
  Sense strand starting at position 3655 of SEQ ID NO: 1888217
ugcagauuguagcuacaau

SEQ ID NO: 2519347 - RNA, 19 nt, Artificial Sequence
  Description of Artificial Sequence: Synthetic oligonucleotide
  Antisense strand to SEQ ID NO: 2519346
auuguagcuacaaucugca

SEQ ID NO: 2519348 - RNA, 19 nt, Artificial Sequence
  Description of Artificial Sequence: Synthetic oligonucleotide
  Sense strand starting at position 3681 of SEQ ID NO: 1888217
ucuccaguguggucacauu

SEQ ID NO: 2519349 - RNA, 19 nt, Artificial Sequence
  Description of Artificial Sequence: Synthetic oligonucleotide
  Antisense strand to SEQ ID NO: 2519348
aaugugaccacacuggaga

SEQ ID NO: 2519350 - RNA, 19 nt, Artificial Sequence
  Description of Artificial Sequence: Synthetic oligonucleotide
  Sense strand starting at position 2233 of SEQ ID NO: 1888218
acaguuacgaugcaucgau

SEQ ID NO: 2519351 - RNA, 19 nt, Artificial Sequence
  Description of Artificial Sequence: Synthetic oligonucleotide
  Antisense strand to SEQ ID NO: 2519350
aucgaugcaucguaacugu

SEQ ID NO: 2519352 - RNA, 19 nt, Artificial Sequence
  Description of Artificial Sequence: Synthetic oligonucleotide
  Sense strand starting at position 2237 of SEQ ID NO: 1888218
uuacgaugcaucgaucaca

SEQ ID NO: 2519353 - RNA, 19 nt, Artificial Sequence
  Description of Artificial Sequence: Synthetic oligonucleotide
  Antisense strand to SEQ ID NO: 2519352
ugugaucgaugcaucguaa

SEQ ID NO: 2519354 - RNA, 19 nt, Artificial Sequence
  Description of Artificial Sequence: Synthetic oligonucleotide
  Sense strand starting at position 2389 of SEQ ID NO: 1888218
gguccaugcuccucagaag

SEQ ID NO: 2519355 - RNA, 19 nt, Artificial Sequence
  Description of Artificial Sequence: Synthetic oligonucleotide
  Antisense strand to SEQ ID NO: 2519354
cuucugaggagcauggacc

SEQ ID NO: 2519356 - RNA, 19 nt, Artificial Sequence
  Description of Artificial Sequence: Synthetic oligonucleotide
  Sense strand starting at position 2390 of SEQ ID NO: 1888218
guccaugcuccucagaaga

SEQ ID NO: 2519357 - RNA, 19 nt, Artificial Sequence
  Description of Artificial Sequence: Synthetic oligonucleotide
  Antisense strand to SEQ ID NO: 2519356
ucuucugaggagcauggac

SEQ ID NO: 2519358 - RNA, 19 nt, Artificial Sequence
  Description of Artificial Sequence: Synthetic oligonucleotide
  Sense strand starting at position 2444 of SEQ ID NO: 1888218
auacguguguucuuauuuc

SEQ ID NO: 2519359 - RNA, 19 nt, Artificial Sequence
  Description of Artificial Sequence: Synthetic oligonucleotide
  Antisense strand to SEQ ID NO: 2519358
gaaauaagaacacacguau

SEQ ID NO: 2519360 - RNA, 19 nt, Artificial Sequence
  Description of Artificial Sequence: Synthetic oligonucleotide
  Sense strand starting at position 2448 of SEQ ID NO: 1888218
guguguucuuauuucugua

SEQ ID NO: 2519361 - RNA, 19 nt, Artificial Sequence
  Description of Artificial Sequence: Synthetic oligonucleotide
  Antisense strand to SEQ ID NO: 2519360
uacagaaauaagaacacac

SEQ ID NO: 2519362 - RNA, 19 nt, Artificial Sequence
  Description of Artificial Sequence: Synthetic oligonucleotide
  Sense strand starting at position 2550 of SEQ ID NO: 1888218
guggccaacuuuguaagaa

SEQ ID NO: 2519363 - RNA, 19 nt, Artificial Sequence
  Description of Artificial Sequence: Synthetic oligonucleotide
  Antisense strand to SEQ ID NO: 2519362
uucuuacaaaguuggccac

SEQ ID NO: 2519364 - RNA, 19 nt, Artificial Sequence
  Description of Artificial Sequence: Synthetic oligonucleotide
  Sense strand starting at position 2855 of SEQ ID NO: 1888218
cggagaaugguguaaaccu

SEQ ID NO: 2519365 - RNA, 19 nt, Artificial Sequence
  Description of Artificial Sequence: Synthetic oligonucleotide
  Antisense strand to SEQ ID NO: 2519364
agguuuacaccauucuccg

SEQ ID NO: 2519366 - RNA, 19 nt, Artificial Sequence
  Description of Artificial Sequence: Synthetic oligonucleotide
  Sense strand starting at position 2863 of SEQ ID NO: 1888218
gguguaaaccugggaggua

SEQ ID NO: 2519367 - RNA, 19 nt, Artificial Sequence
  Description of Artificial Sequence: Synthetic oligonucleotide
  Antisense strand to SEQ ID NO: 2519366
uaccucccagguuuacacc

SEQ ID NO: 2519368 - RNA, 19 nt, Artificial Sequence
  Description of Artificial Sequence: Synthetic oligonucleotide
  Sense strand starting at position 3164 of SEQ ID NO: 1888218
cggccuagcacuggauuua

SEQ ID NO: 2519369 - RNA, 19 nt, Artificial Sequence
  Description of Artificial Sequence: Synthetic oligonucleotide
  Antisense strand to SEQ ID NO: 2519368
uaaauccagugcuaggccg

SEQ ID NO: 2519370 - RNA, 19 nt, Artificial Sequence
  Description of Artificial Sequence: Synthetic oligonucleotide
  Sense strand starting at position 3352 of SEQ ID NO: 1888218
uuccuaagauucgucuaca

SEQ ID NO: 2519371 - RNA, 19 nt, Artificial Sequence
  Description of Artificial Sequence: Synthetic oligonucleotide
  Antisense strand to SEQ ID NO: 2519370
uguagacgaaucuuaggaa

SEQ ID NO: 2519372 - RNA, 19 nt, Artificial Sequence
  Description of Artificial Sequence: Synthetic oligonucleotide
  Sense strand starting at position 3355 of SEQ ID NO: 1888218
cuaagauucgucuacacug

SEQ ID NO: 2519373 - RNA, 19 nt, Artificial Sequence
  Description of Artificial Sequence: Synthetic oligonucleotide
  Antisense strand to SEQ ID NO: 2519372
caguguagacgaaucuuag

SEQ ID NO: 2519374 - RNA, 19 nt, Artificial Sequence
  Description of Artificial Sequence: Synthetic oligonucleotide
  Sense strand starting at position 95 of SEQ ID NO: 1888219
gcguuauucgcagucuuca

SEQ ID NO: 2519375 - RNA, 19 nt, Artificial Sequence
  Description of Artificial Sequence: Synthetic oligonucleotide
  Antisense strand to SEQ ID NO: 2519374
ugaagacugcgaauaacgc

SEQ ID NO: 2519376 - RNA, 19 nt, Artificial Sequence
  Description of Artificial Sequence: Synthetic oligonucleotide
  Sense strand starting at position 2428 of SEQ ID NO: 1888219
acaguuacgaugcaucgau

SEQ ID NO: 2519377 - RNA, 19 nt, Artificial Sequence
  Description of Artificial Sequence: Synthetic oligonucleotide
  Antisense strand to SEQ ID NO: 2519376
aucgaugcaucguaacugu

SEQ ID NO: 2519378 - RNA, 19 nt, Artificial Sequence
  Description of Artificial Sequence: Synthetic oligonucleotide
  Sense strand starting at position 2432 of SEQ ID NO: 1888219
uuacgaugcaucgaucaca

SEQ ID NO: 2519379 - RNA, 19 nt, Artificial Sequence
  Description of Artificial Sequence: Synthetic oligonucleotide
  Antisense strand to SEQ ID NO: 2519378
ugugaucgaugcaucguaa

SEQ ID NO: 2519380 - RNA, 19 nt, Artificial Sequence
  Description of Artificial Sequence: Synthetic oligonucleotide
  Sense strand starting at position 2584 of SEQ ID NO: 1888219
gguccaugcuccucagaag

SEQ ID NO: 2519381 - RNA, 19 nt, Artificial Sequence
  Description of Artificial Sequence: Synthetic oligonucleotide
  Antisense strand to SEQ ID NO: 2519380
cuucugaggagcauggacc

SEQ ID NO: 2519382 - RNA, 19 nt, Artificial Sequence
  Description of Artificial Sequence: Synthetic oligonucleotide
  Sense strand starting at position 2585 of SEQ ID NO: 1888219
guccaugcuccucagaaga

SEQ ID NO: 2519383 - RNA, 19 nt, Artificial Sequence
  Description of Artificial Sequence: Synthetic oligonucleotide
  Antisense strand to SEQ ID NO: 2519382
ucuucugaggagcauggac

SEQ ID NO: 2519384 - RNA, 19 nt, Artificial Sequence
  Description of Artificial Sequence: Synthetic oligonucleotide
  Sense strand starting at position 2639 of SEQ ID NO: 1888219
auacguguguucuuauuuc

SEQ ID NO: 2519385 - RNA, 19 nt, Artificial Sequence
  Description of Artificial Sequence: Synthetic oligonucleotide
  Antisense strand to SEQ ID NO: 2519384
gaaauaagaacacacguau

SEQ ID NO: 2519386 - RNA, 19 nt, Artificial Sequence
  Description of Artificial Sequence: Synthetic oligonucleotide
  Sense strand starting at position 2643 of SEQ ID NO: 1888219
guguguucuuauuucugua

SEQ ID NO: 2519387 - RNA, 19 nt, Artificial Sequence
  Description of Artificial Sequence: Synthetic oligonucleotide
  Antisense strand to SEQ ID NO: 2519386
uacagaaauaagaacacac

SEQ ID NO: 2519388 - RNA, 19 nt, Artificial Sequence
  Description of Artificial Sequence: Synthetic oligonucleotide
  Sense strand starting at position 2745 of SEQ ID NO: 1888219
guggccaacuuuguaagaa

SEQ ID NO: 2519389 - RNA, 19 nt, Artificial Sequence
  Description of Artificial Sequence: Synthetic oligonucleotide
  Antisense strand to SEQ ID NO: 2519388
uucuuacaaaguuggccac

SEQ ID NO: 2519390 - RNA, 19 nt, Artificial Sequence
  Description of Artificial Sequence: Synthetic oligonucleotide
  Sense strand starting at position 3050 of SEQ ID NO: 1888219
cggagaaugguguaaaccu

SEQ ID NO: 2519391 - RNA, 19 nt, Artificial Sequence
  Description of Artificial Sequence: Synthetic oligonucleotide
  Antisense strand to SEQ ID NO: 2519390
agguuuacaccauucuccg

SEQ ID NO: 2519392 - RNA, 19 nt, Artificial Sequence
  Description of Artificial Sequence: Synthetic oligonucleotide
  Sense strand starting at position 3058 of SEQ ID NO: 1888219
gguguaaaccugggaggua

SEQ ID NO: 2519393 - RNA, 19 nt, Artificial Sequence
  Description of Artificial Sequence: Synthetic oligonucleotide
  Antisense strand to SEQ ID NO: 2519392
uaccucccagguuuacacc

SEQ ID NO: 2519394 - RNA, 19 nt, Artificial Sequence
  Description of Artificial Sequence: Synthetic oligonucleotide
  Sense strand starting at position 3359 of SEQ ID NO: 1888219
cggccuagcacuggauuua

SEQ ID NO: 2519395 - RNA, 19 nt, Artificial Sequence
  Description of Artificial Sequence: Synthetic oligonucleotide
  Antisense strand to SEQ ID NO: 2519394
uaaauccagugcuaggccg

SEQ ID NO: 2519396 - RNA, 19 nt, Artificial Sequence
  Description of Artificial Sequence: Synthetic oligonucleotide
  Sense strand starting at position 3547 of SEQ ID NO: 1888219
uuccuaagauucgucuaca

SEQ ID NO: 2519397 - RNA, 19 nt, Artificial Sequence
  Description of Artificial Sequence: Synthetic oligonucleotide
  Antisense strand to SEQ ID NO: 2519396
uguagacgaaucuuaggaa

SEQ ID NO: 2519398 - RNA, 19 nt, Artificial Sequence
  Description of Artificial Sequence: Synthetic oligonucleotide
  Sense strand starting at position 3548 of SEQ ID NO: 1888219
uccuaagauucgucuacac

SEQ ID NO: 2519399 - RNA, 19 nt, Artificial Sequence
  Description of Artificial Sequence: Synthetic oligonucleotide
  Antisense strand to SEQ ID NO: 2519398
guguagacgaaucuuagga

SEQ ID NO: 2519400 - RNA, 19 nt, Artificial Sequence
  Description of Artificial Sequence: Synthetic oligonucleotide
  Sense strand starting at position 3550 of SEQ ID NO: 1888219
cuaagauucgucuacacug

SEQ ID NO: 2519401 - RNA, 19 nt, Artificial Sequence
  Description of Artificial Sequence: Synthetic oligonucleotide
  Antisense strand to SEQ ID NO: 2519400
caguguagacgaaucuuag

SEQ ID NO: 2519402 - RNA, 19 nt, Artificial Sequence
  Description of Artificial Sequence: Synthetic oligonucleotide
  Sense strand starting at position 207 of SEQ ID NO: 1888220
gcguuauucgcagucuuca

SEQ ID NO: 2519403 - RNA, 19 nt, Artificial Sequence
  Description of Artificial Sequence: Synthetic oligonucleotide
  Antisense strand to SEQ ID NO: 2519402
ugaagacugcgaauaacgc

SEQ ID NO: 2519404 - RNA, 19 nt, Artificial Sequence
  Description of Artificial Sequence: Synthetic oligonucleotide
  Sense strand starting at position 2540 of SEQ ID NO: 1888220
acaguuacgaugcaucgau

SEQ ID NO: 2519405 - RNA, 19 nt, Artificial Sequence
  Description of Artificial Sequence: Synthetic oligonucleotide
  Antisense strand to SEQ ID NO: 2519404
aucgaugcaucguaacugu

SEQ ID NO: 2519406 - RNA, 19 nt, Artificial Sequence
  Description of Artificial Sequence: Synthetic oligonucleotide
  Sense strand starting at position 2544 of SEQ ID NO: 1888220
uuacgaugcaucgaucaca

SEQ ID NO: 2519407 - RNA, 19 nt, Artificial Sequence
  Description of Artificial Sequence: Synthetic oligonucleotide
  Antisense strand to SEQ ID NO: 2519406
ugugaucgaugcaucguaa

SEQ ID NO: 2519408 - RNA, 19 nt, Artificial Sequence
  Description of Artificial Sequence: Synthetic oligonucleotide
  Sense strand starting at position 2696 of SEQ ID NO: 1888220
gguccaugcuccucagaag

SEQ ID NO: 2519409 - RNA, 19 nt, Artificial Sequence
  Description of Artificial Sequence: Synthetic oligonucleotide
  Antisense strand to SEQ ID NO: 2519408
cuucugaggagcauggacc

SEQ ID NO: 2519410 - RNA, 19 nt, Artificial Sequence
  Description of Artificial Sequence: Synthetic oligonucleotide
  Sense strand starting at position 2697 of SEQ ID NO: 1888220
guccaugcuccucagaaga

SEQ ID NO: 2519411 - RNA, 19 nt, Artificial Sequence
  Description of Artificial Sequence: Synthetic oligonucleotide
  Antisense strand to SEQ ID NO: 2519410
ucuucugaggagcauggac

SEQ ID NO: 2519412 - RNA, 19 nt, Artificial Sequence
  Description of Artificial Sequence: Synthetic oligonucleotide
  Sense strand starting at position 2751 of SEQ ID NO: 1888220
auacguguguucuuauuuc

SEQ ID NO: 2519413 - RNA, 19 nt, Artificial Sequence
  Description of Artificial Sequence: Synthetic oligonucleotide
  Antisense strand to SEQ ID NO: 2519412
gaaauaagaacacacguau

SEQ ID NO: 2519414 - RNA, 19 nt, Artificial Sequence
  Description of Artificial Sequence: Synthetic oligonucleotide
  Sense strand starting at position 2755 of SEQ ID NO: 1888220
guguguucuuauuucugua

SEQ ID NO: 2519415 - RNA, 19 nt, Artificial Sequence
  Description of Artificial Sequence: Synthetic oligonucleotide
  Antisense strand to SEQ ID NO: 2519414
uacagaaauaagaacacac

SEQ ID NO: 2519416 - RNA, 19 nt, Artificial Sequence
  Description of Artificial Sequence: Synthetic oligonucleotide
  Sense strand starting at position 2857 of SEQ ID NO: 1888220
guggccaacuuuguaagaa

SEQ ID NO: 2519417 - RNA, 19 nt, Artificial Sequence
  Description of Artificial Sequence: Synthetic oligonucleotide
  Antisense strand to SEQ ID NO: 2519416
uucuuacaaaguuggccac

SEQ ID NO: 2519418 - RNA, 19 nt, Artificial Sequence
  Description of Artificial Sequence: Synthetic oligonucleotide
  Sense strand starting at position 3162 of SEQ ID NO: 1888220
cggagaaugguguaaaccu

SEQ ID NO: 2519419 - RNA, 19 nt, Artificial Sequence
  Description of Artificial Sequence: Synthetic oligonucleotide
  Antisense strand to SEQ ID NO: 2519418
agguuuacaccauucuccg

SEQ ID NO: 2519420 - RNA, 19 nt, Artificial Sequence
  Description of Artificial Sequence: Synthetic oligonucleotide
  Sense strand starting at position 3170 of SEQ ID NO: 1888220
gguguaaaccugggaggua

SEQ ID NO: 2519421 - RNA, 19 nt, Artificial Sequence
  Description of Artificial Sequence: Synthetic oligonucleotide
  Antisense strand to SEQ ID NO: 2519420
uaccucccagguuuacacc

SEQ ID NO: 2519422 - RNA, 19 nt, Artificial Sequence
  Description of Artificial Sequence: Synthetic oligonucleotide
  Sense strand starting at position 3471 of SEQ ID NO: 1888220
cggccuagcacuggauuua

SEQ ID NO: 2519423 - RNA, 19 nt, Artificial Sequence
  Description of Artificial Sequence: Synthetic oligonucleotide
  Antisense strand to SEQ ID NO: 2519422
uaaauccagugcuaggccg

SEQ ID NO: 2519424 - RNA, 19 nt, Artificial Sequence
  Description of Artificial Sequence: Synthetic oligonucleotide
  Sense strand starting at position 3659 of SEQ ID NO: 1888220
uuccuaagauucgucuaca

SEQ ID NO: 2519425 - RNA, 19 nt, Artificial Sequence
  Description of Artificial Sequence: Synthetic oligonucleotide
  Antisense strand to SEQ ID NO: 2519424
uguagacgaaucuuaggaa

SEQ ID NO: 2519426 - RNA, 19 nt, Artificial Sequence
  Description of Artificial Sequence: Synthetic oligonucleotide
  Sense strand starting at position 3660 of SEQ ID NO: 1888220
uccuaagauucgucuacac

SEQ ID NO: 2519427 - RNA, 19 nt, Artificial Sequence
  Description of Artificial Sequence: Synthetic oligonucleotide
  Antisense strand to SEQ ID NO: 2519426
guguagacgaaucuuagga

SEQ ID NO: 2519428 - RNA, 19 nt, Artificial Sequence
  Description of Artificial Sequence: Synthetic oligonucleotide
  Sense strand starting at position 3662 of SEQ ID NO: 1888220
cuaagauucgucuacacug

SEQ ID NO: 2519429 - RNA, 19 nt, Artificial Sequence
  Description of Artificial Sequence: Synthetic oligonucleotide
  Antisense strand to SEQ ID NO: 2519428
caguguagacgaaucuuag

SEQ ID NO: 2519430 - RNA, 19 nt, Artificial Sequence
  Description of Artificial Sequence: Synthetic oligonucleotide
  Sense strand starting at position 112 of SEQ ID NO: 1888221
agagucugauucucaggaa

SEQ ID NO: 2519431 - RNA, 19 nt, Artificial Sequence
  Description of Artificial Sequence: Synthetic oligonucleotide
  Antisense strand to SEQ ID NO: 2519430
uuccugagaaucagacucu

SEQ ID NO: 2519432 - RNA, 19 nt, Artificial Sequence
  Description of Artificial Sequence: Synthetic oligonucleotide
  Sense strand starting at position 161 of SEQ ID NO: 1888221
gcucaauaucaaugugcaa

SEQ ID NO: 2519433 - RNA, 19 nt, Artificial Sequence
  Description of Artificial Sequence: Synthetic oligonucleotide
  Antisense strand to SEQ ID NO: 2519432
uugcacauugauauugagc

SEQ ID NO: 2519434 - RNA, 19 nt, Artificial Sequence
  Description of Artificial Sequence: Synthetic oligonucleotide
  Sense strand starting at position 239 of SEQ ID NO: 1888221
ugcucaggucccugauuua

SEQ ID NO: 2519435 - RNA, 19 nt, Artificial Sequence
  Description of Artificial Sequence: Synthetic oligonucleotide
  Antisense strand to SEQ ID NO: 2519434
uaaaucagggaccugagca

SEQ ID NO: 2519436 - RNA, 19 nt, Artificial Sequence
  Description of Artificial Sequence: Synthetic oligonucleotide
  Sense strand starting at position 439 of SEQ ID NO: 1888221
caaacuucuccggaggcua

SEQ ID NO: 2519437 - RNA, 19 nt, Artificial Sequence
  Description of Artificial Sequence: Synthetic oligonucleotide
  Antisense strand to SEQ ID NO: 2519436
uagccuccggagaaguuug

SEQ ID NO: 2519438 - RNA, 19 nt, Artificial Sequence
  Description of Artificial Sequence: Synthetic oligonucleotide
  Sense strand starting at position 659 of SEQ ID NO: 1888221
guuaaaugcuauguaagua

SEQ ID NO: 2519439 - RNA, 19 nt, Artificial Sequence
  Description of Artificial Sequence: Synthetic oligonucleotide
  Antisense strand to SEQ ID NO: 2519438
uacuuacauagcauuuaac

SEQ ID NO: 2519440 - RNA, 19 nt, Artificial Sequence
  Description of Artificial Sequence: Synthetic oligonucleotide
  Sense strand starting at position 685 of SEQ ID NO: 1888221
cacugcaguguuuagggaa

SEQ ID NO: 2519441 - RNA, 19 nt, Artificial Sequence
  Description of Artificial Sequence: Synthetic oligonucleotide
  Antisense strand to SEQ ID NO: 2519440
uucccuaaacacugcagug

SEQ ID NO: 2519442 - RNA, 19 nt, Artificial Sequence
  Description of Artificial Sequence: Synthetic oligonucleotide
  Sense strand starting at position 692 of SEQ ID NO: 1888221
guguuuagggaaugacaag

SEQ ID NO: 2519443 - RNA, 19 nt, Artificial Sequence
  Description of Artificial Sequence: Synthetic oligonucleotide
  Antisense strand to SEQ ID NO: 2519442
cuugucauucccuaaacac

SEQ ID NO: 2519444 - RNA, 19 nt, Artificial Sequence
  Description of Artificial Sequence: Synthetic oligonucleotide
  Sense strand starting at position 724 of SEQ ID NO: 1888221
acguguucaguacagaugu

SEQ ID NO: 2519445 - RNA, 19 nt, Artificial Sequence
  Description of Artificial Sequence: Synthetic oligonucleotide
  Antisense strand to SEQ ID NO: 2519444
acaucuguacugaacacgu

SEQ ID NO: 2519446 - RNA, 19 nt, Artificial Sequence
  Description of Artificial Sequence: Synthetic oligonucleotide
  Sense strand starting at position 1119 of SEQ ID NO: 1888221
ggauagggagcguauuguu

SEQ ID NO: 2519447 - RNA, 19 nt, Artificial Sequence
  Description of Artificial Sequence: Synthetic oligonucleotide
  Antisense strand to SEQ ID NO: 2519446
aacaauacgcucccuaucc

SEQ ID NO: 2519448 - RNA, 19 nt, Artificial Sequence
  Description of Artificial Sequence: Synthetic oligonucleotide
  Sense strand starting at position 1218 of SEQ ID NO: 1888221
uguagacacguguauaucu

SEQ ID NO: 2519449 - RNA, 19 nt, Artificial Sequence
  Description of Artificial Sequence: Synthetic oligonucleotide
  Antisense strand to SEQ ID NO: 2519448
agauauacacgugucuaca

SEQ ID NO: 2519450 - RNA, 19 nt, Artificial Sequence
  Description of Artificial Sequence: Synthetic oligonucleotide
  Sense strand starting at position 1694 of SEQ ID NO: 1888221
cggucuuucgccuccuaca

SEQ ID NO: 2519451 - RNA, 19 nt, Artificial Sequence
  Description of Artificial Sequence: Synthetic oligonucleotide
  Antisense strand to SEQ ID NO: 2519450
uguaggaggcgaaagaccg

SEQ ID NO: 2519452 - RNA, 19 nt, Artificial Sequence
  Description of Artificial Sequence: Synthetic oligonucleotide
  Sense strand starting at position 2105 of SEQ ID NO: 1888221
cguauauuccagcaaauug

SEQ ID NO: 2519453 - RNA, 19 nt, Artificial Sequence
  Description of Artificial Sequence: Synthetic oligonucleotide
  Antisense strand to SEQ ID NO: 2519452
caauuugcuggaauauacg

SEQ ID NO: 2519454 - RNA, 19 nt, Artificial Sequence
  Description of Artificial Sequence: Synthetic oligonucleotide
  Sense strand starting at position 2194 of SEQ ID NO: 1888221
uggugagcgcuugacaaug

SEQ ID NO: 2519455 - RNA, 19 nt, Artificial Sequence
  Description of Artificial Sequence: Synthetic oligonucleotide
  Antisense strand to SEQ ID NO: 2519454
cauugucaagcgcucacca

SEQ ID NO: 2519456 - RNA, 19 nt, Artificial Sequence
  Description of Artificial Sequence: Synthetic oligonucleotide
  Sense strand starting at position 2199 of SEQ ID NO: 1888221
agcgcuugacaaugauuua

SEQ ID NO: 2519457 - RNA, 19 nt, Artificial Sequence
  Description of Artificial Sequence: Synthetic oligonucleotide
  Antisense strand to SEQ ID NO: 2519456
uaaaucauugucaagcgcu

SEQ ID NO: 2519458 - RNA, 19 nt, Artificial Sequence
  Description of Artificial Sequence: Synthetic oligonucleotide
  Sense strand starting at position 2252 of SEQ ID NO: 1888221
gcucucuguccugacauga

SEQ ID NO: 2519459 - RNA, 19 nt, Artificial Sequence
  Description of Artificial Sequence: Synthetic oligonucleotide
  Antisense strand to SEQ ID NO: 2519458
ucaugucaggacagagagc

SEQ ID NO: 2519460 - RNA, 19 nt, Artificial Sequence
  Description of Artificial Sequence: Synthetic oligonucleotide
  Sense strand starting at position 2275 of SEQ ID NO: 1888221
uuacaaagcgcuuggauuu

SEQ ID NO: 2519461 - RNA, 19 nt, Artificial Sequence
  Description of Artificial Sequence: Synthetic oligonucleotide
  Antisense strand to SEQ ID NO: 2519460
aaauccaagcgcuuuguaa

SEQ ID NO: 2519462 - RNA, 19 nt, Artificial Sequence
  Description of Artificial Sequence: Synthetic oligonucleotide
  Sense strand starting at position 2466 of SEQ ID NO: 1888221
cggaguuucgcagcucgua

SEQ ID NO: 2519463 - RNA, 19 nt, Artificial Sequence
  Description of Artificial Sequence: Synthetic oligonucleotide
  Antisense strand to SEQ ID NO: 2519462
uacgagcugcgaaacuccg

SEQ ID NO: 2519464 - RNA, 19 nt, Artificial Sequence
  Description of Artificial Sequence: Synthetic oligonucleotide
  Sense strand starting at position 2767 of SEQ ID NO: 1888221
caccgugaguuaccaugau

SEQ ID NO: 2519465 - RNA, 19 nt, Artificial Sequence
  Description of Artificial Sequence: Synthetic oligonucleotide
  Antisense strand to SEQ ID NO: 2519464
aucaugguaacucacggug

SEQ ID NO: 2519466 - RNA, 19 nt, Artificial Sequence
  Description of Artificial Sequence: Synthetic oligonucleotide
  Sense strand starting at position 2771 of SEQ ID NO: 1888221
gugaguuaccaugauacgu

SEQ ID NO: 2519467 - RNA, 19 nt, Artificial Sequence
  Description of Artificial Sequence: Synthetic oligonucleotide
  Antisense strand to SEQ ID NO: 2519466
acguaucaugguaacucac

SEQ ID NO: 2519468 - RNA, 19 nt, Artificial Sequence
  Description of Artificial Sequence: Synthetic oligonucleotide
  Sense strand starting at position 2780 of SEQ ID NO: 1888221
caugauacguuauuugcua

SEQ ID NO: 2519469 - RNA, 19 nt, Artificial Sequence
  Description of Artificial Sequence: Synthetic oligonucleotide
  Antisense strand to SEQ ID NO: 2519468
uagcaaauaacguaucaug

SEQ ID NO: 2519470 - RNA, 19 nt, Artificial Sequence
  Description of Artificial Sequence: Synthetic oligonucleotide
  Sense strand starting at position 2933 of SEQ ID NO: 1888221
aguguuucgcugccaucuu

SEQ ID NO: 2519471 - RNA, 19 nt, Artificial Sequence
  Description of Artificial Sequence: Synthetic oligonucleotide
  Antisense strand to SEQ ID NO: 2519470
aagauggcagcgaaacacu

SEQ ID NO: 2519472 - RNA, 19 nt, Artificial Sequence
  Description of Artificial Sequence: Synthetic oligonucleotide
  Sense strand starting at position 2981 of SEQ ID NO: 1888221
cgaagcugcccagaucauu

SEQ ID NO: 2519473 - RNA, 19 nt, Artificial Sequence
  Description of Artificial Sequence: Synthetic oligonucleotide
  Antisense strand to SEQ ID NO: 2519472
aaugaucugggcagcuucg

SEQ ID NO: 2519474 - RNA, 19 nt, Artificial Sequence
  Description of Artificial Sequence: Synthetic oligonucleotide
  Sense strand starting at position 3063 of SEQ ID NO: 1888221
cgcgaaagugcuucccuua

SEQ ID NO: 2519475 - RNA, 19 nt, Artificial Sequence
  Description of Artificial Sequence: Synthetic oligonucleotide
  Antisense strand to SEQ ID NO: 2519474
uaagggaagcacuuucgcg

SEQ ID NO: 2519476 - RNA, 19 nt, Artificial Sequence
  Description of Artificial Sequence: Synthetic oligonucleotide
  Sense strand starting at position 3404 of SEQ ID NO: 1888221
ugggcauuacgguggagau

SEQ ID NO: 2519477 - RNA, 19 nt, Artificial Sequence
  Description of Artificial Sequence: Synthetic oligonucleotide
  Antisense strand to SEQ ID NO: 2519476
aucuccaccguaaugccca

SEQ ID NO: 2519478 - RNA, 19 nt, Artificial Sequence
  Description of Artificial Sequence: Synthetic oligonucleotide
  Sense strand starting at position 3405 of SEQ ID NO: 1888221
gggcauuacgguggagaua

SEQ ID NO: 2519479 - RNA, 19 nt, Artificial Sequence
  Description of Artificial Sequence: Synthetic oligonucleotide
  Antisense strand to SEQ ID NO: 2519478
uaucuccaccguaaugccc

SEQ ID NO: 2519480 - RNA, 19 nt, Artificial Sequence
  Description of Artificial Sequence: Synthetic oligonucleotide
  Sense strand starting at position 3406 of SEQ ID NO: 1888221
ggcauuacgguggagauau

SEQ ID NO: 2519481 - RNA, 19 nt, Artificial Sequence
  Description of Artificial Sequence: Synthetic oligonucleotide
  Antisense strand to SEQ ID NO: 2519480
auaucuccaccguaaugcc

SEQ ID NO: 2519482 - RNA, 19 nt, Artificial Sequence
  Description of Artificial Sequence: Synthetic oligonucleotide
  Sense strand starting at position 3429 of SEQ ID NO: 1888221
caggaaaguuaacugucuu

SEQ ID NO: 2519483 - RNA, 19 nt, Artificial Sequence
  Description of Artificial Sequence: Synthetic oligonucleotide
  Antisense strand to SEQ ID NO: 2519482
aagacaguuaacuuuccug

SEQ ID NO: 2519484 - RNA, 19 nt, Artificial Sequence
  Description of Artificial Sequence: Synthetic oligonucleotide
  Sense strand starting at position 3471 of SEQ ID NO: 1888221
gggccagguauuuguauca

SEQ ID NO: 2519485 - RNA, 19 nt, Artificial Sequence
  Description of Artificial Sequence: Synthetic oligonucleotide
  Antisense strand to SEQ ID NO: 2519484
ugauacaaauaccuggccc

SEQ ID NO: 2519486 - RNA, 19 nt, Artificial Sequence
  Description of Artificial Sequence: Synthetic oligonucleotide
  Sense strand starting at position 3476 of SEQ ID NO: 1888221
agguauuuguaucaaauca

SEQ ID NO: 2519487 - RNA, 19 nt, Artificial Sequence
  Description of Artificial Sequence: Synthetic oligonucleotide
  Antisense strand to SEQ ID NO: 2519486
ugauuugauacaaauaccu

SEQ ID NO: 2519488 - RNA, 19 nt, Artificial Sequence
  Description of Artificial Sequence: Synthetic oligonucleotide
  Sense strand starting at position 3572 of SEQ ID NO: 1888221
guuuguauauacuucccau

SEQ ID NO: 2519489 - RNA, 19 nt, Artificial Sequence
  Description of Artificial Sequence: Synthetic oligonucleotide
  Antisense strand to SEQ ID NO: 2519488
augggaaguauauacaaac

SEQ ID NO: 2519490 - RNA, 19 nt, Artificial Sequence
  Description of Artificial Sequence: Synthetic oligonucleotide
  Sense strand starting at position 3607 of SEQ ID NO: 1888221
ugcauuucuugaguaccua

SEQ ID NO: 2519491 - RNA, 19 nt, Artificial Sequence
  Description of Artificial Sequence: Synthetic oligonucleotide
  Antisense strand to SEQ ID NO: 2519490
uagguacucaagaaaugca

SEQ ID NO: 2519492 - RNA, 19 nt, Artificial Sequence
  Description of Artificial Sequence: Synthetic oligonucleotide
  Sense strand starting at position 3624 of SEQ ID NO: 1888221
uaauuugugcuaggccaua

SEQ ID NO: 2519493 - RNA, 19 nt, Artificial Sequence
  Description of Artificial Sequence: Synthetic oligonucleotide
  Antisense strand to SEQ ID NO: 2519492
uauggccuagcacaaauua

SEQ ID NO: 2519494 - RNA, 19 nt, Artificial Sequence
  Description of Artificial Sequence: Synthetic oligonucleotide
  Sense strand starting at position 3629 of SEQ ID NO: 1888221
ugugcuaggccauaaggau

SEQ ID NO: 2519495 - RNA, 19 nt, Artificial Sequence
  Description of Artificial Sequence: Synthetic oligonucleotide
  Antisense strand to SEQ ID NO: 2519494
auccuuauggccuagcaca

SEQ ID NO: 2519496 - RNA, 19 nt, Artificial Sequence
  Description of Artificial Sequence: Synthetic oligonucleotide
  Sense strand starting at position 3704 of SEQ ID NO: 1888221
gacaucuacuagguugaga

SEQ ID NO: 2519497 - RNA, 19 nt, Artificial Sequence
  Description of Artificial Sequence: Synthetic oligonucleotide
  Antisense strand to SEQ ID NO: 2519496
ucucaaccuaguagauguc

SEQ ID NO: 2519498 - RNA, 19 nt, Artificial Sequence
  Description of Artificial Sequence: Synthetic oligonucleotide
  Sense strand starting at position 3706 of SEQ ID NO: 1888221
caucuacuagguugagaca

SEQ ID NO: 2519499 - RNA, 19 nt, Artificial Sequence
  Description of Artificial Sequence: Synthetic oligonucleotide
  Antisense strand to SEQ ID NO: 2519498
ugucucaaccuaguagaug

SEQ ID NO: 2519500 - RNA, 19 nt, Artificial Sequence
  Description of Artificial Sequence: Synthetic oligonucleotide
  Sense strand starting at position 3751 of SEQ ID NO: 1888221
acugcuagacuguauaaac

SEQ ID NO: 2519501 - RNA, 19 nt, Artificial Sequence
  Description of Artificial Sequence: Synthetic oligonucleotide
  Antisense strand to SEQ ID NO: 2519500
guuuauacagucuagcagu

SEQ ID NO: 2519502 - RNA, 19 nt, Artificial Sequence
  Description of Artificial Sequence: Synthetic oligonucleotide
  Sense strand starting at position 3839 of SEQ ID NO: 1888221
guaggaauuaaugguauug

SEQ ID NO: 2519503 - RNA, 19 nt, Artificial Sequence
  Description of Artificial Sequence: Synthetic oligonucleotide
  Antisense strand to SEQ ID NO: 2519502
caauaccauuaauuccuac

SEQ ID NO: 2519504 - RNA, 19 nt, Artificial Sequence
  Description of Artificial Sequence: Synthetic oligonucleotide
  Sense strand starting at position 3886 of SEQ ID NO: 1888221
cgauauuuguaagccaguu

SEQ ID NO: 2519505 - RNA, 19 nt, Artificial Sequence
  Description of Artificial Sequence: Synthetic oligonucleotide
  Antisense strand to SEQ ID NO: 2519504
aacuggcuuacaaauaucg

SEQ ID NO: 2519506 - RNA, 19 nt, Artificial Sequence
  Description of Artificial Sequence: Synthetic oligonucleotide
  Sense strand starting at position 3898 of SEQ ID NO: 1888221
gccaguuggcuagcguuaa

SEQ ID NO: 2519507 - RNA, 19 nt, Artificial Sequence
  Description of Artificial Sequence: Synthetic oligonucleotide
  Antisense strand to SEQ ID NO: 2519506
uuaacgcuagccaacuggc

SEQ ID NO: 2519508 - RNA, 19 nt, Artificial Sequence
  Description of Artificial Sequence: Synthetic oligonucleotide
  Sense strand starting at position 3939 of SEQ ID NO: 1888221
ggccuuguugcuccaaguu

SEQ ID NO: 2519509 - RNA, 19 nt, Artificial Sequence
  Description of Artificial Sequence: Synthetic oligonucleotide
  Antisense strand to SEQ ID NO: 2519508
aacuuggagcaacaaggcc

SEQ ID NO: 2519510 - RNA, 19 nt, Artificial Sequence
  Description of Artificial Sequence: Synthetic oligonucleotide
  Sense strand starting at position 35 of SEQ ID NO: 1888222
aguauuacuuguguacaau

SEQ ID NO: 2519511 - RNA, 19 nt, Artificial Sequence
  Description of Artificial Sequence: Synthetic oligonucleotide
  Antisense strand to SEQ ID NO: 2519510
auuguacacaaguaauacu

SEQ ID NO: 2519512 - RNA, 19 nt, Artificial Sequence
  Description of Artificial Sequence: Synthetic oligonucleotide
  Sense strand starting at position 36 of SEQ ID NO: 1888222
guauuacuuguguacaauu

SEQ ID NO: 2519513 - RNA, 19 nt, Artificial Sequence
  Description of Artificial Sequence: Synthetic oligonucleotide
  Antisense strand to SEQ ID NO: 2519512
aauuguacacaaguaauac

SEQ ID NO: 2519514 - RNA, 19 nt, Artificial Sequence
  Description of Artificial Sequence: Synthetic oligonucleotide
  Sense strand starting at position 179 of SEQ ID NO: 1888222
gcagaaggcucuuuagaag

SEQ ID NO: 2519515 - RNA, 19 nt, Artificial Sequence
  Description of Artificial Sequence: Synthetic oligonucleotide
  Antisense strand to SEQ ID NO: 2519514
cuucuaaagagccuucugc

SEQ ID NO: 2519516 - RNA, 19 nt, Artificial Sequence
  Description of Artificial Sequence: Synthetic oligonucleotide
  Sense strand starting at position 342 of SEQ ID NO: 1888222
cgaacugucugacuguuaa

SEQ ID NO: 2519517 - RNA, 19 nt, Artificial Sequence
  Description of Artificial Sequence: Synthetic oligonucleotide
  Antisense strand to SEQ ID NO: 2519516
uuaacagucagacaguucg

SEQ ID NO: 2519518 - RNA, 19 nt, Artificial Sequence
  Description of Artificial Sequence: Synthetic oligonucleotide
  Sense strand starting at position 857 of SEQ ID NO: 1888222
gggaauaccugcuuguaaa

SEQ ID NO: 2519519 - RNA, 19 nt, Artificial Sequence
  Description of Artificial Sequence: Synthetic oligonucleotide
  Antisense strand to SEQ ID NO: 2519518
uuuacaagcagguauuccc

SEQ ID NO: 2519520 - RNA, 19 nt, Artificial Sequence
  Description of Artificial Sequence: Synthetic oligonucleotide
  Sense strand starting at position 949 of SEQ ID NO: 1888222
cuugacuuucuggaugagu

SEQ ID NO: 2519521 - RNA, 19 nt, Artificial Sequence
  Description of Artificial Sequence: Synthetic oligonucleotide
  Antisense strand to SEQ ID NO: 2519520
acucauccagaaagucaag

SEQ ID NO: 2519522 - RNA, 19 nt, Artificial Sequence
  Description of Artificial Sequence: Synthetic oligonucleotide
  Sense strand starting at position 951 of SEQ ID NO: 1888222
ugacuuucuggaugaguuu

SEQ ID NO: 2519523 - RNA, 19 nt, Artificial Sequence
  Description of Artificial Sequence: Synthetic oligonucleotide
  Antisense strand to SEQ ID NO: 2519522
aaacucauccagaaaguca

SEQ ID NO: 2519524 - RNA, 19 nt, Artificial Sequence
  Description of Artificial Sequence: Synthetic oligonucleotide
  Sense strand starting at position 991 of SEQ ID NO: 1888222
ccugguacucacugggaau

SEQ ID NO: 2519525 - RNA, 19 nt, Artificial Sequence
  Description of Artificial Sequence: Synthetic oligonucleotide
  Antisense strand to SEQ ID NO: 2519524
auucccagugaguaccagg

SEQ ID NO: 2519526 - RNA, 19 nt, Artificial Sequence
  Description of Artificial Sequence: Synthetic oligonucleotide
  Sense strand starting at position 992 of SEQ ID NO: 1888222
cugguacucacugggaaug

SEQ ID NO: 2519527 - RNA, 19 nt, Artificial Sequence
  Description of Artificial Sequence: Synthetic oligonucleotide
  Antisense strand to SEQ ID NO: 2519526
cauucccagugaguaccag

SEQ ID NO: 2519528 - RNA, 19 nt, Artificial Sequence
  Description of Artificial Sequence: Synthetic oligonucleotide
  Sense strand starting at position 993 of SEQ ID NO: 1888222
ugguacucacugggaauga

SEQ ID NO: 2519529 - RNA, 19 nt, Artificial Sequence
  Description of Artificial Sequence: Synthetic oligonucleotide
  Antisense strand to SEQ ID NO: 2519528
ucauucccagugaguacca

SEQ ID NO: 2519530 - RNA, 19 nt, Artificial Sequence
  Description of Artificial Sequence: Synthetic oligonucleotide
  Sense strand starting at position 1029 of SEQ ID NO: 1888222
cggcauucuggguaggaca

SEQ ID NO: 2519531 - RNA, 19 nt, Artificial Sequence
  Description of Artificial Sequence: Synthetic oligonucleotide
  Antisense strand to SEQ ID NO: 2519530
uguccuacccagaaugccg

SEQ ID NO: 2519532 - RNA, 19 nt, Artificial Sequence
  Description of Artificial Sequence: Synthetic oligonucleotide
  Sense strand starting at position 1086 of SEQ ID NO: 1888222
uugugaauauacuugagac

SEQ ID NO: 2519533 - RNA, 19 nt, Artificial Sequence
  Description of Artificial Sequence: Synthetic oligonucleotide
  Antisense strand to SEQ ID NO: 2519532
gucucaaguauauucacaa

SEQ ID NO: 2519534 - RNA, 19 nt, Artificial Sequence
  Description of Artificial Sequence: Synthetic oligonucleotide
  Sense strand starting at position 1325 of SEQ ID NO: 1888222
acaugacucucuguggaga

SEQ ID NO: 2519535 - RNA, 19 nt, Artificial Sequence
  Description of Artificial Sequence: Synthetic oligonucleotide
  Antisense strand to SEQ ID NO: 2519534
ucuccacagagagucaugu

SEQ ID NO: 2519536 - RNA, 19 nt, Artificial Sequence
  Description of Artificial Sequence: Synthetic oligonucleotide
  Sense strand starting at position 1326 of SEQ ID NO: 1888222
caugacucucuguggagau

SEQ ID NO: 2519537 - RNA, 19 nt, Artificial Sequence
  Description of Artificial Sequence: Synthetic oligonucleotide
  Antisense strand to SEQ ID NO: 2519536
aucuccacagagagucaug

SEQ ID NO: 2519538 - RNA, 19 nt, Artificial Sequence
  Description of Artificial Sequence: Synthetic oligonucleotide
  Sense strand starting at position 1471 of SEQ ID NO: 1888222
aguagaguugcccaggaac

SEQ ID NO: 2519539 - RNA, 19 nt, Artificial Sequence
  Description of Artificial Sequence: Synthetic oligonucleotide
  Antisense strand to SEQ ID NO: 2519538
guuccugggcaacucuacu

SEQ ID NO: 2519540 - RNA, 19 nt, Artificial Sequence
  Description of Artificial Sequence: Synthetic oligonucleotide
  Sense strand starting at position 1473 of SEQ ID NO: 1888222
uagaguugcccaggaacaa

SEQ ID NO: 2519541 - RNA, 19 nt, Artificial Sequence
  Description of Artificial Sequence: Synthetic oligonucleotide
  Antisense strand to SEQ ID NO: 2519540
uuguuccugggcaacucua

SEQ ID NO: 2519542 - RNA, 19 nt, Artificial Sequence
  Description of Artificial Sequence: Synthetic oligonucleotide
  Sense strand starting at position 1538 of SEQ ID NO: 1888222
aaaguuugagucugacuca

SEQ ID NO: 2519543 - RNA, 19 nt, Artificial Sequence
  Description of Artificial Sequence: Synthetic oligonucleotide
  Antisense strand to SEQ ID NO: 2519542
ugagucagacucaaacuuu

SEQ ID NO: 2519544 - RNA, 19 nt, Artificial Sequence
  Description of Artificial Sequence: Synthetic oligonucleotide
  Sense strand starting at position 1633 of SEQ ID NO: 1888222
uaguuagaucuguagcagu

SEQ ID NO: 2519545 - RNA, 19 nt, Artificial Sequence
  Description of Artificial Sequence: Synthetic oligonucleotide
  Antisense strand to SEQ ID NO: 2519544
acugcuacagaucuaacua

SEQ ID NO: 2519546 - RNA, 19 nt, Artificial Sequence
  Description of Artificial Sequence: Synthetic oligonucleotide
  Sense strand starting at position 1928 of SEQ ID NO: 1888222
gguccugcuccugauauug

SEQ ID NO: 2519547 - RNA, 19 nt, Artificial Sequence
  Description of Artificial Sequence: Synthetic oligonucleotide
  Antisense strand to SEQ ID NO: 2519546
caauaucaggagcaggacc

SEQ ID NO: 2519548 - RNA, 19 nt, Artificial Sequence
  Description of Artificial Sequence: Synthetic oligonucleotide
  Sense strand starting at position 2017 of SEQ ID NO: 1888222
aacugaucccaugguuaag

SEQ ID NO: 2519549 - RNA, 19 nt, Artificial Sequence
  Description of Artificial Sequence: Synthetic oligonucleotide
  Antisense strand to SEQ ID NO: 2519548
cuuaaccaugggaucaguu

SEQ ID NO: 2519550 - RNA, 19 nt, Artificial Sequence
  Description of Artificial Sequence: Synthetic oligonucleotide
  Sense strand starting at position 2019 of SEQ ID NO: 1888222
cugaucccaugguuaagau

SEQ ID NO: 2519551 - RNA, 19 nt, Artificial Sequence
  Description of Artificial Sequence: Synthetic oligonucleotide
  Antisense strand to SEQ ID NO: 2519550
aucuuaaccaugggaucag

SEQ ID NO: 2519552 - RNA, 19 nt, Artificial Sequence
  Description of Artificial Sequence: Synthetic oligonucleotide
  Sense strand starting at position 2034 of SEQ ID NO: 1888222
agaugauauguaggccaau

SEQ ID NO: 2519553 - RNA, 19 nt, Artificial Sequence
  Description of Artificial Sequence: Synthetic oligonucleotide
  Antisense strand to SEQ ID NO: 2519552
auuggccuacauaucaucu

SEQ ID NO: 2519554 - RNA, 19 nt, Artificial Sequence
  Description of Artificial Sequence: Synthetic oligonucleotide
  Sense strand starting at position 2035 of SEQ ID NO: 1888222
gaugauauguaggccaaua

SEQ ID NO: 2519555 - RNA, 19 nt, Artificial Sequence
  Description of Artificial Sequence: Synthetic oligonucleotide
  Antisense strand to SEQ ID NO: 2519554
uauuggccuacauaucauc

SEQ ID NO: 2519556 - RNA, 19 nt, Artificial Sequence
  Description of Artificial Sequence: Synthetic oligonucleotide
  Sense strand starting at position 2037 of SEQ ID NO: 1888222
ugauauguaggccaauaua

SEQ ID NO: 2519557 - RNA, 19 nt, Artificial Sequence
  Description of Artificial Sequence: Synthetic oligonucleotide
  Antisense strand to SEQ ID NO: 2519556
uauauuggccuacauauca

SEQ ID NO: 2519558 - RNA, 19 nt, Artificial Sequence
  Description of Artificial Sequence: Synthetic oligonucleotide
  Sense strand starting at position 2725 of SEQ ID NO: 1888222
ggaaacuagagguguugau

SEQ ID NO: 2519559 - RNA, 19 nt, Artificial Sequence
  Description of Artificial Sequence: Synthetic oligonucleotide
  Antisense strand to SEQ ID NO: 2519558
aucaacaccucuaguuucc

SEQ ID NO: 2519560 - RNA, 19 nt, Artificial Sequence
  Description of Artificial Sequence: Synthetic oligonucleotide
  Sense strand starting at position 2750 of SEQ ID NO: 1888222
gaggaagauuauccgucua

SEQ ID NO: 2519561 - RNA, 19 nt, Artificial Sequence
  Description of Artificial Sequence: Synthetic oligonucleotide
  Antisense strand to SEQ ID NO: 2519560
uagacggauaaucuuccuc

SEQ ID NO: 2519562 - RNA, 19 nt, Artificial Sequence
  Description of Artificial Sequence: Synthetic oligonucleotide
  Sense strand starting at position 2755 of SEQ ID NO: 1888222
agauuauccgucuagcaca

SEQ ID NO: 2519563 - RNA, 19 nt, Artificial Sequence
  Description of Artificial Sequence: Synthetic oligonucleotide
  Antisense strand to SEQ ID NO: 2519562
ugugcuagacggauaaucu

SEQ ID NO: 2519564 - RNA, 19 nt, Artificial Sequence
  Description of Artificial Sequence: Synthetic oligonucleotide
  Sense strand starting at position 2864 of SEQ ID NO: 1888222
aucuaaucucuagguaaga

SEQ ID NO: 2519565 - RNA, 19 nt, Artificial Sequence
  Description of Artificial Sequence: Synthetic oligonucleotide
  Antisense strand to SEQ ID NO: 2519564
ucuuaccuagagauuagau

SEQ ID NO: 2519566 - RNA, 19 nt, Artificial Sequence
  Description of Artificial Sequence: Synthetic oligonucleotide
  Sense strand starting at position 2914 of SEQ ID NO: 1888222
agaaaugacugccaaauuu

SEQ ID NO: 2519567 - RNA, 19 nt, Artificial Sequence
  Description of Artificial Sequence: Synthetic oligonucleotide
  Antisense strand to SEQ ID NO: 2519566
aaauuuggcagucauuucu

SEQ ID NO: 2519568 - RNA, 19 nt, Artificial Sequence
  Description of Artificial Sequence: Synthetic oligonucleotide
  Sense strand starting at position 3557 of SEQ ID NO: 1888222
ugauaucuaggauggguau

SEQ ID NO: 2519569 - RNA, 19 nt, Artificial Sequence
  Description of Artificial Sequence: Synthetic oligonucleotide
  Antisense strand to SEQ ID NO: 2519568
auacccauccuagauauca

SEQ ID NO: 2519570 - RNA, 19 nt, Artificial Sequence
  Description of Artificial Sequence: Synthetic oligonucleotide
  Sense strand starting at position 3569 of SEQ ID NO: 1888222
uggguaucaguuugggaaa

SEQ ID NO: 2519571 - RNA, 19 nt, Artificial Sequence
  Description of Artificial Sequence: Synthetic oligonucleotide
  Antisense strand to SEQ ID NO: 2519570
uuucccaaacugauaccca

SEQ ID NO: 2519572 - RNA, 19 nt, Artificial Sequence
  Description of Artificial Sequence: Synthetic oligonucleotide
  Sense strand starting at position 3627 of SEQ ID NO: 1888222
acaaaucauguuuguugga

SEQ ID NO: 2519573 - RNA, 19 nt, Artificial Sequence
  Description of Artificial Sequence: Synthetic oligonucleotide
  Antisense strand to SEQ ID NO: 2519572
uccaacaaacaugauuugu

SEQ ID NO: 2519574 - RNA, 19 nt, Artificial Sequence
  Description of Artificial Sequence: Synthetic oligonucleotide
  Sense strand starting at position 3839 of SEQ ID NO: 1888222
gugagauguuagguaccca

SEQ ID NO: 2519575 - RNA, 19 nt, Artificial Sequence
  Description of Artificial Sequence: Synthetic oligonucleotide
  Antisense strand to SEQ ID NO: 2519574
uggguaccuaacaucucac

SEQ ID NO: 2519576 - RNA, 19 nt, Artificial Sequence
  Description of Artificial Sequence: Synthetic oligonucleotide
  Sense strand starting at position 3840 of SEQ ID NO: 1888222
ugagauguuagguacccau

SEQ ID NO: 2519577 - RNA, 19 nt, Artificial Sequence
  Description of Artificial Sequence: Synthetic oligonucleotide
  Antisense strand to SEQ ID NO: 2519576
auggguaccuaacaucuca

SEQ ID NO: 2519578 - RNA, 19 nt, Artificial Sequence
  Description of Artificial Sequence: Synthetic oligonucleotide
  Sense strand starting at position 3843 of SEQ ID NO: 1888222
gauguuagguacccauuaa

SEQ ID NO: 2519579 - RNA, 19 nt, Artificial Sequence
  Description of Artificial Sequence: Synthetic oligonucleotide
  Antisense strand to SEQ ID NO: 2519578
uuaauggguaccuaacauc

SEQ ID NO: 2519580 - RNA, 19 nt, Artificial Sequence
  Description of Artificial Sequence: Synthetic oligonucleotide
  Sense strand starting at position 3882 of SEQ ID NO: 1888222
uccugcuggcaagaauaua

SEQ ID NO: 2519581 - RNA, 19 nt, Artificial Sequence
  Description of Artificial Sequence: Synthetic oligonucleotide
  Antisense strand to SEQ ID NO: 2519580
uauauucuugccagcagga

SEQ ID NO: 2519582 - RNA, 19 nt, Artificial Sequence
  Description of Artificial Sequence: Synthetic oligonucleotide
  Sense strand starting at position 3932 of SEQ ID NO: 1888222
aaaugauauggcuggaguu

SEQ ID NO: 2519583 - RNA, 19 nt, Artificial Sequence
  Description of Artificial Sequence: Synthetic oligonucleotide
  Antisense strand to SEQ ID NO: 2519582
aacuccagccauaucauuu

SEQ ID NO: 2519584 - RNA, 19 nt, Artificial Sequence
  Description of Artificial Sequence: Synthetic oligonucleotide
  Sense strand starting at position 3933 of SEQ ID NO: 1888222
aaugauauggcuggaguuu

SEQ ID NO: 2519585 - RNA, 19 nt, Artificial Sequence
  Description of Artificial Sequence: Synthetic oligonucleotide
  Antisense strand to SEQ ID NO: 2519584
aaacuccagccauaucauu

SEQ ID NO: 2519586 - RNA, 19 nt, Artificial Sequence
  Description of Artificial Sequence: Synthetic oligonucleotide
  Sense strand starting at position 3934 of SEQ ID NO: 1888222
augauauggcuggaguuua

SEQ ID NO: 2519587 - RNA, 19 nt, Artificial Sequence
  Description of Artificial Sequence: Synthetic oligonucleotide
  Antisense strand to SEQ ID NO: 2519586
uaaacuccagccauaucau

SEQ ID NO: 2519588 - RNA, 19 nt, Artificial Sequence
  Description of Artificial Sequence: Synthetic oligonucleotide
  Sense strand starting at position 3939 of SEQ ID NO: 1888222
auggcuggaguuuacaaua

SEQ ID NO: 2519589 - RNA, 19 nt, Artificial Sequence
  Description of Artificial Sequence: Synthetic oligonucleotide
  Antisense strand to SEQ ID NO: 2519588
uauuguaaacuccagccau

SEQ ID NO: 2519590 - RNA, 19 nt, Artificial Sequence
  Description of Artificial Sequence: Synthetic oligonucleotide
  Sense strand starting at position 145 of SEQ ID NO: 1888223
acaucugggucaucucgaa

SEQ ID NO: 2519591 - RNA, 19 nt, Artificial Sequence
  Description of Artificial Sequence: Synthetic oligonucleotide
  Antisense strand to SEQ ID NO: 2519590
uucgagaugacccagaugu

SEQ ID NO: 2519592 - RNA, 19 nt, Artificial Sequence
  Description of Artificial Sequence: Synthetic oligonucleotide
  Sense strand starting at position 149 of SEQ ID NO: 1888223
cugggucaucucgaaguca

SEQ ID NO: 2519593 - RNA, 19 nt, Artificial Sequence
  Description of Artificial Sequence: Synthetic oligonucleotide
  Antisense strand to SEQ ID NO: 2519592
ugacuucgagaugacccag

SEQ ID NO: 2519594 - RNA, 19 nt, Artificial Sequence
  Description of Artificial Sequence: Synthetic oligonucleotide
  Sense strand starting at position 160 of SEQ ID NO: 1888223
cgaagucagucucuauuga

SEQ ID NO: 2519595 - RNA, 19 nt, Artificial Sequence
  Description of Artificial Sequence: Synthetic oligonucleotide
  Antisense strand to SEQ ID NO: 2519594
ucaauagagacugacuucg

SEQ ID NO: 2519596 - RNA, 19 nt, Artificial Sequence
  Description of Artificial Sequence: Synthetic oligonucleotide
  Sense strand starting at position 161 of SEQ ID NO: 1888223
gaagucagucucuauugau

SEQ ID NO: 2519597 - RNA, 19 nt, Artificial Sequence
  Description of Artificial Sequence: Synthetic oligonucleotide
  Antisense strand to SEQ ID NO: 2519596
aucaauagagacugacuuc

SEQ ID NO: 2519598 - RNA, 19 nt, Artificial Sequence
  Description of Artificial Sequence: Synthetic oligonucleotide
  Sense strand starting at position 189 of SEQ ID NO: 1888223
cuuugaauauguuucugua

SEQ ID NO: 2519599 - RNA, 19 nt, Artificial Sequence
  Description of Artificial Sequence: Synthetic oligonucleotide
  Antisense strand to SEQ ID NO: 2519598
uacagaaacauauucaaag

SEQ ID NO: 2519600 - RNA, 19 nt, Artificial Sequence
  Description of Artificial Sequence: Synthetic oligonucleotide
  Sense strand starting at position 538 of SEQ ID NO: 1888223
aaauuauuagcguggugca

SEQ ID NO: 2519601 - RNA, 19 nt, Artificial Sequence
  Description of Artificial Sequence: Synthetic oligonucleotide
  Antisense strand to SEQ ID NO: 2519600
ugcaccacgcuaauaauuu

SEQ ID NO: 2519602 - RNA, 19 nt, Artificial Sequence
  Description of Artificial Sequence: Synthetic oligonucleotide
  Sense strand starting at position 539 of SEQ ID NO: 1888223
aauuauuagcguggugcaa

SEQ ID NO: 2519603 - RNA, 19 nt, Artificial Sequence
  Description of Artificial Sequence: Synthetic oligonucleotide
  Antisense strand to SEQ ID NO: 2519602
uugcaccacgcuaauaauu

SEQ ID NO: 2519604 - RNA, 19 nt, Artificial Sequence
  Description of Artificial Sequence: Synthetic oligonucleotide
  Sense strand starting at position 734 of SEQ ID NO: 1888223
agacccugugucuaugaga

SEQ ID NO: 2519605 - RNA, 19 nt, Artificial Sequence
  Description of Artificial Sequence: Synthetic oligonucleotide
  Antisense strand to SEQ ID NO: 2519604
ucucauagacacagggucu

SEQ ID NO: 2519606 - RNA, 19 nt, Artificial Sequence
  Description of Artificial Sequence: Synthetic oligonucleotide
  Sense strand starting at position 898 of SEQ ID NO: 1888223
gcacgacccugauuccaaa

SEQ ID NO: 2519607 - RNA, 19 nt, Artificial Sequence
  Description of Artificial Sequence: Synthetic oligonucleotide
  Antisense strand to SEQ ID NO: 2519606
uuuggaaucagggucgugc

SEQ ID NO: 2519608 - RNA, 19 nt, Artificial Sequence
  Description of Artificial Sequence: Synthetic oligonucleotide
  Sense strand starting at position 901 of SEQ ID NO: 1888223
cgacccugauuccaaauaa

SEQ ID NO: 2519609 - RNA, 19 nt, Artificial Sequence
  Description of Artificial Sequence: Synthetic oligonucleotide
  Antisense strand to SEQ ID NO: 2519608
uuauuuggaaucagggucg

SEQ ID NO: 2519610 - RNA, 19 nt, Artificial Sequence
  Description of Artificial Sequence: Synthetic oligonucleotide
  Sense strand starting at position 1406 of SEQ ID NO: 1888223
agcuuuauucuacguuugu

SEQ ID NO: 2519611 - RNA, 19 nt, Artificial Sequence
  Description of Artificial Sequence: Synthetic oligonucleotide
  Antisense strand to SEQ ID NO: 2519610
acaaacguagaauaaagcu

SEQ ID NO: 2519612 - RNA, 19 nt, Artificial Sequence
  Description of Artificial Sequence: Synthetic oligonucleotide
  Sense strand starting at position 1407 of SEQ ID NO: 1888223
gcuuuauucuacguuugua

SEQ ID NO: 2519613 - RNA, 19 nt, Artificial Sequence
  Description of Artificial Sequence: Synthetic oligonucleotide
  Antisense strand to SEQ ID NO: 2519612
uacaaacguagaauaaagc

SEQ ID NO: 2519614 - RNA, 19 nt, Artificial Sequence
  Description of Artificial Sequence: Synthetic oligonucleotide
  Sense strand starting at position 1412 of SEQ ID NO: 1888223
auucuacguuuguauaaac

SEQ ID NO: 2519615 - RNA, 19 nt, Artificial Sequence
  Description of Artificial Sequence: Synthetic oligonucleotide
  Antisense strand to SEQ ID NO: 2519614
guuuauacaaacguagaau

SEQ ID NO: 2519616 - RNA, 19 nt, Artificial Sequence
  Description of Artificial Sequence: Synthetic oligonucleotide
  Sense strand starting at position 1755 of SEQ ID NO: 1888223
guugaauauugccucucuu

SEQ ID NO: 2519617 - RNA, 19 nt, Artificial Sequence
  Description of Artificial Sequence: Synthetic oligonucleotide
  Antisense strand to SEQ ID NO: 2519616
aagagaggcaauauucaac

SEQ ID NO: 2519618 - RNA, 19 nt, Artificial Sequence
  Description of Artificial Sequence: Synthetic oligonucleotide
  Sense strand starting at position 1906 of SEQ ID NO: 1888223
ugcucuugcuuguauaauu

SEQ ID NO: 2519619 - RNA, 19 nt, Artificial Sequence
  Description of Artificial Sequence: Synthetic oligonucleotide
  Antisense strand to SEQ ID NO: 2519618
aauuauacaagcaagagca

SEQ ID NO: 2519620 - RNA, 19 nt, Artificial Sequence
  Description of Artificial Sequence: Synthetic oligonucleotide
  Sense strand starting at position 2044 of SEQ ID NO: 1888223
aagaauggcugucgacaua

SEQ ID NO: 2519621 - RNA, 19 nt, Artificial Sequence
  Description of Artificial Sequence: Synthetic oligonucleotide
  Antisense strand to SEQ ID NO: 2519620
uaugucgacagccauucuu

SEQ ID NO: 2519622 - RNA, 19 nt, Artificial Sequence
  Description of Artificial Sequence: Synthetic oligonucleotide
  Sense strand starting at position 2047 of SEQ ID NO: 1888223
aauggcugucgacauaaga

SEQ ID NO: 2519623 - RNA, 19 nt, Artificial Sequence
  Description of Artificial Sequence: Synthetic oligonucleotide
  Antisense strand to SEQ ID NO: 2519622
ucuuaugucgacagccauu

SEQ ID NO: 2519624 - RNA, 19 nt, Artificial Sequence
  Description of Artificial Sequence: Synthetic oligonucleotide
  Sense strand starting at position 2178 of SEQ ID NO: 1888223
uagucauauuuaugaagug

SEQ ID NO: 2519625 - RNA, 19 nt, Artificial Sequence
  Description of Artificial Sequence: Synthetic oligonucleotide
  Antisense strand to SEQ ID NO: 2519624
cacuucauaaauaugacua

SEQ ID NO: 2519626 - RNA, 19 nt, Artificial Sequence
  Description of Artificial Sequence: Synthetic oligonucleotide
  Sense strand starting at position 2179 of SEQ ID NO: 1888223
agucauauuuaugaaguga

SEQ ID NO: 2519627 - RNA, 19 nt, Artificial Sequence
  Description of Artificial Sequence: Synthetic oligonucleotide
  Antisense strand to SEQ ID NO: 2519626
ucacuucauaaauaugacu

SEQ ID NO: 2519628 - RNA, 19 nt, Artificial Sequence
  Description of Artificial Sequence: Synthetic oligonucleotide
  Sense strand starting at position 2362 of SEQ ID NO: 1888223
augagucuaucagucucua

SEQ ID NO: 2519629 - RNA, 19 nt, Artificial Sequence
  Description of Artificial Sequence: Synthetic oligonucleotide
  Antisense strand to SEQ ID NO: 2519628
uagagacugauagacucau

SEQ ID NO: 2519630 - RNA, 19 nt, Artificial Sequence
  Description of Artificial Sequence: Synthetic oligonucleotide
  Sense strand starting at position 2367 of SEQ ID NO: 1888223
ucuaucagucucuacugua

SEQ ID NO: 2519631 - RNA, 19 nt, Artificial Sequence
  Description of Artificial Sequence: Synthetic oligonucleotide
  Antisense strand to SEQ ID NO: 2519630
uacaguagagacugauaga

SEQ ID NO: 2519632 - RNA, 19 nt, Artificial Sequence
  Description of Artificial Sequence: Synthetic oligonucleotide
  Sense strand starting at position 2567 of SEQ ID NO: 1888223
uacauauguuaaggaaaga

SEQ ID NO: 2519633 - RNA, 19 nt, Artificial Sequence
  Description of Artificial Sequence: Synthetic oligonucleotide
  Antisense strand to SEQ ID NO: 2519632
ucuuuccuuaacauaugua

SEQ ID NO: 2519634 - RNA, 19 nt, Artificial Sequence
  Description of Artificial Sequence: Synthetic oligonucleotide
  Sense strand starting at position 2587 of SEQ ID NO: 1888223
gcaagaugaagauguguua

SEQ ID NO: 2519635 - RNA, 19 nt, Artificial Sequence
  Description of Artificial Sequence: Synthetic oligonucleotide
  Antisense strand to SEQ ID NO: 2519634
uaacacaucuucaucuugc

SEQ ID NO: 2519636 - RNA, 19 nt, Artificial Sequence
  Description of Artificial Sequence: Synthetic oligonucleotide
  Sense strand starting at position 831 of SEQ ID NO: 1888224
agaaauacagaguguguca

SEQ ID NO: 2519637 - RNA, 19 nt, Artificial Sequence
  Description of Artificial Sequence: Synthetic oligonucleotide
  Antisense strand to SEQ ID NO: 2519636
ugacacacucuguauuucu

SEQ ID NO: 2519638 - RNA, 19 nt, Artificial Sequence
  Description of Artificial Sequence: Synthetic oligonucleotide
  Sense strand starting at position 833 of SEQ ID NO: 1888224
aaauacagagugugucauu

SEQ ID NO: 2519639 - RNA, 19 nt, Artificial Sequence
  Description of Artificial Sequence: Synthetic oligonucleotide
  Antisense strand to SEQ ID NO: 2519638
aaugacacacucuguauuu

SEQ ID NO: 2519640 - RNA, 19 nt, Artificial Sequence
  Description of Artificial Sequence: Synthetic oligonucleotide
  Sense strand starting at position 842 of SEQ ID NO: 1888224
gugugucauuucccuggga

SEQ ID NO: 2519641 - RNA, 19 nt, Artificial Sequence
  Description of Artificial Sequence: Synthetic oligonucleotide
  Antisense strand to SEQ ID NO: 2519640
ucccagggaaaugacacac

SEQ ID NO: 2519642 - RNA, 19 nt, Artificial Sequence
  Description of Artificial Sequence: Synthetic oligonucleotide
  Sense strand starting at position 1040 of SEQ ID NO: 1888224
gccugaugaugccuccuua

SEQ ID NO: 2519643 - RNA, 19 nt, Artificial Sequence
  Description of Artificial Sequence: Synthetic oligonucleotide
  Antisense strand to SEQ ID NO: 2519642
uaaggaggcaucaucaggc

SEQ ID NO: 2519644 - RNA, 19 nt, Artificial Sequence
  Description of Artificial Sequence: Synthetic oligonucleotide
  Sense strand starting at position 1044 of SEQ ID NO: 1888224
gaugaugccuccuuacgau

SEQ ID NO: 2519645 - RNA, 19 nt, Artificial Sequence
  Description of Artificial Sequence: Synthetic oligonucleotide
  Antisense strand to SEQ ID NO: 2519644
aucguaaggaggcaucauc

SEQ ID NO: 2519646 - RNA, 19 nt, Artificial Sequence
  Description of Artificial Sequence: Synthetic oligonucleotide
  Sense strand starting at position 1151 of SEQ ID NO: 1888224
uagucaagagcacgguuau

SEQ ID NO: 2519647 - RNA, 19 nt, Artificial Sequence
  Description of Artificial Sequence: Synthetic oligonucleotide
  Antisense strand to SEQ ID NO: 2519646
auaaccgugcucuugacua

SEQ ID NO: 2519648 - RNA, 19 nt, Artificial Sequence
  Description of Artificial Sequence: Synthetic oligonucleotide
  Sense strand starting at position 1161 of SEQ ID NO: 1888224
cacgguuaucagcaauaca

SEQ ID NO: 2519649 - RNA, 19 nt, Artificial Sequence
  Description of Artificial Sequence: Synthetic oligonucleotide
  Antisense strand to SEQ ID NO: 2519648
uguauugcugauaaccgug

SEQ ID NO: 2519650 - RNA, 19 nt, Artificial Sequence
  Description of Artificial Sequence: Synthetic oligonucleotide
  Sense strand starting at position 1164 of SEQ ID NO: 1888224
gguuaucagcaauacagau

SEQ ID NO: 2519651 - RNA, 19 nt, Artificial Sequence
  Description of Artificial Sequence: Synthetic oligonucleotide
  Antisense strand to SEQ ID NO: 2519650
aucuguauugcugauaacc

SEQ ID NO: 2519652 - RNA, 19 nt, Artificial Sequence
  Description of Artificial Sequence: Synthetic oligonucleotide
  Sense strand starting at position 1204 of SEQ ID NO: 1888224
ucaggaggucagcaacuuu

SEQ ID NO: 2519653 - RNA, 19 nt, Artificial Sequence
  Description of Artificial Sequence: Synthetic oligonucleotide
  Antisense strand to SEQ ID NO: 2519652
aaaguugcugaccuccuga

SEQ ID NO: 2519654 - RNA, 19 nt, Artificial Sequence
  Description of Artificial Sequence: Synthetic oligonucleotide
  Sense strand starting at position 1409 of SEQ ID NO: 1888224
cggcgaccucuucgaauuc

SEQ ID NO: 2519655 - RNA, 19 nt, Artificial Sequence
  Description of Artificial Sequence: Synthetic oligonucleotide
  Antisense strand to SEQ ID NO: 2519654
gaauucgaagaggucgccg

SEQ ID NO: 2519656 - RNA, 19 nt, Artificial Sequence
  Description of Artificial Sequence: Synthetic oligonucleotide
  Sense strand starting at position 1418 of SEQ ID NO: 1888224
cuucgaauucucugcuauc

SEQ ID NO: 2519657 - RNA, 19 nt, Artificial Sequence
  Description of Artificial Sequence: Synthetic oligonucleotide
  Antisense strand to SEQ ID NO: 2519656
gauagcagagaauucgaag

SEQ ID NO: 2519658 - RNA, 19 nt, Artificial Sequence
  Description of Artificial Sequence: Synthetic oligonucleotide
  Sense strand starting at position 1419 of SEQ ID NO: 1888224
uucgaauucucugcuaucu

SEQ ID NO: 2519659 - RNA, 19 nt, Artificial Sequence
  Description of Artificial Sequence: Synthetic oligonucleotide
  Antisense strand to SEQ ID NO: 2519658
agauagcagagaauucgaa

SEQ ID NO: 2519660 - RNA, 19 nt, Artificial Sequence
  Description of Artificial Sequence: Synthetic oligonucleotide
  Sense strand starting at position 1948 of SEQ ID NO: 1888224
gugcguuggagcggaaaga

SEQ ID NO: 2519661 - RNA, 19 nt, Artificial Sequence
  Description of Artificial Sequence: Synthetic oligonucleotide
  Antisense strand to SEQ ID NO: 2519660
ucuuuccgcuccaacgcac

SEQ ID NO: 2519662 - RNA, 19 nt, Artificial Sequence
  Description of Artificial Sequence: Synthetic oligonucleotide
  Sense strand starting at position 2371 of SEQ ID NO: 1888224
gcuugaguucaggaguaua

SEQ ID NO: 2519663 - RNA, 19 nt, Artificial Sequence
  Description of Artificial Sequence: Synthetic oligonucleotide
  Antisense strand to SEQ ID NO: 2519662
uauacuccugaacucaagc

SEQ ID NO: 2519664 - RNA, 19 nt, Artificial Sequence
  Description of Artificial Sequence: Synthetic oligonucleotide
  Sense strand starting at position 2405 of SEQ ID NO: 1888224
cacagugacuucguuucua

SEQ ID NO: 2519665 - RNA, 19 nt, Artificial Sequence
  Description of Artificial Sequence: Synthetic oligonucleotide
  Antisense strand to SEQ ID NO: 2519664
uagaaacgaagucacugug

SEQ ID NO: 2519666 - RNA, 19 nt, Artificial Sequence
  Description of Artificial Sequence: Synthetic oligonucleotide
  Sense strand starting at position 2409 of SEQ ID NO: 1888224
gugacuucguuucuacaaa

SEQ ID NO: 2519667 - RNA, 19 nt, Artificial Sequence
  Description of Artificial Sequence: Synthetic oligonucleotide
  Antisense strand to SEQ ID NO: 2519666
uuuguagaaacgaagucac

SEQ ID NO: 2519668 - RNA, 19 nt, Artificial Sequence
  Description of Artificial Sequence: Synthetic oligonucleotide
  Sense strand starting at position 2478 of SEQ ID NO: 1888224
gugagccauccuugcguca

SEQ ID NO: 2519669 - RNA, 19 nt, Artificial Sequence
  Description of Artificial Sequence: Synthetic oligonucleotide
  Antisense strand to SEQ ID NO: 2519668
ugacgcaaggauggcucac

SEQ ID NO: 2519670 - RNA, 19 nt, Artificial Sequence
  Description of Artificial Sequence: Synthetic oligonucleotide
  Sense strand starting at position 2556 of SEQ ID NO: 1888224
gagaacuguaguggagagu

SEQ ID NO: 2519671 - RNA, 19 nt, Artificial Sequence
  Description of Artificial Sequence: Synthetic oligonucleotide
  Antisense strand to SEQ ID NO: 2519670
acucuccacuacaguucuc

SEQ ID NO: 2519672 - RNA, 19 nt, Artificial Sequence
  Description of Artificial Sequence: Synthetic oligonucleotide
  Sense strand starting at position 2595 of SEQ ID NO: 1888224
gccucacauccugauggua

SEQ ID NO: 2519673 - RNA, 19 nt, Artificial Sequence
  Description of Artificial Sequence: Synthetic oligonucleotide
  Antisense strand to SEQ ID NO: 2519672
uaccaucaggaugugaggc

SEQ ID NO: 2519674 - RNA, 19 nt, Artificial Sequence
  Description of Artificial Sequence: Synthetic oligonucleotide
  Sense strand starting at position 2597 of SEQ ID NO: 1888224
cucacauccugaugguaga

SEQ ID NO: 2519675 - RNA, 19 nt, Artificial Sequence
  Description of Artificial Sequence: Synthetic oligonucleotide
  Antisense strand to SEQ ID NO: 2519674
ucuaccaucaggaugugag

SEQ ID NO: 2519676 - RNA, 19 nt, Artificial Sequence
  Description of Artificial Sequence: Synthetic oligonucleotide
  Sense strand starting at position 2660 of SEQ ID NO: 1888224
guguguuguguucauccca

SEQ ID NO: 2519677 - RNA, 19 nt, Artificial Sequence
  Description of Artificial Sequence: Synthetic oligonucleotide
  Antisense strand to SEQ ID NO: 2519676
ugggaugaacacaacacac

SEQ ID NO: 2519678 - RNA, 19 nt, Artificial Sequence
  Description of Artificial Sequence: Synthetic oligonucleotide
  Sense strand starting at position 2868 of SEQ ID NO: 1888224
augauagauccaggcgaua

SEQ ID NO: 2519679 - RNA, 19 nt, Artificial Sequence
  Description of Artificial Sequence: Synthetic oligonucleotide
  Antisense strand to SEQ ID NO: 2519678
uaucgccuggaucuaucau

SEQ ID NO: 2519680 - RNA, 19 nt, Artificial Sequence
  Description of Artificial Sequence: Synthetic oligonucleotide
  Sense strand starting at position 2870 of SEQ ID NO: 1888224
gauagauccaggcgauaag

SEQ ID NO: 2519681 - RNA, 19 nt, Artificial Sequence
  Description of Artificial Sequence: Synthetic oligonucleotide
  Antisense strand to SEQ ID NO: 2519680
cuuaucgccuggaucuauc

SEQ ID NO: 2519682 - RNA, 19 nt, Artificial Sequence
  Description of Artificial Sequence: Synthetic oligonucleotide
  Sense strand starting at position 2952 of SEQ ID NO: 1888224
gccagcauccgguacagau

SEQ ID NO: 2519683 - RNA, 19 nt, Artificial Sequence
  Description of Artificial Sequence: Synthetic oligonucleotide
  Antisense strand to SEQ ID NO: 2519682
aucuguaccggaugcuggc

SEQ ID NO: 2519684 - RNA, 19 nt, Artificial Sequence
  Description of Artificial Sequence: Synthetic oligonucleotide
  Sense strand starting at position 2962 of SEQ ID NO: 1888224
gguacagauugggcggaau

SEQ ID NO: 2519685 - RNA, 19 nt, Artificial Sequence
  Description of Artificial Sequence: Synthetic oligonucleotide
  Antisense strand to SEQ ID NO: 2519684
auuccgcccaaucuguacc

SEQ ID NO: 2519686 - RNA, 19 nt, Artificial Sequence
  Description of Artificial Sequence: Synthetic oligonucleotide
  Sense strand starting at position 2964 of SEQ ID NO: 1888224
uacagauugggcggaaugu

SEQ ID NO: 2519687 - RNA, 19 nt, Artificial Sequence
  Description of Artificial Sequence: Synthetic oligonucleotide
  Antisense strand to SEQ ID NO: 2519686
acauuccgcccaaucugua

SEQ ID NO: 2519688 - RNA, 19 nt, Artificial Sequence
  Description of Artificial Sequence: Synthetic oligonucleotide
  Sense strand starting at position 2974 of SEQ ID NO: 1888224
gcggaauguggagaagguu

SEQ ID NO: 2519689 - RNA, 19 nt, Artificial Sequence
  Description of Artificial Sequence: Synthetic oligonucleotide
  Antisense strand to SEQ ID NO: 2519688
aaccuucuccacauuccgc

SEQ ID NO: 2519690 - RNA, 19 nt, Artificial Sequence
  Description of Artificial Sequence: Synthetic oligonucleotide
  Sense strand starting at position 3163 of SEQ ID NO: 1888224
agcagcuacugcucuagua

SEQ ID NO: 2519691 - RNA, 19 nt, Artificial Sequence
  Description of Artificial Sequence: Synthetic oligonucleotide
  Antisense strand to SEQ ID NO: 2519690
uacuagagcaguagcugcu

SEQ ID NO: 2519692 - RNA, 19 nt, Artificial Sequence
  Description of Artificial Sequence: Synthetic oligonucleotide
  Sense strand starting at position 3209 of SEQ ID NO: 1888224
aggauuagcagaugcucaa

SEQ ID NO: 2519693 - RNA, 19 nt, Artificial Sequence
  Description of Artificial Sequence: Synthetic oligonucleotide
  Antisense strand to SEQ ID NO: 2519692
uugagcaucugcuaauccu

SEQ ID NO: 2519694 - RNA, 19 nt, Artificial Sequence
  Description of Artificial Sequence: Synthetic oligonucleotide
  Sense strand starting at position 3213 of SEQ ID NO: 1888224
uuagcagaugcucaagaaa

SEQ ID NO: 2519695 - RNA, 19 nt, Artificial Sequence
  Description of Artificial Sequence: Synthetic oligonucleotide
  Antisense strand to SEQ ID NO: 2519694
uuucuugagcaucugcuaa

SEQ ID NO: 2519696 - RNA, 19 nt, Artificial Sequence
  Description of Artificial Sequence: Synthetic oligonucleotide
  Sense strand starting at position 3216 of SEQ ID NO: 1888224
gcagaugcucaagaaauau

SEQ ID NO: 2519697 - RNA, 19 nt, Artificial Sequence
  Description of Artificial Sequence: Synthetic oligonucleotide
  Antisense strand to SEQ ID NO: 2519696
auauuucuugagcaucugc

SEQ ID NO: 2519698 - RNA, 19 nt, Artificial Sequence
  Description of Artificial Sequence: Synthetic oligonucleotide
  Sense strand starting at position 3239 of SEQ ID NO: 1888224
ugaauaugcuggcucuuau

SEQ ID NO: 2519699 - RNA, 19 nt, Artificial Sequence
  Description of Artificial Sequence: Synthetic oligonucleotide
  Antisense strand to SEQ ID NO: 2519698
auaagagccagcauauuca

SEQ ID NO: 2519700 - RNA, 19 nt, Artificial Sequence
  Description of Artificial Sequence: Synthetic oligonucleotide
  Sense strand starting at position 3251 of SEQ ID NO: 1888224
cucuuaucugcucagcagu

SEQ ID NO: 2519701 - RNA, 19 nt, Artificial Sequence
  Description of Artificial Sequence: Synthetic oligonucleotide
  Antisense strand to SEQ ID NO: 2519700
acugcugagcagauaagag

SEQ ID NO: 2519702 - RNA, 19 nt, Artificial Sequence
  Description of Artificial Sequence: Synthetic oligonucleotide
  Sense strand starting at position 3318 of SEQ ID NO: 1888224
gcucccauucuagaugaca

SEQ ID NO: 2519703 - RNA, 19 nt, Artificial Sequence
  Description of Artificial Sequence: Synthetic oligonucleotide
  Antisense strand to SEQ ID NO: 2519702
ugucaucuagaaugggagc

SEQ ID NO: 2519704 - RNA, 19 nt, Artificial Sequence
  Description of Artificial Sequence: Synthetic oligonucleotide
  Sense strand starting at position 3404 of SEQ ID NO: 1888224
gguaccugucaaugaggga

SEQ ID NO: 2519705 - RNA, 19 nt, Artificial Sequence
  Description of Artificial Sequence: Synthetic oligonucleotide
  Antisense strand to SEQ ID NO: 2519704
ucccucauugacagguacc

SEQ ID NO: 2519706 - RNA, 19 nt, Artificial Sequence
  Description of Artificial Sequence: Synthetic oligonucleotide
  Sense strand starting at position 3739 of SEQ ID NO: 1888224
aaggaucugccucgggaga

SEQ ID NO: 2519707 - RNA, 19 nt, Artificial Sequence
  Description of Artificial Sequence: Synthetic oligonucleotide
  Antisense strand to SEQ ID NO: 2519706
ucucccgaggcagauccuu

SEQ ID NO: 2519708 - RNA, 19 nt, Artificial Sequence
  Description of Artificial Sequence: Synthetic oligonucleotide
  Sense strand starting at position 3831 of SEQ ID NO: 1888224
auugaagucuugggaugca

SEQ ID NO: 2519709 - RNA, 19 nt, Artificial Sequence
  Description of Artificial Sequence: Synthetic oligonucleotide
  Antisense strand to SEQ ID NO: 2519708
ugcaucccaagacuucaau

SEQ ID NO: 2519710 - RNA, 19 nt, Artificial Sequence
  Description of Artificial Sequence: Synthetic oligonucleotide
  Sense strand starting at position 3905 of SEQ ID NO: 1888224
cacugucugucugaagacu

SEQ ID NO: 2519711 - RNA, 19 nt, Artificial Sequence
  Description of Artificial Sequence: Synthetic oligonucleotide
  Antisense strand to SEQ ID NO: 2519710
agucuucagacagacagug

SEQ ID NO: 2519712 - RNA, 19 nt, Artificial Sequence
  Description of Artificial Sequence: Synthetic oligonucleotide
  Sense strand starting at position 3942 of SEQ ID NO: 1888224
gccagaauuucuucugucu

SEQ ID NO: 2519713 - RNA, 19 nt, Artificial Sequence
  Description of Artificial Sequence: Synthetic oligonucleotide
  Antisense strand to SEQ ID NO: 2519712
agacagaagaaauucuggc

SEQ ID NO: 2519714 - RNA, 19 nt, Artificial Sequence
  Description of Artificial Sequence: Synthetic oligonucleotide
  Sense strand starting at position 3954 of SEQ ID NO: 1888224
ucugucuccugucaaucaa

SEQ ID NO: 2519715 - RNA, 19 nt, Artificial Sequence
  Description of Artificial Sequence: Synthetic oligonucleotide
  Antisense strand to SEQ ID NO: 2519714
uugauugacaggagacaga

SEQ ID NO: 2519716 - RNA, 19 nt, Artificial Sequence
  Description of Artificial Sequence: Synthetic oligonucleotide
  Sense strand starting at position 20 of SEQ ID NO: 1888225
agcacuuccugacuugaaa

SEQ ID NO: 2519717 - RNA, 19 nt, Artificial Sequence
  Description of Artificial Sequence: Synthetic oligonucleotide
  Antisense strand to SEQ ID NO: 2519716
uuucaagucaggaagugcu

SEQ ID NO: 2519718 - RNA, 19 nt, Artificial Sequence
  Description of Artificial Sequence: Synthetic oligonucleotide
  Sense strand starting at position 242 of SEQ ID NO: 1888225
agaaaccagcugugauaaa

SEQ ID NO: 2519719 - RNA, 19 nt, Artificial Sequence
  Description of Artificial Sequence: Synthetic oligonucleotide
  Antisense strand to SEQ ID NO: 2519718
uuuaucacagcugguuucu

SEQ ID NO: 2519720 - RNA, 19 nt, Artificial Sequence
  Description of Artificial Sequence: Synthetic oligonucleotide
  Sense strand starting at position 254 of SEQ ID NO: 1888225
ugauaaacguccucugaga

SEQ ID NO: 2519721 - RNA, 19 nt, Artificial Sequence
  Description of Artificial Sequence: Synthetic oligonucleotide
  Antisense strand to SEQ ID NO: 2519720
ucucagaggacguuuauca

SEQ ID NO: 2519722 - RNA, 19 nt, Artificial Sequence
  Description of Artificial Sequence: Synthetic oligonucleotide
  Sense strand starting at position 319 of SEQ ID NO: 1888225
uuaugcauuucugcaguua

SEQ ID NO: 2519723 - RNA, 19 nt, Artificial Sequence
  Description of Artificial Sequence: Synthetic oligonucleotide
  Antisense strand to SEQ ID NO: 2519722
uaacugcagaaaugcauaa

SEQ ID NO: 2519724 - RNA, 19 nt, Artificial Sequence
  Description of Artificial Sequence: Synthetic oligonucleotide
  Sense strand starting at position 350 of SEQ ID NO: 1888225
gcaacuuguccuuaagcau

SEQ ID NO: 2519725 - RNA, 19 nt, Artificial Sequence
  Description of Artificial Sequence: Synthetic oligonucleotide
  Antisense strand to SEQ ID NO: 2519724
augcuuaaggacaaguugc

SEQ ID NO: 2519726 - RNA, 19 nt, Artificial Sequence
  Description of Artificial Sequence: Synthetic oligonucleotide
  Sense strand starting at position 381 of SEQ ID NO: 1888225
uaucaauagcgguaaagua

SEQ ID NO: 2519727 - RNA, 19 nt, Artificial Sequence
  Description of Artificial Sequence: Synthetic oligonucleotide
  Antisense strand to SEQ ID NO: 2519726
uacuuuaccgcuauugaua

SEQ ID NO: 2519728 - RNA, 19 nt, Artificial Sequence
  Description of Artificial Sequence: Synthetic oligonucleotide
  Sense strand starting at position 451 of SEQ ID NO: 1888225
uuaugucugucuucugaaa

SEQ ID NO: 2519729 - RNA, 19 nt, Artificial Sequence
  Description of Artificial Sequence: Synthetic oligonucleotide
  Antisense strand to SEQ ID NO: 2519728
uuucagaagacagacauaa

SEQ ID NO: 2519730 - RNA, 19 nt, Artificial Sequence
  Description of Artificial Sequence: Synthetic oligonucleotide
  Sense strand starting at position 477 of SEQ ID NO: 1888225
ugaacugaauguguacaga

SEQ ID NO: 2519731 - RNA, 19 nt, Artificial Sequence
  Description of Artificial Sequence: Synthetic oligonucleotide
  Antisense strand to SEQ ID NO: 2519730
ucuguacacauucaguuca

SEQ ID NO: 2519732 - RNA, 19 nt, Artificial Sequence
  Description of Artificial Sequence: Synthetic oligonucleotide
  Sense strand starting at position 509 of SEQ ID NO: 1888225
cuagucaugcaauggguua

SEQ ID NO: 2519733 - RNA, 19 nt, Artificial Sequence
  Description of Artificial Sequence: Synthetic oligonucleotide
  Antisense strand to SEQ ID NO: 2519732
uaacccauugcaugacuag

SEQ ID NO: 2519734 - RNA, 19 nt, Artificial Sequence
  Description of Artificial Sequence: Synthetic oligonucleotide
  Sense strand starting at position 514 of SEQ ID NO: 1888225
caugcaauggguuaaguau

SEQ ID NO: 2519735 - RNA, 19 nt, Artificial Sequence
  Description of Artificial Sequence: Synthetic oligonucleotide
  Antisense strand to SEQ ID NO: 2519734
auacuuaacccauugcaug

SEQ ID NO: 2519736 - RNA, 19 nt, Artificial Sequence
  Description of Artificial Sequence: Synthetic oligonucleotide
  Sense strand starting at position 725 of SEQ ID NO: 1888225
acggaagaauuacaggaaa

SEQ ID NO: 2519737 - RNA, 19 nt, Artificial Sequence
  Description of Artificial Sequence: Synthetic oligonucleotide
  Antisense strand to SEQ ID NO: 2519736
uuuccuguaauucuuccgu

SEQ ID NO: 2519738 - RNA, 19 nt, Artificial Sequence
  Description of Artificial Sequence: Synthetic oligonucleotide
  Sense strand starting at position 805 of SEQ ID NO: 1888225
ggaggcucuggcuaucaau

SEQ ID NO: 2519739 - RNA, 19 nt, Artificial Sequence
  Description of Artificial Sequence: Synthetic oligonucleotide
  Antisense strand to SEQ ID NO: 2519738
auugauagccagagccucc

SEQ ID NO: 2519740 - RNA, 19 nt, Artificial Sequence
  Description of Artificial Sequence: Synthetic oligonucleotide
  Sense strand starting at position 819 of SEQ ID NO: 1888225
ucaaucaaucuccggagaa

SEQ ID NO: 2519741 - RNA, 19 nt, Artificial Sequence
  Description of Artificial Sequence: Synthetic oligonucleotide
  Antisense strand to SEQ ID NO: 2519740
uucuccggagauugauuga

SEQ ID NO: 2519742 - RNA, 19 nt, Artificial Sequence
  Description of Artificial Sequence: Synthetic oligonucleotide
  Sense strand starting at position 877 of SEQ ID NO: 1888225
ucaaguauuuacuaaaggu

SEQ ID NO: 2519743 - RNA, 19 nt, Artificial Sequence
  Description of Artificial Sequence: Synthetic oligonucleotide
  Antisense strand to SEQ ID NO: 2519742
accuuuaguaaauacuuga

SEQ ID NO: 2519744 - RNA, 19 nt, Artificial Sequence
  Description of Artificial Sequence: Synthetic oligonucleotide
  Sense strand starting at position 1099 of SEQ ID NO: 1888225
ggcuucagcguggcgaaau

SEQ ID NO: 2519745 - RNA, 19 nt, Artificial Sequence
  Description of Artificial Sequence: Synthetic oligonucleotide
  Antisense strand to SEQ ID NO: 2519744
auuucgccacgcugaagcc

SEQ ID NO: 2519746 - RNA, 19 nt, Artificial Sequence
  Description of Artificial Sequence: Synthetic oligonucleotide
  Sense strand starting at position 1992 of SEQ ID NO: 1888225
aggccuuucgggagcugua

SEQ ID NO: 2519747 - RNA, 19 nt, Artificial Sequence
  Description of Artificial Sequence: Synthetic oligonucleotide
  Antisense strand to SEQ ID NO: 2519746
uacagcucccgaaaggccu

SEQ ID NO: 2519748 - RNA, 19 nt, Artificial Sequence
  Description of Artificial Sequence: Synthetic oligonucleotide
  Sense strand starting at position 2208 of SEQ ID NO: 1888225
auccguggccucuaguaaa

SEQ ID NO: 2519749 - RNA, 19 nt, Artificial Sequence
  Description of Artificial Sequence: Synthetic oligonucleotide
  Antisense strand to SEQ ID NO: 2519748
uuuacuagaggccacggau

SEQ ID NO: 2519750 - RNA, 19 nt, Artificial Sequence
  Description of Artificial Sequence: Synthetic oligonucleotide
  Sense strand starting at position 2501 of SEQ ID NO: 1888225
gguuauaaaugaguugcau

SEQ ID NO: 2519751 - RNA, 19 nt, Artificial Sequence
  Description of Artificial Sequence: Synthetic oligonucleotide
  Antisense strand to SEQ ID NO: 2519750
augcaacucauuuauaacc

SEQ ID NO: 2519752 - RNA, 19 nt, Artificial Sequence
  Description of Artificial Sequence: Synthetic oligonucleotide
  Sense strand starting at position 2600 of SEQ ID NO: 1888225
acauaauacuggccauagu

SEQ ID NO: 2519753 - RNA, 19 nt, Artificial Sequence
  Description of Artificial Sequence: Synthetic oligonucleotide
  Antisense strand to SEQ ID NO: 2519752
acuauggccaguauuaugu

SEQ ID NO: 2519754 - RNA, 19 nt, Artificial Sequence
  Description of Artificial Sequence: Synthetic oligonucleotide
  Sense strand starting at position 2698 of SEQ ID NO: 1888225
gauccugugccagagacuu

SEQ ID NO: 2519755 - RNA, 19 nt, Artificial Sequence
  Description of Artificial Sequence: Synthetic oligonucleotide
  Antisense strand to SEQ ID NO: 2519754
aagucucuggcacaggauc

SEQ ID NO: 2519756 - RNA, 19 nt, Artificial Sequence
  Description of Artificial Sequence: Synthetic oligonucleotide
  Sense strand starting at position 2815 of SEQ ID NO: 1888225
acugccaagugagauuuau

SEQ ID NO: 2519757 - RNA, 19 nt, Artificial Sequence
  Description of Artificial Sequence: Synthetic oligonucleotide
  Antisense strand to SEQ ID NO: 2519756
auaaaucucacuuggcagu

SEQ ID NO: 2519758 - RNA, 19 nt, Artificial Sequence
  Description of Artificial Sequence: Synthetic oligonucleotide
  Sense strand starting at position 2824 of SEQ ID NO: 1888225
ugagauuuaugacaguuuc

SEQ ID NO: 2519759 - RNA, 19 nt, Artificial Sequence
  Description of Artificial Sequence: Synthetic oligonucleotide
  Antisense strand to SEQ ID NO: 2519758
gaaacugucauaaaucuca

SEQ ID NO: 2519760 - RNA, 19 nt, Artificial Sequence
  Description of Artificial Sequence: Synthetic oligonucleotide
  Sense strand starting at position 2891 of SEQ ID NO: 1888225
aaugaagacugucuguaga

SEQ ID NO: 2519761 - RNA, 19 nt, Artificial Sequence
  Description of Artificial Sequence: Synthetic oligonucleotide
  Antisense strand to SEQ ID NO: 2519760
ucuacagacagucuucauu

SEQ ID NO: 2519762 - RNA, 19 nt, Artificial Sequence
  Description of Artificial Sequence: Synthetic oligonucleotide
  Sense strand starting at position 3013 of SEQ ID NO: 1888225
gcucuucgugcaguuuauu

SEQ ID NO: 2519763 - RNA, 19 nt, Artificial Sequence
  Description of Artificial Sequence: Synthetic oligonucleotide
  Antisense strand to SEQ ID NO: 2519762
aauaaacugcacgaagagc

SEQ ID NO: 2519764 - RNA, 19 nt, Artificial Sequence
  Description of Artificial Sequence: Synthetic oligonucleotide
  Sense strand starting at position 3019 of SEQ ID NO: 1888225
cgugcaguuuauuuacgau

SEQ ID NO: 2519765 - RNA, 19 nt, Artificial Sequence
  Description of Artificial Sequence: Synthetic oligonucleotide
  Antisense strand to SEQ ID NO: 2519764
aucguaaauaaacugcacg

SEQ ID NO: 2519766 - RNA, 19 nt, Artificial Sequence
  Description of Artificial Sequence: Synthetic oligonucleotide
  Sense strand starting at position 3031 of SEQ ID NO: 1888225
uuacgauuacuacaugcau

SEQ ID NO: 2519767 - RNA, 19 nt, Artificial Sequence
  Description of Artificial Sequence: Synthetic oligonucleotide
  Antisense strand to SEQ ID NO: 2519766
augcauguaguaaucguaa

SEQ ID NO: 2519768 - RNA, 19 nt, Artificial Sequence
  Description of Artificial Sequence: Synthetic oligonucleotide
  Sense strand starting at position 3106 of SEQ ID NO: 1888225
auuggaggugaccguaaau

SEQ ID NO: 2519769 - RNA, 19 nt, Artificial Sequence
  Description of Artificial Sequence: Synthetic oligonucleotide
  Antisense strand to SEQ ID NO: 2519768
auuuacggucaccuccaau

SEQ ID NO: 2519770 - RNA, 19 nt, Artificial Sequence
  Description of Artificial Sequence: Synthetic oligonucleotide
  Sense strand starting at position 3193 of SEQ ID NO: 1888225
ggcuuaauggagugaggcu

SEQ ID NO: 2519771 - RNA, 19 nt, Artificial Sequence
  Description of Artificial Sequence: Synthetic oligonucleotide
  Antisense strand to SEQ ID NO: 2519770
agccucacuccauuaagcc

SEQ ID NO: 2519772 - RNA, 19 nt, Artificial Sequence
  Description of Artificial Sequence: Synthetic oligonucleotide
  Sense strand starting at position 3194 of SEQ ID NO: 1888225
gcuuaauggagugaggcua

SEQ ID NO: 2519773 - RNA, 19 nt, Artificial Sequence
  Description of Artificial Sequence: Synthetic oligonucleotide
  Antisense strand to SEQ ID NO: 2519772
uagccucacuccauuaagc

SEQ ID NO: 2519774 - RNA, 19 nt, Artificial Sequence
  Description of Artificial Sequence: Synthetic oligonucleotide
  Sense strand starting at position 3226 of SEQ ID NO: 1888225
uaaguaaaucaguguguug

SEQ ID NO: 2519775 - RNA, 19 nt, Artificial Sequence
  Description of Artificial Sequence: Synthetic oligonucleotide
  Antisense strand to SEQ ID NO: 2519774
caacacacugauuuacuua

SEQ ID NO: 2519776 - RNA, 19 nt, Artificial Sequence
  Description of Artificial Sequence: Synthetic oligonucleotide
  Sense strand starting at position 3240 of SEQ ID NO: 1888225
uguugauuaaaucaguugu

SEQ ID NO: 2519777 - RNA, 19 nt, Artificial Sequence
  Description of Artificial Sequence: Synthetic oligonucleotide
  Antisense strand to SEQ ID NO: 2519776
acaacugauuuaaucaaca

SEQ ID NO: 2519778 - RNA, 19 nt, Artificial Sequence
  Description of Artificial Sequence: Synthetic oligonucleotide
  Sense strand starting at position 3246 of SEQ ID NO: 1888225
uuaaaucaguuguucccua

SEQ ID NO: 2519779 - RNA, 19 nt, Artificial Sequence
  Description of Artificial Sequence: Synthetic oligonucleotide
  Antisense strand to SEQ ID NO: 2519778
uagggaacaacugauuuaa

SEQ ID NO: 2519780 - RNA, 19 nt, Artificial Sequence
  Description of Artificial Sequence: Synthetic oligonucleotide
  Sense strand starting at position 3410 of SEQ ID NO: 1888225
aguucuagauucucauauc

SEQ ID NO: 2519781 - RNA, 19 nt, Artificial Sequence
  Description of Artificial Sequence: Synthetic oligonucleotide
  Antisense strand to SEQ ID NO: 2519780
gauaugagaaucuagaacu

SEQ ID NO: 2519782 - RNA, 19 nt, Artificial Sequence
  Description of Artificial Sequence: Synthetic oligonucleotide
  Sense strand starting at position 3418 of SEQ ID NO: 1888225
auucucauaucuguaguca

SEQ ID NO: 2519783 - RNA, 19 nt, Artificial Sequence
  Description of Artificial Sequence: Synthetic oligonucleotide
  Antisense strand to SEQ ID NO: 2519782
ugacuacagauaugagaau

SEQ ID NO: 2519784 - RNA, 19 nt, Artificial Sequence
  Description of Artificial Sequence: Synthetic oligonucleotide
  Sense strand starting at position 3506 of SEQ ID NO: 1888225
gguuucuaguaauuuccuu

SEQ ID NO: 2519785 - RNA, 19 nt, Artificial Sequence
  Description of Artificial Sequence: Synthetic oligonucleotide
  Antisense strand to SEQ ID NO: 2519784
aaggaaauuacuagaaacc

SEQ ID NO: 2519786 - RNA, 19 nt, Artificial Sequence
  Description of Artificial Sequence: Synthetic oligonucleotide
  Sense strand starting at position 3607 of SEQ ID NO: 1888225
ccuuaauuacuggguagag

SEQ ID NO: 2519787 - RNA, 19 nt, Artificial Sequence
  Description of Artificial Sequence: Synthetic oligonucleotide
  Antisense strand to SEQ ID NO: 2519786
cucuacccaguaauuaagg

SEQ ID NO: 2519788 - RNA, 19 nt, Artificial Sequence
  Description of Artificial Sequence: Synthetic oligonucleotide
  Sense strand starting at position 3677 of SEQ ID NO: 1888225
agaugaaccucacagaaua

SEQ ID NO: 2519789 - RNA, 19 nt, Artificial Sequence
  Description of Artificial Sequence: Synthetic oligonucleotide
  Antisense strand to SEQ ID NO: 2519788
uauucugugagguucaucu

SEQ ID NO: 2519790 - RNA, 19 nt, Artificial Sequence
  Description of Artificial Sequence: Synthetic oligonucleotide
  Sense strand starting at position 3906 of SEQ ID NO: 1888225
guuccauuucuuggcugua

SEQ ID NO: 2519791 - RNA, 19 nt, Artificial Sequence
  Description of Artificial Sequence: Synthetic oligonucleotide
  Antisense strand to SEQ ID NO: 2519790
uacagccaagaaauggaac

SEQ ID NO: 2519792 - RNA, 19 nt, Artificial Sequence
  Description of Artificial Sequence: Synthetic oligonucleotide
  Sense strand starting at position 3909 of SEQ ID NO: 1888225
ccauuucuuggcuguacua

SEQ ID NO: 2519793 - RNA, 19 nt, Artificial Sequence
  Description of Artificial Sequence: Synthetic oligonucleotide
  Antisense strand to SEQ ID NO: 2519792
uaguacagccaagaaaugg

SEQ ID NO: 2519794 - RNA, 19 nt, Artificial Sequence
  Description of Artificial Sequence: Synthetic oligonucleotide
  Sense strand starting at position 3965 of SEQ ID NO: 1888225
uggcuacugaaagaguuau

SEQ ID NO: 2519795 - RNA, 19 nt, Artificial Sequence
  Description of Artificial Sequence: Synthetic oligonucleotide
  Antisense strand to SEQ ID NO: 2519794
auaacucuuucaguagcca

SEQ ID NO: 2519796 - RNA, 19 nt, Artificial Sequence
  Description of Artificial Sequence: Synthetic oligonucleotide
  Sense strand starting at position 114 of SEQ ID NO: 1888226
aucugcguuucuccuaaua

SEQ ID NO: 2519797 - RNA, 19 nt, Artificial Sequence
  Description of Artificial Sequence: Synthetic oligonucleotide
  Antisense strand to SEQ ID NO: 2519796
uauuaggagaaacgcagau

SEQ ID NO: 2519798 - RNA, 19 nt, Artificial Sequence
  Description of Artificial Sequence: Synthetic oligonucleotide
  Sense strand starting at position 116 of SEQ ID NO: 1888226
cugcguuucuccuaauaau

SEQ ID NO: 2519799 - RNA, 19 nt, Artificial Sequence
  Description of Artificial Sequence: Synthetic oligonucleotide
  Antisense strand to SEQ ID NO: 2519798
auuauuaggagaaacgcag

SEQ ID NO: 2519800 - RNA, 19 nt, Artificial Sequence
  Description of Artificial Sequence: Synthetic oligonucleotide
  Sense strand starting at position 219 of SEQ ID NO: 1888226
ccaauugugguauacccau

SEQ ID NO: 2519801 - RNA, 19 nt, Artificial Sequence
  Description of Artificial Sequence: Synthetic oligonucleotide
  Antisense strand to SEQ ID NO: 2519800
auggguauaccacaauugg

SEQ ID NO: 2519802 - RNA, 19 nt, Artificial Sequence
  Description of Artificial Sequence: Synthetic oligonucleotide
  Sense strand starting at position 435 of SEQ ID NO: 1888226
ggugggugucaaggagaau

SEQ ID NO: 2519803 - RNA, 19 nt, Artificial Sequence
  Description of Artificial Sequence: Synthetic oligonucleotide
  Antisense strand to SEQ ID NO: 2519802
auucuccuugacacccacc

SEQ ID NO: 2519804 - RNA, 19 nt, Artificial Sequence
  Description of Artificial Sequence: Synthetic oligonucleotide
  Sense strand starting at position 436 of SEQ ID NO: 1888226
gugggugucaaggagaaug

SEQ ID NO: 2519805 - RNA, 19 nt, Artificial Sequence
  Description of Artificial Sequence: Synthetic oligonucleotide
  Antisense strand to SEQ ID NO: 2519804
cauucuccuugacacccac

SEQ ID NO: 2519806 - RNA, 19 nt, Artificial Sequence
  Description of Artificial Sequence: Synthetic oligonucleotide
  Sense strand starting at position 463 of SEQ ID NO: 1888226
aggaaugugcuggaguguu

SEQ ID NO: 2519807 - RNA, 19 nt, Artificial Sequence
  Description of Artificial Sequence: Synthetic oligonucleotide
  Antisense strand to SEQ ID NO: 2519806
aacacuccagcacauuccu

SEQ ID NO: 2519808 - RNA, 19 nt, Artificial Sequence
  Description of Artificial Sequence: Synthetic oligonucleotide
  Sense strand starting at position 513 of SEQ ID NO: 1888226
guucuaugaguuuaugaau

SEQ ID NO: 2519809 - RNA, 19 nt, Artificial Sequence
  Description of Artificial Sequence: Synthetic oligonucleotide
  Antisense strand to SEQ ID NO: 2519808
auucauaaacucauagaac

SEQ ID NO: 2519810 - RNA, 19 nt, Artificial Sequence
  Description of Artificial Sequence: Synthetic oligonucleotide
  Sense strand starting at position 516 of SEQ ID NO: 1888226
cuaugaguuuaugaauuug

SEQ ID NO: 2519811 - RNA, 19 nt, Artificial Sequence
  Description of Artificial Sequence: Synthetic oligonucleotide
  Antisense strand to SEQ ID NO: 2519810
caaauucauaaacucauag

SEQ ID NO: 2519812 - RNA, 19 nt, Artificial Sequence
  Description of Artificial Sequence: Synthetic oligonucleotide
  Sense strand starting at position 755 of SEQ ID NO: 1888226
acaggugucugccaugaug

SEQ ID NO: 2519813 - RNA, 19 nt, Artificial Sequence
  Description of Artificial Sequence: Synthetic oligonucleotide
  Antisense strand to SEQ ID NO: 2519812
caucauggcagacaccugu

SEQ ID NO: 2519814 - RNA, 19 nt, Artificial Sequence
  Description of Artificial Sequence: Synthetic oligonucleotide
  Sense strand starting at position 959 of SEQ ID NO: 1888226
uugguaaucagaugaguaa

SEQ ID NO: 2519815 - RNA, 19 nt, Artificial Sequence
  Description of Artificial Sequence: Synthetic oligonucleotide
  Antisense strand to SEQ ID NO: 2519814
uuacucaucugauuaccaa

SEQ ID NO: 2519816 - RNA, 19 nt, Artificial Sequence
  Description of Artificial Sequence: Synthetic oligonucleotide
  Sense strand starting at position 1236 of SEQ ID NO: 1888226
cuuucuuagucucugagau

SEQ ID NO: 2519817 - RNA, 19 nt, Artificial Sequence
  Description of Artificial Sequence: Synthetic oligonucleotide
  Antisense strand to SEQ ID NO: 2519816
aucucagagacuaagaaag

SEQ ID NO: 2519818 - RNA, 19 nt, Artificial Sequence
  Description of Artificial Sequence: Synthetic oligonucleotide
  Sense strand starting at position 1237 of SEQ ID NO: 1888226
uuucuuagucucugagaug

SEQ ID NO: 2519819 - RNA, 19 nt, Artificial Sequence
  Description of Artificial Sequence: Synthetic oligonucleotide
  Antisense strand to SEQ ID NO: 2519818
caucucagagacuaagaaa

SEQ ID NO: 2519820 - RNA, 19 nt, Artificial Sequence
  Description of Artificial Sequence: Synthetic oligonucleotide
  Sense strand starting at position 1238 of SEQ ID NO: 1888226
uucuuagucucugagauga

SEQ ID NO: 2519821 - RNA, 19 nt, Artificial Sequence
  Description of Artificial Sequence: Synthetic oligonucleotide
  Antisense strand to SEQ ID NO: 2519820
ucaucucagagacuaagaa

SEQ ID NO: 2519822 - RNA, 19 nt, Artificial Sequence
  Description of Artificial Sequence: Synthetic oligonucleotide
  Sense strand starting at position 1301 of SEQ ID NO: 1888226
cccauauccuuggucuacu

SEQ ID NO: 2519823 - RNA, 19 nt, Artificial Sequence
  Description of Artificial Sequence: Synthetic oligonucleotide
  Antisense strand to SEQ ID NO: 2519822
aguagaccaaggauauggg

SEQ ID NO: 2519824 - RNA, 19 nt, Artificial Sequence
  Description of Artificial Sequence: Synthetic oligonucleotide
  Sense strand starting at position 1312 of SEQ ID NO: 1888226
ggucuacucugagaugauu

SEQ ID NO: 2519825 - RNA, 19 nt, Artificial Sequence
  Description of Artificial Sequence: Synthetic oligonucleotide
  Antisense strand to SEQ ID NO: 2519824
aaucaucucagaguagacc

SEQ ID NO: 2519826 - RNA, 19 nt, Artificial Sequence
  Description of Artificial Sequence: Synthetic oligonucleotide
  Sense strand starting at position 1472 of SEQ ID NO: 1888226
agaggucuauccuggccau

SEQ ID NO: 2519827 - RNA, 19 nt, Artificial Sequence
  Description of Artificial Sequence: Synthetic oligonucleotide
  Antisense strand to SEQ ID NO: 2519826
auggccaggauagaccucu

SEQ ID NO: 2519828 - RNA, 19 nt, Artificial Sequence
  Description of Artificial Sequence: Synthetic oligonucleotide
  Sense strand starting at position 1532 of SEQ ID NO: 1888226
accacaacuugggaguaua

SEQ ID NO: 2519829 - RNA, 19 nt, Artificial Sequence
  Description of Artificial Sequence: Synthetic oligonucleotide
  Antisense strand to SEQ ID NO: 2519828
uauacucccaaguuguggu

SEQ ID NO: 2519830 - RNA, 19 nt, Artificial Sequence
  Description of Artificial Sequence: Synthetic oligonucleotide
  Sense strand starting at position 1699 of SEQ ID NO: 1888226
gguuccucaucuuuguaaa

SEQ ID NO: 2519831 - RNA, 19 nt, Artificial Sequence
  Description of Artificial Sequence: Synthetic oligonucleotide
  Antisense strand to SEQ ID NO: 2519830
uuuacaaagaugaggaacc

SEQ ID NO: 2519832 - RNA, 19 nt, Artificial Sequence
  Description of Artificial Sequence: Synthetic oligonucleotide
  Sense strand starting at position 1700 of SEQ ID NO: 1888226
guuccucaucuuuguaaau

SEQ ID NO: 2519833 - RNA, 19 nt, Artificial Sequence
  Description of Artificial Sequence: Synthetic oligonucleotide
  Antisense strand to SEQ ID NO: 2519832
auuuacaaagaugaggaac

SEQ ID NO: 2519834 - RNA, 19 nt, Artificial Sequence
  Description of Artificial Sequence: Synthetic oligonucleotide
  Sense strand starting at position 1713 of SEQ ID NO: 1888226
guaaauagcucuugccauu

SEQ ID NO: 2519835 - RNA, 19 nt, Artificial Sequence
  Description of Artificial Sequence: Synthetic oligonucleotide
  Antisense strand to SEQ ID NO: 2519834
aauggcaagagcuauuuac

SEQ ID NO: 2519836 - RNA, 19 nt, Artificial Sequence
  Description of Artificial Sequence: Synthetic oligonucleotide
  Sense strand starting at position 1807 of SEQ ID NO: 1888226
augugcaauuugcauagua

SEQ ID NO: 2519837 - RNA, 19 nt, Artificial Sequence
  Description of Artificial Sequence: Synthetic oligonucleotide
  Antisense strand to SEQ ID NO: 2519836
uacuaugcaaauugcacau

SEQ ID NO: 2519838 - RNA, 19 nt, Artificial Sequence
  Description of Artificial Sequence: Synthetic oligonucleotide
  Sense strand starting at position 2303 of SEQ ID NO: 1888226
ucuacaaaugucugaggaa

SEQ ID NO: 2519839 - RNA, 19 nt, Artificial Sequence
  Description of Artificial Sequence: Synthetic oligonucleotide
  Antisense strand to SEQ ID NO: 2519838
uuccucagacauuuguaga

SEQ ID NO: 2519840 - RNA, 19 nt, Artificial Sequence
  Description of Artificial Sequence: Synthetic oligonucleotide
  Sense strand starting at position 2304 of SEQ ID NO: 1888226
cuacaaaugucugaggaau

SEQ ID NO: 2519841 - RNA, 19 nt, Artificial Sequence
  Description of Artificial Sequence: Synthetic oligonucleotide
  Antisense strand to SEQ ID NO: 2519840
auuccucagacauuuguag

SEQ ID NO: 2519842 - RNA, 19 nt, Artificial Sequence
  Description of Artificial Sequence: Synthetic oligonucleotide
  Sense strand starting at position 2306 of SEQ ID NO: 1888226
acaaaugucugaggaauau

SEQ ID NO: 2519843 - RNA, 19 nt, Artificial Sequence
  Description of Artificial Sequence: Synthetic oligonucleotide
  Antisense strand to SEQ ID NO: 2519842
auauuccucagacauuugu

SEQ ID NO: 2519844 - RNA, 19 nt, Artificial Sequence
  Description of Artificial Sequence: Synthetic oligonucleotide
  Sense strand starting at position 2902 of SEQ ID NO: 1888226
cuuguccacuauucuagau

SEQ ID NO: 2519845 - RNA, 19 nt, Artificial Sequence
  Description of Artificial Sequence: Synthetic oligonucleotide
  Antisense strand to SEQ ID NO: 2519844
aucuagaauaguggacaag

SEQ ID NO: 2519846 - RNA, 19 nt, Artificial Sequence
  Description of Artificial Sequence: Synthetic oligonucleotide
  Sense strand starting at position 2904 of SEQ ID NO: 1888226
uguccacuauucuagauua

SEQ ID NO: 2519847 - RNA, 19 nt, Artificial Sequence
  Description of Artificial Sequence: Synthetic oligonucleotide
  Antisense strand to SEQ ID NO: 2519846
uaaucuagaauaguggaca

SEQ ID NO: 2519848 - RNA, 19 nt, Artificial Sequence
  Description of Artificial Sequence: Synthetic oligonucleotide
  Sense strand starting at position 2971 of SEQ ID NO: 1888226
acucuaguauuacgagguu

SEQ ID NO: 2519849 - RNA, 19 nt, Artificial Sequence
  Description of Artificial Sequence: Synthetic oligonucleotide
  Antisense strand to SEQ ID NO: 2519848
aaccucguaauacuagagu

SEQ ID NO: 2519850 - RNA, 19 nt, Artificial Sequence
  Description of Artificial Sequence: Synthetic oligonucleotide
  Sense strand starting at position 3169 of SEQ ID NO: 1888226
gagaacagguacccuuaua

SEQ ID NO: 2519851 - RNA, 19 nt, Artificial Sequence
  Description of Artificial Sequence: Synthetic oligonucleotide
  Antisense strand to SEQ ID NO: 2519850
uauaaggguaccuguucuc

SEQ ID NO: 2519852 - RNA, 19 nt, Artificial Sequence
  Description of Artificial Sequence: Synthetic oligonucleotide
  Sense strand starting at position 3180 of SEQ ID NO: 1888226
cccuuauacgucugaguac

SEQ ID NO: 2519853 - RNA, 19 nt, Artificial Sequence
  Description of Artificial Sequence: Synthetic oligonucleotide
  Antisense strand to SEQ ID NO: 2519852
guacucagacguauaaggg

SEQ ID NO: 2519854 - RNA, 19 nt, Artificial Sequence
  Description of Artificial Sequence: Synthetic oligonucleotide
  Sense strand starting at position 3181 of SEQ ID NO: 1888226
ccuuauacgucugaguacu

SEQ ID NO: 2519855 - RNA, 19 nt, Artificial Sequence
  Description of Artificial Sequence: Synthetic oligonucleotide
  Antisense strand to SEQ ID NO: 2519854
aguacucagacguauaagg

SEQ ID NO: 2519856 - RNA, 19 nt, Artificial Sequence
  Description of Artificial Sequence: Synthetic oligonucleotide
  Sense strand starting at position 3187 of SEQ ID NO: 1888226
acgucugaguacuccaauc

SEQ ID NO: 2519857 - RNA, 19 nt, Artificial Sequence
  Description of Artificial Sequence: Synthetic oligonucleotide
  Antisense strand to SEQ ID NO: 2519856
gauuggaguacucagacgu

SEQ ID NO: 2519858 - RNA, 19 nt, Artificial Sequence
  Description of Artificial Sequence: Synthetic oligonucleotide
  Sense strand starting at position 3189 of SEQ ID NO: 1888226
gucugaguacuccaaucuu

SEQ ID NO: 2519859 - RNA, 19 nt, Artificial Sequence
  Description of Artificial Sequence: Synthetic oligonucleotide
  Antisense strand to SEQ ID NO: 2519858
aagauuggaguacucagac

SEQ ID NO: 2519860 - RNA, 19 nt, Artificial Sequence
  Description of Artificial Sequence: Synthetic oligonucleotide
  Sense strand starting at position 3285 of SEQ ID NO: 1888226
acauacaugugguagagaa

SEQ ID NO: 2519861 - RNA, 19 nt, Artificial Sequence
  Description of Artificial Sequence: Synthetic oligonucleotide
  Antisense strand to SEQ ID NO: 2519860
uucucuaccacauguaugu

SEQ ID NO: 2519862 - RNA, 19 nt, Artificial Sequence
  Description of Artificial Sequence: Synthetic oligonucleotide
  Sense strand starting at position 3295 of SEQ ID NO: 1888226
gguagagaauauuacacau

SEQ ID NO: 2519863 - RNA, 19 nt, Artificial Sequence
  Description of Artificial Sequence: Synthetic oligonucleotide
  Antisense strand to SEQ ID NO: 2519862
auguguaauauucucuacc

SEQ ID NO: 2519864 - RNA, 19 nt, Artificial Sequence
  Description of Artificial Sequence: Synthetic oligonucleotide
  Sense strand starting at position 3433 of SEQ ID NO: 1888226
agaccagaguucuauuauu

SEQ ID NO: 2519865 - RNA, 19 nt, Artificial Sequence
  Description of Artificial Sequence: Synthetic oligonucleotide
  Antisense strand to SEQ ID NO: 2519864
aauaauagaacucuggucu

SEQ ID NO: 2519866 - RNA, 19 nt, Artificial Sequence
  Description of Artificial Sequence: Synthetic oligonucleotide
  Sense strand starting at position 3438 of SEQ ID NO: 1888226
agaguucuauuauuaccua

SEQ ID NO: 2519867 - RNA, 19 nt, Artificial Sequence
  Description of Artificial Sequence: Synthetic oligonucleotide
  Antisense strand to SEQ ID NO: 2519866
uagguaauaauagaacucu

SEQ ID NO: 2519868 - RNA, 19 nt, Artificial Sequence
  Description of Artificial Sequence: Synthetic oligonucleotide
  Sense strand starting at position 3691 of SEQ ID NO: 1888226
uuauccaguuagguuuaga

SEQ ID NO: 2519869 - RNA, 19 nt, Artificial Sequence
  Description of Artificial Sequence: Synthetic oligonucleotide
  Antisense strand to SEQ ID NO: 2519868
ucuaaaccuaacuggauaa

SEQ ID NO: 2519870 - RNA, 19 nt, Artificial Sequence
  Description of Artificial Sequence: Synthetic oligonucleotide
  Sense strand starting at position 83 of SEQ ID NO: 1888227
gcaagacucuuaucugcaa

SEQ ID NO: 2519871 - RNA, 19 nt, Artificial Sequence
  Description of Artificial Sequence: Synthetic oligonucleotide
  Antisense strand to SEQ ID NO: 2519870
uugcagauaagagucuugc

SEQ ID NO: 2519872 - RNA, 19 nt, Artificial Sequence
  Description of Artificial Sequence: Synthetic oligonucleotide
  Sense strand starting at position 86 of SEQ ID NO: 1888227
agacucuuaucugcaaguu

SEQ ID NO: 2519873 - RNA, 19 nt, Artificial Sequence
  Description of Artificial Sequence: Synthetic oligonucleotide
  Antisense strand to SEQ ID NO: 2519872
aacuugcagauaagagucu

SEQ ID NO: 2519874 - RNA, 19 nt, Artificial Sequence
  Description of Artificial Sequence: Synthetic oligonucleotide
  Sense strand starting at position 126 of SEQ ID NO: 1888227
ggaggccuuugagugguaa

SEQ ID NO: 2519875 - RNA, 19 nt, Artificial Sequence
  Description of Artificial Sequence: Synthetic oligonucleotide
  Antisense strand to SEQ ID NO: 2519874
uuaccacucaaaggccucc

SEQ ID NO: 2519876 - RNA, 19 nt, Artificial Sequence
  Description of Artificial Sequence: Synthetic oligonucleotide
  Sense strand starting at position 127 of SEQ ID NO: 1888227
gaggccuuugagugguaaa

SEQ ID NO: 2519877 - RNA, 19 nt, Artificial Sequence
  Description of Artificial Sequence: Synthetic oligonucleotide
  Antisense strand to SEQ ID NO: 2519876
uuuaccacucaaaggccuc

SEQ ID NO: 2519878 - RNA, 19 nt, Artificial Sequence
  Description of Artificial Sequence: Synthetic oligonucleotide
  Sense strand starting at position 128 of SEQ ID NO: 1888227
aggccuuugagugguaaau

SEQ ID NO: 2519879 - RNA, 19 nt, Artificial Sequence
  Description of Artificial Sequence: Synthetic oligonucleotide
  Antisense strand to SEQ ID NO: 2519878
auuuaccacucaaaggccu

SEQ ID NO: 2519880 - RNA, 19 nt, Artificial Sequence
  Description of Artificial Sequence: Synthetic oligonucleotide
  Sense strand starting at position 134 of SEQ ID NO: 1888227
uugagugguaaauggugau

SEQ ID NO: 2519881 - RNA, 19 nt, Artificial Sequence
  Description of Artificial Sequence: Synthetic oligonucleotide
  Antisense strand to SEQ ID NO: 2519880
aucaccauuuaccacucaa

SEQ ID NO: 2519882 - RNA, 19 nt, Artificial Sequence
  Description of Artificial Sequence: Synthetic oligonucleotide
  Sense strand starting at position 138 of SEQ ID NO: 1888227
gugguaaauggugaugaca

SEQ ID NO: 2519883 - RNA, 19 nt, Artificial Sequence
  Description of Artificial Sequence: Synthetic oligonucleotide
  Antisense strand to SEQ ID NO: 2519882
ugucaucaccauuuaccac

SEQ ID NO: 2519884 - RNA, 19 nt, Artificial Sequence
  Description of Artificial Sequence: Synthetic oligonucleotide
  Sense strand starting at position 141 of SEQ ID NO: 1888227
guaaauggugaugacaagu

SEQ ID NO: 2519885 - RNA, 19 nt, Artificial Sequence
  Description of Artificial Sequence: Synthetic oligonucleotide
  Antisense strand to SEQ ID NO: 2519884
acuugucaucaccauuuac

SEQ ID NO: 2519886 - RNA, 19 nt, Artificial Sequence
  Description of Artificial Sequence: Synthetic oligonucleotide
  Sense strand starting at position 152 of SEQ ID NO: 1888227
ugacaaguuuaaucugaag

SEQ ID NO: 2519887 - RNA, 19 nt, Artificial Sequence
  Description of Artificial Sequence: Synthetic oligonucleotide
  Antisense strand to SEQ ID NO: 2519886
cuucagauuaaacuuguca

SEQ ID NO: 2519888 - RNA, 19 nt, Artificial Sequence
  Description of Artificial Sequence: Synthetic oligonucleotide
  Sense strand starting at position 234 of SEQ ID NO: 1888227
ccacgcuuugaguaaugaa

SEQ ID NO: 2519889 - RNA, 19 nt, Artificial Sequence
  Description of Artificial Sequence: Synthetic oligonucleotide
  Antisense strand to SEQ ID NO: 2519888
uucauuacucaaagcgugg

SEQ ID NO: 2519890 - RNA, 19 nt, Artificial Sequence
  Description of Artificial Sequence: Synthetic oligonucleotide
  Sense strand starting at position 275 of SEQ ID NO: 1888227
aguccuuaccaaggaucua

SEQ ID NO: 2519891 - RNA, 19 nt, Artificial Sequence
  Description of Artificial Sequence: Synthetic oligonucleotide
  Antisense strand to SEQ ID NO: 2519890
uagauccuugguaaggacu

SEQ ID NO: 2519892 - RNA, 19 nt, Artificial Sequence
  Description of Artificial Sequence: Synthetic oligonucleotide
  Sense strand starting at position 392 of SEQ ID NO: 1888227
guguaauucuaauugggaa

SEQ ID NO: 2519893 - RNA, 19 nt, Artificial Sequence
  Description of Artificial Sequence: Synthetic oligonucleotide
  Antisense strand to SEQ ID NO: 2519892
uucccaauuagaauuacac

SEQ ID NO: 2519894 - RNA, 19 nt, Artificial Sequence
  Description of Artificial Sequence: Synthetic oligonucleotide
  Sense strand starting at position 441 of SEQ ID NO: 1888227
uggugauuuaguggagccu

SEQ ID NO: 2519895 - RNA, 19 nt, Artificial Sequence
  Description of Artificial Sequence: Synthetic oligonucleotide
  Antisense strand to SEQ ID NO: 2519894
aggcuccacuaaaucacca

SEQ ID NO: 2519896 - RNA, 19 nt, Artificial Sequence
  Description of Artificial Sequence: Synthetic oligonucleotide
  Sense strand starting at position 474 of SEQ ID NO: 1888227
aggauuugcuaagggagaa

SEQ ID NO: 2519897 - RNA, 19 nt, Artificial Sequence
  Description of Artificial Sequence: Synthetic oligonucleotide
  Antisense strand to SEQ ID NO: 2519896
uucucccuuagcaaauccu

SEQ ID NO: 2519898 - RNA, 19 nt, Artificial Sequence
  Description of Artificial Sequence: Synthetic oligonucleotide
  Sense strand starting at position 562 of SEQ ID NO: 1888227
cuuuaaaucaugggaggcu

SEQ ID NO: 2519899 - RNA, 19 nt, Artificial Sequence
  Description of Artificial Sequence: Synthetic oligonucleotide
  Antisense strand to SEQ ID NO: 2519898
agccucccaugauuuaaag

SEQ ID NO: 2519900 - RNA, 19 nt, Artificial Sequence
  Description of Artificial Sequence: Synthetic oligonucleotide
  Sense strand starting at position 571 of SEQ ID NO: 1888227
augggaggcuucuuaaauu

SEQ ID NO: 2519901 - RNA, 19 nt, Artificial Sequence
  Description of Artificial Sequence: Synthetic oligonucleotide
  Antisense strand to SEQ ID NO: 2519900
aauuuaagaagccucccau

SEQ ID NO: 2519902 - RNA, 19 nt, Artificial Sequence
  Description of Artificial Sequence: Synthetic oligonucleotide
  Sense strand starting at position 672 of SEQ ID NO: 1888227
gcagaaagccucggacaga

SEQ ID NO: 2519903 - RNA, 19 nt, Artificial Sequence
  Description of Artificial Sequence: Synthetic oligonucleotide
  Antisense strand to SEQ ID NO: 2519902
ucuguccgaggcuuucugc

SEQ ID NO: 2519904 - RNA, 19 nt, Artificial Sequence
  Description of Artificial Sequence: Synthetic oligonucleotide
  Sense strand starting at position 966 of SEQ ID NO: 1888227
ccagcucugcaggaagaaa

SEQ ID NO: 2519905 - RNA, 19 nt, Artificial Sequence
  Description of Artificial Sequence: Synthetic oligonucleotide
  Antisense strand to SEQ ID NO: 2519904
uuucuuccugcagagcugg

SEQ ID NO: 2519906 - RNA, 19 nt, Artificial Sequence
  Description of Artificial Sequence: Synthetic oligonucleotide
  Sense strand starting at position 1037 of SEQ ID NO: 1888227
ggugguuaugcgagguuau

SEQ ID NO: 2519907 - RNA, 19 nt, Artificial Sequence
  Description of Artificial Sequence: Synthetic oligonucleotide
  Antisense strand to SEQ ID NO: 2519906
auaaccucgcauaaccacc

SEQ ID NO: 2519908 - RNA, 19 nt, Artificial Sequence
  Description of Artificial Sequence: Synthetic oligonucleotide
  Sense strand starting at position 1100 of SEQ ID NO: 1888227
ggaagaacguuagcucuua

SEQ ID NO: 2519909 - RNA, 19 nt, Artificial Sequence
  Description of Artificial Sequence: Synthetic oligonucleotide
  Antisense strand to SEQ ID NO: 2519908
uaagagcuaacguucuucc

SEQ ID NO: 2519910 - RNA, 19 nt, Artificial Sequence
  Description of Artificial Sequence: Synthetic oligonucleotide
  Sense strand starting at position 1141 of SEQ ID NO: 1888227
acaguaacaccucaauugu

SEQ ID NO: 2519911 - RNA, 19 nt, Artificial Sequence
  Description of Artificial Sequence: Synthetic oligonucleotide
  Antisense strand to SEQ ID NO: 2519910
acaauugagguguuacugu

SEQ ID NO: 2519912 - RNA, 19 nt, Artificial Sequence
  Description of Artificial Sequence: Synthetic oligonucleotide
  Sense strand starting at position 1150 of SEQ ID NO: 1888227
ccucaauuguacuccgaca

SEQ ID NO: 2519913 - RNA, 19 nt, Artificial Sequence
  Description of Artificial Sequence: Synthetic oligonucleotide
  Antisense strand to SEQ ID NO: 2519912
ugucggaguacaauugagg

SEQ ID NO: 2519914 - RNA, 19 nt, Artificial Sequence
  Description of Artificial Sequence: Synthetic oligonucleotide
  Sense strand starting at position 1152 of SEQ ID NO: 1888227
ucaauuguacuccgacaac

SEQ ID NO: 2519915 - RNA, 19 nt, Artificial Sequence
  Description of Artificial Sequence: Synthetic oligonucleotide
  Antisense strand to SEQ ID NO: 2519914
guugucggaguacaauuga

SEQ ID NO: 2519916 - RNA, 19 nt, Artificial Sequence
  Description of Artificial Sequence: Synthetic oligonucleotide
  Sense strand starting at position 1293 of SEQ ID NO: 1888227
ccgagacccugaguugaga

SEQ ID NO: 2519917 - RNA, 19 nt, Artificial Sequence
  Description of Artificial Sequence: Synthetic oligonucleotide
  Antisense strand to SEQ ID NO: 2519916
ucucaacucagggucucgg

SEQ ID NO: 2519918 - RNA, 19 nt, Artificial Sequence
  Description of Artificial Sequence: Synthetic oligonucleotide
  Sense strand starting at position 1427 of SEQ ID NO: 1888227
guagggucccguuagagga

SEQ ID NO: 2519919 - RNA, 19 nt, Artificial Sequence
  Description of Artificial Sequence: Synthetic oligonucleotide
  Antisense strand to SEQ ID NO: 2519918
uccucuaacgggacccuac

SEQ ID NO: 2519920 - RNA, 19 nt, Artificial Sequence
  Description of Artificial Sequence: Synthetic oligonucleotide
  Sense strand starting at position 1644 of SEQ ID NO: 1888227
gagggaggcucucuugcua

SEQ ID NO: 2519921 - RNA, 19 nt, Artificial Sequence
  Description of Artificial Sequence: Synthetic oligonucleotide
  Antisense strand to SEQ ID NO: 2519920
uagcaagagagccucccuc

SEQ ID NO: 2519922 - RNA, 19 nt, Artificial Sequence
  Description of Artificial Sequence: Synthetic oligonucleotide
  Sense strand starting at position 2407 of SEQ ID NO: 1888227
gacucagggcuccgaauua

SEQ ID NO: 2519923 - RNA, 19 nt, Artificial Sequence
  Description of Artificial Sequence: Synthetic oligonucleotide
  Antisense strand to SEQ ID NO: 2519922
uaauucggagcccugaguc

SEQ ID NO: 2519924 - RNA, 19 nt, Artificial Sequence
  Description of Artificial Sequence: Synthetic oligonucleotide
  Sense strand starting at position 2423 of SEQ ID NO: 1888227
uuaccaguccuccauugua

SEQ ID NO: 2519925 - RNA, 19 nt, Artificial Sequence
  Description of Artificial Sequence: Synthetic oligonucleotide
  Antisense strand to SEQ ID NO: 2519924
uacaauggaggacugguaa

SEQ ID NO: 2519926 - RNA, 19 nt, Artificial Sequence
  Description of Artificial Sequence: Synthetic oligonucleotide
  Sense strand starting at position 3240 of SEQ ID NO: 1888227
cucagagggcagcaauaau

SEQ ID NO: 2519927 - RNA, 19 nt, Artificial Sequence
  Description of Artificial Sequence: Synthetic oligonucleotide
  Antisense strand to SEQ ID NO: 2519926
auuauugcugcccucugag

SEQ ID NO: 2519928 - RNA, 19 nt, Artificial Sequence
  Description of Artificial Sequence: Synthetic oligonucleotide
  Sense strand starting at position 3289 of SEQ ID NO: 1888227
ugaauuuaguuggaaggaa

SEQ ID NO: 2519929 - RNA, 19 nt, Artificial Sequence
  Description of Artificial Sequence: Synthetic oligonucleotide
  Antisense strand to SEQ ID NO: 2519928
uuccuuccaacuaaauuca

SEQ ID NO: 2519930 - RNA, 19 nt, Artificial Sequence
  Description of Artificial Sequence: Synthetic oligonucleotide
  Sense strand starting at position 3407 of SEQ ID NO: 1888227
cuauguccuugguuagaca

SEQ ID NO: 2519931 - RNA, 19 nt, Artificial Sequence
  Description of Artificial Sequence: Synthetic oligonucleotide
  Antisense strand to SEQ ID NO: 2519930
ugucuaaccaaggacauag

SEQ ID NO: 2519932 - RNA, 19 nt, Artificial Sequence
  Description of Artificial Sequence: Synthetic oligonucleotide
  Sense strand starting at position 3408 of SEQ ID NO: 1888227
uauguccuugguuagacaa

SEQ ID NO: 2519933 - RNA, 19 nt, Artificial Sequence
  Description of Artificial Sequence: Synthetic oligonucleotide
  Antisense strand to SEQ ID NO: 2519932
uugucuaaccaaggacaua

SEQ ID NO: 2519934 - RNA, 19 nt, Artificial Sequence
  Description of Artificial Sequence: Synthetic oligonucleotide
  Sense strand starting at position 3451 of SEQ ID NO: 1888227
gcccgaauuccucaucuau

SEQ ID NO: 2519935 - RNA, 19 nt, Artificial Sequence
  Description of Artificial Sequence: Synthetic oligonucleotide
  Antisense strand to SEQ ID NO: 2519934
auagaugaggaauucgggc

SEQ ID NO: 2519936 - RNA, 19 nt, Artificial Sequence
  Description of Artificial Sequence: Synthetic oligonucleotide
  Sense strand starting at position 3514 of SEQ ID NO: 1888227
gaaugauaauaugcaugua

SEQ ID NO: 2519937 - RNA, 19 nt, Artificial Sequence
  Description of Artificial Sequence: Synthetic oligonucleotide
  Antisense strand to SEQ ID NO: 2519936
uacaugcauauuaucauuc

SEQ ID NO: 2519938 - RNA, 19 nt, Artificial Sequence
  Description of Artificial Sequence: Synthetic oligonucleotide
  Sense strand starting at position 3535 of SEQ ID NO: 1888227
augcuuagagcucaguaag

SEQ ID NO: 2519939 - RNA, 19 nt, Artificial Sequence
  Description of Artificial Sequence: Synthetic oligonucleotide
  Antisense strand to SEQ ID NO: 2519938
cuuacugagcucuaagcau

SEQ ID NO: 2519940 - RNA, 19 nt, Artificial Sequence
  Description of Artificial Sequence: Synthetic oligonucleotide
  Sense strand starting at position 3538 of SEQ ID NO: 1888227
cuuagagcucaguaaguau

SEQ ID NO: 2519941 - RNA, 19 nt, Artificial Sequence
  Description of Artificial Sequence: Synthetic oligonucleotide
  Antisense strand to SEQ ID NO: 2519940
auacuuacugagcucuaag

SEQ ID NO: 2519942 - RNA, 19 nt, Artificial Sequence
  Description of Artificial Sequence: Synthetic oligonucleotide
  Sense strand starting at position 3541 of SEQ ID NO: 1888227
agagcucaguaaguauuau

SEQ ID NO: 2519943 - RNA, 19 nt, Artificial Sequence
  Description of Artificial Sequence: Synthetic oligonucleotide
  Antisense strand to SEQ ID NO: 2519942
auaauacuuacugagcucu

SEQ ID NO: 2519944 - RNA, 19 nt, Artificial Sequence
  Description of Artificial Sequence: Synthetic oligonucleotide
  Sense strand starting at position 3604 of SEQ ID NO: 1888227
acuucuugaguuugaagaa

SEQ ID NO: 2519945 - RNA, 19 nt, Artificial Sequence
  Description of Artificial Sequence: Synthetic oligonucleotide
  Antisense strand to SEQ ID NO: 2519944
uucuucaaacucaagaagu

SEQ ID NO: 2519946 - RNA, 19 nt, Artificial Sequence
  Description of Artificial Sequence: Synthetic oligonucleotide
  Sense strand starting at position 3671 of SEQ ID NO: 1888227
aggguauaaucaucuuuag

SEQ ID NO: 2519947 - RNA, 19 nt, Artificial Sequence
  Description of Artificial Sequence: Synthetic oligonucleotide
  Antisense strand to SEQ ID NO: 2519946
cuaaagaugauuauacccu

SEQ ID NO: 2519948 - RNA, 19 nt, Artificial Sequence
  Description of Artificial Sequence: Synthetic oligonucleotide
  Sense strand starting at position 3674 of SEQ ID NO: 1888227
guauaaucaucuuuagaga

SEQ ID NO: 2519949 - RNA, 19 nt, Artificial Sequence
  Description of Artificial Sequence: Synthetic oligonucleotide
  Antisense strand to SEQ ID NO: 2519948
ucucuaaagaugauuauac

SEQ ID NO: 2519950 - RNA, 19 nt, Artificial Sequence
  Description of Artificial Sequence: Synthetic oligonucleotide
  Sense strand starting at position 34 of SEQ ID NO: 1888228
cacauuacuguccacggau

SEQ ID NO: 2519951 - RNA, 19 nt, Artificial Sequence
  Description of Artificial Sequence: Synthetic oligonucleotide
  Antisense strand to SEQ ID NO: 2519950
auccguggacaguaaugug

SEQ ID NO: 2519952 - RNA, 19 nt, Artificial Sequence
  Description of Artificial Sequence: Synthetic oligonucleotide
  Sense strand starting at position 36 of SEQ ID NO: 1888228
cauuacuguccacggauau

SEQ ID NO: 2519953 - RNA, 19 nt, Artificial Sequence
  Description of Artificial Sequence: Synthetic oligonucleotide
  Antisense strand to SEQ ID NO: 2519952
auauccguggacaguaaug

SEQ ID NO: 2519954 - RNA, 19 nt, Artificial Sequence
  Description of Artificial Sequence: Synthetic oligonucleotide
  Sense strand starting at position 37 of SEQ ID NO: 1888228
auuacuguccacggauauu

SEQ ID NO: 2519955 - RNA, 19 nt, Artificial Sequence
  Description of Artificial Sequence: Synthetic oligonucleotide
  Antisense strand to SEQ ID NO: 2519954
aauauccguggacaguaau

SEQ ID NO: 2519956 - RNA, 19 nt, Artificial Sequence
  Description of Artificial Sequence: Synthetic oligonucleotide
  Sense strand starting at position 48 of SEQ ID NO: 1888228
cggauauuagcaugaggua

SEQ ID NO: 2519957 - RNA, 19 nt, Artificial Sequence
  Description of Artificial Sequence: Synthetic oligonucleotide
  Antisense strand to SEQ ID NO: 2519956
uaccucaugcuaauauccg

SEQ ID NO: 2519958 - RNA, 19 nt, Artificial Sequence
  Description of Artificial Sequence: Synthetic oligonucleotide
  Sense strand starting at position 92 of SEQ ID NO: 1888228
ggguuuauuguagaugagu

SEQ ID NO: 2519959 - RNA, 19 nt, Artificial Sequence
  Description of Artificial Sequence: Synthetic oligonucleotide
  Antisense strand to SEQ ID NO: 2519958
acucaucuacaauaaaccc

SEQ ID NO: 2519960 - RNA, 19 nt, Artificial Sequence
  Description of Artificial Sequence: Synthetic oligonucleotide
  Sense strand starting at position 97 of SEQ ID NO: 1888228
uauuguagaugaguaugua

SEQ ID NO: 2519961 - RNA, 19 nt, Artificial Sequence
  Description of Artificial Sequence: Synthetic oligonucleotide
  Antisense strand to SEQ ID NO: 2519960
uacauacucaucuacaaua

SEQ ID NO: 2519962 - RNA, 19 nt, Artificial Sequence
  Description of Artificial Sequence: Synthetic oligonucleotide
  Sense strand starting at position 110 of SEQ ID NO: 1888228
uauguaaguggucacuuaa

SEQ ID NO: 2519963 - RNA, 19 nt, Artificial Sequence
  Description of Artificial Sequence: Synthetic oligonucleotide
  Antisense strand to SEQ ID NO: 2519962
uuaagugaccacuuacaua

SEQ ID NO: 2519964 - RNA, 19 nt, Artificial Sequence
  Description of Artificial Sequence: Synthetic oligonucleotide
  Sense strand starting at position 262 of SEQ ID NO: 1888228
auuuaagagucauaaggua

SEQ ID NO: 2519965 - RNA, 19 nt, Artificial Sequence
  Description of Artificial Sequence: Synthetic oligonucleotide
  Antisense strand to SEQ ID NO: 2519964
uaccuuaugacucuuaaau

SEQ ID NO: 2519966 - RNA, 19 nt, Artificial Sequence
  Description of Artificial Sequence: Synthetic oligonucleotide
  Sense strand starting at position 316 of SEQ ID NO: 1888228
gcaauaaagacgugggagu

SEQ ID NO: 2519967 - RNA, 19 nt, Artificial Sequence
  Description of Artificial Sequence: Synthetic oligonucleotide
  Antisense strand to SEQ ID NO: 2519966
acucccacgucuuuauugc

SEQ ID NO: 2519968 - RNA, 19 nt, Artificial Sequence
  Description of Artificial Sequence: Synthetic oligonucleotide
  Sense strand starting at position 707 of SEQ ID NO: 1888228
guaguaaacuuccuauaau

SEQ ID NO: 2519969 - RNA, 19 nt, Artificial Sequence
  Description of Artificial Sequence: Synthetic oligonucleotide
  Antisense strand to SEQ ID NO: 2519968
auuauaggaaguuuacuac

SEQ ID NO: 2519970 - RNA, 19 nt, Artificial Sequence
  Description of Artificial Sequence: Synthetic oligonucleotide
  Sense strand starting at position 737 of SEQ ID NO: 1888228
gccuaagacuuccugagaa

SEQ ID NO: 2519971 - RNA, 19 nt, Artificial Sequence
  Description of Artificial Sequence: Synthetic oligonucleotide
  Antisense strand to SEQ ID NO: 2519970
uucucaggaagucuuaggc

SEQ ID NO: 2519972 - RNA, 19 nt, Artificial Sequence
  Description of Artificial Sequence: Synthetic oligonucleotide
  Sense strand starting at position 878 of SEQ ID NO: 1888228
uuuacugaggccugaacuu

SEQ ID NO: 2519973 - RNA, 19 nt, Artificial Sequence
  Description of Artificial Sequence: Synthetic oligonucleotide
  Antisense strand to SEQ ID NO: 2519972
aaguucaggccucaguaaa

SEQ ID NO: 2519974 - RNA, 19 nt, Artificial Sequence
  Description of Artificial Sequence: Synthetic oligonucleotide
  Sense strand starting at position 951 of SEQ ID NO: 1888228
gagaaagguuucucaaacg

SEQ ID NO: 2519975 - RNA, 19 nt, Artificial Sequence
  Description of Artificial Sequence: Synthetic oligonucleotide
  Antisense strand to SEQ ID NO: 2519974
cguuugagaaaccuuucuc

SEQ ID NO: 2519976 - RNA, 19 nt, Artificial Sequence
  Description of Artificial Sequence: Synthetic oligonucleotide
  Sense strand starting at position 1080 of SEQ ID NO: 1888228
ucaugagagccacauaugu

SEQ ID NO: 2519977 - RNA, 19 nt, Artificial Sequence
  Description of Artificial Sequence: Synthetic oligonucleotide
  Antisense strand to SEQ ID NO: 2519976
acauauguggcucucauga

SEQ ID NO: 2519978 - RNA, 19 nt, Artificial Sequence
  Description of Artificial Sequence: Synthetic oligonucleotide
  Sense strand starting at position 1284 of SEQ ID NO: 1888228
acuauacucguguguauuu

SEQ ID NO: 2519979 - RNA, 19 nt, Artificial Sequence
  Description of Artificial Sequence: Synthetic oligonucleotide
  Antisense strand to SEQ ID NO: 2519978
aaauacacacgaguauagu

SEQ ID NO: 2519980 - RNA, 19 nt, Artificial Sequence
  Description of Artificial Sequence: Synthetic oligonucleotide
  Sense strand starting at position 1421 of SEQ ID NO: 1888228
cugcaaggcccugaugauu

SEQ ID NO: 2519981 - RNA, 19 nt, Artificial Sequence
  Description of Artificial Sequence: Synthetic oligonucleotide
  Antisense strand to SEQ ID NO: 2519980
aaucaucagggccuugcag

SEQ ID NO: 2519982 - RNA, 19 nt, Artificial Sequence
  Description of Artificial Sequence: Synthetic oligonucleotide
  Sense strand starting at position 1527 of SEQ ID NO: 1888228
ugccgaaaugaaugcauga

SEQ ID NO: 2519983 - RNA, 19 nt, Artificial Sequence
  Description of Artificial Sequence: Synthetic oligonucleotide
  Antisense strand to SEQ ID NO: 2519982
ucaugcauucauuucggca

SEQ ID NO: 2519984 - RNA, 19 nt, Artificial Sequence
  Description of Artificial Sequence: Synthetic oligonucleotide
  Sense strand starting at position 2015 of SEQ ID NO: 1888228
uugugucuacuccaaagau

SEQ ID NO: 2519985 - RNA, 19 nt, Artificial Sequence
  Description of Artificial Sequence: Synthetic oligonucleotide
  Antisense strand to SEQ ID NO: 2519984
aucuuuggaguagacacaa

SEQ ID NO: 2519986 - RNA, 19 nt, Artificial Sequence
  Description of Artificial Sequence: Synthetic oligonucleotide
  Sense strand starting at position 2061 of SEQ ID NO: 1888228
ggccuaguucgcuugccau

SEQ ID NO: 2519987 - RNA, 19 nt, Artificial Sequence
  Description of Artificial Sequence: Synthetic oligonucleotide
  Antisense strand to SEQ ID NO: 2519986
auggcaagcgaacuaggcc

SEQ ID NO: 2519988 - RNA, 19 nt, Artificial Sequence
  Description of Artificial Sequence: Synthetic oligonucleotide
  Sense strand starting at position 2063 of SEQ ID NO: 1888228
ccuaguucgcuugccauua

SEQ ID NO: 2519989 - RNA, 19 nt, Artificial Sequence
  Description of Artificial Sequence: Synthetic oligonucleotide
  Antisense strand to SEQ ID NO: 2519988
uaauggcaagcgaacuagg

SEQ ID NO: 2519990 - RNA, 19 nt, Artificial Sequence
  Description of Artificial Sequence: Synthetic oligonucleotide
  Sense strand starting at position 2167 of SEQ ID NO: 1888228
aguugaagagcucgagaug

SEQ ID NO: 2519991 - RNA, 19 nt, Artificial Sequence
  Description of Artificial Sequence: Synthetic oligonucleotide
  Antisense strand to SEQ ID NO: 2519990
caucucgagcucuucaacu

SEQ ID NO: 2519992 - RNA, 19 nt, Artificial Sequence
  Description of Artificial Sequence: Synthetic oligonucleotide
  Sense strand starting at position 2168 of SEQ ID NO: 1888228
guugaagagcucgagauga

SEQ ID NO: 2519993 - RNA, 19 nt, Artificial Sequence
  Description of Artificial Sequence: Synthetic oligonucleotide
  Antisense strand to SEQ ID NO: 2519992
ucaucucgagcucuucaac

SEQ ID NO: 2519994 - RNA, 19 nt, Artificial Sequence
  Description of Artificial Sequence: Synthetic oligonucleotide
  Sense strand starting at position 2515 of SEQ ID NO: 1888228
gacauauaaugagugcuuu

SEQ ID NO: 2519995 - RNA, 19 nt, Artificial Sequence
  Description of Artificial Sequence: Synthetic oligonucleotide
  Antisense strand to SEQ ID NO: 2519994
aaagcacucauuauauguc

SEQ ID NO: 2519996 - RNA, 19 nt, Artificial Sequence
  Description of Artificial Sequence: Synthetic oligonucleotide
  Sense strand starting at position 2590 of SEQ ID NO: 1888228
ucguaagauugcucagaga

SEQ ID NO: 2519997 - RNA, 19 nt, Artificial Sequence
  Description of Artificial Sequence: Synthetic oligonucleotide
  Antisense strand to SEQ ID NO: 2519996
ucucugagcaaucuuacga

SEQ ID NO: 2519998 - RNA, 19 nt, Artificial Sequence
  Description of Artificial Sequence: Synthetic oligonucleotide
  Sense strand starting at position 2608 of SEQ ID NO: 1888228
aguuaagugcuguaauaca

SEQ ID NO: 2519999 - RNA, 19 nt, Artificial Sequence
  Description of Artificial Sequence: Synthetic oligonucleotide
  Antisense strand to SEQ ID NO: 2519998
uguauuacagcacuuaacu

SEQ ID NO: 2520000 - RNA, 19 nt, Artificial Sequence
  Description of Artificial Sequence: Synthetic oligonucleotide
  Sense strand starting at position 2613 of SEQ ID NO: 1888228
agugcuguaauacaucgaa

SEQ ID NO: 2520001 - RNA, 19 nt, Artificial Sequence
  Description of Artificial Sequence: Synthetic oligonucleotide
  Antisense strand to SEQ ID NO: 2520000
uucgauguauuacagcacu

SEQ ID NO: 2520002 - RNA, 19 nt, Artificial Sequence
  Description of Artificial Sequence: Synthetic oligonucleotide
  Sense strand starting at position 2937 of SEQ ID NO: 1888228
uauuaacuggugugagacu

SEQ ID NO: 2520003 - RNA, 19 nt, Artificial Sequence
  Description of Artificial Sequence: Synthetic oligonucleotide
  Antisense strand to SEQ ID NO: 2520002
agucucacaccaguuaaua

SEQ ID NO: 2520004 - RNA, 19 nt, Artificial Sequence
  Description of Artificial Sequence: Synthetic oligonucleotide
  Sense strand starting at position 2948 of SEQ ID NO: 1888228
gugagacuuuaccuggaga

SEQ ID NO: 2520005 - RNA, 19 nt, Artificial Sequence
  Description of Artificial Sequence: Synthetic oligonucleotide
  Antisense strand to SEQ ID NO: 2520004
ucuccagguaaagucucac

SEQ ID NO: 2520006 - RNA, 19 nt, Artificial Sequence
  Description of Artificial Sequence: Synthetic oligonucleotide
  Sense strand starting at position 3004 of SEQ ID NO: 1888228
uuugaaggaugaucgaauu

SEQ ID NO: 2520007 - RNA, 19 nt, Artificial Sequence
  Description of Artificial Sequence: Synthetic oligonucleotide
  Antisense strand to SEQ ID NO: 2520006
aauucgaucauccuucaaa

SEQ ID NO: 2520008 - RNA, 19 nt, Artificial Sequence
  Description of Artificial Sequence: Synthetic oligonucleotide
  Sense strand starting at position 3039 of SEQ ID NO: 1888228
uuagcuaaaccugaguuga

SEQ ID NO: 2520009 - RNA, 19 nt, Artificial Sequence
  Description of Artificial Sequence: Synthetic oligonucleotide
  Antisense strand to SEQ ID NO: 2520008
ucaacucagguuuagcuaa

SEQ ID NO: 2520010 - RNA, 19 nt, Artificial Sequence
  Description of Artificial Sequence: Synthetic oligonucleotide
  Sense strand starting at position 3041 of SEQ ID NO: 1888228
agcuaaaccugaguugauu

SEQ ID NO: 2520011 - RNA, 19 nt, Artificial Sequence
  Description of Artificial Sequence: Synthetic oligonucleotide
  Antisense strand to SEQ ID NO: 2520010
aaucaacucagguuuagcu

SEQ ID NO: 2520012 - RNA, 19 nt, Artificial Sequence
  Description of Artificial Sequence: Synthetic oligonucleotide
  Sense strand starting at position 3073 of SEQ ID NO: 1888228
uuagaaugcuagucuuaca

SEQ ID NO: 2520013 - RNA, 19 nt, Artificial Sequence
  Description of Artificial Sequence: Synthetic oligonucleotide
  Antisense strand to SEQ ID NO: 2520012
uguaagacuagcauucuaa

SEQ ID NO: 2520014 - RNA, 19 nt, Artificial Sequence
  Description of Artificial Sequence: Synthetic oligonucleotide
  Sense strand starting at position 3184 of SEQ ID NO: 1888228
agggaaucuuucuuucuua

SEQ ID NO: 2520015 - RNA, 19 nt, Artificial Sequence
  Description of Artificial Sequence: Synthetic oligonucleotide
  Antisense strand to SEQ ID NO: 2520014
uaagaaagaaagauucccu

SEQ ID NO: 2520016 - RNA, 19 nt, Artificial Sequence
  Description of Artificial Sequence: Synthetic oligonucleotide
  Sense strand starting at position 3185 of SEQ ID NO: 1888228
gggaaucuuucuuucuuac

SEQ ID NO: 2520017 - RNA, 19 nt, Artificial Sequence
  Description of Artificial Sequence: Synthetic oligonucleotide
  Antisense strand to SEQ ID NO: 2520016
guaagaaagaaagauuccc

SEQ ID NO: 2520018 - RNA, 19 nt, Artificial Sequence
  Description of Artificial Sequence: Synthetic oligonucleotide
  Sense strand starting at position 3578 of SEQ ID NO: 1888228
uccauaaagcccugggauu

SEQ ID NO: 2520019 - RNA, 19 nt, Artificial Sequence
  Description of Artificial Sequence: Synthetic oligonucleotide
  Antisense strand to SEQ ID NO: 2520018
aaucccagggcuuuaugga

SEQ ID NO: 2520020 - RNA, 19 nt, Artificial Sequence
  Description of Artificial Sequence: Synthetic oligonucleotide
  Sense strand starting at position 3600 of SEQ ID NO: 1888228
cuuugucuaccuuaaguuu

SEQ ID NO: 2520021 - RNA, 19 nt, Artificial Sequence
  Description of Artificial Sequence: Synthetic oligonucleotide
  Antisense strand to SEQ ID NO: 2520020
aaacuuaagguagacaaag

SEQ ID NO: 2520022 - RNA, 19 nt, Artificial Sequence
  Description of Artificial Sequence: Synthetic oligonucleotide
  Sense strand starting at position 3685 of SEQ ID NO: 1888228
ccagaauacguuggagaga

SEQ ID NO: 2520023 - RNA, 19 nt, Artificial Sequence
  Description of Artificial Sequence: Synthetic oligonucleotide
  Antisense strand to SEQ ID NO: 2520022
ucucuccaacguauucugg

SEQ ID NO: 2520024 - RNA, 19 nt, Artificial Sequence
  Description of Artificial Sequence: Synthetic oligonucleotide
  Sense strand starting at position 3687 of SEQ ID NO: 1888228
agaauacguuggagagaug

SEQ ID NO: 2520025 - RNA, 19 nt, Artificial Sequence
  Description of Artificial Sequence: Synthetic oligonucleotide
  Antisense strand to SEQ ID NO: 2520024
caucucuccaacguauucu

SEQ ID NO: 2520026 - RNA, 19 nt, Artificial Sequence
  Description of Artificial Sequence: Synthetic oligonucleotide
  Sense strand starting at position 3709 of SEQ ID NO: 1888228
uuagacuuguuaccucuau

SEQ ID NO: 2520027 - RNA, 19 nt, Artificial Sequence
  Description of Artificial Sequence: Synthetic oligonucleotide
  Antisense strand to SEQ ID NO: 2520026
auagagguaacaagucuaa

SEQ ID NO: 2520028 - RNA, 19 nt, Artificial Sequence
  Description of Artificial Sequence: Synthetic oligonucleotide
  Sense strand starting at position 3933 of SEQ ID NO: 1888228
uugcaaaggacccgagauu

SEQ ID NO: 2520029 - RNA, 19 nt, Artificial Sequence
  Description of Artificial Sequence: Synthetic oligonucleotide
  Antisense strand to SEQ ID NO: 2520028
aaucucggguccuuugcaa

SEQ ID NO: 2520030 - RNA, 19 nt, Artificial Sequence
  Description of Artificial Sequence: Synthetic oligonucleotide
  Sense strand starting at position 43 of SEQ ID NO: 1888229
ccaguaacccuacagagua

SEQ ID NO: 2520031 - RNA, 19 nt, Artificial Sequence
  Description of Artificial Sequence: Synthetic oligonucleotide
  Antisense strand to SEQ ID NO: 2520030
uacucuguaggguuacugg

SEQ ID NO: 2520032 - RNA, 19 nt, Artificial Sequence
  Description of Artificial Sequence: Synthetic oligonucleotide
  Sense strand starting at position 114 of SEQ ID NO: 1888229
agauaacuugcccaaguca

SEQ ID NO: 2520033 - RNA, 19 nt, Artificial Sequence
  Description of Artificial Sequence: Synthetic oligonucleotide
  Antisense strand to SEQ ID NO: 2520032
ugacuugggcaaguuaucu

SEQ ID NO: 2520034 - RNA, 19 nt, Artificial Sequence
  Description of Artificial Sequence: Synthetic oligonucleotide
  Sense strand starting at position 139 of SEQ ID NO: 1888229
caggaaauaugggaaccaa

SEQ ID NO: 2520035 - RNA, 19 nt, Artificial Sequence
  Description of Artificial Sequence: Synthetic oligonucleotide
  Antisense strand to SEQ ID NO: 2520034
uugguucccauauuuccug

SEQ ID NO: 2520036 - RNA, 19 nt, Artificial Sequence
  Description of Artificial Sequence: Synthetic oligonucleotide
  Sense strand starting at position 157 of SEQ ID NO: 1888229
aucaaaugccugcagucaa

SEQ ID NO: 2520037 - RNA, 19 nt, Artificial Sequence
  Description of Artificial Sequence: Synthetic oligonucleotide
  Antisense strand to SEQ ID NO: 2520036
uugacugcaggcauuugau

SEQ ID NO: 2520038 - RNA, 19 nt, Artificial Sequence
  Description of Artificial Sequence: Synthetic oligonucleotide
  Sense strand starting at position 299 of SEQ ID NO: 1888229
cuagacuccuguguacuaa

SEQ ID NO: 2520039 - RNA, 19 nt, Artificial Sequence
  Description of Artificial Sequence: Synthetic oligonucleotide
  Antisense strand to SEQ ID NO: 2520038
uuaguacacaggagucuag

SEQ ID NO: 2520040 - RNA, 19 nt, Artificial Sequence
  Description of Artificial Sequence: Synthetic oligonucleotide
  Sense strand starting at position 383 of SEQ ID NO: 1888229
uucccauaguaguugauua

SEQ ID NO: 2520041 - RNA, 19 nt, Artificial Sequence
  Description of Artificial Sequence: Synthetic oligonucleotide
  Antisense strand to SEQ ID NO: 2520040
uaaucaacuacuaugggaa

SEQ ID NO: 2520042 - RNA, 19 nt, Artificial Sequence
  Description of Artificial Sequence: Synthetic oligonucleotide
  Sense strand starting at position 387 of SEQ ID NO: 1888229
cauaguaguugauuaggua

SEQ ID NO: 2520043 - RNA, 19 nt, Artificial Sequence
  Description of Artificial Sequence: Synthetic oligonucleotide
  Antisense strand to SEQ ID NO: 2520042
uaccuaaucaacuacuaug

SEQ ID NO: 2520044 - RNA, 19 nt, Artificial Sequence
  Description of Artificial Sequence: Synthetic oligonucleotide
  Sense strand starting at position 388 of SEQ ID NO: 1888229
auaguaguugauuagguaa

SEQ ID NO: 2520045 - RNA, 19 nt, Artificial Sequence
  Description of Artificial Sequence: Synthetic oligonucleotide
  Antisense strand to SEQ ID NO: 2520044
uuaccuaaucaacuacuau

SEQ ID NO: 2520046 - RNA, 19 nt, Artificial Sequence
  Description of Artificial Sequence: Synthetic oligonucleotide
  Sense strand starting at position 722 of SEQ ID NO: 1888229
cagguaaugugaucuauaa

SEQ ID NO: 2520047 - RNA, 19 nt, Artificial Sequence
  Description of Artificial Sequence: Synthetic oligonucleotide
  Antisense strand to SEQ ID NO: 2520046
uuauagaucacauuaccug

SEQ ID NO: 2520048 - RNA, 19 nt, Artificial Sequence
  Description of Artificial Sequence: Synthetic oligonucleotide
  Sense strand starting at position 777 of SEQ ID NO: 1888229
uggucacacauuggugaaa

SEQ ID NO: 2520049 - RNA, 19 nt, Artificial Sequence
  Description of Artificial Sequence: Synthetic oligonucleotide
  Antisense strand to SEQ ID NO: 2520048
uuucaccaaugugugacca

SEQ ID NO: 2520050 - RNA, 19 nt, Artificial Sequence
  Description of Artificial Sequence: Synthetic oligonucleotide
  Sense strand starting at position 908 of SEQ ID NO: 1888229
gcugaagugaucugaccaa

SEQ ID NO: 2520051 - RNA, 19 nt, Artificial Sequence
  Description of Artificial Sequence: Synthetic oligonucleotide
  Antisense strand to SEQ ID NO: 2520050
uuggucagaucacuucagc

SEQ ID NO: 2520052 - RNA, 19 nt, Artificial Sequence
  Description of Artificial Sequence: Synthetic oligonucleotide
  Sense strand starting at position 915 of SEQ ID NO: 1888229
ugaucugaccaaggucaau

SEQ ID NO: 2520053 - RNA, 19 nt, Artificial Sequence
  Description of Artificial Sequence: Synthetic oligonucleotide
  Antisense strand to SEQ ID NO: 2520052
auugaccuuggucagauca

SEQ ID NO: 2520054 - RNA, 19 nt, Artificial Sequence
  Description of Artificial Sequence: Synthetic oligonucleotide
  Sense strand starting at position 932 of SEQ ID NO: 1888229
auugcuagugaguaguaaa

SEQ ID NO: 2520055 - RNA, 19 nt, Artificial Sequence
  Description of Artificial Sequence: Synthetic oligonucleotide
  Antisense strand to SEQ ID NO: 2520054
uuuacuacucacuagcaau

SEQ ID NO: 2520056 - RNA, 19 nt, Artificial Sequence
  Description of Artificial Sequence: Synthetic oligonucleotide
  Sense strand starting at position 957 of SEQ ID NO: 1888229
gccaguggccucgaauuua

SEQ ID NO: 2520057 - RNA, 19 nt, Artificial Sequence
  Description of Artificial Sequence: Synthetic oligonucleotide
  Antisense strand to SEQ ID NO: 2520056
uaaauucgaggccacuggc

SEQ ID NO: 2520058 - RNA, 19 nt, Artificial Sequence
  Description of Artificial Sequence: Synthetic oligonucleotide
  Sense strand starting at position 1023 of SEQ ID NO: 1888229
cucucacuucuccagggau

SEQ ID NO: 2520059 - RNA, 19 nt, Artificial Sequence
  Description of Artificial Sequence: Synthetic oligonucleotide
  Antisense strand to SEQ ID NO: 2520058
aucccuggagaagugagag

SEQ ID NO: 2520060 - RNA, 19 nt, Artificial Sequence
  Description of Artificial Sequence: Synthetic oligonucleotide
  Sense strand starting at position 1025 of SEQ ID NO: 1888229
cucacuucuccagggauuc

SEQ ID NO: 2520061 - RNA, 19 nt, Artificial Sequence
  Description of Artificial Sequence: Synthetic oligonucleotide
  Antisense strand to SEQ ID NO: 2520060
gaaucccuggagaagugag

SEQ ID NO: 2520062 - RNA, 19 nt, Artificial Sequence
  Description of Artificial Sequence: Synthetic oligonucleotide
  Sense strand starting at position 1046 of SEQ ID NO: 1888229
ccauuucuuugcgugauca

SEQ ID NO: 2520063 - RNA, 19 nt, Artificial Sequence
  Description of Artificial Sequence: Synthetic oligonucleotide
  Antisense strand to SEQ ID NO: 2520062
ugaucacgcaaagaaaugg

SEQ ID NO: 2520064 - RNA, 19 nt, Artificial Sequence
  Description of Artificial Sequence: Synthetic oligonucleotide
  Sense strand starting at position 1047 of SEQ ID NO: 1888229
cauuucuuugcgugaucac

SEQ ID NO: 2520065 - RNA, 19 nt, Artificial Sequence
  Description of Artificial Sequence: Synthetic oligonucleotide
  Antisense strand to SEQ ID NO: 2520064
gugaucacgcaaagaaaug

SEQ ID NO: 2520066 - RNA, 19 nt, Artificial Sequence
  Description of Artificial Sequence: Synthetic oligonucleotide
  Sense strand starting at position 1056 of SEQ ID NO: 1888229
gcgugaucacgcccaucau

SEQ ID NO: 2520067 - RNA, 19 nt, Artificial Sequence
  Description of Artificial Sequence: Synthetic oligonucleotide
  Antisense strand to SEQ ID NO: 2520066
augaugggcgugaucacgc

SEQ ID NO: 2520068 - RNA, 19 nt, Artificial Sequence
  Description of Artificial Sequence: Synthetic oligonucleotide
  Sense strand starting at position 1323 of SEQ ID NO: 1888229
auaaguguaagggaugcua

SEQ ID NO: 2520069 - RNA, 19 nt, Artificial Sequence
  Description of Artificial Sequence: Synthetic oligonucleotide
  Antisense strand to SEQ ID NO: 2520068
uagcaucccuuacacuuau

SEQ ID NO: 2520070 - RNA, 19 nt, Artificial Sequence
  Description of Artificial Sequence: Synthetic oligonucleotide
  Sense strand starting at position 1344 of SEQ ID NO: 1888229
gucgaaucucaauggaaag

SEQ ID NO: 2520071 - RNA, 19 nt, Artificial Sequence
  Description of Artificial Sequence: Synthetic oligonucleotide
  Antisense strand to SEQ ID NO: 2520070
cuuuccauugagauucgac

SEQ ID NO: 2520072 - RNA, 19 nt, Artificial Sequence
  Description of Artificial Sequence: Synthetic oligonucleotide
  Sense strand starting at position 1431 of SEQ ID NO: 1888229
ggguguugaguugauauuc

SEQ ID NO: 2520073 - RNA, 19 nt, Artificial Sequence
  Description of Artificial Sequence: Synthetic oligonucleotide
  Antisense strand to SEQ ID NO: 2520072
gaauaucaacucaacaccc

SEQ ID NO: 2520074 - RNA, 19 nt, Artificial Sequence
  Description of Artificial Sequence: Synthetic oligonucleotide
  Sense strand starting at position 1451 of SEQ ID NO: 1888229
aaugguaucguaggaagga

SEQ ID NO: 2520075 - RNA, 19 nt, Artificial Sequence
  Description of Artificial Sequence: Synthetic oligonucleotide
  Antisense strand to SEQ ID NO: 2520074
uccuuccuacgauaccauu

SEQ ID NO: 2520076 - RNA, 19 nt, Artificial Sequence
  Description of Artificial Sequence: Synthetic oligonucleotide
  Sense strand starting at position 1524 of SEQ ID NO: 1888229
ucccuucugaccgaaggua

SEQ ID NO: 2520077 - RNA, 19 nt, Artificial Sequence
  Description of Artificial Sequence: Synthetic oligonucleotide
  Antisense strand to SEQ ID NO: 2520076
uaccuucggucagaaggga

SEQ ID NO: 2520078 - RNA, 19 nt, Artificial Sequence
  Description of Artificial Sequence: Synthetic oligonucleotide
  Sense strand starting at position 1684 of SEQ ID NO: 1888229
gaaaguuugagggaugugu

SEQ ID NO: 2520079 - RNA, 19 nt, Artificial Sequence
  Description of Artificial Sequence: Synthetic oligonucleotide
  Antisense strand to SEQ ID NO: 2520078
acacaucccucaaacuuuc

SEQ ID NO: 2520080 - RNA, 19 nt, Artificial Sequence
  Description of Artificial Sequence: Synthetic oligonucleotide
  Sense strand starting at position 1686 of SEQ ID NO: 1888229
aaguuugagggauguguca

SEQ ID NO: 2520081 - RNA, 19 nt, Artificial Sequence
  Description of Artificial Sequence: Synthetic oligonucleotide
  Antisense strand to SEQ ID NO: 2520080
ugacacaucccucaaacuu

SEQ ID NO: 2520082 - RNA, 19 nt, Artificial Sequence
  Description of Artificial Sequence: Synthetic oligonucleotide
  Sense strand starting at position 1743 of SEQ ID NO: 1888229
acaggaaggcuccggaaua

SEQ ID NO: 2520083 - RNA, 19 nt, Artificial Sequence
  Description of Artificial Sequence: Synthetic oligonucleotide
  Antisense strand to SEQ ID NO: 2520082
uauuccggagccuuccugu

SEQ ID NO: 2520084 - RNA, 19 nt, Artificial Sequence
  Description of Artificial Sequence: Synthetic oligonucleotide
  Sense strand starting at position 2415 of SEQ ID NO: 1888229
gugaucucugggcaggaca

SEQ ID NO: 2520085 - RNA, 19 nt, Artificial Sequence
  Description of Artificial Sequence: Synthetic oligonucleotide
  Antisense strand to SEQ ID NO: 2520084
uguccugcccagagaucac

SEQ ID NO: 2520086 - RNA, 19 nt, Artificial Sequence
  Description of Artificial Sequence: Synthetic oligonucleotide
  Sense strand starting at position 2658 of SEQ ID NO: 1888229
uuuccuuaaguguagaaug

SEQ ID NO: 2520087 - RNA, 19 nt, Artificial Sequence
  Description of Artificial Sequence: Synthetic oligonucleotide
  Antisense strand to SEQ ID NO: 2520086
cauucuacacuuaaggaaa

SEQ ID NO: 2520088 - RNA, 19 nt, Artificial Sequence
  Description of Artificial Sequence: Synthetic oligonucleotide
  Sense strand starting at position 2745 of SEQ ID NO: 1888229
auauuaagugcucaguaac

SEQ ID NO: 2520089 - RNA, 19 nt, Artificial Sequence
  Description of Artificial Sequence: Synthetic oligonucleotide
  Antisense strand to SEQ ID NO: 2520088
guuacugagcacuuaauau

SEQ ID NO: 2520090 - RNA, 19 nt, Artificial Sequence
  Description of Artificial Sequence: Synthetic oligonucleotide
  Sense strand starting at position 2748 of SEQ ID NO: 1888229
uuaagugcucaguaacuag

SEQ ID NO: 2520091 - RNA, 19 nt, Artificial Sequence
  Description of Artificial Sequence: Synthetic oligonucleotide
  Antisense strand to SEQ ID NO: 2520090
cuaguuacugagcacuuaa

SEQ ID NO: 2520092 - RNA, 19 nt, Artificial Sequence
  Description of Artificial Sequence: Synthetic oligonucleotide
  Sense strand starting at position 2793 of SEQ ID NO: 1888229
uccaauugcgcauaaggaa

SEQ ID NO: 2520093 - RNA, 19 nt, Artificial Sequence
  Description of Artificial Sequence: Synthetic oligonucleotide
  Antisense strand to SEQ ID NO: 2520092
uuccuuaugcgcaauugga

SEQ ID NO: 2520094 - RNA, 19 nt, Artificial Sequence
  Description of Artificial Sequence: Synthetic oligonucleotide
  Sense strand starting at position 2913 of SEQ ID NO: 1888229
uugccauaucccuagauug

SEQ ID NO: 2520095 - RNA, 19 nt, Artificial Sequence
  Description of Artificial Sequence: Synthetic oligonucleotide
  Antisense strand to SEQ ID NO: 2520094
caaucuagggauauggcaa

SEQ ID NO: 2520096 - RNA, 19 nt, Artificial Sequence
  Description of Artificial Sequence: Synthetic oligonucleotide
  Sense strand starting at position 2915 of SEQ ID NO: 1888229
gccauaucccuagauugua

SEQ ID NO: 2520097 - RNA, 19 nt, Artificial Sequence
  Description of Artificial Sequence: Synthetic oligonucleotide
  Antisense strand to SEQ ID NO: 2520096
uacaaucuagggauauggc

SEQ ID NO: 2520098 - RNA, 19 nt, Artificial Sequence
  Description of Artificial Sequence: Synthetic oligonucleotide
  Sense strand starting at position 3030 of SEQ ID NO: 1888229
acuugacacuauguguaaa

SEQ ID NO: 2520099 - RNA, 19 nt, Artificial Sequence
  Description of Artificial Sequence: Synthetic oligonucleotide
  Antisense strand to SEQ ID NO: 2520098
uuuacacauagugucaagu

SEQ ID NO: 2520100 - RNA, 19 nt, Artificial Sequence
  Description of Artificial Sequence: Synthetic oligonucleotide
  Sense strand starting at position 3032 of SEQ ID NO: 1888229
uugacacuauguguaaauu

SEQ ID NO: 2520101 - RNA, 19 nt, Artificial Sequence
  Description of Artificial Sequence: Synthetic oligonucleotide
  Antisense strand to SEQ ID NO: 2520100
aauuuacacauagugucaa

SEQ ID NO: 2520102 - RNA, 19 nt, Artificial Sequence
  Description of Artificial Sequence: Synthetic oligonucleotide
  Sense strand starting at position 3042 of SEQ ID NO: 1888229
guguaaauuguagagcuga

SEQ ID NO: 2520103 - RNA, 19 nt, Artificial Sequence
  Description of Artificial Sequence: Synthetic oligonucleotide
  Antisense strand to SEQ ID NO: 2520102
ucagcucuacaauuuacac

SEQ ID NO: 2520104 - RNA, 19 nt, Artificial Sequence
  Description of Artificial Sequence: Synthetic oligonucleotide
  Sense strand starting at position 3162 of SEQ ID NO: 1888229
cugguuucucuauguauuu

SEQ ID NO: 2520105 - RNA, 19 nt, Artificial Sequence
  Description of Artificial Sequence: Synthetic oligonucleotide
  Antisense strand to SEQ ID NO: 2520104
aaauacauagagaaaccag

SEQ ID NO: 2520106 - RNA, 19 nt, Artificial Sequence
  Description of Artificial Sequence: Synthetic oligonucleotide
  Sense strand starting at position 3601 of SEQ ID NO: 1888229
gaaagucuuugaguaguca

SEQ ID NO: 2520107 - RNA, 19 nt, Artificial Sequence
  Description of Artificial Sequence: Synthetic oligonucleotide
  Antisense strand to SEQ ID NO: 2520106
ugacuacucaaagacuuuc

SEQ ID NO: 2520108 - RNA, 19 nt, Artificial Sequence
  Description of Artificial Sequence: Synthetic oligonucleotide
  Sense strand starting at position 3888 of SEQ ID NO: 1888229
gccgaaauuuccucaaggu

SEQ ID NO: 2520109 - RNA, 19 nt, Artificial Sequence
  Description of Artificial Sequence: Synthetic oligonucleotide
  Antisense strand to SEQ ID NO: 2520108
accuugaggaaauuucggc

SEQ ID NO: 2520110 - RNA, 19 nt, Artificial Sequence
  Description of Artificial Sequence: Synthetic oligonucleotide
  Sense strand starting at position 305 of SEQ ID NO: 1888230
gcaagucaucacugcaaag

SEQ ID NO: 2520111 - RNA, 19 nt, Artificial Sequence
  Description of Artificial Sequence: Synthetic oligonucleotide
  Antisense strand to SEQ ID NO: 2520110
cuuugcagugaugacuugc

SEQ ID NO: 2520112 - RNA, 19 nt, Artificial Sequence
  Description of Artificial Sequence: Synthetic oligonucleotide
  Sense strand starting at position 500 of SEQ ID NO: 1888230
cagacacuugauuguguuu

SEQ ID NO: 2520113 - RNA, 19 nt, Artificial Sequence
  Description of Artificial Sequence: Synthetic oligonucleotide
  Antisense strand to SEQ ID NO: 2520112
aaacacaaucaagugucug

SEQ ID NO: 2520114 - RNA, 19 nt, Artificial Sequence
  Description of Artificial Sequence: Synthetic oligonucleotide
  Sense strand starting at position 506 of SEQ ID NO: 1888230
cuugauuguguuuaggcaa

SEQ ID NO: 2520115 - RNA, 19 nt, Artificial Sequence
  Description of Artificial Sequence: Synthetic oligonucleotide
  Antisense strand to SEQ ID NO: 2520114
uugccuaaacacaaucaag

SEQ ID NO: 2520116 - RNA, 19 nt, Artificial Sequence
  Description of Artificial Sequence: Synthetic oligonucleotide
  Sense strand starting at position 937 of SEQ ID NO: 1888230
uaaacaguuuggucuagca

SEQ ID NO: 2520117 - RNA, 19 nt, Artificial Sequence
  Description of Artificial Sequence: Synthetic oligonucleotide
  Antisense strand to SEQ ID NO: 2520116
ugcuagaccaaacuguuua

SEQ ID NO: 2520118 - RNA, 19 nt, Artificial Sequence
  Description of Artificial Sequence: Synthetic oligonucleotide
  Sense strand starting at position 939 of SEQ ID NO: 1888230
aacaguuuggucuagcaca

SEQ ID NO: 2520119 - RNA, 19 nt, Artificial Sequence
  Description of Artificial Sequence: Synthetic oligonucleotide
  Antisense strand to SEQ ID NO: 2520118
ugugcuagaccaaacuguu

SEQ ID NO: 2520120 - RNA, 19 nt, Artificial Sequence
  Description of Artificial Sequence: Synthetic oligonucleotide
  Sense strand starting at position 965 of SEQ ID NO: 1888230
gaccuugagcucugugaag

SEQ ID NO: 2520121 - RNA, 19 nt, Artificial Sequence
  Description of Artificial Sequence: Synthetic oligonucleotide
  Antisense strand to SEQ ID NO: 2520120
cuucacagagcucaagguc

SEQ ID NO: 2520122 - RNA, 19 nt, Artificial Sequence
  Description of Artificial Sequence: Synthetic oligonucleotide
  Sense strand starting at position 971 of SEQ ID NO: 1888230
gagcucugugaagacaauu

SEQ ID NO: 2520123 - RNA, 19 nt, Artificial Sequence
  Description of Artificial Sequence: Synthetic oligonucleotide
  Antisense strand to SEQ ID NO: 2520122
aauugucuucacagagcuc

SEQ ID NO: 2520124 - RNA, 19 nt, Artificial Sequence
  Description of Artificial Sequence: Synthetic oligonucleotide
  Sense strand starting at position 1101 of SEQ ID NO: 1888230
accacaucucucugugaca

SEQ ID NO: 2520125 - RNA, 19 nt, Artificial Sequence
  Description of Artificial Sequence: Synthetic oligonucleotide
  Antisense strand to SEQ ID NO: 2520124
ugucacagagagauguggu

SEQ ID NO: 2520126 - RNA, 19 nt, Artificial Sequence
  Description of Artificial Sequence: Synthetic oligonucleotide
  Sense strand starting at position 1414 of SEQ ID NO: 1888230
gcuuauuucuaauugcuag

SEQ ID NO: 2520127 - RNA, 19 nt, Artificial Sequence
  Description of Artificial Sequence: Synthetic oligonucleotide
  Antisense strand to SEQ ID NO: 2520126
cuagcaauuagaaauaagc

SEQ ID NO: 2520128 - RNA, 19 nt, Artificial Sequence
  Description of Artificial Sequence: Synthetic oligonucleotide
  Sense strand starting at position 1420 of SEQ ID NO: 1888230
uucuaauugcuagagcgau

SEQ ID NO: 2520129 - RNA, 19 nt, Artificial Sequence
  Description of Artificial Sequence: Synthetic oligonucleotide
  Antisense strand to SEQ ID NO: 2520128
aucgcucuagcaauuagaa

SEQ ID NO: 2520130 - RNA, 19 nt, Artificial Sequence
  Description of Artificial Sequence: Synthetic oligonucleotide
  Sense strand starting at position 1435 of SEQ ID NO: 1888230
cgauucuacccauggguca

SEQ ID NO: 2520131 - RNA, 19 nt, Artificial Sequence
  Description of Artificial Sequence: Synthetic oligonucleotide
  Antisense strand to SEQ ID NO: 2520130
ugacccauggguagaaucg

SEQ ID NO: 2520132 - RNA, 19 nt, Artificial Sequence
  Description of Artificial Sequence: Synthetic oligonucleotide
  Sense strand starting at position 1436 of SEQ ID NO: 1888230
gauucuacccaugggucaa

SEQ ID NO: 2520133 - RNA, 19 nt, Artificial Sequence
  Description of Artificial Sequence: Synthetic oligonucleotide
  Antisense strand to SEQ ID NO: 2520132
uugacccauggguagaauc

SEQ ID NO: 2520134 - RNA, 19 nt, Artificial Sequence
  Description of Artificial Sequence: Synthetic oligonucleotide
  Sense strand starting at position 2205 of SEQ ID NO: 1888230
augaguuacgggcagcaga

SEQ ID NO: 2520135 - RNA, 19 nt, Artificial Sequence
  Description of Artificial Sequence: Synthetic oligonucleotide
  Antisense strand to SEQ ID NO: 2520134
ucugcugcccguaacucau

SEQ ID NO: 2520136 - RNA, 19 nt, Artificial Sequence
  Description of Artificial Sequence: Synthetic oligonucleotide
  Sense strand starting at position 2706 of SEQ ID NO: 1888230
gagugaaucgcagcugcuu

SEQ ID NO: 2520137 - RNA, 19 nt, Artificial Sequence
  Description of Artificial Sequence: Synthetic oligonucleotide
  Antisense strand to SEQ ID NO: 2520136
aagcagcugcgauucacuc

SEQ ID NO: 2520138 - RNA, 19 nt, Artificial Sequence
  Description of Artificial Sequence: Synthetic oligonucleotide
  Sense strand starting at position 2754 of SEQ ID NO: 1888230
ucaggcgacucuuuagaaa

SEQ ID NO: 2520139 - RNA, 19 nt, Artificial Sequence
  Description of Artificial Sequence: Synthetic oligonucleotide
  Antisense strand to SEQ ID NO: 2520138
uuucuaaagagucgccuga

SEQ ID NO: 2520140 - RNA, 19 nt, Artificial Sequence
  Description of Artificial Sequence: Synthetic oligonucleotide
  Sense strand starting at position 2853 of SEQ ID NO: 1888230
uuuaaagagucauucgaag

SEQ ID NO: 2520141 - RNA, 19 nt, Artificial Sequence
  Description of Artificial Sequence: Synthetic oligonucleotide
  Antisense strand to SEQ ID NO: 2520140
cuucgaaugacucuuuaaa

SEQ ID NO: 2520142 - RNA, 19 nt, Artificial Sequence
  Description of Artificial Sequence: Synthetic oligonucleotide
  Sense strand starting at position 2996 of SEQ ID NO: 1888230
accuaaaugugguugguaa

SEQ ID NO: 2520143 - RNA, 19 nt, Artificial Sequence
  Description of Artificial Sequence: Synthetic oligonucleotide
  Antisense strand to SEQ ID NO: 2520142
uuaccaaccacauuuaggu

SEQ ID NO: 2520144 - RNA, 19 nt, Artificial Sequence
  Description of Artificial Sequence: Synthetic oligonucleotide
  Sense strand starting at position 2997 of SEQ ID NO: 1888230
ccuaaaugugguugguaaa

SEQ ID NO: 2520145 - RNA, 19 nt, Artificial Sequence
  Description of Artificial Sequence: Synthetic oligonucleotide
  Antisense strand to SEQ ID NO: 2520144
uuuaccaaccacauuuagg

SEQ ID NO: 2520146 - RNA, 19 nt, Artificial Sequence
  Description of Artificial Sequence: Synthetic oligonucleotide
  Sense strand starting at position 2998 of SEQ ID NO: 1888230
cuaaaugugguugguaaau

SEQ ID NO: 2520147 - RNA, 19 nt, Artificial Sequence
  Description of Artificial Sequence: Synthetic oligonucleotide
  Antisense strand to SEQ ID NO: 2520146
auuuaccaaccacauuuag

SEQ ID NO: 2520148 - RNA, 19 nt, Artificial Sequence
  Description of Artificial Sequence: Synthetic oligonucleotide
  Sense strand starting at position 3037 of SEQ ID NO: 1888230
augguuuacagaugugguu

SEQ ID NO: 2520149 - RNA, 19 nt, Artificial Sequence
  Description of Artificial Sequence: Synthetic oligonucleotide
  Antisense strand to SEQ ID NO: 2520148
aaccacaucuguaaaccau

SEQ ID NO: 2520150 - RNA, 19 nt, Artificial Sequence
  Description of Artificial Sequence: Synthetic oligonucleotide
  Sense strand starting at position 3039 of SEQ ID NO: 1888230
gguuuacagaugugguuga

SEQ ID NO: 2520151 - RNA, 19 nt, Artificial Sequence
  Description of Artificial Sequence: Synthetic oligonucleotide
  Antisense strand to SEQ ID NO: 2520150
ucaaccacaucuguaaacc

SEQ ID NO: 2520152 - RNA, 19 nt, Artificial Sequence
  Description of Artificial Sequence: Synthetic oligonucleotide
  Sense strand starting at position 3043 of SEQ ID NO: 1888230
uacagaugugguugaauuc

SEQ ID NO: 2520153 - RNA, 19 nt, Artificial Sequence
  Description of Artificial Sequence: Synthetic oligonucleotide
  Antisense strand to SEQ ID NO: 2520152
gaauucaaccacaucugua

SEQ ID NO: 2520154 - RNA, 19 nt, Artificial Sequence
  Description of Artificial Sequence: Synthetic oligonucleotide
  Sense strand starting at position 3062 of SEQ ID NO: 1888230
uguuacacaugucuacuua

SEQ ID NO: 2520155 - RNA, 19 nt, Artificial Sequence
  Description of Artificial Sequence: Synthetic oligonucleotide
  Antisense strand to SEQ ID NO: 2520154
uaaguagacauguguaaca

SEQ ID NO: 2520156 - RNA, 19 nt, Artificial Sequence
  Description of Artificial Sequence: Synthetic oligonucleotide
  Sense strand starting at position 3085 of SEQ ID NO: 1888230
ucagaaucguuauuccauu

SEQ ID NO: 2520157 - RNA, 19 nt, Artificial Sequence
  Description of Artificial Sequence: Synthetic oligonucleotide
  Antisense strand to SEQ ID NO: 2520156
aauggaauaacgauucuga

SEQ ID NO: 2520158 - RNA, 19 nt, Artificial Sequence
  Description of Artificial Sequence: Synthetic oligonucleotide
  Sense strand starting at position 3256 of SEQ ID NO: 1888230
uccugaaucuuccuggagu

SEQ ID NO: 2520159 - RNA, 19 nt, Artificial Sequence
  Description of Artificial Sequence: Synthetic oligonucleotide
  Antisense strand to SEQ ID NO: 2520158
acuccaggaagauucagga

SEQ ID NO: 2520160 - RNA, 19 nt, Artificial Sequence
  Description of Artificial Sequence: Synthetic oligonucleotide
  Sense strand starting at position 3259 of SEQ ID NO: 1888230
ugaaucuuccuggaguuac

SEQ ID NO: 2520161 - RNA, 19 nt, Artificial Sequence
  Description of Artificial Sequence: Synthetic oligonucleotide
  Antisense strand to SEQ ID NO: 2520160
guaacuccaggaagauuca

SEQ ID NO: 2520162 - RNA, 19 nt, Artificial Sequence
  Description of Artificial Sequence: Synthetic oligonucleotide
  Sense strand starting at position 3276 of SEQ ID NO: 1888230
acaggugcuuauccacuaa

SEQ ID NO: 2520163 - RNA, 19 nt, Artificial Sequence
  Description of Artificial Sequence: Synthetic oligonucleotide
  Antisense strand to SEQ ID NO: 2520162
uuaguggauaagcaccugu

SEQ ID NO: 2520164 - RNA, 19 nt, Artificial Sequence
  Description of Artificial Sequence: Synthetic oligonucleotide
  Sense strand starting at position 3324 of SEQ ID NO: 1888230
ugcauuaauggacagcauu

SEQ ID NO: 2520165 - RNA, 19 nt, Artificial Sequence
  Description of Artificial Sequence: Synthetic oligonucleotide
  Antisense strand to SEQ ID NO: 2520164
aaugcuguccauuaaugca

SEQ ID NO: 2520166 - RNA, 19 nt, Artificial Sequence
  Description of Artificial Sequence: Synthetic oligonucleotide
  Sense strand starting at position 3351 of SEQ ID NO: 1888230
uaggauugggugggcuaua

SEQ ID NO: 2520167 - RNA, 19 nt, Artificial Sequence
  Description of Artificial Sequence: Synthetic oligonucleotide
  Antisense strand to SEQ ID NO: 2520166
uauagcccacccaauccua

SEQ ID NO: 2520168 - RNA, 19 nt, Artificial Sequence
  Description of Artificial Sequence: Synthetic oligonucleotide
  Sense strand starting at position 3352 of SEQ ID NO: 1888230
aggauugggugggcuauaa

SEQ ID NO: 2520169 - RNA, 19 nt, Artificial Sequence
  Description of Artificial Sequence: Synthetic oligonucleotide
  Antisense strand to SEQ ID NO: 2520168
uuauagcccacccaauccu

SEQ ID NO: 2520170 - RNA, 19 nt, Artificial Sequence
  Description of Artificial Sequence: Synthetic oligonucleotide
  Sense strand starting at position 3644 of SEQ ID NO: 1888230
uagaaauaagaguguguug

SEQ ID NO: 2520171 - RNA, 19 nt, Artificial Sequence
  Description of Artificial Sequence: Synthetic oligonucleotide
  Antisense strand to SEQ ID NO: 2520170
caacacacucuuauuucua

SEQ ID NO: 2520172 - RNA, 19 nt, Artificial Sequence
  Description of Artificial Sequence: Synthetic oligonucleotide
  Sense strand starting at position 3697 of SEQ ID NO: 1888230
gucucagcucuacauacau

SEQ ID NO: 2520173 - RNA, 19 nt, Artificial Sequence
  Description of Artificial Sequence: Synthetic oligonucleotide
  Antisense strand to SEQ ID NO: 2520172
auguauguagagcugagac

SEQ ID NO: 2520174 - RNA, 19 nt, Artificial Sequence
  Description of Artificial Sequence: Synthetic oligonucleotide
  Sense strand starting at position 3861 of SEQ ID NO: 1888230
uggguccucugguuacaaa

SEQ ID NO: 2520175 - RNA, 19 nt, Artificial Sequence
  Description of Artificial Sequence: Synthetic oligonucleotide
  Antisense strand to SEQ ID NO: 2520174
uuuguaaccagaggaccca

SEQ ID NO: 2520176 - RNA, 19 nt, Artificial Sequence
  Description of Artificial Sequence: Synthetic oligonucleotide
  Sense strand starting at position 3942 of SEQ ID NO: 1888230
ugagauaaccaaugcuugu

SEQ ID NO: 2520177 - RNA, 19 nt, Artificial Sequence
  Description of Artificial Sequence: Synthetic oligonucleotide
  Antisense strand to SEQ ID NO: 2520176
acaagcauugguuaucuca

SEQ ID NO: 2520178 - RNA, 19 nt, Artificial Sequence
  Description of Artificial Sequence: Synthetic oligonucleotide
  Sense strand starting at position 3951 of SEQ ID NO: 1888230
caaugcuugugaucagaua

SEQ ID NO: 2520179 - RNA, 19 nt, Artificial Sequence
  Description of Artificial Sequence: Synthetic oligonucleotide
  Antisense strand to SEQ ID NO: 2520178
uaucugaucacaagcauug

SEQ ID NO: 2520180 - RNA, 19 nt, Artificial Sequence
  Description of Artificial Sequence: Synthetic oligonucleotide
  Sense strand starting at position 3952 of SEQ ID NO: 1888230
aaugcuugugaucagauau

SEQ ID NO: 2520181 - RNA, 19 nt, Artificial Sequence
  Description of Artificial Sequence: Synthetic oligonucleotide
  Antisense strand to SEQ ID NO: 2520180
auaucugaucacaagcauu

SEQ ID NO: 2520182 - RNA, 19 nt, Artificial Sequence
  Description of Artificial Sequence: Synthetic oligonucleotide
  Sense strand starting at position 3958 of SEQ ID NO: 1888230
ugugaucagauauggaugu

SEQ ID NO: 2520183 - RNA, 19 nt, Artificial Sequence
  Description of Artificial Sequence: Synthetic oligonucleotide
  Antisense strand to SEQ ID NO: 2520182
acauccauaucugaucaca

SEQ ID NO: 2520184 - RNA, 19 nt, Artificial Sequence
  Description of Artificial Sequence: Synthetic oligonucleotide
  Sense strand starting at position 3962 of SEQ ID NO: 1888230
aucagauauggauguggua

SEQ ID NO: 2520185 - RNA, 19 nt, Artificial Sequence
  Description of Artificial Sequence: Synthetic oligonucleotide
  Antisense strand to SEQ ID NO: 2520184
uaccacauccauaucugau

SEQ ID NO: 2520186 - RNA, 19 nt, Artificial Sequence
  Description of Artificial Sequence: Synthetic oligonucleotide
  Sense strand starting at position 3964 of SEQ ID NO: 1888230
cagauauggaugugguaug

SEQ ID NO: 2520187 - RNA, 19 nt, Artificial Sequence
  Description of Artificial Sequence: Synthetic oligonucleotide
  Antisense strand to SEQ ID NO: 2520186
cauaccacauccauaucug

SEQ ID NO: 2520188 - RNA, 19 nt, Artificial Sequence
  Description of Artificial Sequence: Synthetic oligonucleotide
  Sense strand starting at position 3969 of SEQ ID NO: 1888230
auggaugugguaugaacau

SEQ ID NO: 2520189 - RNA, 19 nt, Artificial Sequence
  Description of Artificial Sequence: Synthetic oligonucleotide
  Antisense strand to SEQ ID NO: 2520188
auguucauaccacauccau

SEQ ID NO: 2520190 - RNA, 19 nt, Artificial Sequence
  Description of Artificial Sequence: Synthetic oligonucleotide
  Sense strand starting at position 26 of SEQ ID NO: 1888231
agaucuuugagaggccaua

SEQ ID NO: 2520191 - RNA, 19 nt, Artificial Sequence
  Description of Artificial Sequence: Synthetic oligonucleotide
  Antisense strand to SEQ ID NO: 2520190
uauggccucucaaagaucu

SEQ ID NO: 2520192 - RNA, 19 nt, Artificial Sequence
  Description of Artificial Sequence: Synthetic oligonucleotide
  Sense strand starting at position 115 of SEQ ID NO: 1888231
guguuaagguguugauaau

SEQ ID NO: 2520193 - RNA, 19 nt, Artificial Sequence
  Description of Artificial Sequence: Synthetic oligonucleotide
  Antisense strand to SEQ ID NO: 2520192
auuaucaacaccuuaacac

SEQ ID NO: 2520194 - RNA, 19 nt, Artificial Sequence
  Description of Artificial Sequence: Synthetic oligonucleotide
  Sense strand starting at position 116 of SEQ ID NO: 1888231
uguuaagguguugauaauu

SEQ ID NO: 2520195 - RNA, 19 nt, Artificial Sequence
  Description of Artificial Sequence: Synthetic oligonucleotide
  Antisense strand to SEQ ID NO: 2520194
aauuaucaacaccuuaaca

SEQ ID NO: 2520196 - RNA, 19 nt, Artificial Sequence
  Description of Artificial Sequence: Synthetic oligonucleotide
  Sense strand starting at position 124 of SEQ ID NO: 1888231
uguugauaauuccaagaaa

SEQ ID NO: 2520197 - RNA, 19 nt, Artificial Sequence
  Description of Artificial Sequence: Synthetic oligonucleotide
  Antisense strand to SEQ ID NO: 2520196
uuucuuggaauuaucaaca

SEQ ID NO: 2520198 - RNA, 19 nt, Artificial Sequence
  Description of Artificial Sequence: Synthetic oligonucleotide
  Sense strand starting at position 181 of SEQ ID NO: 1888231
ucugaaauccuagagcugu

SEQ ID NO: 2520199 - RNA, 19 nt, Artificial Sequence
  Description of Artificial Sequence: Synthetic oligonucleotide
  Antisense strand to SEQ ID NO: 2520198
acagcucuaggauuucaga

SEQ ID NO: 2520200 - RNA, 19 nt, Artificial Sequence
  Description of Artificial Sequence: Synthetic oligonucleotide
  Sense strand starting at position 224 of SEQ ID NO: 1888231
ucauuauggugaugucucu

SEQ ID NO: 2520201 - RNA, 19 nt, Artificial Sequence
  Description of Artificial Sequence: Synthetic oligonucleotide
  Antisense strand to SEQ ID NO: 2520200
agagacaucaccauaauga

SEQ ID NO: 2520202 - RNA, 19 nt, Artificial Sequence
  Description of Artificial Sequence: Synthetic oligonucleotide
  Sense strand starting at position 250 of SEQ ID NO: 1888231
uggugaccugcguaacuau

SEQ ID NO: 2520203 - RNA, 19 nt, Artificial Sequence
  Description of Artificial Sequence: Synthetic oligonucleotide
  Antisense strand to SEQ ID NO: 2520202
auaguuacgcaggucacca

SEQ ID NO: 2520204 - RNA, 19 nt, Artificial Sequence
  Description of Artificial Sequence: Synthetic oligonucleotide
  Sense strand starting at position 257 of SEQ ID NO: 1888231
cugcguaacuauugggaaa

SEQ ID NO: 2520205 - RNA, 19 nt, Artificial Sequence
  Description of Artificial Sequence: Synthetic oligonucleotide
  Antisense strand to SEQ ID NO: 2520204
uuucccaauaguuacgcag

SEQ ID NO: 2520206 - RNA, 19 nt, Artificial Sequence
  Description of Artificial Sequence: Synthetic oligonucleotide
  Sense strand starting at position 258 of SEQ ID NO: 1888231
ugcguaacuauugggaaau

SEQ ID NO: 2520207 - RNA, 19 nt, Artificial Sequence
  Description of Artificial Sequence: Synthetic oligonucleotide
  Antisense strand to SEQ ID NO: 2520206
auuucccaauaguuacgca

SEQ ID NO: 2520208 - RNA, 19 nt, Artificial Sequence
  Description of Artificial Sequence: Synthetic oligonucleotide
  Sense strand starting at position 259 of SEQ ID NO: 1888231
gcguaacuauugggaaauc

SEQ ID NO: 2520209 - RNA, 19 nt, Artificial Sequence
  Description of Artificial Sequence: Synthetic oligonucleotide
  Antisense strand to SEQ ID NO: 2520208
gauuucccaauaguuacgc

SEQ ID NO: 2520210 - RNA, 19 nt, Artificial Sequence
  Description of Artificial Sequence: Synthetic oligonucleotide
  Sense strand starting at position 260 of SEQ ID NO: 1888231
cguaacuauugggaaaucu

SEQ ID NO: 2520211 - RNA, 19 nt, Artificial Sequence
  Description of Artificial Sequence: Synthetic oligonucleotide
  Antisense strand to SEQ ID NO: 2520210
agauuucccaauaguuacg

SEQ ID NO: 2520212 - RNA, 19 nt, Artificial Sequence
  Description of Artificial Sequence: Synthetic oligonucleotide
  Sense strand starting at position 269 of SEQ ID NO: 1888231
ugggaaaucuaguuucuca

SEQ ID NO: 2520213 - RNA, 19 nt, Artificial Sequence
  Description of Artificial Sequence: Synthetic oligonucleotide
  Antisense strand to SEQ ID NO: 2520212
ugagaaacuagauuuccca

SEQ ID NO: 2520214 - RNA, 19 nt, Artificial Sequence
  Description of Artificial Sequence: Synthetic oligonucleotide
  Sense strand starting at position 567 of SEQ ID NO: 1888231
ccgcgucccgucuaucaua

SEQ ID NO: 2520215 - RNA, 19 nt, Artificial Sequence
  Description of Artificial Sequence: Synthetic oligonucleotide
  Antisense strand to SEQ ID NO: 2520214
uaugauagacgggacgcgg

SEQ ID NO: 2520216 - RNA, 19 nt, Artificial Sequence
  Description of Artificial Sequence: Synthetic oligonucleotide
  Sense strand starting at position 572 of SEQ ID NO: 1888231
ucccgucuaucauaaguuu

SEQ ID NO: 2520217 - RNA, 19 nt, Artificial Sequence
  Description of Artificial Sequence: Synthetic oligonucleotide
  Antisense strand to SEQ ID NO: 2520216
aaacuuaugauagacggga

SEQ ID NO: 2520218 - RNA, 19 nt, Artificial Sequence
  Description of Artificial Sequence: Synthetic oligonucleotide
  Sense strand starting at position 592 of SEQ ID NO: 1888231
auugaacauugccuaggua

SEQ ID NO: 2520219 - RNA, 19 nt, Artificial Sequence
  Description of Artificial Sequence: Synthetic oligonucleotide
  Antisense strand to SEQ ID NO: 2520218
uaccuaggcaauguucaau

SEQ ID NO: 2520220 - RNA, 19 nt, Artificial Sequence
  Description of Artificial Sequence: Synthetic oligonucleotide
  Sense strand starting at position 593 of SEQ ID NO: 1888231
uugaacauugccuagguau

SEQ ID NO: 2520221 - RNA, 19 nt, Artificial Sequence
  Description of Artificial Sequence: Synthetic oligonucleotide
  Antisense strand to SEQ ID NO: 2520220
auaccuaggcaauguucaa

SEQ ID NO: 2520222 - RNA, 19 nt, Artificial Sequence
  Description of Artificial Sequence: Synthetic oligonucleotide
  Sense strand starting at position 595 of SEQ ID NO: 1888231
gaacauugccuagguauca

SEQ ID NO: 2520223 - RNA, 19 nt, Artificial Sequence
  Description of Artificial Sequence: Synthetic oligonucleotide
  Antisense strand to SEQ ID NO: 2520222
ugauaccuaggcaauguuc

SEQ ID NO: 2520224 - RNA, 19 nt, Artificial Sequence
  Description of Artificial Sequence: Synthetic oligonucleotide
  Sense strand starting at position 605 of SEQ ID NO: 1888231
uagguaucaggauguguuu

SEQ ID NO: 2520225 - RNA, 19 nt, Artificial Sequence
  Description of Artificial Sequence: Synthetic oligonucleotide
  Antisense strand to SEQ ID NO: 2520224
aaacacauccugauaccua

SEQ ID NO: 2520226 - RNA, 19 nt, Artificial Sequence
  Description of Artificial Sequence: Synthetic oligonucleotide
  Sense strand starting at position 608 of SEQ ID NO: 1888231
guaucaggauguguuuaca

SEQ ID NO: 2520227 - RNA, 19 nt, Artificial Sequence
  Description of Artificial Sequence: Synthetic oligonucleotide
  Antisense strand to SEQ ID NO: 2520226
uguaaacacauccugauac

SEQ ID NO: 2520228 - RNA, 19 nt, Artificial Sequence
  Description of Artificial Sequence: Synthetic oligonucleotide
  Sense strand starting at position 717 of SEQ ID NO: 1888231
augugaacucaggaagugu

SEQ ID NO: 2520229 - RNA, 19 nt, Artificial Sequence
  Description of Artificial Sequence: Synthetic oligonucleotide
  Antisense strand to SEQ ID NO: 2520228
acacuuccugaguucacau

SEQ ID NO: 2520230 - RNA, 19 nt, Artificial Sequence
  Description of Artificial Sequence: Synthetic oligonucleotide
  Sense strand starting at position 999 of SEQ ID NO: 1888231
ggccuucgcucguccagaa

SEQ ID NO: 2520231 - RNA, 19 nt, Artificial Sequence
  Description of Artificial Sequence: Synthetic oligonucleotide
  Antisense strand to SEQ ID NO: 2520230
uucuggacgagcgaaggcc

SEQ ID NO: 2520232 - RNA, 19 nt, Artificial Sequence
  Description of Artificial Sequence: Synthetic oligonucleotide
  Sense strand starting at position 1441 of SEQ ID NO: 1888231
ucgccugcgguuugugaaa

SEQ ID NO: 2520233 - RNA, 19 nt, Artificial Sequence
  Description of Artificial Sequence: Synthetic oligonucleotide
  Antisense strand to SEQ ID NO: 2520232
uuucacaaaccgcaggcga

SEQ ID NO: 2520234 - RNA, 19 nt, Artificial Sequence
  Description of Artificial Sequence: Synthetic oligonucleotide
  Sense strand starting at position 1608 of SEQ ID NO: 1888231
ugggcaucauauuaucaua

SEQ ID NO: 2520235 - RNA, 19 nt, Artificial Sequence
  Description of Artificial Sequence: Synthetic oligonucleotide
  Antisense strand to SEQ ID NO: 2520234
uaugauaauaugaugccca

SEQ ID NO: 2520236 - RNA, 19 nt, Artificial Sequence
  Description of Artificial Sequence: Synthetic oligonucleotide
  Sense strand starting at position 1639 of SEQ ID NO: 1888231
uccggauucuuauggagcu

SEQ ID NO: 2520237 - RNA, 19 nt, Artificial Sequence
  Description of Artificial Sequence: Synthetic oligonucleotide
  Antisense strand to SEQ ID NO: 2520236
agcuccauaagaauccgga

SEQ ID NO: 2520238 - RNA, 19 nt, Artificial Sequence
  Description of Artificial Sequence: Synthetic oligonucleotide
  Sense strand starting at position 1640 of SEQ ID NO: 1888231
ccggauucuuauggagcuu

SEQ ID NO: 2520239 - RNA, 19 nt, Artificial Sequence
  Description of Artificial Sequence: Synthetic oligonucleotide
  Antisense strand to SEQ ID NO: 2520238
aagcuccauaagaauccgg

SEQ ID NO: 2520240 - RNA, 19 nt, Artificial Sequence
  Description of Artificial Sequence: Synthetic oligonucleotide
  Sense strand starting at position 1651 of SEQ ID NO: 1888231
uggagcuucgaacgagauu

SEQ ID NO: 2520241 - RNA, 19 nt, Artificial Sequence
  Description of Artificial Sequence: Synthetic oligonucleotide
  Antisense strand to SEQ ID NO: 2520240
aaucucguucgaagcucca

SEQ ID NO: 2520242 - RNA, 19 nt, Artificial Sequence
  Description of Artificial Sequence: Synthetic oligonucleotide
  Sense strand starting at position 1652 of SEQ ID NO: 1888231
ggagcuucgaacgagauua

SEQ ID NO: 2520243 - RNA, 19 nt, Artificial Sequence
  Description of Artificial Sequence: Synthetic oligonucleotide
  Antisense strand to SEQ ID NO: 2520242
uaaucucguucgaagcucc

SEQ ID NO: 2520244 - RNA, 19 nt, Artificial Sequence
  Description of Artificial Sequence: Synthetic oligonucleotide
  Sense strand starting at position 1654 of SEQ ID NO: 1888231
agcuucgaacgagauuaaa

SEQ ID NO: 2520245 - RNA, 19 nt, Artificial Sequence
  Description of Artificial Sequence: Synthetic oligonucleotide
  Antisense strand to SEQ ID NO: 2520244
uuuaaucucguucgaagcu

SEQ ID NO: 2520246 - RNA, 19 nt, Artificial Sequence
  Description of Artificial Sequence: Synthetic oligonucleotide
  Sense strand starting at position 1715 of SEQ ID NO: 1888231
agcauuugcuggucccaua

SEQ ID NO: 2520247 - RNA, 19 nt, Artificial Sequence
  Description of Artificial Sequence: Synthetic oligonucleotide
  Antisense strand to SEQ ID NO: 2520246
uaugggaccagcaaaugcu

SEQ ID NO: 2520248 - RNA, 19 nt, Artificial Sequence
  Description of Artificial Sequence: Synthetic oligonucleotide
  Sense strand starting at position 1797 of SEQ ID NO: 1888231
uuaagaagcuuuccugagu

SEQ ID NO: 2520249 - RNA, 19 nt, Artificial Sequence
  Description of Artificial Sequence: Synthetic oligonucleotide
  Antisense strand to SEQ ID NO: 2520248
acucaggaaagcuucuuaa

SEQ ID NO: 2520250 - RNA, 19 nt, Artificial Sequence
  Description of Artificial Sequence: Synthetic oligonucleotide
  Sense strand starting at position 1800 of SEQ ID NO: 1888231
agaagcuuuccugagucuu

SEQ ID NO: 2520251 - RNA, 19 nt, Artificial Sequence
  Description of Artificial Sequence: Synthetic oligonucleotide
  Antisense strand to SEQ ID NO: 2520250
aagacucaggaaagcuucu

SEQ ID NO: 2520252 - RNA, 19 nt, Artificial Sequence
  Description of Artificial Sequence: Synthetic oligonucleotide
  Sense strand starting at position 1825 of SEQ ID NO: 1888231
cccaaauucucuucuggga

SEQ ID NO: 2520253 - RNA, 19 nt, Artificial Sequence
  Description of Artificial Sequence: Synthetic oligonucleotide
  Antisense strand to SEQ ID NO: 2520252
ucccagaagagaauuuggg

SEQ ID NO: 2520254 - RNA, 19 nt, Artificial Sequence
  Description of Artificial Sequence: Synthetic oligonucleotide
  Sense strand starting at position 1895 of SEQ ID NO: 1888231
ggcaggugucucggaauga

SEQ ID NO: 2520255 - RNA, 19 nt, Artificial Sequence
  Description of Artificial Sequence: Synthetic oligonucleotide
  Antisense strand to SEQ ID NO: 2520254
ucauuccgagacaccugcc

SEQ ID NO: 2520256 - RNA, 19 nt, Artificial Sequence
  Description of Artificial Sequence: Synthetic oligonucleotide
  Sense strand starting at position 1896 of SEQ ID NO: 1888231
gcaggugucucggaaugag

SEQ ID NO: 2520257 - RNA, 19 nt, Artificial Sequence
  Description of Artificial Sequence: Synthetic oligonucleotide
  Antisense strand to SEQ ID NO: 2520256
cucauuccgagacaccugc

SEQ ID NO: 2520258 - RNA, 19 nt, Artificial Sequence
  Description of Artificial Sequence: Synthetic oligonucleotide
  Sense strand starting at position 1899 of SEQ ID NO: 1888231
ggugucucggaaugagcua

SEQ ID NO: 2520259 - RNA, 19 nt, Artificial Sequence
  Description of Artificial Sequence: Synthetic oligonucleotide
  Antisense strand to SEQ ID NO: 2520258
uagcucauuccgagacacc

SEQ ID NO: 2520260 - RNA, 19 nt, Artificial Sequence
  Description of Artificial Sequence: Synthetic oligonucleotide
  Sense strand starting at position 2099 of SEQ ID NO: 1888231
cagcgauugggagaugcaa

SEQ ID NO: 2520261 - RNA, 19 nt, Artificial Sequence
  Description of Artificial Sequence: Synthetic oligonucleotide
  Antisense strand to SEQ ID NO: 2520260
uugcaucucccaaucgcug

SEQ ID NO: 2520262 - RNA, 19 nt, Artificial Sequence
  Description of Artificial Sequence: Synthetic oligonucleotide
  Sense strand starting at position 2101 of SEQ ID NO: 1888231
gcgauugggagaugcaaau

SEQ ID NO: 2520263 - RNA, 19 nt, Artificial Sequence
  Description of Artificial Sequence: Synthetic oligonucleotide
  Antisense strand to SEQ ID NO: 2520262
auuugcaucucccaaucgc

SEQ ID NO: 2520264 - RNA, 19 nt, Artificial Sequence
  Description of Artificial Sequence: Synthetic oligonucleotide
  Sense strand starting at position 4 of SEQ ID NO: 1888232
gggucuagucuuuaccuca

SEQ ID NO: 2520265 - RNA, 19 nt, Artificial Sequence
  Description of Artificial Sequence: Synthetic oligonucleotide
  Antisense strand to SEQ ID NO: 2520264
ugagguaaagacuagaccc

SEQ ID NO: 2520266 - RNA, 19 nt, Artificial Sequence
  Description of Artificial Sequence: Synthetic oligonucleotide
  Sense strand starting at position 19 of SEQ ID NO: 1888232
cucauaguguugcuaggau

SEQ ID NO: 2520267 - RNA, 19 nt, Artificial Sequence
  Description of Artificial Sequence: Synthetic oligonucleotide
  Antisense strand to SEQ ID NO: 2520266
auccuagcaacacuaugag

SEQ ID NO: 2520268 - RNA, 19 nt, Artificial Sequence
  Description of Artificial Sequence: Synthetic oligonucleotide
  Sense strand starting at position 66 of SEQ ID NO: 1888232
ggcacauggugguuuaaag

SEQ ID NO: 2520269 - RNA, 19 nt, Artificial Sequence
  Description of Artificial Sequence: Synthetic oligonucleotide
  Antisense strand to SEQ ID NO: 2520268
cuuuaaaccaccaugugcc

SEQ ID NO: 2520270 - RNA, 19 nt, Artificial Sequence
  Description of Artificial Sequence: Synthetic oligonucleotide
  Sense strand starting at position 88 of SEQ ID NO: 1888232
gggcucugucugcuugcaa

SEQ ID NO: 2520271 - RNA, 19 nt, Artificial Sequence
  Description of Artificial Sequence: Synthetic oligonucleotide
  Antisense strand to SEQ ID NO: 2520270
uugcaagcagacagagccc

SEQ ID NO: 2520272 - RNA, 19 nt, Artificial Sequence
  Description of Artificial Sequence: Synthetic oligonucleotide
  Sense strand starting at position 304 of SEQ ID NO: 1888232
gacgaagcuggccaagaau

SEQ ID NO: 2520273 - RNA, 19 nt, Artificial Sequence
  Description of Artificial Sequence: Synthetic oligonucleotide
  Antisense strand to SEQ ID NO: 2520272
auucuuggccagcuucguc

SEQ ID NO: 2520274 - RNA, 19 nt, Artificial Sequence
  Description of Artificial Sequence: Synthetic oligonucleotide
  Sense strand starting at position 307 of SEQ ID NO: 1888232
gaagcuggccaagaauauu

SEQ ID NO: 2520275 - RNA, 19 nt, Artificial Sequence
  Description of Artificial Sequence: Synthetic oligonucleotide
  Antisense strand to SEQ ID NO: 2520274
aauauucuuggccagcuuc

SEQ ID NO: 2520276 - RNA, 19 nt, Artificial Sequence
  Description of Artificial Sequence: Synthetic oligonucleotide
  Sense strand starting at position 345 of SEQ ID NO: 1888232
uuaauuaccgaaugcuuau

SEQ ID NO: 2520277 - RNA, 19 nt, Artificial Sequence
  Description of Artificial Sequence: Synthetic oligonucleotide
  Antisense strand to SEQ ID NO: 2520276
auaagcauucgguaauuaa

SEQ ID NO: 2520278 - RNA, 19 nt, Artificial Sequence
  Description of Artificial Sequence: Synthetic oligonucleotide
  Sense strand starting at position 454 of SEQ ID NO: 1888232
agugaauacucaguacgug

SEQ ID NO: 2520279 - RNA, 19 nt, Artificial Sequence
  Description of Artificial Sequence: Synthetic oligonucleotide
  Antisense strand to SEQ ID NO: 2520278
cacguacugaguauucacu

SEQ ID NO: 2520280 - RNA, 19 nt, Artificial Sequence
  Description of Artificial Sequence: Synthetic oligonucleotide
  Sense strand starting at position 571 of SEQ ID NO: 1888232
guauucucccagcaauuag

SEQ ID NO: 2520281 - RNA, 19 nt, Artificial Sequence
  Description of Artificial Sequence: Synthetic oligonucleotide
  Antisense strand to SEQ ID NO: 2520280
cuaauugcugggagaauac

SEQ ID NO: 2520282 - RNA, 19 nt, Artificial Sequence
  Description of Artificial Sequence: Synthetic oligonucleotide
  Sense strand starting at position 620 of SEQ ID NO: 1888232
ggacuucggaaguggaaau

SEQ ID NO: 2520283 - RNA, 19 nt, Artificial Sequence
  Description of Artificial Sequence: Synthetic oligonucleotide
  Antisense strand to SEQ ID NO: 2520282
auuuccacuuccgaagucc

SEQ ID NO: 2520284 - RNA, 19 nt, Artificial Sequence
  Description of Artificial Sequence: Synthetic oligonucleotide
  Sense strand starting at position 1430 of SEQ ID NO: 1888232
ggagucagauucccaguua

SEQ ID NO: 2520285 - RNA, 19 nt, Artificial Sequence
  Description of Artificial Sequence: Synthetic oligonucleotide
  Antisense strand to SEQ ID NO: 2520284
uaacugggaaucugacucc

SEQ ID NO: 2520286 - RNA, 19 nt, Artificial Sequence
  Description of Artificial Sequence: Synthetic oligonucleotide
  Sense strand starting at position 1507 of SEQ ID NO: 1888232
agcauuuacugagagcuau

SEQ ID NO: 2520287 - RNA, 19 nt, Artificial Sequence
  Description of Artificial Sequence: Synthetic oligonucleotide
  Antisense strand to SEQ ID NO: 2520286
auagcucucaguaaaugcu

SEQ ID NO: 2520288 - RNA, 19 nt, Artificial Sequence
  Description of Artificial Sequence: Synthetic oligonucleotide
  Sense strand starting at position 1523 of SEQ ID NO: 1888232
uaucaauggcccgacguuu

SEQ ID NO: 2520289 - RNA, 19 nt, Artificial Sequence
  Description of Artificial Sequence: Synthetic oligonucleotide
  Antisense strand to SEQ ID NO: 2520288
aaacgucgggccauugaua

SEQ ID NO: 2520290 - RNA, 19 nt, Artificial Sequence
  Description of Artificial Sequence: Synthetic oligonucleotide
  Sense strand starting at position 1541 of SEQ ID NO: 1888232
uuucuagggcuguggauau

SEQ ID NO: 2520291 - RNA, 19 nt, Artificial Sequence
  Description of Artificial Sequence: Synthetic oligonucleotide
  Antisense strand to SEQ ID NO: 2520290
auauccacagcccuagaaa

SEQ ID NO: 2520292 - RNA, 19 nt, Artificial Sequence
  Description of Artificial Sequence: Synthetic oligonucleotide
  Sense strand starting at position 1864 of SEQ ID NO: 1888232
gcaccuuucccuuaccgau

SEQ ID NO: 2520293 - RNA, 19 nt, Artificial Sequence
  Description of Artificial Sequence: Synthetic oligonucleotide
  Antisense strand to SEQ ID NO: 2520292
aucgguaagggaaaggugc

SEQ ID NO: 2520294 - RNA, 19 nt, Artificial Sequence
  Description of Artificial Sequence: Synthetic oligonucleotide
  Sense strand starting at position 2131 of SEQ ID NO: 1888232
cuuggauacccucgcuaca

SEQ ID NO: 2520295 - RNA, 19 nt, Artificial Sequence
  Description of Artificial Sequence: Synthetic oligonucleotide
  Antisense strand to SEQ ID NO: 2520294
uguagcgaggguauccaag

SEQ ID NO: 2520296 - RNA, 19 nt, Artificial Sequence
  Description of Artificial Sequence: Synthetic oligonucleotide
  Sense strand starting at position 2133 of SEQ ID NO: 1888232
uggauacccucgcuacaau

SEQ ID NO: 2520297 - RNA, 19 nt, Artificial Sequence
  Description of Artificial Sequence: Synthetic oligonucleotide
  Antisense strand to SEQ ID NO: 2520296
auuguagcgaggguaucca

SEQ ID NO: 2520298 - RNA, 19 nt, Artificial Sequence
  Description of Artificial Sequence: Synthetic oligonucleotide
  Sense strand starting at position 2134 of SEQ ID NO: 1888232
ggauacccucgcuacaauu

SEQ ID NO: 2520299 - RNA, 19 nt, Artificial Sequence
  Description of Artificial Sequence: Synthetic oligonucleotide
  Antisense strand to SEQ ID NO: 2520298
aauuguagcgaggguaucc

SEQ ID NO: 2520300 - RNA, 19 nt, Artificial Sequence
  Description of Artificial Sequence: Synthetic oligonucleotide
  Sense strand starting at position 2239 of SEQ ID NO: 1888232
ucgggauuagcuuagauug

SEQ ID NO: 2520301 - RNA, 19 nt, Artificial Sequence
  Description of Artificial Sequence: Synthetic oligonucleotide
  Antisense strand to SEQ ID NO: 2520300
caaucuaagcuaaucccga

SEQ ID NO: 2520302 - RNA, 19 nt, Artificial Sequence
  Description of Artificial Sequence: Synthetic oligonucleotide
  Sense strand starting at position 2301 of SEQ ID NO: 1888232
gacuaaccgcauuagggau

SEQ ID NO: 2520303 - RNA, 19 nt, Artificial Sequence
  Description of Artificial Sequence: Synthetic oligonucleotide
  Antisense strand to SEQ ID NO: 2520302
aucccuaaugcgguuaguc

SEQ ID NO: 2520304 - RNA, 19 nt, Artificial Sequence
  Description of Artificial Sequence: Synthetic oligonucleotide
  Sense strand starting at position 2345 of SEQ ID NO: 1888232
gugugcuuuccugaagacc

SEQ ID NO: 2520305 - RNA, 19 nt, Artificial Sequence
  Description of Artificial Sequence: Synthetic oligonucleotide
  Antisense strand to SEQ ID NO: 2520304
ggucuucaggaaagcacac

SEQ ID NO: 2520306 - RNA, 19 nt, Artificial Sequence
  Description of Artificial Sequence: Synthetic oligonucleotide
  Sense strand starting at position 2387 of SEQ ID NO: 1888232
gcagaaguaaauuggcuuu

SEQ ID NO: 2520307 - RNA, 19 nt, Artificial Sequence
  Description of Artificial Sequence: Synthetic oligonucleotide
  Antisense strand to SEQ ID NO: 2520306
aaagccaauuuacuucugc

SEQ ID NO: 2520308 - RNA, 19 nt, Artificial Sequence
  Description of Artificial Sequence: Synthetic oligonucleotide
  Sense strand starting at position 2390 of SEQ ID NO: 1888232
gaaguaaauuggcuuugcu

SEQ ID NO: 2520309 - RNA, 19 nt, Artificial Sequence
  Description of Artificial Sequence: Synthetic oligonucleotide
  Antisense strand to SEQ ID NO: 2520308
agcaaagccaauuuacuuc

SEQ ID NO: 2520310 - RNA, 19 nt, Artificial Sequence
  Description of Artificial Sequence: Synthetic oligonucleotide
  Sense strand starting at position 2393 of SEQ ID NO: 1888232
guaaauuggcuuugcugaa

SEQ ID NO: 2520311 - RNA, 19 nt, Artificial Sequence
  Description of Artificial Sequence: Synthetic oligonucleotide
  Antisense strand to SEQ ID NO: 2520310
uucagcaaagccaauuuac

SEQ ID NO: 2520312 - RNA, 19 nt, Artificial Sequence
  Description of Artificial Sequence: Synthetic oligonucleotide
  Sense strand starting at position 2643 of SEQ ID NO: 1888232
auaguugcuuuccuggaaa

SEQ ID NO: 2520313 - RNA, 19 nt, Artificial Sequence
  Description of Artificial Sequence: Synthetic oligonucleotide
  Antisense strand to SEQ ID NO: 2520312
uuuccaggaaagcaacuau

SEQ ID NO: 2520314 - RNA, 19 nt, Artificial Sequence
  Description of Artificial Sequence: Synthetic oligonucleotide
  Sense strand starting at position 2672 of SEQ ID NO: 1888232
uuauuaacacugugcaaga

SEQ ID NO: 2520315 - RNA, 19 nt, Artificial Sequence
  Description of Artificial Sequence: Synthetic oligonucleotide
  Antisense strand to SEQ ID NO: 2520314
ucuugcacaguguuaauaa

SEQ ID NO: 2520316 - RNA, 19 nt, Artificial Sequence
  Description of Artificial Sequence: Synthetic oligonucleotide
  Sense strand starting at position 2734 of SEQ ID NO: 1888232
gguuauuaggagcaugguu

SEQ ID NO: 2520317 - RNA, 19 nt, Artificial Sequence
  Description of Artificial Sequence: Synthetic oligonucleotide
  Antisense strand to SEQ ID NO: 2520316
aaccaugcuccuaauaacc

SEQ ID NO: 2520318 - RNA, 19 nt, Artificial Sequence
  Description of Artificial Sequence: Synthetic oligonucleotide
  Sense strand starting at position 2784 of SEQ ID NO: 1888232
ggaggaggguccuuucuuu

SEQ ID NO: 2520319 - RNA, 19 nt, Artificial Sequence
  Description of Artificial Sequence: Synthetic oligonucleotide
  Antisense strand to SEQ ID NO: 2520318
aaagaaaggacccuccucc

SEQ ID NO: 2520320 - RNA, 19 nt, Artificial Sequence
  Description of Artificial Sequence: Synthetic oligonucleotide
  Sense strand starting at position 2806 of SEQ ID NO: 1888232
gugugagacucuccuuucu

SEQ ID NO: 2520321 - RNA, 19 nt, Artificial Sequence
  Description of Artificial Sequence: Synthetic oligonucleotide
  Antisense strand to SEQ ID NO: 2520320
agaaaggagagucucacac

SEQ ID NO: 2520322 - RNA, 19 nt, Artificial Sequence
  Description of Artificial Sequence: Synthetic oligonucleotide
  Sense strand starting at position 2808 of SEQ ID NO: 1888232
gugagacucuccuuucuau

SEQ ID NO: 2520323 - RNA, 19 nt, Artificial Sequence
  Description of Artificial Sequence: Synthetic oligonucleotide
  Antisense strand to SEQ ID NO: 2520322
auagaaaggagagucucac

SEQ ID NO: 2520324 - RNA, 19 nt, Artificial Sequence
  Description of Artificial Sequence: Synthetic oligonucleotide
  Sense strand starting at position 2965 of SEQ ID NO: 1888232
aggucuuucuacccuggaa

SEQ ID NO: 2520325 - RNA, 19 nt, Artificial Sequence
  Description of Artificial Sequence: Synthetic oligonucleotide
  Antisense strand to SEQ ID NO: 2520324
uuccaggguagaaagaccu

SEQ ID NO: 2520326 - RNA, 19 nt, Artificial Sequence
  Description of Artificial Sequence: Synthetic oligonucleotide
  Sense strand starting at position 2967 of SEQ ID NO: 1888232
gucuuucuacccuggaaac

SEQ ID NO: 2520327 - RNA, 19 nt, Artificial Sequence
  Description of Artificial Sequence: Synthetic oligonucleotide
  Antisense strand to SEQ ID NO: 2520326
guuuccaggguagaaagac

SEQ ID NO: 2520328 - RNA, 19 nt, Artificial Sequence
  Description of Artificial Sequence: Synthetic oligonucleotide
  Sense strand starting at position 3052 of SEQ ID NO: 1888232
ugguauuggagucauugaa

SEQ ID NO: 2520329 - RNA, 19 nt, Artificial Sequence
  Description of Artificial Sequence: Synthetic oligonucleotide
  Antisense strand to SEQ ID NO: 2520328
uucaaugacuccaauacca

SEQ ID NO: 2520330 - RNA, 19 nt, Artificial Sequence
  Description of Artificial Sequence: Synthetic oligonucleotide
  Sense strand starting at position 3163 of SEQ ID NO: 1888232
agggcauccuuucccauaa

SEQ ID NO: 2520331 - RNA, 19 nt, Artificial Sequence
  Description of Artificial Sequence: Synthetic oligonucleotide
  Antisense strand to SEQ ID NO: 2520330
uuaugggaaaggaugcccu

SEQ ID NO: 2520332 - RNA, 19 nt, Artificial Sequence
  Description of Artificial Sequence: Synthetic oligonucleotide
  Sense strand starting at position 3234 of SEQ ID NO: 1888232
ugcaaagagccuuagauac

SEQ ID NO: 2520333 - RNA, 19 nt, Artificial Sequence
  Description of Artificial Sequence: Synthetic oligonucleotide
  Antisense strand to SEQ ID NO: 2520332
guaucuaaggcucuuugca

SEQ ID NO: 2520334 - RNA, 19 nt, Artificial Sequence
  Description of Artificial Sequence: Synthetic oligonucleotide
  Sense strand starting at position 3276 of SEQ ID NO: 1888232
ugaguucuauuguuaucau

SEQ ID NO: 2520335 - RNA, 19 nt, Artificial Sequence
  Description of Artificial Sequence: Synthetic oligonucleotide
  Antisense strand to SEQ ID NO: 2520334
augauaacaauagaacuca

SEQ ID NO: 2520336 - RNA, 19 nt, Artificial Sequence
  Description of Artificial Sequence: Synthetic oligonucleotide
  Sense strand starting at position 3279 of SEQ ID NO: 1888232
guucuauuguuaucauuuc

SEQ ID NO: 2520337 - RNA, 19 nt, Artificial Sequence
  Description of Artificial Sequence: Synthetic oligonucleotide
  Antisense strand to SEQ ID NO: 2520336
gaaaugauaacaauagaac

SEQ ID NO: 2520338 - RNA, 19 nt, Artificial Sequence
  Description of Artificial Sequence: Synthetic oligonucleotide
  Sense strand starting at position 3335 of SEQ ID NO: 1888232
uuugaauccagguauggca

SEQ ID NO: 2520339 - RNA, 19 nt, Artificial Sequence
  Description of Artificial Sequence: Synthetic oligonucleotide
  Antisense strand to SEQ ID NO: 2520338
ugccauaccuggauucaaa

SEQ ID NO: 2520340 - RNA, 19 nt, Artificial Sequence
  Description of Artificial Sequence: Synthetic oligonucleotide
  Sense strand starting at position 3358 of SEQ ID NO: 1888232
uccugagucugcuucuaac

SEQ ID NO: 2520341 - RNA, 19 nt, Artificial Sequence
  Description of Artificial Sequence: Synthetic oligonucleotide
  Antisense strand to SEQ ID NO: 2520340
guuagaagcagacucagga

SEQ ID NO: 2520342 - RNA, 19 nt, Artificial Sequence
  Description of Artificial Sequence: Synthetic oligonucleotide
  Sense strand starting at position 3524 of SEQ ID NO: 1888232
uuaucuaaguguccuuaac

SEQ ID NO: 2520343 - RNA, 19 nt, Artificial Sequence
  Description of Artificial Sequence: Synthetic oligonucleotide
  Antisense strand to SEQ ID NO: 2520342
guuaaggacacuuagauaa

SEQ ID NO: 2520344 - RNA, 19 nt, Artificial Sequence
  Description of Artificial Sequence: Synthetic oligonucleotide
  Sense strand starting at position 183 of SEQ ID NO: 1888233
aaugaauugguauagcagu

SEQ ID NO: 2520345 - RNA, 19 nt, Artificial Sequence
  Description of Artificial Sequence: Synthetic oligonucleotide
  Antisense strand to SEQ ID NO: 2520344
acugcuauaccaauucauu

SEQ ID NO: 2520346 - RNA, 19 nt, Artificial Sequence
  Description of Artificial Sequence: Synthetic oligonucleotide
  Sense strand starting at position 190 of SEQ ID NO: 1888233
ugguauagcaguuacagaa

SEQ ID NO: 2520347 - RNA, 19 nt, Artificial Sequence
  Description of Artificial Sequence: Synthetic oligonucleotide
  Antisense strand to SEQ ID NO: 2520346
uucuguaacugcuauacca

SEQ ID NO: 2520348 - RNA, 19 nt, Artificial Sequence
  Description of Artificial Sequence: Synthetic oligonucleotide
  Sense strand starting at position 265 of SEQ ID NO: 1888233
ccauguaucugccagcaga

SEQ ID NO: 2520349 - RNA, 19 nt, Artificial Sequence
  Description of Artificial Sequence: Synthetic oligonucleotide
  Antisense strand to SEQ ID NO: 2520348
ucugcuggcagauacaugg

SEQ ID NO: 2520350 - RNA, 19 nt, Artificial Sequence
  Description of Artificial Sequence: Synthetic oligonucleotide
  Sense strand starting at position 279 of SEQ ID NO: 1888233
gcagaugucaaagguggau

SEQ ID NO: 2520351 - RNA, 19 nt, Artificial Sequence
  Description of Artificial Sequence: Synthetic oligonucleotide
  Antisense strand to SEQ ID NO: 2520350
auccaccuuugacaucugc

SEQ ID NO: 2520352 - RNA, 19 nt, Artificial Sequence
  Description of Artificial Sequence: Synthetic oligonucleotide
  Sense strand starting at position 318 of SEQ ID NO: 1888233
ugggaaauggcaggugaaa

SEQ ID NO: 2520353 - RNA, 19 nt, Artificial Sequence
  Description of Artificial Sequence: Synthetic oligonucleotide
  Antisense strand to SEQ ID NO: 2520352
uuucaccugccauuuccca

SEQ ID NO: 2520354 - RNA, 19 nt, Artificial Sequence
  Description of Artificial Sequence: Synthetic oligonucleotide
  Sense strand starting at position 320 of SEQ ID NO: 1888233
ggaaauggcaggugaaagu

SEQ ID NO: 2520355 - RNA, 19 nt, Artificial Sequence
  Description of Artificial Sequence: Synthetic oligonucleotide
  Antisense strand to SEQ ID NO: 2520354
acuuucaccugccauuucc

SEQ ID NO: 2520356 - RNA, 19 nt, Artificial Sequence
  Description of Artificial Sequence: Synthetic oligonucleotide
  Sense strand starting at position 400 of SEQ ID NO: 1888233
uggcaucagcuguguugaa

SEQ ID NO: 2520357 - RNA, 19 nt, Artificial Sequence
  Description of Artificial Sequence: Synthetic oligonucleotide
  Antisense strand to SEQ ID NO: 2520356
uucaacacagcugaugcca

SEQ ID NO: 2520358 - RNA, 19 nt, Artificial Sequence
  Description of Artificial Sequence: Synthetic oligonucleotide
  Sense strand starting at position 529 of SEQ ID NO: 1888233
ccaugucauccugguuaua

SEQ ID NO: 2520359 - RNA, 19 nt, Artificial Sequence
  Description of Artificial Sequence: Synthetic oligonucleotide
  Antisense strand to SEQ ID NO: 2520358
uauaaccaggaugacaugg

SEQ ID NO: 2520360 - RNA, 19 nt, Artificial Sequence
  Description of Artificial Sequence: Synthetic oligonucleotide
  Sense strand starting at position 531 of SEQ ID NO: 1888233
augucauccugguuauaua

SEQ ID NO: 2520361 - RNA, 19 nt, Artificial Sequence
  Description of Artificial Sequence: Synthetic oligonucleotide
  Antisense strand to SEQ ID NO: 2520360
uauauaaccaggaugacau

SEQ ID NO: 2520362 - RNA, 19 nt, Artificial Sequence
  Description of Artificial Sequence: Synthetic oligonucleotide
  Sense strand starting at position 532 of SEQ ID NO: 1888233
ugucauccugguuauauaa

SEQ ID NO: 2520363 - RNA, 19 nt, Artificial Sequence
  Description of Artificial Sequence: Synthetic oligonucleotide
  Antisense strand to SEQ ID NO: 2520362
uuauauaaccaggaugaca

SEQ ID NO: 2520364 - RNA, 19 nt, Artificial Sequence
  Description of Artificial Sequence: Synthetic oligonucleotide
  Sense strand starting at position 534 of SEQ ID NO: 1888233
ucauccugguuauauaaga

SEQ ID NO: 2520365 - RNA, 19 nt, Artificial Sequence
  Description of Artificial Sequence: Synthetic oligonucleotide
  Antisense strand to SEQ ID NO: 2520364
ucuuauauaaccaggauga

SEQ ID NO: 2520366 - RNA, 19 nt, Artificial Sequence
  Description of Artificial Sequence: Synthetic oligonucleotide
  Sense strand starting at position 647 of SEQ ID NO: 1888233
gcuuccaggagcugaguaa

SEQ ID NO: 2520367 - RNA, 19 nt, Artificial Sequence
  Description of Artificial Sequence: Synthetic oligonucleotide
  Antisense strand to SEQ ID NO: 2520366
uuacucagcuccuggaagc

SEQ ID NO: 2520368 - RNA, 19 nt, Artificial Sequence
  Description of Artificial Sequence: Synthetic oligonucleotide
  Sense strand starting at position 753 of SEQ ID NO: 1888233
guuauccuccaagggacau

SEQ ID NO: 2520369 - RNA, 19 nt, Artificial Sequence
  Description of Artificial Sequence: Synthetic oligonucleotide
  Antisense strand to SEQ ID NO: 2520368
augucccuuggaggauaac

SEQ ID NO: 2520370 - RNA, 19 nt, Artificial Sequence
  Description of Artificial Sequence: Synthetic oligonucleotide
  Sense strand starting at position 868 of SEQ ID NO: 1888233
gagaauccugcugggagga

SEQ ID NO: 2520371 - RNA, 19 nt, Artificial Sequence
  Description of Artificial Sequence: Synthetic oligonucleotide
  Antisense strand to SEQ ID NO: 2520370
uccucccagcaggauucuc

SEQ ID NO: 2520372 - RNA, 19 nt, Artificial Sequence
  Description of Artificial Sequence: Synthetic oligonucleotide
  Sense strand starting at position 884 of SEQ ID NO: 1888233
ggacaucgucgggaagaca

SEQ ID NO: 2520373 - RNA, 19 nt, Artificial Sequence
  Description of Artificial Sequence: Synthetic oligonucleotide
  Antisense strand to SEQ ID NO: 2520372
ugucuucccgacgaugucc

SEQ ID NO: 2520374 - RNA, 19 nt, Artificial Sequence
  Description of Artificial Sequence: Synthetic oligonucleotide
  Sense strand starting at position 2288 of SEQ ID NO: 1888233
gggcuuuccucacuggagu

SEQ ID NO: 2520375 - RNA, 19 nt, Artificial Sequence
  Description of Artificial Sequence: Synthetic oligonucleotide
  Antisense strand to SEQ ID NO: 2520374
acuccagugaggaaagccc

SEQ ID NO: 2520376 - RNA, 19 nt, Artificial Sequence
  Description of Artificial Sequence: Synthetic oligonucleotide
  Sense strand starting at position 2289 of SEQ ID NO: 1888233
ggcuuuccucacuggaguu

SEQ ID NO: 2520377 - RNA, 19 nt, Artificial Sequence
  Description of Artificial Sequence: Synthetic oligonucleotide
  Antisense strand to SEQ ID NO: 2520376
aacuccagugaggaaagcc

SEQ ID NO: 2520378 - RNA, 19 nt, Artificial Sequence
  Description of Artificial Sequence: Synthetic oligonucleotide
  Sense strand starting at position 2499 of SEQ ID NO: 1888233
ggcagugucauguaugcac

SEQ ID NO: 2520379 - RNA, 19 nt, Artificial Sequence
  Description of Artificial Sequence: Synthetic oligonucleotide
  Antisense strand to SEQ ID NO: 2520378
gugcauacaugacacugcc

SEQ ID NO: 2520380 - RNA, 19 nt, Artificial Sequence
  Description of Artificial Sequence: Synthetic oligonucleotide
  Sense strand starting at position 2647 of SEQ ID NO: 1888233
cggcccuguugagaaauca

SEQ ID NO: 2520381 - RNA, 19 nt, Artificial Sequence
  Description of Artificial Sequence: Synthetic oligonucleotide
  Antisense strand to SEQ ID NO: 2520380
ugauuucucaacagggccg

SEQ ID NO: 2520382 - RNA, 19 nt, Artificial Sequence
  Description of Artificial Sequence: Synthetic oligonucleotide
  Sense strand starting at position 2773 of SEQ ID NO: 1888233
uggugaaacuguugucucu

SEQ ID NO: 2520383 - RNA, 19 nt, Artificial Sequence
  Description of Artificial Sequence: Synthetic oligonucleotide
  Antisense strand to SEQ ID NO: 2520382
agagacaacaguuucacca

SEQ ID NO: 2520384 - RNA, 19 nt, Artificial Sequence
  Description of Artificial Sequence: Synthetic oligonucleotide
  Sense strand starting at position 2775 of SEQ ID NO: 1888233
gugaaacuguugucucuac

SEQ ID NO: 2520385 - RNA, 19 nt, Artificial Sequence
  Description of Artificial Sequence: Synthetic oligonucleotide
  Antisense strand to SEQ ID NO: 2520384
guagagacaacaguuucac

SEQ ID NO: 2520386 - RNA, 19 nt, Artificial Sequence
  Description of Artificial Sequence: Synthetic oligonucleotide
  Sense strand starting at position 2836 of SEQ ID NO: 1888233
ccaguuccuccagagauug

SEQ ID NO: 2520387 - RNA, 19 nt, Artificial Sequence
  Description of Artificial Sequence: Synthetic oligonucleotide
  Antisense strand to SEQ ID NO: 2520386
caaucucuggaggaacugg

SEQ ID NO: 2520388 - RNA, 19 nt, Artificial Sequence
  Description of Artificial Sequence: Synthetic oligonucleotide
  Sense strand starting at position 2900 of SEQ ID NO: 1888233
uggagauugccugggaggu

SEQ ID NO: 2520389 - RNA, 19 nt, Artificial Sequence
  Description of Artificial Sequence: Synthetic oligonucleotide
  Antisense strand to SEQ ID NO: 2520388
accucccaggcaaucucca

SEQ ID NO: 2520390 - RNA, 19 nt, Artificial Sequence
  Description of Artificial Sequence: Synthetic oligonucleotide
  Sense strand starting at position 3119 of SEQ ID NO: 1888233
aauuguugcccuggacaaa

SEQ ID NO: 2520391 - RNA, 19 nt, Artificial Sequence
  Description of Artificial Sequence: Synthetic oligonucleotide
  Antisense strand to SEQ ID NO: 2520390
uuuguccagggcaacaauu

SEQ ID NO: 2520392 - RNA, 19 nt, Artificial Sequence
  Description of Artificial Sequence: Synthetic oligonucleotide
  Sense strand starting at position 3120 of SEQ ID NO: 1888233
auuguugcccuggacaaau

SEQ ID NO: 2520393 - RNA, 19 nt, Artificial Sequence
  Description of Artificial Sequence: Synthetic oligonucleotide
  Antisense strand to SEQ ID NO: 2520392
auuuguccagggcaacaau

SEQ ID NO: 2520394 - RNA, 19 nt, Artificial Sequence
  Description of Artificial Sequence: Synthetic oligonucleotide
  Sense strand starting at position 3315 of SEQ ID NO: 1888233
ccugacaucuugcugagaa

SEQ ID NO: 2520395 - RNA, 19 nt, Artificial Sequence
  Description of Artificial Sequence: Synthetic oligonucleotide
  Antisense strand to SEQ ID NO: 2520394
uucucagcaagaugucagg

SEQ ID NO: 2520396 - RNA, 19 nt, Artificial Sequence
  Description of Artificial Sequence: Synthetic oligonucleotide
  Sense strand starting at position 3316 of SEQ ID NO: 1888233
cugacaucuugcugagaag

SEQ ID NO: 2520397 - RNA, 19 nt, Artificial Sequence
  Description of Artificial Sequence: Synthetic oligonucleotide
  Antisense strand to SEQ ID NO: 2520396
cuucucagcaagaugucag

SEQ ID NO: 2520398 - RNA, 19 nt, Artificial Sequence
  Description of Artificial Sequence: Synthetic oligonucleotide
  Sense strand starting at position 3319 of SEQ ID NO: 1888233
acaucuugcugagaagcca

SEQ ID NO: 2520399 - RNA, 19 nt, Artificial Sequence
  Description of Artificial Sequence: Synthetic oligonucleotide
  Antisense strand to SEQ ID NO: 2520398
uggcuucucagcaagaugu

SEQ ID NO: 2520400 - RNA, 19 nt, Artificial Sequence
  Description of Artificial Sequence: Synthetic oligonucleotide
  Sense strand starting at position 3506 of SEQ ID NO: 1888233
uggugacuuuaguguacaa

SEQ ID NO: 2520401 - RNA, 19 nt, Artificial Sequence
  Description of Artificial Sequence: Synthetic oligonucleotide
  Antisense strand to SEQ ID NO: 2520400
uuguacacuaaagucacca

SEQ ID NO: 2520402 - RNA, 19 nt, Artificial Sequence
  Description of Artificial Sequence: Synthetic oligonucleotide
  Sense strand starting at position 3508 of SEQ ID NO: 1888233
gugacuuuaguguacaaag

SEQ ID NO: 2520403 - RNA, 19 nt, Artificial Sequence
  Description of Artificial Sequence: Synthetic oligonucleotide
  Antisense strand to SEQ ID NO: 2520402
cuuuguacacuaaagucac

SEQ ID NO: 2520404 - RNA, 19 nt, Artificial Sequence
  Description of Artificial Sequence: Synthetic oligonucleotide
  Sense strand starting at position 3510 of SEQ ID NO: 1888233
gacuuuaguguacaaagca

SEQ ID NO: 2520405 - RNA, 19 nt, Artificial Sequence
  Description of Artificial Sequence: Synthetic oligonucleotide
  Antisense strand to SEQ ID NO: 2520404
ugcuuuguacacuaaaguc

SEQ ID NO: 2520406 - RNA, 19 nt, Artificial Sequence
  Description of Artificial Sequence: Synthetic oligonucleotide
  Sense strand starting at position 3736 of SEQ ID NO: 1888233
aggguauugggaugcguua

SEQ ID NO: 2520407 - RNA, 19 nt, Artificial Sequence
  Description of Artificial Sequence: Synthetic oligonucleotide
  Antisense strand to SEQ ID NO: 2520406
uaacgcaucccaauacccu

SEQ ID NO: 2520408 - RNA, 19 nt, Artificial Sequence
  Description of Artificial Sequence: Synthetic oligonucleotide
  Sense strand starting at position 14 of SEQ ID NO: 1888236
gagccaguccuauguauaa

SEQ ID NO: 2520409 - RNA, 19 nt, Artificial Sequence
  Description of Artificial Sequence: Synthetic oligonucleotide
  Antisense strand to SEQ ID NO: 2520408
uuauacauaggacuggcuc

SEQ ID NO: 2520410 - RNA, 19 nt, Artificial Sequence
  Description of Artificial Sequence: Synthetic oligonucleotide
  Sense strand starting at position 55 of SEQ ID NO: 1888236
ucaggugugugaguuaaca

SEQ ID NO: 2520411 - RNA, 19 nt, Artificial Sequence
  Description of Artificial Sequence: Synthetic oligonucleotide
  Antisense strand to SEQ ID NO: 2520410
uguuaacucacacaccuga

SEQ ID NO: 2520412 - RNA, 19 nt, Artificial Sequence
  Description of Artificial Sequence: Synthetic oligonucleotide
  Sense strand starting at position 117 of SEQ ID NO: 1888236
cgaguaaugagucacauuc

SEQ ID NO: 2520413 - RNA, 19 nt, Artificial Sequence
  Description of Artificial Sequence: Synthetic oligonucleotide
  Antisense strand to SEQ ID NO: 2520412
gaaugugacucauuacucg

SEQ ID NO: 2520414 - RNA, 19 nt, Artificial Sequence
  Description of Artificial Sequence: Synthetic oligonucleotide
  Sense strand starting at position 124 of SEQ ID NO: 1888236
ugagucacauucuuggaaa

SEQ ID NO: 2520415 - RNA, 19 nt, Artificial Sequence
  Description of Artificial Sequence: Synthetic oligonucleotide
  Antisense strand to SEQ ID NO: 2520414
uuuccaagaaugugacuca

SEQ ID NO: 2520416 - RNA, 19 nt, Artificial Sequence
  Description of Artificial Sequence: Synthetic oligonucleotide
  Sense strand starting at position 155 of SEQ ID NO: 1888236
uuaugauggagaugugcuu

SEQ ID NO: 2520417 - RNA, 19 nt, Artificial Sequence
  Description of Artificial Sequence: Synthetic oligonucleotide
  Antisense strand to SEQ ID NO: 2520416
aagcacaucuccaucauaa

SEQ ID NO: 2520418 - RNA, 19 nt, Artificial Sequence
  Description of Artificial Sequence: Synthetic oligonucleotide
  Sense strand starting at position 161 of SEQ ID NO: 1888236
uggagaugugcuuacauaa

SEQ ID NO: 2520419 - RNA, 19 nt, Artificial Sequence
  Description of Artificial Sequence: Synthetic oligonucleotide
  Antisense strand to SEQ ID NO: 2520418
uuauguaagcacaucucca

SEQ ID NO: 2520420 - RNA, 19 nt, Artificial Sequence
  Description of Artificial Sequence: Synthetic oligonucleotide
  Sense strand starting at position 293 of SEQ ID NO: 1888236
gugcuaagcccugggaauu

SEQ ID NO: 2520421 - RNA, 19 nt, Artificial Sequence
  Description of Artificial Sequence: Synthetic oligonucleotide
  Antisense strand to SEQ ID NO: 2520420
aauucccagggcuuagcac

SEQ ID NO: 2520422 - RNA, 19 nt, Artificial Sequence
  Description of Artificial Sequence: Synthetic oligonucleotide
  Sense strand starting at position 650 of SEQ ID NO: 1888236
aggccuucucaaggauaua

SEQ ID NO: 2520423 - RNA, 19 nt, Artificial Sequence
  Description of Artificial Sequence: Synthetic oligonucleotide
  Antisense strand to SEQ ID NO: 2520422
uauauccuugagaaggccu

SEQ ID NO: 2520424 - RNA, 19 nt, Artificial Sequence
  Description of Artificial Sequence: Synthetic oligonucleotide
  Sense strand starting at position 782 of SEQ ID NO: 1888236
uuucuuguccaagagaugu

SEQ ID NO: 2520425 - RNA, 19 nt, Artificial Sequence
  Description of Artificial Sequence: Synthetic oligonucleotide
  Antisense strand to SEQ ID NO: 2520424
acaucucuuggacaagaaa

SEQ ID NO: 2520426 - RNA, 19 nt, Artificial Sequence
  Description of Artificial Sequence: Synthetic oligonucleotide
  Sense strand starting at position 824 of SEQ ID NO: 1888236
acuuacuagcacugugaga

SEQ ID NO: 2520427 - RNA, 19 nt, Artificial Sequence
  Description of Artificial Sequence: Synthetic oligonucleotide
  Antisense strand to SEQ ID NO: 2520426
ucucacagugcuaguaagu

SEQ ID NO: 2520428 - RNA, 19 nt, Artificial Sequence
  Description of Artificial Sequence: Synthetic oligonucleotide
  Sense strand starting at position 826 of SEQ ID NO: 1888236
uuacuagcacugugagaca

SEQ ID NO: 2520429 - RNA, 19 nt, Artificial Sequence
  Description of Artificial Sequence: Synthetic oligonucleotide
  Antisense strand to SEQ ID NO: 2520428
ugucucacagugcuaguaa

SEQ ID NO: 2520430 - RNA, 19 nt, Artificial Sequence
  Description of Artificial Sequence: Synthetic oligonucleotide
  Sense strand starting at position 859 of SEQ ID NO: 1888236
agaacaaguuaucugaucu

SEQ ID NO: 2520431 - RNA, 19 nt, Artificial Sequence
  Description of Artificial Sequence: Synthetic oligonucleotide
  Antisense strand to SEQ ID NO: 2520430
agaucagauaacuuguucu

SEQ ID NO: 2520432 - RNA, 19 nt, Artificial Sequence
  Description of Artificial Sequence: Synthetic oligonucleotide
  Sense strand starting at position 905 of SEQ ID NO: 1888236
gcaucauuagguuacaaug

SEQ ID NO: 2520433 - RNA, 19 nt, Artificial Sequence
  Description of Artificial Sequence: Synthetic oligonucleotide
  Antisense strand to SEQ ID NO: 2520432
cauuguaaccuaaugaugc

SEQ ID NO: 2520434 - RNA, 19 nt, Artificial Sequence
  Description of Artificial Sequence: Synthetic oligonucleotide
  Sense strand starting at position 960 of SEQ ID NO: 1888236
ugguaugaacgacgagaau

SEQ ID NO: 2520435 - RNA, 19 nt, Artificial Sequence
  Description of Artificial Sequence: Synthetic oligonucleotide
  Antisense strand to SEQ ID NO: 2520434
auucucgucguucauacca

SEQ ID NO: 2520436 - RNA, 19 nt, Artificial Sequence
  Description of Artificial Sequence: Synthetic oligonucleotide
  Sense strand starting at position 1016 of SEQ ID NO: 1888236
guuuaacaacguuauacaa

SEQ ID NO: 2520437 - RNA, 19 nt, Artificial Sequence
  Description of Artificial Sequence: Synthetic oligonucleotide
  Antisense strand to SEQ ID NO: 2520436
uuguauaacguuguuaaac

SEQ ID NO: 2520438 - RNA, 19 nt, Artificial Sequence
  Description of Artificial Sequence: Synthetic oligonucleotide
  Sense strand starting at position 1077 of SEQ ID NO: 1888236
aaagccuggcuguaguuaa

SEQ ID NO: 2520439 - RNA, 19 nt, Artificial Sequence
  Description of Artificial Sequence: Synthetic oligonucleotide
  Antisense strand to SEQ ID NO: 2520438
uuaacuacagccaggcuuu

SEQ ID NO: 2520440 - RNA, 19 nt, Artificial Sequence
  Description of Artificial Sequence: Synthetic oligonucleotide
  Sense strand starting at position 1087 of SEQ ID NO: 1888236
uguaguuaagcuggacaca

SEQ ID NO: 2520441 - RNA, 19 nt, Artificial Sequence
  Description of Artificial Sequence: Synthetic oligonucleotide
  Antisense strand to SEQ ID NO: 2520440
uguguccagcuuaacuaca

SEQ ID NO: 2520442 - RNA, 19 nt, Artificial Sequence
  Description of Artificial Sequence: Synthetic oligonucleotide
  Sense strand starting at position 1253 of SEQ ID NO: 1888236
aucuguucucacgaagcuu

SEQ ID NO: 2520443 - RNA, 19 nt, Artificial Sequence
  Description of Artificial Sequence: Synthetic oligonucleotide
  Antisense strand to SEQ ID NO: 2520442
aagcuucgugagaacagau

SEQ ID NO: 2520444 - RNA, 19 nt, Artificial Sequence
  Description of Artificial Sequence: Synthetic oligonucleotide
  Sense strand starting at position 1360 of SEQ ID NO: 1888236
gcagcuguugcacagauca

SEQ ID NO: 2520445 - RNA, 19 nt, Artificial Sequence
  Description of Artificial Sequence: Synthetic oligonucleotide
  Antisense strand to SEQ ID NO: 2520444
ugaucugugcaacagcugc

SEQ ID NO: 2520446 - RNA, 19 nt, Artificial Sequence
  Description of Artificial Sequence: Synthetic oligonucleotide
  Sense strand starting at position 1451 of SEQ ID NO: 1888236
uggugaacugccuaaaucu

SEQ ID NO: 2520447 - RNA, 19 nt, Artificial Sequence
  Description of Artificial Sequence: Synthetic oligonucleotide
  Antisense strand to SEQ ID NO: 2520446
agauuuaggcaguucacca

SEQ ID NO: 2520448 - RNA, 19 nt, Artificial Sequence
  Description of Artificial Sequence: Synthetic oligonucleotide
  Sense strand starting at position 1490 of SEQ ID NO: 1888236
aggugcauuucuuuggcaa

SEQ ID NO: 2520449 - RNA, 19 nt, Artificial Sequence
  Description of Artificial Sequence: Synthetic oligonucleotide
  Antisense strand to SEQ ID NO: 2520448
uugccaaagaaaugcaccu

SEQ ID NO: 2520450 - RNA, 19 nt, Artificial Sequence
  Description of Artificial Sequence: Synthetic oligonucleotide
  Sense strand starting at position 1491 of SEQ ID NO: 1888236
ggugcauuucuuuggcaag

SEQ ID NO: 2520451 - RNA, 19 nt, Artificial Sequence
  Description of Artificial Sequence: Synthetic oligonucleotide
  Antisense strand to SEQ ID NO: 2520450
cuugccaaagaaaugcacc

SEQ ID NO: 2520452 - RNA, 19 nt, Artificial Sequence
  Description of Artificial Sequence: Synthetic oligonucleotide
  Sense strand starting at position 1537 of SEQ ID NO: 1888236
aaaggagucuacgccugaa

SEQ ID NO: 2520453 - RNA, 19 nt, Artificial Sequence
  Description of Artificial Sequence: Synthetic oligonucleotide
  Antisense strand to SEQ ID NO: 2520452
uucaggcguagacuccuuu

SEQ ID NO: 2520454 - RNA, 19 nt, Artificial Sequence
  Description of Artificial Sequence: Synthetic oligonucleotide
  Sense strand starting at position 2323 of SEQ ID NO: 1888236
ugccgagauuugggagaga

SEQ ID NO: 2520455 - RNA, 19 nt, Artificial Sequence
  Description of Artificial Sequence: Synthetic oligonucleotide
  Antisense strand to SEQ ID NO: 2520454
ucucucccaaaucucggca

SEQ ID NO: 2520456 - RNA, 19 nt, Artificial Sequence
  Description of Artificial Sequence: Synthetic oligonucleotide
  Sense strand starting at position 3229 of SEQ ID NO: 1888236
ccgcgcaucccuucuugau

SEQ ID NO: 2520457 - RNA, 19 nt, Artificial Sequence
  Description of Artificial Sequence: Synthetic oligonucleotide
  Antisense strand to SEQ ID NO: 2520456
aucaagaagggaugcgcgg

SEQ ID NO: 2520458 - RNA, 19 nt, Artificial Sequence
  Description of Artificial Sequence: Synthetic oligonucleotide
  Sense strand starting at position 3299 of SEQ ID NO: 1888236
caaggaggucuugguuaaa

SEQ ID NO: 2520459 - RNA, 19 nt, Artificial Sequence
  Description of Artificial Sequence: Synthetic oligonucleotide
  Antisense strand to SEQ ID NO: 2520458
uuuaaccaagaccuccuug

SEQ ID NO: 2520460 - RNA, 19 nt, Artificial Sequence
  Description of Artificial Sequence: Synthetic oligonucleotide
  Sense strand starting at position 3457 of SEQ ID NO: 1888236
ccuggugugauuugacuuu

SEQ ID NO: 2520461 - RNA, 19 nt, Artificial Sequence
  Description of Artificial Sequence: Synthetic oligonucleotide
  Antisense strand to SEQ ID NO: 2520460
aaagucaaaucacaccagg

SEQ ID NO: 2520462 - RNA, 19 nt, Artificial Sequence
  Description of Artificial Sequence: Synthetic oligonucleotide
  Sense strand starting at position 3469 of SEQ ID NO: 1888236
ugacuuuaacuucgaauag

SEQ ID NO: 2520463 - RNA, 19 nt, Artificial Sequence
  Description of Artificial Sequence: Synthetic oligonucleotide
  Antisense strand to SEQ ID NO: 2520462
cuauucgaaguuaaaguca

SEQ ID NO: 2520464 - RNA, 19 nt, Artificial Sequence
  Description of Artificial Sequence: Synthetic oligonucleotide
  Sense strand starting at position 3502 of SEQ ID NO: 1888236
caucucuuuggagauuguu

SEQ ID NO: 2520465 - RNA, 19 nt, Artificial Sequence
  Description of Artificial Sequence: Synthetic oligonucleotide
  Antisense strand to SEQ ID NO: 2520464
aacaaucuccaaagagaug

SEQ ID NO: 2520466 - RNA, 19 nt, Artificial Sequence
  Description of Artificial Sequence: Synthetic oligonucleotide
  Sense strand starting at position 3528 of SEQ ID NO: 1888236
acgaguucacugcagugaa

SEQ ID NO: 2520467 - RNA, 19 nt, Artificial Sequence
  Description of Artificial Sequence: Synthetic oligonucleotide
  Antisense strand to SEQ ID NO: 2520466
uucacugcagugaacucgu

SEQ ID NO: 2520468 - RNA, 19 nt, Artificial Sequence
  Description of Artificial Sequence: Synthetic oligonucleotide
  Sense strand starting at position 3604 of SEQ ID NO: 1888236
aucuguuguccggaguuag

SEQ ID NO: 2520469 - RNA, 19 nt, Artificial Sequence
  Description of Artificial Sequence: Synthetic oligonucleotide
  Antisense strand to SEQ ID NO: 2520468
cuaacuccggacaacagau

SEQ ID NO: 2520470 - RNA, 19 nt, Artificial Sequence
  Description of Artificial Sequence: Synthetic oligonucleotide
  Sense strand starting at position 3605 of SEQ ID NO: 1888236
ucuguuguccggaguuagu

SEQ ID NO: 2520471 - RNA, 19 nt, Artificial Sequence
  Description of Artificial Sequence: Synthetic oligonucleotide
  Antisense strand to SEQ ID NO: 2520470
acuaacuccggacaacaga

SEQ ID NO: 2520472 - RNA, 19 nt, Artificial Sequence
  Description of Artificial Sequence: Synthetic oligonucleotide
  Sense strand starting at position 3713 of SEQ ID NO: 1888236
uaagguuaugccuaacgcu

SEQ ID NO: 2520473 - RNA, 19 nt, Artificial Sequence
  Description of Artificial Sequence: Synthetic oligonucleotide
  Antisense strand to SEQ ID NO: 2520472
agcguuaggcauaaccuua

SEQ ID NO: 2520474 - RNA, 19 nt, Artificial Sequence
  Description of Artificial Sequence: Synthetic oligonucleotide
  Sense strand starting at position 3731 of SEQ ID NO: 1888236
ucauuugcucuuggcuaaa

SEQ ID NO: 2520475 - RNA, 19 nt, Artificial Sequence
  Description of Artificial Sequence: Synthetic oligonucleotide
  Antisense strand to SEQ ID NO: 2520474
uuuagccaagagcaaauga

SEQ ID NO: 2520476 - RNA, 19 nt, Artificial Sequence
  Description of Artificial Sequence: Synthetic oligonucleotide
  Sense strand starting at position 3828 of SEQ ID NO: 1888236
uuuagucuguagccagauu

SEQ ID NO: 2520477 - RNA, 19 nt, Artificial Sequence
  Description of Artificial Sequence: Synthetic oligonucleotide
  Antisense strand to SEQ ID NO: 2520476
aaucuggcuacagacuaaa

SEQ ID NO: 2520478 - RNA, 19 nt, Artificial Sequence
  Description of Artificial Sequence: Synthetic oligonucleotide
  Sense strand starting at position 3889 of SEQ ID NO: 1888236
gugugucaacaggaaugua

SEQ ID NO: 2520479 - RNA, 19 nt, Artificial Sequence
  Description of Artificial Sequence: Synthetic oligonucleotide
  Antisense strand to SEQ ID NO: 2520478
uacauuccuguugacacac

SEQ ID NO: 2520480 - RNA, 19 nt, Artificial Sequence
  Description of Artificial Sequence: Synthetic oligonucleotide
  Sense strand starting at position 3915 of SEQ ID NO: 1888236
uauuaacaucuagggugau

SEQ ID NO: 2520481 - RNA, 19 nt, Artificial Sequence
  Description of Artificial Sequence: Synthetic oligonucleotide
  Antisense strand to SEQ ID NO: 2520480
aucacccuagauguuaaua

SEQ ID NO: 2520482 - RNA, 19 nt, Artificial Sequence
  Description of Artificial Sequence: Synthetic oligonucleotide
  Sense strand starting at position 3945 of SEQ ID NO: 1888236
cuauuaagucagcauggua

SEQ ID NO: 2520483 - RNA, 19 nt, Artificial Sequence
  Description of Artificial Sequence: Synthetic oligonucleotide
  Antisense strand to SEQ ID NO: 2520482
uaccaugcugacuuaauag

SEQ ID NO: 2520484 - RNA, 19 nt, Artificial Sequence
  Description of Artificial Sequence: Synthetic oligonucleotide
  Sense strand starting at position 3948 of SEQ ID NO: 1888236
uuaagucagcaugguauaa

SEQ ID NO: 2520485 - RNA, 19 nt, Artificial Sequence
  Description of Artificial Sequence: Synthetic oligonucleotide
  Antisense strand to SEQ ID NO: 2520484
uuauaccaugcugacuuaa

SEQ ID NO: 2520486 - RNA, 19 nt, Artificial Sequence
  Description of Artificial Sequence: Synthetic oligonucleotide
  Sense strand starting at position 3952 of SEQ ID NO: 1888236
gucagcaugguauaauuaa

SEQ ID NO: 2520487 - RNA, 19 nt, Artificial Sequence
  Description of Artificial Sequence: Synthetic oligonucleotide
  Antisense strand to SEQ ID NO: 2520486
uuaauuauaccaugcugac

SEQ ID NO: 2520488 - RNA, 19 nt, Artificial Sequence
  Description of Artificial Sequence: Synthetic oligonucleotide
  Sense strand starting at position 10 of SEQ ID NO: 1888235
gagccaguccuauguauaa

SEQ ID NO: 2520489 - RNA, 19 nt, Artificial Sequence
  Description of Artificial Sequence: Synthetic oligonucleotide
  Antisense strand to SEQ ID NO: 2520488
uuauacauaggacuggcuc

SEQ ID NO: 2520490 - RNA, 19 nt, Artificial Sequence
  Description of Artificial Sequence: Synthetic oligonucleotide
  Sense strand starting at position 51 of SEQ ID NO: 1888235
ucaggugugugaguuaaca

SEQ ID NO: 2520491 - RNA, 19 nt, Artificial Sequence
  Description of Artificial Sequence: Synthetic oligonucleotide
  Antisense strand to SEQ ID NO: 2520490
uguuaacucacacaccuga

SEQ ID NO: 2520492 - RNA, 19 nt, Artificial Sequence
  Description of Artificial Sequence: Synthetic oligonucleotide
  Sense strand starting at position 113 of SEQ ID NO: 1888235
cgaguaaugagucacauuc

SEQ ID NO: 2520493 - RNA, 19 nt, Artificial Sequence
  Description of Artificial Sequence: Synthetic oligonucleotide
  Antisense strand to SEQ ID NO: 2520492
gaaugugacucauuacucg

SEQ ID NO: 2520494 - RNA, 19 nt, Artificial Sequence
  Description of Artificial Sequence: Synthetic oligonucleotide
  Sense strand starting at position 120 of SEQ ID NO: 1888235
ugagucacauucuuggaaa

SEQ ID NO: 2520495 - RNA, 19 nt, Artificial Sequence
  Description of Artificial Sequence: Synthetic oligonucleotide
  Antisense strand to SEQ ID NO: 2520494
uuuccaagaaugugacuca

SEQ ID NO: 2520496 - RNA, 19 nt, Artificial Sequence
  Description of Artificial Sequence: Synthetic oligonucleotide
  Sense strand starting at position 151 of SEQ ID NO: 1888235
uuaugauggagaugugcuu

SEQ ID NO: 2520497 - RNA, 19 nt, Artificial Sequence
  Description of Artificial Sequence: Synthetic oligonucleotide
  Antisense strand to SEQ ID NO: 2520496
aagcacaucuccaucauaa

SEQ ID NO: 2520498 - RNA, 19 nt, Artificial Sequence
  Description of Artificial Sequence: Synthetic oligonucleotide
  Sense strand starting at position 157 of SEQ ID NO: 1888235
uggagaugugcuuacauaa

SEQ ID NO: 2520499 - RNA, 19 nt, Artificial Sequence
  Description of Artificial Sequence: Synthetic oligonucleotide
  Antisense strand to SEQ ID NO: 2520498
uuauguaagcacaucucca

SEQ ID NO: 2520500 - RNA, 19 nt, Artificial Sequence
  Description of Artificial Sequence: Synthetic oligonucleotide
  Sense strand starting at position 289 of SEQ ID NO: 1888235
gugcuaagcccugggaauu

SEQ ID NO: 2520501 - RNA, 19 nt, Artificial Sequence
  Description of Artificial Sequence: Synthetic oligonucleotide
  Antisense strand to SEQ ID NO: 2520500
aauucccagggcuuagcac

SEQ ID NO: 2520502 - RNA, 19 nt, Artificial Sequence
  Description of Artificial Sequence: Synthetic oligonucleotide
  Sense strand starting at position 646 of SEQ ID NO: 1888235
aggccuucucaaggauaua

SEQ ID NO: 2520503 - RNA, 19 nt, Artificial Sequence
  Description of Artificial Sequence: Synthetic oligonucleotide
  Antisense strand to SEQ ID NO: 2520502
uauauccuugagaaggccu

SEQ ID NO: 2520504 - RNA, 19 nt, Artificial Sequence
  Description of Artificial Sequence: Synthetic oligonucleotide
  Sense strand starting at position 778 of SEQ ID NO: 1888235
uuucuuguccaagagaugu

SEQ ID NO: 2520505 - RNA, 19 nt, Artificial Sequence
  Description of Artificial Sequence: Synthetic oligonucleotide
  Antisense strand to SEQ ID NO: 2520504
acaucucuuggacaagaaa

SEQ ID NO: 2520506 - RNA, 19 nt, Artificial Sequence
  Description of Artificial Sequence: Synthetic oligonucleotide
  Sense strand starting at position 820 of SEQ ID NO: 1888235
acuuacuagcacugugaga

SEQ ID NO: 2520507 - RNA, 19 nt, Artificial Sequence
  Description of Artificial Sequence: Synthetic oligonucleotide
  Antisense strand to SEQ ID NO: 2520506
ucucacagugcuaguaagu

SEQ ID NO: 2520508 - RNA, 19 nt, Artificial Sequence
  Description of Artificial Sequence: Synthetic oligonucleotide
  Sense strand starting at position 822 of SEQ ID NO: 1888235
uuacuagcacugugagaca

SEQ ID NO: 2520509 - RNA, 19 nt, Artificial Sequence
  Description of Artificial Sequence: Synthetic oligonucleotide
  Antisense strand to SEQ ID NO: 2520508
ugucucacagugcuaguaa

SEQ ID NO: 2520510 - RNA, 19 nt, Artificial Sequence
  Description of Artificial Sequence: Synthetic oligonucleotide
  Sense strand starting at position 855 of SEQ ID NO: 1888235
agaacaaguuaucugaucu

SEQ ID NO: 2520511 - RNA, 19 nt, Artificial Sequence
  Description of Artificial Sequence: Synthetic oligonucleotide
  Antisense strand to SEQ ID NO: 2520510
agaucagauaacuuguucu

SEQ ID NO: 2520512 - RNA, 19 nt, Artificial Sequence
  Description of Artificial Sequence: Synthetic oligonucleotide
  Sense strand starting at position 901 of SEQ ID NO: 1888235
gcaucauuagguuacaaug

SEQ ID NO: 2520513 - RNA, 19 nt, Artificial Sequence
  Description of Artificial Sequence: Synthetic oligonucleotide
  Antisense strand to SEQ ID NO: 2520512
cauuguaaccuaaugaugc

SEQ ID NO: 2520514 - RNA, 19 nt, Artificial Sequence
  Description of Artificial Sequence: Synthetic oligonucleotide
  Sense strand starting at position 956 of SEQ ID NO: 1888235
ugguaugaacgacgagaau

SEQ ID NO: 2520515 - RNA, 19 nt, Artificial Sequence
  Description of Artificial Sequence: Synthetic oligonucleotide
  Antisense strand to SEQ ID NO: 2520514
auucucgucguucauacca

SEQ ID NO: 2520516 - RNA, 19 nt, Artificial Sequence
  Description of Artificial Sequence: Synthetic oligonucleotide
  Sense strand starting at position 1012 of SEQ ID NO: 1888235
guuuaacaacguuauacaa

SEQ ID NO: 2520517 - RNA, 19 nt, Artificial Sequence
  Description of Artificial Sequence: Synthetic oligonucleotide
  Antisense strand to SEQ ID NO: 2520516
uuguauaacguuguuaaac

SEQ ID NO: 2520518 - RNA, 19 nt, Artificial Sequence
  Description of Artificial Sequence: Synthetic oligonucleotide
  Sense strand starting at position 1073 of SEQ ID NO: 1888235
aaagccuggcuguaguuaa

SEQ ID NO: 2520519 - RNA, 19 nt, Artificial Sequence
  Description of Artificial Sequence: Synthetic oligonucleotide
  Antisense strand to SEQ ID NO: 2520518
uuaacuacagccaggcuuu

SEQ ID NO: 2520520 - RNA, 19 nt, Artificial Sequence
  Description of Artificial Sequence: Synthetic oligonucleotide
  Sense strand starting at position 1083 of SEQ ID NO: 1888235
uguaguuaagcuggacaca

SEQ ID NO: 2520521 - RNA, 19 nt, Artificial Sequence
  Description of Artificial Sequence: Synthetic oligonucleotide
  Antisense strand to SEQ ID NO: 2520520
uguguccagcuuaacuaca

SEQ ID NO: 2520522 - RNA, 19 nt, Artificial Sequence
  Description of Artificial Sequence: Synthetic oligonucleotide
  Sense strand starting at position 1249 of SEQ ID NO: 1888235
aucuguucucacgaagcuu

SEQ ID NO: 2520523 - RNA, 19 nt, Artificial Sequence
  Description of Artificial Sequence: Synthetic oligonucleotide
  Antisense strand to SEQ ID NO: 2520522
aagcuucgugagaacagau

SEQ ID NO: 2520524 - RNA, 19 nt, Artificial Sequence
  Description of Artificial Sequence: Synthetic oligonucleotide
  Sense strand starting at position 1356 of SEQ ID NO: 1888235
gcagcuguugcacagauca

SEQ ID NO: 2520525 - RNA, 19 nt, Artificial Sequence
  Description of Artificial Sequence: Synthetic oligonucleotide
  Antisense strand to SEQ ID NO: 2520524
ugaucugugcaacagcugc

SEQ ID NO: 2520526 - RNA, 19 nt, Artificial Sequence
  Description of Artificial Sequence: Synthetic oligonucleotide
  Sense strand starting at position 1447 of SEQ ID NO: 1888235
uggugaacugccuaaaucu

SEQ ID NO: 2520527 - RNA, 19 nt, Artificial Sequence
  Description of Artificial Sequence: Synthetic oligonucleotide
  Antisense strand to SEQ ID NO: 2520526
agauuuaggcaguucacca

SEQ ID NO: 2520528 - RNA, 19 nt, Artificial Sequence
  Description of Artificial Sequence: Synthetic oligonucleotide
  Sense strand starting at position 1486 of SEQ ID NO: 1888235
aggugcauuucuuuggcaa

SEQ ID NO: 2520529 - RNA, 19 nt, Artificial Sequence
  Description of Artificial Sequence: Synthetic oligonucleotide
  Antisense strand to SEQ ID NO: 2520528
uugccaaagaaaugcaccu

SEQ ID NO: 2520530 - RNA, 19 nt, Artificial Sequence
  Description of Artificial Sequence: Synthetic oligonucleotide
  Sense strand starting at position 1487 of SEQ ID NO: 1888235
ggugcauuucuuuggcaag

SEQ ID NO: 2520531 - RNA, 19 nt, Artificial Sequence
  Description of Artificial Sequence: Synthetic oligonucleotide
  Antisense strand to SEQ ID NO: 2520530
cuugccaaagaaaugcacc

SEQ ID NO: 2520532 - RNA, 19 nt, Artificial Sequence
  Description of Artificial Sequence: Synthetic oligonucleotide
  Sense strand starting at position 1533 of SEQ ID NO: 1888235
aaaggagucuacgccugaa

SEQ ID NO: 2520533 - RNA, 19 nt, Artificial Sequence
  Description of Artificial Sequence: Synthetic oligonucleotide
  Antisense strand to SEQ ID NO: 2520532
uucaggcguagacuccuuu

SEQ ID NO: 2520534 - RNA, 19 nt, Artificial Sequence
  Description of Artificial Sequence: Synthetic oligonucleotide
  Sense strand starting at position 2319 of SEQ ID NO: 1888235
ugccgagauuugggagaga

SEQ ID NO: 2520535 - RNA, 19 nt, Artificial Sequence
  Description of Artificial Sequence: Synthetic oligonucleotide
  Antisense strand to SEQ ID NO: 2520534
ucucucccaaaucucggca

SEQ ID NO: 2520536 - RNA, 19 nt, Artificial Sequence
  Description of Artificial Sequence: Synthetic oligonucleotide
  Sense strand starting at position 3225 of SEQ ID NO: 1888235
ccgcgcaucccuucuugau

SEQ ID NO: 2520537 - RNA, 19 nt, Artificial Sequence
  Description of Artificial Sequence: Synthetic oligonucleotide
  Antisense strand to SEQ ID NO: 2520536
aucaagaagggaugcgcgg

SEQ ID NO: 2520538 - RNA, 19 nt, Artificial Sequence
  Description of Artificial Sequence: Synthetic oligonucleotide
  Sense strand starting at position 3295 of SEQ ID NO: 1888235
caaggaggucuugguuaaa

SEQ ID NO: 2520539 - RNA, 19 nt, Artificial Sequence
  Description of Artificial Sequence: Synthetic oligonucleotide
  Antisense strand to SEQ ID NO: 2520538
uuuaaccaagaccuccuug

SEQ ID NO: 2520540 - RNA, 19 nt, Artificial Sequence
  Description of Artificial Sequence: Synthetic oligonucleotide
  Sense strand starting at position 3453 of SEQ ID NO: 1888235
ccuggugugauuugacuuu

SEQ ID NO: 2520541 - RNA, 19 nt, Artificial Sequence
  Description of Artificial Sequence: Synthetic oligonucleotide
  Antisense strand to SEQ ID NO: 2520540
aaagucaaaucacaccagg

SEQ ID NO: 2520542 - RNA, 19 nt, Artificial Sequence
  Description of Artificial Sequence: Synthetic oligonucleotide
  Sense strand starting at position 3465 of SEQ ID NO: 1888235
ugacuuuaacuucgaauag

SEQ ID NO: 2520543 - RNA, 19 nt, Artificial Sequence
  Description of Artificial Sequence: Synthetic oligonucleotide
  Antisense strand to SEQ ID NO: 2520542
cuauucgaaguuaaaguca

SEQ ID NO: 2520544 - RNA, 19 nt, Artificial Sequence
  Description of Artificial Sequence: Synthetic oligonucleotide
  Sense strand starting at position 3498 of SEQ ID NO: 1888235
caucucuuuggagauuguu

SEQ ID NO: 2520545 - RNA, 19 nt, Artificial Sequence
  Description of Artificial Sequence: Synthetic oligonucleotide
  Antisense strand to SEQ ID NO: 2520544
aacaaucuccaaagagaug

SEQ ID NO: 2520546 - RNA, 19 nt, Artificial Sequence
  Description of Artificial Sequence: Synthetic oligonucleotide
  Sense strand starting at position 3524 of SEQ ID NO: 1888235
acgaguucacugcagugaa

SEQ ID NO: 2520547 - RNA, 19 nt, Artificial Sequence
  Description of Artificial Sequence: Synthetic oligonucleotide
  Antisense strand to SEQ ID NO: 2520546
uucacugcagugaacucgu

SEQ ID NO: 2520548 - RNA, 19 nt, Artificial Sequence
  Description of Artificial Sequence: Synthetic oligonucleotide
  Sense strand starting at position 3600 of SEQ ID NO: 1888235
aucuguuguccggaguuag

SEQ ID NO: 2520549 - RNA, 19 nt, Artificial Sequence
  Description of Artificial Sequence: Synthetic oligonucleotide
  Antisense strand to SEQ ID NO: 2520548
cuaacuccggacaacagau

SEQ ID NO: 2520550 - RNA, 19 nt, Artificial Sequence
  Description of Artificial Sequence: Synthetic oligonucleotide
  Sense strand starting at position 3601 of SEQ ID NO: 1888235
ucuguuguccggaguuagu

SEQ ID NO: 2520551 - RNA, 19 nt, Artificial Sequence
  Description of Artificial Sequence: Synthetic oligonucleotide
  Antisense strand to SEQ ID NO: 2520550
acuaacuccggacaacaga

SEQ ID NO: 2520552 - RNA, 19 nt, Artificial Sequence
  Description of Artificial Sequence: Synthetic oligonucleotide
  Sense strand starting at position 3709 of SEQ ID NO: 1888235
uaagguuaugccuaacgcu

SEQ ID NO: 2520553 - RNA, 19 nt, Artificial Sequence
  Description of Artificial Sequence: Synthetic oligonucleotide
  Antisense strand to SEQ ID NO: 2520552
agcguuaggcauaaccuua

SEQ ID NO: 2520554 - RNA, 19 nt, Artificial Sequence
  Description of Artificial Sequence: Synthetic oligonucleotide
  Sense strand starting at position 3727 of SEQ ID NO: 1888235
ucauuugcucuuggcuaaa

SEQ ID NO: 2520555 - RNA, 19 nt, Artificial Sequence
  Description of Artificial Sequence: Synthetic oligonucleotide
  Antisense strand to SEQ ID NO: 2520554
uuuagccaagagcaaauga

SEQ ID NO: 2520556 - RNA, 19 nt, Artificial Sequence
  Description of Artificial Sequence: Synthetic oligonucleotide
  Sense strand starting at position 3824 of SEQ ID NO: 1888235
uuuagucuguagccagauu

SEQ ID NO: 2520557 - RNA, 19 nt, Artificial Sequence
  Description of Artificial Sequence: Synthetic oligonucleotide
  Antisense strand to SEQ ID NO: 2520556
aaucuggcuacagacuaaa

SEQ ID NO: 2520558 - RNA, 19 nt, Artificial Sequence
  Description of Artificial Sequence: Synthetic oligonucleotide
  Sense strand starting at position 3885 of SEQ ID NO: 1888235
gugugucaacaggaaugua

SEQ ID NO: 2520559 - RNA, 19 nt, Artificial Sequence
  Description of Artificial Sequence: Synthetic oligonucleotide
  Antisense strand to SEQ ID NO: 2520558
uacauuccuguugacacac

SEQ ID NO: 2520560 - RNA, 19 nt, Artificial Sequence
  Description of Artificial Sequence: Synthetic oligonucleotide
  Sense strand starting at position 3911 of SEQ ID NO: 1888235
uauuaacaucuagggugau

SEQ ID NO: 2520561 - RNA, 19 nt, Artificial Sequence
  Description of Artificial Sequence: Synthetic oligonucleotide
  Antisense strand to SEQ ID NO: 2520560
aucacccuagauguuaaua

SEQ ID NO: 2520562 - RNA, 19 nt, Artificial Sequence
  Description of Artificial Sequence: Synthetic oligonucleotide
  Sense strand starting at position 3941 of SEQ ID NO: 1888235
cuauuaagucagcauggua

SEQ ID NO: 2520563 - RNA, 19 nt, Artificial Sequence
  Description of Artificial Sequence: Synthetic oligonucleotide
  Antisense strand to SEQ ID NO: 2520562
uaccaugcugacuuaauag

SEQ ID NO: 2520564 - RNA, 19 nt, Artificial Sequence
  Description of Artificial Sequence: Synthetic oligonucleotide
  Sense strand starting at position 3944 of SEQ ID NO: 1888235
uuaagucagcaugguauaa

SEQ ID NO: 2520565 - RNA, 19 nt, Artificial Sequence
  Description of Artificial Sequence: Synthetic oligonucleotide
  Antisense strand to SEQ ID NO: 2520564
uuauaccaugcugacuuaa

SEQ ID NO: 2520566 - RNA, 19 nt, Artificial Sequence
  Description of Artificial Sequence: Synthetic oligonucleotide
  Sense strand starting at position 3948 of SEQ ID NO: 1888235
gucagcaugguauaauuaa

SEQ ID NO: 2520567 - RNA, 19 nt, Artificial Sequence
  Description of Artificial Sequence: Synthetic oligonucleotide
  Antisense strand to SEQ ID NO: 2520566
uuaauuauaccaugcugac

SEQ ID NO: 2520568 - RNA, 19 nt, Artificial Sequence
  Description of Artificial Sequence: Synthetic oligonucleotide
  Sense strand starting at position 29 of SEQ ID NO: 1888234
uuaugauggagaugugcuu

SEQ ID NO: 2520569 - RNA, 19 nt, Artificial Sequence
  Description of Artificial Sequence: Synthetic oligonucleotide
  Antisense strand to SEQ ID NO: 2520568
aagcacaucuccaucauaa

SEQ ID NO: 2520570 - RNA, 19 nt, Artificial Sequence
  Description of Artificial Sequence: Synthetic oligonucleotide
  Sense strand starting at position 35 of SEQ ID NO: 1888234
uggagaugugcuuacauaa

SEQ ID NO: 2520571 - RNA, 19 nt, Artificial Sequence
  Description of Artificial Sequence: Synthetic oligonucleotide
  Antisense strand to SEQ ID NO: 2520570
uuauguaagcacaucucca

SEQ ID NO: 2520572 - RNA, 19 nt, Artificial Sequence
  Description of Artificial Sequence: Synthetic oligonucleotide
  Sense strand starting at position 167 of SEQ ID NO: 1888234
gugcuaagcccugggaauu

SEQ ID NO: 2520573 - RNA, 19 nt, Artificial Sequence
  Description of Artificial Sequence: Synthetic oligonucleotide
  Antisense strand to SEQ ID NO: 2520572
aauucccagggcuuagcac

SEQ ID NO: 2520574 - RNA, 19 nt, Artificial Sequence
  Description of Artificial Sequence: Synthetic oligonucleotide
  Sense strand starting at position 524 of SEQ ID NO: 1888234
aggccuucucaaggauaua

SEQ ID NO: 2520575 - RNA, 19 nt, Artificial Sequence
  Description of Artificial Sequence: Synthetic oligonucleotide
  Antisense strand to SEQ ID NO: 2520574
uauauccuugagaaggccu

SEQ ID NO: 2520576 - RNA, 19 nt, Artificial Sequence
  Description of Artificial Sequence: Synthetic oligonucleotide
  Sense strand starting at position 656 of SEQ ID NO: 1888234
uuucuuguccaagagaugu

SEQ ID NO: 2520577 - RNA, 19 nt, Artificial Sequence
  Description of Artificial Sequence: Synthetic oligonucleotide
  Antisense strand to SEQ ID NO: 2520576
acaucucuuggacaagaaa

SEQ ID NO: 2520578 - RNA, 19 nt, Artificial Sequence
  Description of Artificial Sequence: Synthetic oligonucleotide
  Sense strand starting at position 698 of SEQ ID NO: 1888234
acuuacuagcacugugaga

SEQ ID NO: 2520579 - RNA, 19 nt, Artificial Sequence
  Description of Artificial Sequence: Synthetic oligonucleotide
  Antisense strand to SEQ ID NO: 2520578
ucucacagugcuaguaagu

SEQ ID NO: 2520580 - RNA, 19 nt, Artificial Sequence
  Description of Artificial Sequence: Synthetic oligonucleotide
  Sense strand starting at position 700 of SEQ ID NO: 1888234
uuacuagcacugugagaca

SEQ ID NO: 2520581 - RNA, 19 nt, Artificial Sequence
  Description of Artificial Sequence: Synthetic oligonucleotide
  Antisense strand to SEQ ID NO: 2520580
ugucucacagugcuaguaa

SEQ ID NO: 2520582 - RNA, 19 nt, Artificial Sequence
  Description of Artificial Sequence: Synthetic oligonucleotide
  Sense strand starting at position 733 of SEQ ID NO: 1888234
agaacaaguuaucugaucu

SEQ ID NO: 2520583 - RNA, 19 nt, Artificial Sequence
  Description of Artificial Sequence: Synthetic oligonucleotide
  Antisense strand to SEQ ID NO: 2520582
agaucagauaacuuguucu

SEQ ID NO: 2520584 - RNA, 19 nt, Artificial Sequence
  Description of Artificial Sequence: Synthetic oligonucleotide
  Sense strand starting at position 779 of SEQ ID NO: 1888234
gcaucauuagguuacaaug

SEQ ID NO: 2520585 - RNA, 19 nt, Artificial Sequence
  Description of Artificial Sequence: Synthetic oligonucleotide
  Antisense strand to SEQ ID NO: 2520584
cauuguaaccuaaugaugc

SEQ ID NO: 2520586 - RNA, 19 nt, Artificial Sequence
  Description of Artificial Sequence: Synthetic oligonucleotide
  Sense strand starting at position 834 of SEQ ID NO: 1888234
ugguaugaacgacgagaau

SEQ ID NO: 2520587 - RNA, 19 nt, Artificial Sequence
  Description of Artificial Sequence: Synthetic oligonucleotide
  Antisense strand to SEQ ID NO: 2520586
auucucgucguucauacca

SEQ ID NO: 2520588 - RNA, 19 nt, Artificial Sequence
  Description of Artificial Sequence: Synthetic oligonucleotide
  Sense strand starting at position 890 of SEQ ID NO: 1888234
guuuaacaacguuauacaa

SEQ ID NO: 2520589 - RNA, 19 nt, Artificial Sequence
  Description of Artificial Sequence: Synthetic oligonucleotide
  Antisense strand to SEQ ID NO: 2520588
uuguauaacguuguuaaac

SEQ ID NO: 2520590 - RNA, 19 nt, Artificial Sequence
  Description of Artificial Sequence: Synthetic oligonucleotide
  Sense strand starting at position 951 of SEQ ID NO: 1888234
aaagccuggcuguaguuaa

SEQ ID NO: 2520591 - RNA, 19 nt, Artificial Sequence
  Description of Artificial Sequence: Synthetic oligonucleotide
  Antisense strand to SEQ ID NO: 2520590
uuaacuacagccaggcuuu

SEQ ID NO: 2520592 - RNA, 19 nt, Artificial Sequence
  Description of Artificial Sequence: Synthetic oligonucleotide
  Sense strand starting at position 961 of SEQ ID NO: 1888234
uguaguuaagcuggacaca

SEQ ID NO: 2520593 - RNA, 19 nt, Artificial Sequence
  Description of Artificial Sequence: Synthetic oligonucleotide
  Antisense strand to SEQ ID NO: 2520592
uguguccagcuuaacuaca

SEQ ID NO: 2520594 - RNA, 19 nt, Artificial Sequence
  Description of Artificial Sequence: Synthetic oligonucleotide
  Sense strand starting at position 1127 of SEQ ID NO: 1888234
aucuguucucacgaagcuu

SEQ ID NO: 2520595 - RNA, 19 nt, Artificial Sequence
  Description of Artificial Sequence: Synthetic oligonucleotide
  Antisense strand to SEQ ID NO: 2520594
aagcuucgugagaacagau

SEQ ID NO: 2520596 - RNA, 19 nt, Artificial Sequence
  Description of Artificial Sequence: Synthetic oligonucleotide
  Sense strand starting at position 1234 of SEQ ID NO: 1888234
gcagcuguugcacagauca

SEQ ID NO: 2520597 - RNA, 19 nt, Artificial Sequence
  Description of Artificial Sequence: Synthetic oligonucleotide
  Antisense strand to SEQ ID NO: 2520596
ugaucugugcaacagcugc

SEQ ID NO: 2520598 - RNA, 19 nt, Artificial Sequence
  Description of Artificial Sequence: Synthetic oligonucleotide
  Sense strand starting at position 1325 of SEQ ID NO: 1888234
uggugaacugccuaaaucu

SEQ ID NO: 2520599 - RNA, 19 nt, Artificial Sequence
  Description of Artificial Sequence: Synthetic oligonucleotide
  Antisense strand to SEQ ID NO: 2520598
agauuuaggcaguucacca

SEQ ID NO: 2520600 - RNA, 19 nt, Artificial Sequence
  Description of Artificial Sequence: Synthetic oligonucleotide
  Sense strand starting at position 1364 of SEQ ID NO: 1888234
aggugcauuucuuuggcaa

SEQ ID NO: 2520601 - RNA, 19 nt, Artificial Sequence
  Description of Artificial Sequence: Synthetic oligonucleotide
  Antisense strand to SEQ ID NO: 2520600
uugccaaagaaaugcaccu

SEQ ID NO: 2520602 - RNA, 19 nt, Artificial Sequence
  Description of Artificial Sequence: Synthetic oligonucleotide
  Sense strand starting at position 1365 of SEQ ID NO: 1888234
ggugcauuucuuuggcaag

SEQ ID NO: 2520603 - RNA, 19 nt, Artificial Sequence
  Description of Artificial Sequence: Synthetic oligonucleotide
  Antisense strand to SEQ ID NO: 2520602
cuugccaaagaaaugcacc

SEQ ID NO: 2520604 - RNA, 19 nt, Artificial Sequence
  Description of Artificial Sequence: Synthetic oligonucleotide
  Sense strand starting at position 1411 of SEQ ID NO: 1888234
aaaggagucuacgccugaa

SEQ ID NO: 2520605 - RNA, 19 nt, Artificial Sequence
  Description of Artificial Sequence: Synthetic oligonucleotide
  Antisense strand to SEQ ID NO: 2520604
uucaggcguagacuccuuu

SEQ ID NO: 2520606 - RNA, 19 nt, Artificial Sequence
  Description of Artificial Sequence: Synthetic oligonucleotide
  Sense strand starting at position 2197 of SEQ ID NO: 1888234
ugccgagauuugggagaga

SEQ ID NO: 2520607 - RNA, 19 nt, Artificial Sequence
  Description of Artificial Sequence: Synthetic oligonucleotide
  Antisense strand to SEQ ID NO: 2520606
ucucucccaaaucucggca

SEQ ID NO: 2520608 - RNA, 19 nt, Artificial Sequence
  Description of Artificial Sequence: Synthetic oligonucleotide
  Sense strand starting at position 3103 of SEQ ID NO: 1888234
ccgcgcaucccuucuugau

SEQ ID NO: 2520609 - RNA, 19 nt, Artificial Sequence
  Description of Artificial Sequence: Synthetic oligonucleotide
  Antisense strand to SEQ ID NO: 2520608
aucaagaagggaugcgcgg

SEQ ID NO: 2520610 - RNA, 19 nt, Artificial Sequence
  Description of Artificial Sequence: Synthetic oligonucleotide
  Sense strand starting at position 3173 of SEQ ID NO: 1888234
caaggaggucuugguuaaa

SEQ ID NO: 2520611 - RNA, 19 nt, Artificial Sequence
  Description of Artificial Sequence: Synthetic oligonucleotide
  Antisense strand to SEQ ID NO: 2520610
uuuaaccaagaccuccuug

SEQ ID NO: 2520612 - RNA, 19 nt, Artificial Sequence
  Description of Artificial Sequence: Synthetic oligonucleotide
  Sense strand starting at position 3331 of SEQ ID NO: 1888234
ccuggugugauuugacuuu

SEQ ID NO: 2520613 - RNA, 19 nt, Artificial Sequence
  Description of Artificial Sequence: Synthetic oligonucleotide
  Antisense strand to SEQ ID NO: 2520612
aaagucaaaucacaccagg

SEQ ID NO: 2520614 - RNA, 19 nt, Artificial Sequence
  Description of Artificial Sequence: Synthetic oligonucleotide
  Sense strand starting at position 3343 of SEQ ID NO: 1888234
ugacuuuaacuucgaauag

SEQ ID NO: 2520615 - RNA, 19 nt, Artificial Sequence
  Description of Artificial Sequence: Synthetic oligonucleotide
  Antisense strand to SEQ ID NO: 2520614
cuauucgaaguuaaaguca

SEQ ID NO: 2520616 - RNA, 19 nt, Artificial Sequence
  Description of Artificial Sequence: Synthetic oligonucleotide
  Sense strand starting at position 3376 of SEQ ID NO: 1888234
caucucuuuggagauuguu

SEQ ID NO: 2520617 - RNA, 19 nt, Artificial Sequence
  Description of Artificial Sequence: Synthetic oligonucleotide
  Antisense strand to SEQ ID NO: 2520616
aacaaucuccaaagagaug

SEQ ID NO: 2520618 - RNA, 19 nt, Artificial Sequence
  Description of Artificial Sequence: Synthetic oligonucleotide
  Sense strand starting at position 3402 of SEQ ID NO: 1888234
acgaguucacugcagugaa

SEQ ID NO: 2520619 - RNA, 19 nt, Artificial Sequence
  Description of Artificial Sequence: Synthetic oligonucleotide
  Antisense strand to SEQ ID NO: 2520618
uucacugcagugaacucgu

SEQ ID NO: 2520620 - RNA, 19 nt, Artificial Sequence
  Description of Artificial Sequence: Synthetic oligonucleotide
  Sense strand starting at position 3478 of SEQ ID NO: 1888234
aucuguuguccggaguuag

SEQ ID NO: 2520621 - RNA, 19 nt, Artificial Sequence
  Description of Artificial Sequence: Synthetic oligonucleotide
  Antisense strand to SEQ ID NO: 2520620
cuaacuccggacaacagau

SEQ ID NO: 2520622 - RNA, 19 nt, Artificial Sequence
  Description of Artificial Sequence: Synthetic oligonucleotide
  Sense strand starting at position 3479 of SEQ ID NO: 1888234
ucuguuguccggaguuagu

SEQ ID NO: 2520623 - RNA, 19 nt, Artificial Sequence
  Description of Artificial Sequence: Synthetic oligonucleotide
  Antisense strand to SEQ ID NO: 2520622
acuaacuccggacaacaga

SEQ ID NO: 2520624 - RNA, 19 nt, Artificial Sequence
  Description of Artificial Sequence: Synthetic oligonucleotide
  Sense strand starting at position 3587 of SEQ ID NO: 1888234
uaagguuaugccuaacgcu

SEQ ID NO: 2520625 - RNA, 19 nt, Artificial Sequence
  Description of Artificial Sequence: Synthetic oligonucleotide
  Antisense strand to SEQ ID NO: 2520624
agcguuaggcauaaccuua

SEQ ID NO: 2520626 - RNA, 19 nt, Artificial Sequence
  Description of Artificial Sequence: Synthetic oligonucleotide
  Sense strand starting at position 3605 of SEQ ID NO: 1888234
ucauuugcucuuggcuaaa

SEQ ID NO: 2520627 - RNA, 19 nt, Artificial Sequence
  Description of Artificial Sequence: Synthetic oligonucleotide
  Antisense strand to SEQ ID NO: 2520626
uuuagccaagagcaaauga

SEQ ID NO: 2520628 - RNA, 19 nt, Artificial Sequence
  Description of Artificial Sequence: Synthetic oligonucleotide
  Sense strand starting at position 3763 of SEQ ID NO: 1888234
gugugucaacaggaaugua

SEQ ID NO: 2520629 - RNA, 19 nt, Artificial Sequence
  Description of Artificial Sequence: Synthetic oligonucleotide
  Antisense strand to SEQ ID NO: 2520628
uacauuccuguugacacac

SEQ ID NO: 2520630 - RNA, 19 nt, Artificial Sequence
  Description of Artificial Sequence: Synthetic oligonucleotide
  Sense strand starting at position 3789 of SEQ ID NO: 1888234
uauuaacaucuagggugau

SEQ ID NO: 2520631 - RNA, 19 nt, Artificial Sequence
  Description of Artificial Sequence: Synthetic oligonucleotide
  Antisense strand to SEQ ID NO: 2520630
aucacccuagauguuaaua

SEQ ID NO: 2520632 - RNA, 19 nt, Artificial Sequence
  Description of Artificial Sequence: Synthetic oligonucleotide
  Sense strand starting at position 3819 of SEQ ID NO: 1888234
cuauuaagucagcauggua

SEQ ID NO: 2520633 - RNA, 19 nt, Artificial Sequence
  Description of Artificial Sequence: Synthetic oligonucleotide
  Antisense strand to SEQ ID NO: 2520632
uaccaugcugacuuaauag

SEQ ID NO: 2520634 - RNA, 19 nt, Artificial Sequence
  Description of Artificial Sequence: Synthetic oligonucleotide
  Sense strand starting at position 3822 of SEQ ID NO: 1888234
uuaagucagcaugguauaa

SEQ ID NO: 2520635 - RNA, 19 nt, Artificial Sequence
  Description of Artificial Sequence: Synthetic oligonucleotide
  Antisense strand to SEQ ID NO: 2520634
uuauaccaugcugacuuaa

SEQ ID NO: 2520636 - RNA, 19 nt, Artificial Sequence
  Description of Artificial Sequence: Synthetic oligonucleotide
  Sense strand starting at position 3826 of SEQ ID NO: 1888234
gucagcaugguauaauuaa

SEQ ID NO: 2520637 - RNA, 19 nt, Artificial Sequence
  Description of Artificial Sequence: Synthetic oligonucleotide
  Antisense strand to SEQ ID NO: 2520636
uuaauuauaccaugcugac

SEQ ID NO: 2520638 - RNA, 19 nt, Artificial Sequence
  Description of Artificial Sequence: Synthetic oligonucleotide
  Sense strand starting at position 3911 of SEQ ID NO: 1888234
augagauucuaguccuuac

SEQ ID NO: 2520639 - RNA, 19 nt, Artificial Sequence
  Description of Artificial Sequence: Synthetic oligonucleotide
  Antisense strand to SEQ ID NO: 2520638
guaaggacuagaaucucau

SEQ ID NO: 2520640 - RNA, 19 nt, Artificial Sequence
  Description of Artificial Sequence: Synthetic oligonucleotide
  Sense strand starting at position 3914 of SEQ ID NO: 1888234
agauucuaguccuuacgga

SEQ ID NO: 2520641 - RNA, 19 nt, Artificial Sequence
  Description of Artificial Sequence: Synthetic oligonucleotide
  Antisense strand to SEQ ID NO: 2520640
uccguaaggacuagaaucu

SEQ ID NO: 2520642 - RNA, 19 nt, Artificial Sequence
  Description of Artificial Sequence: Synthetic oligonucleotide
  Sense strand starting at position 3915 of SEQ ID NO: 1888234
gauucuaguccuuacggaa

SEQ ID NO: 2520643 - RNA, 19 nt, Artificial Sequence
  Description of Artificial Sequence: Synthetic oligonucleotide
  Antisense strand to SEQ ID NO: 2520642
uuccguaaggacuagaauc

SEQ ID NO: 2520644 - RNA, 19 nt, Artificial Sequence
  Description of Artificial Sequence: Synthetic oligonucleotide
  Sense strand starting at position 3933 of SEQ ID NO: 1888234
aauggaguuugggcuucua

SEQ ID NO: 2520645 - RNA, 19 nt, Artificial Sequence
  Description of Artificial Sequence: Synthetic oligonucleotide
  Antisense strand to SEQ ID NO: 2520644
uagaagcccaaacuccauu

SEQ ID NO: 2520646 - RNA, 19 nt, Artificial Sequence
  Description of Artificial Sequence: Synthetic oligonucleotide
  Sense strand starting at position 3944 of SEQ ID NO: 1888234
ggcuucuaucccuagcauu

SEQ ID NO: 2520647 - RNA, 19 nt, Artificial Sequence
  Description of Artificial Sequence: Synthetic oligonucleotide
  Antisense strand to SEQ ID NO: 2520646
aaugcuagggauagaagcc

SEQ ID NO: 2520648 - RNA, 19 nt, Artificial Sequence
  Description of Artificial Sequence: Synthetic oligonucleotide
  Sense strand starting at position 72 of SEQ ID NO: 1888237
gcuuuaagaggcugauaca

SEQ ID NO: 2520649 - RNA, 19 nt, Artificial Sequence
  Description of Artificial Sequence: Synthetic oligonucleotide
  Antisense strand to SEQ ID NO: 2520648
uguaucagccucuuaaagc

SEQ ID NO: 2520650 - RNA, 19 nt, Artificial Sequence
  Description of Artificial Sequence: Synthetic oligonucleotide
  Sense strand starting at position 82 of SEQ ID NO: 1888237
gcugauacagaaggguaaa

SEQ ID NO: 2520651 - RNA, 19 nt, Artificial Sequence
  Description of Artificial Sequence: Synthetic oligonucleotide
  Antisense strand to SEQ ID NO: 2520650
uuuacccuucuguaucagc

SEQ ID NO: 2520652 - RNA, 19 nt, Artificial Sequence
  Description of Artificial Sequence: Synthetic oligonucleotide
  Sense strand starting at position 131 of SEQ ID NO: 1888237
cugugaaacucaucuuaga

SEQ ID NO: 2520653 - RNA, 19 nt, Artificial Sequence
  Description of Artificial Sequence: Synthetic oligonucleotide
  Antisense strand to SEQ ID NO: 2520652
ucuaagaugaguuucacag

SEQ ID NO: 2520654 - RNA, 19 nt, Artificial Sequence
  Description of Artificial Sequence: Synthetic oligonucleotide
  Sense strand starting at position 158 of SEQ ID NO: 1888237
uggagucacagcugaacua

SEQ ID NO: 2520655 - RNA, 19 nt, Artificial Sequence
  Description of Artificial Sequence: Synthetic oligonucleotide
  Antisense strand to SEQ ID NO: 2520654
uaguucagcugugacucca

SEQ ID NO: 2520656 - RNA, 19 nt, Artificial Sequence
  Description of Artificial Sequence: Synthetic oligonucleotide
  Sense strand starting at position 255 of SEQ ID NO: 1888237
agccauaaugauugagaau

SEQ ID NO: 2520657 - RNA, 19 nt, Artificial Sequence
  Description of Artificial Sequence: Synthetic oligonucleotide
  Antisense strand to SEQ ID NO: 2520656
auucucaaucauuauggcu

SEQ ID NO: 2520658 - RNA, 19 nt, Artificial Sequence
  Description of Artificial Sequence: Synthetic oligonucleotide
  Sense strand starting at position 360 of SEQ ID NO: 1888237
gaauucugcugaccaaggu

SEQ ID NO: 2520659 - RNA, 19 nt, Artificial Sequence
  Description of Artificial Sequence: Synthetic oligonucleotide
  Antisense strand to SEQ ID NO: 2520658
accuuggucagcagaauuc

SEQ ID NO: 2520660 - RNA, 19 nt, Artificial Sequence
  Description of Artificial Sequence: Synthetic oligonucleotide
  Sense strand starting at position 394 of SEQ ID NO: 1888237
agagaaguggugugaagaa

SEQ ID NO: 2520661 - RNA, 19 nt, Artificial Sequence
  Description of Artificial Sequence: Synthetic oligonucleotide
  Antisense strand to SEQ ID NO: 2520660
uucuucacaccacuucucu

SEQ ID NO: 2520662 - RNA, 19 nt, Artificial Sequence
  Description of Artificial Sequence: Synthetic oligonucleotide
  Sense strand starting at position 435 of SEQ ID NO: 1888237
cuguccauccuguaacaau

SEQ ID NO: 2520663 - RNA, 19 nt, Artificial Sequence
  Description of Artificial Sequence: Synthetic oligonucleotide
  Antisense strand to SEQ ID NO: 2520662
auuguuacaggauggacag

SEQ ID NO: 2520664 - RNA, 19 nt, Artificial Sequence
  Description of Artificial Sequence: Synthetic oligonucleotide
  Sense strand starting at position 809 of SEQ ID NO: 1888237
uugacucagcuguauuacu

SEQ ID NO: 2520665 - RNA, 19 nt, Artificial Sequence
  Description of Artificial Sequence: Synthetic oligonucleotide
  Antisense strand to SEQ ID NO: 2520664
aguaauacagcugagucaa

SEQ ID NO: 2520666 - RNA, 19 nt, Artificial Sequence
  Description of Artificial Sequence: Synthetic oligonucleotide
  Sense strand starting at position 868 of SEQ ID NO: 1888237
gguguuuguaguuaaacaa

SEQ ID NO: 2520667 - RNA, 19 nt, Artificial Sequence
  Description of Artificial Sequence: Synthetic oligonucleotide
  Antisense strand to SEQ ID NO: 2520666
uuguuuaacuacaaacacc

SEQ ID NO: 2520668 - RNA, 19 nt, Artificial Sequence
  Description of Artificial Sequence: Synthetic oligonucleotide
  Sense strand starting at position 996 of SEQ ID NO: 1888237
uuuccaaguguuuacggaa

SEQ ID NO: 2520669 - RNA, 19 nt, Artificial Sequence
  Description of Artificial Sequence: Synthetic oligonucleotide
  Antisense strand to SEQ ID NO: 2520668
uuccguaaacacuuggaaa

SEQ ID NO: 2520670 - RNA, 19 nt, Artificial Sequence
  Description of Artificial Sequence: Synthetic oligonucleotide
  Sense strand starting at position 1070 of SEQ ID NO: 1888237
agcuuuauacaaugaacga

SEQ ID NO: 2520671 - RNA, 19 nt, Artificial Sequence
  Description of Artificial Sequence: Synthetic oligonucleotide
  Antisense strand to SEQ ID NO: 2520670
ucguucauuguauaaagcu

SEQ ID NO: 2520672 - RNA, 19 nt, Artificial Sequence
  Description of Artificial Sequence: Synthetic oligonucleotide
  Sense strand starting at position 1081 of SEQ ID NO: 1888237
augaacgauugagugauua

SEQ ID NO: 2520673 - RNA, 19 nt, Artificial Sequence
  Description of Artificial Sequence: Synthetic oligonucleotide
  Antisense strand to SEQ ID NO: 2520672
uaaucacucaaucguucau

SEQ ID NO: 2520674 - RNA, 19 nt, Artificial Sequence
  Description of Artificial Sequence: Synthetic oligonucleotide
  Sense strand starting at position 1085 of SEQ ID NO: 1888237
acgauugagugauuauaag

SEQ ID NO: 2520675 - RNA, 19 nt, Artificial Sequence
  Description of Artificial Sequence: Synthetic oligonucleotide
  Antisense strand to SEQ ID NO: 2520674
cuuauaaucacucaaucgu

SEQ ID NO: 2520676 - RNA, 19 nt, Artificial Sequence
  Description of Artificial Sequence: Synthetic oligonucleotide
  Sense strand starting at position 1188 of SEQ ID NO: 1888237
gcaucaauucuguaauuga

SEQ ID NO: 2520677 - RNA, 19 nt, Artificial Sequence
  Description of Artificial Sequence: Synthetic oligonucleotide
  Antisense strand to SEQ ID NO: 2520676
ucaauuacagaauugaugc

SEQ ID NO: 2520678 - RNA, 19 nt, Artificial Sequence
  Description of Artificial Sequence: Synthetic oligonucleotide
  Sense strand starting at position 1306 of SEQ ID NO: 1888237
gcuggaaacuuucuaccca

SEQ ID NO: 2520679 - RNA, 19 nt, Artificial Sequence
  Description of Artificial Sequence: Synthetic oligonucleotide
  Antisense strand to SEQ ID NO: 2520678
uggguagaaaguuuccagc

SEQ ID NO: 2520680 - RNA, 19 nt, Artificial Sequence
  Description of Artificial Sequence: Synthetic oligonucleotide
  Sense strand starting at position 1380 of SEQ ID NO: 1888237
ggacccgaucuccacauau

SEQ ID NO: 2520681 - RNA, 19 nt, Artificial Sequence
  Description of Artificial Sequence: Synthetic oligonucleotide
  Antisense strand to SEQ ID NO: 2520680
auauguggagaucgggucc

SEQ ID NO: 2520682 - RNA, 19 nt, Artificial Sequence
  Description of Artificial Sequence: Synthetic oligonucleotide
  Sense strand starting at position 1526 of SEQ ID NO: 1888237
cacgauuggcccuaaaguc

SEQ ID NO: 2520683 - RNA, 19 nt, Artificial Sequence
  Description of Artificial Sequence: Synthetic oligonucleotide
  Antisense strand to SEQ ID NO: 2520682
gacuuuagggccaaucgug

SEQ ID NO: 2520684 - RNA, 19 nt, Artificial Sequence
  Description of Artificial Sequence: Synthetic oligonucleotide
  Sense strand starting at position 2283 of SEQ ID NO: 1888237
gggcucuuugcucacuaaa

SEQ ID NO: 2520685 - RNA, 19 nt, Artificial Sequence
  Description of Artificial Sequence: Synthetic oligonucleotide
  Antisense strand to SEQ ID NO: 2520684
uuuagugagcaaagagccc

SEQ ID NO: 2520686 - RNA, 19 nt, Artificial Sequence
  Description of Artificial Sequence: Synthetic oligonucleotide
  Sense strand starting at position 2477 of SEQ ID NO: 1888237
uacuuaguggcaggagauu

SEQ ID NO: 2520687 - RNA, 19 nt, Artificial Sequence
  Description of Artificial Sequence: Synthetic oligonucleotide
  Antisense strand to SEQ ID NO: 2520686
aaucuccugccacuaagua

SEQ ID NO: 2520688 - RNA, 19 nt, Artificial Sequence
  Description of Artificial Sequence: Synthetic oligonucleotide
  Sense strand starting at position 2488 of SEQ ID NO: 1888237
aggagauuguuucuaucca

SEQ ID NO: 2520689 - RNA, 19 nt, Artificial Sequence
  Description of Artificial Sequence: Synthetic oligonucleotide
  Antisense strand to SEQ ID NO: 2520688
uggauagaaacaaucuccu

SEQ ID NO: 2520690 - RNA, 19 nt, Artificial Sequence
  Description of Artificial Sequence: Synthetic oligonucleotide
  Sense strand starting at position 2492 of SEQ ID NO: 1888237
gauuguuucuauccagaag

SEQ ID NO: 2520691 - RNA, 19 nt, Artificial Sequence
  Description of Artificial Sequence: Synthetic oligonucleotide
  Antisense strand to SEQ ID NO: 2520690
cuucuggauagaaacaauc

SEQ ID NO: 2520692 - RNA, 19 nt, Artificial Sequence
  Description of Artificial Sequence: Synthetic oligonucleotide
  Sense strand starting at position 2646 of SEQ ID NO: 1888237
ccuucuaaccgcguucgaa

SEQ ID NO: 2520693 - RNA, 19 nt, Artificial Sequence
  Description of Artificial Sequence: Synthetic oligonucleotide
  Antisense strand to SEQ ID NO: 2520692
uucgaacgcgguuagaagg

SEQ ID NO: 2520694 - RNA, 19 nt, Artificial Sequence
  Description of Artificial Sequence: Synthetic oligonucleotide
  Sense strand starting at position 2868 of SEQ ID NO: 1888237
cugugucaguauuucucaa

SEQ ID NO: 2520695 - RNA, 19 nt, Artificial Sequence
  Description of Artificial Sequence: Synthetic oligonucleotide
  Antisense strand to SEQ ID NO: 2520694
uugagaaauacugacacag

SEQ ID NO: 2520696 - RNA, 19 nt, Artificial Sequence
  Description of Artificial Sequence: Synthetic oligonucleotide
  Sense strand starting at position 2967 of SEQ ID NO: 1888237
uuggaauuccagugaguau

SEQ ID NO: 2520697 - RNA, 19 nt, Artificial Sequence
  Description of Artificial Sequence: Synthetic oligonucleotide
  Antisense strand to SEQ ID NO: 2520696
auacucacuggaauuccaa

SEQ ID NO: 2520698 - RNA, 19 nt, Artificial Sequence
  Description of Artificial Sequence: Synthetic oligonucleotide
  Sense strand starting at position 2968 of SEQ ID NO: 1888237
uggaauuccagugaguauc

SEQ ID NO: 2520699 - RNA, 19 nt, Artificial Sequence
  Description of Artificial Sequence: Synthetic oligonucleotide
  Antisense strand to SEQ ID NO: 2520698
gauacucacuggaauucca

SEQ ID NO: 2520700 - RNA, 19 nt, Artificial Sequence
  Description of Artificial Sequence: Synthetic oligonucleotide
  Sense strand starting at position 3025 of SEQ ID NO: 1888237
aguuaugucauagaauguu

SEQ ID NO: 2520701 - RNA, 19 nt, Artificial Sequence
  Description of Artificial Sequence: Synthetic oligonucleotide
  Antisense strand to SEQ ID NO: 2520700
aacauucuaugacauaacu

SEQ ID NO: 2520702 - RNA, 19 nt, Artificial Sequence
  Description of Artificial Sequence: Synthetic oligonucleotide
  Sense strand starting at position 3280 of SEQ ID NO: 1888237
auccuccuccgucaagaua

SEQ ID NO: 2520703 - RNA, 19 nt, Artificial Sequence
  Description of Artificial Sequence: Synthetic oligonucleotide
  Antisense strand to SEQ ID NO: 2520702
uaucuugacggaggaggau

SEQ ID NO: 2520704 - RNA, 19 nt, Artificial Sequence
  Description of Artificial Sequence: Synthetic oligonucleotide
  Sense strand starting at position 3440 of SEQ ID NO: 1888237
ccaguugucuauuugcauu

SEQ ID NO: 2520705 - RNA, 19 nt, Artificial Sequence
  Description of Artificial Sequence: Synthetic oligonucleotide
  Antisense strand to SEQ ID NO: 2520704
aaugcaaauagacaacugg

SEQ ID NO: 2520706 - RNA, 19 nt, Artificial Sequence
  Description of Artificial Sequence: Synthetic oligonucleotide
  Sense strand starting at position 3442 of SEQ ID NO: 1888237
aguugucuauuugcauuaa

SEQ ID NO: 2520707 - RNA, 19 nt, Artificial Sequence
  Description of Artificial Sequence: Synthetic oligonucleotide
  Antisense strand to SEQ ID NO: 2520706
uuaaugcaaauagacaacu

SEQ ID NO: 2520708 - RNA, 19 nt, Artificial Sequence
  Description of Artificial Sequence: Synthetic oligonucleotide
  Sense strand starting at position 3547 of SEQ ID NO: 1888237
uauccagguuagguuuaua

SEQ ID NO: 2520709 - RNA, 19 nt, Artificial Sequence
  Description of Artificial Sequence: Synthetic oligonucleotide
  Antisense strand to SEQ ID NO: 2520708
uauaaaccuaaccuggaua

SEQ ID NO: 2520710 - RNA, 19 nt, Artificial Sequence
  Description of Artificial Sequence: Synthetic oligonucleotide
  Sense strand starting at position 3550 of SEQ ID NO: 1888237
ccagguuagguuuauaaac

SEQ ID NO: 2520711 - RNA, 19 nt, Artificial Sequence
  Description of Artificial Sequence: Synthetic oligonucleotide
  Antisense strand to SEQ ID NO: 2520710
guuuauaaaccuaaccugg

SEQ ID NO: 2520712 - RNA, 19 nt, Artificial Sequence
  Description of Artificial Sequence: Synthetic oligonucleotide
  Sense strand starting at position 3579 of SEQ ID NO: 1888237
agaagaaauguuugaaugu

SEQ ID NO: 2520713 - RNA, 19 nt, Artificial Sequence
  Description of Artificial Sequence: Synthetic oligonucleotide
  Antisense strand to SEQ ID NO: 2520712
acauucaaacauuucuucu

SEQ ID NO: 2520714 - RNA, 19 nt, Artificial Sequence
  Description of Artificial Sequence: Synthetic oligonucleotide
  Sense strand starting at position 3647 of SEQ ID NO: 1888237
cugcuugcgccaucaugau

SEQ ID NO: 2520715 - RNA, 19 nt, Artificial Sequence
  Description of Artificial Sequence: Synthetic oligonucleotide
  Antisense strand to SEQ ID NO: 2520714
aucaugauggcgcaagcag

SEQ ID NO: 2520716 - RNA, 19 nt, Artificial Sequence
  Description of Artificial Sequence: Synthetic oligonucleotide
  Sense strand starting at position 3659 of SEQ ID NO: 1888237
ucaugauuucugugccaua

SEQ ID NO: 2520717 - RNA, 19 nt, Artificial Sequence
  Description of Artificial Sequence: Synthetic oligonucleotide
  Antisense strand to SEQ ID NO: 2520716
uauggcacagaaaucauga

SEQ ID NO: 2520718 - RNA, 19 nt, Artificial Sequence
  Description of Artificial Sequence: Synthetic oligonucleotide
  Sense strand starting at position 3691 of SEQ ID NO: 1888237
uuacuuuaucccuggagga

SEQ ID NO: 2520719 - RNA, 19 nt, Artificial Sequence
  Description of Artificial Sequence: Synthetic oligonucleotide
  Antisense strand to SEQ ID NO: 2520718
uccuccagggauaaaguaa

SEQ ID NO: 2520720 - RNA, 19 nt, Artificial Sequence
  Description of Artificial Sequence: Synthetic oligonucleotide
  Sense strand starting at position 3692 of SEQ ID NO: 1888237
uacuuuaucccuggaggau

SEQ ID NO: 2520721 - RNA, 19 nt, Artificial Sequence
  Description of Artificial Sequence: Synthetic oligonucleotide
  Antisense strand to SEQ ID NO: 2520720
auccuccagggauaaagua

SEQ ID NO: 2520722 - RNA, 19 nt, Artificial Sequence
  Description of Artificial Sequence: Synthetic oligonucleotide
  Sense strand starting at position 3865 of SEQ ID NO: 1888237
ggugccaaaucauuaaauu

SEQ ID NO: 2520723 - RNA, 19 nt, Artificial Sequence
  Description of Artificial Sequence: Synthetic oligonucleotide
  Antisense strand to SEQ ID NO: 2520722
aauuuaaugauuuggcacc

SEQ ID NO: 2520724 - RNA, 19 nt, Artificial Sequence
  Description of Artificial Sequence: Synthetic oligonucleotide
  Sense strand starting at position 3959 of SEQ ID NO: 1888237
ggugaauuugcacguauau

SEQ ID NO: 2520725 - RNA, 19 nt, Artificial Sequence
  Description of Artificial Sequence: Synthetic oligonucleotide
  Antisense strand to SEQ ID NO: 2520724
auauacgugcaaauucacc

SEQ ID NO: 2520726 - RNA, 19 nt, Artificial Sequence
  Description of Artificial Sequence: Synthetic oligonucleotide
  Sense strand starting at position 3980 of SEQ ID NO: 1888237
cgagaucucagccauauug

SEQ ID NO: 2520727 - RNA, 19 nt, Artificial Sequence
  Description of Artificial Sequence: Synthetic oligonucleotide
  Antisense strand to SEQ ID NO: 2520726
caauauggcugagaucucg

SEQ ID NO: 2520728 - RNA, 19 nt, Artificial Sequence
  Description of Artificial Sequence: Synthetic oligonucleotide
  Sense strand starting at position 148 of SEQ ID NO: 1888238
gagaaagucuuggcaagcu

SEQ ID NO: 2520729 - RNA, 19 nt, Artificial Sequence
  Description of Artificial Sequence: Synthetic oligonucleotide
  Antisense strand to SEQ ID NO: 2520728
agcuugccaagacuuucuc

SEQ ID NO: 2520730 - RNA, 19 nt, Artificial Sequence
  Description of Artificial Sequence: Synthetic oligonucleotide
  Sense strand starting at position 169 of SEQ ID NO: 1888238
ggaguuacugcuuauuccu

SEQ ID NO: 2520731 - RNA, 19 nt, Artificial Sequence
  Description of Artificial Sequence: Synthetic oligonucleotide
  Antisense strand to SEQ ID NO: 2520730
aggaauaagcaguaacucc

SEQ ID NO: 2520732 - RNA, 19 nt, Artificial Sequence
  Description of Artificial Sequence: Synthetic oligonucleotide
  Sense strand starting at position 183 of SEQ ID NO: 1888238
uuccuuauuccuuaguguu

SEQ ID NO: 2520733 - RNA, 19 nt, Artificial Sequence
  Description of Artificial Sequence: Synthetic oligonucleotide
  Antisense strand to SEQ ID NO: 2520732
aacacuaaggaauaaggaa

SEQ ID NO: 2520734 - RNA, 19 nt, Artificial Sequence
  Description of Artificial Sequence: Synthetic oligonucleotide
  Sense strand starting at position 286 of SEQ ID NO: 1888238
gccggaaagcucuacucaa

SEQ ID NO: 2520735 - RNA, 19 nt, Artificial Sequence
  Description of Artificial Sequence: Synthetic oligonucleotide
  Antisense strand to SEQ ID NO: 2520734
uugaguagagcuuuccggc

SEQ ID NO: 2520736 - RNA, 19 nt, Artificial Sequence
  Description of Artificial Sequence: Synthetic oligonucleotide
  Sense strand starting at position 638 of SEQ ID NO: 1888238
ggcagagcuguccucguua

SEQ ID NO: 2520737 - RNA, 19 nt, Artificial Sequence
  Description of Artificial Sequence: Synthetic oligonucleotide
  Antisense strand to SEQ ID NO: 2520736
uaacgaggacagcucugcc

SEQ ID NO: 2520738 - RNA, 19 nt, Artificial Sequence
  Description of Artificial Sequence: Synthetic oligonucleotide
  Sense strand starting at position 746 of SEQ ID NO: 1888238
uuucuuauagugggauuaa

SEQ ID NO: 2520739 - RNA, 19 nt, Artificial Sequence
  Description of Artificial Sequence: Synthetic oligonucleotide
  Antisense strand to SEQ ID NO: 2520738
uuaaucccacuauaagaaa

SEQ ID NO: 2520740 - RNA, 19 nt, Artificial Sequence
  Description of Artificial Sequence: Synthetic oligonucleotide
  Sense strand starting at position 976 of SEQ ID NO: 1888238
ccucuaacacugugaugua

SEQ ID NO: 2520741 - RNA, 19 nt, Artificial Sequence
  Description of Artificial Sequence: Synthetic oligonucleotide
  Antisense strand to SEQ ID NO: 2520740
uacaucacaguguuagagg

SEQ ID NO: 2520742 - RNA, 19 nt, Artificial Sequence
  Description of Artificial Sequence: Synthetic oligonucleotide
  Sense strand starting at position 1009 of SEQ ID NO: 1888238
aguuguaacccacagauau

SEQ ID NO: 2520743 - RNA, 19 nt, Artificial Sequence
  Description of Artificial Sequence: Synthetic oligonucleotide
  Antisense strand to SEQ ID NO: 2520742
auaucuguggguuacaacu

SEQ ID NO: 2520744 - RNA, 19 nt, Artificial Sequence
  Description of Artificial Sequence: Synthetic oligonucleotide
  Sense strand starting at position 1151 of SEQ ID NO: 1888238
uuugccucuccagggauau

SEQ ID NO: 2520745 - RNA, 19 nt, Artificial Sequence
  Description of Artificial Sequence: Synthetic oligonucleotide
  Antisense strand to SEQ ID NO: 2520744
auaucccuggagaggcaaa

SEQ ID NO: 2520746 - RNA, 19 nt, Artificial Sequence
  Description of Artificial Sequence: Synthetic oligonucleotide
  Sense strand starting at position 1177 of SEQ ID NO: 1888238
cuaccucaggucugaaagu

SEQ ID NO: 2520747 - RNA, 19 nt, Artificial Sequence
  Description of Artificial Sequence: Synthetic oligonucleotide
  Antisense strand to SEQ ID NO: 2520746
acuuucagaccugagguag

SEQ ID NO: 2520748 - RNA, 19 nt, Artificial Sequence
  Description of Artificial Sequence: Synthetic oligonucleotide
  Sense strand starting at position 1690 of SEQ ID NO: 1888238
ggaaaucuuucccugguca

SEQ ID NO: 2520749 - RNA, 19 nt, Artificial Sequence
  Description of Artificial Sequence: Synthetic oligonucleotide
  Antisense strand to SEQ ID NO: 2520748
ugaccagggaaagauuucc

SEQ ID NO: 2520750 - RNA, 19 nt, Artificial Sequence
  Description of Artificial Sequence: Synthetic oligonucleotide
  Sense strand starting at position 1691 of SEQ ID NO: 1888238
gaaaucuuucccuggucag

SEQ ID NO: 2520751 - RNA, 19 nt, Artificial Sequence
  Description of Artificial Sequence: Synthetic oligonucleotide
  Antisense strand to SEQ ID NO: 2520750
cugaccagggaaagauuuc

SEQ ID NO: 2520752 - RNA, 19 nt, Artificial Sequence
  Description of Artificial Sequence: Synthetic oligonucleotide
  Sense strand starting at position 1694 of SEQ ID NO: 1888238
aucuuucccuggucagauc

SEQ ID NO: 2520753 - RNA, 19 nt, Artificial Sequence
  Description of Artificial Sequence: Synthetic oligonucleotide
  Antisense strand to SEQ ID NO: 2520752
gaucugaccagggaaagau

SEQ ID NO: 2520754 - RNA, 19 nt, Artificial Sequence
  Description of Artificial Sequence: Synthetic oligonucleotide
  Sense strand starting at position 1705 of SEQ ID NO: 1888238
gucagaucucgcgcccuca

SEQ ID NO: 2520755 - RNA, 19 nt, Artificial Sequence
  Description of Artificial Sequence: Synthetic oligonucleotide
  Antisense strand to SEQ ID NO: 2520754
ugagggcgcgagaucugac

SEQ ID NO: 2520756 - RNA, 19 nt, Artificial Sequence
  Description of Artificial Sequence: Synthetic oligonucleotide
  Sense strand starting at position 1996 of SEQ ID NO: 1888238
uccgcugucgucccggaaa

SEQ ID NO: 2520757 - RNA, 19 nt, Artificial Sequence
  Description of Artificial Sequence: Synthetic oligonucleotide
  Antisense strand to SEQ ID NO: 2520756
uuuccgggacgacagcgga

SEQ ID NO: 2520758 - RNA, 19 nt, Artificial Sequence
  Description of Artificial Sequence: Synthetic oligonucleotide
  Sense strand starting at position 2015 of SEQ ID NO: 1888238
ccgggaugcgguuaucaga

SEQ ID NO: 2520759 - RNA, 19 nt, Artificial Sequence
  Description of Artificial Sequence: Synthetic oligonucleotide
  Antisense strand to SEQ ID NO: 2520758
ucugauaaccgcaucccgg

SEQ ID NO: 2520760 - RNA, 19 nt, Artificial Sequence
  Description of Artificial Sequence: Synthetic oligonucleotide
  Sense strand starting at position 2054 of SEQ ID NO: 1888238
cgaagauucccucagagcu

SEQ ID NO: 2520761 - RNA, 19 nt, Artificial Sequence
  Description of Artificial Sequence: Synthetic oligonucleotide
  Antisense strand to SEQ ID NO: 2520760
agcucugagggaaucuucg

SEQ ID NO: 2520762 - RNA, 19 nt, Artificial Sequence
  Description of Artificial Sequence: Synthetic oligonucleotide
  Sense strand starting at position 2210 of SEQ ID NO: 1888238
uuacccauuugauaguuga

SEQ ID NO: 2520763 - RNA, 19 nt, Artificial Sequence
  Description of Artificial Sequence: Synthetic oligonucleotide
  Antisense strand to SEQ ID NO: 2520762
ucaacuaucaaauggguaa

SEQ ID NO: 2520764 - RNA, 19 nt, Artificial Sequence
  Description of Artificial Sequence: Synthetic oligonucleotide
  Sense strand starting at position 2553 of SEQ ID NO: 1888238
aguacacuuuccuuuaagu

SEQ ID NO: 2520765 - RNA, 19 nt, Artificial Sequence
  Description of Artificial Sequence: Synthetic oligonucleotide
  Antisense strand to SEQ ID NO: 2520764
acuuaaaggaaaguguacu

SEQ ID NO: 2520766 - RNA, 19 nt, Artificial Sequence
  Description of Artificial Sequence: Synthetic oligonucleotide
  Sense strand starting at position 2558 of SEQ ID NO: 1888238
acuuuccuuuaaguaguua

SEQ ID NO: 2520767 - RNA, 19 nt, Artificial Sequence
  Description of Artificial Sequence: Synthetic oligonucleotide
  Antisense strand to SEQ ID NO: 2520766
uaacuacuuaaaggaaagu

SEQ ID NO: 2520768 - RNA, 19 nt, Artificial Sequence
  Description of Artificial Sequence: Synthetic oligonucleotide
  Sense strand starting at position 2601 of SEQ ID NO: 1888238
ucaguauucgauugcauuu

SEQ ID NO: 2520769 - RNA, 19 nt, Artificial Sequence
  Description of Artificial Sequence: Synthetic oligonucleotide
  Antisense strand to SEQ ID NO: 2520768
aaaugcaaucgaauacuga

SEQ ID NO: 2520770 - RNA, 19 nt, Artificial Sequence
  Description of Artificial Sequence: Synthetic oligonucleotide
  Sense strand starting at position 2830 of SEQ ID NO: 1888238
agauuaaucuguuccagaa

SEQ ID NO: 2520771 - RNA, 19 nt, Artificial Sequence
  Description of Artificial Sequence: Synthetic oligonucleotide
  Antisense strand to SEQ ID NO: 2520770
uucuggaacagauuaaucu

SEQ ID NO: 2520772 - RNA, 19 nt, Artificial Sequence
  Description of Artificial Sequence: Synthetic oligonucleotide
  Sense strand starting at position 3048 of SEQ ID NO: 1888238
cugugcaagcuccuuugua

SEQ ID NO: 2520773 - RNA, 19 nt, Artificial Sequence
  Description of Artificial Sequence: Synthetic oligonucleotide
  Antisense strand to SEQ ID NO: 2520772
uacaaaggagcuugcacag

SEQ ID NO: 2520774 - RNA, 19 nt, Artificial Sequence
  Description of Artificial Sequence: Synthetic oligonucleotide
  Sense strand starting at position 3081 of SEQ ID NO: 1888238
auauccuuuggccagguau

SEQ ID NO: 2520775 - RNA, 19 nt, Artificial Sequence
  Description of Artificial Sequence: Synthetic oligonucleotide
  Antisense strand to SEQ ID NO: 2520774
auaccuggccaaaggauau

SEQ ID NO: 2520776 - RNA, 19 nt, Artificial Sequence
  Description of Artificial Sequence: Synthetic oligonucleotide
  Sense strand starting at position 3083 of SEQ ID NO: 1888238
auccuuuggccagguauuu

SEQ ID NO: 2520777 - RNA, 19 nt, Artificial Sequence
  Description of Artificial Sequence: Synthetic oligonucleotide
  Antisense strand to SEQ ID NO: 2520776
aaauaccuggccaaaggau

SEQ ID NO: 2520778 - RNA, 19 nt, Artificial Sequence
  Description of Artificial Sequence: Synthetic oligonucleotide
  Sense strand starting at position 3092 of SEQ ID NO: 1888238
ccagguauuuaagagugga

SEQ ID NO: 2520779 - RNA, 19 nt, Artificial Sequence
  Description of Artificial Sequence: Synthetic oligonucleotide
  Antisense strand to SEQ ID NO: 2520778
uccacucuuaaauaccugg

SEQ ID NO: 2520780 - RNA, 19 nt, Artificial Sequence
  Description of Artificial Sequence: Synthetic oligonucleotide
  Sense strand starting at position 3202 of SEQ ID NO: 1888238
augagucuccauuguacca

SEQ ID NO: 2520781 - RNA, 19 nt, Artificial Sequence
  Description of Artificial Sequence: Synthetic oligonucleotide
  Antisense strand to SEQ ID NO: 2520780
ugguacaauggagacucau

SEQ ID NO: 2520782 - RNA, 19 nt, Artificial Sequence
  Description of Artificial Sequence: Synthetic oligonucleotide
  Sense strand starting at position 3225 of SEQ ID NO: 1888238
cuggucagcauuugaaguu

SEQ ID NO: 2520783 - RNA, 19 nt, Artificial Sequence
  Description of Artificial Sequence: Synthetic oligonucleotide
  Antisense strand to SEQ ID NO: 2520782
aacuucaaaugcugaccag

SEQ ID NO: 2520784 - RNA, 19 nt, Artificial Sequence
  Description of Artificial Sequence: Synthetic oligonucleotide
  Sense strand starting at position 3269 of SEQ ID NO: 1888238
ugaccacuuggguauguau

SEQ ID NO: 2520785 - RNA, 19 nt, Artificial Sequence
  Description of Artificial Sequence: Synthetic oligonucleotide
  Antisense strand to SEQ ID NO: 2520784
auacauacccaagugguca

SEQ ID NO: 2520786 - RNA, 19 nt, Artificial Sequence
  Description of Artificial Sequence: Synthetic oligonucleotide
  Sense strand starting at position 3399 of SEQ ID NO: 1888238
uugugaaaggucuguuaaa

SEQ ID NO: 2520787 - RNA, 19 nt, Artificial Sequence
  Description of Artificial Sequence: Synthetic oligonucleotide
  Antisense strand to SEQ ID NO: 2520786
uuuaacagaccuuucacaa

SEQ ID NO: 2520788 - RNA, 19 nt, Artificial Sequence
  Description of Artificial Sequence: Synthetic oligonucleotide
  Sense strand starting at position 3400 of SEQ ID NO: 1888238
ugugaaaggucuguuaaag

SEQ ID NO: 2520789 - RNA, 19 nt, Artificial Sequence
  Description of Artificial Sequence: Synthetic oligonucleotide
  Antisense strand to SEQ ID NO: 2520788
cuuuaacagaccuuucaca

SEQ ID NO: 2520790 - RNA, 19 nt, Artificial Sequence
  Description of Artificial Sequence: Synthetic oligonucleotide
  Sense strand starting at position 3507 of SEQ ID NO: 1888238
ccaccugcccuaugggaaa

SEQ ID NO: 2520791 - RNA, 19 nt, Artificial Sequence
  Description of Artificial Sequence: Synthetic oligonucleotide
  Antisense strand to SEQ ID NO: 2520790
uuucccauagggcaggugg

SEQ ID NO: 2520792 - RNA, 19 nt, Artificial Sequence
  Description of Artificial Sequence: Synthetic oligonucleotide
  Sense strand starting at position 3634 of SEQ ID NO: 1888238
accagacauuuccagaaag

SEQ ID NO: 2520793 - RNA, 19 nt, Artificial Sequence
  Description of Artificial Sequence: Synthetic oligonucleotide
  Antisense strand to SEQ ID NO: 2520792
cuuucuggaaaugucuggu

SEQ ID NO: 2520794 - RNA, 19 nt, Artificial Sequence
  Description of Artificial Sequence: Synthetic oligonucleotide
  Sense strand starting at position 3650 of SEQ ID NO: 1888238
aaggaaaugucagaaagau

SEQ ID NO: 2520795 - RNA, 19 nt, Artificial Sequence
  Description of Artificial Sequence: Synthetic oligonucleotide
  Antisense strand to SEQ ID NO: 2520794
aucuuucugacauuuccuu

SEQ ID NO: 2520796 - RNA, 19 nt, Artificial Sequence
  Description of Artificial Sequence: Synthetic oligonucleotide
  Sense strand starting at position 3659 of SEQ ID NO: 1888238
ucagaaagaugucuuuauc

SEQ ID NO: 2520797 - RNA, 19 nt, Artificial Sequence
  Description of Artificial Sequence: Synthetic oligonucleotide
  Antisense strand to SEQ ID NO: 2520796
gauaaagacaucuuucuga

SEQ ID NO: 2520798 - RNA, 19 nt, Artificial Sequence
  Description of Artificial Sequence: Synthetic oligonucleotide
  Sense strand starting at position 3665 of SEQ ID NO: 1888238
agaugucuuuaucucauua

SEQ ID NO: 2520799 - RNA, 19 nt, Artificial Sequence
  Description of Artificial Sequence: Synthetic oligonucleotide
  Antisense strand to SEQ ID NO: 2520798
uaaugagauaaagacaucu

SEQ ID NO: 2520800 - RNA, 19 nt, Artificial Sequence
  Description of Artificial Sequence: Synthetic oligonucleotide
  Sense strand starting at position 3791 of SEQ ID NO: 1888238
gccuuuaauccauaugagc

SEQ ID NO: 2520801 - RNA, 19 nt, Artificial Sequence
  Description of Artificial Sequence: Synthetic oligonucleotide
  Antisense strand to SEQ ID NO: 2520800
gcucauauggauuaaaggc

SEQ ID NO: 2520802 - RNA, 19 nt, Artificial Sequence
  Description of Artificial Sequence: Synthetic oligonucleotide
  Sense strand starting at position 3799 of SEQ ID NO: 1888238
uccauaugagcaugaucaa

SEQ ID NO: 2520803 - RNA, 19 nt, Artificial Sequence
  Description of Artificial Sequence: Synthetic oligonucleotide
  Antisense strand to SEQ ID NO: 2520802
uugaucaugcucauaugga

SEQ ID NO: 2520804 - RNA, 19 nt, Artificial Sequence
  Description of Artificial Sequence: Synthetic oligonucleotide
  Sense strand starting at position 3971 of SEQ ID NO: 1888238
agauaauagugccuaagug

SEQ ID NO: 2520805 - RNA, 19 nt, Artificial Sequence
  Description of Artificial Sequence: Synthetic oligonucleotide
  Antisense strand to SEQ ID NO: 2520804
cacuuaggcacuauuaucu

SEQ ID NO: 2520806 - RNA, 19 nt, Artificial Sequence
  Description of Artificial Sequence: Synthetic oligonucleotide
  Sense strand starting at position 3972 of SEQ ID NO: 1888238
gauaauagugccuaaguga

SEQ ID NO: 2520807 - RNA, 19 nt, Artificial Sequence
  Description of Artificial Sequence: Synthetic oligonucleotide
  Antisense strand to SEQ ID NO: 2520806
ucacuuaggcacuauuauc

SEQ ID NO: 2520808 - RNA, 19 nt, Artificial Sequence
  Description of Artificial Sequence: Synthetic oligonucleotide
  Sense strand starting at position 139 of SEQ ID NO: 1888239
aggugaguagucuggguga

SEQ ID NO: 2520809 - RNA, 19 nt, Artificial Sequence
  Description of Artificial Sequence: Synthetic oligonucleotide
  Antisense strand to SEQ ID NO: 2520808
ucacccagacuacucaccu

SEQ ID NO: 2520810 - RNA, 19 nt, Artificial Sequence
  Description of Artificial Sequence: Synthetic oligonucleotide
  Sense strand starting at position 141 of SEQ ID NO: 1888239
gugaguagucugggugaca

SEQ ID NO: 2520811 - RNA, 19 nt, Artificial Sequence
  Description of Artificial Sequence: Synthetic oligonucleotide
  Antisense strand to SEQ ID NO: 2520810
ugucacccagacuacucac

SEQ ID NO: 2520812 - RNA, 19 nt, Artificial Sequence
  Description of Artificial Sequence: Synthetic oligonucleotide
  Sense strand starting at position 142 of SEQ ID NO: 1888239
ugaguagucugggugacag

SEQ ID NO: 2520813 - RNA, 19 nt, Artificial Sequence
  Description of Artificial Sequence: Synthetic oligonucleotide
  Antisense strand to SEQ ID NO: 2520812
cugucacccagacuacuca

SEQ ID NO: 2520814 - RNA, 19 nt, Artificial Sequence
  Description of Artificial Sequence: Synthetic oligonucleotide
  Sense strand starting at position 233 of SEQ ID NO: 1888239
caaaguuagcugcaagguu

SEQ ID NO: 2520815 - RNA, 19 nt, Artificial Sequence
  Description of Artificial Sequence: Synthetic oligonucleotide
  Antisense strand to SEQ ID NO: 2520814
aaccuugcagcuaacuuug

SEQ ID NO: 2520816 - RNA, 19 nt, Artificial Sequence
  Description of Artificial Sequence: Synthetic oligonucleotide
  Sense strand starting at position 1274 of SEQ ID NO: 1888239
gagaaagcucugcgggacu

SEQ ID NO: 2520817 - RNA, 19 nt, Artificial Sequence
  Description of Artificial Sequence: Synthetic oligonucleotide
  Antisense strand to SEQ ID NO: 2520816
agucccgcagagcuuucuc

SEQ ID NO: 2520818 - RNA, 19 nt, Artificial Sequence
  Description of Artificial Sequence: Synthetic oligonucleotide
  Sense strand starting at position 1276 of SEQ ID NO: 1888239
gaaagcucugcgggacuga

SEQ ID NO: 2520819 - RNA, 19 nt, Artificial Sequence
  Description of Artificial Sequence: Synthetic oligonucleotide
  Antisense strand to SEQ ID NO: 2520818
ucagucccgcagagcuuuc

SEQ ID NO: 2520820 - RNA, 19 nt, Artificial Sequence
  Description of Artificial Sequence: Synthetic oligonucleotide
  Sense strand starting at position 1946 of SEQ ID NO: 1888239
cagcgacuugggcaaacuu

SEQ ID NO: 2520821 - RNA, 19 nt, Artificial Sequence
  Description of Artificial Sequence: Synthetic oligonucleotide
  Antisense strand to SEQ ID NO: 2520820
aaguuugcccaagucgcug

SEQ ID NO: 2520822 - RNA, 19 nt, Artificial Sequence
  Description of Artificial Sequence: Synthetic oligonucleotide
  Sense strand starting at position 2272 of SEQ ID NO: 1888239
gaaagagcagucugugaaa

SEQ ID NO: 2520823 - RNA, 19 nt, Artificial Sequence
  Description of Artificial Sequence: Synthetic oligonucleotide
  Antisense strand to SEQ ID NO: 2520822
uuucacagacugcucuuuc

SEQ ID NO: 2520824 - RNA, 19 nt, Artificial Sequence
  Description of Artificial Sequence: Synthetic oligonucleotide
  Sense strand starting at position 2274 of SEQ ID NO: 1888239
aagagcagucugugaaacu

SEQ ID NO: 2520825 - RNA, 19 nt, Artificial Sequence
  Description of Artificial Sequence: Synthetic oligonucleotide
  Antisense strand to SEQ ID NO: 2520824
aguuucacagacugcucuu

SEQ ID NO: 2520826 - RNA, 19 nt, Artificial Sequence
  Description of Artificial Sequence: Synthetic oligonucleotide
  Sense strand starting at position 2308 of SEQ ID NO: 1888239
cugggcucuuauuugcaaa

SEQ ID NO: 2520827 - RNA, 19 nt, Artificial Sequence
  Description of Artificial Sequence: Synthetic oligonucleotide
  Antisense strand to SEQ ID NO: 2520826
uuugcaaauaagagcccag

SEQ ID NO: 2520828 - RNA, 19 nt, Artificial Sequence
  Description of Artificial Sequence: Synthetic oligonucleotide
  Sense strand starting at position 2423 of SEQ ID NO: 1888239
ggaggaagguggucuuguu

SEQ ID NO: 2520829 - RNA, 19 nt, Artificial Sequence
  Description of Artificial Sequence: Synthetic oligonucleotide
  Antisense strand to SEQ ID NO: 2520828
aacaagaccaccuuccucc

SEQ ID NO: 2520830 - RNA, 19 nt, Artificial Sequence
  Description of Artificial Sequence: Synthetic oligonucleotide
  Sense strand starting at position 2435 of SEQ ID NO: 1888239
ucuuguuugguuuggagaa

SEQ ID NO: 2520831 - RNA, 19 nt, Artificial Sequence
  Description of Artificial Sequence: Synthetic oligonucleotide
  Antisense strand to SEQ ID NO: 2520830
uucuccaaaccaaacaaga

SEQ ID NO: 2520832 - RNA, 19 nt, Artificial Sequence
  Description of Artificial Sequence: Synthetic oligonucleotide
  Sense strand starting at position 2631 of SEQ ID NO: 1888239
cuuggagucagguauucuu

SEQ ID NO: 2520833 - RNA, 19 nt, Artificial Sequence
  Description of Artificial Sequence: Synthetic oligonucleotide
  Antisense strand to SEQ ID NO: 2520832
aagaauaccugacuccaag

SEQ ID NO: 2520834 - RNA, 19 nt, Artificial Sequence
  Description of Artificial Sequence: Synthetic oligonucleotide
  Sense strand starting at position 2639 of SEQ ID NO: 1888239
cagguauucuucucaggag

SEQ ID NO: 2520835 - RNA, 19 nt, Artificial Sequence
  Description of Artificial Sequence: Synthetic oligonucleotide
  Antisense strand to SEQ ID NO: 2520834
cuccugagaagaauaccug

SEQ ID NO: 2520836 - RNA, 19 nt, Artificial Sequence
  Description of Artificial Sequence: Synthetic oligonucleotide
  Sense strand starting at position 2643 of SEQ ID NO: 1888239
uauucuucucaggagugca

SEQ ID NO: 2520837 - RNA, 19 nt, Artificial Sequence
  Description of Artificial Sequence: Synthetic oligonucleotide
  Antisense strand to SEQ ID NO: 2520836
ugcacuccugagaagaaua

SEQ ID NO: 2520838 - RNA, 19 nt, Artificial Sequence
  Description of Artificial Sequence: Synthetic oligonucleotide
  Sense strand starting at position 2711 of SEQ ID NO: 1888239
gcgggagcggcuucucuua

SEQ ID NO: 2520839 - RNA, 19 nt, Artificial Sequence
  Description of Artificial Sequence: Synthetic oligonucleotide
  Antisense strand to SEQ ID NO: 2520838
uaagagaagccgcucccgc

SEQ ID NO: 2520840 - RNA, 19 nt, Artificial Sequence
  Description of Artificial Sequence: Synthetic oligonucleotide
  Sense strand starting at position 2828 of SEQ ID NO: 1888239
cuuugagaguuguuccacu

SEQ ID NO: 2520841 - RNA, 19 nt, Artificial Sequence
  Description of Artificial Sequence: Synthetic oligonucleotide
  Antisense strand to SEQ ID NO: 2520840
aguggaacaacucucaaag

SEQ ID NO: 2520842 - RNA, 19 nt, Artificial Sequence
  Description of Artificial Sequence: Synthetic oligonucleotide
  Sense strand starting at position 2998 of SEQ ID NO: 1888239
agaaccaggucugugugaa

SEQ ID NO: 2520843 - RNA, 19 nt, Artificial Sequence
  Description of Artificial Sequence: Synthetic oligonucleotide
  Antisense strand to SEQ ID NO: 2520842
uucacacagaccugguucu

SEQ ID NO: 2520844 - RNA, 19 nt, Artificial Sequence
  Description of Artificial Sequence: Synthetic oligonucleotide
  Sense strand starting at position 2999 of SEQ ID NO: 1888239
gaaccaggucugugugaag

SEQ ID NO: 2520845 - RNA, 19 nt, Artificial Sequence
  Description of Artificial Sequence: Synthetic oligonucleotide
  Antisense strand to SEQ ID NO: 2520844
cuucacacagaccugguuc

SEQ ID NO: 2520846 - RNA, 19 nt, Artificial Sequence
  Description of Artificial Sequence: Synthetic oligonucleotide
  Sense strand starting at position 3054 of SEQ ID NO: 1888239
ccacaaaccuucuugggua

SEQ ID NO: 2520847 - RNA, 19 nt, Artificial Sequence
  Description of Artificial Sequence: Synthetic oligonucleotide
  Antisense strand to SEQ ID NO: 2520846
uacccaagaagguuugugg

SEQ ID NO: 2520848 - RNA, 19 nt, Artificial Sequence
  Description of Artificial Sequence: Synthetic oligonucleotide
  Sense strand starting at position 3079 of SEQ ID NO: 1888239
gcauguguguagauaguug

SEQ ID NO: 2520849 - RNA, 19 nt, Artificial Sequence
  Description of Artificial Sequence: Synthetic oligonucleotide
  Antisense strand to SEQ ID NO: 2520848
caacuaucuacacacaugc

SEQ ID NO: 2520850 - RNA, 19 nt, Artificial Sequence
  Description of Artificial Sequence: Synthetic oligonucleotide
  Sense strand starting at position 3083 of SEQ ID NO: 1888239
guguguagauaguugagga

SEQ ID NO: 2520851 - RNA, 19 nt, Artificial Sequence
  Description of Artificial Sequence: Synthetic oligonucleotide
  Antisense strand to SEQ ID NO: 2520850
uccucaacuaucuacacac

SEQ ID NO: 2520852 - RNA, 19 nt, Artificial Sequence
  Description of Artificial Sequence: Synthetic oligonucleotide
  Sense strand starting at position 3233 of SEQ ID NO: 1888239
ccugucagccauugggaga

SEQ ID NO: 2520853 - RNA, 19 nt, Artificial Sequence
  Description of Artificial Sequence: Synthetic oligonucleotide
  Antisense strand to SEQ ID NO: 2520852
ucucccaauggcugacagg

SEQ ID NO: 2520854 - RNA, 19 nt, Artificial Sequence
  Description of Artificial Sequence: Synthetic oligonucleotide
  Sense strand starting at position 3234 of SEQ ID NO: 1888239
cugucagccauugggagaa

SEQ ID NO: 2520855 - RNA, 19 nt, Artificial Sequence
  Description of Artificial Sequence: Synthetic oligonucleotide
  Antisense strand to SEQ ID NO: 2520854
uucucccaauggcugacag

SEQ ID NO: 2520856 - RNA, 19 nt, Artificial Sequence
  Description of Artificial Sequence: Synthetic oligonucleotide
  Sense strand starting at position 3304 of SEQ ID NO: 1888239
acugcaaagagcugagaua

SEQ ID NO: 2520857 - RNA, 19 nt, Artificial Sequence
  Description of Artificial Sequence: Synthetic oligonucleotide
  Antisense strand to SEQ ID NO: 2520856
uaucucagcucuuugcagu

SEQ ID NO: 2520858 - RNA, 19 nt, Artificial Sequence
  Description of Artificial Sequence: Synthetic oligonucleotide
  Sense strand starting at position 3418 of SEQ ID NO: 1888239
cagagaucuccuggguaac

SEQ ID NO: 2520859 - RNA, 19 nt, Artificial Sequence
  Description of Artificial Sequence: Synthetic oligonucleotide
  Antisense strand to SEQ ID NO: 2520858
guuacccaggagaucucug

SEQ ID NO: 2520860 - RNA, 19 nt, Artificial Sequence
  Description of Artificial Sequence: Synthetic oligonucleotide
  Sense strand starting at position 3419 of SEQ ID NO: 1888239
agagaucuccuggguaaca

SEQ ID NO: 2520861 - RNA, 19 nt, Artificial Sequence
  Description of Artificial Sequence: Synthetic oligonucleotide
  Antisense strand to SEQ ID NO: 2520860
uguuacccaggagaucucu

SEQ ID NO: 2520862 - RNA, 19 nt, Artificial Sequence
  Description of Artificial Sequence: Synthetic oligonucleotide
  Sense strand starting at position 3420 of SEQ ID NO: 1888239
gagaucuccuggguaacag

SEQ ID NO: 2520863 - RNA, 19 nt, Artificial Sequence
  Description of Artificial Sequence: Synthetic oligonucleotide
  Antisense strand to SEQ ID NO: 2520862
cuguuacccaggagaucuc

SEQ ID NO: 2520864 - RNA, 19 nt, Artificial Sequence
  Description of Artificial Sequence: Synthetic oligonucleotide
  Sense strand starting at position 3527 of SEQ ID NO: 1888239
guguguuucccggccaguu

SEQ ID NO: 2520865 - RNA, 19 nt, Artificial Sequence
  Description of Artificial Sequence: Synthetic oligonucleotide
  Antisense strand to SEQ ID NO: 2520864
aacuggccgggaaacacac

SEQ ID NO: 2520866 - RNA, 19 nt, Artificial Sequence
  Description of Artificial Sequence: Synthetic oligonucleotide
  Sense strand starting at position 3528 of SEQ ID NO: 1888239
uguguuucccggccaguua

SEQ ID NO: 2520867 - RNA, 19 nt, Artificial Sequence
  Description of Artificial Sequence: Synthetic oligonucleotide
  Antisense strand to SEQ ID NO: 2520866
uaacuggccgggaaacaca

SEQ ID NO: 2520868 - RNA, 19 nt, Artificial Sequence
  Description of Artificial Sequence: Synthetic oligonucleotide
  Sense strand starting at position 3607 of SEQ ID NO: 1888239
auauaugguugcuccagga

SEQ ID NO: 2520869 - RNA, 19 nt, Artificial Sequence
  Description of Artificial Sequence: Synthetic oligonucleotide
  Antisense strand to SEQ ID NO: 2520868
uccuggagcaaccauauau

SEQ ID NO: 2520870 - RNA, 19 nt, Artificial Sequence
  Description of Artificial Sequence: Synthetic oligonucleotide
  Sense strand starting at position 3611 of SEQ ID NO: 1888239
augguugcuccaggaucaa

SEQ ID NO: 2520871 - RNA, 19 nt, Artificial Sequence
  Description of Artificial Sequence: Synthetic oligonucleotide
  Antisense strand to SEQ ID NO: 2520870
uugauccuggagcaaccau

SEQ ID NO: 2520872 - RNA, 19 nt, Artificial Sequence
  Description of Artificial Sequence: Synthetic oligonucleotide
  Sense strand starting at position 3622 of SEQ ID NO: 1888239
aggaucaaaugagacaauu

SEQ ID NO: 2520873 - RNA, 19 nt, Artificial Sequence
  Description of Artificial Sequence: Synthetic oligonucleotide
  Antisense strand to SEQ ID NO: 2520872
aauugucucauuugauccu

SEQ ID NO: 2520874 - RNA, 19 nt, Artificial Sequence
  Description of Artificial Sequence: Synthetic oligonucleotide
  Sense strand starting at position 3652 of SEQ ID NO: 1888239
ucuagcauugucugacaca

SEQ ID NO: 2520875 - RNA, 19 nt, Artificial Sequence
  Description of Artificial Sequence: Synthetic oligonucleotide
  Antisense strand to SEQ ID NO: 2520874
ugugucagacaaugcuaga

SEQ ID NO: 2520876 - RNA, 19 nt, Artificial Sequence
  Description of Artificial Sequence: Synthetic oligonucleotide
  Sense strand starting at position 3835 of SEQ ID NO: 1888239
uuagauugcuacucagaaa

SEQ ID NO: 2520877 - RNA, 19 nt, Artificial Sequence
  Description of Artificial Sequence: Synthetic oligonucleotide
  Antisense strand to SEQ ID NO: 2520876
uuucugaguagcaaucuaa

SEQ ID NO: 2520878 - RNA, 19 nt, Artificial Sequence
  Description of Artificial Sequence: Synthetic oligonucleotide
  Sense strand starting at position 3914 of SEQ ID NO: 1888239
agaacaguguuucuguaga

SEQ ID NO: 2520879 - RNA, 19 nt, Artificial Sequence
  Description of Artificial Sequence: Synthetic oligonucleotide
  Antisense strand to SEQ ID NO: 2520878
ucuacagaaacacuguucu

SEQ ID NO: 2520880 - RNA, 19 nt, Artificial Sequence
  Description of Artificial Sequence: Synthetic oligonucleotide
  Sense strand starting at position 3916 of SEQ ID NO: 1888239
aacaguguuucuguagaga

SEQ ID NO: 2520881 - RNA, 19 nt, Artificial Sequence
  Description of Artificial Sequence: Synthetic oligonucleotide
  Antisense strand to SEQ ID NO: 2520880
ucucuacagaaacacuguu

SEQ ID NO: 2520882 - RNA, 19 nt, Artificial Sequence
  Description of Artificial Sequence: Synthetic oligonucleotide
  Sense strand starting at position 3929 of SEQ ID NO: 1888239
uagagaaaguguuugcagu

SEQ ID NO: 2520883 - RNA, 19 nt, Artificial Sequence
  Description of Artificial Sequence: Synthetic oligonucleotide
  Antisense strand to SEQ ID NO: 2520882
acugcaaacacuuucucua

SEQ ID NO: 2520884 - RNA, 19 nt, Artificial Sequence
  Description of Artificial Sequence: Synthetic oligonucleotide
  Sense strand starting at position 3942 of SEQ ID NO: 1888239
ugcaguugugcacauuuga

SEQ ID NO: 2520885 - RNA, 19 nt, Artificial Sequence
  Description of Artificial Sequence: Synthetic oligonucleotide
  Antisense strand to SEQ ID NO: 2520884
ucaaaugugcacaacugca

SEQ ID NO: 2520886 - RNA, 19 nt, Artificial Sequence
  Description of Artificial Sequence: Synthetic oligonucleotide
  Sense strand starting at position 3972 of SEQ ID NO: 1888239
gaccuuucuuguuuguaag

SEQ ID NO: 2520887 - RNA, 19 nt, Artificial Sequence
  Description of Artificial Sequence: Synthetic oligonucleotide
  Antisense strand to SEQ ID NO: 2520886
cuuacaaacaagaaagguc

SEQ ID NO: 2520888 - RNA, 19 nt, Artificial Sequence
  Description of Artificial Sequence: Synthetic oligonucleotide
  Sense strand starting at position 18 of SEQ ID NO: 1888240
agcccagcucaagauugaa

SEQ ID NO: 2520889 - RNA, 19 nt, Artificial Sequence
  Description of Artificial Sequence: Synthetic oligonucleotide
  Antisense strand to SEQ ID NO: 2520888
uucaaucuugagcugggcu

SEQ ID NO: 2520890 - RNA, 19 nt, Artificial Sequence
  Description of Artificial Sequence: Synthetic oligonucleotide
  Sense strand starting at position 62 of SEQ ID NO: 1888240
cugccacuuuguucuauuu

SEQ ID NO: 2520891 - RNA, 19 nt, Artificial Sequence
  Description of Artificial Sequence: Synthetic oligonucleotide
  Antisense strand to SEQ ID NO: 2520890
aaauagaacaaaguggcag

SEQ ID NO: 2520892 - RNA, 19 nt, Artificial Sequence
  Description of Artificial Sequence: Synthetic oligonucleotide
  Sense strand starting at position 97 of SEQ ID NO: 1888240
ggaugaugcucacccaacu

SEQ ID NO: 2520893 - RNA, 19 nt, Artificial Sequence
  Description of Artificial Sequence: Synthetic oligonucleotide
  Antisense strand to SEQ ID NO: 2520892
aguugggugagcaucaucc

SEQ ID NO: 2520894 - RNA, 19 nt, Artificial Sequence
  Description of Artificial Sequence: Synthetic oligonucleotide
  Sense strand starting at position 213 of SEQ ID NO: 1888240
guaggaauccuguaucuua

SEQ ID NO: 2520895 - RNA, 19 nt, Artificial Sequence
  Description of Artificial Sequence: Synthetic oligonucleotide
  Antisense strand to SEQ ID NO: 2520894
uaagauacaggauuccuac

SEQ ID NO: 2520896 - RNA, 19 nt, Artificial Sequence
  Description of Artificial Sequence: Synthetic oligonucleotide
  Sense strand starting at position 278 of SEQ ID NO: 1888240
agugauaaucagcauauca

SEQ ID NO: 2520897 - RNA, 19 nt, Artificial Sequence
  Description of Artificial Sequence: Synthetic oligonucleotide
  Antisense strand to SEQ ID NO: 2520896
ugauaugcugauuaucacu

SEQ ID NO: 2520898 - RNA, 19 nt, Artificial Sequence
  Description of Artificial Sequence: Synthetic oligonucleotide
  Sense strand starting at position 280 of SEQ ID NO: 1888240
ugauaaucagcauaucagu

SEQ ID NO: 2520899 - RNA, 19 nt, Artificial Sequence
  Description of Artificial Sequence: Synthetic oligonucleotide
  Antisense strand to SEQ ID NO: 2520898
acugauaugcugauuauca

SEQ ID NO: 2520900 - RNA, 19 nt, Artificial Sequence
  Description of Artificial Sequence: Synthetic oligonucleotide
  Sense strand starting at position 517 of SEQ ID NO: 1888240
aguagaauaguuugaaacu

SEQ ID NO: 2520901 - RNA, 19 nt, Artificial Sequence
  Description of Artificial Sequence: Synthetic oligonucleotide
  Antisense strand to SEQ ID NO: 2520900
aguuucaaacuauucuacu

SEQ ID NO: 2520902 - RNA, 19 nt, Artificial Sequence
  Description of Artificial Sequence: Synthetic oligonucleotide
  Sense strand starting at position 559 of SEQ ID NO: 1888240
caaucuggguuucugugau

SEQ ID NO: 2520903 - RNA, 19 nt, Artificial Sequence
  Description of Artificial Sequence: Synthetic oligonucleotide
  Antisense strand to SEQ ID NO: 2520902
aucacagaaacccagauug

SEQ ID NO: 2520904 - RNA, 19 nt, Artificial Sequence
  Description of Artificial Sequence: Synthetic oligonucleotide
  Sense strand starting at position 583 of SEQ ID NO: 1888240
uggaucaaagcauguuaga

SEQ ID NO: 2520905 - RNA, 19 nt, Artificial Sequence
  Description of Artificial Sequence: Synthetic oligonucleotide
  Antisense strand to SEQ ID NO: 2520904
ucuaacaugcuuugaucca

SEQ ID NO: 2520906 - RNA, 19 nt, Artificial Sequence
  Description of Artificial Sequence: Synthetic oligonucleotide
  Sense strand starting at position 620 of SEQ ID NO: 1888240
cuaaauacauguuuacagu

SEQ ID NO: 2520907 - RNA, 19 nt, Artificial Sequence
  Description of Artificial Sequence: Synthetic oligonucleotide
  Antisense strand to SEQ ID NO: 2520906
acuguaaacauguauuuag

SEQ ID NO: 2520908 - RNA, 19 nt, Artificial Sequence
  Description of Artificial Sequence: Synthetic oligonucleotide
  Sense strand starting at position 750 of SEQ ID NO: 1888240
ggguguaauaagcaugaca

SEQ ID NO: 2520909 - RNA, 19 nt, Artificial Sequence
  Description of Artificial Sequence: Synthetic oligonucleotide
  Antisense strand to SEQ ID NO: 2520908
ugucaugcuuauuacaccc

SEQ ID NO: 2520910 - RNA, 19 nt, Artificial Sequence
  Description of Artificial Sequence: Synthetic oligonucleotide
  Sense strand starting at position 752 of SEQ ID NO: 1888240
guguaauaagcaugacaaa

SEQ ID NO: 2520911 - RNA, 19 nt, Artificial Sequence
  Description of Artificial Sequence: Synthetic oligonucleotide
  Antisense strand to SEQ ID NO: 2520910
uuugucaugcuuauuacac

SEQ ID NO: 2520912 - RNA, 19 nt, Artificial Sequence
  Description of Artificial Sequence: Synthetic oligonucleotide
  Sense strand starting at position 764 of SEQ ID NO: 1888240
ugacaaaguuaagccauaa

SEQ ID NO: 2520913 - RNA, 19 nt, Artificial Sequence
  Description of Artificial Sequence: Synthetic oligonucleotide
  Antisense strand to SEQ ID NO: 2520912
uuauggcuuaacuuuguca

SEQ ID NO: 2520914 - RNA, 19 nt, Artificial Sequence
  Description of Artificial Sequence: Synthetic oligonucleotide
  Sense strand starting at position 795 of SEQ ID NO: 1888240
gaggcaaaugcagauguuu

SEQ ID NO: 2520915 - RNA, 19 nt, Artificial Sequence
  Description of Artificial Sequence: Synthetic oligonucleotide
  Antisense strand to SEQ ID NO: 2520914
aaacaucugcauuugccuc

SEQ ID NO: 2520916 - RNA, 19 nt, Artificial Sequence
  Description of Artificial Sequence: Synthetic oligonucleotide
  Sense strand starting at position 933 of SEQ ID NO: 1888240
uuccuaacagucugagaaa

SEQ ID NO: 2520917 - RNA, 19 nt, Artificial Sequence
  Description of Artificial Sequence: Synthetic oligonucleotide
  Antisense strand to SEQ ID NO: 2520916
uuucucagacuguuaggaa

SEQ ID NO: 2520918 - RNA, 19 nt, Artificial Sequence
  Description of Artificial Sequence: Synthetic oligonucleotide
  Sense strand starting at position 942 of SEQ ID NO: 1888240
gucugagaaaguugagucu

SEQ ID NO: 2520919 - RNA, 19 nt, Artificial Sequence
  Description of Artificial Sequence: Synthetic oligonucleotide
  Antisense strand to SEQ ID NO: 2520918
agacucaacuuucucagac

SEQ ID NO: 2520920 - RNA, 19 nt, Artificial Sequence
  Description of Artificial Sequence: Synthetic oligonucleotide
  Sense strand starting at position 1489 of SEQ ID NO: 1888240
aguguucuacagggaaaga

SEQ ID NO: 2520921 - RNA, 19 nt, Artificial Sequence
  Description of Artificial Sequence: Synthetic oligonucleotide
  Antisense strand to SEQ ID NO: 2520920
ucuuucccuguagaacacu

SEQ ID NO: 2520922 - RNA, 19 nt, Artificial Sequence
  Description of Artificial Sequence: Synthetic oligonucleotide
  Sense strand starting at position 2078 of SEQ ID NO: 1888240
gccgcuacagcuucuuauu

SEQ ID NO: 2520923 - RNA, 19 nt, Artificial Sequence
  Description of Artificial Sequence: Synthetic oligonucleotide
  Antisense strand to SEQ ID NO: 2520922
aauaagaagcuguagcggc

SEQ ID NO: 2520924 - RNA, 19 nt, Artificial Sequence
  Description of Artificial Sequence: Synthetic oligonucleotide
  Sense strand starting at position 2105 of SEQ ID NO: 1888240
ccagaaugucaaugcccau

SEQ ID NO: 2520925 - RNA, 19 nt, Artificial Sequence
  Description of Artificial Sequence: Synthetic oligonucleotide
  Antisense strand to SEQ ID NO: 2520924
augggcauugacauucugg

SEQ ID NO: 2520926 - RNA, 19 nt, Artificial Sequence
  Description of Artificial Sequence: Synthetic oligonucleotide
  Sense strand starting at position 2178 of SEQ ID NO: 1888240
uuggcaacucugugaagga

SEQ ID NO: 2520927 - RNA, 19 nt, Artificial Sequence
  Description of Artificial Sequence: Synthetic oligonucleotide
  Antisense strand to SEQ ID NO: 2520926
uccuucacagaguugccaa

SEQ ID NO: 2520928 - RNA, 19 nt, Artificial Sequence
  Description of Artificial Sequence: Synthetic oligonucleotide
  Sense strand starting at position 2200 of SEQ ID NO: 1888240
uucuuagaugccuauggga

SEQ ID NO: 2520929 - RNA, 19 nt, Artificial Sequence
  Description of Artificial Sequence: Synthetic oligonucleotide
  Antisense strand to SEQ ID NO: 2520928
ucccauaggcaucuaagaa

SEQ ID NO: 2520930 - RNA, 19 nt, Artificial Sequence
  Description of Artificial Sequence: Synthetic oligonucleotide
  Sense strand starting at position 2202 of SEQ ID NO: 1888240
cuuagaugccuaugggaaa

SEQ ID NO: 2520931 - RNA, 19 nt, Artificial Sequence
  Description of Artificial Sequence: Synthetic oligonucleotide
  Antisense strand to SEQ ID NO: 2520930
uuucccauaggcaucuaag

SEQ ID NO: 2520932 - RNA, 19 nt, Artificial Sequence
  Description of Artificial Sequence: Synthetic oligonucleotide
  Sense strand starting at position 2493 of SEQ ID NO: 1888240
ggaagagcuucccuuacuc

SEQ ID NO: 2520933 - RNA, 19 nt, Artificial Sequence
  Description of Artificial Sequence: Synthetic oligonucleotide
  Antisense strand to SEQ ID NO: 2520932
gaguaagggaagcucuucc

SEQ ID NO: 2520934 - RNA, 19 nt, Artificial Sequence
  Description of Artificial Sequence: Synthetic oligonucleotide
  Sense strand starting at position 2733 of SEQ ID NO: 1888240
gcuaguugacgcucgcgaa

SEQ ID NO: 2520935 - RNA, 19 nt, Artificial Sequence
  Description of Artificial Sequence: Synthetic oligonucleotide
  Antisense strand to SEQ ID NO: 2520934
uucgcgagcgucaacuagc

SEQ ID NO: 2520936 - RNA, 19 nt, Artificial Sequence
  Description of Artificial Sequence: Synthetic oligonucleotide
  Sense strand starting at position 2876 of SEQ ID NO: 1888240
uauuguugugcugucagua

SEQ ID NO: 2520937 - RNA, 19 nt, Artificial Sequence
  Description of Artificial Sequence: Synthetic oligonucleotide
  Antisense strand to SEQ ID NO: 2520936
uacugacagcacaacaaua

SEQ ID NO: 2520938 - RNA, 19 nt, Artificial Sequence
  Description of Artificial Sequence: Synthetic oligonucleotide
  Sense strand starting at position 2877 of SEQ ID NO: 1888240
auuguugugcugucaguau

SEQ ID NO: 2520939 - RNA, 19 nt, Artificial Sequence
  Description of Artificial Sequence: Synthetic oligonucleotide
  Antisense strand to SEQ ID NO: 2520938
auacugacagcacaacaau

SEQ ID NO: 2520940 - RNA, 19 nt, Artificial Sequence
  Description of Artificial Sequence: Synthetic oligonucleotide
  Sense strand starting at position 2903 of SEQ ID NO: 1888240
uuauauucuuggcccuaga

SEQ ID NO: 2520941 - RNA, 19 nt, Artificial Sequence
  Description of Artificial Sequence: Synthetic oligonucleotide
  Antisense strand to SEQ ID NO: 2520940
ucuagggccaagaauauaa

SEQ ID NO: 2520942 - RNA, 19 nt, Artificial Sequence
  Description of Artificial Sequence: Synthetic oligonucleotide
  Sense strand starting at position 2914 of SEQ ID NO: 1888240
gcccuagauccggaacuau

SEQ ID NO: 2520943 - RNA, 19 nt, Artificial Sequence
  Description of Artificial Sequence: Synthetic oligonucleotide
  Antisense strand to SEQ ID NO: 2520942
auaguuccggaucuagggc

SEQ ID NO: 2520944 - RNA, 19 nt, Artificial Sequence
  Description of Artificial Sequence: Synthetic oligonucleotide
  Sense strand starting at position 2980 of SEQ ID NO: 1888240
gagaauacagucugugaca

SEQ ID NO: 2520945 - RNA, 19 nt, Artificial Sequence
  Description of Artificial Sequence: Synthetic oligonucleotide
  Antisense strand to SEQ ID NO: 2520944
ugucacagacuguauucuc

SEQ ID NO: 2520946 - RNA, 19 nt, Artificial Sequence
  Description of Artificial Sequence: Synthetic oligonucleotide
  Sense strand starting at position 2981 of SEQ ID NO: 1888240
agaauacagucugugacaa

SEQ ID NO: 2520947 - RNA, 19 nt, Artificial Sequence
  Description of Artificial Sequence: Synthetic oligonucleotide
  Antisense strand to SEQ ID NO: 2520946
uugucacagacuguauucu

SEQ ID NO: 2520948 - RNA, 19 nt, Artificial Sequence
  Description of Artificial Sequence: Synthetic oligonucleotide
  Sense strand starting at position 2982 of SEQ ID NO: 1888240
gaauacagucugugacaaa

SEQ ID NO: 2520949 - RNA, 19 nt, Artificial Sequence
  Description of Artificial Sequence: Synthetic oligonucleotide
  Antisense strand to SEQ ID NO: 2520948
uuugucacagacuguauuc

SEQ ID NO: 2520950 - RNA, 19 nt, Artificial Sequence
  Description of Artificial Sequence: Synthetic oligonucleotide
  Sense strand starting at position 3022 of SEQ ID NO: 1888240
agaucagcauuauuagaac

SEQ ID NO: 2520951 - RNA, 19 nt, Artificial Sequence
  Description of Artificial Sequence: Synthetic oligonucleotide
  Antisense strand to SEQ ID NO: 2520950
guucuaauaaugcugaucu

SEQ ID NO: 2520952 - RNA, 19 nt, Artificial Sequence
  Description of Artificial Sequence: Synthetic oligonucleotide
  Sense strand starting at position 3171 of SEQ ID NO: 1888240
uguagauuauaauugggca

SEQ ID NO: 2520953 - RNA, 19 nt, Artificial Sequence
  Description of Artificial Sequence: Synthetic oligonucleotide
  Antisense strand to SEQ ID NO: 2520952
ugcccaauuauaaucuaca

SEQ ID NO: 2520954 - RNA, 19 nt, Artificial Sequence
  Description of Artificial Sequence: Synthetic oligonucleotide
  Sense strand starting at position 3172 of SEQ ID NO: 1888240
guagauuauaauugggcaa

SEQ ID NO: 2520955 - RNA, 19 nt, Artificial Sequence
  Description of Artificial Sequence: Synthetic oligonucleotide
  Antisense strand to SEQ ID NO: 2520954
uugcccaauuauaaucuac

SEQ ID NO: 2520956 - RNA, 19 nt, Artificial Sequence
  Description of Artificial Sequence: Synthetic oligonucleotide
  Sense strand starting at position 3228 of SEQ ID NO: 1888240
cagagauguaaaugguugu

SEQ ID NO: 2520957 - RNA, 19 nt, Artificial Sequence
  Description of Artificial Sequence: Synthetic oligonucleotide
  Antisense strand to SEQ ID NO: 2520956
acaaccauuuacaucucug

SEQ ID NO: 2520958 - RNA, 19 nt, Artificial Sequence
  Description of Artificial Sequence: Synthetic oligonucleotide
  Sense strand starting at position 3229 of SEQ ID NO: 1888240
agagauguaaaugguuguu

SEQ ID NO: 2520959 - RNA, 19 nt, Artificial Sequence
  Description of Artificial Sequence: Synthetic oligonucleotide
  Antisense strand to SEQ ID NO: 2520958
aacaaccauuuacaucucu

SEQ ID NO: 2520960 - RNA, 19 nt, Artificial Sequence
  Description of Artificial Sequence: Synthetic oligonucleotide
  Sense strand starting at position 3247 of SEQ ID NO: 1888240
uguguuaaggugagcguuu

SEQ ID NO: 2520961 - RNA, 19 nt, Artificial Sequence
  Description of Artificial Sequence: Synthetic oligonucleotide
  Antisense strand to SEQ ID NO: 2520960
aaacgcucaccuuaacaca

SEQ ID NO: 2520962 - RNA, 19 nt, Artificial Sequence
  Description of Artificial Sequence: Synthetic oligonucleotide
  Sense strand starting at position 3345 of SEQ ID NO: 1888240
ucauacugguaguuaauua

SEQ ID NO: 2520963 - RNA, 19 nt, Artificial Sequence
  Description of Artificial Sequence: Synthetic oligonucleotide
  Antisense strand to SEQ ID NO: 2520962
uaauuaacuaccaguauga

SEQ ID NO: 2520964 - RNA, 19 nt, Artificial Sequence
  Description of Artificial Sequence: Synthetic oligonucleotide
  Sense strand starting at position 3441 of SEQ ID NO: 1888240
cuuccuuuccacugagaag

SEQ ID NO: 2520965 - RNA, 19 nt, Artificial Sequence
  Description of Artificial Sequence: Synthetic oligonucleotide
  Antisense strand to SEQ ID NO: 2520964
cuucucaguggaaaggaag

SEQ ID NO: 2520966 - RNA, 19 nt, Artificial Sequence
  Description of Artificial Sequence: Synthetic oligonucleotide
  Sense strand starting at position 3505 of SEQ ID NO: 1888240
cuagaacugcucuggugau

SEQ ID NO: 2520967 - RNA, 19 nt, Artificial Sequence
  Description of Artificial Sequence: Synthetic oligonucleotide
  Antisense strand to SEQ ID NO: 2520966
aucaccagagcaguucuag

SEQ ID NO: 2520968 - RNA, 19 nt, Artificial Sequence
  Description of Artificial Sequence: Synthetic oligonucleotide
  Sense strand starting at position 23 of SEQ ID NO: 1888241
cugggaucacacugacagu

SEQ ID NO: 2520969 - RNA, 19 nt, Artificial Sequence
  Description of Artificial Sequence: Synthetic oligonucleotide
  Antisense strand to SEQ ID NO: 2520968
acugucagugugaucccag

SEQ ID NO: 2520970 - RNA, 19 nt, Artificial Sequence
  Description of Artificial Sequence: Synthetic oligonucleotide
  Sense strand starting at position 453 of SEQ ID NO: 1888241
gcgccuucugaguuaaugu

SEQ ID NO: 2520971 - RNA, 19 nt, Artificial Sequence
  Description of Artificial Sequence: Synthetic oligonucleotide
  Antisense strand to SEQ ID NO: 2520970
acauuaacucagaaggcgc

SEQ ID NO: 2520972 - RNA, 19 nt, Artificial Sequence
  Description of Artificial Sequence: Synthetic oligonucleotide
  Sense strand starting at position 460 of SEQ ID NO: 1888241
cugaguuaauguguguaaa

SEQ ID NO: 2520973 - RNA, 19 nt, Artificial Sequence
  Description of Artificial Sequence: Synthetic oligonucleotide
  Antisense strand to SEQ ID NO: 2520972
uuuacacacauuaacucag

SEQ ID NO: 2520974 - RNA, 19 nt, Artificial Sequence
  Description of Artificial Sequence: Synthetic oligonucleotide
  Sense strand starting at position 462 of SEQ ID NO: 1888241
gaguuaauguguguaaaga

SEQ ID NO: 2520975 - RNA, 19 nt, Artificial Sequence
  Description of Artificial Sequence: Synthetic oligonucleotide
  Antisense strand to SEQ ID NO: 2520974
ucuuuacacacauuaacuc

SEQ ID NO: 2520976 - RNA, 19 nt, Artificial Sequence
  Description of Artificial Sequence: Synthetic oligonucleotide
  Sense strand starting at position 472 of SEQ ID NO: 1888241
guguaaagaguuuaagacu

SEQ ID NO: 2520977 - RNA, 19 nt, Artificial Sequence
  Description of Artificial Sequence: Synthetic oligonucleotide
  Antisense strand to SEQ ID NO: 2520976
agucuuaaacucuuuacac

SEQ ID NO: 2520978 - RNA, 19 nt, Artificial Sequence
  Description of Artificial Sequence: Synthetic oligonucleotide
  Sense strand starting at position 896 of SEQ ID NO: 1888241
auaugacuggcguacagua

SEQ ID NO: 2520979 - RNA, 19 nt, Artificial Sequence
  Description of Artificial Sequence: Synthetic oligonucleotide
  Antisense strand to SEQ ID NO: 2520978
uacuguacgccagucauau

SEQ ID NO: 2520980 - RNA, 19 nt, Artificial Sequence
  Description of Artificial Sequence: Synthetic oligonucleotide
  Sense strand starting at position 1098 of SEQ ID NO: 1888241
caaauagcugcucaguaag

SEQ ID NO: 2520981 - RNA, 19 nt, Artificial Sequence
  Description of Artificial Sequence: Synthetic oligonucleotide
  Antisense strand to SEQ ID NO: 2520980
cuuacugagcagcuauuug

SEQ ID NO: 2520982 - RNA, 19 nt, Artificial Sequence
  Description of Artificial Sequence: Synthetic oligonucleotide
  Sense strand starting at position 1108 of SEQ ID NO: 1888241
cucaguaaguuucuugaca

SEQ ID NO: 2520983 - RNA, 19 nt, Artificial Sequence
  Description of Artificial Sequence: Synthetic oligonucleotide
  Antisense strand to SEQ ID NO: 2520982
ugucaagaaacuuacugag

SEQ ID NO: 2520984 - RNA, 19 nt, Artificial Sequence
  Description of Artificial Sequence: Synthetic oligonucleotide
  Sense strand starting at position 1109 of SEQ ID NO: 1888241
ucaguaaguuucuugacag

SEQ ID NO: 2520985 - RNA, 19 nt, Artificial Sequence
  Description of Artificial Sequence: Synthetic oligonucleotide
  Antisense strand to SEQ ID NO: 2520984
cugucaagaaacuuacuga

SEQ ID NO: 2520986 - RNA, 19 nt, Artificial Sequence
  Description of Artificial Sequence: Synthetic oligonucleotide
  Sense strand starting at position 1166 of SEQ ID NO: 1888241
uuggauuucuaagaugaca

SEQ ID NO: 2520987 - RNA, 19 nt, Artificial Sequence
  Description of Artificial Sequence: Synthetic oligonucleotide
  Antisense strand to SEQ ID NO: 2520986
ugucaucuuagaaauccaa

SEQ ID NO: 2520988 - RNA, 19 nt, Artificial Sequence
  Description of Artificial Sequence: Synthetic oligonucleotide
  Sense strand starting at position 1717 of SEQ ID NO: 1888241
gcgcuucgugcacucugaa

SEQ ID NO: 2520989 - RNA, 19 nt, Artificial Sequence
  Description of Artificial Sequence: Synthetic oligonucleotide
  Antisense strand to SEQ ID NO: 2520988
uucagagugcacgaagcgc

SEQ ID NO: 2520990 - RNA, 19 nt, Artificial Sequence
  Description of Artificial Sequence: Synthetic oligonucleotide
  Sense strand starting at position 1718 of SEQ ID NO: 1888241
cgcuucgugcacucugaau

SEQ ID NO: 2520991 - RNA, 19 nt, Artificial Sequence
  Description of Artificial Sequence: Synthetic oligonucleotide
  Antisense strand to SEQ ID NO: 2520990
auucagagugcacgaagcg

SEQ ID NO: 2520992 - RNA, 19 nt, Artificial Sequence
  Description of Artificial Sequence: Synthetic oligonucleotide
  Sense strand starting at position 1729 of SEQ ID NO: 1888241
cucugaauucuuugagagg

SEQ ID NO: 2520993 - RNA, 19 nt, Artificial Sequence
  Description of Artificial Sequence: Synthetic oligonucleotide
  Antisense strand to SEQ ID NO: 2520992
ccucucaaagaauucagag

SEQ ID NO: 2520994 - RNA, 19 nt, Artificial Sequence
  Description of Artificial Sequence: Synthetic oligonucleotide
  Sense strand starting at position 1782 of SEQ ID NO: 1888241
cuuacagucgucuaaguca

SEQ ID NO: 2520995 - RNA, 19 nt, Artificial Sequence
  Description of Artificial Sequence: Synthetic oligonucleotide
  Antisense strand to SEQ ID NO: 2520994
ugacuuagacgacuguaag

SEQ ID NO: 2520996 - RNA, 19 nt, Artificial Sequence
  Description of Artificial Sequence: Synthetic oligonucleotide
  Sense strand starting at position 2847 of SEQ ID NO: 1888241
uauugcaucuggguuaaga

SEQ ID NO: 2520997 - RNA, 19 nt, Artificial Sequence
  Description of Artificial Sequence: Synthetic oligonucleotide
  Antisense strand to SEQ ID NO: 2520996
ucuuaacccagaugcaaua

SEQ ID NO: 2520998 - RNA, 19 nt, Artificial Sequence
  Description of Artificial Sequence: Synthetic oligonucleotide
  Sense strand starting at position 2849 of SEQ ID NO: 1888241
uugcaucuggguuaagaga

SEQ ID NO: 2520999 - RNA, 19 nt, Artificial Sequence
  Description of Artificial Sequence: Synthetic oligonucleotide
  Antisense strand to SEQ ID NO: 2520998
ucucuuaacccagaugcaa

SEQ ID NO: 2521000 - RNA, 19 nt, Artificial Sequence
  Description of Artificial Sequence: Synthetic oligonucleotide
  Sense strand starting at position 2856 of SEQ ID NO: 1888241
uggguuaagagagguucuu

SEQ ID NO: 2521001 - RNA, 19 nt, Artificial Sequence
  Description of Artificial Sequence: Synthetic oligonucleotide
  Antisense strand to SEQ ID NO: 2521000
aagaaccucucuuaaccca

SEQ ID NO: 2521002 - RNA, 19 nt, Artificial Sequence
  Description of Artificial Sequence: Synthetic oligonucleotide
  Sense strand starting at position 2897 of SEQ ID NO: 1888241
caagguauuaguugggagu

SEQ ID NO: 2521003 - RNA, 19 nt, Artificial Sequence
  Description of Artificial Sequence: Synthetic oligonucleotide
  Antisense strand to SEQ ID NO: 2521002
acucccaacuaauaccuug

SEQ ID NO: 2521004 - RNA, 19 nt, Artificial Sequence
  Description of Artificial Sequence: Synthetic oligonucleotide
  Sense strand starting at position 2898 of SEQ ID NO: 1888241
aagguauuaguugggaguu

SEQ ID NO: 2521005 - RNA, 19 nt, Artificial Sequence
  Description of Artificial Sequence: Synthetic oligonucleotide
  Antisense strand to SEQ ID NO: 2521004
aacucccaacuaauaccuu

SEQ ID NO: 2521006 - RNA, 19 nt, Artificial Sequence
  Description of Artificial Sequence: Synthetic oligonucleotide
  Sense strand starting at position 2941 of SEQ ID NO: 1888241
aauaacaggucuuuagguu

SEQ ID NO: 2521007 - RNA, 19 nt, Artificial Sequence
  Description of Artificial Sequence: Synthetic oligonucleotide
  Antisense strand to SEQ ID NO: 2521006
aaccuaaagaccuguuauu

SEQ ID NO: 2521008 - RNA, 19 nt, Artificial Sequence
  Description of Artificial Sequence: Synthetic oligonucleotide
  Sense strand starting at position 2942 of SEQ ID NO: 1888241
auaacaggucuuuagguuu

SEQ ID NO: 2521009 - RNA, 19 nt, Artificial Sequence
  Description of Artificial Sequence: Synthetic oligonucleotide
  Antisense strand to SEQ ID NO: 2521008
aaaccuaaagaccuguuau

SEQ ID NO: 2521010 - RNA, 19 nt, Artificial Sequence
  Description of Artificial Sequence: Synthetic oligonucleotide
  Sense strand starting at position 3032 of SEQ ID NO: 1888241
aagaguuacuuugccaagu

SEQ ID NO: 2521011 - RNA, 19 nt, Artificial Sequence
  Description of Artificial Sequence: Synthetic oligonucleotide
  Antisense strand to SEQ ID NO: 2521010
acuuggcaaaguaacucuu

SEQ ID NO: 2521012 - RNA, 19 nt, Artificial Sequence
  Description of Artificial Sequence: Synthetic oligonucleotide
  Sense strand starting at position 3033 of SEQ ID NO: 1888241
agaguuacuuugccaagua

SEQ ID NO: 2521013 - RNA, 19 nt, Artificial Sequence
  Description of Artificial Sequence: Synthetic oligonucleotide
  Antisense strand to SEQ ID NO: 2521012
uacuuggcaaaguaacucu

SEQ ID NO: 2521014 - RNA, 19 nt, Artificial Sequence
  Description of Artificial Sequence: Synthetic oligonucleotide
  Sense strand starting at position 3050 of SEQ ID NO: 1888241
uaacucuuccuguggagaa

SEQ ID NO: 2521015 - RNA, 19 nt, Artificial Sequence
  Description of Artificial Sequence: Synthetic oligonucleotide
  Antisense strand to SEQ ID NO: 2521014
uucuccacaggaagaguua

SEQ ID NO: 2521016 - RNA, 19 nt, Artificial Sequence
  Description of Artificial Sequence: Synthetic oligonucleotide
  Sense strand starting at position 3092 of SEQ ID NO: 1888241
cccaaagacuaguuugaag

SEQ ID NO: 2521017 - RNA, 19 nt, Artificial Sequence
  Description of Artificial Sequence: Synthetic oligonucleotide
  Antisense strand to SEQ ID NO: 2521016
cuucaaacuagucuuuggg

SEQ ID NO: 2521018 - RNA, 19 nt, Artificial Sequence
  Description of Artificial Sequence: Synthetic oligonucleotide
  Sense strand starting at position 3117 of SEQ ID NO: 1888241
cuuccugucuugucaggaa

SEQ ID NO: 2521019 - RNA, 19 nt, Artificial Sequence
  Description of Artificial Sequence: Synthetic oligonucleotide
  Antisense strand to SEQ ID NO: 2521018
uuccugacaagacaggaag

SEQ ID NO: 2521020 - RNA, 19 nt, Artificial Sequence
  Description of Artificial Sequence: Synthetic oligonucleotide
  Sense strand starting at position 3121 of SEQ ID NO: 1888241
cugucuugucaggaaagac

SEQ ID NO: 2521021 - RNA, 19 nt, Artificial Sequence
  Description of Artificial Sequence: Synthetic oligonucleotide
  Antisense strand to SEQ ID NO: 2521020
gucuuuccugacaagacag

SEQ ID NO: 2521022 - RNA, 19 nt, Artificial Sequence
  Description of Artificial Sequence: Synthetic oligonucleotide
  Sense strand starting at position 3190 of SEQ ID NO: 1888241
cagaguuucugccuuaaag

SEQ ID NO: 2521023 - RNA, 19 nt, Artificial Sequence
  Description of Artificial Sequence: Synthetic oligonucleotide
  Antisense strand to SEQ ID NO: 2521022
cuuuaaggcagaaacucug

SEQ ID NO: 2521024 - RNA, 19 nt, Artificial Sequence
  Description of Artificial Sequence: Synthetic oligonucleotide
  Sense strand starting at position 3192 of SEQ ID NO: 1888241
gaguuucugccuuaaagau

SEQ ID NO: 2521025 - RNA, 19 nt, Artificial Sequence
  Description of Artificial Sequence: Synthetic oligonucleotide
  Antisense strand to SEQ ID NO: 2521024
aucuuuaaggcagaaacuc

SEQ ID NO: 2521026 - RNA, 19 nt, Artificial Sequence
  Description of Artificial Sequence: Synthetic oligonucleotide
  Sense strand starting at position 3201 of SEQ ID NO: 1888241
ccuuaaagaucggcaggaa

SEQ ID NO: 2521027 - RNA, 19 nt, Artificial Sequence
  Description of Artificial Sequence: Synthetic oligonucleotide
  Antisense strand to SEQ ID NO: 2521026
uuccugccgaucuuuaagg

SEQ ID NO: 2521028 - RNA, 19 nt, Artificial Sequence
  Description of Artificial Sequence: Synthetic oligonucleotide
  Sense strand starting at position 3273 of SEQ ID NO: 1888241
ggauuacucagagguaacu

SEQ ID NO: 2521029 - RNA, 19 nt, Artificial Sequence
  Description of Artificial Sequence: Synthetic oligonucleotide
  Antisense strand to SEQ ID NO: 2521028
aguuaccucugaguaaucc

SEQ ID NO: 2521030 - RNA, 19 nt, Artificial Sequence
  Description of Artificial Sequence: Synthetic oligonucleotide
  Sense strand starting at position 3378 of SEQ ID NO: 1888241
agguccuaaucugucuuaa

SEQ ID NO: 2521031 - RNA, 19 nt, Artificial Sequence
  Description of Artificial Sequence: Synthetic oligonucleotide
  Antisense strand to SEQ ID NO: 2521030
uuaagacagauuaggaccu

SEQ ID NO: 2521032 - RNA, 19 nt, Artificial Sequence
  Description of Artificial Sequence: Synthetic oligonucleotide
  Sense strand starting at position 3424 of SEQ ID NO: 1888241
guuggaauuuccuaauuac

SEQ ID NO: 2521033 - RNA, 19 nt, Artificial Sequence
  Description of Artificial Sequence: Synthetic oligonucleotide
  Antisense strand to SEQ ID NO: 2521032
guaauuaggaaauuccaac

SEQ ID NO: 2521034 - RNA, 19 nt, Artificial Sequence
  Description of Artificial Sequence: Synthetic oligonucleotide
  Sense strand starting at position 3707 of SEQ ID NO: 1888241
caucuaaaggugcauugaa

SEQ ID NO: 2521035 - RNA, 19 nt, Artificial Sequence
  Description of Artificial Sequence: Synthetic oligonucleotide
  Antisense strand to SEQ ID NO: 2521034
uucaaugcaccuuuagaug

SEQ ID NO: 2521036 - RNA, 19 nt, Artificial Sequence
  Description of Artificial Sequence: Synthetic oligonucleotide
  Sense strand starting at position 3769 of SEQ ID NO: 1888241
cuuuguagucauugaauuc

SEQ ID NO: 2521037 - RNA, 19 nt, Artificial Sequence
  Description of Artificial Sequence: Synthetic oligonucleotide
  Antisense strand to SEQ ID NO: 2521036
gaauucaaugacuacaaag

SEQ ID NO: 2521038 - RNA, 19 nt, Artificial Sequence
  Description of Artificial Sequence: Synthetic oligonucleotide
  Sense strand starting at position 3823 of SEQ ID NO: 1888241
gaaagaguccagugaggau

SEQ ID NO: 2521039 - RNA, 19 nt, Artificial Sequence
  Description of Artificial Sequence: Synthetic oligonucleotide
  Antisense strand to SEQ ID NO: 2521038
auccucacuggacucuuuc

SEQ ID NO: 2521040 - RNA, 19 nt, Artificial Sequence
  Description of Artificial Sequence: Synthetic oligonucleotide
  Sense strand starting at position 3832 of SEQ ID NO: 1888241
cagugaggaucuguguauu

SEQ ID NO: 2521041 - RNA, 19 nt, Artificial Sequence
  Description of Artificial Sequence: Synthetic oligonucleotide
  Antisense strand to SEQ ID NO: 2521040
aauacacagauccucacug

SEQ ID NO: 2521042 - RNA, 19 nt, Artificial Sequence
  Description of Artificial Sequence: Synthetic oligonucleotide
  Sense strand starting at position 3897 of SEQ ID NO: 1888241
gcaaauaugaauuggaguu

SEQ ID NO: 2521043 - RNA, 19 nt, Artificial Sequence
  Description of Artificial Sequence: Synthetic oligonucleotide
  Antisense strand to SEQ ID NO: 2521042
aacuccaauucauauuugc

SEQ ID NO: 2521044 - RNA, 19 nt, Artificial Sequence
  Description of Artificial Sequence: Synthetic oligonucleotide
  Sense strand starting at position 3937 of SEQ ID NO: 1888241
acagaagcuucggucuaua

SEQ ID NO: 2521045 - RNA, 19 nt, Artificial Sequence
  Description of Artificial Sequence: Synthetic oligonucleotide
  Antisense strand to SEQ ID NO: 2521044
uauagaccgaagcuucugu

SEQ ID NO: 2521046 - RNA, 19 nt, Artificial Sequence
  Description of Artificial Sequence: Synthetic oligonucleotide
  Sense strand starting at position 3942 of SEQ ID NO: 1888241
agcuucggucuauaaauau

SEQ ID NO: 2521047 - RNA, 19 nt, Artificial Sequence
  Description of Artificial Sequence: Synthetic oligonucleotide
  Antisense strand to SEQ ID NO: 2521046
auauuuauagaccgaagcu

SEQ ID NO: 2521048 - RNA, 19 nt, Artificial Sequence
  Description of Artificial Sequence: Synthetic oligonucleotide
  Sense strand starting at position 213 of SEQ ID NO: 1888242
accauaacuuaguuugaag

SEQ ID NO: 2521049 - RNA, 19 nt, Artificial Sequence
  Description of Artificial Sequence: Synthetic oligonucleotide
  Antisense strand to SEQ ID NO: 2521048
cuucaaacuaaguuauggu

SEQ ID NO: 2521050 - RNA, 19 nt, Artificial Sequence
  Description of Artificial Sequence: Synthetic oligonucleotide
  Sense strand starting at position 225 of SEQ ID NO: 1888242
uuugaaggcuuuguaaaga

SEQ ID NO: 2521051 - RNA, 19 nt, Artificial Sequence
  Description of Artificial Sequence: Synthetic oligonucleotide
  Antisense strand to SEQ ID NO: 2521050
ucuuuacaaagccuucaaa

SEQ ID NO: 2521052 - RNA, 19 nt, Artificial Sequence
  Description of Artificial Sequence: Synthetic oligonucleotide
  Sense strand starting at position 378 of SEQ ID NO: 1888242
ucaugaaagaggugcuuua

SEQ ID NO: 2521053 - RNA, 19 nt, Artificial Sequence
  Description of Artificial Sequence: Synthetic oligonucleotide
  Antisense strand to SEQ ID NO: 2521052
uaaagcaccucuuucauga

SEQ ID NO: 2521054 - RNA, 19 nt, Artificial Sequence
  Description of Artificial Sequence: Synthetic oligonucleotide
  Sense strand starting at position 397 of SEQ ID NO: 1888242
ucagcucaucuugagugaa

SEQ ID NO: 2521055 - RNA, 19 nt, Artificial Sequence
  Description of Artificial Sequence: Synthetic oligonucleotide
  Antisense strand to SEQ ID NO: 2521054
uucacucaagaugagcuga

SEQ ID NO: 2521056 - RNA, 19 nt, Artificial Sequence
  Description of Artificial Sequence: Synthetic oligonucleotide
  Sense strand starting at position 399 of SEQ ID NO: 1888242
agcucaucuugagugaaug

SEQ ID NO: 2521057 - RNA, 19 nt, Artificial Sequence
  Description of Artificial Sequence: Synthetic oligonucleotide
  Antisense strand to SEQ ID NO: 2521056
cauucacucaagaugagcu

SEQ ID NO: 2521058 - RNA, 19 nt, Artificial Sequence
  Description of Artificial Sequence: Synthetic oligonucleotide
  Sense strand starting at position 425 of SEQ ID NO: 1888242
ugaagauauggcuaguauc

SEQ ID NO: 2521059 - RNA, 19 nt, Artificial Sequence
  Description of Artificial Sequence: Synthetic oligonucleotide
  Antisense strand to SEQ ID NO: 2521058
gauacuagccauaucuuca

SEQ ID NO: 2521060 - RNA, 19 nt, Artificial Sequence
  Description of Artificial Sequence: Synthetic oligonucleotide
  Sense strand starting at position 436 of SEQ ID NO: 1888242
cuaguaucuccagagucua

SEQ ID NO: 2521061 - RNA, 19 nt, Artificial Sequence
  Description of Artificial Sequence: Synthetic oligonucleotide
  Antisense strand to SEQ ID NO: 2521060
uagacucuggagauacuag

SEQ ID NO: 2521062 - RNA, 19 nt, Artificial Sequence
  Description of Artificial Sequence: Synthetic oligonucleotide
  Sense strand starting at position 540 of SEQ ID NO: 1888242
ggaguacugaccugcaaug

SEQ ID NO: 2521063 - RNA, 19 nt, Artificial Sequence
  Description of Artificial Sequence: Synthetic oligonucleotide
  Antisense strand to SEQ ID NO: 2521062
cauugcaggucaguacucc

SEQ ID NO: 2521064 - RNA, 19 nt, Artificial Sequence
  Description of Artificial Sequence: Synthetic oligonucleotide
  Sense strand starting at position 559 of SEQ ID NO: 1888242
cgauuccuacaucagcaaa

SEQ ID NO: 2521065 - RNA, 19 nt, Artificial Sequence
  Description of Artificial Sequence: Synthetic oligonucleotide
  Antisense strand to SEQ ID NO: 2521064
uuugcugauguaggaaucg

SEQ ID NO: 2521066 - RNA, 19 nt, Artificial Sequence
  Description of Artificial Sequence: Synthetic oligonucleotide
  Sense strand starting at position 605 of SEQ ID NO: 1888242
cuggauuugcuaugccuau

SEQ ID NO: 2521067 - RNA, 19 nt, Artificial Sequence
  Description of Artificial Sequence: Synthetic oligonucleotide
  Antisense strand to SEQ ID NO: 2521066
auaggcauagcaaauccag

SEQ ID NO: 2521068 - RNA, 19 nt, Artificial Sequence
  Description of Artificial Sequence: Synthetic oligonucleotide
  Sense strand starting at position 666 of SEQ ID NO: 1888242
cuuacccaggccugaaauu

SEQ ID NO: 2521069 - RNA, 19 nt, Artificial Sequence
  Description of Artificial Sequence: Synthetic oligonucleotide
  Antisense strand to SEQ ID NO: 2521068
aauuucaggccuggguaag

SEQ ID NO: 2521070 - RNA, 19 nt, Artificial Sequence
  Description of Artificial Sequence: Synthetic oligonucleotide
  Sense strand starting at position 851 of SEQ ID NO: 1888242
uggauucccaagcagagua

SEQ ID NO: 2521071 - RNA, 19 nt, Artificial Sequence
  Description of Artificial Sequence: Synthetic oligonucleotide
  Antisense strand to SEQ ID NO: 2521070
uacucugcuugggaaucca

SEQ ID NO: 2521072 - RNA, 19 nt, Artificial Sequence
  Description of Artificial Sequence: Synthetic oligonucleotide
  Sense strand starting at position 1276 of SEQ ID NO: 1888242
gcgacugacugacugaaua

SEQ ID NO: 2521073 - RNA, 19 nt, Artificial Sequence
  Description of Artificial Sequence: Synthetic oligonucleotide
  Antisense strand to SEQ ID NO: 2521072
uauucagucagucagucgc

SEQ ID NO: 2521074 - RNA, 19 nt, Artificial Sequence
  Description of Artificial Sequence: Synthetic oligonucleotide
  Sense strand starting at position 1404 of SEQ ID NO: 1888242
gugucaaagcaacauuaua

SEQ ID NO: 2521075 - RNA, 19 nt, Artificial Sequence
  Description of Artificial Sequence: Synthetic oligonucleotide
  Antisense strand to SEQ ID NO: 2521074
uauaauguugcuuugacac

SEQ ID NO: 2521076 - RNA, 19 nt, Artificial Sequence
  Description of Artificial Sequence: Synthetic oligonucleotide
  Sense strand starting at position 1418 of SEQ ID NO: 1888242
uuauauaaguggcucaaca

SEQ ID NO: 2521077 - RNA, 19 nt, Artificial Sequence
  Description of Artificial Sequence: Synthetic oligonucleotide
  Antisense strand to SEQ ID NO: 2521076
uguugagccacuuauauaa

SEQ ID NO: 2521078 - RNA, 19 nt, Artificial Sequence
  Description of Artificial Sequence: Synthetic oligonucleotide
  Sense strand starting at position 1420 of SEQ ID NO: 1888242
auauaaguggcucaacaug

SEQ ID NO: 2521079 - RNA, 19 nt, Artificial Sequence
  Description of Artificial Sequence: Synthetic oligonucleotide
  Antisense strand to SEQ ID NO: 2521078
cauguugagccacuuauau

SEQ ID NO: 2521080 - RNA, 19 nt, Artificial Sequence
  Description of Artificial Sequence: Synthetic oligonucleotide
  Sense strand starting at position 1827 of SEQ ID NO: 1888242
cuaagauccuaugugaggu

SEQ ID NO: 2521081 - RNA, 19 nt, Artificial Sequence
  Description of Artificial Sequence: Synthetic oligonucleotide
  Antisense strand to SEQ ID NO: 2521080
accucacauaggaucuuag

SEQ ID NO: 2521082 - RNA, 19 nt, Artificial Sequence
  Description of Artificial Sequence: Synthetic oligonucleotide
  Sense strand starting at position 2100 of SEQ ID NO: 1888242
ucugacaugcccuauggaa

SEQ ID NO: 2521083 - RNA, 19 nt, Artificial Sequence
  Description of Artificial Sequence: Synthetic oligonucleotide
  Antisense strand to SEQ ID NO: 2521082
uuccauagggcaugucaga

SEQ ID NO: 2521084 - RNA, 19 nt, Artificial Sequence
  Description of Artificial Sequence: Synthetic oligonucleotide
  Sense strand starting at position 2265 of SEQ ID NO: 1888242
gagaaucaauguuccagug

SEQ ID NO: 2521085 - RNA, 19 nt, Artificial Sequence
  Description of Artificial Sequence: Synthetic oligonucleotide
  Antisense strand to SEQ ID NO: 2521084
cacuggaacauugauucuc

SEQ ID NO: 2521086 - RNA, 19 nt, Artificial Sequence
  Description of Artificial Sequence: Synthetic oligonucleotide
  Sense strand starting at position 2495 of SEQ ID NO: 1888242
cuaacuggauuguuggaaa

SEQ ID NO: 2521087 - RNA, 19 nt, Artificial Sequence
  Description of Artificial Sequence: Synthetic oligonucleotide
  Antisense strand to SEQ ID NO: 2521086
uuuccaacaauccaguuag

SEQ ID NO: 2521088 - RNA, 19 nt, Artificial Sequence
  Description of Artificial Sequence: Synthetic oligonucleotide
  Sense strand starting at position 2656 of SEQ ID NO: 1888242
agagaauaaguggguuucu

SEQ ID NO: 2521089 - RNA, 19 nt, Artificial Sequence
  Description of Artificial Sequence: Synthetic oligonucleotide
  Antisense strand to SEQ ID NO: 2521088
agaaacccacuuauucucu

SEQ ID NO: 2521090 - RNA, 19 nt, Artificial Sequence
  Description of Artificial Sequence: Synthetic oligonucleotide
  Sense strand starting at position 2657 of SEQ ID NO: 1888242
gagaauaaguggguuucua

SEQ ID NO: 2521091 - RNA, 19 nt, Artificial Sequence
  Description of Artificial Sequence: Synthetic oligonucleotide
  Antisense strand to SEQ ID NO: 2521090
uagaaacccacuuauucuc

SEQ ID NO: 2521092 - RNA, 19 nt, Artificial Sequence
  Description of Artificial Sequence: Synthetic oligonucleotide
  Sense strand starting at position 2714 of SEQ ID NO: 1888242
uguauucuacuggaacauu

SEQ ID NO: 2521093 - RNA, 19 nt, Artificial Sequence
  Description of Artificial Sequence: Synthetic oligonucleotide
  Antisense strand to SEQ ID NO: 2521092
aauguuccaguagaauaca

SEQ ID NO: 2521094 - RNA, 19 nt, Artificial Sequence
  Description of Artificial Sequence: Synthetic oligonucleotide
  Sense strand starting at position 3238 of SEQ ID NO: 1888242
uugagaaagagucaguguu

SEQ ID NO: 2521095 - RNA, 19 nt, Artificial Sequence
  Description of Artificial Sequence: Synthetic oligonucleotide
  Antisense strand to SEQ ID NO: 2521094
aacacugacucuuucucaa

SEQ ID NO: 2521096 - RNA, 19 nt, Artificial Sequence
  Description of Artificial Sequence: Synthetic oligonucleotide
  Sense strand starting at position 3240 of SEQ ID NO: 1888242
gagaaagagucaguguuua

SEQ ID NO: 2521097 - RNA, 19 nt, Artificial Sequence
  Description of Artificial Sequence: Synthetic oligonucleotide
  Antisense strand to SEQ ID NO: 2521096
uaaacacugacucuuucuc

SEQ ID NO: 2521098 - RNA, 19 nt, Artificial Sequence
  Description of Artificial Sequence: Synthetic oligonucleotide
  Sense strand starting at position 3244 of SEQ ID NO: 1888242
aagagucaguguuuaauca

SEQ ID NO: 2521099 - RNA, 19 nt, Artificial Sequence
  Description of Artificial Sequence: Synthetic oligonucleotide
  Antisense strand to SEQ ID NO: 2521098
ugauuaaacacugacucuu

SEQ ID NO: 2521100 - RNA, 19 nt, Artificial Sequence
  Description of Artificial Sequence: Synthetic oligonucleotide
  Sense strand starting at position 3245 of SEQ ID NO: 1888242
agagucaguguuuaaucau

SEQ ID NO: 2521101 - RNA, 19 nt, Artificial Sequence
  Description of Artificial Sequence: Synthetic oligonucleotide
  Antisense strand to SEQ ID NO: 2521100
augauuaaacacugacucu

SEQ ID NO: 2521102 - RNA, 19 nt, Artificial Sequence
  Description of Artificial Sequence: Synthetic oligonucleotide
  Sense strand starting at position 3248 of SEQ ID NO: 1888242
gucaguguuuaaucauuua

SEQ ID NO: 2521103 - RNA, 19 nt, Artificial Sequence
  Description of Artificial Sequence: Synthetic oligonucleotide
  Antisense strand to SEQ ID NO: 2521102
uaaaugauuaaacacugac

SEQ ID NO: 2521104 - RNA, 19 nt, Artificial Sequence
  Description of Artificial Sequence: Synthetic oligonucleotide
  Sense strand starting at position 3372 of SEQ ID NO: 1888242
gaauguguugcugacauac

SEQ ID NO: 2521105 - RNA, 19 nt, Artificial Sequence
  Description of Artificial Sequence: Synthetic oligonucleotide
  Antisense strand to SEQ ID NO: 2521104
guaugucagcaacacauuc

SEQ ID NO: 2521106 - RNA, 19 nt, Artificial Sequence
  Description of Artificial Sequence: Synthetic oligonucleotide
  Sense strand starting at position 3426 of SEQ ID NO: 1888242
uugcauuaucaguaacaug

SEQ ID NO: 2521107 - RNA, 19 nt, Artificial Sequence
  Description of Artificial Sequence: Synthetic oligonucleotide
  Antisense strand to SEQ ID NO: 2521106
cauguuacugauaaugcaa

SEQ ID NO: 2521108 - RNA, 19 nt, Artificial Sequence
  Description of Artificial Sequence: Synthetic oligonucleotide
  Sense strand starting at position 3566 of SEQ ID NO: 1888242
cuuaaaucaggcuggguaa

SEQ ID NO: 2521109 - RNA, 19 nt, Artificial Sequence
  Description of Artificial Sequence: Synthetic oligonucleotide
  Antisense strand to SEQ ID NO: 2521108
uuacccagccugauuuaag

SEQ ID NO: 2521110 - RNA, 19 nt, Artificial Sequence
  Description of Artificial Sequence: Synthetic oligonucleotide
  Sense strand starting at position 3567 of SEQ ID NO: 1888242
uuaaaucaggcuggguaaa

SEQ ID NO: 2521111 - RNA, 19 nt, Artificial Sequence
  Description of Artificial Sequence: Synthetic oligonucleotide
  Antisense strand to SEQ ID NO: 2521110
uuuacccagccugauuuaa

SEQ ID NO: 2521112 - RNA, 19 nt, Artificial Sequence
  Description of Artificial Sequence: Synthetic oligonucleotide
  Sense strand starting at position 3749 of SEQ ID NO: 1888242
cccaaauaccacuggaguu

SEQ ID NO: 2521113 - RNA, 19 nt, Artificial Sequence
  Description of Artificial Sequence: Synthetic oligonucleotide
  Antisense strand to SEQ ID NO: 2521112
aacuccagugguauuuggg

SEQ ID NO: 2521114 - RNA, 19 nt, Artificial Sequence
  Description of Artificial Sequence: Synthetic oligonucleotide
  Sense strand starting at position 3762 of SEQ ID NO: 1888242
ggaguuaagcacugaacca

SEQ ID NO: 2521115 - RNA, 19 nt, Artificial Sequence
  Description of Artificial Sequence: Synthetic oligonucleotide
  Antisense strand to SEQ ID NO: 2521114
ugguucagugcuuaacucc

SEQ ID NO: 2521116 - RNA, 19 nt, Artificial Sequence
  Description of Artificial Sequence: Synthetic oligonucleotide
  Sense strand starting at position 3902 of SEQ ID NO: 1888242
gggucaugggaguauaucu

SEQ ID NO: 2521117 - RNA, 19 nt, Artificial Sequence
  Description of Artificial Sequence: Synthetic oligonucleotide
  Antisense strand to SEQ ID NO: 2521116
agauauacucccaugaccc

SEQ ID NO: 2521118 - RNA, 19 nt, Artificial Sequence
  Description of Artificial Sequence: Synthetic oligonucleotide
  Sense strand starting at position 3907 of SEQ ID NO: 1888242
augggaguauaucucucau

SEQ ID NO: 2521119 - RNA, 19 nt, Artificial Sequence
  Description of Artificial Sequence: Synthetic oligonucleotide
  Antisense strand to SEQ ID NO: 2521118
augagagauauacucccau

SEQ ID NO: 2521120 - RNA, 19 nt, Artificial Sequence
  Description of Artificial Sequence: Synthetic oligonucleotide
  Sense strand starting at position 3909 of SEQ ID NO: 1888242
gggaguauaucucucauga

SEQ ID NO: 2521121 - RNA, 19 nt, Artificial Sequence
  Description of Artificial Sequence: Synthetic oligonucleotide
  Antisense strand to SEQ ID NO: 2521120
ucaugagagauauacuccc

SEQ ID NO: 2521122 - RNA, 19 nt, Artificial Sequence
  Description of Artificial Sequence: Synthetic oligonucleotide
  Sense strand starting at position 3978 of SEQ ID NO: 1888242
aagagcuaguuguugaaga

SEQ ID NO: 2521123 - RNA, 19 nt, Artificial Sequence
  Description of Artificial Sequence: Synthetic oligonucleotide
  Antisense strand to SEQ ID NO: 2521122
ucuucaacaacuagcucuu

SEQ ID NO: 2521124 - RNA, 19 nt, Artificial Sequence
  Description of Artificial Sequence: Synthetic oligonucleotide
  Sense strand starting at position 3980 of SEQ ID NO: 1888242
gagcuaguuguugaagagu

SEQ ID NO: 2521125 - RNA, 19 nt, Artificial Sequence
  Description of Artificial Sequence: Synthetic oligonucleotide
  Antisense strand to SEQ ID NO: 2521124
acucuucaacaacuagcuc

SEQ ID NO: 2521126 - RNA, 19 nt, Artificial Sequence
  Description of Artificial Sequence: Synthetic oligonucleotide
  Sense strand starting at position 3983 of SEQ ID NO: 1888242
cuaguuguugaagagugua

SEQ ID NO: 2521127 - RNA, 19 nt, Artificial Sequence
  Description of Artificial Sequence: Synthetic oligonucleotide
  Antisense strand to SEQ ID NO: 2521126
uacacucuucaacaacuag

SEQ ID NO: 2521128 - RNA, 19 nt, Artificial Sequence
  Description of Artificial Sequence: Synthetic oligonucleotide
  Sense strand starting at position 146 of SEQ ID NO: 1888243
gagacaagguguucaggga

SEQ ID NO: 2521129 - RNA, 19 nt, Artificial Sequence
  Description of Artificial Sequence: Synthetic oligonucleotide
  Antisense strand to SEQ ID NO: 2521128
ucccugaacaccuugucuc

SEQ ID NO: 2521130 - RNA, 19 nt, Artificial Sequence
  Description of Artificial Sequence: Synthetic oligonucleotide
  Sense strand starting at position 232 of SEQ ID NO: 1888243
gucgucaacucuuugauuu

SEQ ID NO: 2521131 - RNA, 19 nt, Artificial Sequence
  Description of Artificial Sequence: Synthetic oligonucleotide
  Antisense strand to SEQ ID NO: 2521130
aaaucaaagaguugacgac

SEQ ID NO: 2521132 - RNA, 19 nt, Artificial Sequence
  Description of Artificial Sequence: Synthetic oligonucleotide
  Sense strand starting at position 233 of SEQ ID NO: 1888243
ucgucaacucuuugauuuc

SEQ ID NO: 2521133 - RNA, 19 nt, Artificial Sequence
  Description of Artificial Sequence: Synthetic oligonucleotide
  Antisense strand to SEQ ID NO: 2521132
gaaaucaaagaguugacga

SEQ ID NO: 2521134 - RNA, 19 nt, Artificial Sequence
  Description of Artificial Sequence: Synthetic oligonucleotide
  Sense strand starting at position 358 of SEQ ID NO: 1888243
aggaaucccgucuguuaag

SEQ ID NO: 2521135 - RNA, 19 nt, Artificial Sequence
  Description of Artificial Sequence: Synthetic oligonucleotide
  Antisense strand to SEQ ID NO: 2521134
cuuaacagacgggauuccu

SEQ ID NO: 2521136 - RNA, 19 nt, Artificial Sequence
  Description of Artificial Sequence: Synthetic oligonucleotide
  Sense strand starting at position 390 of SEQ ID NO: 1888243
agcgaugugagucaugaaa

SEQ ID NO: 2521137 - RNA, 19 nt, Artificial Sequence
  Description of Artificial Sequence: Synthetic oligonucleotide
  Antisense strand to SEQ ID NO: 2521136
uuucaugacucacaucgcu

SEQ ID NO: 2521138 - RNA, 19 nt, Artificial Sequence
  Description of Artificial Sequence: Synthetic oligonucleotide
  Sense strand starting at position 417 of SEQ ID NO: 1888243
cggaggaggcaucgagaau

SEQ ID NO: 2521139 - RNA, 19 nt, Artificial Sequence
  Description of Artificial Sequence: Synthetic oligonucleotide
  Antisense strand to SEQ ID NO: 2521138
auucucgaugccuccuccg

SEQ ID NO: 2521140 - RNA, 19 nt, Artificial Sequence
  Description of Artificial Sequence: Synthetic oligonucleotide
  Sense strand starting at position 428 of SEQ ID NO: 1888243
ucgagaauauggucaguuc

SEQ ID NO: 2521141 - RNA, 19 nt, Artificial Sequence
  Description of Artificial Sequence: Synthetic oligonucleotide
  Antisense strand to SEQ ID NO: 2521140
gaacugaccauauucucga

SEQ ID NO: 2521142 - RNA, 19 nt, Artificial Sequence
  Description of Artificial Sequence: Synthetic oligonucleotide
  Sense strand starting at position 429 of SEQ ID NO: 1888243
cgagaauauggucaguucu

SEQ ID NO: 2521143 - RNA, 19 nt, Artificial Sequence
  Description of Artificial Sequence: Synthetic oligonucleotide
  Antisense strand to SEQ ID NO: 2521142
agaacugaccauauucucg

SEQ ID NO: 2521144 - RNA, 19 nt, Artificial Sequence
  Description of Artificial Sequence: Synthetic oligonucleotide
  Sense strand starting at position 431 of SEQ ID NO: 1888243
agaauauggucaguucuca

SEQ ID NO: 2521145 - RNA, 19 nt, Artificial Sequence
  Description of Artificial Sequence: Synthetic oligonucleotide
  Antisense strand to SEQ ID NO: 2521144
ugagaacugaccauauucu

SEQ ID NO: 2521146 - RNA, 19 nt, Artificial Sequence
  Description of Artificial Sequence: Synthetic oligonucleotide
  Sense strand starting at position 561 of SEQ ID NO: 1888243
ggagaaauguguaggagag

SEQ ID NO: 2521147 - RNA, 19 nt, Artificial Sequence
  Description of Artificial Sequence: Synthetic oligonucleotide
  Antisense strand to SEQ ID NO: 2521146
cucuccuacacauuucucc

SEQ ID NO: 2521148 - RNA, 19 nt, Artificial Sequence
  Description of Artificial Sequence: Synthetic oligonucleotide
  Sense strand starting at position 720 of SEQ ID NO: 1888243
gcgaaaggaccaggaguuu

SEQ ID NO: 2521149 - RNA, 19 nt, Artificial Sequence
  Description of Artificial Sequence: Synthetic oligonucleotide
  Antisense strand to SEQ ID NO: 2521148
aaacuccugguccuuucgc

SEQ ID NO: 2521150 - RNA, 19 nt, Artificial Sequence
  Description of Artificial Sequence: Synthetic oligonucleotide
  Sense strand starting at position 1006 of SEQ ID NO: 1888243
cugggcgauucuccauuua

SEQ ID NO: 2521151 - RNA, 19 nt, Artificial Sequence
  Description of Artificial Sequence: Synthetic oligonucleotide
  Antisense strand to SEQ ID NO: 2521150
uaaauggagaaucgcccag

SEQ ID NO: 2521152 - RNA, 19 nt, Artificial Sequence
  Description of Artificial Sequence: Synthetic oligonucleotide
  Sense strand starting at position 1121 of SEQ ID NO: 1888243
gggccucaucaccaucuua

SEQ ID NO: 2521153 - RNA, 19 nt, Artificial Sequence
  Description of Artificial Sequence: Synthetic oligonucleotide
  Antisense strand to SEQ ID NO: 2521152
uaagauggugaugaggccc

SEQ ID NO: 2521154 - RNA, 19 nt, Artificial Sequence
  Description of Artificial Sequence: Synthetic oligonucleotide
  Sense strand starting at position 2467 of SEQ ID NO: 1888243
gggaacauuuaaugagacu

SEQ ID NO: 2521155 - RNA, 19 nt, Artificial Sequence
  Description of Artificial Sequence: Synthetic oligonucleotide
  Antisense strand to SEQ ID NO: 2521154
agucucauuaaauguuccc

SEQ ID NO: 2521156 - RNA, 19 nt, Artificial Sequence
  Description of Artificial Sequence: Synthetic oligonucleotide
  Sense strand starting at position 2681 of SEQ ID NO: 1888243
ucucuuagugcagagggua

SEQ ID NO: 2521157 - RNA, 19 nt, Artificial Sequence
  Description of Artificial Sequence: Synthetic oligonucleotide
  Antisense strand to SEQ ID NO: 2521156
uacccucugcacuaagaga

SEQ ID NO: 2521158 - RNA, 19 nt, Artificial Sequence
  Description of Artificial Sequence: Synthetic oligonucleotide
  Sense strand starting at position 2774 of SEQ ID NO: 1888243
uccacuauacuguggauga

SEQ ID NO: 2521159 - RNA, 19 nt, Artificial Sequence
  Description of Artificial Sequence: Synthetic oligonucleotide
  Antisense strand to SEQ ID NO: 2521158
ucauccacaguauagugga

SEQ ID NO: 2521160 - RNA, 19 nt, Artificial Sequence
  Description of Artificial Sequence: Synthetic oligonucleotide
  Sense strand starting at position 2778 of SEQ ID NO: 1888243
cuauacuguggaugaaauc

SEQ ID NO: 2521161 - RNA, 19 nt, Artificial Sequence
  Description of Artificial Sequence: Synthetic oligonucleotide
  Antisense strand to SEQ ID NO: 2521160
gauuucauccacaguauag

SEQ ID NO: 2521162 - RNA, 19 nt, Artificial Sequence
  Description of Artificial Sequence: Synthetic oligonucleotide
  Sense strand starting at position 2805 of SEQ ID NO: 1888243
ggguuaccauaguucuaaa

SEQ ID NO: 2521163 - RNA, 19 nt, Artificial Sequence
  Description of Artificial Sequence: Synthetic oligonucleotide
  Antisense strand to SEQ ID NO: 2521162
uuuagaacuaugguaaccc

SEQ ID NO: 2521164 - RNA, 19 nt, Artificial Sequence
  Description of Artificial Sequence: Synthetic oligonucleotide
  Sense strand starting at position 2833 of SEQ ID NO: 1888243
uuggaugaauuccuugcua

SEQ ID NO: 2521165 - RNA, 19 nt, Artificial Sequence
  Description of Artificial Sequence: Synthetic oligonucleotide
  Antisense strand to SEQ ID NO: 2521164
uagcaaggaauucauccaa

SEQ ID NO: 2521166 - RNA, 19 nt, Artificial Sequence
  Description of Artificial Sequence: Synthetic oligonucleotide
  Sense strand starting at position 2835 of SEQ ID NO: 1888243
ggaugaauuccuugcuagu

SEQ ID NO: 2521167 - RNA, 19 nt, Artificial Sequence
  Description of Artificial Sequence: Synthetic oligonucleotide
  Antisense strand to SEQ ID NO: 2521166
acuagcaaggaauucaucc

SEQ ID NO: 2521168 - RNA, 19 nt, Artificial Sequence
  Description of Artificial Sequence: Synthetic oligonucleotide
  Sense strand starting at position 2848 of SEQ ID NO: 1888243
gcuaguguugcggcaguua

SEQ ID NO: 2521169 - RNA, 19 nt, Artificial Sequence
  Description of Artificial Sequence: Synthetic oligonucleotide
  Antisense strand to SEQ ID NO: 2521168
uaacugccgcaacacuagc

SEQ ID NO: 2521170 - RNA, 19 nt, Artificial Sequence
  Description of Artificial Sequence: Synthetic oligonucleotide
  Sense strand starting at position 2860 of SEQ ID NO: 1888243
gcaguuagaaguugaugga

SEQ ID NO: 2521171 - RNA, 19 nt, Artificial Sequence
  Description of Artificial Sequence: Synthetic oligonucleotide
  Antisense strand to SEQ ID NO: 2521170
uccaucaacuucuaacugc

SEQ ID NO: 2521172 - RNA, 19 nt, Artificial Sequence
  Description of Artificial Sequence: Synthetic oligonucleotide
  Sense strand starting at position 2933 of SEQ ID NO: 1888243
aagcuuugagacuguaaac

SEQ ID NO: 2521173 - RNA, 19 nt, Artificial Sequence
  Description of Artificial Sequence: Synthetic oligonucleotide
  Antisense strand to SEQ ID NO: 2521172
guuuacagucucaaagcuu

SEQ ID NO: 2521174 - RNA, 19 nt, Artificial Sequence
  Description of Artificial Sequence: Synthetic oligonucleotide
  Sense strand starting at position 3008 of SEQ ID NO: 1888243
guucucuguguuuagauuu

SEQ ID NO: 2521175 - RNA, 19 nt, Artificial Sequence
  Description of Artificial Sequence: Synthetic oligonucleotide
  Antisense strand to SEQ ID NO: 2521174
aaaucuaaacacagagaac

SEQ ID NO: 2521176 - RNA, 19 nt, Artificial Sequence
  Description of Artificial Sequence: Synthetic oligonucleotide
  Sense strand starting at position 3026 of SEQ ID NO: 1888243
uaucgauccuaguuugaug

SEQ ID NO: 2521177 - RNA, 19 nt, Artificial Sequence
  Description of Artificial Sequence: Synthetic oligonucleotide
  Antisense strand to SEQ ID NO: 2521176
caucaaacuaggaucgaua

SEQ ID NO: 2521178 - RNA, 19 nt, Artificial Sequence
  Description of Artificial Sequence: Synthetic oligonucleotide
  Sense strand starting at position 3109 of SEQ ID NO: 1888243
ggcccagagugguuaaagu

SEQ ID NO: 2521179 - RNA, 19 nt, Artificial Sequence
  Description of Artificial Sequence: Synthetic oligonucleotide
  Antisense strand to SEQ ID NO: 2521178
acuuuaaccacucugggcc

SEQ ID NO: 2521180 - RNA, 19 nt, Artificial Sequence
  Description of Artificial Sequence: Synthetic oligonucleotide
  Sense strand starting at position 3205 of SEQ ID NO: 1888243
gggaguuucugggccaggu

SEQ ID NO: 2521181 - RNA, 19 nt, Artificial Sequence
  Description of Artificial Sequence: Synthetic oligonucleotide
  Antisense strand to SEQ ID NO: 2521180
accuggcccagaaacuccc

SEQ ID NO: 2521182 - RNA, 19 nt, Artificial Sequence
  Description of Artificial Sequence: Synthetic oligonucleotide
  Sense strand starting at position 3215 of SEQ ID NO: 1888243
gggccaggucuugaggagu

SEQ ID NO: 2521183 - RNA, 19 nt, Artificial Sequence
  Description of Artificial Sequence: Synthetic oligonucleotide
  Antisense strand to SEQ ID NO: 2521182
acuccucaagaccuggccc

SEQ ID NO: 2521184 - RNA, 19 nt, Artificial Sequence
  Description of Artificial Sequence: Synthetic oligonucleotide
  Sense strand starting at position 3245 of SEQ ID NO: 1888243
cacauuaguucuuuggagu

SEQ ID NO: 2521185 - RNA, 19 nt, Artificial Sequence
  Description of Artificial Sequence: Synthetic oligonucleotide
  Antisense strand to SEQ ID NO: 2521184
acuccaaagaacuaaugug

SEQ ID NO: 2521186 - RNA, 19 nt, Artificial Sequence
  Description of Artificial Sequence: Synthetic oligonucleotide
  Sense strand starting at position 3246 of SEQ ID NO: 1888243
acauuaguucuuuggaguc

SEQ ID NO: 2521187 - RNA, 19 nt, Artificial Sequence
  Description of Artificial Sequence: Synthetic oligonucleotide
  Antisense strand to SEQ ID NO: 2521186
gacuccaaagaacuaaugu

SEQ ID NO: 2521188 - RNA, 19 nt, Artificial Sequence
  Description of Artificial Sequence: Synthetic oligonucleotide
  Sense strand starting at position 3300 of SEQ ID NO: 1888243
uuacgaguccuauguggga

SEQ ID NO: 2521189 - RNA, 19 nt, Artificial Sequence
  Description of Artificial Sequence: Synthetic oligonucleotide
  Antisense strand to SEQ ID NO: 2521188
ucccacauaggacucguaa

SEQ ID NO: 2521190 - RNA, 19 nt, Artificial Sequence
  Description of Artificial Sequence: Synthetic oligonucleotide
  Sense strand starting at position 3400 of SEQ ID NO: 1888243
ggaaguaaguugucugaau

SEQ ID NO: 2521191 - RNA, 19 nt, Artificial Sequence
  Description of Artificial Sequence: Synthetic oligonucleotide
  Antisense strand to SEQ ID NO: 2521190
auucagacaacuuacuucc

SEQ ID NO: 2521192 - RNA, 19 nt, Artificial Sequence
  Description of Artificial Sequence: Synthetic oligonucleotide
  Sense strand starting at position 3401 of SEQ ID NO: 1888243
gaaguaaguugucugaauu

SEQ ID NO: 2521193 - RNA, 19 nt, Artificial Sequence
  Description of Artificial Sequence: Synthetic oligonucleotide
  Antisense strand to SEQ ID NO: 2521192
aauucagacaacuuacuuc

SEQ ID NO: 2521194 - RNA, 19 nt, Artificial Sequence
  Description of Artificial Sequence: Synthetic oligonucleotide
  Sense strand starting at position 3402 of SEQ ID NO: 1888243
aaguaaguugucugaauuc

SEQ ID NO: 2521195 - RNA, 19 nt, Artificial Sequence
  Description of Artificial Sequence: Synthetic oligonucleotide
  Antisense strand to SEQ ID NO: 2521194
gaauucagacaacuuacuu

SEQ ID NO: 2521196 - RNA, 19 nt, Artificial Sequence
  Description of Artificial Sequence: Synthetic oligonucleotide
  Sense strand starting at position 3430 of SEQ ID NO: 1888243
uagugucagagugagaacu

SEQ ID NO: 2521197 - RNA, 19 nt, Artificial Sequence
  Description of Artificial Sequence: Synthetic oligonucleotide
  Antisense strand to SEQ ID NO: 2521196
aguucucacucugacacua

SEQ ID NO: 2521198 - RNA, 19 nt, Artificial Sequence
  Description of Artificial Sequence: Synthetic oligonucleotide
  Sense strand starting at position 3552 of SEQ ID NO: 1888243
caggaauccugaguaauug

SEQ ID NO: 2521199 - RNA, 19 nt, Artificial Sequence
  Description of Artificial Sequence: Synthetic oligonucleotide
  Antisense strand to SEQ ID NO: 2521198
caauuacucaggauuccug

SEQ ID NO: 2521200 - RNA, 19 nt, Artificial Sequence
  Description of Artificial Sequence: Synthetic oligonucleotide
  Sense strand starting at position 3611 of SEQ ID NO: 1888243
gccuuaugguuaguauuaa

SEQ ID NO: 2521201 - RNA, 19 nt, Artificial Sequence
  Description of Artificial Sequence: Synthetic oligonucleotide
  Antisense strand to SEQ ID NO: 2521200
uuaauacuaaccauaaggc

SEQ ID NO: 2521202 - RNA, 19 nt, Artificial Sequence
  Description of Artificial Sequence: Synthetic oligonucleotide
  Sense strand starting at position 3690 of SEQ ID NO: 1888243
guguuuauggcuuauauac

SEQ ID NO: 2521203 - RNA, 19 nt, Artificial Sequence
  Description of Artificial Sequence: Synthetic oligonucleotide
  Antisense strand to SEQ ID NO: 2521202
guauauaagccauaaacac

SEQ ID NO: 2521204 - RNA, 19 nt, Artificial Sequence
  Description of Artificial Sequence: Synthetic oligonucleotide
  Sense strand starting at position 3741 of SEQ ID NO: 1888243
auccauuucugugagguag

SEQ ID NO: 2521205 - RNA, 19 nt, Artificial Sequence
  Description of Artificial Sequence: Synthetic oligonucleotide
  Antisense strand to SEQ ID NO: 2521204
cuaccucacagaaauggau

SEQ ID NO: 2521206 - RNA, 19 nt, Artificial Sequence
  Description of Artificial Sequence: Synthetic oligonucleotide
  Sense strand starting at position 3816 of SEQ ID NO: 1888243
uagcacuugccuuagauga

SEQ ID NO: 2521207 - RNA, 19 nt, Artificial Sequence
  Description of Artificial Sequence: Synthetic oligonucleotide
  Antisense strand to SEQ ID NO: 2521206
ucaucuaaggcaagugcua

SEQ ID NO: 2521208 - RNA, 19 nt, Artificial Sequence
  Description of Artificial Sequence: Synthetic oligonucleotide
  Sense strand starting at position 185 of SEQ ID NO: 1888244
cuaccuuaugauugacagu

SEQ ID NO: 2521209 - RNA, 19 nt, Artificial Sequence
  Description of Artificial Sequence: Synthetic oligonucleotide
  Antisense strand to SEQ ID NO: 2521208
acugucaaucauaagguag

SEQ ID NO: 2521210 - RNA, 19 nt, Artificial Sequence
  Description of Artificial Sequence: Synthetic oligonucleotide
  Sense strand starting at position 219 of SEQ ID NO: 1888244
aggugaauucaugggagua

SEQ ID NO: 2521211 - RNA, 19 nt, Artificial Sequence
  Description of Artificial Sequence: Synthetic oligonucleotide
  Antisense strand to SEQ ID NO: 2521210
uacucccaugaauucaccu

SEQ ID NO: 2521212 - RNA, 19 nt, Artificial Sequence
  Description of Artificial Sequence: Synthetic oligonucleotide
  Sense strand starting at position 241 of SEQ ID NO: 1888244
gugagauaucguuaggcaa

SEQ ID NO: 2521213 - RNA, 19 nt, Artificial Sequence
  Description of Artificial Sequence: Synthetic oligonucleotide
  Antisense strand to SEQ ID NO: 2521212
uugccuaacgauaucucac

SEQ ID NO: 2521214 - RNA, 19 nt, Artificial Sequence
  Description of Artificial Sequence: Synthetic oligonucleotide
  Sense strand starting at position 303 of SEQ ID NO: 1888244
gugaaacuacugcacaaua

SEQ ID NO: 2521215 - RNA, 19 nt, Artificial Sequence
  Description of Artificial Sequence: Synthetic oligonucleotide
  Antisense strand to SEQ ID NO: 2521214
uauugugcaguaguuucac

SEQ ID NO: 2521216 - RNA, 19 nt, Artificial Sequence
  Description of Artificial Sequence: Synthetic oligonucleotide
  Sense strand starting at position 522 of SEQ ID NO: 1888244
ucaauaucgucugccauuu

SEQ ID NO: 2521217 - RNA, 19 nt, Artificial Sequence
  Description of Artificial Sequence: Synthetic oligonucleotide
  Antisense strand to SEQ ID NO: 2521216
aaauggcagacgauauuga

SEQ ID NO: 2521218 - RNA, 19 nt, Artificial Sequence
  Description of Artificial Sequence: Synthetic oligonucleotide
  Sense strand starting at position 643 of SEQ ID NO: 1888244
ucucuaaacgccuaggaaa

SEQ ID NO: 2521219 - RNA, 19 nt, Artificial Sequence
  Description of Artificial Sequence: Synthetic oligonucleotide
  Antisense strand to SEQ ID NO: 2521218
uuuccuaggcguuuagaga

SEQ ID NO: 2521220 - RNA, 19 nt, Artificial Sequence
  Description of Artificial Sequence: Synthetic oligonucleotide
  Sense strand starting at position 668 of SEQ ID NO: 1888244
agacgauuccgugaguaaa

SEQ ID NO: 2521221 - RNA, 19 nt, Artificial Sequence
  Description of Artificial Sequence: Synthetic oligonucleotide
  Antisense strand to SEQ ID NO: 2521220
uuuacucacggaaucgucu

SEQ ID NO: 2521222 - RNA, 19 nt, Artificial Sequence
  Description of Artificial Sequence: Synthetic oligonucleotide
  Sense strand starting at position 671 of SEQ ID NO: 1888244
cgauuccgugaguaaacau

SEQ ID NO: 2521223 - RNA, 19 nt, Artificial Sequence
  Description of Artificial Sequence: Synthetic oligonucleotide
  Antisense strand to SEQ ID NO: 2521222
auguuuacucacggaaucg

SEQ ID NO: 2521224 - RNA, 19 nt, Artificial Sequence
  Description of Artificial Sequence: Synthetic oligonucleotide
  Sense strand starting at position 902 of SEQ ID NO: 1888244
ugaugagguuggucucgaa

SEQ ID NO: 2521225 - RNA, 19 nt, Artificial Sequence
  Description of Artificial Sequence: Synthetic oligonucleotide
  Antisense strand to SEQ ID NO: 2521224
uucgagaccaaccucauca

SEQ ID NO: 2521226 - RNA, 19 nt, Artificial Sequence
  Description of Artificial Sequence: Synthetic oligonucleotide
  Sense strand starting at position 1551 of SEQ ID NO: 1888244
ggagccaaaccucgagaaa

SEQ ID NO: 2521227 - RNA, 19 nt, Artificial Sequence
  Description of Artificial Sequence: Synthetic oligonucleotide
  Antisense strand to SEQ ID NO: 2521226
uuucucgagguuuggcucc

SEQ ID NO: 2521228 - RNA, 19 nt, Artificial Sequence
  Description of Artificial Sequence: Synthetic oligonucleotide
  Sense strand starting at position 1560 of SEQ ID NO: 1888244
ccucgagaaagcugagaua

SEQ ID NO: 2521229 - RNA, 19 nt, Artificial Sequence
  Description of Artificial Sequence: Synthetic oligonucleotide
  Antisense strand to SEQ ID NO: 2521228
uaucucagcuuucucgagg

SEQ ID NO: 2521230 - RNA, 19 nt, Artificial Sequence
  Description of Artificial Sequence: Synthetic oligonucleotide
  Sense strand starting at position 1864 of SEQ ID NO: 1888244
ucgacaagcucccugaaau

SEQ ID NO: 2521231 - RNA, 19 nt, Artificial Sequence
  Description of Artificial Sequence: Synthetic oligonucleotide
  Antisense strand to SEQ ID NO: 2521230
auuucagggagcuugucga

SEQ ID NO: 2521232 - RNA, 19 nt, Artificial Sequence
  Description of Artificial Sequence: Synthetic oligonucleotide
  Sense strand starting at position 1865 of SEQ ID NO: 1888244
cgacaagcucccugaaaug

SEQ ID NO: 2521233 - RNA, 19 nt, Artificial Sequence
  Description of Artificial Sequence: Synthetic oligonucleotide
  Antisense strand to SEQ ID NO: 2521232
cauuucagggagcuugucg

SEQ ID NO: 2521234 - RNA, 19 nt, Artificial Sequence
  Description of Artificial Sequence: Synthetic oligonucleotide
  Sense strand starting at position 1999 of SEQ ID NO: 1888244
auuugagcggccgaaguau

SEQ ID NO: 2521235 - RNA, 19 nt, Artificial Sequence
  Description of Artificial Sequence: Synthetic oligonucleotide
  Antisense strand to SEQ ID NO: 2521234
auacuucggccgcucaaau

SEQ ID NO: 2521236 - RNA, 19 nt, Artificial Sequence
  Description of Artificial Sequence: Synthetic oligonucleotide
  Sense strand starting at position 2010 of SEQ ID NO: 1888244
cgaaguaucgcgagaccua

SEQ ID NO: 2521237 - RNA, 19 nt, Artificial Sequence
  Description of Artificial Sequence: Synthetic oligonucleotide
  Antisense strand to SEQ ID NO: 2521236
uaggucucgcgauacuucg

SEQ ID NO: 2521238 - RNA, 19 nt, Artificial Sequence
  Description of Artificial Sequence: Synthetic oligonucleotide
  Sense strand starting at position 2011 of SEQ ID NO: 1888244
gaaguaucgcgagaccuaa

SEQ ID NO: 2521239 - RNA, 19 nt, Artificial Sequence
  Description of Artificial Sequence: Synthetic oligonucleotide
  Antisense strand to SEQ ID NO: 2521238
uuaggucucgcgauacuuc

SEQ ID NO: 2521240 - RNA, 19 nt, Artificial Sequence
  Description of Artificial Sequence: Synthetic oligonucleotide
  Sense strand starting at position 2050 of SEQ ID NO: 1888244
gcccaaucucgcgcaauga

SEQ ID NO: 2521241 - RNA, 19 nt, Artificial Sequence
  Description of Artificial Sequence: Synthetic oligonucleotide
  Antisense strand to SEQ ID NO: 2521240
ucauugcgcgagauugggc

SEQ ID NO: 2521242 - RNA, 19 nt, Artificial Sequence
  Description of Artificial Sequence: Synthetic oligonucleotide
  Sense strand starting at position 2063 of SEQ ID NO: 1888244
caaugauugcgccacagau

SEQ ID NO: 2521243 - RNA, 19 nt, Artificial Sequence
  Description of Artificial Sequence: Synthetic oligonucleotide
  Antisense strand to SEQ ID NO: 2521242
aucuguggcgcaaucauug

SEQ ID NO: 2521244 - RNA, 19 nt, Artificial Sequence
  Description of Artificial Sequence: Synthetic oligonucleotide
  Sense strand starting at position 2065 of SEQ ID NO: 1888244
augauugcgccacagauau

SEQ ID NO: 2521245 - RNA, 19 nt, Artificial Sequence
  Description of Artificial Sequence: Synthetic oligonucleotide
  Antisense strand to SEQ ID NO: 2521244
auaucuguggcgcaaucau

SEQ ID NO: 2521246 - RNA, 19 nt, Artificial Sequence
  Description of Artificial Sequence: Synthetic oligonucleotide
  Sense strand starting at position 2349 of SEQ ID NO: 1888244
aguccuuauggcgauagga

SEQ ID NO: 2521247 - RNA, 19 nt, Artificial Sequence
  Description of Artificial Sequence: Synthetic oligonucleotide
  Antisense strand to SEQ ID NO: 2521246
uccuaucgccauaaggacu

SEQ ID NO: 2521248 - RNA, 19 nt, Artificial Sequence
  Description of Artificial Sequence: Synthetic oligonucleotide
  Sense strand starting at position 2351 of SEQ ID NO: 1888244
uccuuauggcgauaggaua

SEQ ID NO: 2521249 - RNA, 19 nt, Artificial Sequence
  Description of Artificial Sequence: Synthetic oligonucleotide
  Antisense strand to SEQ ID NO: 2521248
uauccuaucgccauaagga

SEQ ID NO: 2521250 - RNA, 19 nt, Artificial Sequence
  Description of Artificial Sequence: Synthetic oligonucleotide
  Sense strand starting at position 2683 of SEQ ID NO: 1888244
cugaauauuacuggacgau

SEQ ID NO: 2521251 - RNA, 19 nt, Artificial Sequence
  Description of Artificial Sequence: Synthetic oligonucleotide
  Antisense strand to SEQ ID NO: 2521250
aucguccaguaauauucag

SEQ ID NO: 2521252 - RNA, 19 nt, Artificial Sequence
  Description of Artificial Sequence: Synthetic oligonucleotide
  Sense strand starting at position 2777 of SEQ ID NO: 1888244
ugaagucuucuagaugcca

SEQ ID NO: 2521253 - RNA, 19 nt, Artificial Sequence
  Description of Artificial Sequence: Synthetic oligonucleotide
  Antisense strand to SEQ ID NO: 2521252
uggcaucuagaagacuuca

SEQ ID NO: 2521254 - RNA, 19 nt, Artificial Sequence
  Description of Artificial Sequence: Synthetic oligonucleotide
  Sense strand starting at position 2786 of SEQ ID NO: 1888244
cuagaugccagguaauuag

SEQ ID NO: 2521255 - RNA, 19 nt, Artificial Sequence
  Description of Artificial Sequence: Synthetic oligonucleotide
  Antisense strand to SEQ ID NO: 2521254
cuaauuaccuggcaucuag

SEQ ID NO: 2521256 - RNA, 19 nt, Artificial Sequence
  Description of Artificial Sequence: Synthetic oligonucleotide
  Sense strand starting at position 2790 of SEQ ID NO: 1888244
augccagguaauuagagua

SEQ ID NO: 2521257 - RNA, 19 nt, Artificial Sequence
  Description of Artificial Sequence: Synthetic oligonucleotide
  Antisense strand to SEQ ID NO: 2521256
uacucuaauuaccuggcau

SEQ ID NO: 2521258 - RNA, 19 nt, Artificial Sequence
  Description of Artificial Sequence: Synthetic oligonucleotide
  Sense strand starting at position 2816 of SEQ ID NO: 1888244
gccauuuguucuuugguca

SEQ ID NO: 2521259 - RNA, 19 nt, Artificial Sequence
  Description of Artificial Sequence: Synthetic oligonucleotide
  Antisense strand to SEQ ID NO: 2521258
ugaccaaagaacaaauggc

SEQ ID NO: 2521260 - RNA, 19 nt, Artificial Sequence
  Description of Artificial Sequence: Synthetic oligonucleotide
  Sense strand starting at position 2819 of SEQ ID NO: 1888244
auuuguucuuuggucagua

SEQ ID NO: 2521261 - RNA, 19 nt, Artificial Sequence
  Description of Artificial Sequence: Synthetic oligonucleotide
  Antisense strand to SEQ ID NO: 2521260
uacugaccaaagaacaaau

SEQ ID NO: 2521262 - RNA, 19 nt, Artificial Sequence
  Description of Artificial Sequence: Synthetic oligonucleotide
  Sense strand starting at position 2953 of SEQ ID NO: 1888244
augagacgccuugauuagu

SEQ ID NO: 2521263 - RNA, 19 nt, Artificial Sequence
  Description of Artificial Sequence: Synthetic oligonucleotide
  Antisense strand to SEQ ID NO: 2521262
acuaaucaaggcgucucau

SEQ ID NO: 2521264 - RNA, 19 nt, Artificial Sequence
  Description of Artificial Sequence: Synthetic oligonucleotide
  Sense strand starting at position 2961 of SEQ ID NO: 1888244
ccuugauuaguguaacuag

SEQ ID NO: 2521265 - RNA, 19 nt, Artificial Sequence
  Description of Artificial Sequence: Synthetic oligonucleotide
  Antisense strand to SEQ ID NO: 2521264
cuaguuacacuaaucaagg

SEQ ID NO: 2521266 - RNA, 19 nt, Artificial Sequence
  Description of Artificial Sequence: Synthetic oligonucleotide
  Sense strand starting at position 3080 of SEQ ID NO: 1888244
gcuacuugagacugaggaa

SEQ ID NO: 2521267 - RNA, 19 nt, Artificial Sequence
  Description of Artificial Sequence: Synthetic oligonucleotide
  Antisense strand to SEQ ID NO: 2521266
uuccucagucucaaguagc

SEQ ID NO: 2521268 - RNA, 19 nt, Artificial Sequence
  Description of Artificial Sequence: Synthetic oligonucleotide
  Sense strand starting at position 3103 of SEQ ID NO: 1888244
gguaaugcucaguacugaa

SEQ ID NO: 2521269 - RNA, 19 nt, Artificial Sequence
  Description of Artificial Sequence: Synthetic oligonucleotide
  Antisense strand to SEQ ID NO: 2521268
uucaguacugagcauuacc

SEQ ID NO: 2521270 - RNA, 19 nt, Artificial Sequence
  Description of Artificial Sequence: Synthetic oligonucleotide
  Sense strand starting at position 3153 of SEQ ID NO: 1888244
aguggacccucaguaaauu

SEQ ID NO: 2521271 - RNA, 19 nt, Artificial Sequence
  Description of Artificial Sequence: Synthetic oligonucleotide
  Antisense strand to SEQ ID NO: 2521270
aauuuacugaggguccacu

SEQ ID NO: 2521272 - RNA, 19 nt, Artificial Sequence
  Description of Artificial Sequence: Synthetic oligonucleotide
  Sense strand starting at position 3154 of SEQ ID NO: 1888244
guggacccucaguaaauua

SEQ ID NO: 2521273 - RNA, 19 nt, Artificial Sequence
  Description of Artificial Sequence: Synthetic oligonucleotide
  Antisense strand to SEQ ID NO: 2521272
uaauuuacugaggguccac

SEQ ID NO: 2521274 - RNA, 19 nt, Artificial Sequence
  Description of Artificial Sequence: Synthetic oligonucleotide
  Sense strand starting at position 3348 of SEQ ID NO: 1888244
uaggauuuaucuuagagga

SEQ ID NO: 2521275 - RNA, 19 nt, Artificial Sequence
  Description of Artificial Sequence: Synthetic oligonucleotide
  Antisense strand to SEQ ID NO: 2521274
uccucuaagauaaauccua

SEQ ID NO: 2521276 - RNA, 19 nt, Artificial Sequence
  Description of Artificial Sequence: Synthetic oligonucleotide
  Sense strand starting at position 3350 of SEQ ID NO: 1888244
ggauuuaucuuagaggauu

SEQ ID NO: 2521277 - RNA, 19 nt, Artificial Sequence
  Description of Artificial Sequence: Synthetic oligonucleotide
  Antisense strand to SEQ ID NO: 2521276
aauccucuaagauaaaucc

SEQ ID NO: 2521278 - RNA, 19 nt, Artificial Sequence
  Description of Artificial Sequence: Synthetic oligonucleotide
  Sense strand starting at position 3850 of SEQ ID NO: 1888244
cgguaauuccaguauuaug

SEQ ID NO: 2521279 - RNA, 19 nt, Artificial Sequence
  Description of Artificial Sequence: Synthetic oligonucleotide
  Antisense strand to SEQ ID NO: 2521278
cauaauacuggaauuaccg

SEQ ID NO: 2521280 - RNA, 19 nt, Artificial Sequence
  Description of Artificial Sequence: Synthetic oligonucleotide
  Sense strand starting at position 3859 of SEQ ID NO: 1888244
caguauuaugacuagugca

SEQ ID NO: 2521281 - RNA, 19 nt, Artificial Sequence
  Description of Artificial Sequence: Synthetic oligonucleotide
  Antisense strand to SEQ ID NO: 2521280
ugcacuagucauaauacug

SEQ ID NO: 2521282 - RNA, 19 nt, Artificial Sequence
  Description of Artificial Sequence: Synthetic oligonucleotide
  Sense strand starting at position 3932 of SEQ ID NO: 1888244
augacagaauuugaccuua

SEQ ID NO: 2521283 - RNA, 19 nt, Artificial Sequence
  Description of Artificial Sequence: Synthetic oligonucleotide
  Antisense strand to SEQ ID NO: 2521282
uaaggucaaauucugucau

SEQ ID NO: 2521284 - RNA, 19 nt, Artificial Sequence
  Description of Artificial Sequence: Synthetic oligonucleotide
  Sense strand starting at position 3955 of SEQ ID NO: 1888244
cuagacuucuuguuuggga

SEQ ID NO: 2521285 - RNA, 19 nt, Artificial Sequence
  Description of Artificial Sequence: Synthetic oligonucleotide
  Antisense strand to SEQ ID NO: 2521284
ucccaaacaagaagucuag

SEQ ID NO: 2521286 - RNA, 19 nt, Artificial Sequence
  Description of Artificial Sequence: Synthetic oligonucleotide
  Sense strand starting at position 3956 of SEQ ID NO: 1888244
uagacuucuuguuugggaa

SEQ ID NO: 2521287 - RNA, 19 nt, Artificial Sequence
  Description of Artificial Sequence: Synthetic oligonucleotide
  Antisense strand to SEQ ID NO: 2521286
uucccaaacaagaagucua

SEQ ID NO: 2521288 - RNA, 19 nt, Artificial Sequence
  Description of Artificial Sequence: Synthetic oligonucleotide
  Sense strand starting at position 180 of SEQ ID NO: 1888245
aggauaaggacaugucuuu

SEQ ID NO: 2521289 - RNA, 19 nt, Artificial Sequence
  Description of Artificial Sequence: Synthetic oligonucleotide
  Antisense strand to SEQ ID NO: 2521288
aaagacauguccuuauccu

SEQ ID NO: 2521290 - RNA, 19 nt, Artificial Sequence
  Description of Artificial Sequence: Synthetic oligonucleotide
  Sense strand starting at position 251 of SEQ ID NO: 1888245
gugauuccacaaugacaau

SEQ ID NO: 2521291 - RNA, 19 nt, Artificial Sequence
  Description of Artificial Sequence: Synthetic oligonucleotide
  Antisense strand to SEQ ID NO: 2521290
auugucauuguggaaucac

SEQ ID NO: 2521292 - RNA, 19 nt, Artificial Sequence
  Description of Artificial Sequence: Synthetic oligonucleotide
  Sense strand starting at position 292 of SEQ ID NO: 1888245
acaugaggguacuuucuga

SEQ ID NO: 2521293 - RNA, 19 nt, Artificial Sequence
  Description of Artificial Sequence: Synthetic oligonucleotide
  Antisense strand to SEQ ID NO: 2521292
ucagaaaguacccucaugu

SEQ ID NO: 2521294 - RNA, 19 nt, Artificial Sequence
  Description of Artificial Sequence: Synthetic oligonucleotide
  Sense strand starting at position 300 of SEQ ID NO: 1888245
guacuuucugagggaugug

SEQ ID NO: 2521295 - RNA, 19 nt, Artificial Sequence
  Description of Artificial Sequence: Synthetic oligonucleotide
  Antisense strand to SEQ ID NO: 2521294
cacaucccucagaaaguac

SEQ ID NO: 2521296 - RNA, 19 nt, Artificial Sequence
  Description of Artificial Sequence: Synthetic oligonucleotide
  Sense strand starting at position 318 of SEQ ID NO: 1888245
gggccuuuguaaucaagac

SEQ ID NO: 2521297 - RNA, 19 nt, Artificial Sequence
  Description of Artificial Sequence: Synthetic oligonucleotide
  Antisense strand to SEQ ID NO: 2521296
gucuugauuacaaaggccc

SEQ ID NO: 2521298 - RNA, 19 nt, Artificial Sequence
  Description of Artificial Sequence: Synthetic oligonucleotide
  Sense strand starting at position 435 of SEQ ID NO: 1888245
aagccaugugcugaaagca

SEQ ID NO: 2521299 - RNA, 19 nt, Artificial Sequence
  Description of Artificial Sequence: Synthetic oligonucleotide
  Antisense strand to SEQ ID NO: 2521298
ugcuuucagcacauggcuu

SEQ ID NO: 2521300 - RNA, 19 nt, Artificial Sequence
  Description of Artificial Sequence: Synthetic oligonucleotide
  Sense strand starting at position 551 of SEQ ID NO: 1888245
ccuauaaucuggcucaaga

SEQ ID NO: 2521301 - RNA, 19 nt, Artificial Sequence
  Description of Artificial Sequence: Synthetic oligonucleotide
  Antisense strand to SEQ ID NO: 2521300
ucuugagccagauuauagg

SEQ ID NO: 2521302 - RNA, 19 nt, Artificial Sequence
  Description of Artificial Sequence: Synthetic oligonucleotide
  Sense strand starting at position 553 of SEQ ID NO: 1888245
uauaaucuggcucaagagu

SEQ ID NO: 2521303 - RNA, 19 nt, Artificial Sequence
  Description of Artificial Sequence: Synthetic oligonucleotide
  Antisense strand to SEQ ID NO: 2521302
acucuugagccagauuaua

SEQ ID NO: 2521304 - RNA, 19 nt, Artificial Sequence
  Description of Artificial Sequence: Synthetic oligonucleotide
  Sense strand starting at position 579 of SEQ ID NO: 1888245
ugcucuaauccauggaaag

SEQ ID NO: 2521305 - RNA, 19 nt, Artificial Sequence
  Description of Artificial Sequence: Synthetic oligonucleotide
  Antisense strand to SEQ ID NO: 2521304
cuuuccauggauuagagca

SEQ ID NO: 2521306 - RNA, 19 nt, Artificial Sequence
  Description of Artificial Sequence: Synthetic oligonucleotide
  Sense strand starting at position 580 of SEQ ID NO: 1888245
gcucuaauccauggaaagg

SEQ ID NO: 2521307 - RNA, 19 nt, Artificial Sequence
  Description of Artificial Sequence: Synthetic oligonucleotide
  Antisense strand to SEQ ID NO: 2521306
ccuuuccauggauuagagc

SEQ ID NO: 2521308 - RNA, 19 nt, Artificial Sequence
  Description of Artificial Sequence: Synthetic oligonucleotide
  Sense strand starting at position 721 of SEQ ID NO: 1888245
ugaugcuagucucuauaac

SEQ ID NO: 2521309 - RNA, 19 nt, Artificial Sequence
  Description of Artificial Sequence: Synthetic oligonucleotide
  Antisense strand to SEQ ID NO: 2521308
guuauagagacuagcauca

SEQ ID NO: 2521310 - RNA, 19 nt, Artificial Sequence
  Description of Artificial Sequence: Synthetic oligonucleotide
  Sense strand starting at position 813 of SEQ ID NO: 1888245
aguauuauaaugggcaguu

SEQ ID NO: 2521311 - RNA, 19 nt, Artificial Sequence
  Description of Artificial Sequence: Synthetic oligonucleotide
  Antisense strand to SEQ ID NO: 2521310
aacugcccauuauaauacu

SEQ ID NO: 2521312 - RNA, 19 nt, Artificial Sequence
  Description of Artificial Sequence: Synthetic oligonucleotide
  Sense strand starting at position 881 of SEQ ID NO: 1888245
caguucccugaguaaguau

SEQ ID NO: 2521313 - RNA, 19 nt, Artificial Sequence
  Description of Artificial Sequence: Synthetic oligonucleotide
  Antisense strand to SEQ ID NO: 2521312
auacuuacucagggaacug

SEQ ID NO: 2521314 - RNA, 19 nt, Artificial Sequence
  Description of Artificial Sequence: Synthetic oligonucleotide
  Sense strand starting at position 884 of SEQ ID NO: 1888245
uucccugaguaaguauaaa

SEQ ID NO: 2521315 - RNA, 19 nt, Artificial Sequence
  Description of Artificial Sequence: Synthetic oligonucleotide
  Antisense strand to SEQ ID NO: 2521314
uuuauacuuacucagggaa

SEQ ID NO: 2521316 - RNA, 19 nt, Artificial Sequence
  Description of Artificial Sequence: Synthetic oligonucleotide
  Sense strand starting at position 1056 of SEQ ID NO: 1888245
auaucuacugagugaauuc

SEQ ID NO: 2521317 - RNA, 19 nt, Artificial Sequence
  Description of Artificial Sequence: Synthetic oligonucleotide
  Antisense strand to SEQ ID NO: 2521316
gaauucacucaguagauau

SEQ ID NO: 2521318 - RNA, 19 nt, Artificial Sequence
  Description of Artificial Sequence: Synthetic oligonucleotide
  Sense strand starting at position 1067 of SEQ ID NO: 1888245
gugaauucauaagucggau

SEQ ID NO: 2521319 - RNA, 19 nt, Artificial Sequence
  Description of Artificial Sequence: Synthetic oligonucleotide
  Antisense strand to SEQ ID NO: 2521318
auccgacuuaugaauucac

SEQ ID NO: 2521320 - RNA, 19 nt, Artificial Sequence
  Description of Artificial Sequence: Synthetic oligonucleotide
  Sense strand starting at position 1140 of SEQ ID NO: 1888245
augggauagcccugcuaca

SEQ ID NO: 2521321 - RNA, 19 nt, Artificial Sequence
  Description of Artificial Sequence: Synthetic oligonucleotide
  Antisense strand to SEQ ID NO: 2521320
uguagcagggcuaucccau

SEQ ID NO: 2521322 - RNA, 19 nt, Artificial Sequence
  Description of Artificial Sequence: Synthetic oligonucleotide
  Sense strand starting at position 1338 of SEQ ID NO: 1888245
ggaaauaucugugaaauuu

SEQ ID NO: 2521323 - RNA, 19 nt, Artificial Sequence
  Description of Artificial Sequence: Synthetic oligonucleotide
  Antisense strand to SEQ ID NO: 2521322
aaauuucacagauauuucc

SEQ ID NO: 2521324 - RNA, 19 nt, Artificial Sequence
  Description of Artificial Sequence: Synthetic oligonucleotide
  Sense strand starting at position 1522 of SEQ ID NO: 1888245
gagugagaguuugucucua

SEQ ID NO: 2521325 - RNA, 19 nt, Artificial Sequence
  Description of Artificial Sequence: Synthetic oligonucleotide
  Antisense strand to SEQ ID NO: 2521324
uagagacaaacucucacuc

SEQ ID NO: 2521326 - RNA, 19 nt, Artificial Sequence
  Description of Artificial Sequence: Synthetic oligonucleotide
  Sense strand starting at position 1621 of SEQ ID NO: 1888245
auaaacuggugggauuuau

SEQ ID NO: 2521327 - RNA, 19 nt, Artificial Sequence
  Description of Artificial Sequence: Synthetic oligonucleotide
  Antisense strand to SEQ ID NO: 2521326
auaaaucccaccaguuuau

SEQ ID NO: 2521328 - RNA, 19 nt, Artificial Sequence
  Description of Artificial Sequence: Synthetic oligonucleotide
  Sense strand starting at position 2297 of SEQ ID NO: 1888245
ggccuccaccugugaagau

SEQ ID NO: 2521329 - RNA, 19 nt, Artificial Sequence
  Description of Artificial Sequence: Synthetic oligonucleotide
  Antisense strand to SEQ ID NO: 2521328
aucuucacagguggaggcc

SEQ ID NO: 2521330 - RNA, 19 nt, Artificial Sequence
  Description of Artificial Sequence: Synthetic oligonucleotide
  Sense strand starting at position 2325 of SEQ ID NO: 1888245
ucuaauggcuaugucugaa

SEQ ID NO: 2521331 - RNA, 19 nt, Artificial Sequence
  Description of Artificial Sequence: Synthetic oligonucleotide
  Antisense strand to SEQ ID NO: 2521330
uucagacauagccauuaga

SEQ ID NO: 2521332 - RNA, 19 nt, Artificial Sequence
  Description of Artificial Sequence: Synthetic oligonucleotide
  Sense strand starting at position 2447 of SEQ ID NO: 1888245
caauuaguacauggagacu

SEQ ID NO: 2521333 - RNA, 19 nt, Artificial Sequence
  Description of Artificial Sequence: Synthetic oligonucleotide
  Antisense strand to SEQ ID NO: 2521332
agucuccauguacuaauug

SEQ ID NO: 2521334 - RNA, 19 nt, Artificial Sequence
  Description of Artificial Sequence: Synthetic oligonucleotide
  Sense strand starting at position 2534 of SEQ ID NO: 1888245
aaggguacuugaucggaua

SEQ ID NO: 2521335 - RNA, 19 nt, Artificial Sequence
  Description of Artificial Sequence: Synthetic oligonucleotide
  Antisense strand to SEQ ID NO: 2521334
uauccgaucaaguacccuu

SEQ ID NO: 2521336 - RNA, 19 nt, Artificial Sequence
  Description of Artificial Sequence: Synthetic oligonucleotide
  Sense strand starting at position 2536 of SEQ ID NO: 1888245
ggguacuugaucggauaca

SEQ ID NO: 2521337 - RNA, 19 nt, Artificial Sequence
  Description of Artificial Sequence: Synthetic oligonucleotide
  Antisense strand to SEQ ID NO: 2521336
uguauccgaucaaguaccc

SEQ ID NO: 2521338 - RNA, 19 nt, Artificial Sequence
  Description of Artificial Sequence: Synthetic oligonucleotide
  Sense strand starting at position 2662 of SEQ ID NO: 1888245
uaugcuuucuucucaggga

SEQ ID NO: 2521339 - RNA, 19 nt, Artificial Sequence
  Description of Artificial Sequence: Synthetic oligonucleotide
  Antisense strand to SEQ ID NO: 2521338
ucccugagaagaaagcaua

SEQ ID NO: 2521340 - RNA, 19 nt, Artificial Sequence
  Description of Artificial Sequence: Synthetic oligonucleotide
  Sense strand starting at position 2827 of SEQ ID NO: 1888245
uccugucuucuggauaaag

SEQ ID NO: 2521341 - RNA, 19 nt, Artificial Sequence
  Description of Artificial Sequence: Synthetic oligonucleotide
  Antisense strand to SEQ ID NO: 2521340
cuuuauccagaagacagga

SEQ ID NO: 2521342 - RNA, 19 nt, Artificial Sequence
  Description of Artificial Sequence: Synthetic oligonucleotide
  Sense strand starting at position 2829 of SEQ ID NO: 1888245
cugucuucuggauaaagcu

SEQ ID NO: 2521343 - RNA, 19 nt, Artificial Sequence
  Description of Artificial Sequence: Synthetic oligonucleotide
  Antisense strand to SEQ ID NO: 2521342
agcuuuauccagaagacag

SEQ ID NO: 2521344 - RNA, 19 nt, Artificial Sequence
  Description of Artificial Sequence: Synthetic oligonucleotide
  Sense strand starting at position 3010 of SEQ ID NO: 1888245
uccuaugauuucuaagagu

SEQ ID NO: 2521345 - RNA, 19 nt, Artificial Sequence
  Description of Artificial Sequence: Synthetic oligonucleotide
  Antisense strand to SEQ ID NO: 2521344
acucuuagaaaucauagga

SEQ ID NO: 2521346 - RNA, 19 nt, Artificial Sequence
  Description of Artificial Sequence: Synthetic oligonucleotide
  Sense strand starting at position 3169 of SEQ ID NO: 1888245
uaguguaaguacuuugaaa

SEQ ID NO: 2521347 - RNA, 19 nt, Artificial Sequence
  Description of Artificial Sequence: Synthetic oligonucleotide
  Antisense strand to SEQ ID NO: 2521346
uuucaaaguacuuacacua

SEQ ID NO: 2521348 - RNA, 19 nt, Artificial Sequence
  Description of Artificial Sequence: Synthetic oligonucleotide
  Sense strand starting at position 3282 of SEQ ID NO: 1888245
uggauacucuaugcagcaa

SEQ ID NO: 2521349 - RNA, 19 nt, Artificial Sequence
  Description of Artificial Sequence: Synthetic oligonucleotide
  Antisense strand to SEQ ID NO: 2521348
uugcugcauagaguaucca

SEQ ID NO: 2521350 - RNA, 19 nt, Artificial Sequence
  Description of Artificial Sequence: Synthetic oligonucleotide
  Sense strand starting at position 3417 of SEQ ID NO: 1888245
ccuaaugaucuauacguug

SEQ ID NO: 2521351 - RNA, 19 nt, Artificial Sequence
  Description of Artificial Sequence: Synthetic oligonucleotide
  Antisense strand to SEQ ID NO: 2521350
caacguauagaucauuagg

SEQ ID NO: 2521352 - RNA, 19 nt, Artificial Sequence
  Description of Artificial Sequence: Synthetic oligonucleotide
  Sense strand starting at position 3537 of SEQ ID NO: 1888245
agcucccuuuggcuagaaa

SEQ ID NO: 2521353 - RNA, 19 nt, Artificial Sequence
  Description of Artificial Sequence: Synthetic oligonucleotide
  Antisense strand to SEQ ID NO: 2521352
uuucuagccaaagggagcu

SEQ ID NO: 2521354 - RNA, 19 nt, Artificial Sequence
  Description of Artificial Sequence: Synthetic oligonucleotide
  Sense strand starting at position 3592 of SEQ ID NO: 1888245
cagggcauucuguacugaa

SEQ ID NO: 2521355 - RNA, 19 nt, Artificial Sequence
  Description of Artificial Sequence: Synthetic oligonucleotide
  Antisense strand to SEQ ID NO: 2521354
uucaguacagaaugcccug

SEQ ID NO: 2521356 - RNA, 19 nt, Artificial Sequence
  Description of Artificial Sequence: Synthetic oligonucleotide
  Sense strand starting at position 3694 of SEQ ID NO: 1888245
uaaagcauguguguaaaga

SEQ ID NO: 2521357 - RNA, 19 nt, Artificial Sequence
  Description of Artificial Sequence: Synthetic oligonucleotide
  Antisense strand to SEQ ID NO: 2521356
ucuuuacacacaugcuuua

SEQ ID NO: 2521358 - RNA, 19 nt, Artificial Sequence
  Description of Artificial Sequence: Synthetic oligonucleotide
  Sense strand starting at position 3695 of SEQ ID NO: 1888245
aaagcauguguguaaagau

SEQ ID NO: 2521359 - RNA, 19 nt, Artificial Sequence
  Description of Artificial Sequence: Synthetic oligonucleotide
  Antisense strand to SEQ ID NO: 2521358
aucuuuacacacaugcuuu

SEQ ID NO: 2521360 - RNA, 19 nt, Artificial Sequence
  Description of Artificial Sequence: Synthetic oligonucleotide
  Sense strand starting at position 3743 of SEQ ID NO: 1888245
agucuaagugcucauauuc

SEQ ID NO: 2521361 - RNA, 19 nt, Artificial Sequence
  Description of Artificial Sequence: Synthetic oligonucleotide
  Antisense strand to SEQ ID NO: 2521360
gaauaugagcacuuagacu

SEQ ID NO: 2521362 - RNA, 19 nt, Artificial Sequence
  Description of Artificial Sequence: Synthetic oligonucleotide
  Sense strand starting at position 3865 of SEQ ID NO: 1888245
ugcauuugugccugaaccu

SEQ ID NO: 2521363 - RNA, 19 nt, Artificial Sequence
  Description of Artificial Sequence: Synthetic oligonucleotide
  Antisense strand to SEQ ID NO: 2521362
agguucaggcacaaaugca

SEQ ID NO: 2521364 - RNA, 19 nt, Artificial Sequence
  Description of Artificial Sequence: Synthetic oligonucleotide
  Sense strand starting at position 3882 of SEQ ID NO: 1888245
cugagccaugccugagaaa

SEQ ID NO: 2521365 - RNA, 19 nt, Artificial Sequence
  Description of Artificial Sequence: Synthetic oligonucleotide
  Antisense strand to SEQ ID NO: 2521364
uuucucaggcauggcucag

SEQ ID NO: 2521366 - RNA, 19 nt, Artificial Sequence
  Description of Artificial Sequence: Synthetic oligonucleotide
  Sense strand starting at position 3971 of SEQ ID NO: 1888245
guggcuaaugcugaggaau

SEQ ID NO: 2521367 - RNA, 19 nt, Artificial Sequence
  Description of Artificial Sequence: Synthetic oligonucleotide
  Antisense strand to SEQ ID NO: 2521366
auuccucagcauuagccac

SEQ ID NO: 2521368 - RNA, 19 nt, Artificial Sequence
  Description of Artificial Sequence: Synthetic oligonucleotide
  Sense strand starting at position 70 of SEQ ID NO: 1888246
cgucccgccugaugagaaa

SEQ ID NO: 2521369 - RNA, 19 nt, Artificial Sequence
  Description of Artificial Sequence: Synthetic oligonucleotide
  Antisense strand to SEQ ID NO: 2521368
uuucucaucaggcgggacg

SEQ ID NO: 2521370 - RNA, 19 nt, Artificial Sequence
  Description of Artificial Sequence: Synthetic oligonucleotide
  Sense strand starting at position 588 of SEQ ID NO: 1888246
acaguaagacucuguuugu

SEQ ID NO: 2521371 - RNA, 19 nt, Artificial Sequence
  Description of Artificial Sequence: Synthetic oligonucleotide
  Antisense strand to SEQ ID NO: 2521370
acaaacagagucuuacugu

SEQ ID NO: 2521372 - RNA, 19 nt, Artificial Sequence
  Description of Artificial Sequence: Synthetic oligonucleotide
  Sense strand starting at position 589 of SEQ ID NO: 1888246
caguaagacucuguuugua

SEQ ID NO: 2521373 - RNA, 19 nt, Artificial Sequence
  Description of Artificial Sequence: Synthetic oligonucleotide
  Antisense strand to SEQ ID NO: 2521372
uacaaacagagucuuacug

SEQ ID NO: 2521374 - RNA, 19 nt, Artificial Sequence
  Description of Artificial Sequence: Synthetic oligonucleotide
  Sense strand starting at position 591 of SEQ ID NO: 1888246
guaagacucuguuuguaga

SEQ ID NO: 2521375 - RNA, 19 nt, Artificial Sequence
  Description of Artificial Sequence: Synthetic oligonucleotide
  Antisense strand to SEQ ID NO: 2521374
ucuacaaacagagucuuac

SEQ ID NO: 2521376 - RNA, 19 nt, Artificial Sequence
  Description of Artificial Sequence: Synthetic oligonucleotide
  Sense strand starting at position 593 of SEQ ID NO: 1888246
aagacucuguuuguagaca

SEQ ID NO: 2521377 - RNA, 19 nt, Artificial Sequence
  Description of Artificial Sequence: Synthetic oligonucleotide
  Antisense strand to SEQ ID NO: 2521376
ugucuacaaacagagucuu

SEQ ID NO: 2521378 - RNA, 19 nt, Artificial Sequence
  Description of Artificial Sequence: Synthetic oligonucleotide
  Sense strand starting at position 676 of SEQ ID NO: 1888246
gagagcaacccugguauau

SEQ ID NO: 2521379 - RNA, 19 nt, Artificial Sequence
  Description of Artificial Sequence: Synthetic oligonucleotide
  Antisense strand to SEQ ID NO: 2521378
auauaccaggguugcucuc

SEQ ID NO: 2521380 - RNA, 19 nt, Artificial Sequence
  Description of Artificial Sequence: Synthetic oligonucleotide
  Sense strand starting at position 765 of SEQ ID NO: 1888246
cuccguccuucucuggaaa

SEQ ID NO: 2521381 - RNA, 19 nt, Artificial Sequence
  Description of Artificial Sequence: Synthetic oligonucleotide
  Antisense strand to SEQ ID NO: 2521380
uuuccagagaaggacggag

SEQ ID NO: 2521382 - RNA, 19 nt, Artificial Sequence
  Description of Artificial Sequence: Synthetic oligonucleotide
  Sense strand starting at position 800 of SEQ ID NO: 1888246
gcaaguuccgccugcagua

SEQ ID NO: 2521383 - RNA, 19 nt, Artificial Sequence
  Description of Artificial Sequence: Synthetic oligonucleotide
  Antisense strand to SEQ ID NO: 2521382
uacugcaggcggaacuugc

SEQ ID NO: 2521384 - RNA, 19 nt, Artificial Sequence
  Description of Artificial Sequence: Synthetic oligonucleotide
  Sense strand starting at position 812 of SEQ ID NO: 1888246
ugcaguaauuccgcgacuu

SEQ ID NO: 2521385 - RNA, 19 nt, Artificial Sequence
  Description of Artificial Sequence: Synthetic oligonucleotide
  Antisense strand to SEQ ID NO: 2521384
aagucgcggaauuacugca

SEQ ID NO: 2521386 - RNA, 19 nt, Artificial Sequence
  Description of Artificial Sequence: Synthetic oligonucleotide
  Sense strand starting at position 813 of SEQ ID NO: 1888246
gcaguaauuccgcgacuuc

SEQ ID NO: 2521387 - RNA, 19 nt, Artificial Sequence
  Description of Artificial Sequence: Synthetic oligonucleotide
  Antisense strand to SEQ ID NO: 2521386
gaagucgcggaauuacugc

SEQ ID NO: 2521388 - RNA, 19 nt, Artificial Sequence
  Description of Artificial Sequence: Synthetic oligonucleotide
  Sense strand starting at position 1262 of SEQ ID NO: 1888246
cgggagcuguaguuucgaa

SEQ ID NO: 2521389 - RNA, 19 nt, Artificial Sequence
  Description of Artificial Sequence: Synthetic oligonucleotide
  Antisense strand to SEQ ID NO: 2521388
uucgaaacuacagcucccg

SEQ ID NO: 2521390 - RNA, 19 nt, Artificial Sequence
  Description of Artificial Sequence: Synthetic oligonucleotide
  Sense strand starting at position 2109 of SEQ ID NO: 1888246
gggaguuggcgcugcguga

SEQ ID NO: 2521391 - RNA, 19 nt, Artificial Sequence
  Description of Artificial Sequence: Synthetic oligonucleotide
  Antisense strand to SEQ ID NO: 2521390
ucacgcagcgccaacuccc

SEQ ID NO: 2521392 - RNA, 19 nt, Artificial Sequence
  Description of Artificial Sequence: Synthetic oligonucleotide
  Sense strand starting at position 2174 of SEQ ID NO: 1888246
uguguuuaauguccacuga

SEQ ID NO: 2521393 - RNA, 19 nt, Artificial Sequence
  Description of Artificial Sequence: Synthetic oligonucleotide
  Antisense strand to SEQ ID NO: 2521392
ucaguggacauuaaacaca

SEQ ID NO: 2521394 - RNA, 19 nt, Artificial Sequence
  Description of Artificial Sequence: Synthetic oligonucleotide
  Sense strand starting at position 2221 of SEQ ID NO: 1888246
cgcuccugggugugagaua

SEQ ID NO: 2521395 - RNA, 19 nt, Artificial Sequence
  Description of Artificial Sequence: Synthetic oligonucleotide
  Antisense strand to SEQ ID NO: 2521394
uaucucacacccaggagcg

SEQ ID NO: 2521396 - RNA, 19 nt, Artificial Sequence
  Description of Artificial Sequence: Synthetic oligonucleotide
  Sense strand starting at position 2232 of SEQ ID NO: 1888246
gugagauagugcucggaga

SEQ ID NO: 2521397 - RNA, 19 nt, Artificial Sequence
  Description of Artificial Sequence: Synthetic oligonucleotide
  Antisense strand to SEQ ID NO: 2521396
ucuccgagcacuaucucac

SEQ ID NO: 2521398 - RNA, 19 nt, Artificial Sequence
  Description of Artificial Sequence: Synthetic oligonucleotide
  Sense strand starting at position 2233 of SEQ ID NO: 1888246
ugagauagugcucggagaa

SEQ ID NO: 2521399 - RNA, 19 nt, Artificial Sequence
  Description of Artificial Sequence: Synthetic oligonucleotide
  Antisense strand to SEQ ID NO: 2521398
uucuccgagcacuaucuca

SEQ ID NO: 2521400 - RNA, 19 nt, Artificial Sequence
  Description of Artificial Sequence: Synthetic oligonucleotide
  Sense strand starting at position 2234 of SEQ ID NO: 1888246
gagauagugcucggagaag

SEQ ID NO: 2521401 - RNA, 19 nt, Artificial Sequence
  Description of Artificial Sequence: Synthetic oligonucleotide
  Antisense strand to SEQ ID NO: 2521400
cuucuccgagcacuaucuc

SEQ ID NO: 2521402 - RNA, 19 nt, Artificial Sequence
  Description of Artificial Sequence: Synthetic oligonucleotide
  Sense strand starting at position 2358 of SEQ ID NO: 1888246
cacacacucguugaaugaa

SEQ ID NO: 2521403 - RNA, 19 nt, Artificial Sequence
  Description of Artificial Sequence: Synthetic oligonucleotide
  Antisense strand to SEQ ID NO: 2521402
uucauucaacgagugugug

SEQ ID NO: 2521404 - RNA, 19 nt, Artificial Sequence
  Description of Artificial Sequence: Synthetic oligonucleotide
  Sense strand starting at position 2407 of SEQ ID NO: 1888246
cauacaugcugauaugguu

SEQ ID NO: 2521405 - RNA, 19 nt, Artificial Sequence
  Description of Artificial Sequence: Synthetic oligonucleotide
  Antisense strand to SEQ ID NO: 2521404
aaccauaucagcauguaug

SEQ ID NO: 2521406 - RNA, 19 nt, Artificial Sequence
  Description of Artificial Sequence: Synthetic oligonucleotide
  Sense strand starting at position 2445 of SEQ ID NO: 1888246
aagucucaccucgaauugu

SEQ ID NO: 2521407 - RNA, 19 nt, Artificial Sequence
  Description of Artificial Sequence: Synthetic oligonucleotide
  Antisense strand to SEQ ID NO: 2521406
acaauucgaggugagacuu

SEQ ID NO: 2521408 - RNA, 19 nt, Artificial Sequence
  Description of Artificial Sequence: Synthetic oligonucleotide
  Sense strand starting at position 2502 of SEQ ID NO: 1888246
guuggaucaugcggucagu

SEQ ID NO: 2521409 - RNA, 19 nt, Artificial Sequence
  Description of Artificial Sequence: Synthetic oligonucleotide
  Antisense strand to SEQ ID NO: 2521408
acugaccgcaugauccaac

SEQ ID NO: 2521410 - RNA, 19 nt, Artificial Sequence
  Description of Artificial Sequence: Synthetic oligonucleotide
  Sense strand starting at position 2552 of SEQ ID NO: 1888246
aggagacccgaugguuuaa

SEQ ID NO: 2521411 - RNA, 19 nt, Artificial Sequence
  Description of Artificial Sequence: Synthetic oligonucleotide
  Antisense strand to SEQ ID NO: 2521410
uuaaaccaucgggucuccu

SEQ ID NO: 2521412 - RNA, 19 nt, Artificial Sequence
  Description of Artificial Sequence: Synthetic oligonucleotide
  Sense strand starting at position 2977 of SEQ ID NO: 1888246
ccacacuuucugggugaga

SEQ ID NO: 2521413 - RNA, 19 nt, Artificial Sequence
  Description of Artificial Sequence: Synthetic oligonucleotide
  Antisense strand to SEQ ID NO: 2521412
ucucacccagaaagugugg

SEQ ID NO: 2521414 - RNA, 19 nt, Artificial Sequence
  Description of Artificial Sequence: Synthetic oligonucleotide
  Sense strand starting at position 2978 of SEQ ID NO: 1888246
cacacuuucugggugagaa

SEQ ID NO: 2521415 - RNA, 19 nt, Artificial Sequence
  Description of Artificial Sequence: Synthetic oligonucleotide
  Antisense strand to SEQ ID NO: 2521414
uucucacccagaaagugug

SEQ ID NO: 2521416 - RNA, 19 nt, Artificial Sequence
  Description of Artificial Sequence: Synthetic oligonucleotide
  Sense strand starting at position 2979 of SEQ ID NO: 1888246
acacuuucugggugagaaa

SEQ ID NO: 2521417 - RNA, 19 nt, Artificial Sequence
  Description of Artificial Sequence: Synthetic oligonucleotide
  Antisense strand to SEQ ID NO: 2521416
uuucucacccagaaagugu

SEQ ID NO: 2521418 - RNA, 19 nt, Artificial Sequence
  Description of Artificial Sequence: Synthetic oligonucleotide
  Sense strand starting at position 3071 of SEQ ID NO: 1888246
aucucaucuccugagagca

SEQ ID NO: 2521419 - RNA, 19 nt, Artificial Sequence
  Description of Artificial Sequence: Synthetic oligonucleotide
  Antisense strand to SEQ ID NO: 2521418
ugcucucaggagaugagau

SEQ ID NO: 2521420 - RNA, 19 nt, Artificial Sequence
  Description of Artificial Sequence: Synthetic oligonucleotide
  Sense strand starting at position 3117 of SEQ ID NO: 1888246
ugagcugaagucugaguca

SEQ ID NO: 2521421 - RNA, 19 nt, Artificial Sequence
  Description of Artificial Sequence: Synthetic oligonucleotide
  Antisense strand to SEQ ID NO: 2521420
ugacucagacuucagcuca

SEQ ID NO: 2521422 - RNA, 19 nt, Artificial Sequence
  Description of Artificial Sequence: Synthetic oligonucleotide
  Sense strand starting at position 3120 of SEQ ID NO: 1888246
gcugaagucugagucaucu

SEQ ID NO: 2521423 - RNA, 19 nt, Artificial Sequence
  Description of Artificial Sequence: Synthetic oligonucleotide
  Antisense strand to SEQ ID NO: 2521422
agaugacucagacuucagc

SEQ ID NO: 2521424 - RNA, 19 nt, Artificial Sequence
  Description of Artificial Sequence: Synthetic oligonucleotide
  Sense strand starting at position 3208 of SEQ ID NO: 1888246
uccucuaauugcugacgua

SEQ ID NO: 2521425 - RNA, 19 nt, Artificial Sequence
  Description of Artificial Sequence: Synthetic oligonucleotide
  Antisense strand to SEQ ID NO: 2521424
uacgucagcaauuagagga

SEQ ID NO: 2521426 - RNA, 19 nt, Artificial Sequence
  Description of Artificial Sequence: Synthetic oligonucleotide
  Sense strand starting at position 3250 of SEQ ID NO: 1888246
gugcuugacagaugucugu

SEQ ID NO: 2521427 - RNA, 19 nt, Artificial Sequence
  Description of Artificial Sequence: Synthetic oligonucleotide
  Antisense strand to SEQ ID NO: 2521426
acagacaucugucaagcac

SEQ ID NO: 2521428 - RNA, 19 nt, Artificial Sequence
  Description of Artificial Sequence: Synthetic oligonucleotide
  Sense strand starting at position 3254 of SEQ ID NO: 1888246
uugacagaugucuguugaa

SEQ ID NO: 2521429 - RNA, 19 nt, Artificial Sequence
  Description of Artificial Sequence: Synthetic oligonucleotide
  Antisense strand to SEQ ID NO: 2521428
uucaacagacaucugucaa

SEQ ID NO: 2521430 - RNA, 19 nt, Artificial Sequence
  Description of Artificial Sequence: Synthetic oligonucleotide
  Sense strand starting at position 3257 of SEQ ID NO: 1888246
acagaugucuguugaauga

SEQ ID NO: 2521431 - RNA, 19 nt, Artificial Sequence
  Description of Artificial Sequence: Synthetic oligonucleotide
  Antisense strand to SEQ ID NO: 2521430
ucauucaacagacaucugu

SEQ ID NO: 2521432 - RNA, 19 nt, Artificial Sequence
  Description of Artificial Sequence: Synthetic oligonucleotide
  Sense strand starting at position 3278 of SEQ ID NO: 1888246
gaguguccugcugagauau

SEQ ID NO: 2521433 - RNA, 19 nt, Artificial Sequence
  Description of Artificial Sequence: Synthetic oligonucleotide
  Antisense strand to SEQ ID NO: 2521432
auaucucagcaggacacuc

SEQ ID NO: 2521434 - RNA, 19 nt, Artificial Sequence
  Description of Artificial Sequence: Synthetic oligonucleotide
  Sense strand starting at position 3280 of SEQ ID NO: 1888246
guguccugcugagauauag

SEQ ID NO: 2521435 - RNA, 19 nt, Artificial Sequence
  Description of Artificial Sequence: Synthetic oligonucleotide
  Antisense strand to SEQ ID NO: 2521434
cuauaucucagcaggacac

SEQ ID NO: 2521436 - RNA, 19 nt, Artificial Sequence
  Description of Artificial Sequence: Synthetic oligonucleotide
  Sense strand starting at position 3378 of SEQ ID NO: 1888246
ggaauagaguggugcgauc

SEQ ID NO: 2521437 - RNA, 19 nt, Artificial Sequence
  Description of Artificial Sequence: Synthetic oligonucleotide
  Antisense strand to SEQ ID NO: 2521436
gaucgcaccacucuauucc

SEQ ID NO: 2521438 - RNA, 19 nt, Artificial Sequence
  Description of Artificial Sequence: Synthetic oligonucleotide
  Sense strand starting at position 3648 of SEQ ID NO: 1888246
aaugcagaggucugauaaa

SEQ ID NO: 2521439 - RNA, 19 nt, Artificial Sequence
  Description of Artificial Sequence: Synthetic oligonucleotide
  Antisense strand to SEQ ID NO: 2521438
uuuaucagaccucugcauu

SEQ ID NO: 2521440 - RNA, 19 nt, Artificial Sequence
  Description of Artificial Sequence: Synthetic oligonucleotide
  Sense strand starting at position 10 of SEQ ID NO: 1888247
ggaacaaaguguuccaaag

SEQ ID NO: 2521441 - RNA, 19 nt, Artificial Sequence
  Description of Artificial Sequence: Synthetic oligonucleotide
  Antisense strand to SEQ ID NO: 2521440
cuuuggaacacuuuguucc

SEQ ID NO: 2521442 - RNA, 19 nt, Artificial Sequence
  Description of Artificial Sequence: Synthetic oligonucleotide
  Sense strand starting at position 361 of SEQ ID NO: 1888247
ccagguuauucuucgaaag

SEQ ID NO: 2521443 - RNA, 19 nt, Artificial Sequence
  Description of Artificial Sequence: Synthetic oligonucleotide
  Antisense strand to SEQ ID NO: 2521442
cuuucgaagaauaaccugg

SEQ ID NO: 2521444 - RNA, 19 nt, Artificial Sequence
  Description of Artificial Sequence: Synthetic oligonucleotide
  Sense strand starting at position 362 of SEQ ID NO: 1888247
cagguuauucuucgaaaga

SEQ ID NO: 2521445 - RNA, 19 nt, Artificial Sequence
  Description of Artificial Sequence: Synthetic oligonucleotide
  Antisense strand to SEQ ID NO: 2521444
ucuuucgaagaauaaccug

SEQ ID NO: 2521446 - RNA, 19 nt, Artificial Sequence
  Description of Artificial Sequence: Synthetic oligonucleotide
  Sense strand starting at position 373 of SEQ ID NO: 1888247
ucgaaagacuuucuacuua

SEQ ID NO: 2521447 - RNA, 19 nt, Artificial Sequence
  Description of Artificial Sequence: Synthetic oligonucleotide
  Antisense strand to SEQ ID NO: 2521446
uaaguagaaagucuuucga

SEQ ID NO: 2521448 - RNA, 19 nt, Artificial Sequence
  Description of Artificial Sequence: Synthetic oligonucleotide
  Sense strand starting at position 427 of SEQ ID NO: 1888247
cuguauauuuaggauauca

SEQ ID NO: 2521449 - RNA, 19 nt, Artificial Sequence
  Description of Artificial Sequence: Synthetic oligonucleotide
  Antisense strand to SEQ ID NO: 2521448
ugauauccuaaauauacag

SEQ ID NO: 2521450 - RNA, 19 nt, Artificial Sequence
  Description of Artificial Sequence: Synthetic oligonucleotide
  Sense strand starting at position 625 of SEQ ID NO: 1888247
gaaggccuugcucauagua

SEQ ID NO: 2521451 - RNA, 19 nt, Artificial Sequence
  Description of Artificial Sequence: Synthetic oligonucleotide
  Antisense strand to SEQ ID NO: 2521450
uacuaugagcaaggccuuc

SEQ ID NO: 2521452 - RNA, 19 nt, Artificial Sequence
  Description of Artificial Sequence: Synthetic oligonucleotide
  Sense strand starting at position 694 of SEQ ID NO: 1888247
aaugcugucgucuagagaa

SEQ ID NO: 2521453 - RNA, 19 nt, Artificial Sequence
  Description of Artificial Sequence: Synthetic oligonucleotide
  Antisense strand to SEQ ID NO: 2521452
uucucuagacgacagcauu

SEQ ID NO: 2521454 - RNA, 19 nt, Artificial Sequence
  Description of Artificial Sequence: Synthetic oligonucleotide
  Sense strand starting at position 797 of SEQ ID NO: 1888247
aggcaugaaugacucuuaa

SEQ ID NO: 2521455 - RNA, 19 nt, Artificial Sequence
  Description of Artificial Sequence: Synthetic oligonucleotide
  Antisense strand to SEQ ID NO: 2521454
uuaagagucauucaugccu

SEQ ID NO: 2521456 - RNA, 19 nt, Artificial Sequence
  Description of Artificial Sequence: Synthetic oligonucleotide
  Sense strand starting at position 880 of SEQ ID NO: 1888247
aaccuaaaguagucuggaa

SEQ ID NO: 2521457 - RNA, 19 nt, Artificial Sequence
  Description of Artificial Sequence: Synthetic oligonucleotide
  Antisense strand to SEQ ID NO: 2521456
uuccagacuacuuuagguu

SEQ ID NO: 2521458 - RNA, 19 nt, Artificial Sequence
  Description of Artificial Sequence: Synthetic oligonucleotide
  Sense strand starting at position 882 of SEQ ID NO: 1888247
ccuaaaguagucuggaaua

SEQ ID NO: 2521459 - RNA, 19 nt, Artificial Sequence
  Description of Artificial Sequence: Synthetic oligonucleotide
  Antisense strand to SEQ ID NO: 2521458
uauuccagacuacuuuagg

SEQ ID NO: 2521460 - RNA, 19 nt, Artificial Sequence
  Description of Artificial Sequence: Synthetic oligonucleotide
  Sense strand starting at position 909 of SEQ ID NO: 1888247
ucaugauaaguguggagaa

SEQ ID NO: 2521461 - RNA, 19 nt, Artificial Sequence
  Description of Artificial Sequence: Synthetic oligonucleotide
  Antisense strand to SEQ ID NO: 2521460
uucuccacacuuaucauga

SEQ ID NO: 2521462 - RNA, 19 nt, Artificial Sequence
  Description of Artificial Sequence: Synthetic oligonucleotide
  Sense strand starting at position 984 of SEQ ID NO: 1888247
gcaagaaguagguauggcu

SEQ ID NO: 2521463 - RNA, 19 nt, Artificial Sequence
  Description of Artificial Sequence: Synthetic oligonucleotide
  Antisense strand to SEQ ID NO: 2521462
agccauaccuacuucuugc

SEQ ID NO: 2521464 - RNA, 19 nt, Artificial Sequence
  Description of Artificial Sequence: Synthetic oligonucleotide
  Sense strand starting at position 1109 of SEQ ID NO: 1888247
acgaguccaguuuggauaa

SEQ ID NO: 2521465 - RNA, 19 nt, Artificial Sequence
  Description of Artificial Sequence: Synthetic oligonucleotide
  Antisense strand to SEQ ID NO: 2521464
uuauccaaacuggacucgu

SEQ ID NO: 2521466 - RNA, 19 nt, Artificial Sequence
  Description of Artificial Sequence: Synthetic oligonucleotide
  Sense strand starting at position 1123 of SEQ ID NO: 1888247
gauaaucugcgagguaaac

SEQ ID NO: 2521467 - RNA, 19 nt, Artificial Sequence
  Description of Artificial Sequence: Synthetic oligonucleotide
  Antisense strand to SEQ ID NO: 2521466
guuuaccucgcagauuauc

SEQ ID NO: 2521468 - RNA, 19 nt, Artificial Sequence
  Description of Artificial Sequence: Synthetic oligonucleotide
  Sense strand starting at position 1312 of SEQ ID NO: 1888247
gccugagucccucauaaca

SEQ ID NO: 2521469 - RNA, 19 nt, Artificial Sequence
  Description of Artificial Sequence: Synthetic oligonucleotide
  Antisense strand to SEQ ID NO: 2521468
uguuaugagggacucaggc

SEQ ID NO: 2521470 - RNA, 19 nt, Artificial Sequence
  Description of Artificial Sequence: Synthetic oligonucleotide
  Sense strand starting at position 1357 of SEQ ID NO: 1888247
aauugauuugcccggccaa

SEQ ID NO: 2521471 - RNA, 19 nt, Artificial Sequence
  Description of Artificial Sequence: Synthetic oligonucleotide
  Antisense strand to SEQ ID NO: 2521470
uuggccgggcaaaucaauu

SEQ ID NO: 2521472 - RNA, 19 nt, Artificial Sequence
  Description of Artificial Sequence: Synthetic oligonucleotide
  Sense strand starting at position 2129 of SEQ ID NO: 1888247
aucauagaacgaugugaca

SEQ ID NO: 2521473 - RNA, 19 nt, Artificial Sequence
  Description of Artificial Sequence: Synthetic oligonucleotide
  Antisense strand to SEQ ID NO: 2521472
ugucacaucguucuaugau

SEQ ID NO: 2521474 - RNA, 19 nt, Artificial Sequence
  Description of Artificial Sequence: Synthetic oligonucleotide
  Sense strand starting at position 2461 of SEQ ID NO: 1888247
uaggaaucagcuuagguuu

SEQ ID NO: 2521475 - RNA, 19 nt, Artificial Sequence
  Description of Artificial Sequence: Synthetic oligonucleotide
  Antisense strand to SEQ ID NO: 2521474
aaaccuaagcugauuccua

SEQ ID NO: 2521476 - RNA, 19 nt, Artificial Sequence
  Description of Artificial Sequence: Synthetic oligonucleotide
  Sense strand starting at position 2467 of SEQ ID NO: 1888247
ucagcuuagguuuacuaga

SEQ ID NO: 2521477 - RNA, 19 nt, Artificial Sequence
  Description of Artificial Sequence: Synthetic oligonucleotide
  Antisense strand to SEQ ID NO: 2521476
ucuaguaaaccuaagcuga

SEQ ID NO: 2521478 - RNA, 19 nt, Artificial Sequence
  Description of Artificial Sequence: Synthetic oligonucleotide
  Sense strand starting at position 2469 of SEQ ID NO: 1888247
agcuuagguuuacuagaag

SEQ ID NO: 2521479 - RNA, 19 nt, Artificial Sequence
  Description of Artificial Sequence: Synthetic oligonucleotide
  Antisense strand to SEQ ID NO: 2521478
cuucuaguaaaccuaagcu

SEQ ID NO: 2521480 - RNA, 19 nt, Artificial Sequence
  Description of Artificial Sequence: Synthetic oligonucleotide
  Sense strand starting at position 2523 of SEQ ID NO: 1888247
cugacaucuugagucaaag

SEQ ID NO: 2521481 - RNA, 19 nt, Artificial Sequence
  Description of Artificial Sequence: Synthetic oligonucleotide
  Antisense strand to SEQ ID NO: 2521480
cuuugacucaagaugucag

SEQ ID NO: 2521482 - RNA, 19 nt, Artificial Sequence
  Description of Artificial Sequence: Synthetic oligonucleotide
  Sense strand starting at position 2656 of SEQ ID NO: 1888247
ccagaauggugagcaaagu

SEQ ID NO: 2521483 - RNA, 19 nt, Artificial Sequence
  Description of Artificial Sequence: Synthetic oligonucleotide
  Antisense strand to SEQ ID NO: 2521482
acuuugcucaccauucugg

SEQ ID NO: 2521484 - RNA, 19 nt, Artificial Sequence
  Description of Artificial Sequence: Synthetic oligonucleotide
  Sense strand starting at position 2714 of SEQ ID NO: 1888247
cagucuaguguguacuaaa

SEQ ID NO: 2521485 - RNA, 19 nt, Artificial Sequence
  Description of Artificial Sequence: Synthetic oligonucleotide
  Antisense strand to SEQ ID NO: 2521484
uuuaguacacacuagacug

SEQ ID NO: 2521486 - RNA, 19 nt, Artificial Sequence
  Description of Artificial Sequence: Synthetic oligonucleotide
  Sense strand starting at position 2783 of SEQ ID NO: 1888247
uuuggcuuacuugaaaguu

SEQ ID NO: 2521487 - RNA, 19 nt, Artificial Sequence
  Description of Artificial Sequence: Synthetic oligonucleotide
  Antisense strand to SEQ ID NO: 2521486
aacuuucaaguaagccaaa

SEQ ID NO: 2521488 - RNA, 19 nt, Artificial Sequence
  Description of Artificial Sequence: Synthetic oligonucleotide
  Sense strand starting at position 2792 of SEQ ID NO: 1888247
cuugaaaguuuggcaggau

SEQ ID NO: 2521489 - RNA, 19 nt, Artificial Sequence
  Description of Artificial Sequence: Synthetic oligonucleotide
  Antisense strand to SEQ ID NO: 2521488
auccugccaaacuuucaag

SEQ ID NO: 2521490 - RNA, 19 nt, Artificial Sequence
  Description of Artificial Sequence: Synthetic oligonucleotide
  Sense strand starting at position 2795 of SEQ ID NO: 1888247
gaaaguuuggcaggauauc

SEQ ID NO: 2521491 - RNA, 19 nt, Artificial Sequence
  Description of Artificial Sequence: Synthetic oligonucleotide
  Antisense strand to SEQ ID NO: 2521490
gauauccugccaaacuuuc

SEQ ID NO: 2521492 - RNA, 19 nt, Artificial Sequence
  Description of Artificial Sequence: Synthetic oligonucleotide
  Sense strand starting at position 2796 of SEQ ID NO: 1888247
aaaguuuggcaggauaucu

SEQ ID NO: 2521493 - RNA, 19 nt, Artificial Sequence
  Description of Artificial Sequence: Synthetic oligonucleotide
  Antisense strand to SEQ ID NO: 2521492
agauauccugccaaacuuu

SEQ ID NO: 2521494 - RNA, 19 nt, Artificial Sequence
  Description of Artificial Sequence: Synthetic oligonucleotide
  Sense strand starting at position 2966 of SEQ ID NO: 1888247
uccaaucuguuccuuggaa

SEQ ID NO: 2521495 - RNA, 19 nt, Artificial Sequence
  Description of Artificial Sequence: Synthetic oligonucleotide
  Antisense strand to SEQ ID NO: 2521494
uuccaaggaacagauugga

SEQ ID NO: 2521496 - RNA, 19 nt, Artificial Sequence
  Description of Artificial Sequence: Synthetic oligonucleotide
  Sense strand starting at position 2967 of SEQ ID NO: 1888247
ccaaucuguuccuuggaaa

SEQ ID NO: 2521497 - RNA, 19 nt, Artificial Sequence
  Description of Artificial Sequence: Synthetic oligonucleotide
  Antisense strand to SEQ ID NO: 2521496
uuuccaaggaacagauugg

SEQ ID NO: 2521498 - RNA, 19 nt, Artificial Sequence
  Description of Artificial Sequence: Synthetic oligonucleotide
  Sense strand starting at position 3089 of SEQ ID NO: 1888247
augagugagguccagugua

SEQ ID NO: 2521499 - RNA, 19 nt, Artificial Sequence
  Description of Artificial Sequence: Synthetic oligonucleotide
  Antisense strand to SEQ ID NO: 2521498
uacacuggaccucacucau

SEQ ID NO: 2521500 - RNA, 19 nt, Artificial Sequence
  Description of Artificial Sequence: Synthetic oligonucleotide
  Sense strand starting at position 3094 of SEQ ID NO: 1888247
ugagguccaguguaagaaa

SEQ ID NO: 2521501 - RNA, 19 nt, Artificial Sequence
  Description of Artificial Sequence: Synthetic oligonucleotide
  Antisense strand to SEQ ID NO: 2521500
uuucuuacacuggaccuca

SEQ ID NO: 2521502 - RNA, 19 nt, Artificial Sequence
  Description of Artificial Sequence: Synthetic oligonucleotide
  Sense strand starting at position 3138 of SEQ ID NO: 1888247
ugauaaauagcuuggcaac

SEQ ID NO: 2521503 - RNA, 19 nt, Artificial Sequence
  Description of Artificial Sequence: Synthetic oligonucleotide
  Antisense strand to SEQ ID NO: 2521502
guugccaagcuauuuauca

SEQ ID NO: 2521504 - RNA, 19 nt, Artificial Sequence
  Description of Artificial Sequence: Synthetic oligonucleotide
  Sense strand starting at position 3288 of SEQ ID NO: 1888247
ggaugaugugcacagcaga

SEQ ID NO: 2521505 - RNA, 19 nt, Artificial Sequence
  Description of Artificial Sequence: Synthetic oligonucleotide
  Antisense strand to SEQ ID NO: 2521504
ucugcugugcacaucaucc

SEQ ID NO: 2521506 - RNA, 19 nt, Artificial Sequence
  Description of Artificial Sequence: Synthetic oligonucleotide
  Sense strand starting at position 3369 of SEQ ID NO: 1888247
gcauguucgcuggcaggga

SEQ ID NO: 2521507 - RNA, 19 nt, Artificial Sequence
  Description of Artificial Sequence: Synthetic oligonucleotide
  Antisense strand to SEQ ID NO: 2521506
ucccugccagcgaacaugc

SEQ ID NO: 2521508 - RNA, 19 nt, Artificial Sequence
  Description of Artificial Sequence: Synthetic oligonucleotide
  Sense strand starting at position 3614 of SEQ ID NO: 1888247
gaagaaugugcauaaguua

SEQ ID NO: 2521509 - RNA, 19 nt, Artificial Sequence
  Description of Artificial Sequence: Synthetic oligonucleotide
  Antisense strand to SEQ ID NO: 2521508
uaacuuaugcacauucuuc

SEQ ID NO: 2521510 - RNA, 19 nt, Artificial Sequence
  Description of Artificial Sequence: Synthetic oligonucleotide
  Sense strand starting at position 3679 of SEQ ID NO: 1888247
gauguugguauccgaggga

SEQ ID NO: 2521511 - RNA, 19 nt, Artificial Sequence
  Description of Artificial Sequence: Synthetic oligonucleotide
  Antisense strand to SEQ ID NO: 2521510
ucccucggauaccaacauc

SEQ ID NO: 2521512 - RNA, 19 nt, Artificial Sequence
  Description of Artificial Sequence: Synthetic oligonucleotide
  Sense strand starting at position 3710 of SEQ ID NO: 1888247
ggcauuguccuggaaccua

SEQ ID NO: 2521513 - RNA, 19 nt, Artificial Sequence
  Description of Artificial Sequence: Synthetic oligonucleotide
  Antisense strand to SEQ ID NO: 2521512
uagguuccaggacaaugcc

SEQ ID NO: 2521514 - RNA, 19 nt, Artificial Sequence
  Description of Artificial Sequence: Synthetic oligonucleotide
  Sense strand starting at position 3794 of SEQ ID NO: 1888247
gaagguggcaguggugaaa

SEQ ID NO: 2521515 - RNA, 19 nt, Artificial Sequence
  Description of Artificial Sequence: Synthetic oligonucleotide
  Antisense strand to SEQ ID NO: 2521514
uuucaccacugccaccuuc

SEQ ID NO: 2521516 - RNA, 19 nt, Artificial Sequence
  Description of Artificial Sequence: Synthetic oligonucleotide
  Sense strand starting at position 3852 of SEQ ID NO: 1888247
gggagugauuuccaggaaa

SEQ ID NO: 2521517 - RNA, 19 nt, Artificial Sequence
  Description of Artificial Sequence: Synthetic oligonucleotide
  Antisense strand to SEQ ID NO: 2521516
uuuccuggaaaucacuccc

SEQ ID NO: 2521518 - RNA, 19 nt, Artificial Sequence
  Description of Artificial Sequence: Synthetic oligonucleotide
  Sense strand starting at position 3914 of SEQ ID NO: 1888247
auauaagugcucuacuggu

SEQ ID NO: 2521519 - RNA, 19 nt, Artificial Sequence
  Description of Artificial Sequence: Synthetic oligonucleotide
  Antisense strand to SEQ ID NO: 2521518
accaguagagcacuuauau

SEQ ID NO: 2521520 - RNA, 19 nt, Artificial Sequence
  Description of Artificial Sequence: Synthetic oligonucleotide
  Sense strand starting at position 92 of SEQ ID NO: 1888248
gauaaagauuguguugaag

SEQ ID NO: 2521521 - RNA, 19 nt, Artificial Sequence
  Description of Artificial Sequence: Synthetic oligonucleotide
  Antisense strand to SEQ ID NO: 2521520
cuucaacacaaucuuuauc

SEQ ID NO: 2521522 - RNA, 19 nt, Artificial Sequence
  Description of Artificial Sequence: Synthetic oligonucleotide
  Sense strand starting at position 261 of SEQ ID NO: 1888248
ggcagacgacuguaauuca

SEQ ID NO: 2521523 - RNA, 19 nt, Artificial Sequence
  Description of Artificial Sequence: Synthetic oligonucleotide
  Antisense strand to SEQ ID NO: 2521522
ugaauuacagucgucugcc

SEQ ID NO: 2521524 - RNA, 19 nt, Artificial Sequence
  Description of Artificial Sequence: Synthetic oligonucleotide
  Sense strand starting at position 779 of SEQ ID NO: 1888248
ucaugucuucugugaauac

SEQ ID NO: 2521525 - RNA, 19 nt, Artificial Sequence
  Description of Artificial Sequence: Synthetic oligonucleotide
  Antisense strand to SEQ ID NO: 2521524
guauucacagaagacauga

SEQ ID NO: 2521526 - RNA, 19 nt, Artificial Sequence
  Description of Artificial Sequence: Synthetic oligonucleotide
  Sense strand starting at position 783 of SEQ ID NO: 1888248
gucuucugugaauacagau

SEQ ID NO: 2521527 - RNA, 19 nt, Artificial Sequence
  Description of Artificial Sequence: Synthetic oligonucleotide
  Antisense strand to SEQ ID NO: 2521526
aucuguauucacagaagac

SEQ ID NO: 2521528 - RNA, 19 nt, Artificial Sequence
  Description of Artificial Sequence: Synthetic oligonucleotide
  Sense strand starting at position 927 of SEQ ID NO: 1888248
ugauguuagggaugaagca

SEQ ID NO: 2521529 - RNA, 19 nt, Artificial Sequence
  Description of Artificial Sequence: Synthetic oligonucleotide
  Antisense strand to SEQ ID NO: 2521528
ugcuucaucccuaacauca

SEQ ID NO: 2521530 - RNA, 19 nt, Artificial Sequence
  Description of Artificial Sequence: Synthetic oligonucleotide
  Sense strand starting at position 936 of SEQ ID NO: 1888248
ggaugaagcagucagucuu

SEQ ID NO: 2521531 - RNA, 19 nt, Artificial Sequence
  Description of Artificial Sequence: Synthetic oligonucleotide
  Antisense strand to SEQ ID NO: 2521530
aagacugacugcuucaucc

SEQ ID NO: 2521532 - RNA, 19 nt, Artificial Sequence
  Description of Artificial Sequence: Synthetic oligonucleotide
  Sense strand starting at position 991 of SEQ ID NO: 1888248
cuucuaucagguugauaaa

SEQ ID NO: 2521533 - RNA, 19 nt, Artificial Sequence
  Description of Artificial Sequence: Synthetic oligonucleotide
  Antisense strand to SEQ ID NO: 2521532
uuuaucaaccugauagaag

SEQ ID NO: 2521534 - RNA, 19 nt, Artificial Sequence
  Description of Artificial Sequence: Synthetic oligonucleotide
  Sense strand starting at position 1020 of SEQ ID NO: 1888248
auucuuaguuugucacaca

SEQ ID NO: 2521535 - RNA, 19 nt, Artificial Sequence
  Description of Artificial Sequence: Synthetic oligonucleotide
  Antisense strand to SEQ ID NO: 2521534
ugugugacaaacuaagaau

SEQ ID NO: 2521536 - RNA, 19 nt, Artificial Sequence
  Description of Artificial Sequence: Synthetic oligonucleotide
  Sense strand starting at position 1140 of SEQ ID NO: 1888248
auuuaugggugguaaacca

SEQ ID NO: 2521537 - RNA, 19 nt, Artificial Sequence
  Description of Artificial Sequence: Synthetic oligonucleotide
  Antisense strand to SEQ ID NO: 2521536
ugguuuaccacccauaaau

SEQ ID NO: 2521538 - RNA, 19 nt, Artificial Sequence
  Description of Artificial Sequence: Synthetic oligonucleotide
  Sense strand starting at position 1247 of SEQ ID NO: 1888248
gcugaauucuaaccacuag

SEQ ID NO: 2521539 - RNA, 19 nt, Artificial Sequence
  Description of Artificial Sequence: Synthetic oligonucleotide
  Antisense strand to SEQ ID NO: 2521538
cuagugguuagaauucagc

SEQ ID NO: 2521540 - RNA, 19 nt, Artificial Sequence
  Description of Artificial Sequence: Synthetic oligonucleotide
  Sense strand starting at position 1395 of SEQ ID NO: 1888248
guaacuauuuaggaaacau

SEQ ID NO: 2521541 - RNA, 19 nt, Artificial Sequence
  Description of Artificial Sequence: Synthetic oligonucleotide
  Antisense strand to SEQ ID NO: 2521540
auguuuccuaaauaguuac

SEQ ID NO: 2521542 - RNA, 19 nt, Artificial Sequence
  Description of Artificial Sequence: Synthetic oligonucleotide
  Sense strand starting at position 1504 of SEQ ID NO: 1888248
cuuuaaagucuuggaacua

SEQ ID NO: 2521543 - RNA, 19 nt, Artificial Sequence
  Description of Artificial Sequence: Synthetic oligonucleotide
  Antisense strand to SEQ ID NO: 2521542
uaguuccaagacuuuaaag

SEQ ID NO: 2521544 - RNA, 19 nt, Artificial Sequence
  Description of Artificial Sequence: Synthetic oligonucleotide
  Sense strand starting at position 1678 of SEQ ID NO: 1888248
gugagacuaucauuaucau

SEQ ID NO: 2521545 - RNA, 19 nt, Artificial Sequence
  Description of Artificial Sequence: Synthetic oligonucleotide
  Antisense strand to SEQ ID NO: 2521544
augauaaugauagucucac

SEQ ID NO: 2521546 - RNA, 19 nt, Artificial Sequence
  Description of Artificial Sequence: Synthetic oligonucleotide
  Sense strand starting at position 1958 of SEQ ID NO: 1888248
cuaggugauuggcccaaga

SEQ ID NO: 2521547 - RNA, 19 nt, Artificial Sequence
  Description of Artificial Sequence: Synthetic oligonucleotide
  Antisense strand to SEQ ID NO: 2521546
ucuugggccaaucaccuag

SEQ ID NO: 2521548 - RNA, 19 nt, Artificial Sequence
  Description of Artificial Sequence: Synthetic oligonucleotide
  Sense strand starting at position 2097 of SEQ ID NO: 1888248
gagaauguaggcuguggaa

SEQ ID NO: 2521549 - RNA, 19 nt, Artificial Sequence
  Description of Artificial Sequence: Synthetic oligonucleotide
  Antisense strand to SEQ ID NO: 2521548
uuccacagccuacauucuc

SEQ ID NO: 2521550 - RNA, 19 nt, Artificial Sequence
  Description of Artificial Sequence: Synthetic oligonucleotide
  Sense strand starting at position 2127 of SEQ ID NO: 1888248
cuauuccucuggcugaaga

SEQ ID NO: 2521551 - RNA, 19 nt, Artificial Sequence
  Description of Artificial Sequence: Synthetic oligonucleotide
  Antisense strand to SEQ ID NO: 2521550
ucuucagccagaggaauag

SEQ ID NO: 2521552 - RNA, 19 nt, Artificial Sequence
  Description of Artificial Sequence: Synthetic oligonucleotide
  Sense strand starting at position 2129 of SEQ ID NO: 1888248
auuccucuggcugaagaua

SEQ ID NO: 2521553 - RNA, 19 nt, Artificial Sequence
  Description of Artificial Sequence: Synthetic oligonucleotide
  Antisense strand to SEQ ID NO: 2521552
uaucuucagccagaggaau

SEQ ID NO: 2521554 - RNA, 19 nt, Artificial Sequence
  Description of Artificial Sequence: Synthetic oligonucleotide
  Sense strand starting at position 2263 of SEQ ID NO: 1888248
uuauguugccucuagaggu

SEQ ID NO: 2521555 - RNA, 19 nt, Artificial Sequence
  Description of Artificial Sequence: Synthetic oligonucleotide
  Antisense strand to SEQ ID NO: 2521554
accucuagaggcaacauaa

SEQ ID NO: 2521556 - RNA, 19 nt, Artificial Sequence
  Description of Artificial Sequence: Synthetic oligonucleotide
  Sense strand starting at position 2438 of SEQ ID NO: 1888248
agaaacugcugaggauuua

SEQ ID NO: 2521557 - RNA, 19 nt, Artificial Sequence
  Description of Artificial Sequence: Synthetic oligonucleotide
  Antisense strand to SEQ ID NO: 2521556
uaaauccucagcaguuucu

SEQ ID NO: 2521558 - RNA, 19 nt, Artificial Sequence
  Description of Artificial Sequence: Synthetic oligonucleotide
  Sense strand starting at position 2468 of SEQ ID NO: 1888248
gcaaacaaagacuguuuaa

SEQ ID NO: 2521559 - RNA, 19 nt, Artificial Sequence
  Description of Artificial Sequence: Synthetic oligonucleotide
  Antisense strand to SEQ ID NO: 2521558
uuaaacagucuuuguuugc

SEQ ID NO: 2521560 - RNA, 19 nt, Artificial Sequence
  Description of Artificial Sequence: Synthetic oligonucleotide
  Sense strand starting at position 2478 of SEQ ID NO: 1888248
acuguuuaacaaugucuuu

SEQ ID NO: 2521561 - RNA, 19 nt, Artificial Sequence
  Description of Artificial Sequence: Synthetic oligonucleotide
  Antisense strand to SEQ ID NO: 2521560
aaagacauuguuaaacagu

SEQ ID NO: 2521562 - RNA, 19 nt, Artificial Sequence
  Description of Artificial Sequence: Synthetic oligonucleotide
  Sense strand starting at position 2481 of SEQ ID NO: 1888248
guuuaacaaugucuuuaca

SEQ ID NO: 2521563 - RNA, 19 nt, Artificial Sequence
  Description of Artificial Sequence: Synthetic oligonucleotide
  Antisense strand to SEQ ID NO: 2521562
uguaaagacauuguuaaac

SEQ ID NO: 2521564 - RNA, 19 nt, Artificial Sequence
  Description of Artificial Sequence: Synthetic oligonucleotide
  Sense strand starting at position 2491 of SEQ ID NO: 1888248
gucuuuacauaccucagau

SEQ ID NO: 2521565 - RNA, 19 nt, Artificial Sequence
  Description of Artificial Sequence: Synthetic oligonucleotide
  Antisense strand to SEQ ID NO: 2521564
aucugagguauguaaagac

SEQ ID NO: 2521566 - RNA, 19 nt, Artificial Sequence
  Description of Artificial Sequence: Synthetic oligonucleotide
  Sense strand starting at position 2613 of SEQ ID NO: 1888248
uugagaaauuaugccuaca

SEQ ID NO: 2521567 - RNA, 19 nt, Artificial Sequence
  Description of Artificial Sequence: Synthetic oligonucleotide
  Antisense strand to SEQ ID NO: 2521566
uguaggcauaauuucucaa

SEQ ID NO: 2521568 - RNA, 19 nt, Artificial Sequence
  Description of Artificial Sequence: Synthetic oligonucleotide
  Sense strand starting at position 2655 of SEQ ID NO: 1888248
uguccaggucauuacuuua

SEQ ID NO: 2521569 - RNA, 19 nt, Artificial Sequence
  Description of Artificial Sequence: Synthetic oligonucleotide
  Antisense strand to SEQ ID NO: 2521568
uaaaguaaugaccuggaca

SEQ ID NO: 2521570 - RNA, 19 nt, Artificial Sequence
  Description of Artificial Sequence: Synthetic oligonucleotide
  Sense strand starting at position 2658 of SEQ ID NO: 1888248
ccaggucauuacuuuagaa

SEQ ID NO: 2521571 - RNA, 19 nt, Artificial Sequence
  Description of Artificial Sequence: Synthetic oligonucleotide
  Antisense strand to SEQ ID NO: 2521570
uucuaaaguaaugaccugg

SEQ ID NO: 2521572 - RNA, 19 nt, Artificial Sequence
  Description of Artificial Sequence: Synthetic oligonucleotide
  Sense strand starting at position 2752 of SEQ ID NO: 1888248
acaaacguaauggguuaaa

SEQ ID NO: 2521573 - RNA, 19 nt, Artificial Sequence
  Description of Artificial Sequence: Synthetic oligonucleotide
  Antisense strand to SEQ ID NO: 2521572
uuuaacccauuacguuugu

SEQ ID NO: 2521574 - RNA, 19 nt, Artificial Sequence
  Description of Artificial Sequence: Synthetic oligonucleotide
  Sense strand starting at position 2819 of SEQ ID NO: 1888248
ccauucuuacagggcuaaa

SEQ ID NO: 2521575 - RNA, 19 nt, Artificial Sequence
  Description of Artificial Sequence: Synthetic oligonucleotide
  Antisense strand to SEQ ID NO: 2521574
uuuagcccuguaagaaugg

SEQ ID NO: 2521576 - RNA, 19 nt, Artificial Sequence
  Description of Artificial Sequence: Synthetic oligonucleotide
  Sense strand starting at position 2880 of SEQ ID NO: 1888248
auccauucuuggccuggaa

SEQ ID NO: 2521577 - RNA, 19 nt, Artificial Sequence
  Description of Artificial Sequence: Synthetic oligonucleotide
  Antisense strand to SEQ ID NO: 2521576
uuccaggccaagaauggau

SEQ ID NO: 2521578 - RNA, 19 nt, Artificial Sequence
  Description of Artificial Sequence: Synthetic oligonucleotide
  Sense strand starting at position 2882 of SEQ ID NO: 1888248
ccauucuuggccuggaauu

SEQ ID NO: 2521579 - RNA, 19 nt, Artificial Sequence
  Description of Artificial Sequence: Synthetic oligonucleotide
  Antisense strand to SEQ ID NO: 2521578
aauuccaggccaagaaugg

SEQ ID NO: 2521580 - RNA, 19 nt, Artificial Sequence
  Description of Artificial Sequence: Synthetic oligonucleotide
  Sense strand starting at position 3016 of SEQ ID NO: 1888248
agauacuugugauuacauu

SEQ ID NO: 2521581 - RNA, 19 nt, Artificial Sequence
  Description of Artificial Sequence: Synthetic oligonucleotide
  Antisense strand to SEQ ID NO: 2521580
aauguaaucacaaguaucu

SEQ ID NO: 2521582 - RNA, 19 nt, Artificial Sequence
  Description of Artificial Sequence: Synthetic oligonucleotide
  Sense strand starting at position 3245 of SEQ ID NO: 1888248
gcgccuguaguuucaggua

SEQ ID NO: 2521583 - RNA, 19 nt, Artificial Sequence
  Description of Artificial Sequence: Synthetic oligonucleotide
  Antisense strand to SEQ ID NO: 2521582
uaccugaaacuacaggcgc

SEQ ID NO: 2521584 - RNA, 19 nt, Artificial Sequence
  Description of Artificial Sequence: Synthetic oligonucleotide
  Sense strand starting at position 3281 of SEQ ID NO: 1888248
ugagaagugcuugaauccu

SEQ ID NO: 2521585 - RNA, 19 nt, Artificial Sequence
  Description of Artificial Sequence: Synthetic oligonucleotide
  Antisense strand to SEQ ID NO: 2521584
aggauucaagcacuucuca

SEQ ID NO: 2521586 - RNA, 19 nt, Artificial Sequence
  Description of Artificial Sequence: Synthetic oligonucleotide
  Sense strand starting at position 3496 of SEQ ID NO: 1888248
ggcuuugcuagggagugau

SEQ ID NO: 2521587 - RNA, 19 nt, Artificial Sequence
  Description of Artificial Sequence: Synthetic oligonucleotide
  Antisense strand to SEQ ID NO: 2521586
aucacucccuagcaaagcc

SEQ ID NO: 2521588 - RNA, 19 nt, Artificial Sequence
  Description of Artificial Sequence: Synthetic oligonucleotide
  Sense strand starting at position 3536 of SEQ ID NO: 1888248
acgagagugagucagcuaa

SEQ ID NO: 2521589 - RNA, 19 nt, Artificial Sequence
  Description of Artificial Sequence: Synthetic oligonucleotide
  Antisense strand to SEQ ID NO: 2521588
uuagcugacucacucucgu

SEQ ID NO: 2521590 - RNA, 19 nt, Artificial Sequence
  Description of Artificial Sequence: Synthetic oligonucleotide
  Sense strand starting at position 3538 of SEQ ID NO: 1888248
gagagugagucagcuaaac

SEQ ID NO: 2521591 - RNA, 19 nt, Artificial Sequence
  Description of Artificial Sequence: Synthetic oligonucleotide
  Antisense strand to SEQ ID NO: 2521590
guuuagcugacucacucuc

SEQ ID NO: 2521592 - RNA, 19 nt, Artificial Sequence
  Description of Artificial Sequence: Synthetic oligonucleotide
  Sense strand starting at position 3572 of SEQ ID NO: 1888248
uguugcaaugaacauguua

SEQ ID NO: 2521593 - RNA, 19 nt, Artificial Sequence
  Description of Artificial Sequence: Synthetic oligonucleotide
  Antisense strand to SEQ ID NO: 2521592
uaacauguucauugcaaca

SEQ ID NO: 2521594 - RNA, 19 nt, Artificial Sequence
  Description of Artificial Sequence: Synthetic oligonucleotide
  Sense strand starting at position 3903 of SEQ ID NO: 1888248
uaugguguuccagaacaug

SEQ ID NO: 2521595 - RNA, 19 nt, Artificial Sequence
  Description of Artificial Sequence: Synthetic oligonucleotide
  Antisense strand to SEQ ID NO: 2521594
cauguucuggaacaccaua

SEQ ID NO: 2521596 - RNA, 19 nt, Artificial Sequence
  Description of Artificial Sequence: Synthetic oligonucleotide
  Sense strand starting at position 3964 of SEQ ID NO: 1888248
ggugguauggagcauagua

SEQ ID NO: 2521597 - RNA, 19 nt, Artificial Sequence
  Description of Artificial Sequence: Synthetic oligonucleotide
  Antisense strand to SEQ ID NO: 2521596
uacuaugcuccauaccacc

SEQ ID NO: 2521598 - RNA, 19 nt, Artificial Sequence
  Description of Artificial Sequence: Synthetic oligonucleotide
  Sense strand starting at position 3966 of SEQ ID NO: 1888248
ugguauggagcauaguaua

SEQ ID NO: 2521599 - RNA, 19 nt, Artificial Sequence
  Description of Artificial Sequence: Synthetic oligonucleotide
  Antisense strand to SEQ ID NO: 2521598
uauacuaugcuccauacca

SEQ ID NO: 2521600 - RNA, 19 nt, Artificial Sequence
  Description of Artificial Sequence: Synthetic oligonucleotide
  Sense strand starting at position 9 of SEQ ID NO: 1888249
ggguaauggagccauucga

SEQ ID NO: 2521601 - RNA, 19 nt, Artificial Sequence
  Description of Artificial Sequence: Synthetic oligonucleotide
  Antisense strand to SEQ ID NO: 2521600
ucgaauggcuccauuaccc

SEQ ID NO: 2521602 - RNA, 19 nt, Artificial Sequence
  Description of Artificial Sequence: Synthetic oligonucleotide
  Sense strand starting at position 88 of SEQ ID NO: 1888249
guacuuuagggauguuaaa

SEQ ID NO: 2521603 - RNA, 19 nt, Artificial Sequence
  Description of Artificial Sequence: Synthetic oligonucleotide
  Antisense strand to SEQ ID NO: 2521602
uuuaacaucccuaaaguac

SEQ ID NO: 2521604 - RNA, 19 nt, Artificial Sequence
  Description of Artificial Sequence: Synthetic oligonucleotide
  Sense strand starting at position 137 of SEQ ID NO: 1888249
uugucagagugauuaauac

SEQ ID NO: 2521605 - RNA, 19 nt, Artificial Sequence
  Description of Artificial Sequence: Synthetic oligonucleotide
  Antisense strand to SEQ ID NO: 2521604
guauuaaucacucugacaa

SEQ ID NO: 2521606 - RNA, 19 nt, Artificial Sequence
  Description of Artificial Sequence: Synthetic oligonucleotide
  Sense strand starting at position 215 of SEQ ID NO: 1888249
ccaguucuuugagcugaca

SEQ ID NO: 2521607 - RNA, 19 nt, Artificial Sequence
  Description of Artificial Sequence: Synthetic oligonucleotide
  Antisense strand to SEQ ID NO: 2521606
ugucagcucaaagaacugg

SEQ ID NO: 2521608 - RNA, 19 nt, Artificial Sequence
  Description of Artificial Sequence: Synthetic oligonucleotide
  Sense strand starting at position 217 of SEQ ID NO: 1888249
aguucuuugagcugacaug

SEQ ID NO: 2521609 - RNA, 19 nt, Artificial Sequence
  Description of Artificial Sequence: Synthetic oligonucleotide
  Antisense strand to SEQ ID NO: 2521608
caugucagcucaaagaacu

SEQ ID NO: 2521610 - RNA, 19 nt, Artificial Sequence
  Description of Artificial Sequence: Synthetic oligonucleotide
  Sense strand starting at position 218 of SEQ ID NO: 1888249
guucuuugagcugacauga

SEQ ID NO: 2521611 - RNA, 19 nt, Artificial Sequence
  Description of Artificial Sequence: Synthetic oligonucleotide
  Antisense strand to SEQ ID NO: 2521610
ucaugucagcucaaagaac

SEQ ID NO: 2521612 - RNA, 19 nt, Artificial Sequence
  Description of Artificial Sequence: Synthetic oligonucleotide
  Sense strand starting at position 254 of SEQ ID NO: 1888249
aguguaauguuccuaagaa

SEQ ID NO: 2521613 - RNA, 19 nt, Artificial Sequence
  Description of Artificial Sequence: Synthetic oligonucleotide
  Antisense strand to SEQ ID NO: 2521612
uucuuaggaacauuacacu

SEQ ID NO: 2521614 - RNA, 19 nt, Artificial Sequence
  Description of Artificial Sequence: Synthetic oligonucleotide
  Sense strand starting at position 326 of SEQ ID NO: 1888249
aagggaaggugucuaguau

SEQ ID NO: 2521615 - RNA, 19 nt, Artificial Sequence
  Description of Artificial Sequence: Synthetic oligonucleotide
  Antisense strand to SEQ ID NO: 2521614
auacuagacaccuucccuu

SEQ ID NO: 2521616 - RNA, 19 nt, Artificial Sequence
  Description of Artificial Sequence: Synthetic oligonucleotide
  Sense strand starting at position 327 of SEQ ID NO: 1888249
agggaaggugucuaguaug

SEQ ID NO: 2521617 - RNA, 19 nt, Artificial Sequence
  Description of Artificial Sequence: Synthetic oligonucleotide
  Antisense strand to SEQ ID NO: 2521616
cauacuagacaccuucccu

SEQ ID NO: 2521618 - RNA, 19 nt, Artificial Sequence
  Description of Artificial Sequence: Synthetic oligonucleotide
  Sense strand starting at position 528 of SEQ ID NO: 1888249
uuauucuucccugguaaug

SEQ ID NO: 2521619 - RNA, 19 nt, Artificial Sequence
  Description of Artificial Sequence: Synthetic oligonucleotide
  Antisense strand to SEQ ID NO: 2521618
cauuaccagggaagaauaa

SEQ ID NO: 2521620 - RNA, 19 nt, Artificial Sequence
  Description of Artificial Sequence: Synthetic oligonucleotide
  Sense strand starting at position 538 of SEQ ID NO: 1888249
cugguaaugucucuaauca

SEQ ID NO: 2521621 - RNA, 19 nt, Artificial Sequence
  Description of Artificial Sequence: Synthetic oligonucleotide
  Antisense strand to SEQ ID NO: 2521620
ugauuagagacauuaccag

SEQ ID NO: 2521622 - RNA, 19 nt, Artificial Sequence
  Description of Artificial Sequence: Synthetic oligonucleotide
  Sense strand starting at position 539 of SEQ ID NO: 1888249
ugguaaugucucuaaucaa

SEQ ID NO: 2521623 - RNA, 19 nt, Artificial Sequence
  Description of Artificial Sequence: Synthetic oligonucleotide
  Antisense strand to SEQ ID NO: 2521622
uugauuagagacauuacca

SEQ ID NO: 2521624 - RNA, 19 nt, Artificial Sequence
  Description of Artificial Sequence: Synthetic oligonucleotide
  Sense strand starting at position 876 of SEQ ID NO: 1888249
uugcuugaaccuggcagaa

SEQ ID NO: 2521625 - RNA, 19 nt, Artificial Sequence
  Description of Artificial Sequence: Synthetic oligonucleotide
  Antisense strand to SEQ ID NO: 2521624
uucugccagguucaagcaa

SEQ ID NO: 2521626 - RNA, 19 nt, Artificial Sequence
  Description of Artificial Sequence: Synthetic oligonucleotide
  Sense strand starting at position 1012 of SEQ ID NO: 1888249
uguugugaaucauccuuau

SEQ ID NO: 2521627 - RNA, 19 nt, Artificial Sequence
  Description of Artificial Sequence: Synthetic oligonucleotide
  Antisense strand to SEQ ID NO: 2521626
auaaggaugauucacaaca

SEQ ID NO: 2521628 - RNA, 19 nt, Artificial Sequence
  Description of Artificial Sequence: Synthetic oligonucleotide
  Sense strand starting at position 1015 of SEQ ID NO: 1888249
ugugaaucauccuuaugag

SEQ ID NO: 2521629 - RNA, 19 nt, Artificial Sequence
  Description of Artificial Sequence: Synthetic oligonucleotide
  Antisense strand to SEQ ID NO: 2521628
cucauaaggaugauucaca

SEQ ID NO: 2521630 - RNA, 19 nt, Artificial Sequence
  Description of Artificial Sequence: Synthetic oligonucleotide
  Sense strand starting at position 1024 of SEQ ID NO: 1888249
uccuuaugagaguguccua

SEQ ID NO: 2521631 - RNA, 19 nt, Artificial Sequence
  Description of Artificial Sequence: Synthetic oligonucleotide
  Antisense strand to SEQ ID NO: 2521630
uaggacacucucauaagga

SEQ ID NO: 2521632 - RNA, 19 nt, Artificial Sequence
  Description of Artificial Sequence: Synthetic oligonucleotide
  Sense strand starting at position 1027 of SEQ ID NO: 1888249
uuaugagaguguccuacua

SEQ ID NO: 2521633 - RNA, 19 nt, Artificial Sequence
  Description of Artificial Sequence: Synthetic oligonucleotide
  Antisense strand to SEQ ID NO: 2521632
uaguaggacacucucauaa

SEQ ID NO: 2521634 - RNA, 19 nt, Artificial Sequence
  Description of Artificial Sequence: Synthetic oligonucleotide
  Sense strand starting at position 1203 of SEQ ID NO: 1888249
cucaauuagccuugaagau

SEQ ID NO: 2521635 - RNA, 19 nt, Artificial Sequence
  Description of Artificial Sequence: Synthetic oligonucleotide
  Antisense strand to SEQ ID NO: 2521634
aucuucaaggcuaauugag

SEQ ID NO: 2521636 - RNA, 19 nt, Artificial Sequence
  Description of Artificial Sequence: Synthetic oligonucleotide
  Sense strand starting at position 1290 of SEQ ID NO: 1888249
acucauguggcggacuuua

SEQ ID NO: 2521637 - RNA, 19 nt, Artificial Sequence
  Description of Artificial Sequence: Synthetic oligonucleotide
  Antisense strand to SEQ ID NO: 2521636
uaaaguccgccacaugagu

SEQ ID NO: 2521638 - RNA, 19 nt, Artificial Sequence
  Description of Artificial Sequence: Synthetic oligonucleotide
  Sense strand starting at position 1335 of SEQ ID NO: 1888249
aggugaguauuauccagaa

SEQ ID NO: 2521639 - RNA, 19 nt, Artificial Sequence
  Description of Artificial Sequence: Synthetic oligonucleotide
  Antisense strand to SEQ ID NO: 2521638
uucuggauaauacucaccu

SEQ ID NO: 2521640 - RNA, 19 nt, Artificial Sequence
  Description of Artificial Sequence: Synthetic oligonucleotide
  Sense strand starting at position 1375 of SEQ ID NO: 1888249
gcgucuuaacauuaagcaa

SEQ ID NO: 2521641 - RNA, 19 nt, Artificial Sequence
  Description of Artificial Sequence: Synthetic oligonucleotide
  Antisense strand to SEQ ID NO: 2521640
uugcuuaauguuaagacgc

SEQ ID NO: 2521642 - RNA, 19 nt, Artificial Sequence
  Description of Artificial Sequence: Synthetic oligonucleotide
  Sense strand starting at position 1490 of SEQ ID NO: 1888249
gcaacuucuugguucuuaa

SEQ ID NO: 2521643 - RNA, 19 nt, Artificial Sequence
  Description of Artificial Sequence: Synthetic oligonucleotide
  Antisense strand to SEQ ID NO: 2521642
uuaagaaccaagaaguugc

SEQ ID NO: 2521644 - RNA, 19 nt, Artificial Sequence
  Description of Artificial Sequence: Synthetic oligonucleotide
  Sense strand starting at position 1617 of SEQ ID NO: 1888249
ggaaccauuugccaauacu

SEQ ID NO: 2521645 - RNA, 19 nt, Artificial Sequence
  Description of Artificial Sequence: Synthetic oligonucleotide
  Antisense strand to SEQ ID NO: 2521644
aguauuggcaaaugguucc

SEQ ID NO: 2521646 - RNA, 19 nt, Artificial Sequence
  Description of Artificial Sequence: Synthetic oligonucleotide
  Sense strand starting at position 1678 of SEQ ID NO: 1888249
gcaucagauuaccugguga

SEQ ID NO: 2521647 - RNA, 19 nt, Artificial Sequence
  Description of Artificial Sequence: Synthetic oligonucleotide
  Antisense strand to SEQ ID NO: 2521646
ucaccagguaaucugaugc

SEQ ID NO: 2521648 - RNA, 19 nt, Artificial Sequence
  Description of Artificial Sequence: Synthetic oligonucleotide
  Sense strand starting at position 1680 of SEQ ID NO: 1888249
aucagauuaccuggugaaa

SEQ ID NO: 2521649 - RNA, 19 nt, Artificial Sequence
  Description of Artificial Sequence: Synthetic oligonucleotide
  Antisense strand to SEQ ID NO: 2521648
uuucaccagguaaucugau

SEQ ID NO: 2521650 - RNA, 19 nt, Artificial Sequence
  Description of Artificial Sequence: Synthetic oligonucleotide
  Sense strand starting at position 1719 of SEQ ID NO: 1888249
uggagugagcacggacaau

SEQ ID NO: 2521651 - RNA, 19 nt, Artificial Sequence
  Description of Artificial Sequence: Synthetic oligonucleotide
  Antisense strand to SEQ ID NO: 2521650
auuguccgugcucacucca

SEQ ID NO: 2521652 - RNA, 19 nt, Artificial Sequence
  Description of Artificial Sequence: Synthetic oligonucleotide
  Sense strand starting at position 1842 of SEQ ID NO: 1888249
gcccucaagucuuccaaga

SEQ ID NO: 2521653 - RNA, 19 nt, Artificial Sequence
  Description of Artificial Sequence: Synthetic oligonucleotide
  Antisense strand to SEQ ID NO: 2521652
ucuuggaagacuugagggc

SEQ ID NO: 2521654 - RNA, 19 nt, Artificial Sequence
  Description of Artificial Sequence: Synthetic oligonucleotide
  Sense strand starting at position 3082 of SEQ ID NO: 1888249
guuguccgugaggauaagu

SEQ ID NO: 2521655 - RNA, 19 nt, Artificial Sequence
  Description of Artificial Sequence: Synthetic oligonucleotide
  Antisense strand to SEQ ID NO: 2521654
acuuauccucacggacaac

SEQ ID NO: 2521656 - RNA, 19 nt, Artificial Sequence
  Description of Artificial Sequence: Synthetic oligonucleotide
  Sense strand starting at position 3171 of SEQ ID NO: 1888249
gcugaaguugcucagagua

SEQ ID NO: 2521657 - RNA, 19 nt, Artificial Sequence
  Description of Artificial Sequence: Synthetic oligonucleotide
  Antisense strand to SEQ ID NO: 2521656
uacucugagcaacuucagc

SEQ ID NO: 2521658 - RNA, 19 nt, Artificial Sequence
  Description of Artificial Sequence: Synthetic oligonucleotide
  Sense strand starting at position 3176 of SEQ ID NO: 1888249
aguugcucagaguaagauu

SEQ ID NO: 2521659 - RNA, 19 nt, Artificial Sequence
  Description of Artificial Sequence: Synthetic oligonucleotide
  Antisense strand to SEQ ID NO: 2521658
aaucuuacucugagcaacu

SEQ ID NO: 2521660 - RNA, 19 nt, Artificial Sequence
  Description of Artificial Sequence: Synthetic oligonucleotide
  Sense strand starting at position 3198 of SEQ ID NO: 1888249
ugacuaaugucacucugua

SEQ ID NO: 2521661 - RNA, 19 nt, Artificial Sequence
  Description of Artificial Sequence: Synthetic oligonucleotide
  Antisense strand to SEQ ID NO: 2521660
uacagagugacauuaguca

SEQ ID NO: 2521662 - RNA, 19 nt, Artificial Sequence
  Description of Artificial Sequence: Synthetic oligonucleotide
  Sense strand starting at position 3239 of SEQ ID NO: 1888249
gcguauaagguuuaucuaa

SEQ ID NO: 2521663 - RNA, 19 nt, Artificial Sequence
  Description of Artificial Sequence: Synthetic oligonucleotide
  Antisense strand to SEQ ID NO: 2521662
uuagauaaaccuuauacgc

SEQ ID NO: 2521664 - RNA, 19 nt, Artificial Sequence
  Description of Artificial Sequence: Synthetic oligonucleotide
  Sense strand starting at position 3275 of SEQ ID NO: 1888249
uggcacugauucuuuaaga

SEQ ID NO: 2521665 - RNA, 19 nt, Artificial Sequence
  Description of Artificial Sequence: Synthetic oligonucleotide
  Antisense strand to SEQ ID NO: 2521664
ucuuaaagaaucagugcca

SEQ ID NO: 2521666 - RNA, 19 nt, Artificial Sequence
  Description of Artificial Sequence: Synthetic oligonucleotide
  Sense strand starting at position 3276 of SEQ ID NO: 1888249
ggcacugauucuuuaagaa

SEQ ID NO: 2521667 - RNA, 19 nt, Artificial Sequence
  Description of Artificial Sequence: Synthetic oligonucleotide
  Antisense strand to SEQ ID NO: 2521666
uucuuaaagaaucagugcc

SEQ ID NO: 2521668 - RNA, 19 nt, Artificial Sequence
  Description of Artificial Sequence: Synthetic oligonucleotide
  Sense strand starting at position 3341 of SEQ ID NO: 1888249
cccaucacaguuugguaau

SEQ ID NO: 2521669 - RNA, 19 nt, Artificial Sequence
  Description of Artificial Sequence: Synthetic oligonucleotide
  Antisense strand to SEQ ID NO: 2521668
auuaccaaacugugauggg

SEQ ID NO: 2521670 - RNA, 19 nt, Artificial Sequence
  Description of Artificial Sequence: Synthetic oligonucleotide
  Sense strand starting at position 3355 of SEQ ID NO: 1888249
guaauauucuaacuugagu

SEQ ID NO: 2521671 - RNA, 19 nt, Artificial Sequence
  Description of Artificial Sequence: Synthetic oligonucleotide
  Antisense strand to SEQ ID NO: 2521670
acucaaguuagaauauuac

SEQ ID NO: 2521672 - RNA, 19 nt, Artificial Sequence
  Description of Artificial Sequence: Synthetic oligonucleotide
  Sense strand starting at position 3522 of SEQ ID NO: 1888249
cgcauuucuccugguaccu

SEQ ID NO: 2521673 - RNA, 19 nt, Artificial Sequence
  Description of Artificial Sequence: Synthetic oligonucleotide
  Antisense strand to SEQ ID NO: 2521672
agguaccaggagaaaugcg

SEQ ID NO: 2521674 - RNA, 19 nt, Artificial Sequence
  Description of Artificial Sequence: Synthetic oligonucleotide
  Sense strand starting at position 3901 of SEQ ID NO: 1888249
ucaaaugcugucgagagua

SEQ ID NO: 2521675 - RNA, 19 nt, Artificial Sequence
  Description of Artificial Sequence: Synthetic oligonucleotide
  Antisense strand to SEQ ID NO: 2521674
uacucucgacagcauuuga

SEQ ID NO: 2521676 - RNA, 19 nt, Artificial Sequence
  Description of Artificial Sequence: Synthetic oligonucleotide
  Sense strand starting at position 3903 of SEQ ID NO: 1888249
aaaugcugucgagaguaau

SEQ ID NO: 2521677 - RNA, 19 nt, Artificial Sequence
  Description of Artificial Sequence: Synthetic oligonucleotide
  Antisense strand to SEQ ID NO: 2521676
auuacucucgacagcauuu

SEQ ID NO: 2521678 - RNA, 19 nt, Artificial Sequence
  Description of Artificial Sequence: Synthetic oligonucleotide
  Sense strand starting at position 3914 of SEQ ID NO: 1888249
agaguaauagccugauaga

SEQ ID NO: 2521679 - RNA, 19 nt, Artificial Sequence
  Description of Artificial Sequence: Synthetic oligonucleotide
  Antisense strand to SEQ ID NO: 2521678
ucuaucaggcuauuacucu

SEQ ID NO: 2521680 - RNA, 19 nt, Artificial Sequence
  Description of Artificial Sequence: Synthetic oligonucleotide
  Sense strand starting at position 28 of SEQ ID NO: 1888250
aaacgugugccagagagaa

SEQ ID NO: 2521681 - RNA, 19 nt, Artificial Sequence
  Description of Artificial Sequence: Synthetic oligonucleotide
  Antisense strand to SEQ ID NO: 2521680
uucucucuggcacacguuu

SEQ ID NO: 2521682 - RNA, 19 nt, Artificial Sequence
  Description of Artificial Sequence: Synthetic oligonucleotide
  Sense strand starting at position 97 of SEQ ID NO: 1888250
cugguuccuggugaacaua

SEQ ID NO: 2521683 - RNA, 19 nt, Artificial Sequence
  Description of Artificial Sequence: Synthetic oligonucleotide
  Antisense strand to SEQ ID NO: 2521682
uauguucaccaggaaccag

SEQ ID NO: 2521684 - RNA, 19 nt, Artificial Sequence
  Description of Artificial Sequence: Synthetic oligonucleotide
  Sense strand starting at position 320 of SEQ ID NO: 1888250
gcuagaagucuauaaauac

SEQ ID NO: 2521685 - RNA, 19 nt, Artificial Sequence
  Description of Artificial Sequence: Synthetic oligonucleotide
  Antisense strand to SEQ ID NO: 2521684
guauuuauagacuucuagc

SEQ ID NO: 2521686 - RNA, 19 nt, Artificial Sequence
  Description of Artificial Sequence: Synthetic oligonucleotide
  Sense strand starting at position 376 of SEQ ID NO: 1888250
cccacaugcgaagagucau

SEQ ID NO: 2521687 - RNA, 19 nt, Artificial Sequence
  Description of Artificial Sequence: Synthetic oligonucleotide
  Antisense strand to SEQ ID NO: 2521686
augacucuucgcauguggg

SEQ ID NO: 2521688 - RNA, 19 nt, Artificial Sequence
  Description of Artificial Sequence: Synthetic oligonucleotide
  Sense strand starting at position 817 of SEQ ID NO: 1888250
uucccuuauuccuugagag

SEQ ID NO: 2521689 - RNA, 19 nt, Artificial Sequence
  Description of Artificial Sequence: Synthetic oligonucleotide
  Antisense strand to SEQ ID NO: 2521688
cucucaaggaauaagggaa

SEQ ID NO: 2521690 - RNA, 19 nt, Artificial Sequence
  Description of Artificial Sequence: Synthetic oligonucleotide
  Sense strand starting at position 819 of SEQ ID NO: 1888250
cccuuauuccuugagaguu

SEQ ID NO: 2521691 - RNA, 19 nt, Artificial Sequence
  Description of Artificial Sequence: Synthetic oligonucleotide
  Antisense strand to SEQ ID NO: 2521690
aacucucaaggaauaaggg

SEQ ID NO: 2521692 - RNA, 19 nt, Artificial Sequence
  Description of Artificial Sequence: Synthetic oligonucleotide
  Sense strand starting at position 1310 of SEQ ID NO: 1888250
ccugcaggugaccaugaau

SEQ ID NO: 2521693 - RNA, 19 nt, Artificial Sequence
  Description of Artificial Sequence: Synthetic oligonucleotide
  Antisense strand to SEQ ID NO: 2521692
auucauggucaccugcagg

SEQ ID NO: 2521694 - RNA, 19 nt, Artificial Sequence
  Description of Artificial Sequence: Synthetic oligonucleotide
  Sense strand starting at position 1534 of SEQ ID NO: 1888250
uuuagaucggguuauuggu

SEQ ID NO: 2521695 - RNA, 19 nt, Artificial Sequence
  Description of Artificial Sequence: Synthetic oligonucleotide
  Antisense strand to SEQ ID NO: 2521694
accaauaacccgaucuaaa

SEQ ID NO: 2521696 - RNA, 19 nt, Artificial Sequence
  Description of Artificial Sequence: Synthetic oligonucleotide
  Sense strand starting at position 1590 of SEQ ID NO: 1888250
aggucaguaucagccuaaa

SEQ ID NO: 2521697 - RNA, 19 nt, Artificial Sequence
  Description of Artificial Sequence: Synthetic oligonucleotide
  Antisense strand to SEQ ID NO: 2521696
uuuaggcugauacugaccu

SEQ ID NO: 2521698 - RNA, 19 nt, Artificial Sequence
  Description of Artificial Sequence: Synthetic oligonucleotide
  Sense strand starting at position 1609 of SEQ ID NO: 1888250
augcaaauuugugcuaguu

SEQ ID NO: 2521699 - RNA, 19 nt, Artificial Sequence
  Description of Artificial Sequence: Synthetic oligonucleotide
  Antisense strand to SEQ ID NO: 2521698
aacuagcacaaauuugcau

SEQ ID NO: 2521700 - RNA, 19 nt, Artificial Sequence
  Description of Artificial Sequence: Synthetic oligonucleotide
  Sense strand starting at position 1619 of SEQ ID NO: 1888250
gugcuaguuagagaaacag

SEQ ID NO: 2521701 - RNA, 19 nt, Artificial Sequence
  Description of Artificial Sequence: Synthetic oligonucleotide
  Antisense strand to SEQ ID NO: 2521700
cuguuucucuaacuagcac

SEQ ID NO: 2521702 - RNA, 19 nt, Artificial Sequence
  Description of Artificial Sequence: Synthetic oligonucleotide
  Sense strand starting at position 1629 of SEQ ID NO: 1888250
gagaaacaguccucuucug

SEQ ID NO: 2521703 - RNA, 19 nt, Artificial Sequence
  Description of Artificial Sequence: Synthetic oligonucleotide
  Antisense strand to SEQ ID NO: 2521702
cagaagaggacuguuucuc

SEQ ID NO: 2521704 - RNA, 19 nt, Artificial Sequence
  Description of Artificial Sequence: Synthetic oligonucleotide
  Sense strand starting at position 1657 of SEQ ID NO: 1888250
gucccauggaccugaaguu

SEQ ID NO: 2521705 - RNA, 19 nt, Artificial Sequence
  Description of Artificial Sequence: Synthetic oligonucleotide
  Antisense strand to SEQ ID NO: 2521704
aacuucagguccaugggac

SEQ ID NO: 2521706 - RNA, 19 nt, Artificial Sequence
  Description of Artificial Sequence: Synthetic oligonucleotide
  Sense strand starting at position 1677 of SEQ ID NO: 1888250
gccuguguuccacuccgua

SEQ ID NO: 2521707 - RNA, 19 nt, Artificial Sequence
  Description of Artificial Sequence: Synthetic oligonucleotide
  Antisense strand to SEQ ID NO: 2521706
uacggaguggaacacaggc

SEQ ID NO: 2521708 - RNA, 19 nt, Artificial Sequence
  Description of Artificial Sequence: Synthetic oligonucleotide
  Sense strand starting at position 1723 of SEQ ID NO: 1888250
uguguaauaccaggaggag

SEQ ID NO: 2521709 - RNA, 19 nt, Artificial Sequence
  Description of Artificial Sequence: Synthetic oligonucleotide
  Antisense strand to SEQ ID NO: 2521708
cuccuccugguauuacaca

SEQ ID NO: 2521710 - RNA, 19 nt, Artificial Sequence
  Description of Artificial Sequence: Synthetic oligonucleotide
  Sense strand starting at position 1724 of SEQ ID NO: 1888250
guguaauaccaggaggagu

SEQ ID NO: 2521711 - RNA, 19 nt, Artificial Sequence
  Description of Artificial Sequence: Synthetic oligonucleotide
  Antisense strand to SEQ ID NO: 2521710
acuccuccugguauuacac

SEQ ID NO: 2521712 - RNA, 19 nt, Artificial Sequence
  Description of Artificial Sequence: Synthetic oligonucleotide
  Sense strand starting at position 1741 of SEQ ID NO: 1888250
gucucaacuccaggagacu

SEQ ID NO: 2521713 - RNA, 19 nt, Artificial Sequence
  Description of Artificial Sequence: Synthetic oligonucleotide
  Antisense strand to SEQ ID NO: 2521712
agucuccuggaguugagac

SEQ ID NO: 2521714 - RNA, 19 nt, Artificial Sequence
  Description of Artificial Sequence: Synthetic oligonucleotide
  Sense strand starting at position 1990 of SEQ ID NO: 1888250
gugaucuuaugacuaaaga

SEQ ID NO: 2521715 - RNA, 19 nt, Artificial Sequence
  Description of Artificial Sequence: Synthetic oligonucleotide
  Antisense strand to SEQ ID NO: 2521714
ucuuuagucauaagaucac

SEQ ID NO: 2521716 - RNA, 19 nt, Artificial Sequence
  Description of Artificial Sequence: Synthetic oligonucleotide
  Sense strand starting at position 2022 of SEQ ID NO: 1888250
ccaguaucauuauuacagu

SEQ ID NO: 2521717 - RNA, 19 nt, Artificial Sequence
  Description of Artificial Sequence: Synthetic oligonucleotide
  Antisense strand to SEQ ID NO: 2521716
acuguaauaaugauacugg

SEQ ID NO: 2521718 - RNA, 19 nt, Artificial Sequence
  Description of Artificial Sequence: Synthetic oligonucleotide
  Sense strand starting at position 2189 of SEQ ID NO: 1888250
auuuaaaugcuuugcagua

SEQ ID NO: 2521719 - RNA, 19 nt, Artificial Sequence
  Description of Artificial Sequence: Synthetic oligonucleotide
  Antisense strand to SEQ ID NO: 2521718
uacugcaaagcauuuaaau

SEQ ID NO: 2521720 - RNA, 19 nt, Artificial Sequence
  Description of Artificial Sequence: Synthetic oligonucleotide
  Sense strand starting at position 2278 of SEQ ID NO: 1888250
guaguuuaggguuacucau

SEQ ID NO: 2521721 - RNA, 19 nt, Artificial Sequence
  Description of Artificial Sequence: Synthetic oligonucleotide
  Antisense strand to SEQ ID NO: 2521720
augaguaacccuaaacuac

SEQ ID NO: 2521722 - RNA, 19 nt, Artificial Sequence
  Description of Artificial Sequence: Synthetic oligonucleotide
  Sense strand starting at position 2280 of SEQ ID NO: 1888250
aguuuaggguuacucauau

SEQ ID NO: 2521723 - RNA, 19 nt, Artificial Sequence
  Description of Artificial Sequence: Synthetic oligonucleotide
  Antisense strand to SEQ ID NO: 2521722
auaugaguaacccuaaacu

SEQ ID NO: 2521724 - RNA, 19 nt, Artificial Sequence
  Description of Artificial Sequence: Synthetic oligonucleotide
  Sense strand starting at position 2316 of SEQ ID NO: 1888250
gugaguuccgguaacucgu

SEQ ID NO: 2521725 - RNA, 19 nt, Artificial Sequence
  Description of Artificial Sequence: Synthetic oligonucleotide
  Antisense strand to SEQ ID NO: 2521724
acgaguuaccggaacucac

SEQ ID NO: 2521726 - RNA, 19 nt, Artificial Sequence
  Description of Artificial Sequence: Synthetic oligonucleotide
  Sense strand starting at position 2857 of SEQ ID NO: 1888250
auuccugauccuugugaug

SEQ ID NO: 2521727 - RNA, 19 nt, Artificial Sequence
  Description of Artificial Sequence: Synthetic oligonucleotide
  Antisense strand to SEQ ID NO: 2521726
caucacaaggaucaggaau

SEQ ID NO: 2521728 - RNA, 19 nt, Artificial Sequence
  Description of Artificial Sequence: Synthetic oligonucleotide
  Sense strand starting at position 2893 of SEQ ID NO: 1888250
uuuacuucucagggaggua

SEQ ID NO: 2521729 - RNA, 19 nt, Artificial Sequence
  Description of Artificial Sequence: Synthetic oligonucleotide
  Antisense strand to SEQ ID NO: 2521728
uaccucccugagaaguaaa

SEQ ID NO: 2521730 - RNA, 19 nt, Artificial Sequence
  Description of Artificial Sequence: Synthetic oligonucleotide
  Sense strand starting at position 2999 of SEQ ID NO: 1888250
gggugcuuucgguuugcca

SEQ ID NO: 2521731 - RNA, 19 nt, Artificial Sequence
  Description of Artificial Sequence: Synthetic oligonucleotide
  Antisense strand to SEQ ID NO: 2521730
uggcaaaccgaaagcaccc

SEQ ID NO: 2521732 - RNA, 19 nt, Artificial Sequence
  Description of Artificial Sequence: Synthetic oligonucleotide
  Sense strand starting at position 3036 of SEQ ID NO: 1888250
agguacuaaggcuggaaau

SEQ ID NO: 2521733 - RNA, 19 nt, Artificial Sequence
  Description of Artificial Sequence: Synthetic oligonucleotide
  Antisense strand to SEQ ID NO: 2521732
auuuccagccuuaguaccu

SEQ ID NO: 2521734 - RNA, 19 nt, Artificial Sequence
  Description of Artificial Sequence: Synthetic oligonucleotide
  Sense strand starting at position 3093 of SEQ ID NO: 1888250
augccuugugguuacauaa

SEQ ID NO: 2521735 - RNA, 19 nt, Artificial Sequence
  Description of Artificial Sequence: Synthetic oligonucleotide
  Antisense strand to SEQ ID NO: 2521734
uuauguaaccacaaggcau

SEQ ID NO: 2521736 - RNA, 19 nt, Artificial Sequence
  Description of Artificial Sequence: Synthetic oligonucleotide
  Sense strand starting at position 3233 of SEQ ID NO: 1888250
caggguugugcagaacuua

SEQ ID NO: 2521737 - RNA, 19 nt, Artificial Sequence
  Description of Artificial Sequence: Synthetic oligonucleotide
  Antisense strand to SEQ ID NO: 2521736
uaaguucugcacaacccug

SEQ ID NO: 2521738 - RNA, 19 nt, Artificial Sequence
  Description of Artificial Sequence: Synthetic oligonucleotide
  Sense strand starting at position 3302 of SEQ ID NO: 1888250
guagcuaugcugcugcaau

SEQ ID NO: 2521739 - RNA, 19 nt, Artificial Sequence
  Description of Artificial Sequence: Synthetic oligonucleotide
  Antisense strand to SEQ ID NO: 2521738
auugcagcagcauagcuac

SEQ ID NO: 2521740 - RNA, 19 nt, Artificial Sequence
  Description of Artificial Sequence: Synthetic oligonucleotide
  Sense strand starting at position 3343 of SEQ ID NO: 1888250
aaccgaagaucuuugagug

SEQ ID NO: 2521741 - RNA, 19 nt, Artificial Sequence
  Description of Artificial Sequence: Synthetic oligonucleotide
  Antisense strand to SEQ ID NO: 2521740
cacucaaagaucuucgguu

SEQ ID NO: 2521742 - RNA, 19 nt, Artificial Sequence
  Description of Artificial Sequence: Synthetic oligonucleotide
  Sense strand starting at position 3607 of SEQ ID NO: 1888250
guagcuucucagcauauuu

SEQ ID NO: 2521743 - RNA, 19 nt, Artificial Sequence
  Description of Artificial Sequence: Synthetic oligonucleotide
  Antisense strand to SEQ ID NO: 2521742
aaauaugcugagaagcuac

SEQ ID NO: 2521744 - RNA, 19 nt, Artificial Sequence
  Description of Artificial Sequence: Synthetic oligonucleotide
  Sense strand starting at position 3642 of SEQ ID NO: 1888250
cccagugauagccauggaa

SEQ ID NO: 2521745 - RNA, 19 nt, Artificial Sequence
  Description of Artificial Sequence: Synthetic oligonucleotide
  Antisense strand to SEQ ID NO: 2521744
uuccauggcuaucacuggg

SEQ ID NO: 2521746 - RNA, 19 nt, Artificial Sequence
  Description of Artificial Sequence: Synthetic oligonucleotide
  Sense strand starting at position 3644 of SEQ ID NO: 1888250
cagugauagccauggaaca

SEQ ID NO: 2521747 - RNA, 19 nt, Artificial Sequence
  Description of Artificial Sequence: Synthetic oligonucleotide
  Antisense strand to SEQ ID NO: 2521746
uguuccauggcuaucacug

SEQ ID NO: 2521748 - RNA, 19 nt, Artificial Sequence
  Description of Artificial Sequence: Synthetic oligonucleotide
  Sense strand starting at position 3645 of SEQ ID NO: 1888250
agugauagccauggaacaa

SEQ ID NO: 2521749 - RNA, 19 nt, Artificial Sequence
  Description of Artificial Sequence: Synthetic oligonucleotide
  Antisense strand to SEQ ID NO: 2521748
uuguuccauggcuaucacu

SEQ ID NO: 2521750 - RNA, 19 nt, Artificial Sequence
  Description of Artificial Sequence: Synthetic oligonucleotide
  Sense strand starting at position 3657 of SEQ ID NO: 1888250
ggaacaaguuaguccuuau

SEQ ID NO: 2521751 - RNA, 19 nt, Artificial Sequence
  Description of Artificial Sequence: Synthetic oligonucleotide
  Antisense strand to SEQ ID NO: 2521750
auaaggacuaacuuguucc

SEQ ID NO: 2521752 - RNA, 19 nt, Artificial Sequence
  Description of Artificial Sequence: Synthetic oligonucleotide
  Sense strand starting at position 3660 of SEQ ID NO: 1888250
acaaguuaguccuuauaac

SEQ ID NO: 2521753 - RNA, 19 nt, Artificial Sequence
  Description of Artificial Sequence: Synthetic oligonucleotide
  Antisense strand to SEQ ID NO: 2521752
guuauaaggacuaacuugu

SEQ ID NO: 2521754 - RNA, 19 nt, Artificial Sequence
  Description of Artificial Sequence: Synthetic oligonucleotide
  Sense strand starting at position 3717 of SEQ ID NO: 1888250
gaauuuccugccugugguu

SEQ ID NO: 2521755 - RNA, 19 nt, Artificial Sequence
  Description of Artificial Sequence: Synthetic oligonucleotide
  Antisense strand to SEQ ID NO: 2521754
aaccacaggcaggaaauuc

SEQ ID NO: 2521756 - RNA, 19 nt, Artificial Sequence
  Description of Artificial Sequence: Synthetic oligonucleotide
  Sense strand starting at position 3867 of SEQ ID NO: 1888250
uagaguaagcuuuacagac

SEQ ID NO: 2521757 - RNA, 19 nt, Artificial Sequence
  Description of Artificial Sequence: Synthetic oligonucleotide
  Antisense strand to SEQ ID NO: 2521756
gucuguaaagcuuacucua

SEQ ID NO: 2521758 - RNA, 19 nt, Artificial Sequence
  Description of Artificial Sequence: Synthetic oligonucleotide
  Sense strand starting at position 3966 of SEQ ID NO: 1888250
gucagcaugccucaggaaa

SEQ ID NO: 2521759 - RNA, 19 nt, Artificial Sequence
  Description of Artificial Sequence: Synthetic oligonucleotide
  Antisense strand to SEQ ID NO: 2521758
uuuccugaggcaugcugac

SEQ ID NO: 2521760 - RNA, 19 nt, Artificial Sequence
  Description of Artificial Sequence: Synthetic oligonucleotide
  Sense strand starting at position 10 of SEQ ID NO: 1888251
acuggagucucaucacuuu

SEQ ID NO: 2521761 - RNA, 19 nt, Artificial Sequence
  Description of Artificial Sequence: Synthetic oligonucleotide
  Antisense strand to SEQ ID NO: 2521760
aaagugaugagacuccagu

SEQ ID NO: 2521762 - RNA, 19 nt, Artificial Sequence
  Description of Artificial Sequence: Synthetic oligonucleotide
  Sense strand starting at position 34 of SEQ ID NO: 1888251
guccaacacuguuuacuua

SEQ ID NO: 2521763 - RNA, 19 nt, Artificial Sequence
  Description of Artificial Sequence: Synthetic oligonucleotide
  Antisense strand to SEQ ID NO: 2521762
uaaguaaacaguguuggac

SEQ ID NO: 2521764 - RNA, 19 nt, Artificial Sequence
  Description of Artificial Sequence: Synthetic oligonucleotide
  Sense strand starting at position 87 of SEQ ID NO: 1888251
ggcauuauuucugcaaguu

SEQ ID NO: 2521765 - RNA, 19 nt, Artificial Sequence
  Description of Artificial Sequence: Synthetic oligonucleotide
  Antisense strand to SEQ ID NO: 2521764
aacuugcagaaauaaugcc

SEQ ID NO: 2521766 - RNA, 19 nt, Artificial Sequence
  Description of Artificial Sequence: Synthetic oligonucleotide
  Sense strand starting at position 116 of SEQ ID NO: 1888251
ccucaauuugcccaguugu

SEQ ID NO: 2521767 - RNA, 19 nt, Artificial Sequence
  Description of Artificial Sequence: Synthetic oligonucleotide
  Antisense strand to SEQ ID NO: 2521766
acaacugggcaaauugagg

SEQ ID NO: 2521768 - RNA, 19 nt, Artificial Sequence
  Description of Artificial Sequence: Synthetic oligonucleotide
  Sense strand starting at position 284 of SEQ ID NO: 1888251
ugugaacuaguacaauauu

SEQ ID NO: 2521769 - RNA, 19 nt, Artificial Sequence
  Description of Artificial Sequence: Synthetic oligonucleotide
  Antisense strand to SEQ ID NO: 2521768
aauauuguacuaguucaca

SEQ ID NO: 2521770 - RNA, 19 nt, Artificial Sequence
  Description of Artificial Sequence: Synthetic oligonucleotide
  Sense strand starting at position 313 of SEQ ID NO: 1888251
cuguuacugugacuacaaa

SEQ ID NO: 2521771 - RNA, 19 nt, Artificial Sequence
  Description of Artificial Sequence: Synthetic oligonucleotide
  Antisense strand to SEQ ID NO: 2521770
uuuguagucacaguaacag

SEQ ID NO: 2521772 - RNA, 19 nt, Artificial Sequence
  Description of Artificial Sequence: Synthetic oligonucleotide
  Sense strand starting at position 352 of SEQ ID NO: 1888251
ugcuuuauuccaggaacua

SEQ ID NO: 2521773 - RNA, 19 nt, Artificial Sequence
  Description of Artificial Sequence: Synthetic oligonucleotide
  Antisense strand to SEQ ID NO: 2521772
uaguuccuggaauaaagca

SEQ ID NO: 2521774 - RNA, 19 nt, Artificial Sequence
  Description of Artificial Sequence: Synthetic oligonucleotide
  Sense strand starting at position 353 of SEQ ID NO: 1888251
gcuuuauuccaggaacuag

SEQ ID NO: 2521775 - RNA, 19 nt, Artificial Sequence
  Description of Artificial Sequence: Synthetic oligonucleotide
  Antisense strand to SEQ ID NO: 2521774
cuaguuccuggaauaaagc

SEQ ID NO: 2521776 - RNA, 19 nt, Artificial Sequence
  Description of Artificial Sequence: Synthetic oligonucleotide
  Sense strand starting at position 397 of SEQ ID NO: 1888251
gguauaacaugucugauug

SEQ ID NO: 2521777 - RNA, 19 nt, Artificial Sequence
  Description of Artificial Sequence: Synthetic oligonucleotide
  Antisense strand to SEQ ID NO: 2521776
caaucagacauguuauacc

SEQ ID NO: 2521778 - RNA, 19 nt, Artificial Sequence
  Description of Artificial Sequence: Synthetic oligonucleotide
  Sense strand starting at position 405 of SEQ ID NO: 1888251
augucugauuggguaugau

SEQ ID NO: 2521779 - RNA, 19 nt, Artificial Sequence
  Description of Artificial Sequence: Synthetic oligonucleotide
  Antisense strand to SEQ ID NO: 2521778
aucauacccaaucagacau

SEQ ID NO: 2521780 - RNA, 19 nt, Artificial Sequence
  Description of Artificial Sequence: Synthetic oligonucleotide
  Sense strand starting at position 408 of SEQ ID NO: 1888251
ucugauuggguaugauuac

SEQ ID NO: 2521781 - RNA, 19 nt, Artificial Sequence
  Description of Artificial Sequence: Synthetic oligonucleotide
  Antisense strand to SEQ ID NO: 2521780
guaaucauacccaaucaga

SEQ ID NO: 2521782 - RNA, 19 nt, Artificial Sequence
  Description of Artificial Sequence: Synthetic oligonucleotide
  Sense strand starting at position 485 of SEQ ID NO: 1888251
aucucaguuaguggcagaa

SEQ ID NO: 2521783 - RNA, 19 nt, Artificial Sequence
  Description of Artificial Sequence: Synthetic oligonucleotide
  Antisense strand to SEQ ID NO: 2521782
uucugccacuaacugagau

SEQ ID NO: 2521784 - RNA, 19 nt, Artificial Sequence
  Description of Artificial Sequence: Synthetic oligonucleotide
  Sense strand starting at position 588 of SEQ ID NO: 1888251
ggagcagcugcucaauaaa

SEQ ID NO: 2521785 - RNA, 19 nt, Artificial Sequence
  Description of Artificial Sequence: Synthetic oligonucleotide
  Antisense strand to SEQ ID NO: 2521784
uuuauugagcagcugcucc

SEQ ID NO: 2521786 - RNA, 19 nt, Artificial Sequence
  Description of Artificial Sequence: Synthetic oligonucleotide
  Sense strand starting at position 591 of SEQ ID NO: 1888251
gcagcugcucaauaaauaa

SEQ ID NO: 2521787 - RNA, 19 nt, Artificial Sequence
  Description of Artificial Sequence: Synthetic oligonucleotide
  Antisense strand to SEQ ID NO: 2521786
uuauuuauugagcagcugc

SEQ ID NO: 2521788 - RNA, 19 nt, Artificial Sequence
  Description of Artificial Sequence: Synthetic oligonucleotide
  Sense strand starting at position 1312 of SEQ ID NO: 1888251
ugaguagauggcuaacagu

SEQ ID NO: 2521789 - RNA, 19 nt, Artificial Sequence
  Description of Artificial Sequence: Synthetic oligonucleotide
  Antisense strand to SEQ ID NO: 2521788
acuguuagccaucuacuca

SEQ ID NO: 2521790 - RNA, 19 nt, Artificial Sequence
  Description of Artificial Sequence: Synthetic oligonucleotide
  Sense strand starting at position 2084 of SEQ ID NO: 1888251
gggaaacuccucugagguc

SEQ ID NO: 2521791 - RNA, 19 nt, Artificial Sequence
  Description of Artificial Sequence: Synthetic oligonucleotide
  Antisense strand to SEQ ID NO: 2521790
gaccucagaggaguuuccc

SEQ ID NO: 2521792 - RNA, 19 nt, Artificial Sequence
  Description of Artificial Sequence: Synthetic oligonucleotide
  Sense strand starting at position 2093 of SEQ ID NO: 1888251
cucugaggucacugugacu

SEQ ID NO: 2521793 - RNA, 19 nt, Artificial Sequence
  Description of Artificial Sequence: Synthetic oligonucleotide
  Antisense strand to SEQ ID NO: 2521792
agucacagugaccucagag

SEQ ID NO: 2521794 - RNA, 19 nt, Artificial Sequence
  Description of Artificial Sequence: Synthetic oligonucleotide
  Sense strand starting at position 2149 of SEQ ID NO: 1888251
cucgacuucgcugugcuaa

SEQ ID NO: 2521795 - RNA, 19 nt, Artificial Sequence
  Description of Artificial Sequence: Synthetic oligonucleotide
  Antisense strand to SEQ ID NO: 2521794
uuagcacagcgaagucgag

SEQ ID NO: 2521796 - RNA, 19 nt, Artificial Sequence
  Description of Artificial Sequence: Synthetic oligonucleotide
  Sense strand starting at position 2265 of SEQ ID NO: 1888251
ggaauaaccgccuggacuu

SEQ ID NO: 2521797 - RNA, 19 nt, Artificial Sequence
  Description of Artificial Sequence: Synthetic oligonucleotide
  Antisense strand to SEQ ID NO: 2521796
aaguccaggcgguuauucc

SEQ ID NO: 2521798 - RNA, 19 nt, Artificial Sequence
  Description of Artificial Sequence: Synthetic oligonucleotide
  Sense strand starting at position 2306 of SEQ ID NO: 1888251
ucuguaaacauguguugag

SEQ ID NO: 2521799 - RNA, 19 nt, Artificial Sequence
  Description of Artificial Sequence: Synthetic oligonucleotide
  Antisense strand to SEQ ID NO: 2521798
cucaacacauguuuacaga

SEQ ID NO: 2521800 - RNA, 19 nt, Artificial Sequence
  Description of Artificial Sequence: Synthetic oligonucleotide
  Sense strand starting at position 2400 of SEQ ID NO: 1888251
ucaccacaugcuuaguaga

SEQ ID NO: 2521801 - RNA, 19 nt, Artificial Sequence
  Description of Artificial Sequence: Synthetic oligonucleotide
  Antisense strand to SEQ ID NO: 2521800
ucuacuaagcaugugguga

SEQ ID NO: 2521802 - RNA, 19 nt, Artificial Sequence
  Description of Artificial Sequence: Synthetic oligonucleotide
  Sense strand starting at position 2696 of SEQ ID NO: 1888251
gcuuccaaucuccagagaa

SEQ ID NO: 2521803 - RNA, 19 nt, Artificial Sequence
  Description of Artificial Sequence: Synthetic oligonucleotide
  Antisense strand to SEQ ID NO: 2521802
uucucuggagauuggaagc

SEQ ID NO: 2521804 - RNA, 19 nt, Artificial Sequence
  Description of Artificial Sequence: Synthetic oligonucleotide
  Sense strand starting at position 2873 of SEQ ID NO: 1888251
cugagccuuuaucuagaau

SEQ ID NO: 2521805 - RNA, 19 nt, Artificial Sequence
  Description of Artificial Sequence: Synthetic oligonucleotide
  Antisense strand to SEQ ID NO: 2521804
auucuagauaaaggcucag

SEQ ID NO: 2521806 - RNA, 19 nt, Artificial Sequence
  Description of Artificial Sequence: Synthetic oligonucleotide
  Sense strand starting at position 2876 of SEQ ID NO: 1888251
agccuuuaucuagaaugcu

SEQ ID NO: 2521807 - RNA, 19 nt, Artificial Sequence
  Description of Artificial Sequence: Synthetic oligonucleotide
  Antisense strand to SEQ ID NO: 2521806
agcauucuagauaaaggcu

SEQ ID NO: 2521808 - RNA, 19 nt, Artificial Sequence
  Description of Artificial Sequence: Synthetic oligonucleotide
  Sense strand starting at position 2885 of SEQ ID NO: 1888251
cuagaaugcucuucuucug

SEQ ID NO: 2521809 - RNA, 19 nt, Artificial Sequence
  Description of Artificial Sequence: Synthetic oligonucleotide
  Antisense strand to SEQ ID NO: 2521808
cagaagaagagcauucuag

SEQ ID NO: 2521810 - RNA, 19 nt, Artificial Sequence
  Description of Artificial Sequence: Synthetic oligonucleotide
  Sense strand starting at position 3059 of SEQ ID NO: 1888251
cucauacacuuguuuguua

SEQ ID NO: 2521811 - RNA, 19 nt, Artificial Sequence
  Description of Artificial Sequence: Synthetic oligonucleotide
  Antisense strand to SEQ ID NO: 2521810
uaacaaacaaguguaugag

SEQ ID NO: 2521812 - RNA, 19 nt, Artificial Sequence
  Description of Artificial Sequence: Synthetic oligonucleotide
  Sense strand starting at position 3060 of SEQ ID NO: 1888251
ucauacacuuguuuguuaa

SEQ ID NO: 2521813 - RNA, 19 nt, Artificial Sequence
  Description of Artificial Sequence: Synthetic oligonucleotide
  Antisense strand to SEQ ID NO: 2521812
uuaacaaacaaguguauga

SEQ ID NO: 2521814 - RNA, 19 nt, Artificial Sequence
  Description of Artificial Sequence: Synthetic oligonucleotide
  Sense strand starting at position 3149 of SEQ ID NO: 1888251
cugcaaugccuacaacagu

SEQ ID NO: 2521815 - RNA, 19 nt, Artificial Sequence
  Description of Artificial Sequence: Synthetic oligonucleotide
  Antisense strand to SEQ ID NO: 2521814
acuguuguaggcauugcag

SEQ ID NO: 2521816 - RNA, 19 nt, Artificial Sequence
  Description of Artificial Sequence: Synthetic oligonucleotide
  Sense strand starting at position 3348 of SEQ ID NO: 1888251
ugcaauaaucuaggugaca

SEQ ID NO: 2521817 - RNA, 19 nt, Artificial Sequence
  Description of Artificial Sequence: Synthetic oligonucleotide
  Antisense strand to SEQ ID NO: 2521816
ugucaccuagauuauugca

SEQ ID NO: 2521818 - RNA, 19 nt, Artificial Sequence
  Description of Artificial Sequence: Synthetic oligonucleotide
  Sense strand starting at position 3349 of SEQ ID NO: 1888251
gcaauaaucuaggugacag

SEQ ID NO: 2521819 - RNA, 19 nt, Artificial Sequence
  Description of Artificial Sequence: Synthetic oligonucleotide
  Antisense strand to SEQ ID NO: 2521818
cugucaccuagauuauugc

SEQ ID NO: 2521820 - RNA, 19 nt, Artificial Sequence
  Description of Artificial Sequence: Synthetic oligonucleotide
  Sense strand starting at position 3373 of SEQ ID NO: 1888251
ggcagucuggaugaaagua

SEQ ID NO: 2521821 - RNA, 19 nt, Artificial Sequence
  Description of Artificial Sequence: Synthetic oligonucleotide
  Antisense strand to SEQ ID NO: 2521820
uacuuucauccagacugcc

SEQ ID NO: 2521822 - RNA, 19 nt, Artificial Sequence
  Description of Artificial Sequence: Synthetic oligonucleotide
  Sense strand starting at position 3386 of SEQ ID NO: 1888251
aaaguaauacgguggaggu

SEQ ID NO: 2521823 - RNA, 19 nt, Artificial Sequence
  Description of Artificial Sequence: Synthetic oligonucleotide
  Antisense strand to SEQ ID NO: 2521822
accuccaccguauuacuuu

SEQ ID NO: 2521824 - RNA, 19 nt, Artificial Sequence
  Description of Artificial Sequence: Synthetic oligonucleotide
  Sense strand starting at position 3415 of SEQ ID NO: 1888251
guuggacuccuggacgcau

SEQ ID NO: 2521825 - RNA, 19 nt, Artificial Sequence
  Description of Artificial Sequence: Synthetic oligonucleotide
  Antisense strand to SEQ ID NO: 2521824
augcguccaggaguccaac

SEQ ID NO: 2521826 - RNA, 19 nt, Artificial Sequence
  Description of Artificial Sequence: Synthetic oligonucleotide
  Sense strand starting at position 3564 of SEQ ID NO: 1888251
gucucuuaagacugcuaaa

SEQ ID NO: 2521827 - RNA, 19 nt, Artificial Sequence
  Description of Artificial Sequence: Synthetic oligonucleotide
  Antisense strand to SEQ ID NO: 2521826
uuuagcagucuuaagagac

SEQ ID NO: 2521828 - RNA, 19 nt, Artificial Sequence
  Description of Artificial Sequence: Synthetic oligonucleotide
  Sense strand starting at position 3577 of SEQ ID NO: 1888251
gcuaaagcugacugagaga

SEQ ID NO: 2521829 - RNA, 19 nt, Artificial Sequence
  Description of Artificial Sequence: Synthetic oligonucleotide
  Antisense strand to SEQ ID NO: 2521828
ucucucagucagcuuuagc

SEQ ID NO: 2521830 - RNA, 19 nt, Artificial Sequence
  Description of Artificial Sequence: Synthetic oligonucleotide
  Sense strand starting at position 3604 of SEQ ID NO: 1888251
aggauccaccaauguuuau

SEQ ID NO: 2521831 - RNA, 19 nt, Artificial Sequence
  Description of Artificial Sequence: Synthetic oligonucleotide
  Antisense strand to SEQ ID NO: 2521830
auaaacauugguggauccu

SEQ ID NO: 2521832 - RNA, 19 nt, Artificial Sequence
  Description of Artificial Sequence: Synthetic oligonucleotide
  Sense strand starting at position 3686 of SEQ ID NO: 1888251
uuuacauagcuuugaggua

SEQ ID NO: 2521833 - RNA, 19 nt, Artificial Sequence
  Description of Artificial Sequence: Synthetic oligonucleotide
  Antisense strand to SEQ ID NO: 2521832
uaccucaaagcuauguaaa

SEQ ID NO: 2521834 - RNA, 19 nt, Artificial Sequence
  Description of Artificial Sequence: Synthetic oligonucleotide
  Sense strand starting at position 3691 of SEQ ID NO: 1888251
auagcuuugagguagauac

SEQ ID NO: 2521835 - RNA, 19 nt, Artificial Sequence
  Description of Artificial Sequence: Synthetic oligonucleotide
  Antisense strand to SEQ ID NO: 2521834
guaucuaccucaaagcuau

SEQ ID NO: 2521836 - RNA, 19 nt, Artificial Sequence
  Description of Artificial Sequence: Synthetic oligonucleotide
  Sense strand starting at position 3901 of SEQ ID NO: 1888251
gcgggaaugaccuggucua

SEQ ID NO: 2521837 - RNA, 19 nt, Artificial Sequence
  Description of Artificial Sequence: Synthetic oligonucleotide
  Antisense strand to SEQ ID NO: 2521836
uagaccaggucauucccgc

SEQ ID NO: 2521838 - RNA, 19 nt, Artificial Sequence
  Description of Artificial Sequence: Synthetic oligonucleotide
  Sense strand starting at position 3902 of SEQ ID NO: 1888251
cgggaaugaccuggucuac

SEQ ID NO: 2521839 - RNA, 19 nt, Artificial Sequence
  Description of Artificial Sequence: Synthetic oligonucleotide
  Antisense strand to SEQ ID NO: 2521838
guagaccaggucauucccg

SEQ ID NO: 2521840 - RNA, 19 nt, Artificial Sequence
  Description of Artificial Sequence: Synthetic oligonucleotide
  Sense strand starting at position 35 of SEQ ID NO: 1888252
cuggguuucucuggaauaa

SEQ ID NO: 2521841 - RNA, 19 nt, Artificial Sequence
  Description of Artificial Sequence: Synthetic oligonucleotide
  Antisense strand to SEQ ID NO: 2521840
uuauuccagagaaacccag

SEQ ID NO: 2521842 - RNA, 19 nt, Artificial Sequence
  Description of Artificial Sequence: Synthetic oligonucleotide
  Sense strand starting at position 456 of SEQ ID NO: 1888252
ccaccuuguuuggugagaa

SEQ ID NO: 2521843 - RNA, 19 nt, Artificial Sequence
  Description of Artificial Sequence: Synthetic oligonucleotide
  Antisense strand to SEQ ID NO: 2521842
uucucaccaaacaaggugg

SEQ ID NO: 2521844 - RNA, 19 nt, Artificial Sequence
  Description of Artificial Sequence: Synthetic oligonucleotide
  Sense strand starting at position 457 of SEQ ID NO: 1888252
caccuuguuuggugagaaa

SEQ ID NO: 2521845 - RNA, 19 nt, Artificial Sequence
  Description of Artificial Sequence: Synthetic oligonucleotide
  Antisense strand to SEQ ID NO: 2521844
uuucucaccaaacaaggug

SEQ ID NO: 2521846 - RNA, 19 nt, Artificial Sequence
  Description of Artificial Sequence: Synthetic oligonucleotide
  Sense strand starting at position 501 of SEQ ID NO: 1888252
uuaugucaguucucagaaa

SEQ ID NO: 2521847 - RNA, 19 nt, Artificial Sequence
  Description of Artificial Sequence: Synthetic oligonucleotide
  Antisense strand to SEQ ID NO: 2521846
uuucugagaacugacauaa

SEQ ID NO: 2521848 - RNA, 19 nt, Artificial Sequence
  Description of Artificial Sequence: Synthetic oligonucleotide
  Sense strand starting at position 530 of SEQ ID NO: 1888252
aagggcaucuucuagaaag

SEQ ID NO: 2521849 - RNA, 19 nt, Artificial Sequence
  Description of Artificial Sequence: Synthetic oligonucleotide
  Antisense strand to SEQ ID NO: 2521848
cuuucuagaagaugcccuu

SEQ ID NO: 2521850 - RNA, 19 nt, Artificial Sequence
  Description of Artificial Sequence: Synthetic oligonucleotide
  Sense strand starting at position 770 of SEQ ID NO: 1888252
cuggcuguuccaugagcca

SEQ ID NO: 2521851 - RNA, 19 nt, Artificial Sequence
  Description of Artificial Sequence: Synthetic oligonucleotide
  Antisense strand to SEQ ID NO: 2521850
uggcucauggaacagccag

SEQ ID NO: 2521852 - RNA, 19 nt, Artificial Sequence
  Description of Artificial Sequence: Synthetic oligonucleotide
  Sense strand starting at position 1307 of SEQ ID NO: 1888252
ccacucaggcuucgacaaa

SEQ ID NO: 2521853 - RNA, 19 nt, Artificial Sequence
  Description of Artificial Sequence: Synthetic oligonucleotide
  Antisense strand to SEQ ID NO: 2521852
uuugucgaagccugagugg

SEQ ID NO: 2521854 - RNA, 19 nt, Artificial Sequence
  Description of Artificial Sequence: Synthetic oligonucleotide
  Sense strand starting at position 1319 of SEQ ID NO: 1888252
cgacaaauguccuugucac

SEQ ID NO: 2521855 - RNA, 19 nt, Artificial Sequence
  Description of Artificial Sequence: Synthetic oligonucleotide
  Antisense strand to SEQ ID NO: 2521854
gugacaaggacauuugucg

SEQ ID NO: 2521856 - RNA, 19 nt, Artificial Sequence
  Description of Artificial Sequence: Synthetic oligonucleotide
  Sense strand starting at position 1398 of SEQ ID NO: 1888252
gggucaguggaggagucau

SEQ ID NO: 2521857 - RNA, 19 nt, Artificial Sequence
  Description of Artificial Sequence: Synthetic oligonucleotide
  Antisense strand to SEQ ID NO: 2521856
augacuccuccacugaccc

SEQ ID NO: 2521858 - RNA, 19 nt, Artificial Sequence
  Description of Artificial Sequence: Synthetic oligonucleotide
  Sense strand starting at position 1408 of SEQ ID NO: 1888252
aggagucauuggcuuccca

SEQ ID NO: 2521859 - RNA, 19 nt, Artificial Sequence
  Description of Artificial Sequence: Synthetic oligonucleotide
  Antisense strand to SEQ ID NO: 2521858
ugggaagccaaugacuccu

SEQ ID NO: 2521860 - RNA, 19 nt, Artificial Sequence
  Description of Artificial Sequence: Synthetic oligonucleotide
  Sense strand starting at position 1579 of SEQ ID NO: 1888252
gggcucuaucagcgcaaca

SEQ ID NO: 2521861 - RNA, 19 nt, Artificial Sequence
  Description of Artificial Sequence: Synthetic oligonucleotide
  Antisense strand to SEQ ID NO: 2521860
uguugcgcugauagagccc

SEQ ID NO: 2521862 - RNA, 19 nt, Artificial Sequence
  Description of Artificial Sequence: Synthetic oligonucleotide
  Sense strand starting at position 1639 of SEQ ID NO: 1888252
aggaauugaucccucuaug

SEQ ID NO: 2521863 - RNA, 19 nt, Artificial Sequence
  Description of Artificial Sequence: Synthetic oligonucleotide
  Antisense strand to SEQ ID NO: 2521862
cauagagggaucaauuccu

SEQ ID NO: 2521864 - RNA, 19 nt, Artificial Sequence
  Description of Artificial Sequence: Synthetic oligonucleotide
  Sense strand starting at position 1723 of SEQ ID NO: 1888252
gccugagucccuggcugaa

SEQ ID NO: 2521865 - RNA, 19 nt, Artificial Sequence
  Description of Artificial Sequence: Synthetic oligonucleotide
  Antisense strand to SEQ ID NO: 2521864
uucagccagggacucaggc

SEQ ID NO: 2521866 - RNA, 19 nt, Artificial Sequence
  Description of Artificial Sequence: Synthetic oligonucleotide
  Sense strand starting at position 2220 of SEQ ID NO: 1888252
cucuguagcugugucaaau

SEQ ID NO: 2521867 - RNA, 19 nt, Artificial Sequence
  Description of Artificial Sequence: Synthetic oligonucleotide
  Antisense strand to SEQ ID NO: 2521866
auuugacacagcuacagag

SEQ ID NO: 2521868 - RNA, 19 nt, Artificial Sequence
  Description of Artificial Sequence: Synthetic oligonucleotide
  Sense strand starting at position 2226 of SEQ ID NO: 1888252
agcugugucaaauggaaca

SEQ ID NO: 2521869 - RNA, 19 nt, Artificial Sequence
  Description of Artificial Sequence: Synthetic oligonucleotide
  Antisense strand to SEQ ID NO: 2521868
uguuccauuugacacagcu

SEQ ID NO: 2521870 - RNA, 19 nt, Artificial Sequence
  Description of Artificial Sequence: Synthetic oligonucleotide
  Sense strand starting at position 2240 of SEQ ID NO: 1888252
gaacaacagcccuaguguu

SEQ ID NO: 2521871 - RNA, 19 nt, Artificial Sequence
  Description of Artificial Sequence: Synthetic oligonucleotide
  Antisense strand to SEQ ID NO: 2521870
aacacuagggcuguuguuc

SEQ ID NO: 2521872 - RNA, 19 nt, Artificial Sequence
  Description of Artificial Sequence: Synthetic oligonucleotide
  Sense strand starting at position 2272 of SEQ ID NO: 1888252
gcuggucucucggugacau

SEQ ID NO: 2521873 - RNA, 19 nt, Artificial Sequence
  Description of Artificial Sequence: Synthetic oligonucleotide
  Antisense strand to SEQ ID NO: 2521872
augucaccgagagaccagc

SEQ ID NO: 2521874 - RNA, 19 nt, Artificial Sequence
  Description of Artificial Sequence: Synthetic oligonucleotide
  Sense strand starting at position 2273 of SEQ ID NO: 1888252
cuggucucucggugacaua

SEQ ID NO: 2521875 - RNA, 19 nt, Artificial Sequence
  Description of Artificial Sequence: Synthetic oligonucleotide
  Antisense strand to SEQ ID NO: 2521874
uaugucaccgagagaccag

SEQ ID NO: 2521876 - RNA, 19 nt, Artificial Sequence
  Description of Artificial Sequence: Synthetic oligonucleotide
  Sense strand starting at position 2274 of SEQ ID NO: 1888252
uggucucucggugacauaa

SEQ ID NO: 2521877 - RNA, 19 nt, Artificial Sequence
  Description of Artificial Sequence: Synthetic oligonucleotide
  Antisense strand to SEQ ID NO: 2521876
uuaugucaccgagagacca

SEQ ID NO: 2521878 - RNA, 19 nt, Artificial Sequence
  Description of Artificial Sequence: Synthetic oligonucleotide
  Sense strand starting at position 2359 of SEQ ID NO: 1888252
gguggcaauuagggaauau

SEQ ID NO: 2521879 - RNA, 19 nt, Artificial Sequence
  Description of Artificial Sequence: Synthetic oligonucleotide
  Antisense strand to SEQ ID NO: 2521878
auauucccuaauugccacc

SEQ ID NO: 2521880 - RNA, 19 nt, Artificial Sequence
  Description of Artificial Sequence: Synthetic oligonucleotide
  Sense strand starting at position 2479 of SEQ ID NO: 1888252
guggcauuaucggaaccua

SEQ ID NO: 2521881 - RNA, 19 nt, Artificial Sequence
  Description of Artificial Sequence: Synthetic oligonucleotide
  Antisense strand to SEQ ID NO: 2521880
uagguuccgauaaugccac

SEQ ID NO: 2521882 - RNA, 19 nt, Artificial Sequence
  Description of Artificial Sequence: Synthetic oligonucleotide
  Sense strand starting at position 2487 of SEQ ID NO: 1888252
aucggaaccuaagagucau

SEQ ID NO: 2521883 - RNA, 19 nt, Artificial Sequence
  Description of Artificial Sequence: Synthetic oligonucleotide
  Antisense strand to SEQ ID NO: 2521882
augacucuuagguuccgau

SEQ ID NO: 2521884 - RNA, 19 nt, Artificial Sequence
  Description of Artificial Sequence: Synthetic oligonucleotide
  Sense strand starting at position 2493 of SEQ ID NO: 1888252
accuaagagucaucagggu

SEQ ID NO: 2521885 - RNA, 19 nt, Artificial Sequence
  Description of Artificial Sequence: Synthetic oligonucleotide
  Antisense strand to SEQ ID NO: 2521884
acccugaugacucuuaggu

SEQ ID NO: 2521886 - RNA, 19 nt, Artificial Sequence
  Description of Artificial Sequence: Synthetic oligonucleotide
  Sense strand starting at position 2636 of SEQ ID NO: 1888252
cgcagugugcucugauuca

SEQ ID NO: 2521887 - RNA, 19 nt, Artificial Sequence
  Description of Artificial Sequence: Synthetic oligonucleotide
  Antisense strand to SEQ ID NO: 2521886
ugaaucagagcacacugcg

SEQ ID NO: 2521888 - RNA, 19 nt, Artificial Sequence
  Description of Artificial Sequence: Synthetic oligonucleotide
  Sense strand starting at position 2652 of SEQ ID NO: 1888252
ucaagugagaagugcagau

SEQ ID NO: 2521889 - RNA, 19 nt, Artificial Sequence
  Description of Artificial Sequence: Synthetic oligonucleotide
  Antisense strand to SEQ ID NO: 2521888
aucugcacuucucacuuga

SEQ ID NO: 2521890 - RNA, 19 nt, Artificial Sequence
  Description of Artificial Sequence: Synthetic oligonucleotide
  Sense strand starting at position 2656 of SEQ ID NO: 1888252
gugagaagugcagauguuu

SEQ ID NO: 2521891 - RNA, 19 nt, Artificial Sequence
  Description of Artificial Sequence: Synthetic oligonucleotide
  Antisense strand to SEQ ID NO: 2521890
aaacaucugcacuucucac

SEQ ID NO: 2521892 - RNA, 19 nt, Artificial Sequence
  Description of Artificial Sequence: Synthetic oligonucleotide
  Sense strand starting at position 2662 of SEQ ID NO: 1888252
agugcagauguuugugacu

SEQ ID NO: 2521893 - RNA, 19 nt, Artificial Sequence
  Description of Artificial Sequence: Synthetic oligonucleotide
  Antisense strand to SEQ ID NO: 2521892
agucacaaacaucugcacu

SEQ ID NO: 2521894 - RNA, 19 nt, Artificial Sequence
  Description of Artificial Sequence: Synthetic oligonucleotide
  Sense strand starting at position 2667 of SEQ ID NO: 1888252
agauguuugugacugccga

SEQ ID NO: 2521895 - RNA, 19 nt, Artificial Sequence
  Description of Artificial Sequence: Synthetic oligonucleotide
  Antisense strand to SEQ ID NO: 2521894
ucggcagucacaaacaucu

SEQ ID NO: 2521896 - RNA, 19 nt, Artificial Sequence
  Description of Artificial Sequence: Synthetic oligonucleotide
  Sense strand starting at position 2801 of SEQ ID NO: 1888252
cuuuccuaauguuuguauu

SEQ ID NO: 2521897 - RNA, 19 nt, Artificial Sequence
  Description of Artificial Sequence: Synthetic oligonucleotide
  Antisense strand to SEQ ID NO: 2521896
aauacaaacauuaggaaag

SEQ ID NO: 2521898 - RNA, 19 nt, Artificial Sequence
  Description of Artificial Sequence: Synthetic oligonucleotide
  Sense strand starting at position 2804 of SEQ ID NO: 1888252
uccuaauguuuguauuuga

SEQ ID NO: 2521899 - RNA, 19 nt, Artificial Sequence
  Description of Artificial Sequence: Synthetic oligonucleotide
  Antisense strand to SEQ ID NO: 2521898
ucaaauacaaacauuagga

SEQ ID NO: 2521900 - RNA, 19 nt, Artificial Sequence
  Description of Artificial Sequence: Synthetic oligonucleotide
  Sense strand starting at position 2809 of SEQ ID NO: 1888252
auguuuguauuugauccau

SEQ ID NO: 2521901 - RNA, 19 nt, Artificial Sequence
  Description of Artificial Sequence: Synthetic oligonucleotide
  Antisense strand to SEQ ID NO: 2521900
auggaucaaauacaaacau

SEQ ID NO: 2521902 - RNA, 19 nt, Artificial Sequence
  Description of Artificial Sequence: Synthetic oligonucleotide
  Sense strand starting at position 2821 of SEQ ID NO: 1888252
gauccauaugaauguguug

SEQ ID NO: 2521903 - RNA, 19 nt, Artificial Sequence
  Description of Artificial Sequence: Synthetic oligonucleotide
  Antisense strand to SEQ ID NO: 2521902
caacacauucauauggauc

SEQ ID NO: 2521904 - RNA, 19 nt, Artificial Sequence
  Description of Artificial Sequence: Synthetic oligonucleotide
  Sense strand starting at position 2830 of SEQ ID NO: 1888252
gaauguguugccuguccaa

SEQ ID NO: 2521905 - RNA, 19 nt, Artificial Sequence
  Description of Artificial Sequence: Synthetic oligonucleotide
  Antisense strand to SEQ ID NO: 2521904
uuggacaggcaacacauuc

SEQ ID NO: 2521906 - RNA, 19 nt, Artificial Sequence
  Description of Artificial Sequence: Synthetic oligonucleotide
  Sense strand starting at position 3361 of SEQ ID NO: 1888252
uguaaucggagcuauuguu

SEQ ID NO: 2521907 - RNA, 19 nt, Artificial Sequence
  Description of Artificial Sequence: Synthetic oligonucleotide
  Antisense strand to SEQ ID NO: 2521906
aacaauagcuccgauuaca

SEQ ID NO: 2521908 - RNA, 19 nt, Artificial Sequence
  Description of Artificial Sequence: Synthetic oligonucleotide
  Sense strand starting at position 3577 of SEQ ID NO: 1888252
gggugugcgcuuguccaga

SEQ ID NO: 2521909 - RNA, 19 nt, Artificial Sequence
  Description of Artificial Sequence: Synthetic oligonucleotide
  Antisense strand to SEQ ID NO: 2521908
ucuggacaagcgcacaccc

SEQ ID NO: 2521910 - RNA, 19 nt, Artificial Sequence
  Description of Artificial Sequence: Synthetic oligonucleotide
  Sense strand starting at position 3582 of SEQ ID NO: 1888252
ugcgcuuguccagagcuuu

SEQ ID NO: 2521911 - RNA, 19 nt, Artificial Sequence
  Description of Artificial Sequence: Synthetic oligonucleotide
  Antisense strand to SEQ ID NO: 2521910
aaagcucuggacaagcgca

SEQ ID NO: 2521912 - RNA, 19 nt, Artificial Sequence
  Description of Artificial Sequence: Synthetic oligonucleotide
  Sense strand starting at position 3592 of SEQ ID NO: 1888252
cagagcuuuccuugcagca

SEQ ID NO: 2521913 - RNA, 19 nt, Artificial Sequence
  Description of Artificial Sequence: Synthetic oligonucleotide
  Antisense strand to SEQ ID NO: 2521912
ugcugcaaggaaagcucug

SEQ ID NO: 2521914 - RNA, 19 nt, Artificial Sequence
  Description of Artificial Sequence: Synthetic oligonucleotide
  Sense strand starting at position 3698 of SEQ ID NO: 1888252
gagagaccucacugucucu

SEQ ID NO: 2521915 - RNA, 19 nt, Artificial Sequence
  Description of Artificial Sequence: Synthetic oligonucleotide
  Antisense strand to SEQ ID NO: 2521914
agagacagugaggucucuc

SEQ ID NO: 2521916 - RNA, 19 nt, Artificial Sequence
  Description of Artificial Sequence: Synthetic oligonucleotide
  Sense strand starting at position 3934 of SEQ ID NO: 1888252
ugaggaagccauggucagu

SEQ ID NO: 2521917 - RNA, 19 nt, Artificial Sequence
  Description of Artificial Sequence: Synthetic oligonucleotide
  Antisense strand to SEQ ID NO: 2521916
acugaccauggcuuccuca

SEQ ID NO: 2521918 - RNA, 19 nt, Artificial Sequence
  Description of Artificial Sequence: Synthetic oligonucleotide
  Sense strand starting at position 3957 of SEQ ID NO: 1888252
cagugugcucacugcacaa

SEQ ID NO: 2521919 - RNA, 19 nt, Artificial Sequence
  Description of Artificial Sequence: Synthetic oligonucleotide
  Antisense strand to SEQ ID NO: 2521918
uugugcagugagcacacug

SEQ ID NO: 2521920 - RNA, 19 nt, Artificial Sequence
  Description of Artificial Sequence: Synthetic oligonucleotide
  Sense strand starting at position 388 of SEQ ID NO: 1888253
gaugaaugcgaccagguua

SEQ ID NO: 2521921 - RNA, 19 nt, Artificial Sequence
  Description of Artificial Sequence: Synthetic oligonucleotide
  Antisense strand to SEQ ID NO: 2521920
uaaccuggucgcauucauc

SEQ ID NO: 2521922 - RNA, 19 nt, Artificial Sequence
  Description of Artificial Sequence: Synthetic oligonucleotide
  Sense strand starting at position 486 of SEQ ID NO: 1888253
uucugauuccaguauucua

SEQ ID NO: 2521923 - RNA, 19 nt, Artificial Sequence
  Description of Artificial Sequence: Synthetic oligonucleotide
  Antisense strand to SEQ ID NO: 2521922
uagaauacuggaaucagaa

SEQ ID NO: 2521924 - RNA, 19 nt, Artificial Sequence
  Description of Artificial Sequence: Synthetic oligonucleotide
  Sense strand starting at position 499 of SEQ ID NO: 1888253
auucuauacuuugcaggau

SEQ ID NO: 2521925 - RNA, 19 nt, Artificial Sequence
  Description of Artificial Sequence: Synthetic oligonucleotide
  Antisense strand to SEQ ID NO: 2521924
auccugcaaaguauagaau

SEQ ID NO: 2521926 - RNA, 19 nt, Artificial Sequence
  Description of Artificial Sequence: Synthetic oligonucleotide
  Sense strand starting at position 502 of SEQ ID NO: 1888253
cuauacuuugcaggauaca

SEQ ID NO: 2521927 - RNA, 19 nt, Artificial Sequence
  Description of Artificial Sequence: Synthetic oligonucleotide
  Antisense strand to SEQ ID NO: 2521926
uguauccugcaaaguauag

SEQ ID NO: 2521928 - RNA, 19 nt, Artificial Sequence
  Description of Artificial Sequence: Synthetic oligonucleotide
  Sense strand starting at position 536 of SEQ ID NO: 1888253
ugucccacugaguacaaau

SEQ ID NO: 2521929 - RNA, 19 nt, Artificial Sequence
  Description of Artificial Sequence: Synthetic oligonucleotide
  Antisense strand to SEQ ID NO: 2521928
auuuguacucagugggaca

SEQ ID NO: 2521930 - RNA, 19 nt, Artificial Sequence
  Description of Artificial Sequence: Synthetic oligonucleotide
  Sense strand starting at position 674 of SEQ ID NO: 1888253
ggcgaaucacuuugagacc

SEQ ID NO: 2521931 - RNA, 19 nt, Artificial Sequence
  Description of Artificial Sequence: Synthetic oligonucleotide
  Antisense strand to SEQ ID NO: 2521930
ggucucaaagugauucgcc

SEQ ID NO: 2521932 - RNA, 19 nt, Artificial Sequence
  Description of Artificial Sequence: Synthetic oligonucleotide
  Sense strand starting at position 936 of SEQ ID NO: 1888253
cauaaauggcuuuguagca

SEQ ID NO: 2521933 - RNA, 19 nt, Artificial Sequence
  Description of Artificial Sequence: Synthetic oligonucleotide
  Antisense strand to SEQ ID NO: 2521932
ugcuacaaagccauuuaug

SEQ ID NO: 2521934 - RNA, 19 nt, Artificial Sequence
  Description of Artificial Sequence: Synthetic oligonucleotide
  Sense strand starting at position 985 of SEQ ID NO: 1888253
caguguggcaacgacauua

SEQ ID NO: 2521935 - RNA, 19 nt, Artificial Sequence
  Description of Artificial Sequence: Synthetic oligonucleotide
  Antisense strand to SEQ ID NO: 2521934
uaaugucguugccacacug

SEQ ID NO: 2521936 - RNA, 19 nt, Artificial Sequence
  Description of Artificial Sequence: Synthetic oligonucleotide
  Sense strand starting at position 999 of SEQ ID NO: 1888253
cauuaagaucagcggaaca

SEQ ID NO: 2521937 - RNA, 19 nt, Artificial Sequence
  Description of Artificial Sequence: Synthetic oligonucleotide
  Antisense strand to SEQ ID NO: 2521936
uguuccgcugaucuuaaug

SEQ ID NO: 2521938 - RNA, 19 nt, Artificial Sequence
  Description of Artificial Sequence: Synthetic oligonucleotide
  Sense strand starting at position 1039 of SEQ ID NO: 1888253
aaaggauuucgcugcuuaa

SEQ ID NO: 2521939 - RNA, 19 nt, Artificial Sequence
  Description of Artificial Sequence: Synthetic oligonucleotide
  Antisense strand to SEQ ID NO: 2521938
uuaagcagcgaaauccuuu

SEQ ID NO: 2521940 - RNA, 19 nt, Artificial Sequence
  Description of Artificial Sequence: Synthetic oligonucleotide
  Sense strand starting at position 1042 of SEQ ID NO: 1888253
ggauuucgcugcuuaaauu

SEQ ID NO: 2521941 - RNA, 19 nt, Artificial Sequence
  Description of Artificial Sequence: Synthetic oligonucleotide
  Antisense strand to SEQ ID NO: 2521940
aauuuaagcagcgaaaucc

SEQ ID NO: 2521942 - RNA, 19 nt, Artificial Sequence
  Description of Artificial Sequence: Synthetic oligonucleotide
  Sense strand starting at position 1167 of SEQ ID NO: 1888253
aaagauguuccugaacgug

SEQ ID NO: 2521943 - RNA, 19 nt, Artificial Sequence
  Description of Artificial Sequence: Synthetic oligonucleotide
  Antisense strand to SEQ ID NO: 2521942
cacguucaggaacaucuuu

SEQ ID NO: 2521944 - RNA, 19 nt, Artificial Sequence
  Description of Artificial Sequence: Synthetic oligonucleotide
  Sense strand starting at position 1281 of SEQ ID NO: 1888253
agagcuagaccuugaauuc

SEQ ID NO: 2521945 - RNA, 19 nt, Artificial Sequence
  Description of Artificial Sequence: Synthetic oligonucleotide
  Antisense strand to SEQ ID NO: 2521944
gaauucaaggucuagcucu

SEQ ID NO: 2521946 - RNA, 19 nt, Artificial Sequence
  Description of Artificial Sequence: Synthetic oligonucleotide
  Sense strand starting at position 1322 of SEQ ID NO: 1888253
agaugaacgaguugugaaa

SEQ ID NO: 2521947 - RNA, 19 nt, Artificial Sequence
  Description of Artificial Sequence: Synthetic oligonucleotide
  Antisense strand to SEQ ID NO: 2521946
uuucacaacucguucaucu

SEQ ID NO: 2521948 - RNA, 19 nt, Artificial Sequence
  Description of Artificial Sequence: Synthetic oligonucleotide
  Sense strand starting at position 2535 of SEQ ID NO: 1888253
aucagaccugcccaugaau

SEQ ID NO: 2521949 - RNA, 19 nt, Artificial Sequence
  Description of Artificial Sequence: Synthetic oligonucleotide
  Antisense strand to SEQ ID NO: 2521948
auucaugggcaggucugau

SEQ ID NO: 2521950 - RNA, 19 nt, Artificial Sequence
  Description of Artificial Sequence: Synthetic oligonucleotide
  Sense strand starting at position 2648 of SEQ ID NO: 1888253
auggaucugagcugagaug

SEQ ID NO: 2521951 - RNA, 19 nt, Artificial Sequence
  Description of Artificial Sequence: Synthetic oligonucleotide
  Antisense strand to SEQ ID NO: 2521950
caucucagcucagauccau

SEQ ID NO: 2521952 - RNA, 19 nt, Artificial Sequence
  Description of Artificial Sequence: Synthetic oligonucleotide
  Sense strand starting at position 2660 of SEQ ID NO: 1888253
ugagaugucucucccagag

SEQ ID NO: 2521953 - RNA, 19 nt, Artificial Sequence
  Description of Artificial Sequence: Synthetic oligonucleotide
  Antisense strand to SEQ ID NO: 2521952
cucugggagagacaucuca

SEQ ID NO: 2521954 - RNA, 19 nt, Artificial Sequence
  Description of Artificial Sequence: Synthetic oligonucleotide
  Sense strand starting at position 2710 of SEQ ID NO: 1888253
ugcucugcuccgucacaau

SEQ ID NO: 2521955 - RNA, 19 nt, Artificial Sequence
  Description of Artificial Sequence: Synthetic oligonucleotide
  Antisense strand to SEQ ID NO: 2521954
auugugacggagcagagca

SEQ ID NO: 2521956 - RNA, 19 nt, Artificial Sequence
  Description of Artificial Sequence: Synthetic oligonucleotide
  Sense strand starting at position 2803 of SEQ ID NO: 1888253
aacugaguucuugaaggca

SEQ ID NO: 2521957 - RNA, 19 nt, Artificial Sequence
  Description of Artificial Sequence: Synthetic oligonucleotide
  Antisense strand to SEQ ID NO: 2521956
ugccuucaagaacucaguu

SEQ ID NO: 2521958 - RNA, 19 nt, Artificial Sequence
  Description of Artificial Sequence: Synthetic oligonucleotide
  Sense strand starting at position 2806 of SEQ ID NO: 1888253
ugaguucuugaaggcaaga

SEQ ID NO: 2521959 - RNA, 19 nt, Artificial Sequence
  Description of Artificial Sequence: Synthetic oligonucleotide
  Antisense strand to SEQ ID NO: 2521958
ucuugccuucaagaacuca

SEQ ID NO: 2521960 - RNA, 19 nt, Artificial Sequence
  Description of Artificial Sequence: Synthetic oligonucleotide
  Sense strand starting at position 2855 of SEQ ID NO: 1888253
cagugucucccauauaguc

SEQ ID NO: 2521961 - RNA, 19 nt, Artificial Sequence
  Description of Artificial Sequence: Synthetic oligonucleotide
  Antisense strand to SEQ ID NO: 2521960
gacuauaugggagacacug

SEQ ID NO: 2521962 - RNA, 19 nt, Artificial Sequence
  Description of Artificial Sequence: Synthetic oligonucleotide
  Sense strand starting at position 2864 of SEQ ID NO: 1888253
ccauauagucaaggcucaa

SEQ ID NO: 2521963 - RNA, 19 nt, Artificial Sequence
  Description of Artificial Sequence: Synthetic oligonucleotide
  Antisense strand to SEQ ID NO: 2521962
uugagccuugacuauaugg

SEQ ID NO: 2521964 - RNA, 19 nt, Artificial Sequence
  Description of Artificial Sequence: Synthetic oligonucleotide
  Sense strand starting at position 2915 of SEQ ID NO: 1888253
agcuauuugugggaugaau

SEQ ID NO: 2521965 - RNA, 19 nt, Artificial Sequence
  Description of Artificial Sequence: Synthetic oligonucleotide
  Antisense strand to SEQ ID NO: 2521964
auucaucccacaaauagcu

SEQ ID NO: 2521966 - RNA, 19 nt, Artificial Sequence
  Description of Artificial Sequence: Synthetic oligonucleotide
  Sense strand starting at position 2950 of SEQ ID NO: 1888253
cuaguuuauuuguuguaac

SEQ ID NO: 2521967 - RNA, 19 nt, Artificial Sequence
  Description of Artificial Sequence: Synthetic oligonucleotide
  Antisense strand to SEQ ID NO: 2521966
guuacaacaaauaaacuag

SEQ ID NO: 2521968 - RNA, 19 nt, Artificial Sequence
  Description of Artificial Sequence: Synthetic oligonucleotide
  Sense strand starting at position 3051 of SEQ ID NO: 1888253
uguugcaucaauggaugaa

SEQ ID NO: 2521969 - RNA, 19 nt, Artificial Sequence
  Description of Artificial Sequence: Synthetic oligonucleotide
  Antisense strand to SEQ ID NO: 2521968
uucauccauugaugcaaca

SEQ ID NO: 2521970 - RNA, 19 nt, Artificial Sequence
  Description of Artificial Sequence: Synthetic oligonucleotide
  Sense strand starting at position 3127 of SEQ ID NO: 1888253
gagccuuguccagggaaca

SEQ ID NO: 2521971 - RNA, 19 nt, Artificial Sequence
  Description of Artificial Sequence: Synthetic oligonucleotide
  Antisense strand to SEQ ID NO: 2521970
uguucccuggacaaggcuc

SEQ ID NO: 2521972 - RNA, 19 nt, Artificial Sequence
  Description of Artificial Sequence: Synthetic oligonucleotide
  Sense strand starting at position 3268 of SEQ ID NO: 1888253
acaucuaguuacuuagaag

SEQ ID NO: 2521973 - RNA, 19 nt, Artificial Sequence
  Description of Artificial Sequence: Synthetic oligonucleotide
  Antisense strand to SEQ ID NO: 2521972
cuucuaaguaacuagaugu

SEQ ID NO: 2521974 - RNA, 19 nt, Artificial Sequence
  Description of Artificial Sequence: Synthetic oligonucleotide
  Sense strand starting at position 3277 of SEQ ID NO: 1888253
uacuuagaagcuuguuaga

SEQ ID NO: 2521975 - RNA, 19 nt, Artificial Sequence
  Description of Artificial Sequence: Synthetic oligonucleotide
  Antisense strand to SEQ ID NO: 2521974
ucuaacaagcuucuaagua

SEQ ID NO: 2521976 - RNA, 19 nt, Artificial Sequence
  Description of Artificial Sequence: Synthetic oligonucleotide
  Sense strand starting at position 3279 of SEQ ID NO: 1888253
cuuagaagcuuguuagaag

SEQ ID NO: 2521977 - RNA, 19 nt, Artificial Sequence
  Description of Artificial Sequence: Synthetic oligonucleotide
  Antisense strand to SEQ ID NO: 2521976
cuucuaacaagcuucuaag

SEQ ID NO: 2521978 - RNA, 19 nt, Artificial Sequence
  Description of Artificial Sequence: Synthetic oligonucleotide
  Sense strand starting at position 3321 of SEQ ID NO: 1888253
cuuguuugauuguuaaaga

SEQ ID NO: 2521979 - RNA, 19 nt, Artificial Sequence
  Description of Artificial Sequence: Synthetic oligonucleotide
  Antisense strand to SEQ ID NO: 2521978
ucuuuaacaaucaaacaag

SEQ ID NO: 2521980 - RNA, 19 nt, Artificial Sequence
  Description of Artificial Sequence: Synthetic oligonucleotide
  Sense strand starting at position 3432 of SEQ ID NO: 1888253
gaaauaauaugguugggua

SEQ ID NO: 2521981 - RNA, 19 nt, Artificial Sequence
  Description of Artificial Sequence: Synthetic oligonucleotide
  Antisense strand to SEQ ID NO: 2521980
uacccaaccauauuauuuc

SEQ ID NO: 2521982 - RNA, 19 nt, Artificial Sequence
  Description of Artificial Sequence: Synthetic oligonucleotide
  Sense strand starting at position 3455 of SEQ ID NO: 1888253
cuaagugcaauuuguggua

SEQ ID NO: 2521983 - RNA, 19 nt, Artificial Sequence
  Description of Artificial Sequence: Synthetic oligonucleotide
  Antisense strand to SEQ ID NO: 2521982
uaccacaaauugcacuuag

SEQ ID NO: 2521984 - RNA, 19 nt, Artificial Sequence
  Description of Artificial Sequence: Synthetic oligonucleotide
  Sense strand starting at position 3546 of SEQ ID NO: 1888253
cugagaguaccucagccuu

SEQ ID NO: 2521985 - RNA, 19 nt, Artificial Sequence
  Description of Artificial Sequence: Synthetic oligonucleotide
  Antisense strand to SEQ ID NO: 2521984
aaggcugagguacucucag

SEQ ID NO: 2521986 - RNA, 19 nt, Artificial Sequence
  Description of Artificial Sequence: Synthetic oligonucleotide
  Sense strand starting at position 3548 of SEQ ID NO: 1888253
gagaguaccucagccuuga

SEQ ID NO: 2521987 - RNA, 19 nt, Artificial Sequence
  Description of Artificial Sequence: Synthetic oligonucleotide
  Antisense strand to SEQ ID NO: 2521986
ucaaggcugagguacucuc

SEQ ID NO: 2521988 - RNA, 19 nt, Artificial Sequence
  Description of Artificial Sequence: Synthetic oligonucleotide
  Sense strand starting at position 3552 of SEQ ID NO: 1888253
guaccucagccuugacuaa

SEQ ID NO: 2521989 - RNA, 19 nt, Artificial Sequence
  Description of Artificial Sequence: Synthetic oligonucleotide
  Antisense strand to SEQ ID NO: 2521988
uuagucaaggcugagguac

SEQ ID NO: 2521990 - RNA, 19 nt, Artificial Sequence
  Description of Artificial Sequence: Synthetic oligonucleotide
  Sense strand starting at position 3647 of SEQ ID NO: 1888253
ccuggaguuccaugaggcu

SEQ ID NO: 2521991 - RNA, 19 nt, Artificial Sequence
  Description of Artificial Sequence: Synthetic oligonucleotide
  Antisense strand to SEQ ID NO: 2521990
agccucauggaacuccagg

SEQ ID NO: 2521992 - RNA, 19 nt, Artificial Sequence
  Description of Artificial Sequence: Synthetic oligonucleotide
  Sense strand starting at position 3812 of SEQ ID NO: 1888253
uuacuagaucuagaguggu

SEQ ID NO: 2521993 - RNA, 19 nt, Artificial Sequence
  Description of Artificial Sequence: Synthetic oligonucleotide
  Antisense strand to SEQ ID NO: 2521992
accacucuagaucuaguaa

SEQ ID NO: 2521994 - RNA, 19 nt, Artificial Sequence
  Description of Artificial Sequence: Synthetic oligonucleotide
  Sense strand starting at position 3881 of SEQ ID NO: 1888253
gugucuccucaugguagaa

SEQ ID NO: 2521995 - RNA, 19 nt, Artificial Sequence
  Description of Artificial Sequence: Synthetic oligonucleotide
  Antisense strand to SEQ ID NO: 2521994
uucuaccaugaggagacac

SEQ ID NO: 2521996 - RNA, 19 nt, Artificial Sequence
  Description of Artificial Sequence: Synthetic oligonucleotide
  Sense strand starting at position 3945 of SEQ ID NO: 1888253
ugauuaucuccuggagacu

SEQ ID NO: 2521997 - RNA, 19 nt, Artificial Sequence
  Description of Artificial Sequence: Synthetic oligonucleotide
  Antisense strand to SEQ ID NO: 2521996
agucuccaggagauaauca

SEQ ID NO: 2521998 - RNA, 19 nt, Artificial Sequence
  Description of Artificial Sequence: Synthetic oligonucleotide
  Sense strand starting at position 3954 of SEQ ID NO: 1888253
ccuggagacucuguuagga

SEQ ID NO: 2521999 - RNA, 19 nt, Artificial Sequence
  Description of Artificial Sequence: Synthetic oligonucleotide
  Antisense strand to SEQ ID NO: 2521998
uccuaacagagucuccagg

SEQ ID NO: 2522000 - RNA, 19 nt, Artificial Sequence
  Description of Artificial Sequence: Synthetic oligonucleotide
  Sense strand starting at position 21 of SEQ ID NO: 1888254
caaacaguuccucagacga

SEQ ID NO: 2522001 - RNA, 19 nt, Artificial Sequence
  Description of Artificial Sequence: Synthetic oligonucleotide
  Antisense strand to SEQ ID NO: 2522000
ucgucugaggaacuguuug

SEQ ID NO: 2522002 - RNA, 19 nt, Artificial Sequence
  Description of Artificial Sequence: Synthetic oligonucleotide
  Sense strand starting at position 709 of SEQ ID NO: 1888254
cuucgauaacaugaagcaa

SEQ ID NO: 2522003 - RNA, 19 nt, Artificial Sequence
  Description of Artificial Sequence: Synthetic oligonucleotide
  Antisense strand to SEQ ID NO: 2522002
uugcuucauguuaucgaag

SEQ ID NO: 2522004 - RNA, 19 nt, Artificial Sequence
  Description of Artificial Sequence: Synthetic oligonucleotide
  Sense strand starting at position 821 of SEQ ID NO: 1888254
caaaucgccgcugaaauuu

SEQ ID NO: 2522005 - RNA, 19 nt, Artificial Sequence
  Description of Artificial Sequence: Synthetic oligonucleotide
  Antisense strand to SEQ ID NO: 2522004
aaauuucagcggcgauuug

SEQ ID NO: 2522006 - RNA, 19 nt, Artificial Sequence
  Description of Artificial Sequence: Synthetic oligonucleotide
  Sense strand starting at position 1153 of SEQ ID NO: 1888254
ggguguuuauagaagguga

SEQ ID NO: 2522007 - RNA, 19 nt, Artificial Sequence
  Description of Artificial Sequence: Synthetic oligonucleotide
  Antisense strand to SEQ ID NO: 2522006
ucaccuucuauaaacaccc

SEQ ID NO: 2522008 - RNA, 19 nt, Artificial Sequence
  Description of Artificial Sequence: Synthetic oligonucleotide
  Sense strand starting at position 1155 of SEQ ID NO: 1888254
guguuuauagaaggugaaa

SEQ ID NO: 2522009 - RNA, 19 nt, Artificial Sequence
  Description of Artificial Sequence: Synthetic oligonucleotide
  Antisense strand to SEQ ID NO: 2522008
uuucaccuucuauaaacac

SEQ ID NO: 2522010 - RNA, 19 nt, Artificial Sequence
  Description of Artificial Sequence: Synthetic oligonucleotide
  Sense strand starting at position 1459 of SEQ ID NO: 1888254
ccgagaagcccagguaaga

SEQ ID NO: 2522011 - RNA, 19 nt, Artificial Sequence
  Description of Artificial Sequence: Synthetic oligonucleotide
  Antisense strand to SEQ ID NO: 2522010
ucuuaccugggcuucucgg

SEQ ID NO: 2522012 - RNA, 19 nt, Artificial Sequence
  Description of Artificial Sequence: Synthetic oligonucleotide
  Sense strand starting at position 1561 of SEQ ID NO: 1888254
gguaaauacaaguauuggu

SEQ ID NO: 2522013 - RNA, 19 nt, Artificial Sequence
  Description of Artificial Sequence: Synthetic oligonucleotide
  Antisense strand to SEQ ID NO: 2522012
accaauacuuguauuuacc

SEQ ID NO: 2522014 - RNA, 19 nt, Artificial Sequence
  Description of Artificial Sequence: Synthetic oligonucleotide
  Sense strand starting at position 1705 of SEQ ID NO: 1888254
aggguacguaccgaauaau

SEQ ID NO: 2522015 - RNA, 19 nt, Artificial Sequence
  Description of Artificial Sequence: Synthetic oligonucleotide
  Antisense strand to SEQ ID NO: 2522014
auuauucgguacguacccu

SEQ ID NO: 2522016 - RNA, 19 nt, Artificial Sequence
  Description of Artificial Sequence: Synthetic oligonucleotide
  Sense strand starting at position 1708 of SEQ ID NO: 1888254
guacguaccgaauaauaac

SEQ ID NO: 2522017 - RNA, 19 nt, Artificial Sequence
  Description of Artificial Sequence: Synthetic oligonucleotide
  Antisense strand to SEQ ID NO: 2522016
guuauuauucgguacguac

SEQ ID NO: 2522018 - RNA, 19 nt, Artificial Sequence
  Description of Artificial Sequence: Synthetic oligonucleotide
  Sense strand starting at position 1855 of SEQ ID NO: 1888254
gggugcuauuauccaggga

SEQ ID NO: 2522019 - RNA, 19 nt, Artificial Sequence
  Description of Artificial Sequence: Synthetic oligonucleotide
  Antisense strand to SEQ ID NO: 2522018
ucccuggauaauagcaccc

SEQ ID NO: 2522020 - RNA, 19 nt, Artificial Sequence
  Description of Artificial Sequence: Synthetic oligonucleotide
  Sense strand starting at position 1856 of SEQ ID NO: 1888254
ggugcuauuauccagggaa

SEQ ID NO: 2522021 - RNA, 19 nt, Artificial Sequence
  Description of Artificial Sequence: Synthetic oligonucleotide
  Antisense strand to SEQ ID NO: 2522020
uucccuggauaauagcacc

SEQ ID NO: 2522022 - RNA, 19 nt, Artificial Sequence
  Description of Artificial Sequence: Synthetic oligonucleotide
  Sense strand starting at position 1858 of SEQ ID NO: 1888254
ugcuauuauccagggaaga

SEQ ID NO: 2522023 - RNA, 19 nt, Artificial Sequence
  Description of Artificial Sequence: Synthetic oligonucleotide
  Antisense strand to SEQ ID NO: 2522022
ucuucccuggauaauagca

SEQ ID NO: 2522024 - RNA, 19 nt, Artificial Sequence
  Description of Artificial Sequence: Synthetic oligonucleotide
  Sense strand starting at position 1859 of SEQ ID NO: 1888254
gcuauuauccagggaagaa

SEQ ID NO: 2522025 - RNA, 19 nt, Artificial Sequence
  Description of Artificial Sequence: Synthetic oligonucleotide
  Antisense strand to SEQ ID NO: 2522024
uucuucccuggauaauagc

SEQ ID NO: 2522026 - RNA, 19 nt, Artificial Sequence
  Description of Artificial Sequence: Synthetic oligonucleotide
  Sense strand starting at position 2352 of SEQ ID NO: 1888254
cagagacuccuuugcagac

SEQ ID NO: 2522027 - RNA, 19 nt, Artificial Sequence
  Description of Artificial Sequence: Synthetic oligonucleotide
  Antisense strand to SEQ ID NO: 2522026
gucugcaaaggagucucug

SEQ ID NO: 2522028 - RNA, 19 nt, Artificial Sequence
  Description of Artificial Sequence: Synthetic oligonucleotide
  Sense strand starting at position 2353 of SEQ ID NO: 1888254
agagacuccuuugcagaca

SEQ ID NO: 2522029 - RNA, 19 nt, Artificial Sequence
  Description of Artificial Sequence: Synthetic oligonucleotide
  Antisense strand to SEQ ID NO: 2522028
ugucugcaaaggagucucu

SEQ ID NO: 2522030 - RNA, 19 nt, Artificial Sequence
  Description of Artificial Sequence: Synthetic oligonucleotide
  Sense strand starting at position 2416 of SEQ ID NO: 1888254
agucuacuuguggaaaucu

SEQ ID NO: 2522031 - RNA, 19 nt, Artificial Sequence
  Description of Artificial Sequence: Synthetic oligonucleotide
  Antisense strand to SEQ ID NO: 2522030
agauuuccacaaguagacu

SEQ ID NO: 2522032 - RNA, 19 nt, Artificial Sequence
  Description of Artificial Sequence: Synthetic oligonucleotide
  Sense strand starting at position 2549 of SEQ ID NO: 1888254
cagaguagaucugucuaca

SEQ ID NO: 2522033 - RNA, 19 nt, Artificial Sequence
  Description of Artificial Sequence: Synthetic oligonucleotide
  Antisense strand to SEQ ID NO: 2522032
uguagacagaucuacucug

SEQ ID NO: 2522034 - RNA, 19 nt, Artificial Sequence
  Description of Artificial Sequence: Synthetic oligonucleotide
  Sense strand starting at position 2552 of SEQ ID NO: 1888254
aguagaucugucuacagau

SEQ ID NO: 2522035 - RNA, 19 nt, Artificial Sequence
  Description of Artificial Sequence: Synthetic oligonucleotide
  Antisense strand to SEQ ID NO: 2522034
aucuguagacagaucuacu

SEQ ID NO: 2522036 - RNA, 19 nt, Artificial Sequence
  Description of Artificial Sequence: Synthetic oligonucleotide
  Sense strand starting at position 2564 of SEQ ID NO: 1888254
uacagaucuugggugagca

SEQ ID NO: 2522037 - RNA, 19 nt, Artificial Sequence
  Description of Artificial Sequence: Synthetic oligonucleotide
  Antisense strand to SEQ ID NO: 2522036
ugcucacccaagaucugua

SEQ ID NO: 2522038 - RNA, 19 nt, Artificial Sequence
  Description of Artificial Sequence: Synthetic oligonucleotide
  Sense strand starting at position 2565 of SEQ ID NO: 1888254
acagaucuugggugagcau

SEQ ID NO: 2522039 - RNA, 19 nt, Artificial Sequence
  Description of Artificial Sequence: Synthetic oligonucleotide
  Antisense strand to SEQ ID NO: 2522038
augcucacccaagaucugu

SEQ ID NO: 2522040 - RNA, 19 nt, Artificial Sequence
  Description of Artificial Sequence: Synthetic oligonucleotide
  Sense strand starting at position 2566 of SEQ ID NO: 1888254
cagaucuugggugagcaua

SEQ ID NO: 2522041 - RNA, 19 nt, Artificial Sequence
  Description of Artificial Sequence: Synthetic oligonucleotide
  Antisense strand to SEQ ID NO: 2522040
uaugcucacccaagaucug

SEQ ID NO: 2522042 - RNA, 19 nt, Artificial Sequence
  Description of Artificial Sequence: Synthetic oligonucleotide
  Sense strand starting at position 2580 of SEQ ID NO: 1888254
gcauaaguacuguauauau

SEQ ID NO: 2522043 - RNA, 19 nt, Artificial Sequence
  Description of Artificial Sequence: Synthetic oligonucleotide
  Antisense strand to SEQ ID NO: 2522042
auauauacaguacuuaugc

SEQ ID NO: 2522044 - RNA, 19 nt, Artificial Sequence
  Description of Artificial Sequence: Synthetic oligonucleotide
  Sense strand starting at position 2617 of SEQ ID NO: 1888254
uguuuauagggaugauaca

SEQ ID NO: 2522045 - RNA, 19 nt, Artificial Sequence
  Description of Artificial Sequence: Synthetic oligonucleotide
  Antisense strand to SEQ ID NO: 2522044
uguaucaucccuauaaaca

SEQ ID NO: 2522046 - RNA, 19 nt, Artificial Sequence
  Description of Artificial Sequence: Synthetic oligonucleotide
  Sense strand starting at position 2664 of SEQ ID NO: 1888254
augugagauuagcugaacu

SEQ ID NO: 2522047 - RNA, 19 nt, Artificial Sequence
  Description of Artificial Sequence: Synthetic oligonucleotide
  Antisense strand to SEQ ID NO: 2522046
aguucagcuaaucucacau

SEQ ID NO: 2522048 - RNA, 19 nt, Artificial Sequence
  Description of Artificial Sequence: Synthetic oligonucleotide
  Sense strand starting at position 2740 of SEQ ID NO: 1888254
gcaaucaggcaugaauaca

SEQ ID NO: 2522049 - RNA, 19 nt, Artificial Sequence
  Description of Artificial Sequence: Synthetic oligonucleotide
  Antisense strand to SEQ ID NO: 2522048
uguauucaugccugauugc

SEQ ID NO: 2522050 - RNA, 19 nt, Artificial Sequence
  Description of Artificial Sequence: Synthetic oligonucleotide
  Sense strand starting at position 2798 of SEQ ID NO: 1888254
ugguccuguacugaauaga

SEQ ID NO: 2522051 - RNA, 19 nt, Artificial Sequence
  Description of Artificial Sequence: Synthetic oligonucleotide
  Antisense strand to SEQ ID NO: 2522050
ucuauucaguacaggacca

SEQ ID NO: 2522052 - RNA, 19 nt, Artificial Sequence
  Description of Artificial Sequence: Synthetic oligonucleotide
  Sense strand starting at position 2917 of SEQ ID NO: 1888254
ggccuuccucaggagaauc

SEQ ID NO: 2522053 - RNA, 19 nt, Artificial Sequence
  Description of Artificial Sequence: Synthetic oligonucleotide
  Antisense strand to SEQ ID NO: 2522052
gauucuccugaggaaggcc

SEQ ID NO: 2522054 - RNA, 19 nt, Artificial Sequence
  Description of Artificial Sequence: Synthetic oligonucleotide
  Sense strand starting at position 3119 of SEQ ID NO: 1888254
ggguauuucucucuguuug

SEQ ID NO: 2522055 - RNA, 19 nt, Artificial Sequence
  Description of Artificial Sequence: Synthetic oligonucleotide
  Antisense strand to SEQ ID NO: 2522054
caaacagagagaaauaccc

SEQ ID NO: 2522056 - RNA, 19 nt, Artificial Sequence
  Description of Artificial Sequence: Synthetic oligonucleotide
  Sense strand starting at position 3120 of SEQ ID NO: 1888254
gguauuucucucuguuuga

SEQ ID NO: 2522057 - RNA, 19 nt, Artificial Sequence
  Description of Artificial Sequence: Synthetic oligonucleotide
  Antisense strand to SEQ ID NO: 2522056
ucaaacagagagaaauacc

SEQ ID NO: 2522058 - RNA, 19 nt, Artificial Sequence
  Description of Artificial Sequence: Synthetic oligonucleotide
  Sense strand starting at position 3121 of SEQ ID NO: 1888254
guauuucucucuguuugau

SEQ ID NO: 2522059 - RNA, 19 nt, Artificial Sequence
  Description of Artificial Sequence: Synthetic oligonucleotide
  Antisense strand to SEQ ID NO: 2522058
aucaaacagagagaaauac

SEQ ID NO: 2522060 - RNA, 19 nt, Artificial Sequence
  Description of Artificial Sequence: Synthetic oligonucleotide
  Sense strand starting at position 3283 of SEQ ID NO: 1888254
gagaacuuggauuguguuu

SEQ ID NO: 2522061 - RNA, 19 nt, Artificial Sequence
  Description of Artificial Sequence: Synthetic oligonucleotide
  Antisense strand to SEQ ID NO: 2522060
aaacacaauccaaguucuc

SEQ ID NO: 2522062 - RNA, 19 nt, Artificial Sequence
  Description of Artificial Sequence: Synthetic oligonucleotide
  Sense strand starting at position 3289 of SEQ ID NO: 1888254
uuggauuguguuuagauag

SEQ ID NO: 2522063 - RNA, 19 nt, Artificial Sequence
  Description of Artificial Sequence: Synthetic oligonucleotide
  Antisense strand to SEQ ID NO: 2522062
cuaucuaaacacaauccaa

SEQ ID NO: 2522064 - RNA, 19 nt, Artificial Sequence
  Description of Artificial Sequence: Synthetic oligonucleotide
  Sense strand starting at position 3375 of SEQ ID NO: 1888254
auucgcugcuauuuaauua

SEQ ID NO: 2522065 - RNA, 19 nt, Artificial Sequence
  Description of Artificial Sequence: Synthetic oligonucleotide
  Antisense strand to SEQ ID NO: 2522064
uaauuaaauagcagcgaau

SEQ ID NO: 2522066 - RNA, 19 nt, Artificial Sequence
  Description of Artificial Sequence: Synthetic oligonucleotide
  Sense strand starting at position 3485 of SEQ ID NO: 1888254
gguggacauuuauauauga

SEQ ID NO: 2522067 - RNA, 19 nt, Artificial Sequence
  Description of Artificial Sequence: Synthetic oligonucleotide
  Antisense strand to SEQ ID NO: 2522066
ucauauauaaauguccacc

SEQ ID NO: 2522068 - RNA, 19 nt, Artificial Sequence
  Description of Artificial Sequence: Synthetic oligonucleotide
  Sense strand starting at position 3533 of SEQ ID NO: 1888254
cuuugcaaucugcagacaa

SEQ ID NO: 2522069 - RNA, 19 nt, Artificial Sequence
  Description of Artificial Sequence: Synthetic oligonucleotide
  Antisense strand to SEQ ID NO: 2522068
uugucugcagauugcaaag

SEQ ID NO: 2522070 - RNA, 19 nt, Artificial Sequence
  Description of Artificial Sequence: Synthetic oligonucleotide
  Sense strand starting at position 3568 of SEQ ID NO: 1888254
uuuaguaguggaggagaga

SEQ ID NO: 2522071 - RNA, 19 nt, Artificial Sequence
  Description of Artificial Sequence: Synthetic oligonucleotide
  Antisense strand to SEQ ID NO: 2522070
ucucuccuccacuacuaaa

SEQ ID NO: 2522072 - RNA, 19 nt, Artificial Sequence
  Description of Artificial Sequence: Synthetic oligonucleotide
  Sense strand starting at position 3648 of SEQ ID NO: 1888254
ugcguaguugcgucaaaug

SEQ ID NO: 2522073 - RNA, 19 nt, Artificial Sequence
  Description of Artificial Sequence: Synthetic oligonucleotide
  Antisense strand to SEQ ID NO: 2522072
cauuugacgcaacuacgca

SEQ ID NO: 2522074 - RNA, 19 nt, Artificial Sequence
  Description of Artificial Sequence: Synthetic oligonucleotide
  Sense strand starting at position 3692 of SEQ ID NO: 1888254
gugcuuggacauuaguaau

SEQ ID NO: 2522075 - RNA, 19 nt, Artificial Sequence
  Description of Artificial Sequence: Synthetic oligonucleotide
  Antisense strand to SEQ ID NO: 2522074
auuacuaauguccaagcac

SEQ ID NO: 2522076 - RNA, 19 nt, Artificial Sequence
  Description of Artificial Sequence: Synthetic oligonucleotide
  Sense strand starting at position 3841 of SEQ ID NO: 1888254
auagcuuacugagaaauuu

SEQ ID NO: 2522077 - RNA, 19 nt, Artificial Sequence
  Description of Artificial Sequence: Synthetic oligonucleotide
  Antisense strand to SEQ ID NO: 2522076
aaauuucucaguaagcuau

SEQ ID NO: 2522078 - RNA, 19 nt, Artificial Sequence
  Description of Artificial Sequence: Synthetic oligonucleotide
  Sense strand starting at position 3967 of SEQ ID NO: 1888254
gggcaaugcggugagaaga

SEQ ID NO: 2522079 - RNA, 19 nt, Artificial Sequence
  Description of Artificial Sequence: Synthetic oligonucleotide
  Antisense strand to SEQ ID NO: 2522078
ucuucucaccgcauugccc

SEQ ID NO: 2522080 - RNA, 19 nt, Artificial Sequence
  Description of Artificial Sequence: Synthetic oligonucleotide
  Sense strand starting at position 81 of SEQ ID NO: 1888255
guaguuaccagacaguaaa

SEQ ID NO: 2522081 - RNA, 19 nt, Artificial Sequence
  Description of Artificial Sequence: Synthetic oligonucleotide
  Antisense strand to SEQ ID NO: 2522080
uuuacugucugguaacuac

SEQ ID NO: 2522082 - RNA, 19 nt, Artificial Sequence
  Description of Artificial Sequence: Synthetic oligonucleotide
  Sense strand starting at position 192 of SEQ ID NO: 1888255
ggccaacacugaucaaugu

SEQ ID NO: 2522083 - RNA, 19 nt, Artificial Sequence
  Description of Artificial Sequence: Synthetic oligonucleotide
  Antisense strand to SEQ ID NO: 2522082
acauugaucaguguuggcc

SEQ ID NO: 2522084 - RNA, 19 nt, Artificial Sequence
  Description of Artificial Sequence: Synthetic oligonucleotide
  Sense strand starting at position 199 of SEQ ID NO: 1888255
acugaucaauguguaguua

SEQ ID NO: 2522085 - RNA, 19 nt, Artificial Sequence
  Description of Artificial Sequence: Synthetic oligonucleotide
  Antisense strand to SEQ ID NO: 2522084
uaacuacacauugaucagu

SEQ ID NO: 2522086 - RNA, 19 nt, Artificial Sequence
  Description of Artificial Sequence: Synthetic oligonucleotide
  Sense strand starting at position 200 of SEQ ID NO: 1888255
cugaucaauguguaguuaa

SEQ ID NO: 2522087 - RNA, 19 nt, Artificial Sequence
  Description of Artificial Sequence: Synthetic oligonucleotide
  Antisense strand to SEQ ID NO: 2522086
uuaacuacacauugaucag

SEQ ID NO: 2522088 - RNA, 19 nt, Artificial Sequence
  Description of Artificial Sequence: Synthetic oligonucleotide
  Sense strand starting at position 203 of SEQ ID NO: 1888255
aucaauguguaguuaauca

SEQ ID NO: 2522089 - RNA, 19 nt, Artificial Sequence
  Description of Artificial Sequence: Synthetic oligonucleotide
  Antisense strand to SEQ ID NO: 2522088
ugauuaacuacacauugau

SEQ ID NO: 2522090 - RNA, 19 nt, Artificial Sequence
  Description of Artificial Sequence: Synthetic oligonucleotide
  Sense strand starting at position 207 of SEQ ID NO: 1888255
auguguaguuaaucagcaa

SEQ ID NO: 2522091 - RNA, 19 nt, Artificial Sequence
  Description of Artificial Sequence: Synthetic oligonucleotide
  Antisense strand to SEQ ID NO: 2522090
uugcugauuaacuacacau

SEQ ID NO: 2522092 - RNA, 19 nt, Artificial Sequence
  Description of Artificial Sequence: Synthetic oligonucleotide
  Sense strand starting at position 283 of SEQ ID NO: 1888255
ugacucugcuggucaucaa

SEQ ID NO: 2522093 - RNA, 19 nt, Artificial Sequence
  Description of Artificial Sequence: Synthetic oligonucleotide
  Antisense strand to SEQ ID NO: 2522092
uugaugaccagcagaguca

SEQ ID NO: 2522094 - RNA, 19 nt, Artificial Sequence
  Description of Artificial Sequence: Synthetic oligonucleotide
  Sense strand starting at position 609 of SEQ ID NO: 1888255
aagugagcugccuggagau

SEQ ID NO: 2522095 - RNA, 19 nt, Artificial Sequence
  Description of Artificial Sequence: Synthetic oligonucleotide
  Antisense strand to SEQ ID NO: 2522094
aucuccaggcagcucacuu

SEQ ID NO: 2522096 - RNA, 19 nt, Artificial Sequence
  Description of Artificial Sequence: Synthetic oligonucleotide
  Sense strand starting at position 700 of SEQ ID NO: 1888255
ucaagaaagucacagaaga

SEQ ID NO: 2522097 - RNA, 19 nt, Artificial Sequence
  Description of Artificial Sequence: Synthetic oligonucleotide
  Antisense strand to SEQ ID NO: 2522096
ucuucugugacuuucuuga

SEQ ID NO: 2522098 - RNA, 19 nt, Artificial Sequence
  Description of Artificial Sequence: Synthetic oligonucleotide
  Sense strand starting at position 716 of SEQ ID NO: 1888255
agaccaauuucugguuaaa

SEQ ID NO: 2522099 - RNA, 19 nt, Artificial Sequence
  Description of Artificial Sequence: Synthetic oligonucleotide
  Antisense strand to SEQ ID NO: 2522098
uuuaaccagaaauuggucu

SEQ ID NO: 2522100 - RNA, 19 nt, Artificial Sequence
  Description of Artificial Sequence: Synthetic oligonucleotide
  Sense strand starting at position 854 of SEQ ID NO: 1888255
gcaguuucccuacauuaca

SEQ ID NO: 2522101 - RNA, 19 nt, Artificial Sequence
  Description of Artificial Sequence: Synthetic oligonucleotide
  Antisense strand to SEQ ID NO: 2522100
uguaauguagggaaacugc

SEQ ID NO: 2522102 - RNA, 19 nt, Artificial Sequence
  Description of Artificial Sequence: Synthetic oligonucleotide
  Sense strand starting at position 932 of SEQ ID NO: 1888255
gccauacaguucucggaau

SEQ ID NO: 2522103 - RNA, 19 nt, Artificial Sequence
  Description of Artificial Sequence: Synthetic oligonucleotide
  Antisense strand to SEQ ID NO: 2522102
auuccgagaacuguauggc

SEQ ID NO: 2522104 - RNA, 19 nt, Artificial Sequence
  Description of Artificial Sequence: Synthetic oligonucleotide
  Sense strand starting at position 934 of SEQ ID NO: 1888255
cauacaguucucggaauuc

SEQ ID NO: 2522105 - RNA, 19 nt, Artificial Sequence
  Description of Artificial Sequence: Synthetic oligonucleotide
  Antisense strand to SEQ ID NO: 2522104
gaauuccgagaacuguaug

SEQ ID NO: 2522106 - RNA, 19 nt, Artificial Sequence
  Description of Artificial Sequence: Synthetic oligonucleotide
  Sense strand starting at position 1234 of SEQ ID NO: 1888255
ggcaaaggagucuggaauu

SEQ ID NO: 2522107 - RNA, 19 nt, Artificial Sequence
  Description of Artificial Sequence: Synthetic oligonucleotide
  Antisense strand to SEQ ID NO: 2522106
aauuccagacuccuuugcc

SEQ ID NO: 2522108 - RNA, 19 nt, Artificial Sequence
  Description of Artificial Sequence: Synthetic oligonucleotide
  Sense strand starting at position 1268 of SEQ ID NO: 1888255
cugggagcguccuccauuu

SEQ ID NO: 2522109 - RNA, 19 nt, Artificial Sequence
  Description of Artificial Sequence: Synthetic oligonucleotide
  Antisense strand to SEQ ID NO: 2522108
aaauggaggacgcucccag

SEQ ID NO: 2522110 - RNA, 19 nt, Artificial Sequence
  Description of Artificial Sequence: Synthetic oligonucleotide
  Sense strand starting at position 1292 of SEQ ID NO: 1888255
ucagccaacuggucuguaa

SEQ ID NO: 2522111 - RNA, 19 nt, Artificial Sequence
  Description of Artificial Sequence: Synthetic oligonucleotide
  Antisense strand to SEQ ID NO: 2522110
uuacagaccaguuggcuga

SEQ ID NO: 2522112 - RNA, 19 nt, Artificial Sequence
  Description of Artificial Sequence: Synthetic oligonucleotide
  Sense strand starting at position 1379 of SEQ ID NO: 1888255
ggcacaaugaccgacacuu

SEQ ID NO: 2522113 - RNA, 19 nt, Artificial Sequence
  Description of Artificial Sequence: Synthetic oligonucleotide
  Antisense strand to SEQ ID NO: 2522112
aagugucggucauugugcc

SEQ ID NO: 2522114 - RNA, 19 nt, Artificial Sequence
  Description of Artificial Sequence: Synthetic oligonucleotide
  Sense strand starting at position 2210 of SEQ ID NO: 1888255
gaagacagccaucagucua

SEQ ID NO: 2522115 - RNA, 19 nt, Artificial Sequence
  Description of Artificial Sequence: Synthetic oligonucleotide
  Antisense strand to SEQ ID NO: 2522114
uagacugauggcugucuuc

SEQ ID NO: 2522116 - RNA, 19 nt, Artificial Sequence
  Description of Artificial Sequence: Synthetic oligonucleotide
  Sense strand starting at position 2280 of SEQ ID NO: 1888255
gccuuugaucuuggacuuu

SEQ ID NO: 2522117 - RNA, 19 nt, Artificial Sequence
  Description of Artificial Sequence: Synthetic oligonucleotide
  Antisense strand to SEQ ID NO: 2522116
aaaguccaagaucaaaggc

SEQ ID NO: 2522118 - RNA, 19 nt, Artificial Sequence
  Description of Artificial Sequence: Synthetic oligonucleotide
  Sense strand starting at position 2395 of SEQ ID NO: 1888255
gcaaauaggucagcuugga

SEQ ID NO: 2522119 - RNA, 19 nt, Artificial Sequence
  Description of Artificial Sequence: Synthetic oligonucleotide
  Antisense strand to SEQ ID NO: 2522118
uccaagcugaccuauuugc

SEQ ID NO: 2522120 - RNA, 19 nt, Artificial Sequence
  Description of Artificial Sequence: Synthetic oligonucleotide
  Sense strand starting at position 2509 of SEQ ID NO: 1888255
gugugucugcagucuuguu

SEQ ID NO: 2522121 - RNA, 19 nt, Artificial Sequence
  Description of Artificial Sequence: Synthetic oligonucleotide
  Antisense strand to SEQ ID NO: 2522120
aacaagacugcagacacac

SEQ ID NO: 2522122 - RNA, 19 nt, Artificial Sequence
  Description of Artificial Sequence: Synthetic oligonucleotide
  Sense strand starting at position 2555 of SEQ ID NO: 1888255
agggucagccauugagagu

SEQ ID NO: 2522123 - RNA, 19 nt, Artificial Sequence
  Description of Artificial Sequence: Synthetic oligonucleotide
  Antisense strand to SEQ ID NO: 2522122
acucucaauggcugacccu

SEQ ID NO: 2522124 - RNA, 19 nt, Artificial Sequence
  Description of Artificial Sequence: Synthetic oligonucleotide
  Sense strand starting at position 2556 of SEQ ID NO: 1888255
gggucagccauugagagua

SEQ ID NO: 2522125 - RNA, 19 nt, Artificial Sequence
  Description of Artificial Sequence: Synthetic oligonucleotide
  Antisense strand to SEQ ID NO: 2522124
uacucucaauggcugaccc

SEQ ID NO: 2522126 - RNA, 19 nt, Artificial Sequence
  Description of Artificial Sequence: Synthetic oligonucleotide
  Sense strand starting at position 2566 of SEQ ID NO: 1888255
uugagaguagacuguucuu

SEQ ID NO: 2522127 - RNA, 19 nt, Artificial Sequence
  Description of Artificial Sequence: Synthetic oligonucleotide
  Antisense strand to SEQ ID NO: 2522126
aagaacagucuacucucaa

SEQ ID NO: 2522128 - RNA, 19 nt, Artificial Sequence
  Description of Artificial Sequence: Synthetic oligonucleotide
  Sense strand starting at position 2671 of SEQ ID NO: 1888255
gccagugucccagaugaga

SEQ ID NO: 2522129 - RNA, 19 nt, Artificial Sequence
  Description of Artificial Sequence: Synthetic oligonucleotide
  Antisense strand to SEQ ID NO: 2522128
ucucaucugggacacuggc

SEQ ID NO: 2522130 - RNA, 19 nt, Artificial Sequence
  Description of Artificial Sequence: Synthetic oligonucleotide
  Sense strand starting at position 2685 of SEQ ID NO: 1888255
ugagaaagucaacguggau

SEQ ID NO: 2522131 - RNA, 19 nt, Artificial Sequence
  Description of Artificial Sequence: Synthetic oligonucleotide
  Antisense strand to SEQ ID NO: 2522130
auccacguugacuuucuca

SEQ ID NO: 2522132 - RNA, 19 nt, Artificial Sequence
  Description of Artificial Sequence: Synthetic oligonucleotide
  Sense strand starting at position 2807 of SEQ ID NO: 1888255
auagaauguguuggugaua

SEQ ID NO: 2522133 - RNA, 19 nt, Artificial Sequence
  Description of Artificial Sequence: Synthetic oligonucleotide
  Antisense strand to SEQ ID NO: 2522132
uaucaccaacacauucuau

SEQ ID NO: 2522134 - RNA, 19 nt, Artificial Sequence
  Description of Artificial Sequence: Synthetic oligonucleotide
  Sense strand starting at position 2808 of SEQ ID NO: 1888255
uagaauguguuggugauag

SEQ ID NO: 2522135 - RNA, 19 nt, Artificial Sequence
  Description of Artificial Sequence: Synthetic oligonucleotide
  Antisense strand to SEQ ID NO: 2522134
cuaucaccaacacauucua

SEQ ID NO: 2522136 - RNA, 19 nt, Artificial Sequence
  Description of Artificial Sequence: Synthetic oligonucleotide
  Sense strand starting at position 2810 of SEQ ID NO: 1888255
gaauguguuggugauagaa

SEQ ID NO: 2522137 - RNA, 19 nt, Artificial Sequence
  Description of Artificial Sequence: Synthetic oligonucleotide
  Antisense strand to SEQ ID NO: 2522136
uucuaucaccaacacauuc

SEQ ID NO: 2522138 - RNA, 19 nt, Artificial Sequence
  Description of Artificial Sequence: Synthetic oligonucleotide
  Sense strand starting at position 3014 of SEQ ID NO: 1888255
gcuuauagugagggacaua

SEQ ID NO: 2522139 - RNA, 19 nt, Artificial Sequence
  Description of Artificial Sequence: Synthetic oligonucleotide
  Antisense strand to SEQ ID NO: 2522138
uaugucccucacuauaagc

SEQ ID NO: 2522140 - RNA, 19 nt, Artificial Sequence
  Description of Artificial Sequence: Synthetic oligonucleotide
  Sense strand starting at position 3026 of SEQ ID NO: 1888255
ggacauaugccacguuuac

SEQ ID NO: 2522141 - RNA, 19 nt, Artificial Sequence
  Description of Artificial Sequence: Synthetic oligonucleotide
  Antisense strand to SEQ ID NO: 2522140
guaaacguggcauaugucc

SEQ ID NO: 2522142 - RNA, 19 nt, Artificial Sequence
  Description of Artificial Sequence: Synthetic oligonucleotide
  Sense strand starting at position 3145 of SEQ ID NO: 1888255
caucauagccuaugguuga

SEQ ID NO: 2522143 - RNA, 19 nt, Artificial Sequence
  Description of Artificial Sequence: Synthetic oligonucleotide
  Antisense strand to SEQ ID NO: 2522142
ucaaccauaggcuaugaug

SEQ ID NO: 2522144 - RNA, 19 nt, Artificial Sequence
  Description of Artificial Sequence: Synthetic oligonucleotide
  Sense strand starting at position 3148 of SEQ ID NO: 1888255
cauagccuaugguugagaa

SEQ ID NO: 2522145 - RNA, 19 nt, Artificial Sequence
  Description of Artificial Sequence: Synthetic oligonucleotide
  Antisense strand to SEQ ID NO: 2522144
uucucaaccauaggcuaug

SEQ ID NO: 2522146 - RNA, 19 nt, Artificial Sequence
  Description of Artificial Sequence: Synthetic oligonucleotide
  Sense strand starting at position 3168 of SEQ ID NO: 1888255
cagagaugccagggaugau

SEQ ID NO: 2522147 - RNA, 19 nt, Artificial Sequence
  Description of Artificial Sequence: Synthetic oligonucleotide
  Antisense strand to SEQ ID NO: 2522146
aucaucccuggcaucucug

SEQ ID NO: 2522148 - RNA, 19 nt, Artificial Sequence
  Description of Artificial Sequence: Synthetic oligonucleotide
  Sense strand starting at position 3267 of SEQ ID NO: 1888255
agagucacccucugucaua

SEQ ID NO: 2522149 - RNA, 19 nt, Artificial Sequence
  Description of Artificial Sequence: Synthetic oligonucleotide
  Antisense strand to SEQ ID NO: 2522148
uaugacagagggugacucu

SEQ ID NO: 2522150 - RNA, 19 nt, Artificial Sequence
  Description of Artificial Sequence: Synthetic oligonucleotide
  Sense strand starting at position 3425 of SEQ ID NO: 1888255
ugugcacggucauuagaaa

SEQ ID NO: 2522151 - RNA, 19 nt, Artificial Sequence
  Description of Artificial Sequence: Synthetic oligonucleotide
  Antisense strand to SEQ ID NO: 2522150
uuucuaaugaccgugcaca

SEQ ID NO: 2522152 - RNA, 19 nt, Artificial Sequence
  Description of Artificial Sequence: Synthetic oligonucleotide
  Sense strand starting at position 3683 of SEQ ID NO: 1888255
aguagauugcaccauauug

SEQ ID NO: 2522153 - RNA, 19 nt, Artificial Sequence
  Description of Artificial Sequence: Synthetic oligonucleotide
  Antisense strand to SEQ ID NO: 2522152
caauauggugcaaucuacu

SEQ ID NO: 2522154 - RNA, 19 nt, Artificial Sequence
  Description of Artificial Sequence: Synthetic oligonucleotide
  Sense strand starting at position 3730 of SEQ ID NO: 1888255
aggugaucugccugacauc

SEQ ID NO: 2522155 - RNA, 19 nt, Artificial Sequence
  Description of Artificial Sequence: Synthetic oligonucleotide
  Antisense strand to SEQ ID NO: 2522154
gaugucaggcagaucaccu

SEQ ID NO: 2522156 - RNA, 19 nt, Artificial Sequence
  Description of Artificial Sequence: Synthetic oligonucleotide
  Sense strand starting at position 3905 of SEQ ID NO: 1888255
ugaggucccucaucuaauu

SEQ ID NO: 2522157 - RNA, 19 nt, Artificial Sequence
  Description of Artificial Sequence: Synthetic oligonucleotide
  Antisense strand to SEQ ID NO: 2522156
aauuagaugagggaccuca

SEQ ID NO: 2522158 - RNA, 19 nt, Artificial Sequence
  Description of Artificial Sequence: Synthetic oligonucleotide
  Sense strand starting at position 3935 of SEQ ID NO: 1888255
uggguuaggacuuguugag

SEQ ID NO: 2522159 - RNA, 19 nt, Artificial Sequence
  Description of Artificial Sequence: Synthetic oligonucleotide
  Antisense strand to SEQ ID NO: 2522158
cucaacaaguccuaaccca

SEQ ID NO: 2522160 - RNA, 19 nt, Artificial Sequence
  Description of Artificial Sequence: Synthetic oligonucleotide
  Sense strand starting at position 432 of SEQ ID NO: 1888256
ccucauagacccuggugaa

SEQ ID NO: 2522161 - RNA, 19 nt, Artificial Sequence
  Description of Artificial Sequence: Synthetic oligonucleotide
  Antisense strand to SEQ ID NO: 2522160
uucaccagggucuaugagg

SEQ ID NO: 2522162 - RNA, 19 nt, Artificial Sequence
  Description of Artificial Sequence: Synthetic oligonucleotide
  Sense strand starting at position 444 of SEQ ID NO: 1888256
uggugaacgccucauggaa

SEQ ID NO: 2522163 - RNA, 19 nt, Artificial Sequence
  Description of Artificial Sequence: Synthetic oligonucleotide
  Antisense strand to SEQ ID NO: 2522162
uuccaugaggcguucacca

SEQ ID NO: 2522164 - RNA, 19 nt, Artificial Sequence
  Description of Artificial Sequence: Synthetic oligonucleotide
  Sense strand starting at position 534 of SEQ ID NO: 1888256
gugagaaggaggugugaga

SEQ ID NO: 2522165 - RNA, 19 nt, Artificial Sequence
  Description of Artificial Sequence: Synthetic oligonucleotide
  Antisense strand to SEQ ID NO: 2522164
ucucacaccuccuucucac

SEQ ID NO: 2522166 - RNA, 19 nt, Artificial Sequence
  Description of Artificial Sequence: Synthetic oligonucleotide
  Sense strand starting at position 547 of SEQ ID NO: 1888256
gugagaaagcuccagaguu

SEQ ID NO: 2522167 - RNA, 19 nt, Artificial Sequence
  Description of Artificial Sequence: Synthetic oligonucleotide
  Antisense strand to SEQ ID NO: 2522166
aacucuggagcuuucucac

SEQ ID NO: 2522168 - RNA, 19 nt, Artificial Sequence
  Description of Artificial Sequence: Synthetic oligonucleotide
  Sense strand starting at position 600 of SEQ ID NO: 1888256
gaagcacuuuccgcgauuu

SEQ ID NO: 2522169 - RNA, 19 nt, Artificial Sequence
  Description of Artificial Sequence: Synthetic oligonucleotide
  Antisense strand to SEQ ID NO: 2522168
aaaucgcggaaagugcuuc

SEQ ID NO: 2522170 - RNA, 19 nt, Artificial Sequence
  Description of Artificial Sequence: Synthetic oligonucleotide
  Sense strand starting at position 602 of SEQ ID NO: 1888256
agcacuuuccgcgauuucu

SEQ ID NO: 2522171 - RNA, 19 nt, Artificial Sequence
  Description of Artificial Sequence: Synthetic oligonucleotide
  Antisense strand to SEQ ID NO: 2522170
agaaaucgcggaaagugcu

SEQ ID NO: 2522172 - RNA, 19 nt, Artificial Sequence
  Description of Artificial Sequence: Synthetic oligonucleotide
  Sense strand starting at position 613 of SEQ ID NO: 1888256
cgauuucucucccugcacu

SEQ ID NO: 2522173 - RNA, 19 nt, Artificial Sequence
  Description of Artificial Sequence: Synthetic oligonucleotide
  Antisense strand to SEQ ID NO: 2522172
agugcagggagagaaaucg

SEQ ID NO: 2522174 - RNA, 19 nt, Artificial Sequence
  Description of Artificial Sequence: Synthetic oligonucleotide
  Sense strand starting at position 708 of SEQ ID NO: 1888256
gcguguuagcugccagauc

SEQ ID NO: 2522175 - RNA, 19 nt, Artificial Sequence
  Description of Artificial Sequence: Synthetic oligonucleotide
  Antisense strand to SEQ ID NO: 2522174
gaucuggcagcuaacacgc

SEQ ID NO: 2522176 - RNA, 19 nt, Artificial Sequence
  Description of Artificial Sequence: Synthetic oligonucleotide
  Sense strand starting at position 877 of SEQ ID NO: 1888256
accaguucugaguaucuac

SEQ ID NO: 2522177 - RNA, 19 nt, Artificial Sequence
  Description of Artificial Sequence: Synthetic oligonucleotide
  Antisense strand to SEQ ID NO: 2522176
guagauacucagaacuggu

SEQ ID NO: 2522178 - RNA, 19 nt, Artificial Sequence
  Description of Artificial Sequence: Synthetic oligonucleotide
  Sense strand starting at position 1004 of SEQ ID NO: 1888256
gaaggaacuuagcuagcau

SEQ ID NO: 2522179 - RNA, 19 nt, Artificial Sequence
  Description of Artificial Sequence: Synthetic oligonucleotide
  Antisense strand to SEQ ID NO: 2522178
augcuagcuaaguuccuuc

SEQ ID NO: 2522180 - RNA, 19 nt, Artificial Sequence
  Description of Artificial Sequence: Synthetic oligonucleotide
  Sense strand starting at position 1077 of SEQ ID NO: 1888256
gccagacaguucucagaac

SEQ ID NO: 2522181 - RNA, 19 nt, Artificial Sequence
  Description of Artificial Sequence: Synthetic oligonucleotide
  Antisense strand to SEQ ID NO: 2522180
guucugagaacugucuggc

SEQ ID NO: 2522182 - RNA, 19 nt, Artificial Sequence
  Description of Artificial Sequence: Synthetic oligonucleotide
  Sense strand starting at position 1412 of SEQ ID NO: 1888256
acagcuaacuggucuguaa

SEQ ID NO: 2522183 - RNA, 19 nt, Artificial Sequence
  Description of Artificial Sequence: Synthetic oligonucleotide
  Antisense strand to SEQ ID NO: 2522182
uuacagaccaguuagcugu

SEQ ID NO: 2522184 - RNA, 19 nt, Artificial Sequence
  Description of Artificial Sequence: Synthetic oligonucleotide
  Sense strand starting at position 1473 of SEQ ID NO: 1888256
aaacgaguuaacggucuca

SEQ ID NO: 2522185 - RNA, 19 nt, Artificial Sequence
  Description of Artificial Sequence: Synthetic oligonucleotide
  Antisense strand to SEQ ID NO: 2522184
ugagaccguuaacucguuu

SEQ ID NO: 2522186 - RNA, 19 nt, Artificial Sequence
  Description of Artificial Sequence: Synthetic oligonucleotide
  Sense strand starting at position 1512 of SEQ ID NO: 1888256
gcacuuuguaggcaacagu

SEQ ID NO: 2522187 - RNA, 19 nt, Artificial Sequence
  Description of Artificial Sequence: Synthetic oligonucleotide
  Antisense strand to SEQ ID NO: 2522186
acuguugccuacaaagugc

SEQ ID NO: 2522188 - RNA, 19 nt, Artificial Sequence
  Description of Artificial Sequence: Synthetic oligonucleotide
  Sense strand starting at position 1713 of SEQ ID NO: 1888256
agugucuuucccgaggaca

SEQ ID NO: 2522189 - RNA, 19 nt, Artificial Sequence
  Description of Artificial Sequence: Synthetic oligonucleotide
  Antisense strand to SEQ ID NO: 2522188
uguccucgggaaagacacu

SEQ ID NO: 2522190 - RNA, 19 nt, Artificial Sequence
  Description of Artificial Sequence: Synthetic oligonucleotide
  Sense strand starting at position 1930 of SEQ ID NO: 1888256
aaucaagaugucugcagau

SEQ ID NO: 2522191 - RNA, 19 nt, Artificial Sequence
  Description of Artificial Sequence: Synthetic oligonucleotide
  Antisense strand to SEQ ID NO: 2522190
aucugcagacaucuugauu

SEQ ID NO: 2522192 - RNA, 19 nt, Artificial Sequence
  Description of Artificial Sequence: Synthetic oligonucleotide
  Sense strand starting at position 1940 of SEQ ID NO: 1888256
ucugcagauuucgagagau

SEQ ID NO: 2522193 - RNA, 19 nt, Artificial Sequence
  Description of Artificial Sequence: Synthetic oligonucleotide
  Antisense strand to SEQ ID NO: 2522192
aucucucgaaaucugcaga

SEQ ID NO: 2522194 - RNA, 19 nt, Artificial Sequence
  Description of Artificial Sequence: Synthetic oligonucleotide
  Sense strand starting at position 2228 of SEQ ID NO: 1888256
guuuguucugaagauguuc

SEQ ID NO: 2522195 - RNA, 19 nt, Artificial Sequence
  Description of Artificial Sequence: Synthetic oligonucleotide
  Antisense strand to SEQ ID NO: 2522194
gaacaucuucagaacaaac

SEQ ID NO: 2522196 - RNA, 19 nt, Artificial Sequence
  Description of Artificial Sequence: Synthetic oligonucleotide
  Sense strand starting at position 2236 of SEQ ID NO: 1888256
ugaagauguuccuugguca

SEQ ID NO: 2522197 - RNA, 19 nt, Artificial Sequence
  Description of Artificial Sequence: Synthetic oligonucleotide
  Antisense strand to SEQ ID NO: 2522196
ugaccaaggaacaucuuca

SEQ ID NO: 2522198 - RNA, 19 nt, Artificial Sequence
  Description of Artificial Sequence: Synthetic oligonucleotide
  Sense strand starting at position 2237 of SEQ ID NO: 1888256
gaagauguuccuuggucac

SEQ ID NO: 2522199 - RNA, 19 nt, Artificial Sequence
  Description of Artificial Sequence: Synthetic oligonucleotide
  Antisense strand to SEQ ID NO: 2522198
gugaccaaggaacaucuuc

SEQ ID NO: 2522200 - RNA, 19 nt, Artificial Sequence
  Description of Artificial Sequence: Synthetic oligonucleotide
  Sense strand starting at position 2240 of SEQ ID NO: 1888256
gauguuccuuggucacuga

SEQ ID NO: 2522201 - RNA, 19 nt, Artificial Sequence
  Description of Artificial Sequence: Synthetic oligonucleotide
  Antisense strand to SEQ ID NO: 2522200
ucagugaccaaggaacauc

SEQ ID NO: 2522202 - RNA, 19 nt, Artificial Sequence
  Description of Artificial Sequence: Synthetic oligonucleotide
  Sense strand starting at position 2337 of SEQ ID NO: 1888256
gacuucuuucugcaagggu

SEQ ID NO: 2522203 - RNA, 19 nt, Artificial Sequence
  Description of Artificial Sequence: Synthetic oligonucleotide
  Antisense strand to SEQ ID NO: 2522202
acccuugcagaaagaaguc

SEQ ID NO: 2522204 - RNA, 19 nt, Artificial Sequence
  Description of Artificial Sequence: Synthetic oligonucleotide
  Sense strand starting at position 2358 of SEQ ID NO: 1888256
aaaggcaucugucuuugau

SEQ ID NO: 2522205 - RNA, 19 nt, Artificial Sequence
  Description of Artificial Sequence: Synthetic oligonucleotide
  Antisense strand to SEQ ID NO: 2522204
aucaaagacagaugccuuu

SEQ ID NO: 2522206 - RNA, 19 nt, Artificial Sequence
  Description of Artificial Sequence: Synthetic oligonucleotide
  Sense strand starting at position 2470 of SEQ ID NO: 1888256
gaccgagaugacugaguca

SEQ ID NO: 2522207 - RNA, 19 nt, Artificial Sequence
  Description of Artificial Sequence: Synthetic oligonucleotide
  Antisense strand to SEQ ID NO: 2522206
ugacucagucaucucgguc

SEQ ID NO: 2522208 - RNA, 19 nt, Artificial Sequence
  Description of Artificial Sequence: Synthetic oligonucleotide
  Sense strand starting at position 2482 of SEQ ID NO: 1888256
ugagucauggccugagacu

SEQ ID NO: 2522209 - RNA, 19 nt, Artificial Sequence
  Description of Artificial Sequence: Synthetic oligonucleotide
  Antisense strand to SEQ ID NO: 2522208
agucucaggccaugacuca

SEQ ID NO: 2522210 - RNA, 19 nt, Artificial Sequence
  Description of Artificial Sequence: Synthetic oligonucleotide
  Sense strand starting at position 2483 of SEQ ID NO: 1888256
gagucauggccugagacug

SEQ ID NO: 2522211 - RNA, 19 nt, Artificial Sequence
  Description of Artificial Sequence: Synthetic oligonucleotide
  Antisense strand to SEQ ID NO: 2522210
cagucucaggccaugacuc

SEQ ID NO: 2522212 - RNA, 19 nt, Artificial Sequence
  Description of Artificial Sequence: Synthetic oligonucleotide
  Sense strand starting at position 2499 of SEQ ID NO: 1888256
cuggaaugugagcgugaga

SEQ ID NO: 2522213 - RNA, 19 nt, Artificial Sequence
  Description of Artificial Sequence: Synthetic oligonucleotide
  Antisense strand to SEQ ID NO: 2522212
ucucacgcucacauuccag

SEQ ID NO: 2522214 - RNA, 19 nt, Artificial Sequence
  Description of Artificial Sequence: Synthetic oligonucleotide
  Sense strand starting at position 2501 of SEQ ID NO: 1888256
ggaaugugagcgugagaag

SEQ ID NO: 2522215 - RNA, 19 nt, Artificial Sequence
  Description of Artificial Sequence: Synthetic oligonucleotide
  Antisense strand to SEQ ID NO: 2522214
cuucucacgcucacauucc

SEQ ID NO: 2522216 - RNA, 19 nt, Artificial Sequence
  Description of Artificial Sequence: Synthetic oligonucleotide
  Sense strand starting at position 2502 of SEQ ID NO: 1888256
gaaugugagcgugagaaga

SEQ ID NO: 2522217 - RNA, 19 nt, Artificial Sequence
  Description of Artificial Sequence: Synthetic oligonucleotide
  Antisense strand to SEQ ID NO: 2522216
ucuucucacgcucacauuc

SEQ ID NO: 2522218 - RNA, 19 nt, Artificial Sequence
  Description of Artificial Sequence: Synthetic oligonucleotide
  Sense strand starting at position 2898 of SEQ ID NO: 1888256
gucagauucuugguacuca

SEQ ID NO: 2522219 - RNA, 19 nt, Artificial Sequence
  Description of Artificial Sequence: Synthetic oligonucleotide
  Antisense strand to SEQ ID NO: 2522218
ugaguaccaagaaucugac

SEQ ID NO: 2522220 - RNA, 19 nt, Artificial Sequence
  Description of Artificial Sequence: Synthetic oligonucleotide
  Sense strand starting at position 2902 of SEQ ID NO: 1888256
gauucuugguacucaauag

SEQ ID NO: 2522221 - RNA, 19 nt, Artificial Sequence
  Description of Artificial Sequence: Synthetic oligonucleotide
  Antisense strand to SEQ ID NO: 2522220
cuauugaguaccaagaauc

SEQ ID NO: 2522222 - RNA, 19 nt, Artificial Sequence
  Description of Artificial Sequence: Synthetic oligonucleotide
  Sense strand starting at position 2906 of SEQ ID NO: 1888256
cuugguacucaauagguca

SEQ ID NO: 2522223 - RNA, 19 nt, Artificial Sequence
  Description of Artificial Sequence: Synthetic oligonucleotide
  Antisense strand to SEQ ID NO: 2522222
ugaccuauugaguaccaag

SEQ ID NO: 2522224 - RNA, 19 nt, Artificial Sequence
  Description of Artificial Sequence: Synthetic oligonucleotide
  Sense strand starting at position 3012 of SEQ ID NO: 1888256
gggagaggcccaugggauu

SEQ ID NO: 2522225 - RNA, 19 nt, Artificial Sequence
  Description of Artificial Sequence: Synthetic oligonucleotide
  Antisense strand to SEQ ID NO: 2522224
aaucccaugggccucuccc

SEQ ID NO: 2522226 - RNA, 19 nt, Artificial Sequence
  Description of Artificial Sequence: Synthetic oligonucleotide
  Sense strand starting at position 3300 of SEQ ID NO: 1888256
agacauguuugcuuccacu

SEQ ID NO: 2522227 - RNA, 19 nt, Artificial Sequence
  Description of Artificial Sequence: Synthetic oligonucleotide
  Antisense strand to SEQ ID NO: 2522226
aguggaagcaaacaugucu

SEQ ID NO: 2522228 - RNA, 19 nt, Artificial Sequence
  Description of Artificial Sequence: Synthetic oligonucleotide
  Sense strand starting at position 3541 of SEQ ID NO: 1888256
gcuguuacucuccauguga

SEQ ID NO: 2522229 - RNA, 19 nt, Artificial Sequence
  Description of Artificial Sequence: Synthetic oligonucleotide
  Antisense strand to SEQ ID NO: 2522228
ucacauggagaguaacagc

SEQ ID NO: 2522230 - RNA, 19 nt, Artificial Sequence
  Description of Artificial Sequence: Synthetic oligonucleotide
  Sense strand starting at position 3661 of SEQ ID NO: 1888256
uggaaugauuuauaucaag

SEQ ID NO: 2522231 - RNA, 19 nt, Artificial Sequence
  Description of Artificial Sequence: Synthetic oligonucleotide
  Antisense strand to SEQ ID NO: 2522230
cuugauauaaaucauucca

SEQ ID NO: 2522232 - RNA, 19 nt, Artificial Sequence
  Description of Artificial Sequence: Synthetic oligonucleotide
  Sense strand starting at position 3724 of SEQ ID NO: 1888256
uauaguauuucugagaaag

SEQ ID NO: 2522233 - RNA, 19 nt, Artificial Sequence
  Description of Artificial Sequence: Synthetic oligonucleotide
  Antisense strand to SEQ ID NO: 2522232
cuuucucagaaauacuaua

SEQ ID NO: 2522234 - RNA, 19 nt, Artificial Sequence
  Description of Artificial Sequence: Synthetic oligonucleotide
  Sense strand starting at position 3726 of SEQ ID NO: 1888256
uaguauuucugagaaagcu

SEQ ID NO: 2522235 - RNA, 19 nt, Artificial Sequence
  Description of Artificial Sequence: Synthetic oligonucleotide
  Antisense strand to SEQ ID NO: 2522234
agcuuucucagaaauacua

SEQ ID NO: 2522236 - RNA, 19 nt, Artificial Sequence
  Description of Artificial Sequence: Synthetic oligonucleotide
  Sense strand starting at position 3759 of SEQ ID NO: 1888256
ccguaaggacucugggauu

SEQ ID NO: 2522237 - RNA, 19 nt, Artificial Sequence
  Description of Artificial Sequence: Synthetic oligonucleotide
  Antisense strand to SEQ ID NO: 2522236
aaucccagaguccuuacgg

SEQ ID NO: 2522238 - RNA, 19 nt, Artificial Sequence
  Description of Artificial Sequence: Synthetic oligonucleotide
  Sense strand starting at position 3941 of SEQ ID NO: 1888256
ugcauuccagguugacaga

SEQ ID NO: 2522239 - RNA, 19 nt, Artificial Sequence
  Description of Artificial Sequence: Synthetic oligonucleotide
  Antisense strand to SEQ ID NO: 2522238
ucugucaaccuggaaugca

SEQ ID NO: 2522240 - RNA, 19 nt, Artificial Sequence
  Description of Artificial Sequence: Synthetic oligonucleotide
  Sense strand starting at position 376 of SEQ ID NO: 1888257
ccucauagacccuggugaa

SEQ ID NO: 2522241 - RNA, 19 nt, Artificial Sequence
  Description of Artificial Sequence: Synthetic oligonucleotide
  Antisense strand to SEQ ID NO: 2522240
uucaccagggucuaugagg

SEQ ID NO: 2522242 - RNA, 19 nt, Artificial Sequence
  Description of Artificial Sequence: Synthetic oligonucleotide
  Sense strand starting at position 388 of SEQ ID NO: 1888257
uggugaacgccucauggaa

SEQ ID NO: 2522243 - RNA, 19 nt, Artificial Sequence
  Description of Artificial Sequence: Synthetic oligonucleotide
  Antisense strand to SEQ ID NO: 2522242
uuccaugaggcguucacca

SEQ ID NO: 2522244 - RNA, 19 nt, Artificial Sequence
  Description of Artificial Sequence: Synthetic oligonucleotide
  Sense strand starting at position 478 of SEQ ID NO: 1888257
gugagaaggaggugugaga

SEQ ID NO: 2522245 - RNA, 19 nt, Artificial Sequence
  Description of Artificial Sequence: Synthetic oligonucleotide
  Antisense strand to SEQ ID NO: 2522244
ucucacaccuccuucucac

SEQ ID NO: 2522246 - RNA, 19 nt, Artificial Sequence
  Description of Artificial Sequence: Synthetic oligonucleotide
  Sense strand starting at position 491 of SEQ ID NO: 1888257
gugagaaagcuccagaguu

SEQ ID NO: 2522247 - RNA, 19 nt, Artificial Sequence
  Description of Artificial Sequence: Synthetic oligonucleotide
  Antisense strand to SEQ ID NO: 2522246
aacucuggagcuuucucac

SEQ ID NO: 2522248 - RNA, 19 nt, Artificial Sequence
  Description of Artificial Sequence: Synthetic oligonucleotide
  Sense strand starting at position 544 of SEQ ID NO: 1888257
gaagcacuuuccgcgauuu

SEQ ID NO: 2522249 - RNA, 19 nt, Artificial Sequence
  Description of Artificial Sequence: Synthetic oligonucleotide
  Antisense strand to SEQ ID NO: 2522248
aaaucgcggaaagugcuuc

SEQ ID NO: 2522250 - RNA, 19 nt, Artificial Sequence
  Description of Artificial Sequence: Synthetic oligonucleotide
  Sense strand starting at position 546 of SEQ ID NO: 1888257
agcacuuuccgcgauuucu

SEQ ID NO: 2522251 - RNA, 19 nt, Artificial Sequence
  Description of Artificial Sequence: Synthetic oligonucleotide
  Antisense strand to SEQ ID NO: 2522250
agaaaucgcggaaagugcu

SEQ ID NO: 2522252 - RNA, 19 nt, Artificial Sequence
  Description of Artificial Sequence: Synthetic oligonucleotide
  Sense strand starting at position 557 of SEQ ID NO: 1888257
cgauuucucucccugcacu

SEQ ID NO: 2522253 - RNA, 19 nt, Artificial Sequence
  Description of Artificial Sequence: Synthetic oligonucleotide
  Antisense strand to SEQ ID NO: 2522252
agugcagggagagaaaucg

SEQ ID NO: 2522254 - RNA, 19 nt, Artificial Sequence
  Description of Artificial Sequence: Synthetic oligonucleotide
  Sense strand starting at position 652 of SEQ ID NO: 1888257
gcguguuagcugccagauc

SEQ ID NO: 2522255 - RNA, 19 nt, Artificial Sequence
  Description of Artificial Sequence: Synthetic oligonucleotide
  Antisense strand to SEQ ID NO: 2522254
gaucuggcagcuaacacgc

SEQ ID NO: 2522256 - RNA, 19 nt, Artificial Sequence
  Description of Artificial Sequence: Synthetic oligonucleotide
  Sense strand starting at position 821 of SEQ ID NO: 1888257
accaguucugaguaucuac

SEQ ID NO: 2522257 - RNA, 19 nt, Artificial Sequence
  Description of Artificial Sequence: Synthetic oligonucleotide
  Antisense strand to SEQ ID NO: 2522256
guagauacucagaacuggu

SEQ ID NO: 2522258 - RNA, 19 nt, Artificial Sequence
  Description of Artificial Sequence: Synthetic oligonucleotide
  Sense strand starting at position 948 of SEQ ID NO: 1888257
gaaggaacuuagcuagcau

SEQ ID NO: 2522259 - RNA, 19 nt, Artificial Sequence
  Description of Artificial Sequence: Synthetic oligonucleotide
  Antisense strand to SEQ ID NO: 2522258
augcuagcuaaguuccuuc

SEQ ID NO: 2522260 - RNA, 19 nt, Artificial Sequence
  Description of Artificial Sequence: Synthetic oligonucleotide
  Sense strand starting at position 1021 of SEQ ID NO: 1888257
gccagacaguucucagaac

SEQ ID NO: 2522261 - RNA, 19 nt, Artificial Sequence
  Description of Artificial Sequence: Synthetic oligonucleotide
  Antisense strand to SEQ ID NO: 2522260
guucugagaacugucuggc

SEQ ID NO: 2522262 - RNA, 19 nt, Artificial Sequence
  Description of Artificial Sequence: Synthetic oligonucleotide
  Sense strand starting at position 1356 of SEQ ID NO: 1888257
acagcuaacuggucuguaa

SEQ ID NO: 2522263 - RNA, 19 nt, Artificial Sequence
  Description of Artificial Sequence: Synthetic oligonucleotide
  Antisense strand to SEQ ID NO: 2522262
uuacagaccaguuagcugu

SEQ ID NO: 2522264 - RNA, 19 nt, Artificial Sequence
  Description of Artificial Sequence: Synthetic oligonucleotide
  Sense strand starting at position 1417 of SEQ ID NO: 1888257
aaacgaguuaacggucuca

SEQ ID NO: 2522265 - RNA, 19 nt, Artificial Sequence
  Description of Artificial Sequence: Synthetic oligonucleotide
  Antisense strand to SEQ ID NO: 2522264
ugagaccguuaacucguuu

SEQ ID NO: 2522266 - RNA, 19 nt, Artificial Sequence
  Description of Artificial Sequence: Synthetic oligonucleotide
  Sense strand starting at position 1456 of SEQ ID NO: 1888257
gcacuuuguaggcaacagu

SEQ ID NO: 2522267 - RNA, 19 nt, Artificial Sequence
  Description of Artificial Sequence: Synthetic oligonucleotide
  Antisense strand to SEQ ID NO: 2522266
acuguugccuacaaagugc

SEQ ID NO: 2522268 - RNA, 19 nt, Artificial Sequence
  Description of Artificial Sequence: Synthetic oligonucleotide
  Sense strand starting at position 1657 of SEQ ID NO: 1888257
agugucuuucccgaggaca

SEQ ID NO: 2522269 - RNA, 19 nt, Artificial Sequence
  Description of Artificial Sequence: Synthetic oligonucleotide
  Antisense strand to SEQ ID NO: 2522268
uguccucgggaaagacacu

SEQ ID NO: 2522270 - RNA, 19 nt, Artificial Sequence
  Description of Artificial Sequence: Synthetic oligonucleotide
  Sense strand starting at position 1874 of SEQ ID NO: 1888257
aaucaagaugucugcagau

SEQ ID NO: 2522271 - RNA, 19 nt, Artificial Sequence
  Description of Artificial Sequence: Synthetic oligonucleotide
  Antisense strand to SEQ ID NO: 2522270
aucugcagacaucuugauu

SEQ ID NO: 2522272 - RNA, 19 nt, Artificial Sequence
  Description of Artificial Sequence: Synthetic oligonucleotide
  Sense strand starting at position 2172 of SEQ ID NO: 1888257
guuuguucugaagauguuc

SEQ ID NO: 2522273 - RNA, 19 nt, Artificial Sequence
  Description of Artificial Sequence: Synthetic oligonucleotide
  Antisense strand to SEQ ID NO: 2522272
gaacaucuucagaacaaac

SEQ ID NO: 2522274 - RNA, 19 nt, Artificial Sequence
  Description of Artificial Sequence: Synthetic oligonucleotide
  Sense strand starting at position 2180 of SEQ ID NO: 1888257
ugaagauguuccuugguca

SEQ ID NO: 2522275 - RNA, 19 nt, Artificial Sequence
  Description of Artificial Sequence: Synthetic oligonucleotide
  Antisense strand to SEQ ID NO: 2522274
ugaccaaggaacaucuuca

SEQ ID NO: 2522276 - RNA, 19 nt, Artificial Sequence
  Description of Artificial Sequence: Synthetic oligonucleotide
  Sense strand starting at position 2181 of SEQ ID NO: 1888257
gaagauguuccuuggucac

SEQ ID NO: 2522277 - RNA, 19 nt, Artificial Sequence
  Description of Artificial Sequence: Synthetic oligonucleotide
  Antisense strand to SEQ ID NO: 2522276
gugaccaaggaacaucuuc

SEQ ID NO: 2522278 - RNA, 19 nt, Artificial Sequence
  Description of Artificial Sequence: Synthetic oligonucleotide
  Sense strand starting at position 2184 of SEQ ID NO: 1888257
gauguuccuuggucacuga

SEQ ID NO: 2522279 - RNA, 19 nt, Artificial Sequence
  Description of Artificial Sequence: Synthetic oligonucleotide
  Antisense strand to SEQ ID NO: 2522278
ucagugaccaaggaacauc

SEQ ID NO: 2522280 - RNA, 19 nt, Artificial Sequence
  Description of Artificial Sequence: Synthetic oligonucleotide
  Sense strand starting at position 2281 of SEQ ID NO: 1888257
gacuucuuucugcaagggu

SEQ ID NO: 2522281 - RNA, 19 nt, Artificial Sequence
  Description of Artificial Sequence: Synthetic oligonucleotide
  Antisense strand to SEQ ID NO: 2522280
acccuugcagaaagaaguc

SEQ ID NO: 2522282 - RNA, 19 nt, Artificial Sequence
  Description of Artificial Sequence: Synthetic oligonucleotide
  Sense strand starting at position 2302 of SEQ ID NO: 1888257
aaaggcaucugucuuugau

SEQ ID NO: 2522283 - RNA, 19 nt, Artificial Sequence
  Description of Artificial Sequence: Synthetic oligonucleotide
  Antisense strand to SEQ ID NO: 2522282
aucaaagacagaugccuuu

SEQ ID NO: 2522284 - RNA, 19 nt, Artificial Sequence
  Description of Artificial Sequence: Synthetic oligonucleotide
  Sense strand starting at position 2414 of SEQ ID NO: 1888257
gaccgagaugacugaguca

SEQ ID NO: 2522285 - RNA, 19 nt, Artificial Sequence
  Description of Artificial Sequence: Synthetic oligonucleotide
  Antisense strand to SEQ ID NO: 2522284
ugacucagucaucucgguc

SEQ ID NO: 2522286 - RNA, 19 nt, Artificial Sequence
  Description of Artificial Sequence: Synthetic oligonucleotide
  Sense strand starting at position 2426 of SEQ ID NO: 1888257
ugagucauggccugagacu

SEQ ID NO: 2522287 - RNA, 19 nt, Artificial Sequence
  Description of Artificial Sequence: Synthetic oligonucleotide
  Antisense strand to SEQ ID NO: 2522286
agucucaggccaugacuca

SEQ ID NO: 2522288 - RNA, 19 nt, Artificial Sequence
  Description of Artificial Sequence: Synthetic oligonucleotide
  Sense strand starting at position 2427 of SEQ ID NO: 1888257
gagucauggccugagacug

SEQ ID NO: 2522289 - RNA, 19 nt, Artificial Sequence
  Description of Artificial Sequence: Synthetic oligonucleotide
  Antisense strand to SEQ ID NO: 2522288
cagucucaggccaugacuc

SEQ ID NO: 2522290 - RNA, 19 nt, Artificial Sequence
  Description of Artificial Sequence: Synthetic oligonucleotide
  Sense strand starting at position 2443 of SEQ ID NO: 1888257
cuggaaugugagcgugaga

SEQ ID NO: 2522291 - RNA, 19 nt, Artificial Sequence
  Description of Artificial Sequence: Synthetic oligonucleotide
  Antisense strand to SEQ ID NO: 2522290
ucucacgcucacauuccag

SEQ ID NO: 2522292 - RNA, 19 nt, Artificial Sequence
  Description of Artificial Sequence: Synthetic oligonucleotide
  Sense strand starting at position 2445 of SEQ ID NO: 1888257
ggaaugugagcgugagaag

SEQ ID NO: 2522293 - RNA, 19 nt, Artificial Sequence
  Description of Artificial Sequence: Synthetic oligonucleotide
  Antisense strand to SEQ ID NO: 2522292
cuucucacgcucacauucc

SEQ ID NO: 2522294 - RNA, 19 nt, Artificial Sequence
  Description of Artificial Sequence: Synthetic oligonucleotide
  Sense strand starting at position 2446 of SEQ ID NO: 1888257
gaaugugagcgugagaaga

SEQ ID NO: 2522295 - RNA, 19 nt, Artificial Sequence
  Description of Artificial Sequence: Synthetic oligonucleotide
  Antisense strand to SEQ ID NO: 2522294
ucuucucacgcucacauuc

SEQ ID NO: 2522296 - RNA, 19 nt, Artificial Sequence
  Description of Artificial Sequence: Synthetic oligonucleotide
  Sense strand starting at position 2842 of SEQ ID NO: 1888257
gucagauucuugguacuca

SEQ ID NO: 2522297 - RNA, 19 nt, Artificial Sequence
  Description of Artificial Sequence: Synthetic oligonucleotide
  Antisense strand to SEQ ID NO: 2522296
ugaguaccaagaaucugac

SEQ ID NO: 2522298 - RNA, 19 nt, Artificial Sequence
  Description of Artificial Sequence: Synthetic oligonucleotide
  Sense strand starting at position 2846 of SEQ ID NO: 1888257
gauucuugguacucaauag

SEQ ID NO: 2522299 - RNA, 19 nt, Artificial Sequence
  Description of Artificial Sequence: Synthetic oligonucleotide
  Antisense strand to SEQ ID NO: 2522298
cuauugaguaccaagaauc

SEQ ID NO: 2522300 - RNA, 19 nt, Artificial Sequence
  Description of Artificial Sequence: Synthetic oligonucleotide
  Sense strand starting at position 2850 of SEQ ID NO: 1888257
cuugguacucaauagguca

SEQ ID NO: 2522301 - RNA, 19 nt, Artificial Sequence
  Description of Artificial Sequence: Synthetic oligonucleotide
  Antisense strand to SEQ ID NO: 2522300
ugaccuauugaguaccaag

SEQ ID NO: 2522302 - RNA, 19 nt, Artificial Sequence
  Description of Artificial Sequence: Synthetic oligonucleotide
  Sense strand starting at position 2956 of SEQ ID NO: 1888257
gggagaggcccaugggauu

SEQ ID NO: 2522303 - RNA, 19 nt, Artificial Sequence
  Description of Artificial Sequence: Synthetic oligonucleotide
  Antisense strand to SEQ ID NO: 2522302
aaucccaugggccucuccc

SEQ ID NO: 2522304 - RNA, 19 nt, Artificial Sequence
  Description of Artificial Sequence: Synthetic oligonucleotide
  Sense strand starting at position 3485 of SEQ ID NO: 1888257
gcuguuacucuccauguga

SEQ ID NO: 2522305 - RNA, 19 nt, Artificial Sequence
  Description of Artificial Sequence: Synthetic oligonucleotide
  Antisense strand to SEQ ID NO: 2522304
ucacauggagaguaacagc

SEQ ID NO: 2522306 - RNA, 19 nt, Artificial Sequence
  Description of Artificial Sequence: Synthetic oligonucleotide
  Sense strand starting at position 3605 of SEQ ID NO: 1888257
uggaaugauuuauaucaag

SEQ ID NO: 2522307 - RNA, 19 nt, Artificial Sequence
  Description of Artificial Sequence: Synthetic oligonucleotide
  Antisense strand to SEQ ID NO: 2522306
cuugauauaaaucauucca

SEQ ID NO: 2522308 - RNA, 19 nt, Artificial Sequence
  Description of Artificial Sequence: Synthetic oligonucleotide
  Sense strand starting at position 3668 of SEQ ID NO: 1888257
uauaguauuucugagaaag

SEQ ID NO: 2522309 - RNA, 19 nt, Artificial Sequence
  Description of Artificial Sequence: Synthetic oligonucleotide
  Antisense strand to SEQ ID NO: 2522308
cuuucucagaaauacuaua

SEQ ID NO: 2522310 - RNA, 19 nt, Artificial Sequence
  Description of Artificial Sequence: Synthetic oligonucleotide
  Sense strand starting at position 3670 of SEQ ID NO: 1888257
uaguauuucugagaaagcu

SEQ ID NO: 2522311 - RNA, 19 nt, Artificial Sequence
  Description of Artificial Sequence: Synthetic oligonucleotide
  Antisense strand to SEQ ID NO: 2522310
agcuuucucagaaauacua

SEQ ID NO: 2522312 - RNA, 19 nt, Artificial Sequence
  Description of Artificial Sequence: Synthetic oligonucleotide
  Sense strand starting at position 3703 of SEQ ID NO: 1888257
ccguaaggacucugggauu

SEQ ID NO: 2522313 - RNA, 19 nt, Artificial Sequence
  Description of Artificial Sequence: Synthetic oligonucleotide
  Antisense strand to SEQ ID NO: 2522312
aaucccagaguccuuacgg

SEQ ID NO: 2522314 - RNA, 19 nt, Artificial Sequence
  Description of Artificial Sequence: Synthetic oligonucleotide
  Sense strand starting at position 3885 of SEQ ID NO: 1888257
ugcauuccagguugacaga

SEQ ID NO: 2522315 - RNA, 19 nt, Artificial Sequence
  Description of Artificial Sequence: Synthetic oligonucleotide
  Antisense strand to SEQ ID NO: 2522314
ucugucaaccuggaaugca

SEQ ID NO: 2522316 - RNA, 19 nt, Artificial Sequence
  Description of Artificial Sequence: Synthetic oligonucleotide
  Sense strand starting at position 3937 of SEQ ID NO: 1888257
gaaagauagcauuguccaa

SEQ ID NO: 2522317 - RNA, 19 nt, Artificial Sequence
  Description of Artificial Sequence: Synthetic oligonucleotide
  Antisense strand to SEQ ID NO: 2522316
uuggacaaugcuaucuuuc

SEQ ID NO: 2522318 - RNA, 19 nt, Artificial Sequence
  Description of Artificial Sequence: Synthetic oligonucleotide
  Sense strand starting at position 3941 of SEQ ID NO: 1888257
gauagcauuguccaauaga

SEQ ID NO: 2522319 - RNA, 19 nt, Artificial Sequence
  Description of Artificial Sequence: Synthetic oligonucleotide
  Antisense strand to SEQ ID NO: 2522318
ucuauuggacaaugcuauc

SEQ ID NO: 2522320 - RNA, 19 nt, Artificial Sequence
  Description of Artificial Sequence: Synthetic oligonucleotide
  Sense strand starting at position 37 of SEQ ID NO: 1888258
ggacuccuuucuggcuuua

SEQ ID NO: 2522321 - RNA, 19 nt, Artificial Sequence
  Description of Artificial Sequence: Synthetic oligonucleotide
  Antisense strand to SEQ ID NO: 2522320
uaaagccagaaaggagucc

SEQ ID NO: 2522322 - RNA, 19 nt, Artificial Sequence
  Description of Artificial Sequence: Synthetic oligonucleotide
  Sense strand starting at position 428 of SEQ ID NO: 1888258
uauugccaucauuguggaa

SEQ ID NO: 2522323 - RNA, 19 nt, Artificial Sequence
  Description of Artificial Sequence: Synthetic oligonucleotide
  Antisense strand to SEQ ID NO: 2522322
uuccacaaugauggcaaua

SEQ ID NO: 2522324 - RNA, 19 nt, Artificial Sequence
  Description of Artificial Sequence: Synthetic oligonucleotide
  Sense strand starting at position 432 of SEQ ID NO: 1888258
gccaucauuguggaagcua

SEQ ID NO: 2522325 - RNA, 19 nt, Artificial Sequence
  Description of Artificial Sequence: Synthetic oligonucleotide
  Antisense strand to SEQ ID NO: 2522324
uagcuuccacaaugauggc

SEQ ID NO: 2522326 - RNA, 19 nt, Artificial Sequence
  Description of Artificial Sequence: Synthetic oligonucleotide
  Sense strand starting at position 684 of SEQ ID NO: 1888258
uggagaguuuaagaucaga

SEQ ID NO: 2522327 - RNA, 19 nt, Artificial Sequence
  Description of Artificial Sequence: Synthetic oligonucleotide
  Antisense strand to SEQ ID NO: 2522326
ucugaucuuaaacucucca

SEQ ID NO: 2522328 - RNA, 19 nt, Artificial Sequence
  Description of Artificial Sequence: Synthetic oligonucleotide
  Sense strand starting at position 845 of SEQ ID NO: 1888258
gucgcugaccuggaaacuu

SEQ ID NO: 2522329 - RNA, 19 nt, Artificial Sequence
  Description of Artificial Sequence: Synthetic oligonucleotide
  Antisense strand to SEQ ID NO: 2522328
aaguuuccaggucagcgac

SEQ ID NO: 2522330 - RNA, 19 nt, Artificial Sequence
  Description of Artificial Sequence: Synthetic oligonucleotide
  Sense strand starting at position 1239 of SEQ ID NO: 1888258
cauggugggucacgaaaua

SEQ ID NO: 2522331 - RNA, 19 nt, Artificial Sequence
  Description of Artificial Sequence: Synthetic oligonucleotide
  Antisense strand to SEQ ID NO: 2522330
uauuucgugacccaccaug

SEQ ID NO: 2522332 - RNA, 19 nt, Artificial Sequence
  Description of Artificial Sequence: Synthetic oligonucleotide
  Sense strand starting at position 1459 of SEQ ID NO: 1888258
cagauauguccaugccuag

SEQ ID NO: 2522333 - RNA, 19 nt, Artificial Sequence
  Description of Artificial Sequence: Synthetic oligonucleotide
  Antisense strand to SEQ ID NO: 2522332
cuaggcauggacauaucug

SEQ ID NO: 2522334 - RNA, 19 nt, Artificial Sequence
  Description of Artificial Sequence: Synthetic oligonucleotide
  Sense strand starting at position 1463 of SEQ ID NO: 1888258
uauguccaugccuaggaaa

SEQ ID NO: 2522335 - RNA, 19 nt, Artificial Sequence
  Description of Artificial Sequence: Synthetic oligonucleotide
  Antisense strand to SEQ ID NO: 2522334
uuuccuaggcauggacaua

SEQ ID NO: 2522336 - RNA, 19 nt, Artificial Sequence
  Description of Artificial Sequence: Synthetic oligonucleotide
  Sense strand starting at position 1821 of SEQ ID NO: 1888258
ccuacucugccuggaggaa

SEQ ID NO: 2522337 - RNA, 19 nt, Artificial Sequence
  Description of Artificial Sequence: Synthetic oligonucleotide
  Antisense strand to SEQ ID NO: 2522336
uuccuccaggcagaguagg

SEQ ID NO: 2522338 - RNA, 19 nt, Artificial Sequence
  Description of Artificial Sequence: Synthetic oligonucleotide
  Sense strand starting at position 2038 of SEQ ID NO: 1888258
gauggucaguccucaucaa

SEQ ID NO: 2522339 - RNA, 19 nt, Artificial Sequence
  Description of Artificial Sequence: Synthetic oligonucleotide
  Antisense strand to SEQ ID NO: 2522338
uugaugaggacugaccauc

SEQ ID NO: 2522340 - RNA, 19 nt, Artificial Sequence
  Description of Artificial Sequence: Synthetic oligonucleotide
  Sense strand starting at position 2042 of SEQ ID NO: 1888258
gucaguccucaucaagacu

SEQ ID NO: 2522341 - RNA, 19 nt, Artificial Sequence
  Description of Artificial Sequence: Synthetic oligonucleotide
  Antisense strand to SEQ ID NO: 2522340
agucuugaugaggacugac

SEQ ID NO: 2522342 - RNA, 19 nt, Artificial Sequence
  Description of Artificial Sequence: Synthetic oligonucleotide
  Sense strand starting at position 2080 of SEQ ID NO: 1888258
gaccaaaggcuccaguauu

SEQ ID NO: 2522343 - RNA, 19 nt, Artificial Sequence
  Description of Artificial Sequence: Synthetic oligonucleotide
  Antisense strand to SEQ ID NO: 2522342
aauacuggagccuuugguc

SEQ ID NO: 2522344 - RNA, 19 nt, Artificial Sequence
  Description of Artificial Sequence: Synthetic oligonucleotide
  Sense strand starting at position 2465 of SEQ ID NO: 1888258
acaggaauauaacagauga

SEQ ID NO: 2522345 - RNA, 19 nt, Artificial Sequence
  Description of Artificial Sequence: Synthetic oligonucleotide
  Antisense strand to SEQ ID NO: 2522344
ucaucuguuauauuccugu

SEQ ID NO: 2522346 - RNA, 19 nt, Artificial Sequence
  Description of Artificial Sequence: Synthetic oligonucleotide
  Sense strand starting at position 2840 of SEQ ID NO: 1888258
gcaagucaucacugcaaag

SEQ ID NO: 2522347 - RNA, 19 nt, Artificial Sequence
  Description of Artificial Sequence: Synthetic oligonucleotide
  Antisense strand to SEQ ID NO: 2522346
cuuugcagugaugacuugc

SEQ ID NO: 2522348 - RNA, 19 nt, Artificial Sequence
  Description of Artificial Sequence: Synthetic oligonucleotide
  Sense strand starting at position 2926 of SEQ ID NO: 1888258
guaacacacccucgaguau

SEQ ID NO: 2522349 - RNA, 19 nt, Artificial Sequence
  Description of Artificial Sequence: Synthetic oligonucleotide
  Antisense strand to SEQ ID NO: 2522348
auacucgaggguguguuac

SEQ ID NO: 2522350 - RNA, 19 nt, Artificial Sequence
  Description of Artificial Sequence: Synthetic oligonucleotide
  Sense strand starting at position 2935 of SEQ ID NO: 1888258
ccucgaguauuucguagaa

SEQ ID NO: 2522351 - RNA, 19 nt, Artificial Sequence
  Description of Artificial Sequence: Synthetic oligonucleotide
  Antisense strand to SEQ ID NO: 2522350
uucuacgaaauacucgagg

SEQ ID NO: 2522352 - RNA, 19 nt, Artificial Sequence
  Description of Artificial Sequence: Synthetic oligonucleotide
  Sense strand starting at position 2937 of SEQ ID NO: 1888258
ucgaguauuucguagaauu

SEQ ID NO: 2522353 - RNA, 19 nt, Artificial Sequence
  Description of Artificial Sequence: Synthetic oligonucleotide
  Antisense strand to SEQ ID NO: 2522352
aauucuacgaaauacucga

SEQ ID NO: 2522354 - RNA, 19 nt, Artificial Sequence
  Description of Artificial Sequence: Synthetic oligonucleotide
  Sense strand starting at position 3035 of SEQ ID NO: 1888258
cagacacuugauuguguuu

SEQ ID NO: 2522355 - RNA, 19 nt, Artificial Sequence
  Description of Artificial Sequence: Synthetic oligonucleotide
  Antisense strand to SEQ ID NO: 2522354
aaacacaaucaagugucug

SEQ ID NO: 2522356 - RNA, 19 nt, Artificial Sequence
  Description of Artificial Sequence: Synthetic oligonucleotide
  Sense strand starting at position 3037 of SEQ ID NO: 1888258
gacacuugauuguguuuag

SEQ ID NO: 2522357 - RNA, 19 nt, Artificial Sequence
  Description of Artificial Sequence: Synthetic oligonucleotide
  Antisense strand to SEQ ID NO: 2522356
cuaaacacaaucaaguguc

SEQ ID NO: 2522358 - RNA, 19 nt, Artificial Sequence
  Description of Artificial Sequence: Synthetic oligonucleotide
  Sense strand starting at position 3040 of SEQ ID NO: 1888258
acuugauuguguuuaggca

SEQ ID NO: 2522359 - RNA, 19 nt, Artificial Sequence
  Description of Artificial Sequence: Synthetic oligonucleotide
  Antisense strand to SEQ ID NO: 2522358
ugccuaaacacaaucaagu

SEQ ID NO: 2522360 - RNA, 19 nt, Artificial Sequence
  Description of Artificial Sequence: Synthetic oligonucleotide
  Sense strand starting at position 3041 of SEQ ID NO: 1888258
cuugauuguguuuaggcaa

SEQ ID NO: 2522361 - RNA, 19 nt, Artificial Sequence
  Description of Artificial Sequence: Synthetic oligonucleotide
  Antisense strand to SEQ ID NO: 2522360
uugccuaaacacaaucaag

SEQ ID NO: 2522362 - RNA, 19 nt, Artificial Sequence
  Description of Artificial Sequence: Synthetic oligonucleotide
  Sense strand starting at position 3456 of SEQ ID NO: 1888258
uuccacaucgucugcuuaa

SEQ ID NO: 2522363 - RNA, 19 nt, Artificial Sequence
  Description of Artificial Sequence: Synthetic oligonucleotide
  Antisense strand to SEQ ID NO: 2522362
uuaagcagacgauguggaa

SEQ ID NO: 2522364 - RNA, 19 nt, Artificial Sequence
  Description of Artificial Sequence: Synthetic oligonucleotide
  Sense strand starting at position 3457 of SEQ ID NO: 1888258
uccacaucgucugcuuaaa

SEQ ID NO: 2522365 - RNA, 19 nt, Artificial Sequence
  Description of Artificial Sequence: Synthetic oligonucleotide
  Antisense strand to SEQ ID NO: 2522364
uuuaagcagacgaugugga

SEQ ID NO: 2522366 - RNA, 19 nt, Artificial Sequence
  Description of Artificial Sequence: Synthetic oligonucleotide
  Sense strand starting at position 3469 of SEQ ID NO: 1888258
gcuuaaacaguuuggucua

SEQ ID NO: 2522367 - RNA, 19 nt, Artificial Sequence
  Description of Artificial Sequence: Synthetic oligonucleotide
  Antisense strand to SEQ ID NO: 2522366
uagaccaaacuguuuaagc

SEQ ID NO: 2522368 - RNA, 19 nt, Artificial Sequence
  Description of Artificial Sequence: Synthetic oligonucleotide
  Sense strand starting at position 3472 of SEQ ID NO: 1888258
uaaacaguuuggucuagca

SEQ ID NO: 2522369 - RNA, 19 nt, Artificial Sequence
  Description of Artificial Sequence: Synthetic oligonucleotide
  Antisense strand to SEQ ID NO: 2522368
ugcuagaccaaacuguuua

SEQ ID NO: 2522370 - RNA, 19 nt, Artificial Sequence
  Description of Artificial Sequence: Synthetic oligonucleotide
  Sense strand starting at position 3474 of SEQ ID NO: 1888258
aacaguuuggucuagcaca

SEQ ID NO: 2522371 - RNA, 19 nt, Artificial Sequence
  Description of Artificial Sequence: Synthetic oligonucleotide
  Antisense strand to SEQ ID NO: 2522370
ugugcuagaccaaacuguu

SEQ ID NO: 2522372 - RNA, 19 nt, Artificial Sequence
  Description of Artificial Sequence: Synthetic oligonucleotide
  Sense strand starting at position 3500 of SEQ ID NO: 1888258
gaccuugagcucugugaag

SEQ ID NO: 2522373 - RNA, 19 nt, Artificial Sequence
  Description of Artificial Sequence: Synthetic oligonucleotide
  Antisense strand to SEQ ID NO: 2522372
cuucacagagcucaagguc

SEQ ID NO: 2522374 - RNA, 19 nt, Artificial Sequence
  Description of Artificial Sequence: Synthetic oligonucleotide
  Sense strand starting at position 3506 of SEQ ID NO: 1888258
gagcucugugaagacaauu

SEQ ID NO: 2522375 - RNA, 19 nt, Artificial Sequence
  Description of Artificial Sequence: Synthetic oligonucleotide
  Antisense strand to SEQ ID NO: 2522374
aauugucuucacagagcuc

SEQ ID NO: 2522376 - RNA, 19 nt, Artificial Sequence
  Description of Artificial Sequence: Synthetic oligonucleotide
  Sense strand starting at position 3556 of SEQ ID NO: 1888258
cugccucacgccuaucaga

SEQ ID NO: 2522377 - RNA, 19 nt, Artificial Sequence
  Description of Artificial Sequence: Synthetic oligonucleotide
  Antisense strand to SEQ ID NO: 2522376
ucugauaggcgugaggcag

SEQ ID NO: 2522378 - RNA, 19 nt, Artificial Sequence
  Description of Artificial Sequence: Synthetic oligonucleotide
  Sense strand starting at position 3636 of SEQ ID NO: 1888258
accacaucucucugugaca

SEQ ID NO: 2522379 - RNA, 19 nt, Artificial Sequence
  Description of Artificial Sequence: Synthetic oligonucleotide
  Antisense strand to SEQ ID NO: 2522378
ugucacagagagauguggu

SEQ ID NO: 2522380 - RNA, 19 nt, Artificial Sequence
  Description of Artificial Sequence: Synthetic oligonucleotide
  Sense strand starting at position 3639 of SEQ ID NO: 1888258
acaucucucugugacacuu

SEQ ID NO: 2522381 - RNA, 19 nt, Artificial Sequence
  Description of Artificial Sequence: Synthetic oligonucleotide
  Antisense strand to SEQ ID NO: 2522380
aagugucacagagagaugu

SEQ ID NO: 2522382 - RNA, 19 nt, Artificial Sequence
  Description of Artificial Sequence: Synthetic oligonucleotide
  Sense strand starting at position 3949 of SEQ ID NO: 1888258
gcuuauuucuaauugcuag

SEQ ID NO: 2522383 - RNA, 19 nt, Artificial Sequence
  Description of Artificial Sequence: Synthetic oligonucleotide
  Antisense strand to SEQ ID NO: 2522382
cuagcaauuagaaauaagc

SEQ ID NO: 2522384 - RNA, 19 nt, Artificial Sequence
  Description of Artificial Sequence: Synthetic oligonucleotide
  Sense strand starting at position 3955 of SEQ ID NO: 1888258
uucuaauugcuagagcgau

SEQ ID NO: 2522385 - RNA, 19 nt, Artificial Sequence
  Description of Artificial Sequence: Synthetic oligonucleotide
  Antisense strand to SEQ ID NO: 2522384
aucgcucuagcaauuagaa

SEQ ID NO: 2522386 - RNA, 19 nt, Artificial Sequence
  Description of Artificial Sequence: Synthetic oligonucleotide
  Sense strand starting at position 3970 of SEQ ID NO: 1888258
cgauucuacccauggguca

SEQ ID NO: 2522387 - RNA, 19 nt, Artificial Sequence
  Description of Artificial Sequence: Synthetic oligonucleotide
  Antisense strand to SEQ ID NO: 2522386
ugacccauggguagaaucg

SEQ ID NO: 2522388 - RNA, 19 nt, Artificial Sequence
  Description of Artificial Sequence: Synthetic oligonucleotide
  Sense strand starting at position 3971 of SEQ ID NO: 1888258
gauucuacccaugggucaa

SEQ ID NO: 2522389 - RNA, 19 nt, Artificial Sequence
  Description of Artificial Sequence: Synthetic oligonucleotide
  Antisense strand to SEQ ID NO: 2522388
uugacccauggguagaauc

SEQ ID NO: 2522390 - RNA, 19 nt, Artificial Sequence
  Description of Artificial Sequence: Synthetic oligonucleotide
  Sense strand starting at position 119 of SEQ ID NO: 1888259
aaguuaucccgucauaguc

SEQ ID NO: 2522391 - RNA, 19 nt, Artificial Sequence
  Description of Artificial Sequence: Synthetic oligonucleotide
  Antisense strand to SEQ ID NO: 2522390
gacuaugacgggauaacuu

SEQ ID NO: 2522392 - RNA, 19 nt, Artificial Sequence
  Description of Artificial Sequence: Synthetic oligonucleotide
  Sense strand starting at position 144 of SEQ ID NO: 1888259
cccaaagccuuggcucaaa

SEQ ID NO: 2522393 - RNA, 19 nt, Artificial Sequence
  Description of Artificial Sequence: Synthetic oligonucleotide
  Antisense strand to SEQ ID NO: 2522392
uuugagccaaggcuuuggg

SEQ ID NO: 2522394 - RNA, 19 nt, Artificial Sequence
  Description of Artificial Sequence: Synthetic oligonucleotide
  Sense strand starting at position 226 of SEQ ID NO: 1888259
ccuagaugcacuugggauu

SEQ ID NO: 2522395 - RNA, 19 nt, Artificial Sequence
  Description of Artificial Sequence: Synthetic oligonucleotide
  Antisense strand to SEQ ID NO: 2522394
aaucccaagugcaucuagg

SEQ ID NO: 2522396 - RNA, 19 nt, Artificial Sequence
  Description of Artificial Sequence: Synthetic oligonucleotide
  Sense strand starting at position 227 of SEQ ID NO: 1888259
cuagaugcacuugggauua

SEQ ID NO: 2522397 - RNA, 19 nt, Artificial Sequence
  Description of Artificial Sequence: Synthetic oligonucleotide
  Antisense strand to SEQ ID NO: 2522396
uaaucccaagugcaucuag

SEQ ID NO: 2522398 - RNA, 19 nt, Artificial Sequence
  Description of Artificial Sequence: Synthetic oligonucleotide
  Sense strand starting at position 290 of SEQ ID NO: 1888259
uaggucaagccuuggguau

SEQ ID NO: 2522399 - RNA, 19 nt, Artificial Sequence
  Description of Artificial Sequence: Synthetic oligonucleotide
  Antisense strand to SEQ ID NO: 2522398
auacccaaggcuugaccua

SEQ ID NO: 2522400 - RNA, 19 nt, Artificial Sequence
  Description of Artificial Sequence: Synthetic oligonucleotide
  Sense strand starting at position 321 of SEQ ID NO: 1888259
aagucuuaaugagugagaa

SEQ ID NO: 2522401 - RNA, 19 nt, Artificial Sequence
  Description of Artificial Sequence: Synthetic oligonucleotide
  Antisense strand to SEQ ID NO: 2522400
uucucacucauuaagacuu

SEQ ID NO: 2522402 - RNA, 19 nt, Artificial Sequence
  Description of Artificial Sequence: Synthetic oligonucleotide
  Sense strand starting at position 322 of SEQ ID NO: 1888259
agucuuaaugagugagaac

SEQ ID NO: 2522403 - RNA, 19 nt, Artificial Sequence
  Description of Artificial Sequence: Synthetic oligonucleotide
  Antisense strand to SEQ ID NO: 2522402
guucucacucauuaagacu

SEQ ID NO: 2522404 - RNA, 19 nt, Artificial Sequence
  Description of Artificial Sequence: Synthetic oligonucleotide
  Sense strand starting at position 1025 of SEQ ID NO: 1888259
ggcagcaucccuggaguga

SEQ ID NO: 2522405 - RNA, 19 nt, Artificial Sequence
  Description of Artificial Sequence: Synthetic oligonucleotide
  Antisense strand to SEQ ID NO: 2522404
ucacuccagggaugcugcc

SEQ ID NO: 2522406 - RNA, 19 nt, Artificial Sequence
  Description of Artificial Sequence: Synthetic oligonucleotide
  Sense strand starting at position 1082 of SEQ ID NO: 1888259
uccaguguucugucgucuu

SEQ ID NO: 2522407 - RNA, 19 nt, Artificial Sequence
  Description of Artificial Sequence: Synthetic oligonucleotide
  Antisense strand to SEQ ID NO: 2522406
aagacgacagaacacugga

SEQ ID NO: 2522408 - RNA, 19 nt, Artificial Sequence
  Description of Artificial Sequence: Synthetic oligonucleotide
  Sense strand starting at position 1107 of SEQ ID NO: 1888259
agcugaugucaaugggaau

SEQ ID NO: 2522409 - RNA, 19 nt, Artificial Sequence
  Description of Artificial Sequence: Synthetic oligonucleotide
  Antisense strand to SEQ ID NO: 2522408
auucccauugacaucagcu

SEQ ID NO: 2522410 - RNA, 19 nt, Artificial Sequence
  Description of Artificial Sequence: Synthetic oligonucleotide
  Sense strand starting at position 1108 of SEQ ID NO: 1888259
gcugaugucaaugggaaug

SEQ ID NO: 2522411 - RNA, 19 nt, Artificial Sequence
  Description of Artificial Sequence: Synthetic oligonucleotide
  Antisense strand to SEQ ID NO: 2522410
cauucccauugacaucagc

SEQ ID NO: 2522412 - RNA, 19 nt, Artificial Sequence
  Description of Artificial Sequence: Synthetic oligonucleotide
  Sense strand starting at position 1389 of SEQ ID NO: 1888259
gucauuacuugccuacaca

SEQ ID NO: 2522413 - RNA, 19 nt, Artificial Sequence
  Description of Artificial Sequence: Synthetic oligonucleotide
  Antisense strand to SEQ ID NO: 2522412
uguguaggcaaguaaugac

SEQ ID NO: 2522414 - RNA, 19 nt, Artificial Sequence
  Description of Artificial Sequence: Synthetic oligonucleotide
  Sense strand starting at position 1738 of SEQ ID NO: 1888259
gaaagagacugcucucuga

SEQ ID NO: 2522415 - RNA, 19 nt, Artificial Sequence
  Description of Artificial Sequence: Synthetic oligonucleotide
  Antisense strand to SEQ ID NO: 2522414
ucagagagcagucucuuuc

SEQ ID NO: 2522416 - RNA, 19 nt, Artificial Sequence
  Description of Artificial Sequence: Synthetic oligonucleotide
  Sense strand starting at position 1741 of SEQ ID NO: 1888259
agagacugcucucugauaa

SEQ ID NO: 2522417 - RNA, 19 nt, Artificial Sequence
  Description of Artificial Sequence: Synthetic oligonucleotide
  Antisense strand to SEQ ID NO: 2522416
uuaucagagagcagucucu

SEQ ID NO: 2522418 - RNA, 19 nt, Artificial Sequence
  Description of Artificial Sequence: Synthetic oligonucleotide
  Sense strand starting at position 1784 of SEQ ID NO: 1888259
auacuaaagugucucccau

SEQ ID NO: 2522419 - RNA, 19 nt, Artificial Sequence
  Description of Artificial Sequence: Synthetic oligonucleotide
  Antisense strand to SEQ ID NO: 2522418
augggagacacuuuaguau

SEQ ID NO: 2522420 - RNA, 19 nt, Artificial Sequence
  Description of Artificial Sequence: Synthetic oligonucleotide
  Sense strand starting at position 1823 of SEQ ID NO: 1888259
ugcaaugcuccugagacca

SEQ ID NO: 2522421 - RNA, 19 nt, Artificial Sequence
  Description of Artificial Sequence: Synthetic oligonucleotide
  Antisense strand to SEQ ID NO: 2522420
uggucucaggagcauugca

SEQ ID NO: 2522422 - RNA, 19 nt, Artificial Sequence
  Description of Artificial Sequence: Synthetic oligonucleotide
  Sense strand starting at position 1857 of SEQ ID NO: 1888259
agagaaggagugugugaaa

SEQ ID NO: 2522423 - RNA, 19 nt, Artificial Sequence
  Description of Artificial Sequence: Synthetic oligonucleotide
  Antisense strand to SEQ ID NO: 2522422
uuucacacacuccuucucu

SEQ ID NO: 2522424 - RNA, 19 nt, Artificial Sequence
  Description of Artificial Sequence: Synthetic oligonucleotide
  Sense strand starting at position 1988 of SEQ ID NO: 1888259
uuugaaugcagguguauac

SEQ ID NO: 2522425 - RNA, 19 nt, Artificial Sequence
  Description of Artificial Sequence: Synthetic oligonucleotide
  Antisense strand to SEQ ID NO: 2522424
guauacaccugcauucaaa

SEQ ID NO: 2522426 - RNA, 19 nt, Artificial Sequence
  Description of Artificial Sequence: Synthetic oligonucleotide
  Sense strand starting at position 2017 of SEQ ID NO: 1888259
agagauccaugaggagaaa

SEQ ID NO: 2522427 - RNA, 19 nt, Artificial Sequence
  Description of Artificial Sequence: Synthetic oligonucleotide
  Antisense strand to SEQ ID NO: 2522426
uuucuccucauggaucucu

SEQ ID NO: 2522428 - RNA, 19 nt, Artificial Sequence
  Description of Artificial Sequence: Synthetic oligonucleotide
  Sense strand starting at position 2127 of SEQ ID NO: 1888259
cuuccuugccaggaggaau

SEQ ID NO: 2522429 - RNA, 19 nt, Artificial Sequence
  Description of Artificial Sequence: Synthetic oligonucleotide
  Antisense strand to SEQ ID NO: 2522428
auuccuccuggcaaggaag

SEQ ID NO: 2522430 - RNA, 19 nt, Artificial Sequence
  Description of Artificial Sequence: Synthetic oligonucleotide
  Sense strand starting at position 2180 of SEQ ID NO: 1888259
aaauauugguugguaauga

SEQ ID NO: 2522431 - RNA, 19 nt, Artificial Sequence
  Description of Artificial Sequence: Synthetic oligonucleotide
  Antisense strand to SEQ ID NO: 2522430
ucauuaccaaccaauauuu

SEQ ID NO: 2522432 - RNA, 19 nt, Artificial Sequence
  Description of Artificial Sequence: Synthetic oligonucleotide
  Sense strand starting at position 2201 of SEQ ID NO: 1888259
ggaaucauauggucucaag

SEQ ID NO: 2522433 - RNA, 19 nt, Artificial Sequence
  Description of Artificial Sequence: Synthetic oligonucleotide
  Antisense strand to SEQ ID NO: 2522432
cuugagaccauaugauucc

SEQ ID NO: 2522434 - RNA, 19 nt, Artificial Sequence
  Description of Artificial Sequence: Synthetic oligonucleotide
  Sense strand starting at position 2281 of SEQ ID NO: 1888259
ucaguccuugacugggaua

SEQ ID NO: 2522435 - RNA, 19 nt, Artificial Sequence
  Description of Artificial Sequence: Synthetic oligonucleotide
  Antisense strand to SEQ ID NO: 2522434
uaucccagucaaggacuga

SEQ ID NO: 2522436 - RNA, 19 nt, Artificial Sequence
  Description of Artificial Sequence: Synthetic oligonucleotide
  Sense strand starting at position 2283 of SEQ ID NO: 1888259
aguccuugacugggauagu

SEQ ID NO: 2522437 - RNA, 19 nt, Artificial Sequence
  Description of Artificial Sequence: Synthetic oligonucleotide
  Antisense strand to SEQ ID NO: 2522436
acuaucccagucaaggacu

SEQ ID NO: 2522438 - RNA, 19 nt, Artificial Sequence
  Description of Artificial Sequence: Synthetic oligonucleotide
  Sense strand starting at position 2700 of SEQ ID NO: 1888259
guggacuaucugcaacaga

SEQ ID NO: 2522439 - RNA, 19 nt, Artificial Sequence
  Description of Artificial Sequence: Synthetic oligonucleotide
  Antisense strand to SEQ ID NO: 2522438
ucuguugcagauaguccac

SEQ ID NO: 2522440 - RNA, 19 nt, Artificial Sequence
  Description of Artificial Sequence: Synthetic oligonucleotide
  Sense strand starting at position 2796 of SEQ ID NO: 1888259
guaguuaccagacaguaaa

SEQ ID NO: 2522441 - RNA, 19 nt, Artificial Sequence
  Description of Artificial Sequence: Synthetic oligonucleotide
  Antisense strand to SEQ ID NO: 2522440
uuuacugucugguaacuac

SEQ ID NO: 2522442 - RNA, 19 nt, Artificial Sequence
  Description of Artificial Sequence: Synthetic oligonucleotide
  Sense strand starting at position 2907 of SEQ ID NO: 1888259
ggccaacacugaucaaugu

SEQ ID NO: 2522443 - RNA, 19 nt, Artificial Sequence
  Description of Artificial Sequence: Synthetic oligonucleotide
  Antisense strand to SEQ ID NO: 2522442
acauugaucaguguuggcc

SEQ ID NO: 2522444 - RNA, 19 nt, Artificial Sequence
  Description of Artificial Sequence: Synthetic oligonucleotide
  Sense strand starting at position 2914 of SEQ ID NO: 1888259
acugaucaauguguaguua

SEQ ID NO: 2522445 - RNA, 19 nt, Artificial Sequence
  Description of Artificial Sequence: Synthetic oligonucleotide
  Antisense strand to SEQ ID NO: 2522444
uaacuacacauugaucagu

SEQ ID NO: 2522446 - RNA, 19 nt, Artificial Sequence
  Description of Artificial Sequence: Synthetic oligonucleotide
  Sense strand starting at position 2915 of SEQ ID NO: 1888259
cugaucaauguguaguuaa

SEQ ID NO: 2522447 - RNA, 19 nt, Artificial Sequence
  Description of Artificial Sequence: Synthetic oligonucleotide
  Antisense strand to SEQ ID NO: 2522446
uuaacuacacauugaucag

SEQ ID NO: 2522448 - RNA, 19 nt, Artificial Sequence
  Description of Artificial Sequence: Synthetic oligonucleotide
  Sense strand starting at position 2918 of SEQ ID NO: 1888259
aucaauguguaguuaauca

SEQ ID NO: 2522449 - RNA, 19 nt, Artificial Sequence
  Description of Artificial Sequence: Synthetic oligonucleotide
  Antisense strand to SEQ ID NO: 2522448
ugauuaacuacacauugau

SEQ ID NO: 2522450 - RNA, 19 nt, Artificial Sequence
  Description of Artificial Sequence: Synthetic oligonucleotide
  Sense strand starting at position 2922 of SEQ ID NO: 1888259
auguguaguuaaucagcaa

SEQ ID NO: 2522451 - RNA, 19 nt, Artificial Sequence
  Description of Artificial Sequence: Synthetic oligonucleotide
  Antisense strand to SEQ ID NO: 2522450
uugcugauuaacuacacau

SEQ ID NO: 2522452 - RNA, 19 nt, Artificial Sequence
  Description of Artificial Sequence: Synthetic oligonucleotide
  Sense strand starting at position 2998 of SEQ ID NO: 1888259
ugacucugcuggucaucaa

SEQ ID NO: 2522453 - RNA, 19 nt, Artificial Sequence
  Description of Artificial Sequence: Synthetic oligonucleotide
  Antisense strand to SEQ ID NO: 2522452
uugaugaccagcagaguca

SEQ ID NO: 2522454 - RNA, 19 nt, Artificial Sequence
  Description of Artificial Sequence: Synthetic oligonucleotide
  Sense strand starting at position 3324 of SEQ ID NO: 1888259
aagugagcugccuggagau

SEQ ID NO: 2522455 - RNA, 19 nt, Artificial Sequence
  Description of Artificial Sequence: Synthetic oligonucleotide
  Antisense strand to SEQ ID NO: 2522454
aucuccaggcagcucacuu

SEQ ID NO: 2522456 - RNA, 19 nt, Artificial Sequence
  Description of Artificial Sequence: Synthetic oligonucleotide
  Sense strand starting at position 3415 of SEQ ID NO: 1888259
ucaagaaagucacagaaga

SEQ ID NO: 2522457 - RNA, 19 nt, Artificial Sequence
  Description of Artificial Sequence: Synthetic oligonucleotide
  Antisense strand to SEQ ID NO: 2522456
ucuucugugacuuucuuga

SEQ ID NO: 2522458 - RNA, 19 nt, Artificial Sequence
  Description of Artificial Sequence: Synthetic oligonucleotide
  Sense strand starting at position 3431 of SEQ ID NO: 1888259
agaccaauuucugguuaaa

SEQ ID NO: 2522459 - RNA, 19 nt, Artificial Sequence
  Description of Artificial Sequence: Synthetic oligonucleotide
  Antisense strand to SEQ ID NO: 2522458
uuuaaccagaaauuggucu

SEQ ID NO: 2522460 - RNA, 19 nt, Artificial Sequence
  Description of Artificial Sequence: Synthetic oligonucleotide
  Sense strand starting at position 3569 of SEQ ID NO: 1888259
gcaguuucccuacauuaca

SEQ ID NO: 2522461 - RNA, 19 nt, Artificial Sequence
  Description of Artificial Sequence: Synthetic oligonucleotide
  Antisense strand to SEQ ID NO: 2522460
uguaauguagggaaacugc

SEQ ID NO: 2522462 - RNA, 19 nt, Artificial Sequence
  Description of Artificial Sequence: Synthetic oligonucleotide
  Sense strand starting at position 3647 of SEQ ID NO: 1888259
gccauacaguucucggaau

SEQ ID NO: 2522463 - RNA, 19 nt, Artificial Sequence
  Description of Artificial Sequence: Synthetic oligonucleotide
  Antisense strand to SEQ ID NO: 2522462
auuccgagaacuguauggc

SEQ ID NO: 2522464 - RNA, 19 nt, Artificial Sequence
  Description of Artificial Sequence: Synthetic oligonucleotide
  Sense strand starting at position 3649 of SEQ ID NO: 1888259
cauacaguucucggaauuc

SEQ ID NO: 2522465 - RNA, 19 nt, Artificial Sequence
  Description of Artificial Sequence: Synthetic oligonucleotide
  Antisense strand to SEQ ID NO: 2522464
gaauuccgagaacuguaug

SEQ ID NO: 2522466 - RNA, 19 nt, Artificial Sequence
  Description of Artificial Sequence: Synthetic oligonucleotide
  Sense strand starting at position 3949 of SEQ ID NO: 1888259
ggcaaaggagucuggaauu

SEQ ID NO: 2522467 - RNA, 19 nt, Artificial Sequence
  Description of Artificial Sequence: Synthetic oligonucleotide
  Antisense strand to SEQ ID NO: 2522466
aauuccagacuccuuugcc

SEQ ID NO: 2522468 - RNA, 19 nt, Artificial Sequence
  Description of Artificial Sequence: Synthetic oligonucleotide
  Sense strand starting at position 3983 of SEQ ID NO: 1888259
cugggagcguccuccauuu

SEQ ID NO: 2522469 - RNA, 19 nt, Artificial Sequence
  Description of Artificial Sequence: Synthetic oligonucleotide
  Antisense strand to SEQ ID NO: 2522468
aaauggaggacgcucccag

SEQ ID NO: 2522470 - RNA, 19 nt, Artificial Sequence
  Description of Artificial Sequence: Synthetic oligonucleotide
  Sense strand starting at position 1 of SEQ ID NO: 1888260
gcagcagcugcuucugauu

SEQ ID NO: 2522471 - RNA, 19 nt, Artificial Sequence
  Description of Artificial Sequence: Synthetic oligonucleotide
  Antisense strand to SEQ ID NO: 2522470
aaucagaagcagcugcugc

SEQ ID NO: 2522472 - RNA, 19 nt, Artificial Sequence
  Description of Artificial Sequence: Synthetic oligonucleotide
  Sense strand starting at position 9 of SEQ ID NO: 1888260
ugcuucugauucccaaaga

SEQ ID NO: 2522473 - RNA, 19 nt, Artificial Sequence
  Description of Artificial Sequence: Synthetic oligonucleotide
  Antisense strand to SEQ ID NO: 2522472
ucuuugggaaucagaagca

SEQ ID NO: 2522474 - RNA, 19 nt, Artificial Sequence
  Description of Artificial Sequence: Synthetic oligonucleotide
  Sense strand starting at position 28 of SEQ ID NO: 1888260
uuucuaacaugguuugauu

SEQ ID NO: 2522475 - RNA, 19 nt, Artificial Sequence
  Description of Artificial Sequence: Synthetic oligonucleotide
  Antisense strand to SEQ ID NO: 2522474
aaucaaaccauguuagaaa

SEQ ID NO: 2522476 - RNA, 19 nt, Artificial Sequence
  Description of Artificial Sequence: Synthetic oligonucleotide
  Sense strand starting at position 84 of SEQ ID NO: 1888260
cauguuaagccagauugcu

SEQ ID NO: 2522477 - RNA, 19 nt, Artificial Sequence
  Description of Artificial Sequence: Synthetic oligonucleotide
  Antisense strand to SEQ ID NO: 2522476
agcaaucuggcuuaacaug

SEQ ID NO: 2522478 - RNA, 19 nt, Artificial Sequence
  Description of Artificial Sequence: Synthetic oligonucleotide
  Sense strand starting at position 93 of SEQ ID NO: 1888260
ccagauugcuggcuccaga

SEQ ID NO: 2522479 - RNA, 19 nt, Artificial Sequence
  Description of Artificial Sequence: Synthetic oligonucleotide
  Antisense strand to SEQ ID NO: 2522478
ucuggagccagcaaucugg

SEQ ID NO: 2522480 - RNA, 19 nt, Artificial Sequence
  Description of Artificial Sequence: Synthetic oligonucleotide
  Sense strand starting at position 161 of SEQ ID NO: 1888260
ucuuacaaguucccaagua

SEQ ID NO: 2522481 - RNA, 19 nt, Artificial Sequence
  Description of Artificial Sequence: Synthetic oligonucleotide
  Antisense strand to SEQ ID NO: 2522480
uacuugggaacuuguaaga

SEQ ID NO: 2522482 - RNA, 19 nt, Artificial Sequence
  Description of Artificial Sequence: Synthetic oligonucleotide
  Sense strand starting at position 260 of SEQ ID NO: 1888260
gaucaacucugggugaaau

SEQ ID NO: 2522483 - RNA, 19 nt, Artificial Sequence
  Description of Artificial Sequence: Synthetic oligonucleotide
  Antisense strand to SEQ ID NO: 2522482
auuucacccagaguugauc

SEQ ID NO: 2522484 - RNA, 19 nt, Artificial Sequence
  Description of Artificial Sequence: Synthetic oligonucleotide
  Sense strand starting at position 261 of SEQ ID NO: 1888260
aucaacucugggugaaaug

SEQ ID NO: 2522485 - RNA, 19 nt, Artificial Sequence
  Description of Artificial Sequence: Synthetic oligonucleotide
  Antisense strand to SEQ ID NO: 2522484
cauuucacccagaguugau

SEQ ID NO: 2522486 - RNA, 19 nt, Artificial Sequence
  Description of Artificial Sequence: Synthetic oligonucleotide
  Sense strand starting at position 262 of SEQ ID NO: 1888260
ucaacucugggugaaaugu

SEQ ID NO: 2522487 - RNA, 19 nt, Artificial Sequence
  Description of Artificial Sequence: Synthetic oligonucleotide
  Antisense strand to SEQ ID NO: 2522486
acauuucacccagaguuga

SEQ ID NO: 2522488 - RNA, 19 nt, Artificial Sequence
  Description of Artificial Sequence: Synthetic oligonucleotide
  Sense strand starting at position 296 of SEQ ID NO: 1888260
uuaggaagucagggauugu

SEQ ID NO: 2522489 - RNA, 19 nt, Artificial Sequence
  Description of Artificial Sequence: Synthetic oligonucleotide
  Antisense strand to SEQ ID NO: 2522488
acaaucccugacuuccuaa

SEQ ID NO: 2522490 - RNA, 19 nt, Artificial Sequence
  Description of Artificial Sequence: Synthetic oligonucleotide
  Sense strand starting at position 300 of SEQ ID NO: 1888260
gaagucagggauuguguga

SEQ ID NO: 2522491 - RNA, 19 nt, Artificial Sequence
  Description of Artificial Sequence: Synthetic oligonucleotide
  Antisense strand to SEQ ID NO: 2522490
ucacacaaucccugacuuc

SEQ ID NO: 2522492 - RNA, 19 nt, Artificial Sequence
  Description of Artificial Sequence: Synthetic oligonucleotide
  Sense strand starting at position 940 of SEQ ID NO: 1888260
cagugcauucucuagagaa

SEQ ID NO: 2522493 - RNA, 19 nt, Artificial Sequence
  Description of Artificial Sequence: Synthetic oligonucleotide
  Antisense strand to SEQ ID NO: 2522492
uucucuagagaaugcacug

SEQ ID NO: 2522494 - RNA, 19 nt, Artificial Sequence
  Description of Artificial Sequence: Synthetic oligonucleotide
  Sense strand starting at position 942 of SEQ ID NO: 1888260
gugcauucucuagagaagc

SEQ ID NO: 2522495 - RNA, 19 nt, Artificial Sequence
  Description of Artificial Sequence: Synthetic oligonucleotide
  Antisense strand to SEQ ID NO: 2522494
gcuucucuagagaaugcac

SEQ ID NO: 2522496 - RNA, 19 nt, Artificial Sequence
  Description of Artificial Sequence: Synthetic oligonucleotide
  Sense strand starting at position 992 of SEQ ID NO: 1888260
cucagccucuucuugaaga

SEQ ID NO: 2522497 - RNA, 19 nt, Artificial Sequence
  Description of Artificial Sequence: Synthetic oligonucleotide
  Antisense strand to SEQ ID NO: 2522496
ucuucaagaagaggcugag

SEQ ID NO: 2522498 - RNA, 19 nt, Artificial Sequence
  Description of Artificial Sequence: Synthetic oligonucleotide
  Sense strand starting at position 1494 of SEQ ID NO: 1888260
aggccaaugacauguaaag

SEQ ID NO: 2522499 - RNA, 19 nt, Artificial Sequence
  Description of Artificial Sequence: Synthetic oligonucleotide
  Antisense strand to SEQ ID NO: 2522498
cuuuacaugucauuggccu

SEQ ID NO: 2522500 - RNA, 19 nt, Artificial Sequence
  Description of Artificial Sequence: Synthetic oligonucleotide
  Sense strand starting at position 1736 of SEQ ID NO: 1888260
agagccugguuucugcaaa

SEQ ID NO: 2522501 - RNA, 19 nt, Artificial Sequence
  Description of Artificial Sequence: Synthetic oligonucleotide
  Antisense strand to SEQ ID NO: 2522500
uuugcagaaaccaggcucu

SEQ ID NO: 2522502 - RNA, 19 nt, Artificial Sequence
  Description of Artificial Sequence: Synthetic oligonucleotide
  Sense strand starting at position 1858 of SEQ ID NO: 1888260
acaggaguugugugaaagc

SEQ ID NO: 2522503 - RNA, 19 nt, Artificial Sequence
  Description of Artificial Sequence: Synthetic oligonucleotide
  Antisense strand to SEQ ID NO: 2522502
gcuuucacacaacuccugu

SEQ ID NO: 2522504 - RNA, 19 nt, Artificial Sequence
  Description of Artificial Sequence: Synthetic oligonucleotide
  Sense strand starting at position 1867 of SEQ ID NO: 1888260
gugugaaagcuucaggguu

SEQ ID NO: 2522505 - RNA, 19 nt, Artificial Sequence
  Description of Artificial Sequence: Synthetic oligonucleotide
  Antisense strand to SEQ ID NO: 2522504
aacccugaagcuuucacac

SEQ ID NO: 2522506 - RNA, 19 nt, Artificial Sequence
  Description of Artificial Sequence: Synthetic oligonucleotide
  Sense strand starting at position 2316 of SEQ ID NO: 1888260
ggauguuccuagucaacag

SEQ ID NO: 2522507 - RNA, 19 nt, Artificial Sequence
  Description of Artificial Sequence: Synthetic oligonucleotide
  Antisense strand to SEQ ID NO: 2522506
cuguugacuaggaacaucc

SEQ ID NO: 2522508 - RNA, 19 nt, Artificial Sequence
  Description of Artificial Sequence: Synthetic oligonucleotide
  Sense strand starting at position 2320 of SEQ ID NO: 1888260
guuccuagucaacaguuua

SEQ ID NO: 2522509 - RNA, 19 nt, Artificial Sequence
  Description of Artificial Sequence: Synthetic oligonucleotide
  Antisense strand to SEQ ID NO: 2522508
uaaacuguugacuaggaac

SEQ ID NO: 2522510 - RNA, 19 nt, Artificial Sequence
  Description of Artificial Sequence: Synthetic oligonucleotide
  Sense strand starting at position 2331 of SEQ ID NO: 1888260
acaguuuacugaucagaac

SEQ ID NO: 2522511 - RNA, 19 nt, Artificial Sequence
  Description of Artificial Sequence: Synthetic oligonucleotide
  Antisense strand to SEQ ID NO: 2522510
guucugaucaguaaacugu

SEQ ID NO: 2522512 - RNA, 19 nt, Artificial Sequence
  Description of Artificial Sequence: Synthetic oligonucleotide
  Sense strand starting at position 2364 of SEQ ID NO: 1888260
agucucuccgugcaaauaa

SEQ ID NO: 2522513 - RNA, 19 nt, Artificial Sequence
  Description of Artificial Sequence: Synthetic oligonucleotide
  Antisense strand to SEQ ID NO: 2522512
uuauuugcacggagagacu

SEQ ID NO: 2522514 - RNA, 19 nt, Artificial Sequence
  Description of Artificial Sequence: Synthetic oligonucleotide
  Sense strand starting at position 2435 of SEQ ID NO: 1888260
gcagguggugucuacauaa

SEQ ID NO: 2522515 - RNA, 19 nt, Artificial Sequence
  Description of Artificial Sequence: Synthetic oligonucleotide
  Antisense strand to SEQ ID NO: 2522514
uuauguagacaccaccugc

SEQ ID NO: 2522516 - RNA, 19 nt, Artificial Sequence
  Description of Artificial Sequence: Synthetic oligonucleotide
  Sense strand starting at position 2561 of SEQ ID NO: 1888260
ccaugugauuucugagaga

SEQ ID NO: 2522517 - RNA, 19 nt, Artificial Sequence
  Description of Artificial Sequence: Synthetic oligonucleotide
  Antisense strand to SEQ ID NO: 2522516
ucucucagaaaucacaugg

SEQ ID NO: 2522518 - RNA, 19 nt, Artificial Sequence
  Description of Artificial Sequence: Synthetic oligonucleotide
  Sense strand starting at position 2642 of SEQ ID NO: 1888260
ugaaucauuuggcugugua

SEQ ID NO: 2522519 - RNA, 19 nt, Artificial Sequence
  Description of Artificial Sequence: Synthetic oligonucleotide
  Antisense strand to SEQ ID NO: 2522518
uacacagccaaaugauuca

SEQ ID NO: 2522520 - RNA, 19 nt, Artificial Sequence
  Description of Artificial Sequence: Synthetic oligonucleotide
  Sense strand starting at position 2643 of SEQ ID NO: 1888260
gaaucauuuggcuguguac

SEQ ID NO: 2522521 - RNA, 19 nt, Artificial Sequence
  Description of Artificial Sequence: Synthetic oligonucleotide
  Antisense strand to SEQ ID NO: 2522520
guacacagccaaaugauuc

SEQ ID NO: 2522522 - RNA, 19 nt, Artificial Sequence
  Description of Artificial Sequence: Synthetic oligonucleotide
  Sense strand starting at position 2667 of SEQ ID NO: 1888260
caauguugcuagguuaaau

SEQ ID NO: 2522523 - RNA, 19 nt, Artificial Sequence
  Description of Artificial Sequence: Synthetic oligonucleotide
  Antisense strand to SEQ ID NO: 2522522
auuuaaccuagcaacauug

SEQ ID NO: 2522524 - RNA, 19 nt, Artificial Sequence
  Description of Artificial Sequence: Synthetic oligonucleotide
  Sense strand starting at position 2849 of SEQ ID NO: 1888260
ccagcuuucccagggaaga

SEQ ID NO: 2522525 - RNA, 19 nt, Artificial Sequence
  Description of Artificial Sequence: Synthetic oligonucleotide
  Antisense strand to SEQ ID NO: 2522524
ucuucccugggaaagcugg

SEQ ID NO: 2522526 - RNA, 19 nt, Artificial Sequence
  Description of Artificial Sequence: Synthetic oligonucleotide
  Sense strand starting at position 2850 of SEQ ID NO: 1888260
cagcuuucccagggaagag

SEQ ID NO: 2522527 - RNA, 19 nt, Artificial Sequence
  Description of Artificial Sequence: Synthetic oligonucleotide
  Antisense strand to SEQ ID NO: 2522526
cucuucccugggaaagcug

SEQ ID NO: 2522528 - RNA, 19 nt, Artificial Sequence
  Description of Artificial Sequence: Synthetic oligonucleotide
  Sense strand starting at position 2868 of SEQ ID NO: 1888260
ggagucuggaucugggaau

SEQ ID NO: 2522529 - RNA, 19 nt, Artificial Sequence
  Description of Artificial Sequence: Synthetic oligonucleotide
  Antisense strand to SEQ ID NO: 2522528
auucccagauccagacucc

SEQ ID NO: 2522530 - RNA, 19 nt, Artificial Sequence
  Description of Artificial Sequence: Synthetic oligonucleotide
  Sense strand starting at position 2961 of SEQ ID NO: 1888260
gugacuuuacagggugcaa

SEQ ID NO: 2522531 - RNA, 19 nt, Artificial Sequence
  Description of Artificial Sequence: Synthetic oligonucleotide
  Antisense strand to SEQ ID NO: 2522530
uugcacccuguaaagucac

SEQ ID NO: 2522532 - RNA, 19 nt, Artificial Sequence
  Description of Artificial Sequence: Synthetic oligonucleotide
  Sense strand starting at position 3076 of SEQ ID NO: 1888260
ugcauagaugcugacuaaa

SEQ ID NO: 2522533 - RNA, 19 nt, Artificial Sequence
  Description of Artificial Sequence: Synthetic oligonucleotide
  Antisense strand to SEQ ID NO: 2522532
uuuagucagcaucuaugca

SEQ ID NO: 2522534 - RNA, 19 nt, Artificial Sequence
  Description of Artificial Sequence: Synthetic oligonucleotide
  Sense strand starting at position 3141 of SEQ ID NO: 1888260
agcagcuuaucucuaagaa

SEQ ID NO: 2522535 - RNA, 19 nt, Artificial Sequence
  Description of Artificial Sequence: Synthetic oligonucleotide
  Antisense strand to SEQ ID NO: 2522534
uucuuagagauaagcugcu

SEQ ID NO: 2522536 - RNA, 19 nt, Artificial Sequence
  Description of Artificial Sequence: Synthetic oligonucleotide
  Sense strand starting at position 3142 of SEQ ID NO: 1888260
gcagcuuaucucuaagaaa

SEQ ID NO: 2522537 - RNA, 19 nt, Artificial Sequence
  Description of Artificial Sequence: Synthetic oligonucleotide
  Antisense strand to SEQ ID NO: 2522536
uuucuuagagauaagcugc

SEQ ID NO: 2522538 - RNA, 19 nt, Artificial Sequence
  Description of Artificial Sequence: Synthetic oligonucleotide
  Sense strand starting at position 3173 of SEQ ID NO: 1888260
cuucuaaggcagggaugau

SEQ ID NO: 2522539 - RNA, 19 nt, Artificial Sequence
  Description of Artificial Sequence: Synthetic oligonucleotide
  Antisense strand to SEQ ID NO: 2522538
aucaucccugccuuagaag

SEQ ID NO: 2522540 - RNA, 19 nt, Artificial Sequence
  Description of Artificial Sequence: Synthetic oligonucleotide
  Sense strand starting at position 3209 of SEQ ID NO: 1888260
ggccaacuguuacuaaguu

SEQ ID NO: 2522541 - RNA, 19 nt, Artificial Sequence
  Description of Artificial Sequence: Synthetic oligonucleotide
  Antisense strand to SEQ ID NO: 2522540
aacuuaguaacaguuggcc

SEQ ID NO: 2522542 - RNA, 19 nt, Artificial Sequence
  Description of Artificial Sequence: Synthetic oligonucleotide
  Sense strand starting at position 3331 of SEQ ID NO: 1888260
ccguaaaucccucagugau

SEQ ID NO: 2522543 - RNA, 19 nt, Artificial Sequence
  Description of Artificial Sequence: Synthetic oligonucleotide
  Antisense strand to SEQ ID NO: 2522542
aucacugagggauuuacgg

SEQ ID NO: 2522544 - RNA, 19 nt, Artificial Sequence
  Description of Artificial Sequence: Synthetic oligonucleotide
  Sense strand starting at position 3333 of SEQ ID NO: 1888260
guaaaucccucagugaucu

SEQ ID NO: 2522545 - RNA, 19 nt, Artificial Sequence
  Description of Artificial Sequence: Synthetic oligonucleotide
  Antisense strand to SEQ ID NO: 2522544
agaucacugagggauuuac

SEQ ID NO: 2522546 - RNA, 19 nt, Artificial Sequence
  Description of Artificial Sequence: Synthetic oligonucleotide
  Sense strand starting at position 3371 of SEQ ID NO: 1888260
guccuugauuccuuuccca

SEQ ID NO: 2522547 - RNA, 19 nt, Artificial Sequence
  Description of Artificial Sequence: Synthetic oligonucleotide
  Antisense strand to SEQ ID NO: 2522546
ugggaaaggaaucaaggac

SEQ ID NO: 2522548 - RNA, 19 nt, Artificial Sequence
  Description of Artificial Sequence: Synthetic oligonucleotide
  Sense strand starting at position 3473 of SEQ ID NO: 1888260
ggccaacagaaaugaguua

SEQ ID NO: 2522549 - RNA, 19 nt, Artificial Sequence
  Description of Artificial Sequence: Synthetic oligonucleotide
  Antisense strand to SEQ ID NO: 2522548
uaacucauuucuguuggcc

SEQ ID NO: 2522550 - RNA, 19 nt, Artificial Sequence
  Description of Artificial Sequence: Synthetic oligonucleotide
  Sense strand starting at position 111 of SEQ ID NO: 1888261
gaaagauccugucauuugc

SEQ ID NO: 2522551 - RNA, 19 nt, Artificial Sequence
  Description of Artificial Sequence: Synthetic oligonucleotide
  Antisense strand to SEQ ID NO: 2522550
gcaaaugacaggaucuuuc

SEQ ID NO: 2522552 - RNA, 19 nt, Artificial Sequence
  Description of Artificial Sequence: Synthetic oligonucleotide
  Sense strand starting at position 202 of SEQ ID NO: 1888261
cacuuaugugugcaauguu

SEQ ID NO: 2522553 - RNA, 19 nt, Artificial Sequence
  Description of Artificial Sequence: Synthetic oligonucleotide
  Antisense strand to SEQ ID NO: 2522552
aacauugcacacauaagug

SEQ ID NO: 2522554 - RNA, 19 nt, Artificial Sequence
  Description of Artificial Sequence: Synthetic oligonucleotide
  Sense strand starting at position 375 of SEQ ID NO: 1888261
agggauuucugugaagcag

SEQ ID NO: 2522555 - RNA, 19 nt, Artificial Sequence
  Description of Artificial Sequence: Synthetic oligonucleotide
  Antisense strand to SEQ ID NO: 2522554
cugcuucacagaaaucccu

SEQ ID NO: 2522556 - RNA, 19 nt, Artificial Sequence
  Description of Artificial Sequence: Synthetic oligonucleotide
  Sense strand starting at position 476 of SEQ ID NO: 1888261
cugugcuaucuauaucugu

SEQ ID NO: 2522557 - RNA, 19 nt, Artificial Sequence
  Description of Artificial Sequence: Synthetic oligonucleotide
  Antisense strand to SEQ ID NO: 2522556
acagauauagauagcacag

SEQ ID NO: 2522558 - RNA, 19 nt, Artificial Sequence
  Description of Artificial Sequence: Synthetic oligonucleotide
  Sense strand starting at position 594 of SEQ ID NO: 1888261
uugggaggcugucccaauu

SEQ ID NO: 2522559 - RNA, 19 nt, Artificial Sequence
  Description of Artificial Sequence: Synthetic oligonucleotide
  Antisense strand to SEQ ID NO: 2522558
aauugggacagccucccaa

SEQ ID NO: 2522560 - RNA, 19 nt, Artificial Sequence
  Description of Artificial Sequence: Synthetic oligonucleotide
  Sense strand starting at position 975 of SEQ ID NO: 1888261
uaccaucuaguguguaaga

SEQ ID NO: 2522561 - RNA, 19 nt, Artificial Sequence
  Description of Artificial Sequence: Synthetic oligonucleotide
  Antisense strand to SEQ ID NO: 2522560
ucuuacacacuagauggua

SEQ ID NO: 2522562 - RNA, 19 nt, Artificial Sequence
  Description of Artificial Sequence: Synthetic oligonucleotide
  Sense strand starting at position 1149 of SEQ ID NO: 1888261
uggcuuguucuaggacauu

SEQ ID NO: 2522563 - RNA, 19 nt, Artificial Sequence
  Description of Artificial Sequence: Synthetic oligonucleotide
  Antisense strand to SEQ ID NO: 2522562
aauguccuagaacaagcca

SEQ ID NO: 2522564 - RNA, 19 nt, Artificial Sequence
  Description of Artificial Sequence: Synthetic oligonucleotide
  Sense strand starting at position 1177 of SEQ ID NO: 1888261
agcacugcucaaugggaua

SEQ ID NO: 2522565 - RNA, 19 nt, Artificial Sequence
  Description of Artificial Sequence: Synthetic oligonucleotide
  Antisense strand to SEQ ID NO: 2522564
uaucccauugagcagugcu

SEQ ID NO: 2522566 - RNA, 19 nt, Artificial Sequence
  Description of Artificial Sequence: Synthetic oligonucleotide
  Sense strand starting at position 1191 of SEQ ID NO: 1888261
ggauaagccuugucaccuu

SEQ ID NO: 2522567 - RNA, 19 nt, Artificial Sequence
  Description of Artificial Sequence: Synthetic oligonucleotide
  Antisense strand to SEQ ID NO: 2522566
aaggugacaaggcuuaucc

SEQ ID NO: 2522568 - RNA, 19 nt, Artificial Sequence
  Description of Artificial Sequence: Synthetic oligonucleotide
  Sense strand starting at position 1210 of SEQ ID NO: 1888261
acaacaaugugucuucuca

SEQ ID NO: 2522569 - RNA, 19 nt, Artificial Sequence
  Description of Artificial Sequence: Synthetic oligonucleotide
  Antisense strand to SEQ ID NO: 2522568
ugagaagacacauuguugu

SEQ ID NO: 2522570 - RNA, 19 nt, Artificial Sequence
  Description of Artificial Sequence: Synthetic oligonucleotide
  Sense strand starting at position 1286 of SEQ ID NO: 1888261
gaggcacugcccugaggaa

SEQ ID NO: 2522571 - RNA, 19 nt, Artificial Sequence
  Description of Artificial Sequence: Synthetic oligonucleotide
  Antisense strand to SEQ ID NO: 2522570
uuccucagggcagugccuc

SEQ ID NO: 2522572 - RNA, 19 nt, Artificial Sequence
  Description of Artificial Sequence: Synthetic oligonucleotide
  Sense strand starting at position 1433 of SEQ ID NO: 1888261
ccacuacuguggcuccaaa

SEQ ID NO: 2522573 - RNA, 19 nt, Artificial Sequence
  Description of Artificial Sequence: Synthetic oligonucleotide
  Antisense strand to SEQ ID NO: 2522572
uuuggagccacaguagugg

SEQ ID NO: 2522574 - RNA, 19 nt, Artificial Sequence
  Description of Artificial Sequence: Synthetic oligonucleotide
  Sense strand starting at position 1464 of SEQ ID NO: 1888261
acauaaacucaguguggca

SEQ ID NO: 2522575 - RNA, 19 nt, Artificial Sequence
  Description of Artificial Sequence: Synthetic oligonucleotide
  Antisense strand to SEQ ID NO: 2522574
ugccacacugaguuuaugu

SEQ ID NO: 2522576 - RNA, 19 nt, Artificial Sequence
  Description of Artificial Sequence: Synthetic oligonucleotide
  Sense strand starting at position 1564 of SEQ ID NO: 1888261
caguguaugguagaugcau

SEQ ID NO: 2522577 - RNA, 19 nt, Artificial Sequence
  Description of Artificial Sequence: Synthetic oligonucleotide
  Antisense strand to SEQ ID NO: 2522576
augcaucuaccauacacug

SEQ ID NO: 2522578 - RNA, 19 nt, Artificial Sequence
  Description of Artificial Sequence: Synthetic oligonucleotide
  Sense strand starting at position 1570 of SEQ ID NO: 1888261
augguagaugcauguaaca

SEQ ID NO: 2522579 - RNA, 19 nt, Artificial Sequence
  Description of Artificial Sequence: Synthetic oligonucleotide
  Antisense strand to SEQ ID NO: 2522578
uguuacaugcaucuaccau

SEQ ID NO: 2522580 - RNA, 19 nt, Artificial Sequence
  Description of Artificial Sequence: Synthetic oligonucleotide
  Sense strand starting at position 1572 of SEQ ID NO: 1888261
gguagaugcauguaacaau

SEQ ID NO: 2522581 - RNA, 19 nt, Artificial Sequence
  Description of Artificial Sequence: Synthetic oligonucleotide
  Antisense strand to SEQ ID NO: 2522580
auuguuacaugcaucuacc

SEQ ID NO: 2522582 - RNA, 19 nt, Artificial Sequence
  Description of Artificial Sequence: Synthetic oligonucleotide
  Sense strand starting at position 1838 of SEQ ID NO: 1888261
gagguaacaucacugguga

SEQ ID NO: 2522583 - RNA, 19 nt, Artificial Sequence
  Description of Artificial Sequence: Synthetic oligonucleotide
  Antisense strand to SEQ ID NO: 2522582
ucaccagugauguuaccuc

SEQ ID NO: 2522584 - RNA, 19 nt, Artificial Sequence
  Description of Artificial Sequence: Synthetic oligonucleotide
  Sense strand starting at position 1840 of SEQ ID NO: 1888261
gguaacaucacuggugaga

SEQ ID NO: 2522585 - RNA, 19 nt, Artificial Sequence
  Description of Artificial Sequence: Synthetic oligonucleotide
  Antisense strand to SEQ ID NO: 2522584
ucucaccagugauguuacc

SEQ ID NO: 2522586 - RNA, 19 nt, Artificial Sequence
  Description of Artificial Sequence: Synthetic oligonucleotide
  Sense strand starting at position 1856 of SEQ ID NO: 1888261
agaauaaaggcauguacga

SEQ ID NO: 2522587 - RNA, 19 nt, Artificial Sequence
  Description of Artificial Sequence: Synthetic oligonucleotide
  Antisense strand to SEQ ID NO: 2522586
ucguacaugccuuuauucu

SEQ ID NO: 2522588 - RNA, 19 nt, Artificial Sequence
  Description of Artificial Sequence: Synthetic oligonucleotide
  Sense strand starting at position 1869 of SEQ ID NO: 1888261
guacgaaagcuccagaguu

SEQ ID NO: 2522589 - RNA, 19 nt, Artificial Sequence
  Description of Artificial Sequence: Synthetic oligonucleotide
  Antisense strand to SEQ ID NO: 2522588
aacucuggagcuuucguac

SEQ ID NO: 2522590 - RNA, 19 nt, Artificial Sequence
  Description of Artificial Sequence: Synthetic oligonucleotide
  Sense strand starting at position 2011 of SEQ ID NO: 1888261
ggcagugagugaguugaga

SEQ ID NO: 2522591 - RNA, 19 nt, Artificial Sequence
  Description of Artificial Sequence: Synthetic oligonucleotide
  Antisense strand to SEQ ID NO: 2522590
ucucaacucacucacugcc

SEQ ID NO: 2522592 - RNA, 19 nt, Artificial Sequence
  Description of Artificial Sequence: Synthetic oligonucleotide
  Sense strand starting at position 2114 of SEQ ID NO: 1888261
gcagcagcugcuucugauu

SEQ ID NO: 2522593 - RNA, 19 nt, Artificial Sequence
  Description of Artificial Sequence: Synthetic oligonucleotide
  Antisense strand to SEQ ID NO: 2522592
aaucagaagcagcugcugc

SEQ ID NO: 2522594 - RNA, 19 nt, Artificial Sequence
  Description of Artificial Sequence: Synthetic oligonucleotide
  Sense strand starting at position 2122 of SEQ ID NO: 1888261
ugcuucugauucccaaaga

SEQ ID NO: 2522595 - RNA, 19 nt, Artificial Sequence
  Description of Artificial Sequence: Synthetic oligonucleotide
  Antisense strand to SEQ ID NO: 2522594
ucuuugggaaucagaagca

SEQ ID NO: 2522596 - RNA, 19 nt, Artificial Sequence
  Description of Artificial Sequence: Synthetic oligonucleotide
  Sense strand starting at position 2141 of SEQ ID NO: 1888261
uuucuaacaugguuugauu

SEQ ID NO: 2522597 - RNA, 19 nt, Artificial Sequence
  Description of Artificial Sequence: Synthetic oligonucleotide
  Antisense strand to SEQ ID NO: 2522596
aaucaaaccauguuagaaa

SEQ ID NO: 2522598 - RNA, 19 nt, Artificial Sequence
  Description of Artificial Sequence: Synthetic oligonucleotide
  Sense strand starting at position 2197 of SEQ ID NO: 1888261
cauguuaagccagauugcu

SEQ ID NO: 2522599 - RNA, 19 nt, Artificial Sequence
  Description of Artificial Sequence: Synthetic oligonucleotide
  Antisense strand to SEQ ID NO: 2522598
agcaaucuggcuuaacaug

SEQ ID NO: 2522600 - RNA, 19 nt, Artificial Sequence
  Description of Artificial Sequence: Synthetic oligonucleotide
  Sense strand starting at position 2206 of SEQ ID NO: 1888261
ccagauugcuggcuccaga

SEQ ID NO: 2522601 - RNA, 19 nt, Artificial Sequence
  Description of Artificial Sequence: Synthetic oligonucleotide
  Antisense strand to SEQ ID NO: 2522600
ucuggagccagcaaucugg

SEQ ID NO: 2522602 - RNA, 19 nt, Artificial Sequence
  Description of Artificial Sequence: Synthetic oligonucleotide
  Sense strand starting at position 2274 of SEQ ID NO: 1888261
ucuuacaaguucccaagua

SEQ ID NO: 2522603 - RNA, 19 nt, Artificial Sequence
  Description of Artificial Sequence: Synthetic oligonucleotide
  Antisense strand to SEQ ID NO: 2522602
uacuugggaacuuguaaga

SEQ ID NO: 2522604 - RNA, 19 nt, Artificial Sequence
  Description of Artificial Sequence: Synthetic oligonucleotide
  Sense strand starting at position 2373 of SEQ ID NO: 1888261
gaucaacucugggugaaau

SEQ ID NO: 2522605 - RNA, 19 nt, Artificial Sequence
  Description of Artificial Sequence: Synthetic oligonucleotide
  Antisense strand to SEQ ID NO: 2522604
auuucacccagaguugauc

SEQ ID NO: 2522606 - RNA, 19 nt, Artificial Sequence
  Description of Artificial Sequence: Synthetic oligonucleotide
  Sense strand starting at position 2374 of SEQ ID NO: 1888261
aucaacucugggugaaaug

SEQ ID NO: 2522607 - RNA, 19 nt, Artificial Sequence
  Description of Artificial Sequence: Synthetic oligonucleotide
  Antisense strand to SEQ ID NO: 2522606
cauuucacccagaguugau

SEQ ID NO: 2522608 - RNA, 19 nt, Artificial Sequence
  Description of Artificial Sequence: Synthetic oligonucleotide
  Sense strand starting at position 2375 of SEQ ID NO: 1888261
ucaacucugggugaaaugu

SEQ ID NO: 2522609 - RNA, 19 nt, Artificial Sequence
  Description of Artificial Sequence: Synthetic oligonucleotide
  Antisense strand to SEQ ID NO: 2522608
acauuucacccagaguuga

SEQ ID NO: 2522610 - RNA, 19 nt, Artificial Sequence
  Description of Artificial Sequence: Synthetic oligonucleotide
  Sense strand starting at position 2409 of SEQ ID NO: 1888261
uuaggaagucagggauugu

SEQ ID NO: 2522611 - RNA, 19 nt, Artificial Sequence
  Description of Artificial Sequence: Synthetic oligonucleotide
  Antisense strand to SEQ ID NO: 2522610
acaaucccugacuuccuaa

SEQ ID NO: 2522612 - RNA, 19 nt, Artificial Sequence
  Description of Artificial Sequence: Synthetic oligonucleotide
  Sense strand starting at position 2413 of SEQ ID NO: 1888261
gaagucagggauuguguga

SEQ ID NO: 2522613 - RNA, 19 nt, Artificial Sequence
  Description of Artificial Sequence: Synthetic oligonucleotide
  Antisense strand to SEQ ID NO: 2522612
ucacacaaucccugacuuc

SEQ ID NO: 2522614 - RNA, 19 nt, Artificial Sequence
  Description of Artificial Sequence: Synthetic oligonucleotide
  Sense strand starting at position 3053 of SEQ ID NO: 1888261
cagugcauucucuagagaa

SEQ ID NO: 2522615 - RNA, 19 nt, Artificial Sequence
  Description of Artificial Sequence: Synthetic oligonucleotide
  Antisense strand to SEQ ID NO: 2522614
uucucuagagaaugcacug

SEQ ID NO: 2522616 - RNA, 19 nt, Artificial Sequence
  Description of Artificial Sequence: Synthetic oligonucleotide
  Sense strand starting at position 3055 of SEQ ID NO: 1888261
gugcauucucuagagaagc

SEQ ID NO: 2522617 - RNA, 19 nt, Artificial Sequence
  Description of Artificial Sequence: Synthetic oligonucleotide
  Antisense strand to SEQ ID NO: 2522616
gcuucucuagagaaugcac

SEQ ID NO: 2522618 - RNA, 19 nt, Artificial Sequence
  Description of Artificial Sequence: Synthetic oligonucleotide
  Sense strand starting at position 3103 of SEQ ID NO: 1888261
agcucagccucuucuugaa

SEQ ID NO: 2522619 - RNA, 19 nt, Artificial Sequence
  Description of Artificial Sequence: Synthetic oligonucleotide
  Antisense strand to SEQ ID NO: 2522618
uucaagaagaggcugagcu

SEQ ID NO: 2522620 - RNA, 19 nt, Artificial Sequence
  Description of Artificial Sequence: Synthetic oligonucleotide
  Sense strand starting at position 3105 of SEQ ID NO: 1888261
cucagccucuucuugaaga

SEQ ID NO: 2522621 - RNA, 19 nt, Artificial Sequence
  Description of Artificial Sequence: Synthetic oligonucleotide
  Antisense strand to SEQ ID NO: 2522620
ucuucaagaagaggcugag

SEQ ID NO: 2522622 - RNA, 19 nt, Artificial Sequence
  Description of Artificial Sequence: Synthetic oligonucleotide
  Sense strand starting at position 3607 of SEQ ID NO: 1888261
aggccaaugacauguaaag

SEQ ID NO: 2522623 - RNA, 19 nt, Artificial Sequence
  Description of Artificial Sequence: Synthetic oligonucleotide
  Antisense strand to SEQ ID NO: 2522622
cuuuacaugucauuggccu

SEQ ID NO: 2522624 - RNA, 19 nt, Artificial Sequence
  Description of Artificial Sequence: Synthetic oligonucleotide
  Sense strand starting at position 3849 of SEQ ID NO: 1888261
agagccugguuucugcaaa

SEQ ID NO: 2522625 - RNA, 19 nt, Artificial Sequence
  Description of Artificial Sequence: Synthetic oligonucleotide
  Antisense strand to SEQ ID NO: 2522624
uuugcagaaaccaggcucu

SEQ ID NO: 2522626 - RNA, 19 nt, Artificial Sequence
  Description of Artificial Sequence: Synthetic oligonucleotide
  Sense strand starting at position 3971 of SEQ ID NO: 1888261
acaggaguugugugaaagc

SEQ ID NO: 2522627 - RNA, 19 nt, Artificial Sequence
  Description of Artificial Sequence: Synthetic oligonucleotide
  Antisense strand to SEQ ID NO: 2522626
gcuuucacacaacuccugu

SEQ ID NO: 2522628 - RNA, 19 nt, Artificial Sequence
  Description of Artificial Sequence: Synthetic oligonucleotide
  Sense strand starting at position 3980 of SEQ ID NO: 1888261
gugugaaagcuucaggguu

SEQ ID NO: 2522629 - RNA, 19 nt, Artificial Sequence
  Description of Artificial Sequence: Synthetic oligonucleotide
  Antisense strand to SEQ ID NO: 2522628
aacccugaagcuuucacac

SEQ ID NO: 2522630 - RNA, 19 nt, Artificial Sequence
  Description of Artificial Sequence: Synthetic oligonucleotide
  Sense strand starting at position 1 of SEQ ID NO: 1888262
acagucucuccgugcaaau

SEQ ID NO: 2522631 - RNA, 19 nt, Artificial Sequence
  Description of Artificial Sequence: Synthetic oligonucleotide
  Antisense strand to SEQ ID NO: 2522630
auuugcacggagagacugu

SEQ ID NO: 2522632 - RNA, 19 nt, Artificial Sequence
  Description of Artificial Sequence: Synthetic oligonucleotide
  Sense strand starting at position 3 of SEQ ID NO: 1888262
agucucuccgugcaaauaa

SEQ ID NO: 2522633 - RNA, 19 nt, Artificial Sequence
  Description of Artificial Sequence: Synthetic oligonucleotide
  Antisense strand to SEQ ID NO: 2522632
uuauuugcacggagagacu

SEQ ID NO: 2522634 - RNA, 19 nt, Artificial Sequence
  Description of Artificial Sequence: Synthetic oligonucleotide
  Sense strand starting at position 74 of SEQ ID NO: 1888262
gcagguggugucuacauaa

SEQ ID NO: 2522635 - RNA, 19 nt, Artificial Sequence
  Description of Artificial Sequence: Synthetic oligonucleotide
  Antisense strand to SEQ ID NO: 2522634
uuauguagacaccaccugc

SEQ ID NO: 2522636 - RNA, 19 nt, Artificial Sequence
  Description of Artificial Sequence: Synthetic oligonucleotide
  Sense strand starting at position 189 of SEQ ID NO: 1888262
gagaauggguuccauguga

SEQ ID NO: 2522637 - RNA, 19 nt, Artificial Sequence
  Description of Artificial Sequence: Synthetic oligonucleotide
  Antisense strand to SEQ ID NO: 2522636
ucacauggaacccauucuc

SEQ ID NO: 2522638 - RNA, 19 nt, Artificial Sequence
  Description of Artificial Sequence: Synthetic oligonucleotide
  Sense strand starting at position 200 of SEQ ID NO: 1888262
ccaugugauuucugagaga

SEQ ID NO: 2522639 - RNA, 19 nt, Artificial Sequence
  Description of Artificial Sequence: Synthetic oligonucleotide
  Antisense strand to SEQ ID NO: 2522638
ucucucagaaaucacaugg

SEQ ID NO: 2522640 - RNA, 19 nt, Artificial Sequence
  Description of Artificial Sequence: Synthetic oligonucleotide
  Sense strand starting at position 281 of SEQ ID NO: 1888262
ugaaucauuuggcugugua

SEQ ID NO: 2522641 - RNA, 19 nt, Artificial Sequence
  Description of Artificial Sequence: Synthetic oligonucleotide
  Antisense strand to SEQ ID NO: 2522640
uacacagccaaaugauuca

SEQ ID NO: 2522642 - RNA, 19 nt, Artificial Sequence
  Description of Artificial Sequence: Synthetic oligonucleotide
  Sense strand starting at position 282 of SEQ ID NO: 1888262
gaaucauuuggcuguguac

SEQ ID NO: 2522643 - RNA, 19 nt, Artificial Sequence
  Description of Artificial Sequence: Synthetic oligonucleotide
  Antisense strand to SEQ ID NO: 2522642
guacacagccaaaugauuc

SEQ ID NO: 2522644 - RNA, 19 nt, Artificial Sequence
  Description of Artificial Sequence: Synthetic oligonucleotide
  Sense strand starting at position 302 of SEQ ID NO: 1888262
ccuacaauguugcuagguu

SEQ ID NO: 2522645 - RNA, 19 nt, Artificial Sequence
  Description of Artificial Sequence: Synthetic oligonucleotide
  Antisense strand to SEQ ID NO: 2522644
aaccuagcaacauuguagg

SEQ ID NO: 2522646 - RNA, 19 nt, Artificial Sequence
  Description of Artificial Sequence: Synthetic oligonucleotide
  Sense strand starting at position 306 of SEQ ID NO: 1888262
caauguugcuagguuaaau

SEQ ID NO: 2522647 - RNA, 19 nt, Artificial Sequence
  Description of Artificial Sequence: Synthetic oligonucleotide
  Antisense strand to SEQ ID NO: 2522646
auuuaaccuagcaacauug

SEQ ID NO: 2522648 - RNA, 19 nt, Artificial Sequence
  Description of Artificial Sequence: Synthetic oligonucleotide
  Sense strand starting at position 488 of SEQ ID NO: 1888262
ccagcuuucccagggaaga

SEQ ID NO: 2522649 - RNA, 19 nt, Artificial Sequence
  Description of Artificial Sequence: Synthetic oligonucleotide
  Antisense strand to SEQ ID NO: 2522648
ucuucccugggaaagcugg

SEQ ID NO: 2522650 - RNA, 19 nt, Artificial Sequence
  Description of Artificial Sequence: Synthetic oligonucleotide
  Sense strand starting at position 489 of SEQ ID NO: 1888262
cagcuuucccagggaagag

SEQ ID NO: 2522651 - RNA, 19 nt, Artificial Sequence
  Description of Artificial Sequence: Synthetic oligonucleotide
  Antisense strand to SEQ ID NO: 2522650
cucuucccugggaaagcug

SEQ ID NO: 2522652 - RNA, 19 nt, Artificial Sequence
  Description of Artificial Sequence: Synthetic oligonucleotide
  Sense strand starting at position 507 of SEQ ID NO: 1888262
ggagucuggaucugggaau

SEQ ID NO: 2522653 - RNA, 19 nt, Artificial Sequence
  Description of Artificial Sequence: Synthetic oligonucleotide
  Antisense strand to SEQ ID NO: 2522652
auucccagauccagacucc

SEQ ID NO: 2522654 - RNA, 19 nt, Artificial Sequence
  Description of Artificial Sequence: Synthetic oligonucleotide
  Sense strand starting at position 600 of SEQ ID NO: 1888262
gugacuuuacagggugcaa

SEQ ID NO: 2522655 - RNA, 19 nt, Artificial Sequence
  Description of Artificial Sequence: Synthetic oligonucleotide
  Antisense strand to SEQ ID NO: 2522654
uugcacccuguaaagucac

SEQ ID NO: 2522656 - RNA, 19 nt, Artificial Sequence
  Description of Artificial Sequence: Synthetic oligonucleotide
  Sense strand starting at position 700 of SEQ ID NO: 1888262
gcaucucuacaguguugca

SEQ ID NO: 2522657 - RNA, 19 nt, Artificial Sequence
  Description of Artificial Sequence: Synthetic oligonucleotide
  Antisense strand to SEQ ID NO: 2522656
ugcaacacuguagagaugc

SEQ ID NO: 2522658 - RNA, 19 nt, Artificial Sequence
  Description of Artificial Sequence: Synthetic oligonucleotide
  Sense strand starting at position 715 of SEQ ID NO: 1888262
ugcauagaugcugacuaaa

SEQ ID NO: 2522659 - RNA, 19 nt, Artificial Sequence
  Description of Artificial Sequence: Synthetic oligonucleotide
  Antisense strand to SEQ ID NO: 2522658
uuuagucagcaucuaugca

SEQ ID NO: 2522660 - RNA, 19 nt, Artificial Sequence
  Description of Artificial Sequence: Synthetic oligonucleotide
  Sense strand starting at position 780 of SEQ ID NO: 1888262
agcagcuuaucucuaagaa

SEQ ID NO: 2522661 - RNA, 19 nt, Artificial Sequence
  Description of Artificial Sequence: Synthetic oligonucleotide
  Antisense strand to SEQ ID NO: 2522660
uucuuagagauaagcugcu

SEQ ID NO: 2522662 - RNA, 19 nt, Artificial Sequence
  Description of Artificial Sequence: Synthetic oligonucleotide
  Sense strand starting at position 781 of SEQ ID NO: 1888262
gcagcuuaucucuaagaaa

SEQ ID NO: 2522663 - RNA, 19 nt, Artificial Sequence
  Description of Artificial Sequence: Synthetic oligonucleotide
  Antisense strand to SEQ ID NO: 2522662
uuucuuagagauaagcugc

SEQ ID NO: 2522664 - RNA, 19 nt, Artificial Sequence
  Description of Artificial Sequence: Synthetic oligonucleotide
  Sense strand starting at position 812 of SEQ ID NO: 1888262
cuucuaaggcagggaugau

SEQ ID NO: 2522665 - RNA, 19 nt, Artificial Sequence
  Description of Artificial Sequence: Synthetic oligonucleotide
  Antisense strand to SEQ ID NO: 2522664
aucaucccugccuuagaag

SEQ ID NO: 2522666 - RNA, 19 nt, Artificial Sequence
  Description of Artificial Sequence: Synthetic oligonucleotide
  Sense strand starting at position 848 of SEQ ID NO: 1888262
ggccaacuguuacuaaguu

SEQ ID NO: 2522667 - RNA, 19 nt, Artificial Sequence
  Description of Artificial Sequence: Synthetic oligonucleotide
  Antisense strand to SEQ ID NO: 2522666
aacuuaguaacaguuggcc

SEQ ID NO: 2522668 - RNA, 19 nt, Artificial Sequence
  Description of Artificial Sequence: Synthetic oligonucleotide
  Sense strand starting at position 970 of SEQ ID NO: 1888262
ccguaaaucccucagugau

SEQ ID NO: 2522669 - RNA, 19 nt, Artificial Sequence
  Description of Artificial Sequence: Synthetic oligonucleotide
  Antisense strand to SEQ ID NO: 2522668
aucacugagggauuuacgg

SEQ ID NO: 2522670 - RNA, 19 nt, Artificial Sequence
  Description of Artificial Sequence: Synthetic oligonucleotide
  Sense strand starting at position 972 of SEQ ID NO: 1888262
guaaaucccucagugaucu

SEQ ID NO: 2522671 - RNA, 19 nt, Artificial Sequence
  Description of Artificial Sequence: Synthetic oligonucleotide
  Antisense strand to SEQ ID NO: 2522670
agaucacugagggauuuac

SEQ ID NO: 2522672 - RNA, 19 nt, Artificial Sequence
  Description of Artificial Sequence: Synthetic oligonucleotide
  Sense strand starting at position 1010 of SEQ ID NO: 1888262
guccuugauuccuuuccca

SEQ ID NO: 2522673 - RNA, 19 nt, Artificial Sequence
  Description of Artificial Sequence: Synthetic oligonucleotide
  Antisense strand to SEQ ID NO: 2522672
ugggaaaggaaucaaggac

SEQ ID NO: 2522674 - RNA, 19 nt, Artificial Sequence
  Description of Artificial Sequence: Synthetic oligonucleotide
  Sense strand starting at position 1112 of SEQ ID NO: 1888262
ggccaacagaaaugaguua

SEQ ID NO: 2522675 - RNA, 19 nt, Artificial Sequence
  Description of Artificial Sequence: Synthetic oligonucleotide
  Antisense strand to SEQ ID NO: 2522674
uaacucauuucuguuggcc

SEQ ID NO: 2522676 - RNA, 19 nt, Artificial Sequence
  Description of Artificial Sequence: Synthetic oligonucleotide
  Sense strand starting at position 1919 of SEQ ID NO: 1888262
ggaagugcucucggcaguu

SEQ ID NO: 2522677 - RNA, 19 nt, Artificial Sequence
  Description of Artificial Sequence: Synthetic oligonucleotide
  Antisense strand to SEQ ID NO: 2522676
aacugccgagagcacuucc

SEQ ID NO: 2522678 - RNA, 19 nt, Artificial Sequence
  Description of Artificial Sequence: Synthetic oligonucleotide
  Sense strand starting at position 2848 of SEQ ID NO: 1888262
ugggcuggaggguaucaau

SEQ ID NO: 2522679 - RNA, 19 nt, Artificial Sequence
  Description of Artificial Sequence: Synthetic oligonucleotide
  Antisense strand to SEQ ID NO: 2522678
auugauacccuccagccca

SEQ ID NO: 2522680 - RNA, 19 nt, Artificial Sequence
  Description of Artificial Sequence: Synthetic oligonucleotide
  Sense strand starting at position 2880 of SEQ ID NO: 1888262
uccacugaggcuuacauaa

SEQ ID NO: 2522681 - RNA, 19 nt, Artificial Sequence
  Description of Artificial Sequence: Synthetic oligonucleotide
  Antisense strand to SEQ ID NO: 2522680
uuauguaagccucagugga

SEQ ID NO: 2522682 - RNA, 19 nt, Artificial Sequence
  Description of Artificial Sequence: Synthetic oligonucleotide
  Sense strand starting at position 2909 of SEQ ID NO: 1888262
ccgggcacuggguaugaau

SEQ ID NO: 2522683 - RNA, 19 nt, Artificial Sequence
  Description of Artificial Sequence: Synthetic oligonucleotide
  Antisense strand to SEQ ID NO: 2522682
auucauacccagugcccgg

SEQ ID NO: 2522684 - RNA, 19 nt, Artificial Sequence
  Description of Artificial Sequence: Synthetic oligonucleotide
  Sense strand starting at position 2996 of SEQ ID NO: 1888262
ggucuuugucagggacucu

SEQ ID NO: 2522685 - RNA, 19 nt, Artificial Sequence
  Description of Artificial Sequence: Synthetic oligonucleotide
  Antisense strand to SEQ ID NO: 2522684
agagucccugacaaagacc

SEQ ID NO: 2522686 - RNA, 19 nt, Artificial Sequence
  Description of Artificial Sequence: Synthetic oligonucleotide
  Sense strand starting at position 3289 of SEQ ID NO: 1888262
gcggcagucaugugacacu

SEQ ID NO: 2522687 - RNA, 19 nt, Artificial Sequence
  Description of Artificial Sequence: Synthetic oligonucleotide
  Antisense strand to SEQ ID NO: 2522686
agugucacaugacugccgc

SEQ ID NO: 2522688 - RNA, 19 nt, Artificial Sequence
  Description of Artificial Sequence: Synthetic oligonucleotide
  Sense strand starting at position 3326 of SEQ ID NO: 1888262
ccaagaugugacugaugca

SEQ ID NO: 2522689 - RNA, 19 nt, Artificial Sequence
  Description of Artificial Sequence: Synthetic oligonucleotide
  Antisense strand to SEQ ID NO: 2522688
ugcaucagucacaucuugg

SEQ ID NO: 2522690 - RNA, 19 nt, Artificial Sequence
  Description of Artificial Sequence: Synthetic oligonucleotide
  Sense strand starting at position 3406 of SEQ ID NO: 1888262
gggaaucagugucucagga

SEQ ID NO: 2522691 - RNA, 19 nt, Artificial Sequence
  Description of Artificial Sequence: Synthetic oligonucleotide
  Antisense strand to SEQ ID NO: 2522690
uccugagacacugauuccc

SEQ ID NO: 2522692 - RNA, 19 nt, Artificial Sequence
  Description of Artificial Sequence: Synthetic oligonucleotide
  Sense strand starting at position 3481 of SEQ ID NO: 1888262
ggucaucccgucugaaaug

SEQ ID NO: 2522693 - RNA, 19 nt, Artificial Sequence
  Description of Artificial Sequence: Synthetic oligonucleotide
  Antisense strand to SEQ ID NO: 2522692
cauuucagacgggaugacc

SEQ ID NO: 2522694 - RNA, 19 nt, Artificial Sequence
  Description of Artificial Sequence: Synthetic oligonucleotide
  Sense strand starting at position 3486 of SEQ ID NO: 1888262
ucccgucugaaauggacaa

SEQ ID NO: 2522695 - RNA, 19 nt, Artificial Sequence
  Description of Artificial Sequence: Synthetic oligonucleotide
  Antisense strand to SEQ ID NO: 2522694
uuguccauuucagacggga

SEQ ID NO: 2522696 - RNA, 19 nt, Artificial Sequence
  Description of Artificial Sequence: Synthetic oligonucleotide
  Sense strand starting at position 3487 of SEQ ID NO: 1888262
cccgucugaaauggacaau

SEQ ID NO: 2522697 - RNA, 19 nt, Artificial Sequence
  Description of Artificial Sequence: Synthetic oligonucleotide
  Antisense strand to SEQ ID NO: 2522696
auuguccauuucagacggg

SEQ ID NO: 2522698 - RNA, 19 nt, Artificial Sequence
  Description of Artificial Sequence: Synthetic oligonucleotide
  Sense strand starting at position 3499 of SEQ ID NO: 1888262
ggacaauggugccucuaca

SEQ ID NO: 2522699 - RNA, 19 nt, Artificial Sequence
  Description of Artificial Sequence: Synthetic oligonucleotide
  Antisense strand to SEQ ID NO: 2522698
uguagaggcaccauugucc

SEQ ID NO: 2522700 - RNA, 19 nt, Artificial Sequence
  Description of Artificial Sequence: Synthetic oligonucleotide
  Sense strand starting at position 3605 of SEQ ID NO: 1888262
agauccagggcuuguugaa

SEQ ID NO: 2522701 - RNA, 19 nt, Artificial Sequence
  Description of Artificial Sequence: Synthetic oligonucleotide
  Antisense strand to SEQ ID NO: 2522700
uucaacaagcccuggaucu

SEQ ID NO: 2522702 - RNA, 19 nt, Artificial Sequence
  Description of Artificial Sequence: Synthetic oligonucleotide
  Sense strand starting at position 3777 of SEQ ID NO: 1888262
ggcagacuucuucggacgu

SEQ ID NO: 2522703 - RNA, 19 nt, Artificial Sequence
  Description of Artificial Sequence: Synthetic oligonucleotide
  Antisense strand to SEQ ID NO: 2522702
acguccgaagaagucugcc

SEQ ID NO: 2522704 - RNA, 19 nt, Artificial Sequence
  Description of Artificial Sequence: Synthetic oligonucleotide
  Sense strand starting at position 3781 of SEQ ID NO: 1888262
gacuucuucggacguggaa

SEQ ID NO: 2522705 - RNA, 19 nt, Artificial Sequence
  Description of Artificial Sequence: Synthetic oligonucleotide
  Antisense strand to SEQ ID NO: 2522704
uuccacguccgaagaaguc

SEQ ID NO: 2522706 - RNA, 19 nt, Artificial Sequence
  Description of Artificial Sequence: Synthetic oligonucleotide
  Sense strand starting at position 3783 of SEQ ID NO: 1888262
cuucuucggacguggaaga

SEQ ID NO: 2522707 - RNA, 19 nt, Artificial Sequence
  Description of Artificial Sequence: Synthetic oligonucleotide
  Antisense strand to SEQ ID NO: 2522706
ucuuccacguccgaagaag

SEQ ID NO: 2522708 - RNA, 19 nt, Artificial Sequence
  Description of Artificial Sequence: Synthetic oligonucleotide
  Sense strand starting at position 3958 of SEQ ID NO: 1888262
ugagucagauauuccaaga

SEQ ID NO: 2522709 - RNA, 19 nt, Artificial Sequence
  Description of Artificial Sequence: Synthetic oligonucleotide
  Antisense strand to SEQ ID NO: 2522708
ucuuggaauaucugacuca

SEQ ID NO: 2522710 - RNA, 19 nt, Artificial Sequence
  Description of Artificial Sequence: Synthetic oligonucleotide
  Sense strand starting at position 200 of SEQ ID NO: 1888263
uaguguuaacaguggucua

SEQ ID NO: 2522711 - RNA, 19 nt, Artificial Sequence
  Description of Artificial Sequence: Synthetic oligonucleotide
  Antisense strand to SEQ ID NO: 2522710
uagaccacuguuaacacua

SEQ ID NO: 2522712 - RNA, 19 nt, Artificial Sequence
  Description of Artificial Sequence: Synthetic oligonucleotide
  Sense strand starting at position 272 of SEQ ID NO: 1888263
gcuuaagucucaucuuaug

SEQ ID NO: 2522713 - RNA, 19 nt, Artificial Sequence
  Description of Artificial Sequence: Synthetic oligonucleotide
  Antisense strand to SEQ ID NO: 2522712
cauaagaugagacuuaagc

SEQ ID NO: 2522714 - RNA, 19 nt, Artificial Sequence
  Description of Artificial Sequence: Synthetic oligonucleotide
  Sense strand starting at position 278 of SEQ ID NO: 1888263
gucucaucuuaugcacaua

SEQ ID NO: 2522715 - RNA, 19 nt, Artificial Sequence
  Description of Artificial Sequence: Synthetic oligonucleotide
  Antisense strand to SEQ ID NO: 2522714
uaugugcauaagaugagac

SEQ ID NO: 2522716 - RNA, 19 nt, Artificial Sequence
  Description of Artificial Sequence: Synthetic oligonucleotide
  Sense strand starting at position 288 of SEQ ID NO: 1888263
augcacauauuguugaauu

SEQ ID NO: 2522717 - RNA, 19 nt, Artificial Sequence
  Description of Artificial Sequence: Synthetic oligonucleotide
  Antisense strand to SEQ ID NO: 2522716
aauucaacaauaugugcau

SEQ ID NO: 2522718 - RNA, 19 nt, Artificial Sequence
  Description of Artificial Sequence: Synthetic oligonucleotide
  Sense strand starting at position 602 of SEQ ID NO: 1888263
gggaaauagcucugaccac

SEQ ID NO: 2522719 - RNA, 19 nt, Artificial Sequence
  Description of Artificial Sequence: Synthetic oligonucleotide
  Antisense strand to SEQ ID NO: 2522718
guggucagagcuauuuccc

SEQ ID NO: 2522720 - RNA, 19 nt, Artificial Sequence
  Description of Artificial Sequence: Synthetic oligonucleotide
  Sense strand starting at position 827 of SEQ ID NO: 1888263
guguguuguagacagguuu

SEQ ID NO: 2522721 - RNA, 19 nt, Artificial Sequence
  Description of Artificial Sequence: Synthetic oligonucleotide
  Antisense strand to SEQ ID NO: 2522720
aaaccugucuacaacacac

SEQ ID NO: 2522722 - RNA, 19 nt, Artificial Sequence
  Description of Artificial Sequence: Synthetic oligonucleotide
  Sense strand starting at position 1752 of SEQ ID NO: 1888263
ccucauagacccuggugaa

SEQ ID NO: 2522723 - RNA, 19 nt, Artificial Sequence
  Description of Artificial Sequence: Synthetic oligonucleotide
  Antisense strand to SEQ ID NO: 2522722
uucaccagggucuaugagg

SEQ ID NO: 2522724 - RNA, 19 nt, Artificial Sequence
  Description of Artificial Sequence: Synthetic oligonucleotide
  Sense strand starting at position 1764 of SEQ ID NO: 1888263
uggugaacgccucauggaa

SEQ ID NO: 2522725 - RNA, 19 nt, Artificial Sequence
  Description of Artificial Sequence: Synthetic oligonucleotide
  Antisense strand to SEQ ID NO: 2522724
uuccaugaggcguucacca

SEQ ID NO: 2522726 - RNA, 19 nt, Artificial Sequence
  Description of Artificial Sequence: Synthetic oligonucleotide
  Sense strand starting at position 1854 of SEQ ID NO: 1888263
gugagaaggaggugugaga

SEQ ID NO: 2522727 - RNA, 19 nt, Artificial Sequence
  Description of Artificial Sequence: Synthetic oligonucleotide
  Antisense strand to SEQ ID NO: 2522726
ucucacaccuccuucucac

SEQ ID NO: 2522728 - RNA, 19 nt, Artificial Sequence
  Description of Artificial Sequence: Synthetic oligonucleotide
  Sense strand starting at position 1867 of SEQ ID NO: 1888263
gugagaaagcuccagaguu

SEQ ID NO: 2522729 - RNA, 19 nt, Artificial Sequence
  Description of Artificial Sequence: Synthetic oligonucleotide
  Antisense strand to SEQ ID NO: 2522728
aacucuggagcuuucucac

SEQ ID NO: 2522730 - RNA, 19 nt, Artificial Sequence
  Description of Artificial Sequence: Synthetic oligonucleotide
  Sense strand starting at position 1920 of SEQ ID NO: 1888263
gaagcacuuuccgcgauuu

SEQ ID NO: 2522731 - RNA, 19 nt, Artificial Sequence
  Description of Artificial Sequence: Synthetic oligonucleotide
  Antisense strand to SEQ ID NO: 2522730
aaaucgcggaaagugcuuc

SEQ ID NO: 2522732 - RNA, 19 nt, Artificial Sequence
  Description of Artificial Sequence: Synthetic oligonucleotide
  Sense strand starting at position 1922 of SEQ ID NO: 1888263
agcacuuuccgcgauuucu

SEQ ID NO: 2522733 - RNA, 19 nt, Artificial Sequence
  Description of Artificial Sequence: Synthetic oligonucleotide
  Antisense strand to SEQ ID NO: 2522732
agaaaucgcggaaagugcu

SEQ ID NO: 2522734 - RNA, 19 nt, Artificial Sequence
  Description of Artificial Sequence: Synthetic oligonucleotide
  Sense strand starting at position 1931 of SEQ ID NO: 1888263
cgcgauuucucucccugca

SEQ ID NO: 2522735 - RNA, 19 nt, Artificial Sequence
  Description of Artificial Sequence: Synthetic oligonucleotide
  Antisense strand to SEQ ID NO: 2522734
ugcagggagagaaaucgcg

SEQ ID NO: 2522736 - RNA, 19 nt, Artificial Sequence
  Description of Artificial Sequence: Synthetic oligonucleotide
  Sense strand starting at position 1933 of SEQ ID NO: 1888263
cgauuucucucccugcacu

SEQ ID NO: 2522737 - RNA, 19 nt, Artificial Sequence
  Description of Artificial Sequence: Synthetic oligonucleotide
  Antisense strand to SEQ ID NO: 2522736
agugcagggagagaaaucg

SEQ ID NO: 2522738 - RNA, 19 nt, Artificial Sequence
  Description of Artificial Sequence: Synthetic oligonucleotide
  Sense strand starting at position 2028 of SEQ ID NO: 1888263
gcguguuagcugccagauc

SEQ ID NO: 2522739 - RNA, 19 nt, Artificial Sequence
  Description of Artificial Sequence: Synthetic oligonucleotide
  Antisense strand to SEQ ID NO: 2522738
gaucuggcagcuaacacgc

SEQ ID NO: 2522740 - RNA, 19 nt, Artificial Sequence
  Description of Artificial Sequence: Synthetic oligonucleotide
  Sense strand starting at position 2197 of SEQ ID NO: 1888263
accaguucugaguaucuac

SEQ ID NO: 2522741 - RNA, 19 nt, Artificial Sequence
  Description of Artificial Sequence: Synthetic oligonucleotide
  Antisense strand to SEQ ID NO: 2522740
guagauacucagaacuggu

SEQ ID NO: 2522742 - RNA, 19 nt, Artificial Sequence
  Description of Artificial Sequence: Synthetic oligonucleotide
  Sense strand starting at position 2324 of SEQ ID NO: 1888263
gaaggaacuuagcuagcau

SEQ ID NO: 2522743 - RNA, 19 nt, Artificial Sequence
  Description of Artificial Sequence: Synthetic oligonucleotide
  Antisense strand to SEQ ID NO: 2522742
augcuagcuaaguuccuuc

SEQ ID NO: 2522744 - RNA, 19 nt, Artificial Sequence
  Description of Artificial Sequence: Synthetic oligonucleotide
  Sense strand starting at position 2397 of SEQ ID NO: 1888263
gccagacaguucucagaac

SEQ ID NO: 2522745 - RNA, 19 nt, Artificial Sequence
  Description of Artificial Sequence: Synthetic oligonucleotide
  Antisense strand to SEQ ID NO: 2522744
guucugagaacugucuggc

SEQ ID NO: 2522746 - RNA, 19 nt, Artificial Sequence
  Description of Artificial Sequence: Synthetic oligonucleotide
  Sense strand starting at position 2424 of SEQ ID NO: 1888263
ggcugagcucauugacugu

SEQ ID NO: 2522747 - RNA, 19 nt, Artificial Sequence
  Description of Artificial Sequence: Synthetic oligonucleotide
  Antisense strand to SEQ ID NO: 2522746
acagucaaugagcucagcc

SEQ ID NO: 2522748 - RNA, 19 nt, Artificial Sequence
  Description of Artificial Sequence: Synthetic oligonucleotide
  Sense strand starting at position 2732 of SEQ ID NO: 1888263
acagcuaacuggucuguaa

SEQ ID NO: 2522749 - RNA, 19 nt, Artificial Sequence
  Description of Artificial Sequence: Synthetic oligonucleotide
  Antisense strand to SEQ ID NO: 2522748
uuacagaccaguuagcugu

SEQ ID NO: 2522750 - RNA, 19 nt, Artificial Sequence
  Description of Artificial Sequence: Synthetic oligonucleotide
  Sense strand starting at position 2793 of SEQ ID NO: 1888263
aaacgaguuaacggucuca

SEQ ID NO: 2522751 - RNA, 19 nt, Artificial Sequence
  Description of Artificial Sequence: Synthetic oligonucleotide
  Antisense strand to SEQ ID NO: 2522750
ugagaccguuaacucguuu

SEQ ID NO: 2522752 - RNA, 19 nt, Artificial Sequence
  Description of Artificial Sequence: Synthetic oligonucleotide
  Sense strand starting at position 2832 of SEQ ID NO: 1888263
gcacuuuguaggcaacagu

SEQ ID NO: 2522753 - RNA, 19 nt, Artificial Sequence
  Description of Artificial Sequence: Synthetic oligonucleotide
  Antisense strand to SEQ ID NO: 2522752
acuguugccuacaaagugc

SEQ ID NO: 2522754 - RNA, 19 nt, Artificial Sequence
  Description of Artificial Sequence: Synthetic oligonucleotide
  Sense strand starting at position 3033 of SEQ ID NO: 1888263
agugucuuucccgaggaca

SEQ ID NO: 2522755 - RNA, 19 nt, Artificial Sequence
  Description of Artificial Sequence: Synthetic oligonucleotide
  Antisense strand to SEQ ID NO: 2522754
uguccucgggaaagacacu

SEQ ID NO: 2522756 - RNA, 19 nt, Artificial Sequence
  Description of Artificial Sequence: Synthetic oligonucleotide
  Sense strand starting at position 3250 of SEQ ID NO: 1888263
aaucaagaugucugcagau

SEQ ID NO: 2522757 - RNA, 19 nt, Artificial Sequence
  Description of Artificial Sequence: Synthetic oligonucleotide
  Antisense strand to SEQ ID NO: 2522756
aucugcagacaucuugauu

SEQ ID NO: 2522758 - RNA, 19 nt, Artificial Sequence
  Description of Artificial Sequence: Synthetic oligonucleotide
  Sense strand starting at position 3260 of SEQ ID NO: 1888263
ucugcagauuucgagagau

SEQ ID NO: 2522759 - RNA, 19 nt, Artificial Sequence
  Description of Artificial Sequence: Synthetic oligonucleotide
  Antisense strand to SEQ ID NO: 2522758
aucucucgaaaucugcaga

SEQ ID NO: 2522760 - RNA, 19 nt, Artificial Sequence
  Description of Artificial Sequence: Synthetic oligonucleotide
  Sense strand starting at position 3548 of SEQ ID NO: 1888263
guuuguucugaagauguuc

SEQ ID NO: 2522761 - RNA, 19 nt, Artificial Sequence
  Description of Artificial Sequence: Synthetic oligonucleotide
  Antisense strand to SEQ ID NO: 2522760
gaacaucuucagaacaaac

SEQ ID NO: 2522762 - RNA, 19 nt, Artificial Sequence
  Description of Artificial Sequence: Synthetic oligonucleotide
  Sense strand starting at position 3556 of SEQ ID NO: 1888263
ugaagauguuccuugguca

SEQ ID NO: 2522763 - RNA, 19 nt, Artificial Sequence
  Description of Artificial Sequence: Synthetic oligonucleotide
  Antisense strand to SEQ ID NO: 2522762
ugaccaaggaacaucuuca

SEQ ID NO: 2522764 - RNA, 19 nt, Artificial Sequence
  Description of Artificial Sequence: Synthetic oligonucleotide
  Sense strand starting at position 3557 of SEQ ID NO: 1888263
gaagauguuccuuggucac

SEQ ID NO: 2522765 - RNA, 19 nt, Artificial Sequence
  Description of Artificial Sequence: Synthetic oligonucleotide
  Antisense strand to SEQ ID NO: 2522764
gugaccaaggaacaucuuc

SEQ ID NO: 2522766 - RNA, 19 nt, Artificial Sequence
  Description of Artificial Sequence: Synthetic oligonucleotide
  Sense strand starting at position 3560 of SEQ ID NO: 1888263
gauguuccuuggucacuga

SEQ ID NO: 2522767 - RNA, 19 nt, Artificial Sequence
  Description of Artificial Sequence: Synthetic oligonucleotide
  Antisense strand to SEQ ID NO: 2522766
ucagugaccaaggaacauc

SEQ ID NO: 2522768 - RNA, 19 nt, Artificial Sequence
  Description of Artificial Sequence: Synthetic oligonucleotide
  Sense strand starting at position 3657 of SEQ ID NO: 1888263
gacuucuuucugcaagggu

SEQ ID NO: 2522769 - RNA, 19 nt, Artificial Sequence
  Description of Artificial Sequence: Synthetic oligonucleotide
  Antisense strand to SEQ ID NO: 2522768
acccuugcagaaagaaguc

SEQ ID NO: 2522770 - RNA, 19 nt, Artificial Sequence
  Description of Artificial Sequence: Synthetic oligonucleotide
  Sense strand starting at position 3678 of SEQ ID NO: 1888263
aaaggcaucugucuuugau

SEQ ID NO: 2522771 - RNA, 19 nt, Artificial Sequence
  Description of Artificial Sequence: Synthetic oligonucleotide
  Antisense strand to SEQ ID NO: 2522770
aucaaagacagaugccuuu

SEQ ID NO: 2522772 - RNA, 19 nt, Artificial Sequence
  Description of Artificial Sequence: Synthetic oligonucleotide
  Sense strand starting at position 3680 of SEQ ID NO: 1888263
aggcaucugucuuugauuc

SEQ ID NO: 2522773 - RNA, 19 nt, Artificial Sequence
  Description of Artificial Sequence: Synthetic oligonucleotide
  Antisense strand to SEQ ID NO: 2522772
gaaucaaagacagaugccu

SEQ ID NO: 2522774 - RNA, 19 nt, Artificial Sequence
  Description of Artificial Sequence: Synthetic oligonucleotide
  Sense strand starting at position 3790 of SEQ ID NO: 1888263
gaccgagaugacugaguca

SEQ ID NO: 2522775 - RNA, 19 nt, Artificial Sequence
  Description of Artificial Sequence: Synthetic oligonucleotide
  Antisense strand to SEQ ID NO: 2522774
ugacucagucaucucgguc

SEQ ID NO: 2522776 - RNA, 19 nt, Artificial Sequence
  Description of Artificial Sequence: Synthetic oligonucleotide
  Sense strand starting at position 3802 of SEQ ID NO: 1888263
ugagucauggccugagacu

SEQ ID NO: 2522777 - RNA, 19 nt, Artificial Sequence
  Description of Artificial Sequence: Synthetic oligonucleotide
  Antisense strand to SEQ ID NO: 2522776
agucucaggccaugacuca

SEQ ID NO: 2522778 - RNA, 19 nt, Artificial Sequence
  Description of Artificial Sequence: Synthetic oligonucleotide
  Sense strand starting at position 3803 of SEQ ID NO: 1888263
gagucauggccugagacug

SEQ ID NO: 2522779 - RNA, 19 nt, Artificial Sequence
  Description of Artificial Sequence: Synthetic oligonucleotide
  Antisense strand to SEQ ID NO: 2522778
cagucucaggccaugacuc

SEQ ID NO: 2522780 - RNA, 19 nt, Artificial Sequence
  Description of Artificial Sequence: Synthetic oligonucleotide
  Sense strand starting at position 3819 of SEQ ID NO: 1888263
cuggaaugugagcgugaga

SEQ ID NO: 2522781 - RNA, 19 nt, Artificial Sequence
  Description of Artificial Sequence: Synthetic oligonucleotide
  Antisense strand to SEQ ID NO: 2522780
ucucacgcucacauuccag

SEQ ID NO: 2522782 - RNA, 19 nt, Artificial Sequence
  Description of Artificial Sequence: Synthetic oligonucleotide
  Sense strand starting at position 3821 of SEQ ID NO: 1888263
ggaaugugagcgugagaag

SEQ ID NO: 2522783 - RNA, 19 nt, Artificial Sequence
  Description of Artificial Sequence: Synthetic oligonucleotide
  Antisense strand to SEQ ID NO: 2522782
cuucucacgcucacauucc

SEQ ID NO: 2522784 - RNA, 19 nt, Artificial Sequence
  Description of Artificial Sequence: Synthetic oligonucleotide
  Sense strand starting at position 3822 of SEQ ID NO: 1888263
gaaugugagcgugagaaga

SEQ ID NO: 2522785 - RNA, 19 nt, Artificial Sequence
  Description of Artificial Sequence: Synthetic oligonucleotide
  Antisense strand to SEQ ID NO: 2522784
ucuucucacgcucacauuc

SEQ ID NO: 2522786 - RNA, 19 nt, Artificial Sequence
  Description of Artificial Sequence: Synthetic oligonucleotide
  Sense strand starting at position 3863 of SEQ ID NO: 1888263
ggguaacugcuuugcuaaa

SEQ ID NO: 2522787 - RNA, 19 nt, Artificial Sequence
  Description of Artificial Sequence: Synthetic oligonucleotide
  Antisense strand to SEQ ID NO: 2522786
uuuagcaaagcaguuaccc

SEQ ID NO: 2522788 - RNA, 19 nt, Artificial Sequence
  Description of Artificial Sequence: Synthetic oligonucleotide
  Sense strand starting at position 3865 of SEQ ID NO: 1888263
guaacugcuuugcuaaacu

SEQ ID NO: 2522789 - RNA, 19 nt, Artificial Sequence
  Description of Artificial Sequence: Synthetic oligonucleotide
  Antisense strand to SEQ ID NO: 2522788
aguuuagcaaagcaguuac

SEQ ID NO: 2522790 - RNA, 19 nt, Artificial Sequence
  Description of Artificial Sequence: Synthetic oligonucleotide
  Sense strand starting at position 103 of SEQ ID NO: 1888264
gucauuacuugccuacaca

SEQ ID NO: 2522791 - RNA, 19 nt, Artificial Sequence
  Description of Artificial Sequence: Synthetic oligonucleotide
  Antisense strand to SEQ ID NO: 2522790
uguguaggcaaguaaugac

SEQ ID NO: 2522792 - RNA, 19 nt, Artificial Sequence
  Description of Artificial Sequence: Synthetic oligonucleotide
  Sense strand starting at position 452 of SEQ ID NO: 1888264
gaaagagacugcucucuga

SEQ ID NO: 2522793 - RNA, 19 nt, Artificial Sequence
  Description of Artificial Sequence: Synthetic oligonucleotide
  Antisense strand to SEQ ID NO: 2522792
ucagagagcagucucuuuc

SEQ ID NO: 2522794 - RNA, 19 nt, Artificial Sequence
  Description of Artificial Sequence: Synthetic oligonucleotide
  Sense strand starting at position 455 of SEQ ID NO: 1888264
agagacugcucucugauaa

SEQ ID NO: 2522795 - RNA, 19 nt, Artificial Sequence
  Description of Artificial Sequence: Synthetic oligonucleotide
  Antisense strand to SEQ ID NO: 2522794
uuaucagagagcagucucu

SEQ ID NO: 2522796 - RNA, 19 nt, Artificial Sequence
  Description of Artificial Sequence: Synthetic oligonucleotide
  Sense strand starting at position 498 of SEQ ID NO: 1888264
auacuaaagugucucccau

SEQ ID NO: 2522797 - RNA, 19 nt, Artificial Sequence
  Description of Artificial Sequence: Synthetic oligonucleotide
  Antisense strand to SEQ ID NO: 2522796
augggagacacuuuaguau

SEQ ID NO: 2522798 - RNA, 19 nt, Artificial Sequence
  Description of Artificial Sequence: Synthetic oligonucleotide
  Sense strand starting at position 537 of SEQ ID NO: 1888264
ugcaaugcuccugagacca

SEQ ID NO: 2522799 - RNA, 19 nt, Artificial Sequence
  Description of Artificial Sequence: Synthetic oligonucleotide
  Antisense strand to SEQ ID NO: 2522798
uggucucaggagcauugca

SEQ ID NO: 2522800 - RNA, 19 nt, Artificial Sequence
  Description of Artificial Sequence: Synthetic oligonucleotide
  Sense strand starting at position 571 of SEQ ID NO: 1888264
agagaaggagugugugaaa

SEQ ID NO: 2522801 - RNA, 19 nt, Artificial Sequence
  Description of Artificial Sequence: Synthetic oligonucleotide
  Antisense strand to SEQ ID NO: 2522800
uuucacacacuccuucucu

SEQ ID NO: 2522802 - RNA, 19 nt, Artificial Sequence
  Description of Artificial Sequence: Synthetic oligonucleotide
  Sense strand starting at position 702 of SEQ ID NO: 1888264
uuugaaugcagguguauac

SEQ ID NO: 2522803 - RNA, 19 nt, Artificial Sequence
  Description of Artificial Sequence: Synthetic oligonucleotide
  Antisense strand to SEQ ID NO: 2522802
guauacaccugcauucaaa

SEQ ID NO: 2522804 - RNA, 19 nt, Artificial Sequence
  Description of Artificial Sequence: Synthetic oligonucleotide
  Sense strand starting at position 731 of SEQ ID NO: 1888264
agagauccaugaggagaaa

SEQ ID NO: 2522805 - RNA, 19 nt, Artificial Sequence
  Description of Artificial Sequence: Synthetic oligonucleotide
  Antisense strand to SEQ ID NO: 2522804
uuucuccucauggaucucu

SEQ ID NO: 2522806 - RNA, 19 nt, Artificial Sequence
  Description of Artificial Sequence: Synthetic oligonucleotide
  Sense strand starting at position 841 of SEQ ID NO: 1888264
cuuccuugccaggaggaau

SEQ ID NO: 2522807 - RNA, 19 nt, Artificial Sequence
  Description of Artificial Sequence: Synthetic oligonucleotide
  Antisense strand to SEQ ID NO: 2522806
auuccuccuggcaaggaag

SEQ ID NO: 2522808 - RNA, 19 nt, Artificial Sequence
  Description of Artificial Sequence: Synthetic oligonucleotide
  Sense strand starting at position 894 of SEQ ID NO: 1888264
aaauauugguugguaauga

SEQ ID NO: 2522809 - RNA, 19 nt, Artificial Sequence
  Description of Artificial Sequence: Synthetic oligonucleotide
  Antisense strand to SEQ ID NO: 2522808
ucauuaccaaccaauauuu

SEQ ID NO: 2522810 - RNA, 19 nt, Artificial Sequence
  Description of Artificial Sequence: Synthetic oligonucleotide
  Sense strand starting at position 904 of SEQ ID NO: 1888264
ugguaaugauaggaaucau

SEQ ID NO: 2522811 - RNA, 19 nt, Artificial Sequence
  Description of Artificial Sequence: Synthetic oligonucleotide
  Antisense strand to SEQ ID NO: 2522810
augauuccuaucauuacca

SEQ ID NO: 2522812 - RNA, 19 nt, Artificial Sequence
  Description of Artificial Sequence: Synthetic oligonucleotide
  Sense strand starting at position 915 of SEQ ID NO: 1888264
ggaaucauauggucucaag

SEQ ID NO: 2522813 - RNA, 19 nt, Artificial Sequence
  Description of Artificial Sequence: Synthetic oligonucleotide
  Antisense strand to SEQ ID NO: 2522812
cuugagaccauaugauucc

SEQ ID NO: 2522814 - RNA, 19 nt, Artificial Sequence
  Description of Artificial Sequence: Synthetic oligonucleotide
  Sense strand starting at position 995 of SEQ ID NO: 1888264
ucaguccuugacugggaua

SEQ ID NO: 2522815 - RNA, 19 nt, Artificial Sequence
  Description of Artificial Sequence: Synthetic oligonucleotide
  Antisense strand to SEQ ID NO: 2522814
uaucccagucaaggacuga

SEQ ID NO: 2522816 - RNA, 19 nt, Artificial Sequence
  Description of Artificial Sequence: Synthetic oligonucleotide
  Sense strand starting at position 997 of SEQ ID NO: 1888264
aguccuugacugggauagu

SEQ ID NO: 2522817 - RNA, 19 nt, Artificial Sequence
  Description of Artificial Sequence: Synthetic oligonucleotide
  Antisense strand to SEQ ID NO: 2522816
acuaucccagucaaggacu

SEQ ID NO: 2522818 - RNA, 19 nt, Artificial Sequence
  Description of Artificial Sequence: Synthetic oligonucleotide
  Sense strand starting at position 1296 of SEQ ID NO: 1888264
acagaacuguacuagauac

SEQ ID NO: 2522819 - RNA, 19 nt, Artificial Sequence
  Description of Artificial Sequence: Synthetic oligonucleotide
  Antisense strand to SEQ ID NO: 2522818
guaucuaguacaguucugu

SEQ ID NO: 2522820 - RNA, 19 nt, Artificial Sequence
  Description of Artificial Sequence: Synthetic oligonucleotide
  Sense strand starting at position 1414 of SEQ ID NO: 1888264
guggacuaucugcaacaga

SEQ ID NO: 2522821 - RNA, 19 nt, Artificial Sequence
  Description of Artificial Sequence: Synthetic oligonucleotide
  Antisense strand to SEQ ID NO: 2522820
ucuguugcagauaguccac

SEQ ID NO: 2522822 - RNA, 19 nt, Artificial Sequence
  Description of Artificial Sequence: Synthetic oligonucleotide
  Sense strand starting at position 1510 of SEQ ID NO: 1888264
guaguuaccagacaguaaa

SEQ ID NO: 2522823 - RNA, 19 nt, Artificial Sequence
  Description of Artificial Sequence: Synthetic oligonucleotide
  Antisense strand to SEQ ID NO: 2522822
uuuacugucugguaacuac

SEQ ID NO: 2522824 - RNA, 19 nt, Artificial Sequence
  Description of Artificial Sequence: Synthetic oligonucleotide
  Sense strand starting at position 1621 of SEQ ID NO: 1888264
ggccaacacugaucaaugu

SEQ ID NO: 2522825 - RNA, 19 nt, Artificial Sequence
  Description of Artificial Sequence: Synthetic oligonucleotide
  Antisense strand to SEQ ID NO: 2522824
acauugaucaguguuggcc

SEQ ID NO: 2522826 - RNA, 19 nt, Artificial Sequence
  Description of Artificial Sequence: Synthetic oligonucleotide
  Sense strand starting at position 1628 of SEQ ID NO: 1888264
acugaucaauguguaguua

SEQ ID NO: 2522827 - RNA, 19 nt, Artificial Sequence
  Description of Artificial Sequence: Synthetic oligonucleotide
  Antisense strand to SEQ ID NO: 2522826
uaacuacacauugaucagu

SEQ ID NO: 2522828 - RNA, 19 nt, Artificial Sequence
  Description of Artificial Sequence: Synthetic oligonucleotide
  Sense strand starting at position 1629 of SEQ ID NO: 1888264
cugaucaauguguaguuaa

SEQ ID NO: 2522829 - RNA, 19 nt, Artificial Sequence
  Description of Artificial Sequence: Synthetic oligonucleotide
  Antisense strand to SEQ ID NO: 2522828
uuaacuacacauugaucag

SEQ ID NO: 2522830 - RNA, 19 nt, Artificial Sequence
  Description of Artificial Sequence: Synthetic oligonucleotide
  Sense strand starting at position 1632 of SEQ ID NO: 1888264
aucaauguguaguuaauca

SEQ ID NO: 2522831 - RNA, 19 nt, Artificial Sequence
  Description of Artificial Sequence: Synthetic oligonucleotide
  Antisense strand to SEQ ID NO: 2522830
ugauuaacuacacauugau

SEQ ID NO: 2522832 - RNA, 19 nt, Artificial Sequence
  Description of Artificial Sequence: Synthetic oligonucleotide
  Sense strand starting at position 1636 of SEQ ID NO: 1888264
auguguaguuaaucagcaa

SEQ ID NO: 2522833 - RNA, 19 nt, Artificial Sequence
  Description of Artificial Sequence: Synthetic oligonucleotide
  Antisense strand to SEQ ID NO: 2522832
uugcugauuaacuacacau

SEQ ID NO: 2522834 - RNA, 19 nt, Artificial Sequence
  Description of Artificial Sequence: Synthetic oligonucleotide
  Sense strand starting at position 1712 of SEQ ID NO: 1888264
ugacucugcuggucaucaa

SEQ ID NO: 2522835 - RNA, 19 nt, Artificial Sequence
  Description of Artificial Sequence: Synthetic oligonucleotide
  Antisense strand to SEQ ID NO: 2522834
uugaugaccagcagaguca

SEQ ID NO: 2522836 - RNA, 19 nt, Artificial Sequence
  Description of Artificial Sequence: Synthetic oligonucleotide
  Sense strand starting at position 2038 of SEQ ID NO: 1888264
aagugagcugccuggagau

SEQ ID NO: 2522837 - RNA, 19 nt, Artificial Sequence
  Description of Artificial Sequence: Synthetic oligonucleotide
  Antisense strand to SEQ ID NO: 2522836
aucuccaggcagcucacuu

SEQ ID NO: 2522838 - RNA, 19 nt, Artificial Sequence
  Description of Artificial Sequence: Synthetic oligonucleotide
  Sense strand starting at position 2129 of SEQ ID NO: 1888264
ucaagaaagucacagaaga

SEQ ID NO: 2522839 - RNA, 19 nt, Artificial Sequence
  Description of Artificial Sequence: Synthetic oligonucleotide
  Antisense strand to SEQ ID NO: 2522838
ucuucugugacuuucuuga

SEQ ID NO: 2522840 - RNA, 19 nt, Artificial Sequence
  Description of Artificial Sequence: Synthetic oligonucleotide
  Sense strand starting at position 2145 of SEQ ID NO: 1888264
agaccaauuucugguuaaa

SEQ ID NO: 2522841 - RNA, 19 nt, Artificial Sequence
  Description of Artificial Sequence: Synthetic oligonucleotide
  Antisense strand to SEQ ID NO: 2522840
uuuaaccagaaauuggucu

SEQ ID NO: 2522842 - RNA, 19 nt, Artificial Sequence
  Description of Artificial Sequence: Synthetic oligonucleotide
  Sense strand starting at position 2283 of SEQ ID NO: 1888264
gcaguuucccuacauuaca

SEQ ID NO: 2522843 - RNA, 19 nt, Artificial Sequence
  Description of Artificial Sequence: Synthetic oligonucleotide
  Antisense strand to SEQ ID NO: 2522842
uguaauguagggaaacugc

SEQ ID NO: 2522844 - RNA, 19 nt, Artificial Sequence
  Description of Artificial Sequence: Synthetic oligonucleotide
  Sense strand starting at position 2353 of SEQ ID NO: 1888264
ccggcuuugccauacaguu

SEQ ID NO: 2522845 - RNA, 19 nt, Artificial Sequence
  Description of Artificial Sequence: Synthetic oligonucleotide
  Antisense strand to SEQ ID NO: 2522844
aacuguauggcaaagccgg

SEQ ID NO: 2522846 - RNA, 19 nt, Artificial Sequence
  Description of Artificial Sequence: Synthetic oligonucleotide
  Sense strand starting at position 2361 of SEQ ID NO: 1888264
gccauacaguucucggaau

SEQ ID NO: 2522847 - RNA, 19 nt, Artificial Sequence
  Description of Artificial Sequence: Synthetic oligonucleotide
  Antisense strand to SEQ ID NO: 2522846
auuccgagaacuguauggc

SEQ ID NO: 2522848 - RNA, 19 nt, Artificial Sequence
  Description of Artificial Sequence: Synthetic oligonucleotide
  Sense strand starting at position 2363 of SEQ ID NO: 1888264
cauacaguucucggaauuc

SEQ ID NO: 2522849 - RNA, 19 nt, Artificial Sequence
  Description of Artificial Sequence: Synthetic oligonucleotide
  Antisense strand to SEQ ID NO: 2522848
gaauuccgagaacuguaug

SEQ ID NO: 2522850 - RNA, 19 nt, Artificial Sequence
  Description of Artificial Sequence: Synthetic oligonucleotide
  Sense strand starting at position 2663 of SEQ ID NO: 1888264
ggcaaaggagucuggaauu

SEQ ID NO: 2522851 - RNA, 19 nt, Artificial Sequence
  Description of Artificial Sequence: Synthetic oligonucleotide
  Antisense strand to SEQ ID NO: 2522850
aauuccagacuccuuugcc

SEQ ID NO: 2522852 - RNA, 19 nt, Artificial Sequence
  Description of Artificial Sequence: Synthetic oligonucleotide
  Sense strand starting at position 2697 of SEQ ID NO: 1888264
cugggagcguccuccauuu

SEQ ID NO: 2522853 - RNA, 19 nt, Artificial Sequence
  Description of Artificial Sequence: Synthetic oligonucleotide
  Antisense strand to SEQ ID NO: 2522852
aaauggaggacgcucccag

SEQ ID NO: 2522854 - RNA, 19 nt, Artificial Sequence
  Description of Artificial Sequence: Synthetic oligonucleotide
  Sense strand starting at position 2721 of SEQ ID NO: 1888264
ucagccaacuggucuguaa

SEQ ID NO: 2522855 - RNA, 19 nt, Artificial Sequence
  Description of Artificial Sequence: Synthetic oligonucleotide
  Antisense strand to SEQ ID NO: 2522854
uuacagaccaguuggcuga

SEQ ID NO: 2522856 - RNA, 19 nt, Artificial Sequence
  Description of Artificial Sequence: Synthetic oligonucleotide
  Sense strand starting at position 2765 of SEQ ID NO: 1888264
aaagguuauugaggagaaa

SEQ ID NO: 2522857 - RNA, 19 nt, Artificial Sequence
  Description of Artificial Sequence: Synthetic oligonucleotide
  Antisense strand to SEQ ID NO: 2522856
uuucuccucaauaaccuuu

SEQ ID NO: 2522858 - RNA, 19 nt, Artificial Sequence
  Description of Artificial Sequence: Synthetic oligonucleotide
  Sense strand starting at position 2808 of SEQ ID NO: 1888264
ggcacaaugaccgacacuu

SEQ ID NO: 2522859 - RNA, 19 nt, Artificial Sequence
  Description of Artificial Sequence: Synthetic oligonucleotide
  Antisense strand to SEQ ID NO: 2522858
aagugucggucauugugcc

SEQ ID NO: 2522860 - RNA, 19 nt, Artificial Sequence
  Description of Artificial Sequence: Synthetic oligonucleotide
  Sense strand starting at position 3616 of SEQ ID NO: 1888264
gcuuccauuugaggacaca

SEQ ID NO: 2522861 - RNA, 19 nt, Artificial Sequence
  Description of Artificial Sequence: Synthetic oligonucleotide
  Antisense strand to SEQ ID NO: 2522860
uguguccucaaauggaagc

SEQ ID NO: 2522862 - RNA, 19 nt, Artificial Sequence
  Description of Artificial Sequence: Synthetic oligonucleotide
  Sense strand starting at position 3639 of SEQ ID NO: 1888264
gaagacagccaucagucua

SEQ ID NO: 2522863 - RNA, 19 nt, Artificial Sequence
  Description of Artificial Sequence: Synthetic oligonucleotide
  Antisense strand to SEQ ID NO: 2522862
uagacugauggcugucuuc

SEQ ID NO: 2522864 - RNA, 19 nt, Artificial Sequence
  Description of Artificial Sequence: Synthetic oligonucleotide
  Sense strand starting at position 3709 of SEQ ID NO: 1888264
gccuuugaucuuggacuuu

SEQ ID NO: 2522865 - RNA, 19 nt, Artificial Sequence
  Description of Artificial Sequence: Synthetic oligonucleotide
  Antisense strand to SEQ ID NO: 2522864
aaaguccaagaucaaaggc

SEQ ID NO: 2522866 - RNA, 19 nt, Artificial Sequence
  Description of Artificial Sequence: Synthetic oligonucleotide
  Sense strand starting at position 3824 of SEQ ID NO: 1888264
gcaaauaggucagcuugga

SEQ ID NO: 2522867 - RNA, 19 nt, Artificial Sequence
  Description of Artificial Sequence: Synthetic oligonucleotide
  Antisense strand to SEQ ID NO: 2522866
uccaagcugaccuauuugc

SEQ ID NO: 2522868 - RNA, 19 nt, Artificial Sequence
  Description of Artificial Sequence: Synthetic oligonucleotide
  Sense strand starting at position 3938 of SEQ ID NO: 1888264
gugugucugcagucuuguu

SEQ ID NO: 2522869 - RNA, 19 nt, Artificial Sequence
  Description of Artificial Sequence: Synthetic oligonucleotide
  Antisense strand to SEQ ID NO: 2522868
aacaagacugcagacacac

SEQ ID NO: 2522870 - RNA, 19 nt, Artificial Sequence
  Description of Artificial Sequence: Synthetic oligonucleotide
  Sense strand starting at position 384 of SEQ ID NO: 1888265
cauggugggucacgaaaua

SEQ ID NO: 2522871 - RNA, 19 nt, Artificial Sequence
  Description of Artificial Sequence: Synthetic oligonucleotide
  Antisense strand to SEQ ID NO: 2522870
uauuucgugacccaccaug

SEQ ID NO: 2522872 - RNA, 19 nt, Artificial Sequence
  Description of Artificial Sequence: Synthetic oligonucleotide
  Sense strand starting at position 604 of SEQ ID NO: 1888265
cagauauguccaugccuag

SEQ ID NO: 2522873 - RNA, 19 nt, Artificial Sequence
  Description of Artificial Sequence: Synthetic oligonucleotide
  Antisense strand to SEQ ID NO: 2522872
cuaggcauggacauaucug

SEQ ID NO: 2522874 - RNA, 19 nt, Artificial Sequence
  Description of Artificial Sequence: Synthetic oligonucleotide
  Sense strand starting at position 608 of SEQ ID NO: 1888265
uauguccaugccuaggaaa

SEQ ID NO: 2522875 - RNA, 19 nt, Artificial Sequence
  Description of Artificial Sequence: Synthetic oligonucleotide
  Antisense strand to SEQ ID NO: 2522874
uuuccuaggcauggacaua

SEQ ID NO: 2522876 - RNA, 19 nt, Artificial Sequence
  Description of Artificial Sequence: Synthetic oligonucleotide
  Sense strand starting at position 966 of SEQ ID NO: 1888265
ccuacucugccuggaggaa

SEQ ID NO: 2522877 - RNA, 19 nt, Artificial Sequence
  Description of Artificial Sequence: Synthetic oligonucleotide
  Antisense strand to SEQ ID NO: 2522876
uuccuccaggcagaguagg

SEQ ID NO: 2522878 - RNA, 19 nt, Artificial Sequence
  Description of Artificial Sequence: Synthetic oligonucleotide
  Sense strand starting at position 1183 of SEQ ID NO: 1888265
gauggucaguccucaucaa

SEQ ID NO: 2522879 - RNA, 19 nt, Artificial Sequence
  Description of Artificial Sequence: Synthetic oligonucleotide
  Antisense strand to SEQ ID NO: 2522878
uugaugaggacugaccauc

SEQ ID NO: 2522880 - RNA, 19 nt, Artificial Sequence
  Description of Artificial Sequence: Synthetic oligonucleotide
  Sense strand starting at position 1187 of SEQ ID NO: 1888265
gucaguccucaucaagacu

SEQ ID NO: 2522881 - RNA, 19 nt, Artificial Sequence
  Description of Artificial Sequence: Synthetic oligonucleotide
  Antisense strand to SEQ ID NO: 2522880
agucuugaugaggacugac

SEQ ID NO: 2522882 - RNA, 19 nt, Artificial Sequence
  Description of Artificial Sequence: Synthetic oligonucleotide
  Sense strand starting at position 1225 of SEQ ID NO: 1888265
gaccaaaggcuccaguauu

SEQ ID NO: 2522883 - RNA, 19 nt, Artificial Sequence
  Description of Artificial Sequence: Synthetic oligonucleotide
  Antisense strand to SEQ ID NO: 2522882
aauacuggagccuuugguc

SEQ ID NO: 2522884 - RNA, 19 nt, Artificial Sequence
  Description of Artificial Sequence: Synthetic oligonucleotide
  Sense strand starting at position 1610 of SEQ ID NO: 1888265
acaggaauauaacagauga

SEQ ID NO: 2522885 - RNA, 19 nt, Artificial Sequence
  Description of Artificial Sequence: Synthetic oligonucleotide
  Antisense strand to SEQ ID NO: 2522884
ucaucuguuauauuccugu

SEQ ID NO: 2522886 - RNA, 19 nt, Artificial Sequence
  Description of Artificial Sequence: Synthetic oligonucleotide
  Sense strand starting at position 1985 of SEQ ID NO: 1888265
gcaagucaucacugcaaag

SEQ ID NO: 2522887 - RNA, 19 nt, Artificial Sequence
  Description of Artificial Sequence: Synthetic oligonucleotide
  Antisense strand to SEQ ID NO: 2522886
cuuugcagugaugacuugc

SEQ ID NO: 2522888 - RNA, 19 nt, Artificial Sequence
  Description of Artificial Sequence: Synthetic oligonucleotide
  Sense strand starting at position 2071 of SEQ ID NO: 1888265
guaacacacccucgaguau

SEQ ID NO: 2522889 - RNA, 19 nt, Artificial Sequence
  Description of Artificial Sequence: Synthetic oligonucleotide
  Antisense strand to SEQ ID NO: 2522888
auacucgaggguguguuac

SEQ ID NO: 2522890 - RNA, 19 nt, Artificial Sequence
  Description of Artificial Sequence: Synthetic oligonucleotide
  Sense strand starting at position 2080 of SEQ ID NO: 1888265
ccucgaguauuucguagaa

SEQ ID NO: 2522891 - RNA, 19 nt, Artificial Sequence
  Description of Artificial Sequence: Synthetic oligonucleotide
  Antisense strand to SEQ ID NO: 2522890
uucuacgaaauacucgagg

SEQ ID NO: 2522892 - RNA, 19 nt, Artificial Sequence
  Description of Artificial Sequence: Synthetic oligonucleotide
  Sense strand starting at position 2082 of SEQ ID NO: 1888265
ucgaguauuucguagaauu

SEQ ID NO: 2522893 - RNA, 19 nt, Artificial Sequence
  Description of Artificial Sequence: Synthetic oligonucleotide
  Antisense strand to SEQ ID NO: 2522892
aauucuacgaaauacucga

SEQ ID NO: 2522894 - RNA, 19 nt, Artificial Sequence
  Description of Artificial Sequence: Synthetic oligonucleotide
  Sense strand starting at position 2180 of SEQ ID NO: 1888265
cagacacuugauuguguuu

SEQ ID NO: 2522895 - RNA, 19 nt, Artificial Sequence
  Description of Artificial Sequence: Synthetic oligonucleotide
  Antisense strand to SEQ ID NO: 2522894
aaacacaaucaagugucug

SEQ ID NO: 2522896 - RNA, 19 nt, Artificial Sequence
  Description of Artificial Sequence: Synthetic oligonucleotide
  Sense strand starting at position 2182 of SEQ ID NO: 1888265
gacacuugauuguguuuag

SEQ ID NO: 2522897 - RNA, 19 nt, Artificial Sequence
  Description of Artificial Sequence: Synthetic oligonucleotide
  Antisense strand to SEQ ID NO: 2522896
cuaaacacaaucaaguguc

SEQ ID NO: 2522898 - RNA, 19 nt, Artificial Sequence
  Description of Artificial Sequence: Synthetic oligonucleotide
  Sense strand starting at position 2185 of SEQ ID NO: 1888265
acuugauuguguuuaggca

SEQ ID NO: 2522899 - RNA, 19 nt, Artificial Sequence
  Description of Artificial Sequence: Synthetic oligonucleotide
  Antisense strand to SEQ ID NO: 2522898
ugccuaaacacaaucaagu

SEQ ID NO: 2522900 - RNA, 19 nt, Artificial Sequence
  Description of Artificial Sequence: Synthetic oligonucleotide
  Sense strand starting at position 2186 of SEQ ID NO: 1888265
cuugauuguguuuaggcaa

SEQ ID NO: 2522901 - RNA, 19 nt, Artificial Sequence
  Description of Artificial Sequence: Synthetic oligonucleotide
  Antisense strand to SEQ ID NO: 2522900
uugccuaaacacaaucaag

SEQ ID NO: 2522902 - RNA, 19 nt, Artificial Sequence
  Description of Artificial Sequence: Synthetic oligonucleotide
  Sense strand starting at position 2601 of SEQ ID NO: 1888265
uuccacaucgucugcuuaa

SEQ ID NO: 2522903 - RNA, 19 nt, Artificial Sequence
  Description of Artificial Sequence: Synthetic oligonucleotide
  Antisense strand to SEQ ID NO: 2522902
uuaagcagacgauguggaa

SEQ ID NO: 2522904 - RNA, 19 nt, Artificial Sequence
  Description of Artificial Sequence: Synthetic oligonucleotide
  Sense strand starting at position 2602 of SEQ ID NO: 1888265
uccacaucgucugcuuaaa

SEQ ID NO: 2522905 - RNA, 19 nt, Artificial Sequence
  Description of Artificial Sequence: Synthetic oligonucleotide
  Antisense strand to SEQ ID NO: 2522904
uuuaagcagacgaugugga

SEQ ID NO: 2522906 - RNA, 19 nt, Artificial Sequence
  Description of Artificial Sequence: Synthetic oligonucleotide
  Sense strand starting at position 2614 of SEQ ID NO: 1888265
gcuuaaacaguuuggucua

SEQ ID NO: 2522907 - RNA, 19 nt, Artificial Sequence
  Description of Artificial Sequence: Synthetic oligonucleotide
  Antisense strand to SEQ ID NO: 2522906
uagaccaaacuguuuaagc

SEQ ID NO: 2522908 - RNA, 19 nt, Artificial Sequence
  Description of Artificial Sequence: Synthetic oligonucleotide
  Sense strand starting at position 2617 of SEQ ID NO: 1888265
uaaacaguuuggucuagca

SEQ ID NO: 2522909 - RNA, 19 nt, Artificial Sequence
  Description of Artificial Sequence: Synthetic oligonucleotide
  Antisense strand to SEQ ID NO: 2522908
ugcuagaccaaacuguuua

SEQ ID NO: 2522910 - RNA, 19 nt, Artificial Sequence
  Description of Artificial Sequence: Synthetic oligonucleotide
  Sense strand starting at position 2619 of SEQ ID NO: 1888265
aacaguuuggucuagcaca

SEQ ID NO: 2522911 - RNA, 19 nt, Artificial Sequence
  Description of Artificial Sequence: Synthetic oligonucleotide
  Antisense strand to SEQ ID NO: 2522910
ugugcuagaccaaacuguu

SEQ ID NO: 2522912 - RNA, 19 nt, Artificial Sequence
  Description of Artificial Sequence: Synthetic oligonucleotide
  Sense strand starting at position 2645 of SEQ ID NO: 1888265
gaccuugagcucugugaag

SEQ ID NO: 2522913 - RNA, 19 nt, Artificial Sequence
  Description of Artificial Sequence: Synthetic oligonucleotide
  Antisense strand to SEQ ID NO: 2522912
cuucacagagcucaagguc

SEQ ID NO: 2522914 - RNA, 19 nt, Artificial Sequence
  Description of Artificial Sequence: Synthetic oligonucleotide
  Sense strand starting at position 2651 of SEQ ID NO: 1888265
gagcucugugaagacaauu

SEQ ID NO: 2522915 - RNA, 19 nt, Artificial Sequence
  Description of Artificial Sequence: Synthetic oligonucleotide
  Antisense strand to SEQ ID NO: 2522914
aauugucuucacagagcuc

SEQ ID NO: 2522916 - RNA, 19 nt, Artificial Sequence
  Description of Artificial Sequence: Synthetic oligonucleotide
  Sense strand starting at position 2701 of SEQ ID NO: 1888265
cugccucacgccuaucaga

SEQ ID NO: 2522917 - RNA, 19 nt, Artificial Sequence
  Description of Artificial Sequence: Synthetic oligonucleotide
  Antisense strand to SEQ ID NO: 2522916
ucugauaggcgugaggcag

SEQ ID NO: 2522918 - RNA, 19 nt, Artificial Sequence
  Description of Artificial Sequence: Synthetic oligonucleotide
  Sense strand starting at position 2781 of SEQ ID NO: 1888265
accacaucucucugugaca

SEQ ID NO: 2522919 - RNA, 19 nt, Artificial Sequence
  Description of Artificial Sequence: Synthetic oligonucleotide
  Antisense strand to SEQ ID NO: 2522918
ugucacagagagauguggu

SEQ ID NO: 2522920 - RNA, 19 nt, Artificial Sequence
  Description of Artificial Sequence: Synthetic oligonucleotide
  Sense strand starting at position 2784 of SEQ ID NO: 1888265
acaucucucugugacacuu

SEQ ID NO: 2522921 - RNA, 19 nt, Artificial Sequence
  Description of Artificial Sequence: Synthetic oligonucleotide
  Antisense strand to SEQ ID NO: 2522920
aagugucacagagagaugu

SEQ ID NO: 2522922 - RNA, 19 nt, Artificial Sequence
  Description of Artificial Sequence: Synthetic oligonucleotide
  Sense strand starting at position 3094 of SEQ ID NO: 1888265
gcuuauuucuaauugcuag

SEQ ID NO: 2522923 - RNA, 19 nt, Artificial Sequence
  Description of Artificial Sequence: Synthetic oligonucleotide
  Antisense strand to SEQ ID NO: 2522922
cuagcaauuagaaauaagc

SEQ ID NO: 2522924 - RNA, 19 nt, Artificial Sequence
  Description of Artificial Sequence: Synthetic oligonucleotide
  Sense strand starting at position 3100 of SEQ ID NO: 1888265
uucuaauugcuagagcgau

SEQ ID NO: 2522925 - RNA, 19 nt, Artificial Sequence
  Description of Artificial Sequence: Synthetic oligonucleotide
  Antisense strand to SEQ ID NO: 2522924
aucgcucuagcaauuagaa

SEQ ID NO: 2522926 - RNA, 19 nt, Artificial Sequence
  Description of Artificial Sequence: Synthetic oligonucleotide
  Sense strand starting at position 3115 of SEQ ID NO: 1888265
cgauucuacccauggguca

SEQ ID NO: 2522927 - RNA, 19 nt, Artificial Sequence
  Description of Artificial Sequence: Synthetic oligonucleotide
  Antisense strand to SEQ ID NO: 2522926
ugacccauggguagaaucg

SEQ ID NO: 2522928 - RNA, 19 nt, Artificial Sequence
  Description of Artificial Sequence: Synthetic oligonucleotide
  Sense strand starting at position 3116 of SEQ ID NO: 1888265
gauucuacccaugggucaa

SEQ ID NO: 2522929 - RNA, 19 nt, Artificial Sequence
  Description of Artificial Sequence: Synthetic oligonucleotide
  Antisense strand to SEQ ID NO: 2522928
uugacccauggguagaauc

SEQ ID NO: 2522930 - RNA, 19 nt, Artificial Sequence
  Description of Artificial Sequence: Synthetic oligonucleotide
  Sense strand starting at position 3852 of SEQ ID NO: 1888265
ggguaauaguccgguuccu

SEQ ID NO: 2522931 - RNA, 19 nt, Artificial Sequence
  Description of Artificial Sequence: Synthetic oligonucleotide
  Antisense strand to SEQ ID NO: 2522930
aggaaccggacuauuaccc

SEQ ID NO: 2522932 - RNA, 19 nt, Artificial Sequence
  Description of Artificial Sequence: Synthetic oligonucleotide
  Sense strand starting at position 3870 of SEQ ID NO: 1888265
ugauguucuugucauauga

SEQ ID NO: 2522933 - RNA, 19 nt, Artificial Sequence
  Description of Artificial Sequence: Synthetic oligonucleotide
  Antisense strand to SEQ ID NO: 2522932
ucauaugacaagaacauca

SEQ ID NO: 2522934 - RNA, 19 nt, Artificial Sequence
  Description of Artificial Sequence: Synthetic oligonucleotide
  Sense strand starting at position 3872 of SEQ ID NO: 1888265
auguucuugucauaugagu

SEQ ID NO: 2522935 - RNA, 19 nt, Artificial Sequence
  Description of Artificial Sequence: Synthetic oligonucleotide
  Antisense strand to SEQ ID NO: 2522934
acucauaugacaagaacau

SEQ ID NO: 2522936 - RNA, 19 nt, Artificial Sequence
  Description of Artificial Sequence: Synthetic oligonucleotide
  Sense strand starting at position 3874 of SEQ ID NO: 1888265
guucuugucauaugaguua

SEQ ID NO: 2522937 - RNA, 19 nt, Artificial Sequence
  Description of Artificial Sequence: Synthetic oligonucleotide
  Antisense strand to SEQ ID NO: 2522936
uaacucauaugacaagaac

SEQ ID NO: 2522938 - RNA, 19 nt, Artificial Sequence
  Description of Artificial Sequence: Synthetic oligonucleotide
  Sense strand starting at position 3885 of SEQ ID NO: 1888265
augaguuacgggcagcaga

SEQ ID NO: 2522939 - RNA, 19 nt, Artificial Sequence
  Description of Artificial Sequence: Synthetic oligonucleotide
  Antisense strand to SEQ ID NO: 2522938
ucugcugcccguaacucau

SEQ ID NO: 2522940 - RNA, 19 nt, Artificial Sequence
  Description of Artificial Sequence: Synthetic oligonucleotide
  Sense strand starting at position 181 of SEQ ID NO: 1888266
acaggcuuuggguggaaga

SEQ ID NO: 2522941 - RNA, 19 nt, Artificial Sequence
  Description of Artificial Sequence: Synthetic oligonucleotide
  Antisense strand to SEQ ID NO: 2522940
ucuuccacccaaagccugu

SEQ ID NO: 2522942 - RNA, 19 nt, Artificial Sequence
  Description of Artificial Sequence: Synthetic oligonucleotide
  Sense strand starting at position 182 of SEQ ID NO: 1888266
caggcuuuggguggaagaa

SEQ ID NO: 2522943 - RNA, 19 nt, Artificial Sequence
  Description of Artificial Sequence: Synthetic oligonucleotide
  Antisense strand to SEQ ID NO: 2522942
uucuuccacccaaagccug

SEQ ID NO: 2522944 - RNA, 19 nt, Artificial Sequence
  Description of Artificial Sequence: Synthetic oligonucleotide
  Sense strand starting at position 324 of SEQ ID NO: 1888266
uggagaagcuaucuagaca

SEQ ID NO: 2522945 - RNA, 19 nt, Artificial Sequence
  Description of Artificial Sequence: Synthetic oligonucleotide
  Antisense strand to SEQ ID NO: 2522944
ugucuagauagcuucucca

SEQ ID NO: 2522946 - RNA, 19 nt, Artificial Sequence
  Description of Artificial Sequence: Synthetic oligonucleotide
  Sense strand starting at position 344 of SEQ ID NO: 1888266
gugccuucccaagaggaua

SEQ ID NO: 2522947 - RNA, 19 nt, Artificial Sequence
  Description of Artificial Sequence: Synthetic oligonucleotide
  Antisense strand to SEQ ID NO: 2522946
uauccucuugggaaggcac

SEQ ID NO: 2522948 - RNA, 19 nt, Artificial Sequence
  Description of Artificial Sequence: Synthetic oligonucleotide
  Sense strand starting at position 430 of SEQ ID NO: 1888266
uaucuuaguguaugaggau

SEQ ID NO: 2522949 - RNA, 19 nt, Artificial Sequence
  Description of Artificial Sequence: Synthetic oligonucleotide
  Antisense strand to SEQ ID NO: 2522948
auccucauacacuaagaua

SEQ ID NO: 2522950 - RNA, 19 nt, Artificial Sequence
  Description of Artificial Sequence: Synthetic oligonucleotide
  Sense strand starting at position 490 of SEQ ID NO: 1888266
agguaagaucaggguuaau

SEQ ID NO: 2522951 - RNA, 19 nt, Artificial Sequence
  Description of Artificial Sequence: Synthetic oligonucleotide
  Antisense strand to SEQ ID NO: 2522950
auuaacccugaucuuaccu

SEQ ID NO: 2522952 - RNA, 19 nt, Artificial Sequence
  Description of Artificial Sequence: Synthetic oligonucleotide
  Sense strand starting at position 577 of SEQ ID NO: 1888266
gauccauaggugcaauuau

SEQ ID NO: 2522953 - RNA, 19 nt, Artificial Sequence
  Description of Artificial Sequence: Synthetic oligonucleotide
  Antisense strand to SEQ ID NO: 2522952
auaauugcaccuauggauc

SEQ ID NO: 2522954 - RNA, 19 nt, Artificial Sequence
  Description of Artificial Sequence: Synthetic oligonucleotide
  Sense strand starting at position 800 of SEQ ID NO: 1888266
acaaacaggucugugguaa

SEQ ID NO: 2522955 - RNA, 19 nt, Artificial Sequence
  Description of Artificial Sequence: Synthetic oligonucleotide
  Antisense strand to SEQ ID NO: 2522954
uuaccacagaccuguuugu

SEQ ID NO: 2522956 - RNA, 19 nt, Artificial Sequence
  Description of Artificial Sequence: Synthetic oligonucleotide
  Sense strand starting at position 816 of SEQ ID NO: 1888266
uaacguggcccugaggaau

SEQ ID NO: 2522957 - RNA, 19 nt, Artificial Sequence
  Description of Artificial Sequence: Synthetic oligonucleotide
  Antisense strand to SEQ ID NO: 2522956
auuccucagggccacguua

SEQ ID NO: 2522958 - RNA, 19 nt, Artificial Sequence
  Description of Artificial Sequence: Synthetic oligonucleotide
  Sense strand starting at position 902 of SEQ ID NO: 1888266
gaguaagaaguuuagucag

SEQ ID NO: 2522959 - RNA, 19 nt, Artificial Sequence
  Description of Artificial Sequence: Synthetic oligonucleotide
  Antisense strand to SEQ ID NO: 2522958
cugacuaaacuucuuacuc

SEQ ID NO: 2522960 - RNA, 19 nt, Artificial Sequence
  Description of Artificial Sequence: Synthetic oligonucleotide
  Sense strand starting at position 1322 of SEQ ID NO: 1888266
ggauccucagaaugcauua

SEQ ID NO: 2522961 - RNA, 19 nt, Artificial Sequence
  Description of Artificial Sequence: Synthetic oligonucleotide
  Antisense strand to SEQ ID NO: 2522960
uaaugcauucugaggaucc

SEQ ID NO: 2522962 - RNA, 19 nt, Artificial Sequence
  Description of Artificial Sequence: Synthetic oligonucleotide
  Sense strand starting at position 1487 of SEQ ID NO: 1888266
cuugaaagcccaugggaua

SEQ ID NO: 2522963 - RNA, 19 nt, Artificial Sequence
  Description of Artificial Sequence: Synthetic oligonucleotide
  Antisense strand to SEQ ID NO: 2522962
uaucccaugggcuuucaag

SEQ ID NO: 2522964 - RNA, 19 nt, Artificial Sequence
  Description of Artificial Sequence: Synthetic oligonucleotide
  Sense strand starting at position 1488 of SEQ ID NO: 1888266
uugaaagcccaugggauau

SEQ ID NO: 2522965 - RNA, 19 nt, Artificial Sequence
  Description of Artificial Sequence: Synthetic oligonucleotide
  Antisense strand to SEQ ID NO: 2522964
auaucccaugggcuuucaa

SEQ ID NO: 2522966 - RNA, 19 nt, Artificial Sequence
  Description of Artificial Sequence: Synthetic oligonucleotide
  Sense strand starting at position 1494 of SEQ ID NO: 1888266
gcccaugggauaugaucua

SEQ ID NO: 2522967 - RNA, 19 nt, Artificial Sequence
  Description of Artificial Sequence: Synthetic oligonucleotide
  Antisense strand to SEQ ID NO: 2522966
uagaucauaucccaugggc

SEQ ID NO: 2522968 - RNA, 19 nt, Artificial Sequence
  Description of Artificial Sequence: Synthetic oligonucleotide
  Sense strand starting at position 1706 of SEQ ID NO: 1888266
ccaucaugccugcaagaga

SEQ ID NO: 2522969 - RNA, 19 nt, Artificial Sequence
  Description of Artificial Sequence: Synthetic oligonucleotide
  Antisense strand to SEQ ID NO: 2522968
ucucuugcaggcaugaugg

SEQ ID NO: 2522970 - RNA, 19 nt, Artificial Sequence
  Description of Artificial Sequence: Synthetic oligonucleotide
  Sense strand starting at position 1731 of SEQ ID NO: 1888266
ccaagaauauagcucaagu

SEQ ID NO: 2522971 - RNA, 19 nt, Artificial Sequence
  Description of Artificial Sequence: Synthetic oligonucleotide
  Antisense strand to SEQ ID NO: 2522970
acuugagcuauauucuugg

SEQ ID NO: 2522972 - RNA, 19 nt, Artificial Sequence
  Description of Artificial Sequence: Synthetic oligonucleotide
  Sense strand starting at position 1733 of SEQ ID NO: 1888266
aagaauauagcucaagugu

SEQ ID NO: 2522973 - RNA, 19 nt, Artificial Sequence
  Description of Artificial Sequence: Synthetic oligonucleotide
  Antisense strand to SEQ ID NO: 2522972
acacuugagcuauauucuu

SEQ ID NO: 2522974 - RNA, 19 nt, Artificial Sequence
  Description of Artificial Sequence: Synthetic oligonucleotide
  Sense strand starting at position 1744 of SEQ ID NO: 1888266
ucaagugucuaucuugaaa

SEQ ID NO: 2522975 - RNA, 19 nt, Artificial Sequence
  Description of Artificial Sequence: Synthetic oligonucleotide
  Antisense strand to SEQ ID NO: 2522974
uuucaagauagacacuuga

SEQ ID NO: 2522976 - RNA, 19 nt, Artificial Sequence
  Description of Artificial Sequence: Synthetic oligonucleotide
  Sense strand starting at position 2370 of SEQ ID NO: 1888266
ucuucuagaccugaaugua

SEQ ID NO: 2522977 - RNA, 19 nt, Artificial Sequence
  Description of Artificial Sequence: Synthetic oligonucleotide
  Antisense strand to SEQ ID NO: 2522976
uacauucaggucuagaaga

SEQ ID NO: 2522978 - RNA, 19 nt, Artificial Sequence
  Description of Artificial Sequence: Synthetic oligonucleotide
  Sense strand starting at position 2394 of SEQ ID NO: 1888266
guccaauccaagugagaga

SEQ ID NO: 2522979 - RNA, 19 nt, Artificial Sequence
  Description of Artificial Sequence: Synthetic oligonucleotide
  Antisense strand to SEQ ID NO: 2522978
ucucucacuuggauuggac

SEQ ID NO: 2522980 - RNA, 19 nt, Artificial Sequence
  Description of Artificial Sequence: Synthetic oligonucleotide
  Sense strand starting at position 2448 of SEQ ID NO: 1888266
aaaugcugucauggaaaua

SEQ ID NO: 2522981 - RNA, 19 nt, Artificial Sequence
  Description of Artificial Sequence: Synthetic oligonucleotide
  Antisense strand to SEQ ID NO: 2522980
uauuuccaugacagcauuu

SEQ ID NO: 2522982 - RNA, 19 nt, Artificial Sequence
  Description of Artificial Sequence: Synthetic oligonucleotide
  Sense strand starting at position 2897 of SEQ ID NO: 1888266
ucagaaguauacuuuggaa

SEQ ID NO: 2522983 - RNA, 19 nt, Artificial Sequence
  Description of Artificial Sequence: Synthetic oligonucleotide
  Antisense strand to SEQ ID NO: 2522982
uuccaaaguauacuucuga

SEQ ID NO: 2522984 - RNA, 19 nt, Artificial Sequence
  Description of Artificial Sequence: Synthetic oligonucleotide
  Sense strand starting at position 2909 of SEQ ID NO: 1888266
uuuggaauaucauugccaa

SEQ ID NO: 2522985 - RNA, 19 nt, Artificial Sequence
  Description of Artificial Sequence: Synthetic oligonucleotide
  Antisense strand to SEQ ID NO: 2522984
uuggcaaugauauuccaaa

SEQ ID NO: 2522986 - RNA, 19 nt, Artificial Sequence
  Description of Artificial Sequence: Synthetic oligonucleotide
  Sense strand starting at position 2910 of SEQ ID NO: 1888266
uuggaauaucauugccaag

SEQ ID NO: 2522987 - RNA, 19 nt, Artificial Sequence
  Description of Artificial Sequence: Synthetic oligonucleotide
  Antisense strand to SEQ ID NO: 2522986
cuuggcaaugauauuccaa

SEQ ID NO: 2522988 - RNA, 19 nt, Artificial Sequence
  Description of Artificial Sequence: Synthetic oligonucleotide
  Sense strand starting at position 2912 of SEQ ID NO: 1888266
ggaauaucauugccaagag

SEQ ID NO: 2522989 - RNA, 19 nt, Artificial Sequence
  Description of Artificial Sequence: Synthetic oligonucleotide
  Antisense strand to SEQ ID NO: 2522988
cucuuggcaaugauauucc

SEQ ID NO: 2522990 - RNA, 19 nt, Artificial Sequence
  Description of Artificial Sequence: Synthetic oligonucleotide
  Sense strand starting at position 2936 of SEQ ID NO: 1888266
cucgaaauagcuuauaaau

SEQ ID NO: 2522991 - RNA, 19 nt, Artificial Sequence
  Description of Artificial Sequence: Synthetic oligonucleotide
  Antisense strand to SEQ ID NO: 2522990
auuuauaagcuauuucgag

SEQ ID NO: 2522992 - RNA, 19 nt, Artificial Sequence
  Description of Artificial Sequence: Synthetic oligonucleotide
  Sense strand starting at position 3020 of SEQ ID NO: 1888266
gacuaugaguuaucccuga

SEQ ID NO: 2522993 - RNA, 19 nt, Artificial Sequence
  Description of Artificial Sequence: Synthetic oligonucleotide
  Antisense strand to SEQ ID NO: 2522992
ucagggauaacucauaguc

SEQ ID NO: 2522994 - RNA, 19 nt, Artificial Sequence
  Description of Artificial Sequence: Synthetic oligonucleotide
  Sense strand starting at position 3025 of SEQ ID NO: 1888266
ugaguuaucccugaagcag

SEQ ID NO: 2522995 - RNA, 19 nt, Artificial Sequence
  Description of Artificial Sequence: Synthetic oligonucleotide
  Antisense strand to SEQ ID NO: 2522994
cugcuucagggauaacuca

SEQ ID NO: 2522996 - RNA, 19 nt, Artificial Sequence
  Description of Artificial Sequence: Synthetic oligonucleotide
  Sense strand starting at position 3050 of SEQ ID NO: 1888266
acuuaagaguaagucuaga

SEQ ID NO: 2522997 - RNA, 19 nt, Artificial Sequence
  Description of Artificial Sequence: Synthetic oligonucleotide
  Antisense strand to SEQ ID NO: 2522996
ucuagacuuacucuuaagu

SEQ ID NO: 2522998 - RNA, 19 nt, Artificial Sequence
  Description of Artificial Sequence: Synthetic oligonucleotide
  Sense strand starting at position 3259 of SEQ ID NO: 1888266
ugcaaaugacaugguuaug

SEQ ID NO: 2522999 - RNA, 19 nt, Artificial Sequence
  Description of Artificial Sequence: Synthetic oligonucleotide
  Antisense strand to SEQ ID NO: 2522998
cauaaccaugucauuugca

SEQ ID NO: 2523000 - RNA, 19 nt, Artificial Sequence
  Description of Artificial Sequence: Synthetic oligonucleotide
  Sense strand starting at position 3299 of SEQ ID NO: 1888266
aagguuuaugauggguuau

SEQ ID NO: 2523001 - RNA, 19 nt, Artificial Sequence
  Description of Artificial Sequence: Synthetic oligonucleotide
  Antisense strand to SEQ ID NO: 2523000
auaacccaucauaaaccuu

SEQ ID NO: 2523002 - RNA, 19 nt, Artificial Sequence
  Description of Artificial Sequence: Synthetic oligonucleotide
  Sense strand starting at position 3300 of SEQ ID NO: 1888266
agguuuaugauggguuaug

SEQ ID NO: 2523003 - RNA, 19 nt, Artificial Sequence
  Description of Artificial Sequence: Synthetic oligonucleotide
  Antisense strand to SEQ ID NO: 2523002
cauaacccaucauaaaccu

SEQ ID NO: 2523004 - RNA, 19 nt, Artificial Sequence
  Description of Artificial Sequence: Synthetic oligonucleotide
  Sense strand starting at position 3361 of SEQ ID NO: 1888266
gaauauguacauggacuuu

SEQ ID NO: 2523005 - RNA, 19 nt, Artificial Sequence
  Description of Artificial Sequence: Synthetic oligonucleotide
  Antisense strand to SEQ ID NO: 2523004
aaaguccauguacauauuc

SEQ ID NO: 2523006 - RNA, 19 nt, Artificial Sequence
  Description of Artificial Sequence: Synthetic oligonucleotide
  Sense strand starting at position 3464 of SEQ ID NO: 1888266
aggauaaacuacucuguac

SEQ ID NO: 2523007 - RNA, 19 nt, Artificial Sequence
  Description of Artificial Sequence: Synthetic oligonucleotide
  Antisense strand to SEQ ID NO: 2523006
guacagaguaguuuauccu

SEQ ID NO: 2523008 - RNA, 19 nt, Artificial Sequence
  Description of Artificial Sequence: Synthetic oligonucleotide
  Sense strand starting at position 3610 of SEQ ID NO: 1888266
cagauaauauauguggauu

SEQ ID NO: 2523009 - RNA, 19 nt, Artificial Sequence
  Description of Artificial Sequence: Synthetic oligonucleotide
  Antisense strand to SEQ ID NO: 2523008
aauccacauauauuaucug

SEQ ID NO: 2523010 - RNA, 19 nt, Artificial Sequence
  Description of Artificial Sequence: Synthetic oligonucleotide
  Sense strand starting at position 3904 of SEQ ID NO: 1888266
gcucuauuucuauguguag

SEQ ID NO: 2523011 - RNA, 19 nt, Artificial Sequence
  Description of Artificial Sequence: Synthetic oligonucleotide
  Antisense strand to SEQ ID NO: 2523010
cuacacauagaaauagagc

SEQ ID NO: 2523012 - RNA, 19 nt, Artificial Sequence
  Description of Artificial Sequence: Synthetic oligonucleotide
  Sense strand starting at position 3920 of SEQ ID NO: 1888266
uagcuugguguuuacagaa

SEQ ID NO: 2523013 - RNA, 19 nt, Artificial Sequence
  Description of Artificial Sequence: Synthetic oligonucleotide
  Antisense strand to SEQ ID NO: 2523012
uucuguaaacaccaagcua

SEQ ID NO: 2523014 - RNA, 19 nt, Artificial Sequence
  Description of Artificial Sequence: Synthetic oligonucleotide
  Sense strand starting at position 3934 of SEQ ID NO: 1888266
cagaaucaagacugucuga

SEQ ID NO: 2523015 - RNA, 19 nt, Artificial Sequence
  Description of Artificial Sequence: Synthetic oligonucleotide
  Antisense strand to SEQ ID NO: 2523014
ucagacagucuugauucug

SEQ ID NO: 2523016 - RNA, 19 nt, Artificial Sequence
  Description of Artificial Sequence: Synthetic oligonucleotide
  Sense strand starting at position 3937 of SEQ ID NO: 1888266
aaucaagacugucugagau

SEQ ID NO: 2523017 - RNA, 19 nt, Artificial Sequence
  Description of Artificial Sequence: Synthetic oligonucleotide
  Antisense strand to SEQ ID NO: 2523016
aucucagacagucuugauu

SEQ ID NO: 2523018 - RNA, 19 nt, Artificial Sequence
  Description of Artificial Sequence: Synthetic oligonucleotide
  Sense strand starting at position 3944 of SEQ ID NO: 1888266
acugucugagaucaaaugu

SEQ ID NO: 2523019 - RNA, 19 nt, Artificial Sequence
  Description of Artificial Sequence: Synthetic oligonucleotide
  Antisense strand to SEQ ID NO: 2523018
acauuugaucucagacagu

SEQ ID NO: 2523020 - RNA, 19 nt, Artificial Sequence
  Description of Artificial Sequence: Synthetic oligonucleotide
  Sense strand starting at position 28 of SEQ ID NO: 1888267
gguguugugguggaccauu

SEQ ID NO: 2523021 - RNA, 19 nt, Artificial Sequence
  Description of Artificial Sequence: Synthetic oligonucleotide
  Antisense strand to SEQ ID NO: 2523020
aaugguccaccacaacacc

SEQ ID NO: 2523022 - RNA, 19 nt, Artificial Sequence
  Description of Artificial Sequence: Synthetic oligonucleotide
  Sense strand starting at position 36 of SEQ ID NO: 1888267
gguggaccauuacugaaua

SEQ ID NO: 2523023 - RNA, 19 nt, Artificial Sequence
  Description of Artificial Sequence: Synthetic oligonucleotide
  Antisense strand to SEQ ID NO: 2523022
uauucaguaaugguccacc

SEQ ID NO: 2523024 - RNA, 19 nt, Artificial Sequence
  Description of Artificial Sequence: Synthetic oligonucleotide
  Sense strand starting at position 77 of SEQ ID NO: 1888267
gcacuugagcucuaaucca

SEQ ID NO: 2523025 - RNA, 19 nt, Artificial Sequence
  Description of Artificial Sequence: Synthetic oligonucleotide
  Antisense strand to SEQ ID NO: 2523024
uggauuagagcucaagugc

SEQ ID NO: 2523026 - RNA, 19 nt, Artificial Sequence
  Description of Artificial Sequence: Synthetic oligonucleotide
  Sense strand starting at position 206 of SEQ ID NO: 1888267
uuggaaucccacgaggagu

SEQ ID NO: 2523027 - RNA, 19 nt, Artificial Sequence
  Description of Artificial Sequence: Synthetic oligonucleotide
  Antisense strand to SEQ ID NO: 2523026
acuccucgugggauuccaa

SEQ ID NO: 2523028 - RNA, 19 nt, Artificial Sequence
  Description of Artificial Sequence: Synthetic oligonucleotide
  Sense strand starting at position 217 of SEQ ID NO: 1888267
cgaggagugccagauagau

SEQ ID NO: 2523029 - RNA, 19 nt, Artificial Sequence
  Description of Artificial Sequence: Synthetic oligonucleotide
  Antisense strand to SEQ ID NO: 2523028
aucuaucuggcacuccucg

SEQ ID NO: 2523030 - RNA, 19 nt, Artificial Sequence
  Description of Artificial Sequence: Synthetic oligonucleotide
  Sense strand starting at position 248 of SEQ ID NO: 1888267
aucaaauagcugcaaguuu

SEQ ID NO: 2523031 - RNA, 19 nt, Artificial Sequence
  Description of Artificial Sequence: Synthetic oligonucleotide
  Antisense strand to SEQ ID NO: 2523030
aaacuugcagcuauuugau

SEQ ID NO: 2523032 - RNA, 19 nt, Artificial Sequence
  Description of Artificial Sequence: Synthetic oligonucleotide
  Sense strand starting at position 575 of SEQ ID NO: 1888267
uuauacuagggaugcuauu

SEQ ID NO: 2523033 - RNA, 19 nt, Artificial Sequence
  Description of Artificial Sequence: Synthetic oligonucleotide
  Antisense strand to SEQ ID NO: 2523032
aauagcaucccuaguauaa

SEQ ID NO: 2523034 - RNA, 19 nt, Artificial Sequence
  Description of Artificial Sequence: Synthetic oligonucleotide
  Sense strand starting at position 624 of SEQ ID NO: 1888267
agucaaacggccugagaaa

SEQ ID NO: 2523035 - RNA, 19 nt, Artificial Sequence
  Description of Artificial Sequence: Synthetic oligonucleotide
  Antisense strand to SEQ ID NO: 2523034
uuucucaggccguuugacu

SEQ ID NO: 2523036 - RNA, 19 nt, Artificial Sequence
  Description of Artificial Sequence: Synthetic oligonucleotide
  Sense strand starting at position 696 of SEQ ID NO: 1888267
auuggaacccaguguugua

SEQ ID NO: 2523037 - RNA, 19 nt, Artificial Sequence
  Description of Artificial Sequence: Synthetic oligonucleotide
  Antisense strand to SEQ ID NO: 2523036
uacaacacuggguuccaau

SEQ ID NO: 2523038 - RNA, 19 nt, Artificial Sequence
  Description of Artificial Sequence: Synthetic oligonucleotide
  Sense strand starting at position 729 of SEQ ID NO: 1888267
aauacugcucccgauggaa

SEQ ID NO: 2523039 - RNA, 19 nt, Artificial Sequence
  Description of Artificial Sequence: Synthetic oligonucleotide
  Antisense strand to SEQ ID NO: 2523038
uuccaucgggagcaguauu

SEQ ID NO: 2523040 - RNA, 19 nt, Artificial Sequence
  Description of Artificial Sequence: Synthetic oligonucleotide
  Sense strand starting at position 858 of SEQ ID NO: 1888267
ggacuuacguccucaaucu

SEQ ID NO: 2523041 - RNA, 19 nt, Artificial Sequence
  Description of Artificial Sequence: Synthetic oligonucleotide
  Antisense strand to SEQ ID NO: 2523040
agauugaggacguaagucc

SEQ ID NO: 2523042 - RNA, 19 nt, Artificial Sequence
  Description of Artificial Sequence: Synthetic oligonucleotide
  Sense strand starting at position 878 of SEQ ID NO: 1888267
cugccaucagaauagguuu

SEQ ID NO: 2523043 - RNA, 19 nt, Artificial Sequence
  Description of Artificial Sequence: Synthetic oligonucleotide
  Antisense strand to SEQ ID NO: 2523042
aaaccuauucugauggcag

SEQ ID NO: 2523044 - RNA, 19 nt, Artificial Sequence
  Description of Artificial Sequence: Synthetic oligonucleotide
  Sense strand starting at position 884 of SEQ ID NO: 1888267
ucagaauagguuugcucau

SEQ ID NO: 2523045 - RNA, 19 nt, Artificial Sequence
  Description of Artificial Sequence: Synthetic oligonucleotide
  Antisense strand to SEQ ID NO: 2523044
augagcaaaccuauucuga

SEQ ID NO: 2523046 - RNA, 19 nt, Artificial Sequence
  Description of Artificial Sequence: Synthetic oligonucleotide
  Sense strand starting at position 885 of SEQ ID NO: 1888267
cagaauagguuugcucauu

SEQ ID NO: 2523047 - RNA, 19 nt, Artificial Sequence
  Description of Artificial Sequence: Synthetic oligonucleotide
  Antisense strand to SEQ ID NO: 2523046
aaugagcaaaccuauucug

SEQ ID NO: 2523048 - RNA, 19 nt, Artificial Sequence
  Description of Artificial Sequence: Synthetic oligonucleotide
  Sense strand starting at position 1362 of SEQ ID NO: 1888267
uuagauugcgcugucgacu

SEQ ID NO: 2523049 - RNA, 19 nt, Artificial Sequence
  Description of Artificial Sequence: Synthetic oligonucleotide
  Antisense strand to SEQ ID NO: 2523048
agucgacagcgcaaucuaa

SEQ ID NO: 2523050 - RNA, 19 nt, Artificial Sequence
  Description of Artificial Sequence: Synthetic oligonucleotide
  Sense strand starting at position 1593 of SEQ ID NO: 1888267
aggccaaugucaguccuaa

SEQ ID NO: 2523051 - RNA, 19 nt, Artificial Sequence
  Description of Artificial Sequence: Synthetic oligonucleotide
  Antisense strand to SEQ ID NO: 2523050
uuaggacugacauuggccu

SEQ ID NO: 2523052 - RNA, 19 nt, Artificial Sequence
  Description of Artificial Sequence: Synthetic oligonucleotide
  Sense strand starting at position 1611 of SEQ ID NO: 1888267
augacuuauucucccaguu

SEQ ID NO: 2523053 - RNA, 19 nt, Artificial Sequence
  Description of Artificial Sequence: Synthetic oligonucleotide
  Antisense strand to SEQ ID NO: 2523052
aacugggagaauaagucau

SEQ ID NO: 2523054 - RNA, 19 nt, Artificial Sequence
  Description of Artificial Sequence: Synthetic oligonucleotide
  Sense strand starting at position 1707 of SEQ ID NO: 1888267
gcagaaaccucaccuguua

SEQ ID NO: 2523055 - RNA, 19 nt, Artificial Sequence
  Description of Artificial Sequence: Synthetic oligonucleotide
  Antisense strand to SEQ ID NO: 2523054
uaacaggugagguuucugc

SEQ ID NO: 2523056 - RNA, 19 nt, Artificial Sequence
  Description of Artificial Sequence: Synthetic oligonucleotide
  Sense strand starting at position 1857 of SEQ ID NO: 1888267
agcaauagucucugauaaa

SEQ ID NO: 2523057 - RNA, 19 nt, Artificial Sequence
  Description of Artificial Sequence: Synthetic oligonucleotide
  Antisense strand to SEQ ID NO: 2523056
uuuaucagagacuauugcu

SEQ ID NO: 2523058 - RNA, 19 nt, Artificial Sequence
  Description of Artificial Sequence: Synthetic oligonucleotide
  Sense strand starting at position 1910 of SEQ ID NO: 1888267
gggccaaugcaucagacaa

SEQ ID NO: 2523059 - RNA, 19 nt, Artificial Sequence
  Description of Artificial Sequence: Synthetic oligonucleotide
  Antisense strand to SEQ ID NO: 2523058
uugucugaugcauuggccc

SEQ ID NO: 2523060 - RNA, 19 nt, Artificial Sequence
  Description of Artificial Sequence: Synthetic oligonucleotide
  Sense strand starting at position 2075 of SEQ ID NO: 1888267
ugucuacucagccagggaa

SEQ ID NO: 2523061 - RNA, 19 nt, Artificial Sequence
  Description of Artificial Sequence: Synthetic oligonucleotide
  Antisense strand to SEQ ID NO: 2523060
uucccuggcugaguagaca

SEQ ID NO: 2523062 - RNA, 19 nt, Artificial Sequence
  Description of Artificial Sequence: Synthetic oligonucleotide
  Sense strand starting at position 2367 of SEQ ID NO: 1888267
ggaaguucuugagugagga

SEQ ID NO: 2523063 - RNA, 19 nt, Artificial Sequence
  Description of Artificial Sequence: Synthetic oligonucleotide
  Antisense strand to SEQ ID NO: 2523062
uccucacucaagaacuucc

SEQ ID NO: 2523064 - RNA, 19 nt, Artificial Sequence
  Description of Artificial Sequence: Synthetic oligonucleotide
  Sense strand starting at position 2368 of SEQ ID NO: 1888267
gaaguucuugagugaggag

SEQ ID NO: 2523065 - RNA, 19 nt, Artificial Sequence
  Description of Artificial Sequence: Synthetic oligonucleotide
  Antisense strand to SEQ ID NO: 2523064
cuccucacucaagaacuuc

SEQ ID NO: 2523066 - RNA, 19 nt, Artificial Sequence
  Description of Artificial Sequence: Synthetic oligonucleotide
  Sense strand starting at position 2369 of SEQ ID NO: 1888267
aaguucuugagugaggagu

SEQ ID NO: 2523067 - RNA, 19 nt, Artificial Sequence
  Description of Artificial Sequence: Synthetic oligonucleotide
  Antisense strand to SEQ ID NO: 2523066
acuccucacucaagaacuu

SEQ ID NO: 2523068 - RNA, 19 nt, Artificial Sequence
  Description of Artificial Sequence: Synthetic oligonucleotide
  Sense strand starting at position 2442 of SEQ ID NO: 1888267
auuugcauucgguguuuga

SEQ ID NO: 2523069 - RNA, 19 nt, Artificial Sequence
  Description of Artificial Sequence: Synthetic oligonucleotide
  Antisense strand to SEQ ID NO: 2523068
ucaaacaccgaaugcaaau

SEQ ID NO: 2523070 - RNA, 19 nt, Artificial Sequence
  Description of Artificial Sequence: Synthetic oligonucleotide
  Sense strand starting at position 2487 of SEQ ID NO: 1888267
ggcaauaacuugguagcca

SEQ ID NO: 2523071 - RNA, 19 nt, Artificial Sequence
  Description of Artificial Sequence: Synthetic oligonucleotide
  Antisense strand to SEQ ID NO: 2523070
uggcuaccaaguuauugcc

SEQ ID NO: 2523072 - RNA, 19 nt, Artificial Sequence
  Description of Artificial Sequence: Synthetic oligonucleotide
  Sense strand starting at position 2539 of SEQ ID NO: 1888267
ugaguacaggcccaugaua

SEQ ID NO: 2523073 - RNA, 19 nt, Artificial Sequence
  Description of Artificial Sequence: Synthetic oligonucleotide
  Antisense strand to SEQ ID NO: 2523072
uaucaugggccuguacuca

SEQ ID NO: 2523074 - RNA, 19 nt, Artificial Sequence
  Description of Artificial Sequence: Synthetic oligonucleotide
  Sense strand starting at position 2541 of SEQ ID NO: 1888267
aguacaggcccaugauaga

SEQ ID NO: 2523075 - RNA, 19 nt, Artificial Sequence
  Description of Artificial Sequence: Synthetic oligonucleotide
  Antisense strand to SEQ ID NO: 2523074
ucuaucaugggccuguacu

SEQ ID NO: 2523076 - RNA, 19 nt, Artificial Sequence
  Description of Artificial Sequence: Synthetic oligonucleotide
  Sense strand starting at position 2571 of SEQ ID NO: 1888267
cuggaagaguugaggaagu

SEQ ID NO: 2523077 - RNA, 19 nt, Artificial Sequence
  Description of Artificial Sequence: Synthetic oligonucleotide
  Antisense strand to SEQ ID NO: 2523076
acuuccucaacucuuccag

SEQ ID NO: 2523078 - RNA, 19 nt, Artificial Sequence
  Description of Artificial Sequence: Synthetic oligonucleotide
  Sense strand starting at position 2581 of SEQ ID NO: 1888267
ugaggaaguaguuggcauu

SEQ ID NO: 2523079 - RNA, 19 nt, Artificial Sequence
  Description of Artificial Sequence: Synthetic oligonucleotide
  Antisense strand to SEQ ID NO: 2523078
aaugccaacuacuuccuca

SEQ ID NO: 2523080 - RNA, 19 nt, Artificial Sequence
  Description of Artificial Sequence: Synthetic oligonucleotide
  Sense strand starting at position 2695 of SEQ ID NO: 1888267
ucacauguguucccaugaa

SEQ ID NO: 2523081 - RNA, 19 nt, Artificial Sequence
  Description of Artificial Sequence: Synthetic oligonucleotide
  Antisense strand to SEQ ID NO: 2523080
uucaugggaacacauguga

SEQ ID NO: 2523082 - RNA, 19 nt, Artificial Sequence
  Description of Artificial Sequence: Synthetic oligonucleotide
  Sense strand starting at position 3363 of SEQ ID NO: 1888267
ccuaauaaaugcucgauag

SEQ ID NO: 2523083 - RNA, 19 nt, Artificial Sequence
  Description of Artificial Sequence: Synthetic oligonucleotide
  Antisense strand to SEQ ID NO: 2523082
cuaucgagcauuuauuagg

SEQ ID NO: 2523084 - RNA, 19 nt, Artificial Sequence
  Description of Artificial Sequence: Synthetic oligonucleotide
  Sense strand starting at position 3364 of SEQ ID NO: 1888267
cuaauaaaugcucgauaga

SEQ ID NO: 2523085 - RNA, 19 nt, Artificial Sequence
  Description of Artificial Sequence: Synthetic oligonucleotide
  Antisense strand to SEQ ID NO: 2523084
ucuaucgagcauuuauuag

SEQ ID NO: 2523086 - RNA, 19 nt, Artificial Sequence
  Description of Artificial Sequence: Synthetic oligonucleotide
  Sense strand starting at position 3377 of SEQ ID NO: 1888267
gauagaaagugcuuuguua

SEQ ID NO: 2523087 - RNA, 19 nt, Artificial Sequence
  Description of Artificial Sequence: Synthetic oligonucleotide
  Antisense strand to SEQ ID NO: 2523086
uaacaaagcacuuucuauc

SEQ ID NO: 2523088 - RNA, 19 nt, Artificial Sequence
  Description of Artificial Sequence: Synthetic oligonucleotide
  Sense strand starting at position 3379 of SEQ ID NO: 1888267
uagaaagugcuuuguuaaa

SEQ ID NO: 2523089 - RNA, 19 nt, Artificial Sequence
  Description of Artificial Sequence: Synthetic oligonucleotide
  Antisense strand to SEQ ID NO: 2523088
uuuaacaaagcacuuucua

SEQ ID NO: 2523090 - RNA, 19 nt, Artificial Sequence
  Description of Artificial Sequence: Synthetic oligonucleotide
  Sense strand starting at position 3381 of SEQ ID NO: 1888267
gaaagugcuuuguuaaauc

SEQ ID NO: 2523091 - RNA, 19 nt, Artificial Sequence
  Description of Artificial Sequence: Synthetic oligonucleotide
  Antisense strand to SEQ ID NO: 2523090
gauuuaacaaagcacuuuc

SEQ ID NO: 2523092 - RNA, 19 nt, Artificial Sequence
  Description of Artificial Sequence: Synthetic oligonucleotide
  Sense strand starting at position 3467 of SEQ ID NO: 1888267
aagacuuacucgucaggag

SEQ ID NO: 2523093 - RNA, 19 nt, Artificial Sequence
  Description of Artificial Sequence: Synthetic oligonucleotide
  Antisense strand to SEQ ID NO: 2523092
cuccugacgaguaagucuu

SEQ ID NO: 2523094 - RNA, 19 nt, Artificial Sequence
  Description of Artificial Sequence: Synthetic oligonucleotide
  Sense strand starting at position 3572 of SEQ ID NO: 1888267
ugcucuaaccugugaacca

SEQ ID NO: 2523095 - RNA, 19 nt, Artificial Sequence
  Description of Artificial Sequence: Synthetic oligonucleotide
  Antisense strand to SEQ ID NO: 2523094
ugguucacagguuagagca

SEQ ID NO: 2523096 - RNA, 19 nt, Artificial Sequence
  Description of Artificial Sequence: Synthetic oligonucleotide
  Sense strand starting at position 3612 of SEQ ID NO: 1888267
ccaucuucccacggucaga

SEQ ID NO: 2523097 - RNA, 19 nt, Artificial Sequence
  Description of Artificial Sequence: Synthetic oligonucleotide
  Antisense strand to SEQ ID NO: 2523096
ucugaccgugggaagaugg

SEQ ID NO: 2523098 - RNA, 19 nt, Artificial Sequence
  Description of Artificial Sequence: Synthetic oligonucleotide
  Sense strand starting at position 3909 of SEQ ID NO: 1888267
agaggucuccaacgaagaa

SEQ ID NO: 2523099 - RNA, 19 nt, Artificial Sequence
  Description of Artificial Sequence: Synthetic oligonucleotide
  Antisense strand to SEQ ID NO: 2523098
uucuucguuggagaccucu

SEQ ID NO: 2523100 - RNA, 19 nt, Artificial Sequence
  Description of Artificial Sequence: Synthetic oligonucleotide
  Sense strand starting at position 205 of SEQ ID NO: 1888268
uuauacuagggaugcuauu

SEQ ID NO: 2523101 - RNA, 19 nt, Artificial Sequence
  Description of Artificial Sequence: Synthetic oligonucleotide
  Antisense strand to SEQ ID NO: 2523100
aauagcaucccuaguauaa

SEQ ID NO: 2523102 - RNA, 19 nt, Artificial Sequence
  Description of Artificial Sequence: Synthetic oligonucleotide
  Sense strand starting at position 254 of SEQ ID NO: 1888268
agucaaacggccugagaaa

SEQ ID NO: 2523103 - RNA, 19 nt, Artificial Sequence
  Description of Artificial Sequence: Synthetic oligonucleotide
  Antisense strand to SEQ ID NO: 2523102
uuucucaggccguuugacu

SEQ ID NO: 2523104 - RNA, 19 nt, Artificial Sequence
  Description of Artificial Sequence: Synthetic oligonucleotide
  Sense strand starting at position 326 of SEQ ID NO: 1888268
auuggaacccaguguugua

SEQ ID NO: 2523105 - RNA, 19 nt, Artificial Sequence
  Description of Artificial Sequence: Synthetic oligonucleotide
  Antisense strand to SEQ ID NO: 2523104
uacaacacuggguuccaau

SEQ ID NO: 2523106 - RNA, 19 nt, Artificial Sequence
  Description of Artificial Sequence: Synthetic oligonucleotide
  Sense strand starting at position 359 of SEQ ID NO: 1888268
aauacugcucccgauggaa

SEQ ID NO: 2523107 - RNA, 19 nt, Artificial Sequence
  Description of Artificial Sequence: Synthetic oligonucleotide
  Antisense strand to SEQ ID NO: 2523106
uuccaucgggagcaguauu

SEQ ID NO: 2523108 - RNA, 19 nt, Artificial Sequence
  Description of Artificial Sequence: Synthetic oligonucleotide
  Sense strand starting at position 488 of SEQ ID NO: 1888268
ggacuuacguccucaaucu

SEQ ID NO: 2523109 - RNA, 19 nt, Artificial Sequence
  Description of Artificial Sequence: Synthetic oligonucleotide
  Antisense strand to SEQ ID NO: 2523108
agauugaggacguaagucc

SEQ ID NO: 2523110 - RNA, 19 nt, Artificial Sequence
  Description of Artificial Sequence: Synthetic oligonucleotide
  Sense strand starting at position 508 of SEQ ID NO: 1888268
cugccaucagaauagguuu

SEQ ID NO: 2523111 - RNA, 19 nt, Artificial Sequence
  Description of Artificial Sequence: Synthetic oligonucleotide
  Antisense strand to SEQ ID NO: 2523110
aaaccuauucugauggcag

SEQ ID NO: 2523112 - RNA, 19 nt, Artificial Sequence
  Description of Artificial Sequence: Synthetic oligonucleotide
  Sense strand starting at position 514 of SEQ ID NO: 1888268
ucagaauagguuugcucau

SEQ ID NO: 2523113 - RNA, 19 nt, Artificial Sequence
  Description of Artificial Sequence: Synthetic oligonucleotide
  Antisense strand to SEQ ID NO: 2523112
augagcaaaccuauucuga

SEQ ID NO: 2523114 - RNA, 19 nt, Artificial Sequence
  Description of Artificial Sequence: Synthetic oligonucleotide
  Sense strand starting at position 515 of SEQ ID NO: 1888268
cagaauagguuugcucauu

SEQ ID NO: 2523115 - RNA, 19 nt, Artificial Sequence
  Description of Artificial Sequence: Synthetic oligonucleotide
  Antisense strand to SEQ ID NO: 2523114
aaugagcaaaccuauucug

SEQ ID NO: 2523116 - RNA, 19 nt, Artificial Sequence
  Description of Artificial Sequence: Synthetic oligonucleotide
  Sense strand starting at position 546 of SEQ ID NO: 1888268
uguaucauacccuguaucu

SEQ ID NO: 2523117 - RNA, 19 nt, Artificial Sequence
  Description of Artificial Sequence: Synthetic oligonucleotide
  Antisense strand to SEQ ID NO: 2523116
agauacaggguaugauaca

SEQ ID NO: 2523118 - RNA, 19 nt, Artificial Sequence
  Description of Artificial Sequence: Synthetic oligonucleotide
  Sense strand starting at position 863 of SEQ ID NO: 1888268
ccuguaaccuguucccuau

SEQ ID NO: 2523119 - RNA, 19 nt, Artificial Sequence
  Description of Artificial Sequence: Synthetic oligonucleotide
  Antisense strand to SEQ ID NO: 2523118
auagggaacagguuacagg

SEQ ID NO: 2523120 - RNA, 19 nt, Artificial Sequence
  Description of Artificial Sequence: Synthetic oligonucleotide
  Sense strand starting at position 906 of SEQ ID NO: 1888268
gcaaccagcucuguaaaca

SEQ ID NO: 2523121 - RNA, 19 nt, Artificial Sequence
  Description of Artificial Sequence: Synthetic oligonucleotide
  Antisense strand to SEQ ID NO: 2523120
uguuuacagagcugguugc

SEQ ID NO: 2523122 - RNA, 19 nt, Artificial Sequence
  Description of Artificial Sequence: Synthetic oligonucleotide
  Sense strand starting at position 992 of SEQ ID NO: 1888268
uuagauugcgcugucgacu

SEQ ID NO: 2523123 - RNA, 19 nt, Artificial Sequence
  Description of Artificial Sequence: Synthetic oligonucleotide
  Antisense strand to SEQ ID NO: 2523122
agucgacagcgcaaucuaa

SEQ ID NO: 2523124 - RNA, 19 nt, Artificial Sequence
  Description of Artificial Sequence: Synthetic oligonucleotide
  Sense strand starting at position 1223 of SEQ ID NO: 1888268
aggccaaugucaguccuaa

SEQ ID NO: 2523125 - RNA, 19 nt, Artificial Sequence
  Description of Artificial Sequence: Synthetic oligonucleotide
  Antisense strand to SEQ ID NO: 2523124
uuaggacugacauuggccu

SEQ ID NO: 2523126 - RNA, 19 nt, Artificial Sequence
  Description of Artificial Sequence: Synthetic oligonucleotide
  Sense strand starting at position 1241 of SEQ ID NO: 1888268
augacuuauucucccaguu

SEQ ID NO: 2523127 - RNA, 19 nt, Artificial Sequence
  Description of Artificial Sequence: Synthetic oligonucleotide
  Antisense strand to SEQ ID NO: 2523126
aacugggagaauaagucau

SEQ ID NO: 2523128 - RNA, 19 nt, Artificial Sequence
  Description of Artificial Sequence: Synthetic oligonucleotide
  Sense strand starting at position 1337 of SEQ ID NO: 1888268
gcagaaaccucaccuguua

SEQ ID NO: 2523129 - RNA, 19 nt, Artificial Sequence
  Description of Artificial Sequence: Synthetic oligonucleotide
  Antisense strand to SEQ ID NO: 2523128
uaacaggugagguuucugc

SEQ ID NO: 2523130 - RNA, 19 nt, Artificial Sequence
  Description of Artificial Sequence: Synthetic oligonucleotide
  Sense strand starting at position 1487 of SEQ ID NO: 1888268
agcaauagucucugauaaa

SEQ ID NO: 2523131 - RNA, 19 nt, Artificial Sequence
  Description of Artificial Sequence: Synthetic oligonucleotide
  Antisense strand to SEQ ID NO: 2523130
uuuaucagagacuauugcu

SEQ ID NO: 2523132 - RNA, 19 nt, Artificial Sequence
  Description of Artificial Sequence: Synthetic oligonucleotide
  Sense strand starting at position 1516 of SEQ ID NO: 1888268
aaacaaagauaggaguuau

SEQ ID NO: 2523133 - RNA, 19 nt, Artificial Sequence
  Description of Artificial Sequence: Synthetic oligonucleotide
  Antisense strand to SEQ ID NO: 2523132
auaacuccuaucuuuguuu

SEQ ID NO: 2523134 - RNA, 19 nt, Artificial Sequence
  Description of Artificial Sequence: Synthetic oligonucleotide
  Sense strand starting at position 1540 of SEQ ID NO: 1888268
gggccaaugcaucagacaa

SEQ ID NO: 2523135 - RNA, 19 nt, Artificial Sequence
  Description of Artificial Sequence: Synthetic oligonucleotide
  Antisense strand to SEQ ID NO: 2523134
uugucugaugcauuggccc

SEQ ID NO: 2523136 - RNA, 19 nt, Artificial Sequence
  Description of Artificial Sequence: Synthetic oligonucleotide
  Sense strand starting at position 1633 of SEQ ID NO: 1888268
acauuugagucguacaaga

SEQ ID NO: 2523137 - RNA, 19 nt, Artificial Sequence
  Description of Artificial Sequence: Synthetic oligonucleotide
  Antisense strand to SEQ ID NO: 2523136
ucuuguacgacucaaaugu

SEQ ID NO: 2523138 - RNA, 19 nt, Artificial Sequence
  Description of Artificial Sequence: Synthetic oligonucleotide
  Sense strand starting at position 1705 of SEQ ID NO: 1888268
ugucuacucagccagggaa

SEQ ID NO: 2523139 - RNA, 19 nt, Artificial Sequence
  Description of Artificial Sequence: Synthetic oligonucleotide
  Antisense strand to SEQ ID NO: 2523138
uucccuggcugaguagaca

SEQ ID NO: 2523140 - RNA, 19 nt, Artificial Sequence
  Description of Artificial Sequence: Synthetic oligonucleotide
  Sense strand starting at position 1997 of SEQ ID NO: 1888268
ggaaguucuugagugagga

SEQ ID NO: 2523141 - RNA, 19 nt, Artificial Sequence
  Description of Artificial Sequence: Synthetic oligonucleotide
  Antisense strand to SEQ ID NO: 2523140
uccucacucaagaacuucc

SEQ ID NO: 2523142 - RNA, 19 nt, Artificial Sequence
  Description of Artificial Sequence: Synthetic oligonucleotide
  Sense strand starting at position 1998 of SEQ ID NO: 1888268
gaaguucuugagugaggag

SEQ ID NO: 2523143 - RNA, 19 nt, Artificial Sequence
  Description of Artificial Sequence: Synthetic oligonucleotide
  Antisense strand to SEQ ID NO: 2523142
cuccucacucaagaacuuc

SEQ ID NO: 2523144 - RNA, 19 nt, Artificial Sequence
  Description of Artificial Sequence: Synthetic oligonucleotide
  Sense strand starting at position 1999 of SEQ ID NO: 1888268
aaguucuugagugaggagu

SEQ ID NO: 2523145 - RNA, 19 nt, Artificial Sequence
  Description of Artificial Sequence: Synthetic oligonucleotide
  Antisense strand to SEQ ID NO: 2523144
acuccucacucaagaacuu

SEQ ID NO: 2523146 - RNA, 19 nt, Artificial Sequence
  Description of Artificial Sequence: Synthetic oligonucleotide
  Sense strand starting at position 2072 of SEQ ID NO: 1888268
auuugcauucgguguuuga

SEQ ID NO: 2523147 - RNA, 19 nt, Artificial Sequence
  Description of Artificial Sequence: Synthetic oligonucleotide
  Antisense strand to SEQ ID NO: 2523146
ucaaacaccgaaugcaaau

SEQ ID NO: 2523148 - RNA, 19 nt, Artificial Sequence
  Description of Artificial Sequence: Synthetic oligonucleotide
  Sense strand starting at position 2117 of SEQ ID NO: 1888268
ggcaauaacuugguagcca

SEQ ID NO: 2523149 - RNA, 19 nt, Artificial Sequence
  Description of Artificial Sequence: Synthetic oligonucleotide
  Antisense strand to SEQ ID NO: 2523148
uggcuaccaaguuauugcc

SEQ ID NO: 2523150 - RNA, 19 nt, Artificial Sequence
  Description of Artificial Sequence: Synthetic oligonucleotide
  Sense strand starting at position 2169 of SEQ ID NO: 1888268
ugaguacaggcccaugaua

SEQ ID NO: 2523151 - RNA, 19 nt, Artificial Sequence
  Description of Artificial Sequence: Synthetic oligonucleotide
  Antisense strand to SEQ ID NO: 2523150
uaucaugggccuguacuca

SEQ ID NO: 2523152 - RNA, 19 nt, Artificial Sequence
  Description of Artificial Sequence: Synthetic oligonucleotide
  Sense strand starting at position 2171 of SEQ ID NO: 1888268
aguacaggcccaugauaga

SEQ ID NO: 2523153 - RNA, 19 nt, Artificial Sequence
  Description of Artificial Sequence: Synthetic oligonucleotide
  Antisense strand to SEQ ID NO: 2523152
ucuaucaugggccuguacu

SEQ ID NO: 2523154 - RNA, 19 nt, Artificial Sequence
  Description of Artificial Sequence: Synthetic oligonucleotide
  Sense strand starting at position 2201 of SEQ ID NO: 1888268
cuggaagaguugaggaagu

SEQ ID NO: 2523155 - RNA, 19 nt, Artificial Sequence
  Description of Artificial Sequence: Synthetic oligonucleotide
  Antisense strand to SEQ ID NO: 2523154
acuuccucaacucuuccag

SEQ ID NO: 2523156 - RNA, 19 nt, Artificial Sequence
  Description of Artificial Sequence: Synthetic oligonucleotide
  Sense strand starting at position 2211 of SEQ ID NO: 1888268
ugaggaaguaguuggcauu

SEQ ID NO: 2523157 - RNA, 19 nt, Artificial Sequence
  Description of Artificial Sequence: Synthetic oligonucleotide
  Antisense strand to SEQ ID NO: 2523156
aaugccaacuacuuccuca

SEQ ID NO: 2523158 - RNA, 19 nt, Artificial Sequence
  Description of Artificial Sequence: Synthetic oligonucleotide
  Sense strand starting at position 2325 of SEQ ID NO: 1888268
ucacauguguucccaugaa

SEQ ID NO: 2523159 - RNA, 19 nt, Artificial Sequence
  Description of Artificial Sequence: Synthetic oligonucleotide
  Antisense strand to SEQ ID NO: 2523158
uucaugggaacacauguga

SEQ ID NO: 2523160 - RNA, 19 nt, Artificial Sequence
  Description of Artificial Sequence: Synthetic oligonucleotide
  Sense strand starting at position 2793 of SEQ ID NO: 1888268
uugugaguugcugggauua

SEQ ID NO: 2523161 - RNA, 19 nt, Artificial Sequence
  Description of Artificial Sequence: Synthetic oligonucleotide
  Antisense strand to SEQ ID NO: 2523160
uaaucccagcaacucacaa

SEQ ID NO: 2523162 - RNA, 19 nt, Artificial Sequence
  Description of Artificial Sequence: Synthetic oligonucleotide
  Sense strand starting at position 2993 of SEQ ID NO: 1888268
ccuaauaaaugcucgauag

SEQ ID NO: 2523163 - RNA, 19 nt, Artificial Sequence
  Description of Artificial Sequence: Synthetic oligonucleotide
  Antisense strand to SEQ ID NO: 2523162
cuaucgagcauuuauuagg

SEQ ID NO: 2523164 - RNA, 19 nt, Artificial Sequence
  Description of Artificial Sequence: Synthetic oligonucleotide
  Sense strand starting at position 2994 of SEQ ID NO: 1888268
cuaauaaaugcucgauaga

SEQ ID NO: 2523165 - RNA, 19 nt, Artificial Sequence
  Description of Artificial Sequence: Synthetic oligonucleotide
  Antisense strand to SEQ ID NO: 2523164
ucuaucgagcauuuauuag

SEQ ID NO: 2523166 - RNA, 19 nt, Artificial Sequence
  Description of Artificial Sequence: Synthetic oligonucleotide
  Sense strand starting at position 3007 of SEQ ID NO: 1888268
gauagaaagugcuuuguua

SEQ ID NO: 2523167 - RNA, 19 nt, Artificial Sequence
  Description of Artificial Sequence: Synthetic oligonucleotide
  Antisense strand to SEQ ID NO: 2523166
uaacaaagcacuuucuauc

SEQ ID NO: 2523168 - RNA, 19 nt, Artificial Sequence
  Description of Artificial Sequence: Synthetic oligonucleotide
  Sense strand starting at position 3009 of SEQ ID NO: 1888268
uagaaagugcuuuguuaaa

SEQ ID NO: 2523169 - RNA, 19 nt, Artificial Sequence
  Description of Artificial Sequence: Synthetic oligonucleotide
  Antisense strand to SEQ ID NO: 2523168
uuuaacaaagcacuuucua

SEQ ID NO: 2523170 - RNA, 19 nt, Artificial Sequence
  Description of Artificial Sequence: Synthetic oligonucleotide
  Sense strand starting at position 3011 of SEQ ID NO: 1888268
gaaagugcuuuguuaaauc

SEQ ID NO: 2523171 - RNA, 19 nt, Artificial Sequence
  Description of Artificial Sequence: Synthetic oligonucleotide
  Antisense strand to SEQ ID NO: 2523170
gauuuaacaaagcacuuuc

SEQ ID NO: 2523172 - RNA, 19 nt, Artificial Sequence
  Description of Artificial Sequence: Synthetic oligonucleotide
  Sense strand starting at position 3097 of SEQ ID NO: 1888268
aagacuuacucgucaggag

SEQ ID NO: 2523173 - RNA, 19 nt, Artificial Sequence
  Description of Artificial Sequence: Synthetic oligonucleotide
  Antisense strand to SEQ ID NO: 2523172
cuccugacgaguaagucuu

SEQ ID NO: 2523174 - RNA, 19 nt, Artificial Sequence
  Description of Artificial Sequence: Synthetic oligonucleotide
  Sense strand starting at position 3202 of SEQ ID NO: 1888268
ugcucuaaccugugaacca

SEQ ID NO: 2523175 - RNA, 19 nt, Artificial Sequence
  Description of Artificial Sequence: Synthetic oligonucleotide
  Antisense strand to SEQ ID NO: 2523174
ugguucacagguuagagca

SEQ ID NO: 2523176 - RNA, 19 nt, Artificial Sequence
  Description of Artificial Sequence: Synthetic oligonucleotide
  Sense strand starting at position 3242 of SEQ ID NO: 1888268
ccaucuucccacggucaga

SEQ ID NO: 2523177 - RNA, 19 nt, Artificial Sequence
  Description of Artificial Sequence: Synthetic oligonucleotide
  Antisense strand to SEQ ID NO: 2523176
ucugaccgugggaagaugg

SEQ ID NO: 2523178 - RNA, 19 nt, Artificial Sequence
  Description of Artificial Sequence: Synthetic oligonucleotide
  Sense strand starting at position 3539 of SEQ ID NO: 1888268
agaggucuccaacgaagaa

SEQ ID NO: 2523179 - RNA, 19 nt, Artificial Sequence
  Description of Artificial Sequence: Synthetic oligonucleotide
  Antisense strand to SEQ ID NO: 2523178
uucuucguuggagaccucu

SEQ ID NO: 2523180 - RNA, 19 nt, Artificial Sequence
  Description of Artificial Sequence: Synthetic oligonucleotide
  Sense strand starting at position 119 of SEQ ID NO: 1888269
agcaauagucucugauaaa

SEQ ID NO: 2523181 - RNA, 19 nt, Artificial Sequence
  Description of Artificial Sequence: Synthetic oligonucleotide
  Antisense strand to SEQ ID NO: 2523180
uuuaucagagacuauugcu

SEQ ID NO: 2523182 - RNA, 19 nt, Artificial Sequence
  Description of Artificial Sequence: Synthetic oligonucleotide
  Sense strand starting at position 120 of SEQ ID NO: 1888269
gcaauagucucugauaaag

SEQ ID NO: 2523183 - RNA, 19 nt, Artificial Sequence
  Description of Artificial Sequence: Synthetic oligonucleotide
  Antisense strand to SEQ ID NO: 2523182
cuuuaucagagacuauugc

SEQ ID NO: 2523184 - RNA, 19 nt, Artificial Sequence
  Description of Artificial Sequence: Synthetic oligonucleotide
  Sense strand starting at position 148 of SEQ ID NO: 1888269
aaacaaagauaggaguuau

SEQ ID NO: 2523185 - RNA, 19 nt, Artificial Sequence
  Description of Artificial Sequence: Synthetic oligonucleotide
  Antisense strand to SEQ ID NO: 2523184
auaacuccuaucuuuguuu

SEQ ID NO: 2523186 - RNA, 19 nt, Artificial Sequence
  Description of Artificial Sequence: Synthetic oligonucleotide
  Sense strand starting at position 172 of SEQ ID NO: 1888269
gggccaaugcaucagacaa

SEQ ID NO: 2523187 - RNA, 19 nt, Artificial Sequence
  Description of Artificial Sequence: Synthetic oligonucleotide
  Antisense strand to SEQ ID NO: 2523186
uugucugaugcauuggccc

SEQ ID NO: 2523188 - RNA, 19 nt, Artificial Sequence
  Description of Artificial Sequence: Synthetic oligonucleotide
  Sense strand starting at position 265 of SEQ ID NO: 1888269
acauuugagucguacaaga

SEQ ID NO: 2523189 - RNA, 19 nt, Artificial Sequence
  Description of Artificial Sequence: Synthetic oligonucleotide
  Antisense strand to SEQ ID NO: 2523188
ucuuguacgacucaaaugu

SEQ ID NO: 2523190 - RNA, 19 nt, Artificial Sequence
  Description of Artificial Sequence: Synthetic oligonucleotide
  Sense strand starting at position 332 of SEQ ID NO: 1888269
gccugugucuacucagcca

SEQ ID NO: 2523191 - RNA, 19 nt, Artificial Sequence
  Description of Artificial Sequence: Synthetic oligonucleotide
  Antisense strand to SEQ ID NO: 2523190
uggcugaguagacacaggc

SEQ ID NO: 2523192 - RNA, 19 nt, Artificial Sequence
  Description of Artificial Sequence: Synthetic oligonucleotide
  Sense strand starting at position 337 of SEQ ID NO: 1888269
ugucuacucagccagggaa

SEQ ID NO: 2523193 - RNA, 19 nt, Artificial Sequence
  Description of Artificial Sequence: Synthetic oligonucleotide
  Antisense strand to SEQ ID NO: 2523192
uucccuggcugaguagaca

SEQ ID NO: 2523194 - RNA, 19 nt, Artificial Sequence
  Description of Artificial Sequence: Synthetic oligonucleotide
  Sense strand starting at position 629 of SEQ ID NO: 1888269
ggaaguucuugagugagga

SEQ ID NO: 2523195 - RNA, 19 nt, Artificial Sequence
  Description of Artificial Sequence: Synthetic oligonucleotide
  Antisense strand to SEQ ID NO: 2523194
uccucacucaagaacuucc

SEQ ID NO: 2523196 - RNA, 19 nt, Artificial Sequence
  Description of Artificial Sequence: Synthetic oligonucleotide
  Sense strand starting at position 630 of SEQ ID NO: 1888269
gaaguucuugagugaggag

SEQ ID NO: 2523197 - RNA, 19 nt, Artificial Sequence
  Description of Artificial Sequence: Synthetic oligonucleotide
  Antisense strand to SEQ ID NO: 2523196
cuccucacucaagaacuuc

SEQ ID NO: 2523198 - RNA, 19 nt, Artificial Sequence
  Description of Artificial Sequence: Synthetic oligonucleotide
  Sense strand starting at position 631 of SEQ ID NO: 1888269
aaguucuugagugaggagu

SEQ ID NO: 2523199 - RNA, 19 nt, Artificial Sequence
  Description of Artificial Sequence: Synthetic oligonucleotide
  Antisense strand to SEQ ID NO: 2523198
acuccucacucaagaacuu

SEQ ID NO: 2523200 - RNA, 19 nt, Artificial Sequence
  Description of Artificial Sequence: Synthetic oligonucleotide
  Sense strand starting at position 668 of SEQ ID NO: 1888269
ggaguaagauuugguuggu

SEQ ID NO: 2523201 - RNA, 19 nt, Artificial Sequence
  Description of Artificial Sequence: Synthetic oligonucleotide
  Antisense strand to SEQ ID NO: 2523200
accaaccaaaucuuacucc

SEQ ID NO: 2523202 - RNA, 19 nt, Artificial Sequence
  Description of Artificial Sequence: Synthetic oligonucleotide
  Sense strand starting at position 704 of SEQ ID NO: 1888269
auuugcauucgguguuuga

SEQ ID NO: 2523203 - RNA, 19 nt, Artificial Sequence
  Description of Artificial Sequence: Synthetic oligonucleotide
  Antisense strand to SEQ ID NO: 2523202
ucaaacaccgaaugcaaau

SEQ ID NO: 2523204 - RNA, 19 nt, Artificial Sequence
  Description of Artificial Sequence: Synthetic oligonucleotide
  Sense strand starting at position 720 of SEQ ID NO: 1888269
ugagcacuucuguguugua

SEQ ID NO: 2523205 - RNA, 19 nt, Artificial Sequence
  Description of Artificial Sequence: Synthetic oligonucleotide
  Antisense strand to SEQ ID NO: 2523204
uacaacacagaagugcuca

SEQ ID NO: 2523206 - RNA, 19 nt, Artificial Sequence
  Description of Artificial Sequence: Synthetic oligonucleotide
  Sense strand starting at position 721 of SEQ ID NO: 1888269
gagcacuucuguguuguau

SEQ ID NO: 2523207 - RNA, 19 nt, Artificial Sequence
  Description of Artificial Sequence: Synthetic oligonucleotide
  Antisense strand to SEQ ID NO: 2523206
auacaacacagaagugcuc

SEQ ID NO: 2523208 - RNA, 19 nt, Artificial Sequence
  Description of Artificial Sequence: Synthetic oligonucleotide
  Sense strand starting at position 749 of SEQ ID NO: 1888269
ggcaauaacuugguagcca

SEQ ID NO: 2523209 - RNA, 19 nt, Artificial Sequence
  Description of Artificial Sequence: Synthetic oligonucleotide
  Antisense strand to SEQ ID NO: 2523208
uggcuaccaaguuauugcc

SEQ ID NO: 2523210 - RNA, 19 nt, Artificial Sequence
  Description of Artificial Sequence: Synthetic oligonucleotide
  Sense strand starting at position 750 of SEQ ID NO: 1888269
gcaauaacuugguagccaa

SEQ ID NO: 2523211 - RNA, 19 nt, Artificial Sequence
  Description of Artificial Sequence: Synthetic oligonucleotide
  Antisense strand to SEQ ID NO: 2523210
uuggcuaccaaguuauugc

SEQ ID NO: 2523212 - RNA, 19 nt, Artificial Sequence
  Description of Artificial Sequence: Synthetic oligonucleotide
  Sense strand starting at position 789 of SEQ ID NO: 1888269
gugcuuacacucugaguac

SEQ ID NO: 2523213 - RNA, 19 nt, Artificial Sequence
  Description of Artificial Sequence: Synthetic oligonucleotide
  Antisense strand to SEQ ID NO: 2523212
guacucagaguguaagcac

SEQ ID NO: 2523214 - RNA, 19 nt, Artificial Sequence
  Description of Artificial Sequence: Synthetic oligonucleotide
  Sense strand starting at position 790 of SEQ ID NO: 1888269
ugcuuacacucugaguaca

SEQ ID NO: 2523215 - RNA, 19 nt, Artificial Sequence
  Description of Artificial Sequence: Synthetic oligonucleotide
  Antisense strand to SEQ ID NO: 2523214
uguacucagaguguaagca

SEQ ID NO: 2523216 - RNA, 19 nt, Artificial Sequence
  Description of Artificial Sequence: Synthetic oligonucleotide
  Sense strand starting at position 801 of SEQ ID NO: 1888269
ugaguacaggcccaugaua

SEQ ID NO: 2523217 - RNA, 19 nt, Artificial Sequence
  Description of Artificial Sequence: Synthetic oligonucleotide
  Antisense strand to SEQ ID NO: 2523216
uaucaugggccuguacuca

SEQ ID NO: 2523218 - RNA, 19 nt, Artificial Sequence
  Description of Artificial Sequence: Synthetic oligonucleotide
  Sense strand starting at position 803 of SEQ ID NO: 1888269
aguacaggcccaugauaga

SEQ ID NO: 2523219 - RNA, 19 nt, Artificial Sequence
  Description of Artificial Sequence: Synthetic oligonucleotide
  Antisense strand to SEQ ID NO: 2523218
ucuaucaugggccuguacu

SEQ ID NO: 2523220 - RNA, 19 nt, Artificial Sequence
  Description of Artificial Sequence: Synthetic oligonucleotide
  Sense strand starting at position 833 of SEQ ID NO: 1888269
cuggaagaguugaggaagu

SEQ ID NO: 2523221 - RNA, 19 nt, Artificial Sequence
  Description of Artificial Sequence: Synthetic oligonucleotide
  Antisense strand to SEQ ID NO: 2523220
acuuccucaacucuuccag

SEQ ID NO: 2523222 - RNA, 19 nt, Artificial Sequence
  Description of Artificial Sequence: Synthetic oligonucleotide
  Sense strand starting at position 843 of SEQ ID NO: 1888269
ugaggaaguaguuggcauu

SEQ ID NO: 2523223 - RNA, 19 nt, Artificial Sequence
  Description of Artificial Sequence: Synthetic oligonucleotide
  Antisense strand to SEQ ID NO: 2523222
aaugccaacuacuuccuca

SEQ ID NO: 2523224 - RNA, 19 nt, Artificial Sequence
  Description of Artificial Sequence: Synthetic oligonucleotide
  Sense strand starting at position 957 of SEQ ID NO: 1888269
ucacauguguucccaugaa

SEQ ID NO: 2523225 - RNA, 19 nt, Artificial Sequence
  Description of Artificial Sequence: Synthetic oligonucleotide
  Antisense strand to SEQ ID NO: 2523224
uucaugggaacacauguga

SEQ ID NO: 2523226 - RNA, 19 nt, Artificial Sequence
  Description of Artificial Sequence: Synthetic oligonucleotide
  Sense strand starting at position 1021 of SEQ ID NO: 1888269
uuaguuauguagucgggca

SEQ ID NO: 2523227 - RNA, 19 nt, Artificial Sequence
  Description of Artificial Sequence: Synthetic oligonucleotide
  Antisense strand to SEQ ID NO: 2523226
ugcccgacuacauaacuaa

SEQ ID NO: 2523228 - RNA, 19 nt, Artificial Sequence
  Description of Artificial Sequence: Synthetic oligonucleotide
  Sense strand starting at position 1161 of SEQ ID NO: 1888269
auguuuaaguggcauuaaa

SEQ ID NO: 2523229 - RNA, 19 nt, Artificial Sequence
  Description of Artificial Sequence: Synthetic oligonucleotide
  Antisense strand to SEQ ID NO: 2523228
uuuaaugccacuuaaacau

SEQ ID NO: 2523230 - RNA, 19 nt, Artificial Sequence
  Description of Artificial Sequence: Synthetic oligonucleotide
  Sense strand starting at position 1267 of SEQ ID NO: 1888269
uuugaacugugagaauaaa

SEQ ID NO: 2523231 - RNA, 19 nt, Artificial Sequence
  Description of Artificial Sequence: Synthetic oligonucleotide
  Antisense strand to SEQ ID NO: 2523230
uuuauucucacaguucaaa

SEQ ID NO: 2523232 - RNA, 19 nt, Artificial Sequence
  Description of Artificial Sequence: Synthetic oligonucleotide
  Sense strand starting at position 1425 of SEQ ID NO: 1888269
uugugaguugcugggauua

SEQ ID NO: 2523233 - RNA, 19 nt, Artificial Sequence
  Description of Artificial Sequence: Synthetic oligonucleotide
  Antisense strand to SEQ ID NO: 2523232
uaaucccagcaacucacaa

SEQ ID NO: 2523234 - RNA, 19 nt, Artificial Sequence
  Description of Artificial Sequence: Synthetic oligonucleotide
  Sense strand starting at position 1625 of SEQ ID NO: 1888269
ccuaauaaaugcucgauag

SEQ ID NO: 2523235 - RNA, 19 nt, Artificial Sequence
  Description of Artificial Sequence: Synthetic oligonucleotide
  Antisense strand to SEQ ID NO: 2523234
cuaucgagcauuuauuagg

SEQ ID NO: 2523236 - RNA, 19 nt, Artificial Sequence
  Description of Artificial Sequence: Synthetic oligonucleotide
  Sense strand starting at position 1626 of SEQ ID NO: 1888269
cuaauaaaugcucgauaga

SEQ ID NO: 2523237 - RNA, 19 nt, Artificial Sequence
  Description of Artificial Sequence: Synthetic oligonucleotide
  Antisense strand to SEQ ID NO: 2523236
ucuaucgagcauuuauuag

SEQ ID NO: 2523238 - RNA, 19 nt, Artificial Sequence
  Description of Artificial Sequence: Synthetic oligonucleotide
  Sense strand starting at position 1639 of SEQ ID NO: 1888269
gauagaaagugcuuuguua

SEQ ID NO: 2523239 - RNA, 19 nt, Artificial Sequence
  Description of Artificial Sequence: Synthetic oligonucleotide
  Antisense strand to SEQ ID NO: 2523238
uaacaaagcacuuucuauc

SEQ ID NO: 2523240 - RNA, 19 nt, Artificial Sequence
  Description of Artificial Sequence: Synthetic oligonucleotide
  Sense strand starting at position 1641 of SEQ ID NO: 1888269
uagaaagugcuuuguuaaa

SEQ ID NO: 2523241 - RNA, 19 nt, Artificial Sequence
  Description of Artificial Sequence: Synthetic oligonucleotide
  Antisense strand to SEQ ID NO: 2523240
uuuaacaaagcacuuucua

SEQ ID NO: 2523242 - RNA, 19 nt, Artificial Sequence
  Description of Artificial Sequence: Synthetic oligonucleotide
  Sense strand starting at position 1643 of SEQ ID NO: 1888269
gaaagugcuuuguuaaauc

SEQ ID NO: 2523243 - RNA, 19 nt, Artificial Sequence
  Description of Artificial Sequence: Synthetic oligonucleotide
  Antisense strand to SEQ ID NO: 2523242
gauuuaacaaagcacuuuc

SEQ ID NO: 2523244 - RNA, 19 nt, Artificial Sequence
  Description of Artificial Sequence: Synthetic oligonucleotide
  Sense strand starting at position 1729 of SEQ ID NO: 1888269
aagacuuacucgucaggag

SEQ ID NO: 2523245 - RNA, 19 nt, Artificial Sequence
  Description of Artificial Sequence: Synthetic oligonucleotide
  Antisense strand to SEQ ID NO: 2523244
cuccugacgaguaagucuu

SEQ ID NO: 2523246 - RNA, 19 nt, Artificial Sequence
  Description of Artificial Sequence: Synthetic oligonucleotide
  Sense strand starting at position 1834 of SEQ ID NO: 1888269
ugcucuaaccugugaacca

SEQ ID NO: 2523247 - RNA, 19 nt, Artificial Sequence
  Description of Artificial Sequence: Synthetic oligonucleotide
  Antisense strand to SEQ ID NO: 2523246
ugguucacagguuagagca

SEQ ID NO: 2523248 - RNA, 19 nt, Artificial Sequence
  Description of Artificial Sequence: Synthetic oligonucleotide
  Sense strand starting at position 1835 of SEQ ID NO: 1888269
gcucuaaccugugaaccaa

SEQ ID NO: 2523249 - RNA, 19 nt, Artificial Sequence
  Description of Artificial Sequence: Synthetic oligonucleotide
  Antisense strand to SEQ ID NO: 2523248
uugguucacagguuagagc

SEQ ID NO: 2523250 - RNA, 19 nt, Artificial Sequence
  Description of Artificial Sequence: Synthetic oligonucleotide
  Sense strand starting at position 1874 of SEQ ID NO: 1888269
ccaucuucccacggucaga

SEQ ID NO: 2523251 - RNA, 19 nt, Artificial Sequence
  Description of Artificial Sequence: Synthetic oligonucleotide
  Antisense strand to SEQ ID NO: 2523250
ucugaccgugggaagaugg

SEQ ID NO: 2523252 - RNA, 19 nt, Artificial Sequence
  Description of Artificial Sequence: Synthetic oligonucleotide
  Sense strand starting at position 1918 of SEQ ID NO: 1888269
gccgauguaucagaacuaa

SEQ ID NO: 2523253 - RNA, 19 nt, Artificial Sequence
  Description of Artificial Sequence: Synthetic oligonucleotide
  Antisense strand to SEQ ID NO: 2523252
uuaguucugauacaucggc

SEQ ID NO: 2523254 - RNA, 19 nt, Artificial Sequence
  Description of Artificial Sequence: Synthetic oligonucleotide
  Sense strand starting at position 2171 of SEQ ID NO: 1888269
agaggucuccaacgaagaa

SEQ ID NO: 2523255 - RNA, 19 nt, Artificial Sequence
  Description of Artificial Sequence: Synthetic oligonucleotide
  Antisense strand to SEQ ID NO: 2523254
uucuucguuggagaccucu

SEQ ID NO: 2523256 - RNA, 19 nt, Artificial Sequence
  Description of Artificial Sequence: Synthetic oligonucleotide
  Sense strand starting at position 3291 of SEQ ID NO: 1888269
ccuguacucucuuuagugu

SEQ ID NO: 2523257 - RNA, 19 nt, Artificial Sequence
  Description of Artificial Sequence: Synthetic oligonucleotide
  Antisense strand to SEQ ID NO: 2523256
acacuaaagagaguacagg

SEQ ID NO: 2523258 - RNA, 19 nt, Artificial Sequence
  Description of Artificial Sequence: Synthetic oligonucleotide
  Sense strand starting at position 3784 of SEQ ID NO: 1888269
ccagcuugaucaucacuga

SEQ ID NO: 2523259 - RNA, 19 nt, Artificial Sequence
  Description of Artificial Sequence: Synthetic oligonucleotide
  Antisense strand to SEQ ID NO: 2523258
ucagugaugaucaagcugg

SEQ ID NO: 2523260 - RNA, 19 nt, Artificial Sequence
  Description of Artificial Sequence: Synthetic oligonucleotide
  Sense strand starting at position 169 of SEQ ID NO: 1888270
acggaaucccugugcauuu

SEQ ID NO: 2523261 - RNA, 19 nt, Artificial Sequence
  Description of Artificial Sequence: Synthetic oligonucleotide
  Antisense strand to SEQ ID NO: 2523260
aaaugcacagggauuccgu

SEQ ID NO: 2523262 - RNA, 19 nt, Artificial Sequence
  Description of Artificial Sequence: Synthetic oligonucleotide
  Sense strand starting at position 178 of SEQ ID NO: 1888270
cugugcauuuccucaccua

SEQ ID NO: 2523263 - RNA, 19 nt, Artificial Sequence
  Description of Artificial Sequence: Synthetic oligonucleotide
  Antisense strand to SEQ ID NO: 2523262
uaggugaggaaaugcacag

SEQ ID NO: 2523264 - RNA, 19 nt, Artificial Sequence
  Description of Artificial Sequence: Synthetic oligonucleotide
  Sense strand starting at position 342 of SEQ ID NO: 1888270
gguuuaauggcuuacagag

SEQ ID NO: 2523265 - RNA, 19 nt, Artificial Sequence
  Description of Artificial Sequence: Synthetic oligonucleotide
  Antisense strand to SEQ ID NO: 2523264
cucuguaagccauuaaacc

SEQ ID NO: 2523266 - RNA, 19 nt, Artificial Sequence
  Description of Artificial Sequence: Synthetic oligonucleotide
  Sense strand starting at position 544 of SEQ ID NO: 1888270
gggcuaguugaacagucau

SEQ ID NO: 2523267 - RNA, 19 nt, Artificial Sequence
  Description of Artificial Sequence: Synthetic oligonucleotide
  Antisense strand to SEQ ID NO: 2523266
augacuguucaacuagccc

SEQ ID NO: 2523268 - RNA, 19 nt, Artificial Sequence
  Description of Artificial Sequence: Synthetic oligonucleotide
  Sense strand starting at position 610 of SEQ ID NO: 1888270
ugcagugcuagccuguauu

SEQ ID NO: 2523269 - RNA, 19 nt, Artificial Sequence
  Description of Artificial Sequence: Synthetic oligonucleotide
  Antisense strand to SEQ ID NO: 2523268
aauacaggcuagcacugca

SEQ ID NO: 2523270 - RNA, 19 nt, Artificial Sequence
  Description of Artificial Sequence: Synthetic oligonucleotide
  Sense strand starting at position 718 of SEQ ID NO: 1888270
agcagaagauauguacuua

SEQ ID NO: 2523271 - RNA, 19 nt, Artificial Sequence
  Description of Artificial Sequence: Synthetic oligonucleotide
  Antisense strand to SEQ ID NO: 2523270
uaaguacauaucuucugcu

SEQ ID NO: 2523272 - RNA, 19 nt, Artificial Sequence
  Description of Artificial Sequence: Synthetic oligonucleotide
  Sense strand starting at position 722 of SEQ ID NO: 1888270
gaagauauguacuuaagca

SEQ ID NO: 2523273 - RNA, 19 nt, Artificial Sequence
  Description of Artificial Sequence: Synthetic oligonucleotide
  Antisense strand to SEQ ID NO: 2523272
ugcuuaaguacauaucuuc

SEQ ID NO: 2523274 - RNA, 19 nt, Artificial Sequence
  Description of Artificial Sequence: Synthetic oligonucleotide
  Sense strand starting at position 776 of SEQ ID NO: 1888270
guuccuagccucuagggau

SEQ ID NO: 2523275 - RNA, 19 nt, Artificial Sequence
  Description of Artificial Sequence: Synthetic oligonucleotide
  Antisense strand to SEQ ID NO: 2523274
aucccuagaggcuaggaac

SEQ ID NO: 2523276 - RNA, 19 nt, Artificial Sequence
  Description of Artificial Sequence: Synthetic oligonucleotide
  Sense strand starting at position 862 of SEQ ID NO: 1888270
acaaaucaucgaugauucu

SEQ ID NO: 2523277 - RNA, 19 nt, Artificial Sequence
  Description of Artificial Sequence: Synthetic oligonucleotide
  Antisense strand to SEQ ID NO: 2523276
agaaucaucgaugauuugu

SEQ ID NO: 2523278 - RNA, 19 nt, Artificial Sequence
  Description of Artificial Sequence: Synthetic oligonucleotide
  Sense strand starting at position 871 of SEQ ID NO: 1888270
cgaugauucuuagcaugga

SEQ ID NO: 2523279 - RNA, 19 nt, Artificial Sequence
  Description of Artificial Sequence: Synthetic oligonucleotide
  Antisense strand to SEQ ID NO: 2523278
uccaugcuaagaaucaucg

SEQ ID NO: 2523280 - RNA, 19 nt, Artificial Sequence
  Description of Artificial Sequence: Synthetic oligonucleotide
  Sense strand starting at position 1008 of SEQ ID NO: 1888270
uuguauuaauguccacaaa

SEQ ID NO: 2523281 - RNA, 19 nt, Artificial Sequence
  Description of Artificial Sequence: Synthetic oligonucleotide
  Antisense strand to SEQ ID NO: 2523280
uuuguggacauuaauacaa

SEQ ID NO: 2523282 - RNA, 19 nt, Artificial Sequence
  Description of Artificial Sequence: Synthetic oligonucleotide
  Sense strand starting at position 1009 of SEQ ID NO: 1888270
uguauuaauguccacaaau

SEQ ID NO: 2523283 - RNA, 19 nt, Artificial Sequence
  Description of Artificial Sequence: Synthetic oligonucleotide
  Antisense strand to SEQ ID NO: 2523282
auuuguggacauuaauaca

SEQ ID NO: 2523284 - RNA, 19 nt, Artificial Sequence
  Description of Artificial Sequence: Synthetic oligonucleotide
  Sense strand starting at position 1091 of SEQ ID NO: 1888270
aggaaacaauguucccauu

SEQ ID NO: 2523285 - RNA, 19 nt, Artificial Sequence
  Description of Artificial Sequence: Synthetic oligonucleotide
  Antisense strand to SEQ ID NO: 2523284
aaugggaacauuguuuccu

SEQ ID NO: 2523286 - RNA, 19 nt, Artificial Sequence
  Description of Artificial Sequence: Synthetic oligonucleotide
  Sense strand starting at position 1132 of SEQ ID NO: 1888270
cucugccauccugaagaua

SEQ ID NO: 2523287 - RNA, 19 nt, Artificial Sequence
  Description of Artificial Sequence: Synthetic oligonucleotide
  Antisense strand to SEQ ID NO: 2523286
uaucuucaggauggcagag

SEQ ID NO: 2523288 - RNA, 19 nt, Artificial Sequence
  Description of Artificial Sequence: Synthetic oligonucleotide
  Sense strand starting at position 1135 of SEQ ID NO: 1888270
ugccauccugaagauaacu

SEQ ID NO: 2523289 - RNA, 19 nt, Artificial Sequence
  Description of Artificial Sequence: Synthetic oligonucleotide
  Antisense strand to SEQ ID NO: 2523288
aguuaucuucaggauggca

SEQ ID NO: 2523290 - RNA, 19 nt, Artificial Sequence
  Description of Artificial Sequence: Synthetic oligonucleotide
  Sense strand starting at position 1620 of SEQ ID NO: 1888270
ucaggccugcaauauaauu

SEQ ID NO: 2523291 - RNA, 19 nt, Artificial Sequence
  Description of Artificial Sequence: Synthetic oligonucleotide
  Antisense strand to SEQ ID NO: 2523290
aauuauauugcaggccuga

SEQ ID NO: 2523292 - RNA, 19 nt, Artificial Sequence
  Description of Artificial Sequence: Synthetic oligonucleotide
  Sense strand starting at position 1725 of SEQ ID NO: 1888270
caggcaucggcuuaauaaa

SEQ ID NO: 2523293 - RNA, 19 nt, Artificial Sequence
  Description of Artificial Sequence: Synthetic oligonucleotide
  Antisense strand to SEQ ID NO: 2523292
uuuauuaagccgaugccug

SEQ ID NO: 2523294 - RNA, 19 nt, Artificial Sequence
  Description of Artificial Sequence: Synthetic oligonucleotide
  Sense strand starting at position 1778 of SEQ ID NO: 1888270
accacucaucuuugugaga

SEQ ID NO: 2523295 - RNA, 19 nt, Artificial Sequence
  Description of Artificial Sequence: Synthetic oligonucleotide
  Antisense strand to SEQ ID NO: 2523294
ucucacaaagaugaguggu

SEQ ID NO: 2523296 - RNA, 19 nt, Artificial Sequence
  Description of Artificial Sequence: Synthetic oligonucleotide
  Sense strand starting at position 1779 of SEQ ID NO: 1888270
ccacucaucuuugugagau

SEQ ID NO: 2523297 - RNA, 19 nt, Artificial Sequence
  Description of Artificial Sequence: Synthetic oligonucleotide
  Antisense strand to SEQ ID NO: 2523296
aucucacaaagaugagugg

SEQ ID NO: 2523298 - RNA, 19 nt, Artificial Sequence
  Description of Artificial Sequence: Synthetic oligonucleotide
  Sense strand starting at position 1787 of SEQ ID NO: 1888270
cuuugugagaugggucuca

SEQ ID NO: 2523299 - RNA, 19 nt, Artificial Sequence
  Description of Artificial Sequence: Synthetic oligonucleotide
  Antisense strand to SEQ ID NO: 2523298
ugagacccaucucacaaag

SEQ ID NO: 2523300 - RNA, 19 nt, Artificial Sequence
  Description of Artificial Sequence: Synthetic oligonucleotide
  Sense strand starting at position 2063 of SEQ ID NO: 1888270
auaucuaaugcaugucaag

SEQ ID NO: 2523301 - RNA, 19 nt, Artificial Sequence
  Description of Artificial Sequence: Synthetic oligonucleotide
  Antisense strand to SEQ ID NO: 2523300
cuugacaugcauuagauau

SEQ ID NO: 2523302 - RNA, 19 nt, Artificial Sequence
  Description of Artificial Sequence: Synthetic oligonucleotide
  Sense strand starting at position 2147 of SEQ ID NO: 1888270
cugaacuaaugaucuguaa

SEQ ID NO: 2523303 - RNA, 19 nt, Artificial Sequence
  Description of Artificial Sequence: Synthetic oligonucleotide
  Antisense strand to SEQ ID NO: 2523302
uuacagaucauuaguucag

SEQ ID NO: 2523304 - RNA, 19 nt, Artificial Sequence
  Description of Artificial Sequence: Synthetic oligonucleotide
  Sense strand starting at position 2163 of SEQ ID NO: 1888270
uaaggaucuccuggcagau

SEQ ID NO: 2523305 - RNA, 19 nt, Artificial Sequence
  Description of Artificial Sequence: Synthetic oligonucleotide
  Antisense strand to SEQ ID NO: 2523304
aucugccaggagauccuua

SEQ ID NO: 2523306 - RNA, 19 nt, Artificial Sequence
  Description of Artificial Sequence: Synthetic oligonucleotide
  Sense strand starting at position 2709 of SEQ ID NO: 1888270
aagcuaagaugguccauau

SEQ ID NO: 2523307 - RNA, 19 nt, Artificial Sequence
  Description of Artificial Sequence: Synthetic oligonucleotide
  Antisense strand to SEQ ID NO: 2523306
auauggaccaucuuagcuu

SEQ ID NO: 2523308 - RNA, 19 nt, Artificial Sequence
  Description of Artificial Sequence: Synthetic oligonucleotide
  Sense strand starting at position 2734 of SEQ ID NO: 1888270
uguggaugaggguguugaa

SEQ ID NO: 2523309 - RNA, 19 nt, Artificial Sequence
  Description of Artificial Sequence: Synthetic oligonucleotide
  Antisense strand to SEQ ID NO: 2523308
uucaacacccucauccaca

SEQ ID NO: 2523310 - RNA, 19 nt, Artificial Sequence
  Description of Artificial Sequence: Synthetic oligonucleotide
  Sense strand starting at position 2741 of SEQ ID NO: 1888270
gaggguguugaaggacauu

SEQ ID NO: 2523311 - RNA, 19 nt, Artificial Sequence
  Description of Artificial Sequence: Synthetic oligonucleotide
  Antisense strand to SEQ ID NO: 2523310
aauguccuucaacacccuc

SEQ ID NO: 2523312 - RNA, 19 nt, Artificial Sequence
  Description of Artificial Sequence: Synthetic oligonucleotide
  Sense strand starting at position 2858 of SEQ ID NO: 1888270
gugguagagcugccuguuu

SEQ ID NO: 2523313 - RNA, 19 nt, Artificial Sequence
  Description of Artificial Sequence: Synthetic oligonucleotide
  Antisense strand to SEQ ID NO: 2523312
aaacaggcagcucuaccac

SEQ ID NO: 2523314 - RNA, 19 nt, Artificial Sequence
  Description of Artificial Sequence: Synthetic oligonucleotide
  Sense strand starting at position 2876 of SEQ ID NO: 1888270
ugaacuuaaccuuggucau

SEQ ID NO: 2523315 - RNA, 19 nt, Artificial Sequence
  Description of Artificial Sequence: Synthetic oligonucleotide
  Antisense strand to SEQ ID NO: 2523314
augaccaagguuaaguuca

SEQ ID NO: 2523316 - RNA, 19 nt, Artificial Sequence
  Description of Artificial Sequence: Synthetic oligonucleotide
  Sense strand starting at position 2887 of SEQ ID NO: 1888270
uuggucaucucaguuugaa

SEQ ID NO: 2523317 - RNA, 19 nt, Artificial Sequence
  Description of Artificial Sequence: Synthetic oligonucleotide
  Antisense strand to SEQ ID NO: 2523316
uucaaacugagaugaccaa

SEQ ID NO: 2523318 - RNA, 19 nt, Artificial Sequence
  Description of Artificial Sequence: Synthetic oligonucleotide
  Sense strand starting at position 2890 of SEQ ID NO: 1888270
gucaucucaguuugaaaua

SEQ ID NO: 2523319 - RNA, 19 nt, Artificial Sequence
  Description of Artificial Sequence: Synthetic oligonucleotide
  Antisense strand to SEQ ID NO: 2523318
uauuucaaacugagaugac

SEQ ID NO: 2523320 - RNA, 19 nt, Artificial Sequence
  Description of Artificial Sequence: Synthetic oligonucleotide
  Sense strand starting at position 2961 of SEQ ID NO: 1888270
cacucuugaguuugaggua

SEQ ID NO: 2523321 - RNA, 19 nt, Artificial Sequence
  Description of Artificial Sequence: Synthetic oligonucleotide
  Antisense strand to SEQ ID NO: 2523320
uaccucaaacucaagagug

SEQ ID NO: 2523322 - RNA, 19 nt, Artificial Sequence
  Description of Artificial Sequence: Synthetic oligonucleotide
  Sense strand starting at position 2966 of SEQ ID NO: 1888270
uugaguuugagguacagca

SEQ ID NO: 2523323 - RNA, 19 nt, Artificial Sequence
  Description of Artificial Sequence: Synthetic oligonucleotide
  Antisense strand to SEQ ID NO: 2523322
ugcuguaccucaaacucaa

SEQ ID NO: 2523324 - RNA, 19 nt, Artificial Sequence
  Description of Artificial Sequence: Synthetic oligonucleotide
  Sense strand starting at position 2968 of SEQ ID NO: 1888270
gaguuugagguacagcaaa

SEQ ID NO: 2523325 - RNA, 19 nt, Artificial Sequence
  Description of Artificial Sequence: Synthetic oligonucleotide
  Antisense strand to SEQ ID NO: 2523324
uuugcuguaccucaaacuc

SEQ ID NO: 2523326 - RNA, 19 nt, Artificial Sequence
  Description of Artificial Sequence: Synthetic oligonucleotide
  Sense strand starting at position 3101 of SEQ ID NO: 1888270
cagcaagacugucuugaga

SEQ ID NO: 2523327 - RNA, 19 nt, Artificial Sequence
  Description of Artificial Sequence: Synthetic oligonucleotide
  Antisense strand to SEQ ID NO: 2523326
ucucaagacagucuugcug

SEQ ID NO: 2523328 - RNA, 19 nt, Artificial Sequence
  Description of Artificial Sequence: Synthetic oligonucleotide
  Sense strand starting at position 3712 of SEQ ID NO: 1888270
guuagacuguuuccuuaaa

SEQ ID NO: 2523329 - RNA, 19 nt, Artificial Sequence
  Description of Artificial Sequence: Synthetic oligonucleotide
  Antisense strand to SEQ ID NO: 2523328
uuuaaggaaacagucuaac

SEQ ID NO: 2523330 - RNA, 19 nt, Artificial Sequence
  Description of Artificial Sequence: Synthetic oligonucleotide
  Sense strand starting at position 3793 of SEQ ID NO: 1888270
accuauagaucuguucuca

SEQ ID NO: 2523331 - RNA, 19 nt, Artificial Sequence
  Description of Artificial Sequence: Synthetic oligonucleotide
  Antisense strand to SEQ ID NO: 2523330
ugagaacagaucuauaggu

SEQ ID NO: 2523332 - RNA, 19 nt, Artificial Sequence
  Description of Artificial Sequence: Synthetic oligonucleotide
  Sense strand starting at position 3797 of SEQ ID NO: 1888270
auagaucuguucucaccua

SEQ ID NO: 2523333 - RNA, 19 nt, Artificial Sequence
  Description of Artificial Sequence: Synthetic oligonucleotide
  Antisense strand to SEQ ID NO: 2523332
uaggugagaacagaucuau

SEQ ID NO: 2523334 - RNA, 19 nt, Artificial Sequence
  Description of Artificial Sequence: Synthetic oligonucleotide
  Sense strand starting at position 3811 of SEQ ID NO: 1888270
accuaauuugcucgagcau

SEQ ID NO: 2523335 - RNA, 19 nt, Artificial Sequence
  Description of Artificial Sequence: Synthetic oligonucleotide
  Antisense strand to SEQ ID NO: 2523334
augcucgagcaaauuaggu

SEQ ID NO: 2523336 - RNA, 19 nt, Artificial Sequence
  Description of Artificial Sequence: Synthetic oligonucleotide
  Sense strand starting at position 3812 of SEQ ID NO: 1888270
ccuaauuugcucgagcauc

SEQ ID NO: 2523337 - RNA, 19 nt, Artificial Sequence
  Description of Artificial Sequence: Synthetic oligonucleotide
  Antisense strand to SEQ ID NO: 2523336
gaugcucgagcaaauuagg

SEQ ID NO: 2523338 - RNA, 19 nt, Artificial Sequence
  Description of Artificial Sequence: Synthetic oligonucleotide
  Sense strand starting at position 3826 of SEQ ID NO: 1888270
gcaucaagacccugauaau

SEQ ID NO: 2523339 - RNA, 19 nt, Artificial Sequence
  Description of Artificial Sequence: Synthetic oligonucleotide
  Antisense strand to SEQ ID NO: 2523338
auuaucagggucuugaugc

SEQ ID NO: 2523340 - RNA, 19 nt, Artificial Sequence
  Description of Artificial Sequence: Synthetic oligonucleotide
  Sense strand starting at position 223 of SEQ ID NO: 1888271
ugaaccaacucuugugaau

SEQ ID NO: 2523341 - RNA, 19 nt, Artificial Sequence
  Description of Artificial Sequence: Synthetic oligonucleotide
  Antisense strand to SEQ ID NO: 2523340
auucacaagaguugguuca

SEQ ID NO: 2523342 - RNA, 19 nt, Artificial Sequence
  Description of Artificial Sequence: Synthetic oligonucleotide
  Sense strand starting at position 722 of SEQ ID NO: 1888271
cugugagaacagugcucau

SEQ ID NO: 2523343 - RNA, 19 nt, Artificial Sequence
  Description of Artificial Sequence: Synthetic oligonucleotide
  Antisense strand to SEQ ID NO: 2523342
augagcacuguucucacag

SEQ ID NO: 2523344 - RNA, 19 nt, Artificial Sequence
  Description of Artificial Sequence: Synthetic oligonucleotide
  Sense strand starting at position 725 of SEQ ID NO: 1888271
ugagaacagugcucauuac

SEQ ID NO: 2523345 - RNA, 19 nt, Artificial Sequence
  Description of Artificial Sequence: Synthetic oligonucleotide
  Antisense strand to SEQ ID NO: 2523344
guaaugagcacuguucuca

SEQ ID NO: 2523346 - RNA, 19 nt, Artificial Sequence
  Description of Artificial Sequence: Synthetic oligonucleotide
  Sense strand starting at position 726 of SEQ ID NO: 1888271
gagaacagugcucauuaca

SEQ ID NO: 2523347 - RNA, 19 nt, Artificial Sequence
  Description of Artificial Sequence: Synthetic oligonucleotide
  Antisense strand to SEQ ID NO: 2523346
uguaaugagcacuguucuc

SEQ ID NO: 2523348 - RNA, 19 nt, Artificial Sequence
  Description of Artificial Sequence: Synthetic oligonucleotide
  Sense strand starting at position 773 of SEQ ID NO: 1888271
ggaacgcgugucguuaaca

SEQ ID NO: 2523349 - RNA, 19 nt, Artificial Sequence
  Description of Artificial Sequence: Synthetic oligonucleotide
  Antisense strand to SEQ ID NO: 2523348
uguuaacgacacgcguucc

SEQ ID NO: 2523350 - RNA, 19 nt, Artificial Sequence
  Description of Artificial Sequence: Synthetic oligonucleotide
  Sense strand starting at position 774 of SEQ ID NO: 1888271
gaacgcgugucguuaacau

SEQ ID NO: 2523351 - RNA, 19 nt, Artificial Sequence
  Description of Artificial Sequence: Synthetic oligonucleotide
  Antisense strand to SEQ ID NO: 2523350
auguuaacgacacgcguuc

SEQ ID NO: 2523352 - RNA, 19 nt, Artificial Sequence
  Description of Artificial Sequence: Synthetic oligonucleotide
  Sense strand starting at position 785 of SEQ ID NO: 1888271
guuaacauugcccaguguu

SEQ ID NO: 2523353 - RNA, 19 nt, Artificial Sequence
  Description of Artificial Sequence: Synthetic oligonucleotide
  Antisense strand to SEQ ID NO: 2523352
aacacugggcaauguuaac

SEQ ID NO: 2523354 - RNA, 19 nt, Artificial Sequence
  Description of Artificial Sequence: Synthetic oligonucleotide
  Sense strand starting at position 793 of SEQ ID NO: 1888271
ugcccaguguuucugggau

SEQ ID NO: 2523355 - RNA, 19 nt, Artificial Sequence
  Description of Artificial Sequence: Synthetic oligonucleotide
  Antisense strand to SEQ ID NO: 2523354
aucccagaaacacugggca

SEQ ID NO: 2523356 - RNA, 19 nt, Artificial Sequence
  Description of Artificial Sequence: Synthetic oligonucleotide
  Sense strand starting at position 797 of SEQ ID NO: 1888271
caguguuucugggauaguu

SEQ ID NO: 2523357 - RNA, 19 nt, Artificial Sequence
  Description of Artificial Sequence: Synthetic oligonucleotide
  Antisense strand to SEQ ID NO: 2523356
aacuaucccagaaacacug

SEQ ID NO: 2523358 - RNA, 19 nt, Artificial Sequence
  Description of Artificial Sequence: Synthetic oligonucleotide
  Sense strand starting at position 799 of SEQ ID NO: 1888271
guguuucugggauaguuua

SEQ ID NO: 2523359 - RNA, 19 nt, Artificial Sequence
  Description of Artificial Sequence: Synthetic oligonucleotide
  Antisense strand to SEQ ID NO: 2523358
uaaacuaucccagaaacac

SEQ ID NO: 2523360 - RNA, 19 nt, Artificial Sequence
  Description of Artificial Sequence: Synthetic oligonucleotide
  Sense strand starting at position 807 of SEQ ID NO: 1888271
gggauaguuuaauugugug

SEQ ID NO: 2523361 - RNA, 19 nt, Artificial Sequence
  Description of Artificial Sequence: Synthetic oligonucleotide
  Antisense strand to SEQ ID NO: 2523360
cacacaauuaaacuauccc

SEQ ID NO: 2523362 - RNA, 19 nt, Artificial Sequence
  Description of Artificial Sequence: Synthetic oligonucleotide
  Sense strand starting at position 811 of SEQ ID NO: 1888271
uaguuuaauugugugggua

SEQ ID NO: 2523363 - RNA, 19 nt, Artificial Sequence
  Description of Artificial Sequence: Synthetic oligonucleotide
  Antisense strand to SEQ ID NO: 2523362
uacccacacaauuaaacua

SEQ ID NO: 2523364 - RNA, 19 nt, Artificial Sequence
  Description of Artificial Sequence: Synthetic oligonucleotide
  Sense strand starting at position 812 of SEQ ID NO: 1888271
aguuuaauuguguggguau

SEQ ID NO: 2523365 - RNA, 19 nt, Artificial Sequence
  Description of Artificial Sequence: Synthetic oligonucleotide
  Antisense strand to SEQ ID NO: 2523364
auacccacacaauuaaacu

SEQ ID NO: 2523366 - RNA, 19 nt, Artificial Sequence
  Description of Artificial Sequence: Synthetic oligonucleotide
  Sense strand starting at position 814 of SEQ ID NO: 1888271
uuuaauuguguggguauaa

SEQ ID NO: 2523367 - RNA, 19 nt, Artificial Sequence
  Description of Artificial Sequence: Synthetic oligonucleotide
  Antisense strand to SEQ ID NO: 2523366
uuauacccacacaauuaaa

SEQ ID NO: 2523368 - RNA, 19 nt, Artificial Sequence
  Description of Artificial Sequence: Synthetic oligonucleotide
  Sense strand starting at position 815 of SEQ ID NO: 1888271
uuaauuguguggguauaac

SEQ ID NO: 2523369 - RNA, 19 nt, Artificial Sequence
  Description of Artificial Sequence: Synthetic oligonucleotide
  Antisense strand to SEQ ID NO: 2523368
guuauacccacacaauuaa

SEQ ID NO: 2523370 - RNA, 19 nt, Artificial Sequence
  Description of Artificial Sequence: Synthetic oligonucleotide
  Sense strand starting at position 847 of SEQ ID NO: 1888271
cccaaaggcugucccaaau

SEQ ID NO: 2523371 - RNA, 19 nt, Artificial Sequence
  Description of Artificial Sequence: Synthetic oligonucleotide
  Antisense strand to SEQ ID NO: 2523370
auuugggacagccuuuggg

SEQ ID NO: 2523372 - RNA, 19 nt, Artificial Sequence
  Description of Artificial Sequence: Synthetic oligonucleotide
  Sense strand starting at position 991 of SEQ ID NO: 1888271
uuaagaaacugggugcuaa

SEQ ID NO: 2523373 - RNA, 19 nt, Artificial Sequence
  Description of Artificial Sequence: Synthetic oligonucleotide
  Antisense strand to SEQ ID NO: 2523372
uuagcacccaguuucuuaa

SEQ ID NO: 2523374 - RNA, 19 nt, Artificial Sequence
  Description of Artificial Sequence: Synthetic oligonucleotide
  Sense strand starting at position 992 of SEQ ID NO: 1888271
uaagaaacugggugcuaaa

SEQ ID NO: 2523375 - RNA, 19 nt, Artificial Sequence
  Description of Artificial Sequence: Synthetic oligonucleotide
  Antisense strand to SEQ ID NO: 2523374
uuuagcacccaguuucuua

SEQ ID NO: 2523376 - RNA, 19 nt, Artificial Sequence
  Description of Artificial Sequence: Synthetic oligonucleotide
  Sense strand starting at position 995 of SEQ ID NO: 1888271
gaaacugggugcuaaauga

SEQ ID NO: 2523377 - RNA, 19 nt, Artificial Sequence
  Description of Artificial Sequence: Synthetic oligonucleotide
  Antisense strand to SEQ ID NO: 2523376
ucauuuagcacccaguuuc

SEQ ID NO: 2523378 - RNA, 19 nt, Artificial Sequence
  Description of Artificial Sequence: Synthetic oligonucleotide
  Sense strand starting at position 1023 of SEQ ID NO: 1888271
ggagaaugauuguagcuua

SEQ ID NO: 2523379 - RNA, 19 nt, Artificial Sequence
  Description of Artificial Sequence: Synthetic oligonucleotide
  Antisense strand to SEQ ID NO: 2523378
uaagcuacaaucauucucc

SEQ ID NO: 2523380 - RNA, 19 nt, Artificial Sequence
  Description of Artificial Sequence: Synthetic oligonucleotide
  Sense strand starting at position 1026 of SEQ ID NO: 1888271
gaaugauuguagcuuagca

SEQ ID NO: 2523381 - RNA, 19 nt, Artificial Sequence
  Description of Artificial Sequence: Synthetic oligonucleotide
  Antisense strand to SEQ ID NO: 2523380
ugcuaagcuacaaucauuc

SEQ ID NO: 2523382 - RNA, 19 nt, Artificial Sequence
  Description of Artificial Sequence: Synthetic oligonucleotide
  Sense strand starting at position 1028 of SEQ ID NO: 1888271
augauuguagcuuagcaca

SEQ ID NO: 2523383 - RNA, 19 nt, Artificial Sequence
  Description of Artificial Sequence: Synthetic oligonucleotide
  Antisense strand to SEQ ID NO: 2523382
ugugcuaagcuacaaucau

SEQ ID NO: 2523384 - RNA, 19 nt, Artificial Sequence
  Description of Artificial Sequence: Synthetic oligonucleotide
  Sense strand starting at position 1030 of SEQ ID NO: 1888271
gauuguagcuuagcacauu

SEQ ID NO: 2523385 - RNA, 19 nt, Artificial Sequence
  Description of Artificial Sequence: Synthetic oligonucleotide
  Antisense strand to SEQ ID NO: 2523384
aaugugcuaagcuacaauc

SEQ ID NO: 2523386 - RNA, 19 nt, Artificial Sequence
  Description of Artificial Sequence: Synthetic oligonucleotide
  Sense strand starting at position 1094 of SEQ ID NO: 1888271
cggacacacgucugauaau

SEQ ID NO: 2523387 - RNA, 19 nt, Artificial Sequence
  Description of Artificial Sequence: Synthetic oligonucleotide
  Antisense strand to SEQ ID NO: 2523386
auuaucagacguguguccg

SEQ ID NO: 2523388 - RNA, 19 nt, Artificial Sequence
  Description of Artificial Sequence: Synthetic oligonucleotide
  Sense strand starting at position 1095 of SEQ ID NO: 1888271
ggacacacgucugauaaua

SEQ ID NO: 2523389 - RNA, 19 nt, Artificial Sequence
  Description of Artificial Sequence: Synthetic oligonucleotide
  Antisense strand to SEQ ID NO: 2523388
uauuaucagacgugugucc

SEQ ID NO: 2523390 - RNA, 19 nt, Artificial Sequence
  Description of Artificial Sequence: Synthetic oligonucleotide
  Sense strand starting at position 1097 of SEQ ID NO: 1888271
acacacgucugauaauaag

SEQ ID NO: 2523391 - RNA, 19 nt, Artificial Sequence
  Description of Artificial Sequence: Synthetic oligonucleotide
  Antisense strand to SEQ ID NO: 2523390
cuuauuaucagacgugugu

SEQ ID NO: 2523392 - RNA, 19 nt, Artificial Sequence
  Description of Artificial Sequence: Synthetic oligonucleotide
  Sense strand starting at position 1255 of SEQ ID NO: 1888271
auagaaucaagagguaguu

SEQ ID NO: 2523393 - RNA, 19 nt, Artificial Sequence
  Description of Artificial Sequence: Synthetic oligonucleotide
  Antisense strand to SEQ ID NO: 2523392
aacuaccucuugauucuau

SEQ ID NO: 2523394 - RNA, 19 nt, Artificial Sequence
  Description of Artificial Sequence: Synthetic oligonucleotide
  Sense strand starting at position 1535 of SEQ ID NO: 1888271
cuuccucugccuggucaaa

SEQ ID NO: 2523395 - RNA, 19 nt, Artificial Sequence
  Description of Artificial Sequence: Synthetic oligonucleotide
  Antisense strand to SEQ ID NO: 2523394
uuugaccaggcagaggaag

SEQ ID NO: 2523396 - RNA, 19 nt, Artificial Sequence
  Description of Artificial Sequence: Synthetic oligonucleotide
  Sense strand starting at position 1537 of SEQ ID NO: 1888271
uccucugccuggucaaaga

SEQ ID NO: 2523397 - RNA, 19 nt, Artificial Sequence
  Description of Artificial Sequence: Synthetic oligonucleotide
  Antisense strand to SEQ ID NO: 2523396
ucuuugaccaggcagagga

SEQ ID NO: 2523398 - RNA, 19 nt, Artificial Sequence
  Description of Artificial Sequence: Synthetic oligonucleotide
  Sense strand starting at position 1985 of SEQ ID NO: 1888271
uauugccaucauuguggaa

SEQ ID NO: 2523399 - RNA, 19 nt, Artificial Sequence
  Description of Artificial Sequence: Synthetic oligonucleotide
  Antisense strand to SEQ ID NO: 2523398
uuccacaaugauggcaaua

SEQ ID NO: 2523400 - RNA, 19 nt, Artificial Sequence
  Description of Artificial Sequence: Synthetic oligonucleotide
  Sense strand starting at position 1989 of SEQ ID NO: 1888271
gccaucauuguggaagcua

SEQ ID NO: 2523401 - RNA, 19 nt, Artificial Sequence
  Description of Artificial Sequence: Synthetic oligonucleotide
  Antisense strand to SEQ ID NO: 2523400
uagcuuccacaaugauggc

SEQ ID NO: 2523402 - RNA, 19 nt, Artificial Sequence
  Description of Artificial Sequence: Synthetic oligonucleotide
  Sense strand starting at position 2241 of SEQ ID NO: 1888271
uggagaguuuaagaucaga

SEQ ID NO: 2523403 - RNA, 19 nt, Artificial Sequence
  Description of Artificial Sequence: Synthetic oligonucleotide
  Antisense strand to SEQ ID NO: 2523402
ucugaucuuaaacucucca

SEQ ID NO: 2523404 - RNA, 19 nt, Artificial Sequence
  Description of Artificial Sequence: Synthetic oligonucleotide
  Sense strand starting at position 2402 of SEQ ID NO: 1888271
gucgcugaccuggaaacuu

SEQ ID NO: 2523405 - RNA, 19 nt, Artificial Sequence
  Description of Artificial Sequence: Synthetic oligonucleotide
  Antisense strand to SEQ ID NO: 2523404
aaguuuccaggucagcgac

SEQ ID NO: 2523406 - RNA, 19 nt, Artificial Sequence
  Description of Artificial Sequence: Synthetic oligonucleotide
  Sense strand starting at position 2796 of SEQ ID NO: 1888271
cauggugggucacgaaaua

SEQ ID NO: 2523407 - RNA, 19 nt, Artificial Sequence
  Description of Artificial Sequence: Synthetic oligonucleotide
  Antisense strand to SEQ ID NO: 2523406
uauuucgugacccaccaug

SEQ ID NO: 2523408 - RNA, 19 nt, Artificial Sequence
  Description of Artificial Sequence: Synthetic oligonucleotide
  Sense strand starting at position 3016 of SEQ ID NO: 1888271
cagauauguccaugccuag

SEQ ID NO: 2523409 - RNA, 19 nt, Artificial Sequence
  Description of Artificial Sequence: Synthetic oligonucleotide
  Antisense strand to SEQ ID NO: 2523408
cuaggcauggacauaucug

SEQ ID NO: 2523410 - RNA, 19 nt, Artificial Sequence
  Description of Artificial Sequence: Synthetic oligonucleotide
  Sense strand starting at position 3020 of SEQ ID NO: 1888271
uauguccaugccuaggaaa

SEQ ID NO: 2523411 - RNA, 19 nt, Artificial Sequence
  Description of Artificial Sequence: Synthetic oligonucleotide
  Antisense strand to SEQ ID NO: 2523410
uuuccuaggcauggacaua

SEQ ID NO: 2523412 - RNA, 19 nt, Artificial Sequence
  Description of Artificial Sequence: Synthetic oligonucleotide
  Sense strand starting at position 3378 of SEQ ID NO: 1888271
ccuacucugccuggaggaa

SEQ ID NO: 2523413 - RNA, 19 nt, Artificial Sequence
  Description of Artificial Sequence: Synthetic oligonucleotide
  Antisense strand to SEQ ID NO: 2523412
uuccuccaggcagaguagg

SEQ ID NO: 2523414 - RNA, 19 nt, Artificial Sequence
  Description of Artificial Sequence: Synthetic oligonucleotide
  Sense strand starting at position 3595 of SEQ ID NO: 1888271
gauggucaguccucaucaa

SEQ ID NO: 2523415 - RNA, 19 nt, Artificial Sequence
  Description of Artificial Sequence: Synthetic oligonucleotide
  Antisense strand to SEQ ID NO: 2523414
uugaugaggacugaccauc

SEQ ID NO: 2523416 - RNA, 19 nt, Artificial Sequence
  Description of Artificial Sequence: Synthetic oligonucleotide
  Sense strand starting at position 3599 of SEQ ID NO: 1888271
gucaguccucaucaagacu

SEQ ID NO: 2523417 - RNA, 19 nt, Artificial Sequence
  Description of Artificial Sequence: Synthetic oligonucleotide
  Antisense strand to SEQ ID NO: 2523416
agucuugaugaggacugac

SEQ ID NO: 2523418 - RNA, 19 nt, Artificial Sequence
  Description of Artificial Sequence: Synthetic oligonucleotide
  Sense strand starting at position 3637 of SEQ ID NO: 1888271
gaccaaaggcuccaguauu

SEQ ID NO: 2523419 - RNA, 19 nt, Artificial Sequence
  Description of Artificial Sequence: Synthetic oligonucleotide
  Antisense strand to SEQ ID NO: 2523418
aauacuggagccuuugguc

SEQ ID NO: 2523420 - RNA, 19 nt, Artificial Sequence
  Description of Artificial Sequence: Synthetic oligonucleotide
  Sense strand starting at position 149 of SEQ ID NO: 1888272
ucaagucugucaucgguca

SEQ ID NO: 2523421 - RNA, 19 nt, Artificial Sequence
  Description of Artificial Sequence: Synthetic oligonucleotide
  Antisense strand to SEQ ID NO: 2523420
ugaccgaugacagacuuga

SEQ ID NO: 2523422 - RNA, 19 nt, Artificial Sequence
  Description of Artificial Sequence: Synthetic oligonucleotide
  Sense strand starting at position 242 of SEQ ID NO: 1888272
ugcaguguaccagggaaga

SEQ ID NO: 2523423 - RNA, 19 nt, Artificial Sequence
  Description of Artificial Sequence: Synthetic oligonucleotide
  Antisense strand to SEQ ID NO: 2523422
ucuucccugguacacugca

SEQ ID NO: 2523424 - RNA, 19 nt, Artificial Sequence
  Description of Artificial Sequence: Synthetic oligonucleotide
  Sense strand starting at position 538 of SEQ ID NO: 1888272
ugaaccaacucuugugaau

SEQ ID NO: 2523425 - RNA, 19 nt, Artificial Sequence
  Description of Artificial Sequence: Synthetic oligonucleotide
  Antisense strand to SEQ ID NO: 2523424
auucacaagaguugguuca

SEQ ID NO: 2523426 - RNA, 19 nt, Artificial Sequence
  Description of Artificial Sequence: Synthetic oligonucleotide
  Sense strand starting at position 1037 of SEQ ID NO: 1888272
cugugagaacagugcucau

SEQ ID NO: 2523427 - RNA, 19 nt, Artificial Sequence
  Description of Artificial Sequence: Synthetic oligonucleotide
  Antisense strand to SEQ ID NO: 2523426
augagcacuguucucacag

SEQ ID NO: 2523428 - RNA, 19 nt, Artificial Sequence
  Description of Artificial Sequence: Synthetic oligonucleotide
  Sense strand starting at position 1040 of SEQ ID NO: 1888272
ugagaacagugcucauuac

SEQ ID NO: 2523429 - RNA, 19 nt, Artificial Sequence
  Description of Artificial Sequence: Synthetic oligonucleotide
  Antisense strand to SEQ ID NO: 2523428
guaaugagcacuguucuca

SEQ ID NO: 2523430 - RNA, 19 nt, Artificial Sequence
  Description of Artificial Sequence: Synthetic oligonucleotide
  Sense strand starting at position 1041 of SEQ ID NO: 1888272
gagaacagugcucauuaca

SEQ ID NO: 2523431 - RNA, 19 nt, Artificial Sequence
  Description of Artificial Sequence: Synthetic oligonucleotide
  Antisense strand to SEQ ID NO: 2523430
uguaaugagcacuguucuc

SEQ ID NO: 2523432 - RNA, 19 nt, Artificial Sequence
  Description of Artificial Sequence: Synthetic oligonucleotide
  Sense strand starting at position 1088 of SEQ ID NO: 1888272
ggaacgcgugucguuaaca

SEQ ID NO: 2523433 - RNA, 19 nt, Artificial Sequence
  Description of Artificial Sequence: Synthetic oligonucleotide
  Antisense strand to SEQ ID NO: 2523432
uguuaacgacacgcguucc

SEQ ID NO: 2523434 - RNA, 19 nt, Artificial Sequence
  Description of Artificial Sequence: Synthetic oligonucleotide
  Sense strand starting at position 1089 of SEQ ID NO: 1888272
gaacgcgugucguuaacau

SEQ ID NO: 2523435 - RNA, 19 nt, Artificial Sequence
  Description of Artificial Sequence: Synthetic oligonucleotide
  Antisense strand to SEQ ID NO: 2523434
auguuaacgacacgcguuc

SEQ ID NO: 2523436 - RNA, 19 nt, Artificial Sequence
  Description of Artificial Sequence: Synthetic oligonucleotide
  Sense strand starting at position 1100 of SEQ ID NO: 1888272
guuaacauugcccaguguu

SEQ ID NO: 2523437 - RNA, 19 nt, Artificial Sequence
  Description of Artificial Sequence: Synthetic oligonucleotide
  Antisense strand to SEQ ID NO: 2523436
aacacugggcaauguuaac

SEQ ID NO: 2523438 - RNA, 19 nt, Artificial Sequence
  Description of Artificial Sequence: Synthetic oligonucleotide
  Sense strand starting at position 1108 of SEQ ID NO: 1888272
ugcccaguguuucugggau

SEQ ID NO: 2523439 - RNA, 19 nt, Artificial Sequence
  Description of Artificial Sequence: Synthetic oligonucleotide
  Antisense strand to SEQ ID NO: 2523438
aucccagaaacacugggca

SEQ ID NO: 2523440 - RNA, 19 nt, Artificial Sequence
  Description of Artificial Sequence: Synthetic oligonucleotide
  Sense strand starting at position 1114 of SEQ ID NO: 1888272
guguuucugggauaguuua

SEQ ID NO: 2523441 - RNA, 19 nt, Artificial Sequence
  Description of Artificial Sequence: Synthetic oligonucleotide
  Antisense strand to SEQ ID NO: 2523440
uaaacuaucccagaaacac

SEQ ID NO: 2523442 - RNA, 19 nt, Artificial Sequence
  Description of Artificial Sequence: Synthetic oligonucleotide
  Sense strand starting at position 1122 of SEQ ID NO: 1888272
gggauaguuuaauugugug

SEQ ID NO: 2523443 - RNA, 19 nt, Artificial Sequence
  Description of Artificial Sequence: Synthetic oligonucleotide
  Antisense strand to SEQ ID NO: 2523442
cacacaauuaaacuauccc

SEQ ID NO: 2523444 - RNA, 19 nt, Artificial Sequence
  Description of Artificial Sequence: Synthetic oligonucleotide
  Sense strand starting at position 1126 of SEQ ID NO: 1888272
uaguuuaauugugugggua

SEQ ID NO: 2523445 - RNA, 19 nt, Artificial Sequence
  Description of Artificial Sequence: Synthetic oligonucleotide
  Antisense strand to SEQ ID NO: 2523444
uacccacacaauuaaacua

SEQ ID NO: 2523446 - RNA, 19 nt, Artificial Sequence
  Description of Artificial Sequence: Synthetic oligonucleotide
  Sense strand starting at position 1127 of SEQ ID NO: 1888272
aguuuaauuguguggguau

SEQ ID NO: 2523447 - RNA, 19 nt, Artificial Sequence
  Description of Artificial Sequence: Synthetic oligonucleotide
  Antisense strand to SEQ ID NO: 2523446
auacccacacaauuaaacu

SEQ ID NO: 2523448 - RNA, 19 nt, Artificial Sequence
  Description of Artificial Sequence: Synthetic oligonucleotide
  Sense strand starting at position 1129 of SEQ ID NO: 1888272
uuuaauuguguggguauaa

SEQ ID NO: 2523449 - RNA, 19 nt, Artificial Sequence
  Description of Artificial Sequence: Synthetic oligonucleotide
  Antisense strand to SEQ ID NO: 2523448
uuauacccacacaauuaaa

SEQ ID NO: 2523450 - RNA, 19 nt, Artificial Sequence
  Description of Artificial Sequence: Synthetic oligonucleotide
  Sense strand starting at position 1130 of SEQ ID NO: 1888272
uuaauuguguggguauaac

SEQ ID NO: 2523451 - RNA, 19 nt, Artificial Sequence
  Description of Artificial Sequence: Synthetic oligonucleotide
  Antisense strand to SEQ ID NO: 2523450
guuauacccacacaauuaa

SEQ ID NO: 2523452 - RNA, 19 nt, Artificial Sequence
  Description of Artificial Sequence: Synthetic oligonucleotide
  Sense strand starting at position 1162 of SEQ ID NO: 1888272
cccaaaggcugucccaaau

SEQ ID NO: 2523453 - RNA, 19 nt, Artificial Sequence
  Description of Artificial Sequence: Synthetic oligonucleotide
  Antisense strand to SEQ ID NO: 2523452
auuugggacagccuuuggg

SEQ ID NO: 2523454 - RNA, 19 nt, Artificial Sequence
  Description of Artificial Sequence: Synthetic oligonucleotide
  Sense strand starting at position 1306 of SEQ ID NO: 1888272
uuaagaaacugggugcuaa

SEQ ID NO: 2523455 - RNA, 19 nt, Artificial Sequence
  Description of Artificial Sequence: Synthetic oligonucleotide
  Antisense strand to SEQ ID NO: 2523454
uuagcacccaguuucuuaa

SEQ ID NO: 2523456 - RNA, 19 nt, Artificial Sequence
  Description of Artificial Sequence: Synthetic oligonucleotide
  Sense strand starting at position 1307 of SEQ ID NO: 1888272
uaagaaacugggugcuaaa

SEQ ID NO: 2523457 - RNA, 19 nt, Artificial Sequence
  Description of Artificial Sequence: Synthetic oligonucleotide
  Antisense strand to SEQ ID NO: 2523456
uuuagcacccaguuucuua

SEQ ID NO: 2523458 - RNA, 19 nt, Artificial Sequence
  Description of Artificial Sequence: Synthetic oligonucleotide
  Sense strand starting at position 1310 of SEQ ID NO: 1888272
gaaacugggugcuaaauga

SEQ ID NO: 2523459 - RNA, 19 nt, Artificial Sequence
  Description of Artificial Sequence: Synthetic oligonucleotide
  Antisense strand to SEQ ID NO: 2523458
ucauuuagcacccaguuuc

SEQ ID NO: 2523460 - RNA, 19 nt, Artificial Sequence
  Description of Artificial Sequence: Synthetic oligonucleotide
  Sense strand starting at position 1338 of SEQ ID NO: 1888272
ggagaaugauuguagcuua

SEQ ID NO: 2523461 - RNA, 19 nt, Artificial Sequence
  Description of Artificial Sequence: Synthetic oligonucleotide
  Antisense strand to SEQ ID NO: 2523460
uaagcuacaaucauucucc

SEQ ID NO: 2523462 - RNA, 19 nt, Artificial Sequence
  Description of Artificial Sequence: Synthetic oligonucleotide
  Sense strand starting at position 1341 of SEQ ID NO: 1888272
gaaugauuguagcuuagca

SEQ ID NO: 2523463 - RNA, 19 nt, Artificial Sequence
  Description of Artificial Sequence: Synthetic oligonucleotide
  Antisense strand to SEQ ID NO: 2523462
ugcuaagcuacaaucauuc

SEQ ID NO: 2523464 - RNA, 19 nt, Artificial Sequence
  Description of Artificial Sequence: Synthetic oligonucleotide
  Sense strand starting at position 1343 of SEQ ID NO: 1888272
augauuguagcuuagcaca

SEQ ID NO: 2523465 - RNA, 19 nt, Artificial Sequence
  Description of Artificial Sequence: Synthetic oligonucleotide
  Antisense strand to SEQ ID NO: 2523464
ugugcuaagcuacaaucau

SEQ ID NO: 2523466 - RNA, 19 nt, Artificial Sequence
  Description of Artificial Sequence: Synthetic oligonucleotide
  Sense strand starting at position 1345 of SEQ ID NO: 1888272
gauuguagcuuagcacauu

SEQ ID NO: 2523467 - RNA, 19 nt, Artificial Sequence
  Description of Artificial Sequence: Synthetic oligonucleotide
  Antisense strand to SEQ ID NO: 2523466
aaugugcuaagcuacaauc

SEQ ID NO: 2523468 - RNA, 19 nt, Artificial Sequence
  Description of Artificial Sequence: Synthetic oligonucleotide
  Sense strand starting at position 1409 of SEQ ID NO: 1888272
cggacacacgucugauaau

SEQ ID NO: 2523469 - RNA, 19 nt, Artificial Sequence
  Description of Artificial Sequence: Synthetic oligonucleotide
  Antisense strand to SEQ ID NO: 2523468
auuaucagacguguguccg

SEQ ID NO: 2523470 - RNA, 19 nt, Artificial Sequence
  Description of Artificial Sequence: Synthetic oligonucleotide
  Sense strand starting at position 1410 of SEQ ID NO: 1888272
ggacacacgucugauaaua

SEQ ID NO: 2523471 - RNA, 19 nt, Artificial Sequence
  Description of Artificial Sequence: Synthetic oligonucleotide
  Antisense strand to SEQ ID NO: 2523470
uauuaucagacgugugucc

SEQ ID NO: 2523472 - RNA, 19 nt, Artificial Sequence
  Description of Artificial Sequence: Synthetic oligonucleotide
  Sense strand starting at position 1412 of SEQ ID NO: 1888272
acacacgucugauaauaag

SEQ ID NO: 2523473 - RNA, 19 nt, Artificial Sequence
  Description of Artificial Sequence: Synthetic oligonucleotide
  Antisense strand to SEQ ID NO: 2523472
cuuauuaucagacgugugu

SEQ ID NO: 2523474 - RNA, 19 nt, Artificial Sequence
  Description of Artificial Sequence: Synthetic oligonucleotide
  Sense strand starting at position 1570 of SEQ ID NO: 1888272
auagaaucaagagguaguu

SEQ ID NO: 2523475 - RNA, 19 nt, Artificial Sequence
  Description of Artificial Sequence: Synthetic oligonucleotide
  Antisense strand to SEQ ID NO: 2523474
aacuaccucuugauucuau

SEQ ID NO: 2523476 - RNA, 19 nt, Artificial Sequence
  Description of Artificial Sequence: Synthetic oligonucleotide
  Sense strand starting at position 1850 of SEQ ID NO: 1888272
cuuccucugccuggucaaa

SEQ ID NO: 2523477 - RNA, 19 nt, Artificial Sequence
  Description of Artificial Sequence: Synthetic oligonucleotide
  Antisense strand to SEQ ID NO: 2523476
uuugaccaggcagaggaag

SEQ ID NO: 2523478 - RNA, 19 nt, Artificial Sequence
  Description of Artificial Sequence: Synthetic oligonucleotide
  Sense strand starting at position 1852 of SEQ ID NO: 1888272
uccucugccuggucaaaga

SEQ ID NO: 2523479 - RNA, 19 nt, Artificial Sequence
  Description of Artificial Sequence: Synthetic oligonucleotide
  Antisense strand to SEQ ID NO: 2523478
ucuuugaccaggcagagga

SEQ ID NO: 2523480 - RNA, 19 nt, Artificial Sequence
  Description of Artificial Sequence: Synthetic oligonucleotide
  Sense strand starting at position 2300 of SEQ ID NO: 1888272
uauugccaucauuguggaa

SEQ ID NO: 2523481 - RNA, 19 nt, Artificial Sequence
  Description of Artificial Sequence: Synthetic oligonucleotide
  Antisense strand to SEQ ID NO: 2523480
uuccacaaugauggcaaua

SEQ ID NO: 2523482 - RNA, 19 nt, Artificial Sequence
  Description of Artificial Sequence: Synthetic oligonucleotide
  Sense strand starting at position 2304 of SEQ ID NO: 1888272
gccaucauuguggaagcua

SEQ ID NO: 2523483 - RNA, 19 nt, Artificial Sequence
  Description of Artificial Sequence: Synthetic oligonucleotide
  Antisense strand to SEQ ID NO: 2523482
uagcuuccacaaugauggc

SEQ ID NO: 2523484 - RNA, 19 nt, Artificial Sequence
  Description of Artificial Sequence: Synthetic oligonucleotide
  Sense strand starting at position 2556 of SEQ ID NO: 1888272
uggagaguuuaagaucaga

SEQ ID NO: 2523485 - RNA, 19 nt, Artificial Sequence
  Description of Artificial Sequence: Synthetic oligonucleotide
  Antisense strand to SEQ ID NO: 2523484
ucugaucuuaaacucucca

SEQ ID NO: 2523486 - RNA, 19 nt, Artificial Sequence
  Description of Artificial Sequence: Synthetic oligonucleotide
  Sense strand starting at position 2717 of SEQ ID NO: 1888272
gucgcugaccuggaaacuu

SEQ ID NO: 2523487 - RNA, 19 nt, Artificial Sequence
  Description of Artificial Sequence: Synthetic oligonucleotide
  Antisense strand to SEQ ID NO: 2523486
aaguuuccaggucagcgac

SEQ ID NO: 2523488 - RNA, 19 nt, Artificial Sequence
  Description of Artificial Sequence: Synthetic oligonucleotide
  Sense strand starting at position 3331 of SEQ ID NO: 1888272
cagauauguccaugccuag

SEQ ID NO: 2523489 - RNA, 19 nt, Artificial Sequence
  Description of Artificial Sequence: Synthetic oligonucleotide
  Antisense strand to SEQ ID NO: 2523488
cuaggcauggacauaucug

SEQ ID NO: 2523490 - RNA, 19 nt, Artificial Sequence
  Description of Artificial Sequence: Synthetic oligonucleotide
  Sense strand starting at position 3335 of SEQ ID NO: 1888272
uauguccaugccuaggaaa

SEQ ID NO: 2523491 - RNA, 19 nt, Artificial Sequence
  Description of Artificial Sequence: Synthetic oligonucleotide
  Antisense strand to SEQ ID NO: 2523490
uuuccuaggcauggacaua

SEQ ID NO: 2523492 - RNA, 19 nt, Artificial Sequence
  Description of Artificial Sequence: Synthetic oligonucleotide
  Sense strand starting at position 3693 of SEQ ID NO: 1888272
ccuacucugccuggaggaa

SEQ ID NO: 2523493 - RNA, 19 nt, Artificial Sequence
  Description of Artificial Sequence: Synthetic oligonucleotide
  Antisense strand to SEQ ID NO: 2523492
uuccuccaggcagaguagg

SEQ ID NO: 2523494 - RNA, 19 nt, Artificial Sequence
  Description of Artificial Sequence: Synthetic oligonucleotide
  Sense strand starting at position 3910 of SEQ ID NO: 1888272
gauggucaguccucaucaa

SEQ ID NO: 2523495 - RNA, 19 nt, Artificial Sequence
  Description of Artificial Sequence: Synthetic oligonucleotide
  Antisense strand to SEQ ID NO: 2523494
uugaugaggacugaccauc

SEQ ID NO: 2523496 - RNA, 19 nt, Artificial Sequence
  Description of Artificial Sequence: Synthetic oligonucleotide
  Sense strand starting at position 3914 of SEQ ID NO: 1888272
gucaguccucaucaagacu

SEQ ID NO: 2523497 - RNA, 19 nt, Artificial Sequence
  Description of Artificial Sequence: Synthetic oligonucleotide
  Antisense strand to SEQ ID NO: 2523496
agucuugaugaggacugac

SEQ ID NO: 2523498 - RNA, 19 nt, Artificial Sequence
  Description of Artificial Sequence: Synthetic oligonucleotide
  Sense strand starting at position 3952 of SEQ ID NO: 1888272
gaccaaaggcuccaguauu

SEQ ID NO: 2523499 - RNA, 19 nt, Artificial Sequence
  Description of Artificial Sequence: Synthetic oligonucleotide
  Antisense strand to SEQ ID NO: 2523498
aauacuggagccuuugguc

SEQ ID NO: 2523500 - RNA, 19 nt, Artificial Sequence
  Description of Artificial Sequence: Synthetic oligonucleotide
  Sense strand starting at position 195 of SEQ ID NO: 1888273
cugugagaacagugcucau

SEQ ID NO: 2523501 - RNA, 19 nt, Artificial Sequence
  Description of Artificial Sequence: Synthetic oligonucleotide
  Antisense strand to SEQ ID NO: 2523500
augagcacuguucucacag

SEQ ID NO: 2523502 - RNA, 19 nt, Artificial Sequence
  Description of Artificial Sequence: Synthetic oligonucleotide
  Sense strand starting at position 198 of SEQ ID NO: 1888273
ugagaacagugcucauuac

SEQ ID NO: 2523503 - RNA, 19 nt, Artificial Sequence
  Description of Artificial Sequence: Synthetic oligonucleotide
  Antisense strand to SEQ ID NO: 2523502
guaaugagcacuguucuca

SEQ ID NO: 2523504 - RNA, 19 nt, Artificial Sequence
  Description of Artificial Sequence: Synthetic oligonucleotide
  Sense strand starting at position 199 of SEQ ID NO: 1888273
gagaacagugcucauuaca

SEQ ID NO: 2523505 - RNA, 19 nt, Artificial Sequence
  Description of Artificial Sequence: Synthetic oligonucleotide
  Antisense strand to SEQ ID NO: 2523504
uguaaugagcacuguucuc

SEQ ID NO: 2523506 - RNA, 19 nt, Artificial Sequence
  Description of Artificial Sequence: Synthetic oligonucleotide
  Sense strand starting at position 246 of SEQ ID NO: 1888273
ggaacgcgugucguuaaca

SEQ ID NO: 2523507 - RNA, 19 nt, Artificial Sequence
  Description of Artificial Sequence: Synthetic oligonucleotide
  Antisense strand to SEQ ID NO: 2523506
uguuaacgacacgcguucc

SEQ ID NO: 2523508 - RNA, 19 nt, Artificial Sequence
  Description of Artificial Sequence: Synthetic oligonucleotide
  Sense strand starting at position 258 of SEQ ID NO: 1888273
guuaacauugcccaguguu

SEQ ID NO: 2523509 - RNA, 19 nt, Artificial Sequence
  Description of Artificial Sequence: Synthetic oligonucleotide
  Antisense strand to SEQ ID NO: 2523508
aacacugggcaauguuaac

SEQ ID NO: 2523510 - RNA, 19 nt, Artificial Sequence
  Description of Artificial Sequence: Synthetic oligonucleotide
  Sense strand starting at position 266 of SEQ ID NO: 1888273
ugcccaguguuucugggau

SEQ ID NO: 2523511 - RNA, 19 nt, Artificial Sequence
  Description of Artificial Sequence: Synthetic oligonucleotide
  Antisense strand to SEQ ID NO: 2523510
aucccagaaacacugggca

SEQ ID NO: 2523512 - RNA, 19 nt, Artificial Sequence
  Description of Artificial Sequence: Synthetic oligonucleotide
  Sense strand starting at position 272 of SEQ ID NO: 1888273
guguuucugggauaguuua

SEQ ID NO: 2523513 - RNA, 19 nt, Artificial Sequence
  Description of Artificial Sequence: Synthetic oligonucleotide
  Antisense strand to SEQ ID NO: 2523512
uaaacuaucccagaaacac

SEQ ID NO: 2523514 - RNA, 19 nt, Artificial Sequence
  Description of Artificial Sequence: Synthetic oligonucleotide
  Sense strand starting at position 280 of SEQ ID NO: 1888273
gggauaguuuaauugugug

SEQ ID NO: 2523515 - RNA, 19 nt, Artificial Sequence
  Description of Artificial Sequence: Synthetic oligonucleotide
  Antisense strand to SEQ ID NO: 2523514
cacacaauuaaacuauccc

SEQ ID NO: 2523516 - RNA, 19 nt, Artificial Sequence
  Description of Artificial Sequence: Synthetic oligonucleotide
  Sense strand starting at position 284 of SEQ ID NO: 1888273
uaguuuaauugugugggua

SEQ ID NO: 2523517 - RNA, 19 nt, Artificial Sequence
  Description of Artificial Sequence: Synthetic oligonucleotide
  Antisense strand to SEQ ID NO: 2523516
uacccacacaauuaaacua

SEQ ID NO: 2523518 - RNA, 19 nt, Artificial Sequence
  Description of Artificial Sequence: Synthetic oligonucleotide
  Sense strand starting at position 285 of SEQ ID NO: 1888273
aguuuaauuguguggguau

SEQ ID NO: 2523519 - RNA, 19 nt, Artificial Sequence
  Description of Artificial Sequence: Synthetic oligonucleotide
  Antisense strand to SEQ ID NO: 2523518
auacccacacaauuaaacu

SEQ ID NO: 2523520 - RNA, 19 nt, Artificial Sequence
  Description of Artificial Sequence: Synthetic oligonucleotide
  Sense strand starting at position 287 of SEQ ID NO: 1888273
uuuaauuguguggguauaa

SEQ ID NO: 2523521 - RNA, 19 nt, Artificial Sequence
  Description of Artificial Sequence: Synthetic oligonucleotide
  Antisense strand to SEQ ID NO: 2523520
uuauacccacacaauuaaa

SEQ ID NO: 2523522 - RNA, 19 nt, Artificial Sequence
  Description of Artificial Sequence: Synthetic oligonucleotide
  Sense strand starting at position 288 of SEQ ID NO: 1888273
uuaauuguguggguauaac

SEQ ID NO: 2523523 - RNA, 19 nt, Artificial Sequence
  Description of Artificial Sequence: Synthetic oligonucleotide
  Antisense strand to SEQ ID NO: 2523522
guuauacccacacaauuaa

SEQ ID NO: 2523524 - RNA, 19 nt, Artificial Sequence
  Description of Artificial Sequence: Synthetic oligonucleotide
  Sense strand starting at position 320 of SEQ ID NO: 1888273
cccaaaggcugucccaaau

SEQ ID NO: 2523525 - RNA, 19 nt, Artificial Sequence
  Description of Artificial Sequence: Synthetic oligonucleotide
  Antisense strand to SEQ ID NO: 2523524
auuugggacagccuuuggg

SEQ ID NO: 2523526 - RNA, 19 nt, Artificial Sequence
  Description of Artificial Sequence: Synthetic oligonucleotide
  Sense strand starting at position 464 of SEQ ID NO: 1888273
uuaagaaacugggugcuaa

SEQ ID NO: 2523527 - RNA, 19 nt, Artificial Sequence
  Description of Artificial Sequence: Synthetic oligonucleotide
  Antisense strand to SEQ ID NO: 2523526
uuagcacccaguuucuuaa

SEQ ID NO: 2523528 - RNA, 19 nt, Artificial Sequence
  Description of Artificial Sequence: Synthetic oligonucleotide
  Sense strand starting at position 465 of SEQ ID NO: 1888273
uaagaaacugggugcuaaa

SEQ ID NO: 2523529 - RNA, 19 nt, Artificial Sequence
  Description of Artificial Sequence: Synthetic oligonucleotide
  Antisense strand to SEQ ID NO: 2523528
uuuagcacccaguuucuua

SEQ ID NO: 2523530 - RNA, 19 nt, Artificial Sequence
  Description of Artificial Sequence: Synthetic oligonucleotide
  Sense strand starting at position 468 of SEQ ID NO: 1888273
gaaacugggugcuaaauga

SEQ ID NO: 2523531 - RNA, 19 nt, Artificial Sequence
  Description of Artificial Sequence: Synthetic oligonucleotide
  Antisense strand to SEQ ID NO: 2523530
ucauuuagcacccaguuuc

SEQ ID NO: 2523532 - RNA, 19 nt, Artificial Sequence
  Description of Artificial Sequence: Synthetic oligonucleotide
  Sense strand starting at position 496 of SEQ ID NO: 1888273
ggagaaugauuguagcuua

SEQ ID NO: 2523533 - RNA, 19 nt, Artificial Sequence
  Description of Artificial Sequence: Synthetic oligonucleotide
  Antisense strand to SEQ ID NO: 2523532
uaagcuacaaucauucucc

SEQ ID NO: 2523534 - RNA, 19 nt, Artificial Sequence
  Description of Artificial Sequence: Synthetic oligonucleotide
  Sense strand starting at position 499 of SEQ ID NO: 1888273
gaaugauuguagcuuagca

SEQ ID NO: 2523535 - RNA, 19 nt, Artificial Sequence
  Description of Artificial Sequence: Synthetic oligonucleotide
  Antisense strand to SEQ ID NO: 2523534
ugcuaagcuacaaucauuc

SEQ ID NO: 2523536 - RNA, 19 nt, Artificial Sequence
  Description of Artificial Sequence: Synthetic oligonucleotide
  Sense strand starting at position 501 of SEQ ID NO: 1888273
augauuguagcuuagcaca

SEQ ID NO: 2523537 - RNA, 19 nt, Artificial Sequence
  Description of Artificial Sequence: Synthetic oligonucleotide
  Antisense strand to SEQ ID NO: 2523536
ugugcuaagcuacaaucau

SEQ ID NO: 2523538 - RNA, 19 nt, Artificial Sequence
  Description of Artificial Sequence: Synthetic oligonucleotide
  Sense strand starting at position 503 of SEQ ID NO: 1888273
gauuguagcuuagcacauu

SEQ ID NO: 2523539 - RNA, 19 nt, Artificial Sequence
  Description of Artificial Sequence: Synthetic oligonucleotide
  Antisense strand to SEQ ID NO: 2523538
aaugugcuaagcuacaauc

SEQ ID NO: 2523540 - RNA, 19 nt, Artificial Sequence
  Description of Artificial Sequence: Synthetic oligonucleotide
  Sense strand starting at position 567 of SEQ ID NO: 1888273
cggacacacgucugauaau

SEQ ID NO: 2523541 - RNA, 19 nt, Artificial Sequence
  Description of Artificial Sequence: Synthetic oligonucleotide
  Antisense strand to SEQ ID NO: 2523540
auuaucagacguguguccg

SEQ ID NO: 2523542 - RNA, 19 nt, Artificial Sequence
  Description of Artificial Sequence: Synthetic oligonucleotide
  Sense strand starting at position 568 of SEQ ID NO: 1888273
ggacacacgucugauaaua

SEQ ID NO: 2523543 - RNA, 19 nt, Artificial Sequence
  Description of Artificial Sequence: Synthetic oligonucleotide
  Antisense strand to SEQ ID NO: 2523542
uauuaucagacgugugucc

SEQ ID NO: 2523544 - RNA, 19 nt, Artificial Sequence
  Description of Artificial Sequence: Synthetic oligonucleotide
  Sense strand starting at position 570 of SEQ ID NO: 1888273
acacacgucugauaauaag

SEQ ID NO: 2523545 - RNA, 19 nt, Artificial Sequence
  Description of Artificial Sequence: Synthetic oligonucleotide
  Antisense strand to SEQ ID NO: 2523544
cuuauuaucagacgugugu

SEQ ID NO: 2523546 - RNA, 19 nt, Artificial Sequence
  Description of Artificial Sequence: Synthetic oligonucleotide
  Sense strand starting at position 728 of SEQ ID NO: 1888273
auagaaucaagagguaguu

SEQ ID NO: 2523547 - RNA, 19 nt, Artificial Sequence
  Description of Artificial Sequence: Synthetic oligonucleotide
  Antisense strand to SEQ ID NO: 2523546
aacuaccucuugauucuau

SEQ ID NO: 2523548 - RNA, 19 nt, Artificial Sequence
  Description of Artificial Sequence: Synthetic oligonucleotide
  Sense strand starting at position 1008 of SEQ ID NO: 1888273
cuuccucugccuggucaaa

SEQ ID NO: 2523549 - RNA, 19 nt, Artificial Sequence
  Description of Artificial Sequence: Synthetic oligonucleotide
  Antisense strand to SEQ ID NO: 2523548
uuugaccaggcagaggaag

SEQ ID NO: 2523550 - RNA, 19 nt, Artificial Sequence
  Description of Artificial Sequence: Synthetic oligonucleotide
  Sense strand starting at position 1010 of SEQ ID NO: 1888273
uccucugccuggucaaaga

SEQ ID NO: 2523551 - RNA, 19 nt, Artificial Sequence
  Description of Artificial Sequence: Synthetic oligonucleotide
  Antisense strand to SEQ ID NO: 2523550
ucuuugaccaggcagagga

SEQ ID NO: 2523552 - RNA, 19 nt, Artificial Sequence
  Description of Artificial Sequence: Synthetic oligonucleotide
  Sense strand starting at position 1458 of SEQ ID NO: 1888273
uauugccaucauuguggaa

SEQ ID NO: 2523553 - RNA, 19 nt, Artificial Sequence
  Description of Artificial Sequence: Synthetic oligonucleotide
  Antisense strand to SEQ ID NO: 2523552
uuccacaaugauggcaaua

SEQ ID NO: 2523554 - RNA, 19 nt, Artificial Sequence
  Description of Artificial Sequence: Synthetic oligonucleotide
  Sense strand starting at position 1462 of SEQ ID NO: 1888273
gccaucauuguggaagcua

SEQ ID NO: 2523555 - RNA, 19 nt, Artificial Sequence
  Description of Artificial Sequence: Synthetic oligonucleotide
  Antisense strand to SEQ ID NO: 2523554
uagcuuccacaaugauggc

SEQ ID NO: 2523556 - RNA, 19 nt, Artificial Sequence
  Description of Artificial Sequence: Synthetic oligonucleotide
  Sense strand starting at position 1714 of SEQ ID NO: 1888273
uggagaguuuaagaucaga

SEQ ID NO: 2523557 - RNA, 19 nt, Artificial Sequence
  Description of Artificial Sequence: Synthetic oligonucleotide
  Antisense strand to SEQ ID NO: 2523556
ucugaucuuaaacucucca

SEQ ID NO: 2523558 - RNA, 19 nt, Artificial Sequence
  Description of Artificial Sequence: Synthetic oligonucleotide
  Sense strand starting at position 1875 of SEQ ID NO: 1888273
gucgcugaccuggaaacuu

SEQ ID NO: 2523559 - RNA, 19 nt, Artificial Sequence
  Description of Artificial Sequence: Synthetic oligonucleotide
  Antisense strand to SEQ ID NO: 2523558
aaguuuccaggucagcgac

SEQ ID NO: 2523560 - RNA, 19 nt, Artificial Sequence
  Description of Artificial Sequence: Synthetic oligonucleotide
  Sense strand starting at position 2489 of SEQ ID NO: 1888273
cagauauguccaugccuag

SEQ ID NO: 2523561 - RNA, 19 nt, Artificial Sequence
  Description of Artificial Sequence: Synthetic oligonucleotide
  Antisense strand to SEQ ID NO: 2523560
cuaggcauggacauaucug

SEQ ID NO: 2523562 - RNA, 19 nt, Artificial Sequence
  Description of Artificial Sequence: Synthetic oligonucleotide
  Sense strand starting at position 2493 of SEQ ID NO: 1888273
uauguccaugccuaggaaa

SEQ ID NO: 2523563 - RNA, 19 nt, Artificial Sequence
  Description of Artificial Sequence: Synthetic oligonucleotide
  Antisense strand to SEQ ID NO: 2523562
uuuccuaggcauggacaua

SEQ ID NO: 2523564 - RNA, 19 nt, Artificial Sequence
  Description of Artificial Sequence: Synthetic oligonucleotide
  Sense strand starting at position 2851 of SEQ ID NO: 1888273
ccuacucugccuggaggaa

SEQ ID NO: 2523565 - RNA, 19 nt, Artificial Sequence
  Description of Artificial Sequence: Synthetic oligonucleotide
  Antisense strand to SEQ ID NO: 2523564
uuccuccaggcagaguagg

SEQ ID NO: 2523566 - RNA, 19 nt, Artificial Sequence
  Description of Artificial Sequence: Synthetic oligonucleotide
  Sense strand starting at position 3068 of SEQ ID NO: 1888273
gauggucaguccucaucaa

SEQ ID NO: 2523567 - RNA, 19 nt, Artificial Sequence
  Description of Artificial Sequence: Synthetic oligonucleotide
  Antisense strand to SEQ ID NO: 2523566
uugaugaggacugaccauc

SEQ ID NO: 2523568 - RNA, 19 nt, Artificial Sequence
  Description of Artificial Sequence: Synthetic oligonucleotide
  Sense strand starting at position 3072 of SEQ ID NO: 1888273
gucaguccucaucaagacu

SEQ ID NO: 2523569 - RNA, 19 nt, Artificial Sequence
  Description of Artificial Sequence: Synthetic oligonucleotide
  Antisense strand to SEQ ID NO: 2523568
agucuugaugaggacugac

SEQ ID NO: 2523570 - RNA, 19 nt, Artificial Sequence
  Description of Artificial Sequence: Synthetic oligonucleotide
  Sense strand starting at position 3110 of SEQ ID NO: 1888273
gaccaaaggcuccaguauu

SEQ ID NO: 2523571 - RNA, 19 nt, Artificial Sequence
  Description of Artificial Sequence: Synthetic oligonucleotide
  Antisense strand to SEQ ID NO: 2523570
aauacuggagccuuugguc

SEQ ID NO: 2523572 - RNA, 19 nt, Artificial Sequence
  Description of Artificial Sequence: Synthetic oligonucleotide
  Sense strand starting at position 3495 of SEQ ID NO: 1888273
acaggaauauaacagauga

SEQ ID NO: 2523573 - RNA, 19 nt, Artificial Sequence
  Description of Artificial Sequence: Synthetic oligonucleotide
  Antisense strand to SEQ ID NO: 2523572
ucaucuguuauauuccugu

SEQ ID NO: 2523574 - RNA, 19 nt, Artificial Sequence
  Description of Artificial Sequence: Synthetic oligonucleotide
  Sense strand starting at position 3870 of SEQ ID NO: 1888273
gcaagucaucacugcaaag

SEQ ID NO: 2523575 - RNA, 19 nt, Artificial Sequence
  Description of Artificial Sequence: Synthetic oligonucleotide
  Antisense strand to SEQ ID NO: 2523574
cuuugcagugaugacuugc

SEQ ID NO: 2523576 - RNA, 19 nt, Artificial Sequence
  Description of Artificial Sequence: Synthetic oligonucleotide
  Sense strand starting at position 3956 of SEQ ID NO: 1888273
guaacacacccucgaguau

SEQ ID NO: 2523577 - RNA, 19 nt, Artificial Sequence
  Description of Artificial Sequence: Synthetic oligonucleotide
  Antisense strand to SEQ ID NO: 2523576
auacucgaggguguguuac

SEQ ID NO: 2523578 - RNA, 19 nt, Artificial Sequence
  Description of Artificial Sequence: Synthetic oligonucleotide
  Sense strand starting at position 3967 of SEQ ID NO: 1888273
ucgaguauuucguagaauu

SEQ ID NO: 2523579 - RNA, 19 nt, Artificial Sequence
  Description of Artificial Sequence: Synthetic oligonucleotide
  Antisense strand to SEQ ID NO: 2523578
aauucuacgaaauacucga

SEQ ID NO: 2523580 - RNA, 19 nt, Artificial Sequence
  Description of Artificial Sequence: Synthetic oligonucleotide
  Sense strand starting at position 113 of SEQ ID NO: 1888274
acaauuagaugccuuguaa

SEQ ID NO: 2523581 - RNA, 19 nt, Artificial Sequence
  Description of Artificial Sequence: Synthetic oligonucleotide
  Antisense strand to SEQ ID NO: 2523580
uuacaaggcaucuaauugu

SEQ ID NO: 2523582 - RNA, 19 nt, Artificial Sequence
  Description of Artificial Sequence: Synthetic oligonucleotide
  Sense strand starting at position 141 of SEQ ID NO: 1888274
cgcauaaugucuuugaaag

SEQ ID NO: 2523583 - RNA, 19 nt, Artificial Sequence
  Description of Artificial Sequence: Synthetic oligonucleotide
  Antisense strand to SEQ ID NO: 2523582
cuuucaaagacauuaugcg

SEQ ID NO: 2523584 - RNA, 19 nt, Artificial Sequence
  Description of Artificial Sequence: Synthetic oligonucleotide
  Sense strand starting at position 142 of SEQ ID NO: 1888274
gcauaaugucuuugaaagu

SEQ ID NO: 2523585 - RNA, 19 nt, Artificial Sequence
  Description of Artificial Sequence: Synthetic oligonucleotide
  Antisense strand to SEQ ID NO: 2523584
acuuucaaagacauuaugc

SEQ ID NO: 2523586 - RNA, 19 nt, Artificial Sequence
  Description of Artificial Sequence: Synthetic oligonucleotide
  Sense strand starting at position 149 of SEQ ID NO: 1888274
gucuuugaaaguuaguaca

SEQ ID NO: 2523587 - RNA, 19 nt, Artificial Sequence
  Description of Artificial Sequence: Synthetic oligonucleotide
  Antisense strand to SEQ ID NO: 2523586
uguacuaacuuucaaagac

SEQ ID NO: 2523588 - RNA, 19 nt, Artificial Sequence
  Description of Artificial Sequence: Synthetic oligonucleotide
  Sense strand starting at position 151 of SEQ ID NO: 1888274
cuuugaaaguuaguacaaa

SEQ ID NO: 2523589 - RNA, 19 nt, Artificial Sequence
  Description of Artificial Sequence: Synthetic oligonucleotide
  Antisense strand to SEQ ID NO: 2523588
uuuguacuaacuuucaaag

SEQ ID NO: 2523590 - RNA, 19 nt, Artificial Sequence
  Description of Artificial Sequence: Synthetic oligonucleotide
  Sense strand starting at position 190 of SEQ ID NO: 1888274
ggaguaggacuuugcuauu

SEQ ID NO: 2523591 - RNA, 19 nt, Artificial Sequence
  Description of Artificial Sequence: Synthetic oligonucleotide
  Antisense strand to SEQ ID NO: 2523590
aauagcaaaguccuacucc

SEQ ID NO: 2523592 - RNA, 19 nt, Artificial Sequence
  Description of Artificial Sequence: Synthetic oligonucleotide
  Sense strand starting at position 212 of SEQ ID NO: 1888274
uugcuaaaccuucgacaca

SEQ ID NO: 2523593 - RNA, 19 nt, Artificial Sequence
  Description of Artificial Sequence: Synthetic oligonucleotide
  Antisense strand to SEQ ID NO: 2523592
ugugucgaagguuuagcaa

SEQ ID NO: 2523594 - RNA, 19 nt, Artificial Sequence
  Description of Artificial Sequence: Synthetic oligonucleotide
  Sense strand starting at position 309 of SEQ ID NO: 1888274
gagagugacugcuccuuua

SEQ ID NO: 2523595 - RNA, 19 nt, Artificial Sequence
  Description of Artificial Sequence: Synthetic oligonucleotide
  Antisense strand to SEQ ID NO: 2523594
uaaaggagcagucacucuc

SEQ ID NO: 2523596 - RNA, 19 nt, Artificial Sequence
  Description of Artificial Sequence: Synthetic oligonucleotide
  Sense strand starting at position 312 of SEQ ID NO: 1888274
agugacugcuccuuuauuc

SEQ ID NO: 2523597 - RNA, 19 nt, Artificial Sequence
  Description of Artificial Sequence: Synthetic oligonucleotide
  Antisense strand to SEQ ID NO: 2523596
gaauaaaggagcagucacu

SEQ ID NO: 2523598 - RNA, 19 nt, Artificial Sequence
  Description of Artificial Sequence: Synthetic oligonucleotide
  Sense strand starting at position 328 of SEQ ID NO: 1888274
uucgauuuaccucgcuaag

SEQ ID NO: 2523599 - RNA, 19 nt, Artificial Sequence
  Description of Artificial Sequence: Synthetic oligonucleotide
  Antisense strand to SEQ ID NO: 2523598
cuuagcgagguaaaucgaa

SEQ ID NO: 2523600 - RNA, 19 nt, Artificial Sequence
  Description of Artificial Sequence: Synthetic oligonucleotide
  Sense strand starting at position 330 of SEQ ID NO: 1888274
cgauuuaccucgcuaaguu

SEQ ID NO: 2523601 - RNA, 19 nt, Artificial Sequence
  Description of Artificial Sequence: Synthetic oligonucleotide
  Antisense strand to SEQ ID NO: 2523600
aacuuagcgagguaaaucg

SEQ ID NO: 2523602 - RNA, 19 nt, Artificial Sequence
  Description of Artificial Sequence: Synthetic oligonucleotide
  Sense strand starting at position 861 of SEQ ID NO: 1888274
uuagaucuacuuuguggua

SEQ ID NO: 2523603 - RNA, 19 nt, Artificial Sequence
  Description of Artificial Sequence: Synthetic oligonucleotide
  Antisense strand to SEQ ID NO: 2523602
uaccacaaaguagaucuaa

SEQ ID NO: 2523604 - RNA, 19 nt, Artificial Sequence
  Description of Artificial Sequence: Synthetic oligonucleotide
  Sense strand starting at position 1028 of SEQ ID NO: 1888274
ugcacugauagguaaguaa

SEQ ID NO: 2523605 - RNA, 19 nt, Artificial Sequence
  Description of Artificial Sequence: Synthetic oligonucleotide
  Antisense strand to SEQ ID NO: 2523604
uuacuuaccuaucagugca

SEQ ID NO: 2523606 - RNA, 19 nt, Artificial Sequence
  Description of Artificial Sequence: Synthetic oligonucleotide
  Sense strand starting at position 1073 of SEQ ID NO: 1888274
cuuacuuccucugugggaa

SEQ ID NO: 2523607 - RNA, 19 nt, Artificial Sequence
  Description of Artificial Sequence: Synthetic oligonucleotide
  Antisense strand to SEQ ID NO: 2523606
uucccacagaggaaguaag

SEQ ID NO: 2523608 - RNA, 19 nt, Artificial Sequence
  Description of Artificial Sequence: Synthetic oligonucleotide
  Sense strand starting at position 1076 of SEQ ID NO: 1888274
acuuccucugugggaagaa

SEQ ID NO: 2523609 - RNA, 19 nt, Artificial Sequence
  Description of Artificial Sequence: Synthetic oligonucleotide
  Antisense strand to SEQ ID NO: 2523608
uucuucccacagaggaagu

SEQ ID NO: 2523610 - RNA, 19 nt, Artificial Sequence
  Description of Artificial Sequence: Synthetic oligonucleotide
  Sense strand starting at position 1650 of SEQ ID NO: 1888274
ccgcuucuuuccuuggaga

SEQ ID NO: 2523611 - RNA, 19 nt, Artificial Sequence
  Description of Artificial Sequence: Synthetic oligonucleotide
  Antisense strand to SEQ ID NO: 2523610
ucuccaaggaaagaagcgg

SEQ ID NO: 2523612 - RNA, 19 nt, Artificial Sequence
  Description of Artificial Sequence: Synthetic oligonucleotide
  Sense strand starting at position 1652 of SEQ ID NO: 1888274
gcuucuuuccuuggagagu

SEQ ID NO: 2523613 - RNA, 19 nt, Artificial Sequence
  Description of Artificial Sequence: Synthetic oligonucleotide
  Antisense strand to SEQ ID NO: 2523612
acucuccaaggaaagaagc

SEQ ID NO: 2523614 - RNA, 19 nt, Artificial Sequence
  Description of Artificial Sequence: Synthetic oligonucleotide
  Sense strand starting at position 2294 of SEQ ID NO: 1888274
auugguucucgagguuauc

SEQ ID NO: 2523615 - RNA, 19 nt, Artificial Sequence
  Description of Artificial Sequence: Synthetic oligonucleotide
  Antisense strand to SEQ ID NO: 2523614
gauaaccucgagaaccaau

SEQ ID NO: 2523616 - RNA, 19 nt, Artificial Sequence
  Description of Artificial Sequence: Synthetic oligonucleotide
  Sense strand starting at position 2297 of SEQ ID NO: 1888274
gguucucgagguuaucaua

SEQ ID NO: 2523617 - RNA, 19 nt, Artificial Sequence
  Description of Artificial Sequence: Synthetic oligonucleotide
  Antisense strand to SEQ ID NO: 2523616
uaugauaaccucgagaacc

SEQ ID NO: 2523618 - RNA, 19 nt, Artificial Sequence
  Description of Artificial Sequence: Synthetic oligonucleotide
  Sense strand starting at position 2422 of SEQ ID NO: 1888274
gcuugucuuguuucgcaga

SEQ ID NO: 2523619 - RNA, 19 nt, Artificial Sequence
  Description of Artificial Sequence: Synthetic oligonucleotide
  Antisense strand to SEQ ID NO: 2523618
ucugcgaaacaagacaagc

SEQ ID NO: 2523620 - RNA, 19 nt, Artificial Sequence
  Description of Artificial Sequence: Synthetic oligonucleotide
  Sense strand starting at position 2427 of SEQ ID NO: 1888274
ucuuguuucgcagaaucug

SEQ ID NO: 2523621 - RNA, 19 nt, Artificial Sequence
  Description of Artificial Sequence: Synthetic oligonucleotide
  Antisense strand to SEQ ID NO: 2523620
cagauucugcgaaacaaga

SEQ ID NO: 2523622 - RNA, 19 nt, Artificial Sequence
  Description of Artificial Sequence: Synthetic oligonucleotide
  Sense strand starting at position 2597 of SEQ ID NO: 1888274
gcuugacucacuuguggau

SEQ ID NO: 2523623 - RNA, 19 nt, Artificial Sequence
  Description of Artificial Sequence: Synthetic oligonucleotide
  Antisense strand to SEQ ID NO: 2523622
auccacaagugagucaagc

SEQ ID NO: 2523624 - RNA, 19 nt, Artificial Sequence
  Description of Artificial Sequence: Synthetic oligonucleotide
  Sense strand starting at position 2723 of SEQ ID NO: 1888274
uggaaaguccuuuguccca

SEQ ID NO: 2523625 - RNA, 19 nt, Artificial Sequence
  Description of Artificial Sequence: Synthetic oligonucleotide
  Antisense strand to SEQ ID NO: 2523624
ugggacaaaggacuuucca

SEQ ID NO: 2523626 - RNA, 19 nt, Artificial Sequence
  Description of Artificial Sequence: Synthetic oligonucleotide
  Sense strand starting at position 2784 of SEQ ID NO: 1888274
ugaguuuaucaauggagau

SEQ ID NO: 2523627 - RNA, 19 nt, Artificial Sequence
  Description of Artificial Sequence: Synthetic oligonucleotide
  Antisense strand to SEQ ID NO: 2523626
aucuccauugauaaacuca

SEQ ID NO: 2523628 - RNA, 19 nt, Artificial Sequence
  Description of Artificial Sequence: Synthetic oligonucleotide
  Sense strand starting at position 2841 of SEQ ID NO: 1888274
ggaguaaguuuaaguggag

SEQ ID NO: 2523629 - RNA, 19 nt, Artificial Sequence
  Description of Artificial Sequence: Synthetic oligonucleotide
  Antisense strand to SEQ ID NO: 2523628
cuccacuuaaacuuacucc

SEQ ID NO: 2523630 - RNA, 19 nt, Artificial Sequence
  Description of Artificial Sequence: Synthetic oligonucleotide
  Sense strand starting at position 2842 of SEQ ID NO: 1888274
gaguaaguuuaaguggaga

SEQ ID NO: 2523631 - RNA, 19 nt, Artificial Sequence
  Description of Artificial Sequence: Synthetic oligonucleotide
  Antisense strand to SEQ ID NO: 2523630
ucuccacuuaaacuuacuc

SEQ ID NO: 2523632 - RNA, 19 nt, Artificial Sequence
  Description of Artificial Sequence: Synthetic oligonucleotide
  Sense strand starting at position 3004 of SEQ ID NO: 1888274
ggauaucacugagauaaca

SEQ ID NO: 2523633 - RNA, 19 nt, Artificial Sequence
  Description of Artificial Sequence: Synthetic oligonucleotide
  Antisense strand to SEQ ID NO: 2523632
uguuaucucagugauaucc

SEQ ID NO: 2523634 - RNA, 19 nt, Artificial Sequence
  Description of Artificial Sequence: Synthetic oligonucleotide
  Sense strand starting at position 3180 of SEQ ID NO: 1888274
cgugcuuaaaguuagauaa

SEQ ID NO: 2523635 - RNA, 19 nt, Artificial Sequence
  Description of Artificial Sequence: Synthetic oligonucleotide
  Antisense strand to SEQ ID NO: 2523634
uuaucuaacuuuaagcacg

SEQ ID NO: 2523636 - RNA, 19 nt, Artificial Sequence
  Description of Artificial Sequence: Synthetic oligonucleotide
  Sense strand starting at position 3571 of SEQ ID NO: 1888274
acgggaaaguucuccaagu

SEQ ID NO: 2523637 - RNA, 19 nt, Artificial Sequence
  Description of Artificial Sequence: Synthetic oligonucleotide
  Antisense strand to SEQ ID NO: 2523636
acuuggagaacuuucccgu

SEQ ID NO: 2523638 - RNA, 19 nt, Artificial Sequence
  Description of Artificial Sequence: Synthetic oligonucleotide
  Sense strand starting at position 3572 of SEQ ID NO: 1888274
cgggaaaguucuccaaguc

SEQ ID NO: 2523639 - RNA, 19 nt, Artificial Sequence
  Description of Artificial Sequence: Synthetic oligonucleotide
  Antisense strand to SEQ ID NO: 2523638
gacuuggagaacuuucccg

SEQ ID NO: 2523640 - RNA, 19 nt, Artificial Sequence
  Description of Artificial Sequence: Synthetic oligonucleotide
  Sense strand starting at position 3703 of SEQ ID NO: 1888274
ugaagauguuaccuuguau

SEQ ID NO: 2523641 - RNA, 19 nt, Artificial Sequence
  Description of Artificial Sequence: Synthetic oligonucleotide
  Antisense strand to SEQ ID NO: 2523640
auacaagguaacaucuuca

SEQ ID NO: 2523642 - RNA, 19 nt, Artificial Sequence
  Description of Artificial Sequence: Synthetic oligonucleotide
  Sense strand starting at position 3709 of SEQ ID NO: 1888274
uguuaccuuguaugucaaa

SEQ ID NO: 2523643 - RNA, 19 nt, Artificial Sequence
  Description of Artificial Sequence: Synthetic oligonucleotide
  Antisense strand to SEQ ID NO: 2523642
uuugacauacaagguaaca

SEQ ID NO: 2523644 - RNA, 19 nt, Artificial Sequence
  Description of Artificial Sequence: Synthetic oligonucleotide
  Sense strand starting at position 3744 of SEQ ID NO: 1888274
ugauuaaguugagcaucuu

SEQ ID NO: 2523645 - RNA, 19 nt, Artificial Sequence
  Description of Artificial Sequence: Synthetic oligonucleotide
  Antisense strand to SEQ ID NO: 2523644
aagaugcucaacuuaauca

SEQ ID NO: 2523646 - RNA, 19 nt, Artificial Sequence
  Description of Artificial Sequence: Synthetic oligonucleotide
  Sense strand starting at position 3803 of SEQ ID NO: 1888274
ugugaucauaagggugauu

SEQ ID NO: 2523647 - RNA, 19 nt, Artificial Sequence
  Description of Artificial Sequence: Synthetic oligonucleotide
  Antisense strand to SEQ ID NO: 2523646
aaucacccuuaugaucaca

SEQ ID NO: 2523648 - RNA, 19 nt, Artificial Sequence
  Description of Artificial Sequence: Synthetic oligonucleotide
  Sense strand starting at position 3805 of SEQ ID NO: 1888274
ugaucauaagggugauuac

SEQ ID NO: 2523649 - RNA, 19 nt, Artificial Sequence
  Description of Artificial Sequence: Synthetic oligonucleotide
  Antisense strand to SEQ ID NO: 2523648
guaaucacccuuaugauca

SEQ ID NO: 2523650 - RNA, 19 nt, Artificial Sequence
  Description of Artificial Sequence: Synthetic oligonucleotide
  Sense strand starting at position 3886 of SEQ ID NO: 1888274
gucagagugauuggcugua

SEQ ID NO: 2523651 - RNA, 19 nt, Artificial Sequence
  Description of Artificial Sequence: Synthetic oligonucleotide
  Antisense strand to SEQ ID NO: 2523650
uacagccaaucacucugac

SEQ ID NO: 2523652 - RNA, 19 nt, Artificial Sequence
  Description of Artificial Sequence: Synthetic oligonucleotide
  Sense strand starting at position 3888 of SEQ ID NO: 1888274
cagagugauuggcuguaag

SEQ ID NO: 2523653 - RNA, 19 nt, Artificial Sequence
  Description of Artificial Sequence: Synthetic oligonucleotide
  Antisense strand to SEQ ID NO: 2523652
cuuacagccaaucacucug

SEQ ID NO: 2523654 - RNA, 19 nt, Artificial Sequence
  Description of Artificial Sequence: Synthetic oligonucleotide
  Sense strand starting at position 3891 of SEQ ID NO: 1888274
agugauuggcuguaagaaa

SEQ ID NO: 2523655 - RNA, 19 nt, Artificial Sequence
  Description of Artificial Sequence: Synthetic oligonucleotide
  Antisense strand to SEQ ID NO: 2523654
uuucuuacagccaaucacu

SEQ ID NO: 2523656 - RNA, 19 nt, Artificial Sequence
  Description of Artificial Sequence: Synthetic oligonucleotide
  Sense strand starting at position 3918 of SEQ ID NO: 1888274
cgaaguuaauggcuuugaa

SEQ ID NO: 2523657 - RNA, 19 nt, Artificial Sequence
  Description of Artificial Sequence: Synthetic oligonucleotide
  Antisense strand to SEQ ID NO: 2523656
uucaaagccauuaacuucg

SEQ ID NO: 2523658 - RNA, 19 nt, Artificial Sequence
  Description of Artificial Sequence: Synthetic oligonucleotide
  Sense strand starting at position 3921 of SEQ ID NO: 1888274
aguuaauggcuuugaagau

SEQ ID NO: 2523659 - RNA, 19 nt, Artificial Sequence
  Description of Artificial Sequence: Synthetic oligonucleotide
  Antisense strand to SEQ ID NO: 2523658
aucuucaaagccauuaacu

SEQ ID NO: 2523660 - RNA, 19 nt, Artificial Sequence
  Description of Artificial Sequence: Synthetic oligonucleotide
  Sense strand starting at position 31 of SEQ ID NO: 1888275
cugaguuucugcccaggga

SEQ ID NO: 2523661 - RNA, 19 nt, Artificial Sequence
  Description of Artificial Sequence: Synthetic oligonucleotide
  Antisense strand to SEQ ID NO: 2523660
ucccugggcagaaacucag

SEQ ID NO: 2523662 - RNA, 19 nt, Artificial Sequence
  Description of Artificial Sequence: Synthetic oligonucleotide
  Sense strand starting at position 72 of SEQ ID NO: 1888275
cuuccuuucugaucugaug

SEQ ID NO: 2523663 - RNA, 19 nt, Artificial Sequence
  Description of Artificial Sequence: Synthetic oligonucleotide
  Antisense strand to SEQ ID NO: 2523662
caucagaucagaaaggaag

SEQ ID NO: 2523664 - RNA, 19 nt, Artificial Sequence
  Description of Artificial Sequence: Synthetic oligonucleotide
  Sense strand starting at position 160 of SEQ ID NO: 1888275
agugcaaauaaugggauaa

SEQ ID NO: 2523665 - RNA, 19 nt, Artificial Sequence
  Description of Artificial Sequence: Synthetic oligonucleotide
  Antisense strand to SEQ ID NO: 2523664
uuaucccauuauuugcacu

SEQ ID NO: 2523666 - RNA, 19 nt, Artificial Sequence
  Description of Artificial Sequence: Synthetic oligonucleotide
  Sense strand starting at position 161 of SEQ ID NO: 1888275
gugcaaauaaugggauaaa

SEQ ID NO: 2523667 - RNA, 19 nt, Artificial Sequence
  Description of Artificial Sequence: Synthetic oligonucleotide
  Antisense strand to SEQ ID NO: 2523666
uuuaucccauuauuugcac

SEQ ID NO: 2523668 - RNA, 19 nt, Artificial Sequence
  Description of Artificial Sequence: Synthetic oligonucleotide
  Sense strand starting at position 297 of SEQ ID NO: 1888275
ggccaaauguucccagauc

SEQ ID NO: 2523669 - RNA, 19 nt, Artificial Sequence
  Description of Artificial Sequence: Synthetic oligonucleotide
  Antisense strand to SEQ ID NO: 2523668
gaucugggaacauuuggcc

SEQ ID NO: 2523670 - RNA, 19 nt, Artificial Sequence
  Description of Artificial Sequence: Synthetic oligonucleotide
  Sense strand starting at position 525 of SEQ ID NO: 1888275
uagaacagugucugggaua

SEQ ID NO: 2523671 - RNA, 19 nt, Artificial Sequence
  Description of Artificial Sequence: Synthetic oligonucleotide
  Antisense strand to SEQ ID NO: 2523670
uaucccagacacuguucua

SEQ ID NO: 2523672 - RNA, 19 nt, Artificial Sequence
  Description of Artificial Sequence: Synthetic oligonucleotide
  Sense strand starting at position 553 of SEQ ID NO: 1888275
ccacauaaguguuuacuaa

SEQ ID NO: 2523673 - RNA, 19 nt, Artificial Sequence
  Description of Artificial Sequence: Synthetic oligonucleotide
  Antisense strand to SEQ ID NO: 2523672
uuaguaaacacuuaugugg

SEQ ID NO: 2523674 - RNA, 19 nt, Artificial Sequence
  Description of Artificial Sequence: Synthetic oligonucleotide
  Sense strand starting at position 629 of SEQ ID NO: 1888275
uucagaguuggccaagguu

SEQ ID NO: 2523675 - RNA, 19 nt, Artificial Sequence
  Description of Artificial Sequence: Synthetic oligonucleotide
  Antisense strand to SEQ ID NO: 2523674
aaccuuggccaacucugaa

SEQ ID NO: 2523676 - RNA, 19 nt, Artificial Sequence
  Description of Artificial Sequence: Synthetic oligonucleotide
  Sense strand starting at position 686 of SEQ ID NO: 1888275
cagcaaagguagucucaaa

SEQ ID NO: 2523677 - RNA, 19 nt, Artificial Sequence
  Description of Artificial Sequence: Synthetic oligonucleotide
  Antisense strand to SEQ ID NO: 2523676
uuugagacuaccuuugcug

SEQ ID NO: 2523678 - RNA, 19 nt, Artificial Sequence
  Description of Artificial Sequence: Synthetic oligonucleotide
  Sense strand starting at position 709 of SEQ ID NO: 1888275
gcgauagauuuaggacaac

SEQ ID NO: 2523679 - RNA, 19 nt, Artificial Sequence
  Description of Artificial Sequence: Synthetic oligonucleotide
  Antisense strand to SEQ ID NO: 2523678
guuguccuaaaucuaucgc

SEQ ID NO: 2523680 - RNA, 19 nt, Artificial Sequence
  Description of Artificial Sequence: Synthetic oligonucleotide
  Sense strand starting at position 743 of SEQ ID NO: 1888275
gcacgucaucaaggaauaa

SEQ ID NO: 2523681 - RNA, 19 nt, Artificial Sequence
  Description of Artificial Sequence: Synthetic oligonucleotide
  Antisense strand to SEQ ID NO: 2523680
uuauuccuugaugacgugc

SEQ ID NO: 2523682 - RNA, 19 nt, Artificial Sequence
  Description of Artificial Sequence: Synthetic oligonucleotide
  Sense strand starting at position 892 of SEQ ID NO: 1888275
augucauuccaacagaugu

SEQ ID NO: 2523683 - RNA, 19 nt, Artificial Sequence
  Description of Artificial Sequence: Synthetic oligonucleotide
  Antisense strand to SEQ ID NO: 2523682
acaucuguuggaaugacau

SEQ ID NO: 2523684 - RNA, 19 nt, Artificial Sequence
  Description of Artificial Sequence: Synthetic oligonucleotide
  Sense strand starting at position 1005 of SEQ ID NO: 1888275
aacuuagggcuuuggauaa

SEQ ID NO: 2523685 - RNA, 19 nt, Artificial Sequence
  Description of Artificial Sequence: Synthetic oligonucleotide
  Antisense strand to SEQ ID NO: 2523684
uuauccaaagcccuaaguu

SEQ ID NO: 2523686 - RNA, 19 nt, Artificial Sequence
  Description of Artificial Sequence: Synthetic oligonucleotide
  Sense strand starting at position 1101 of SEQ ID NO: 1888275
gagcaaauccgucaaguuu

SEQ ID NO: 2523687 - RNA, 19 nt, Artificial Sequence
  Description of Artificial Sequence: Synthetic oligonucleotide
  Antisense strand to SEQ ID NO: 2523686
aaacuugacggauuugcuc

SEQ ID NO: 2523688 - RNA, 19 nt, Artificial Sequence
  Description of Artificial Sequence: Synthetic oligonucleotide
  Sense strand starting at position 2997 of SEQ ID NO: 1888275
gggcaacacuuauucucua

SEQ ID NO: 2523689 - RNA, 19 nt, Artificial Sequence
  Description of Artificial Sequence: Synthetic oligonucleotide
  Antisense strand to SEQ ID NO: 2523688
uagagaauaaguguugccc

SEQ ID NO: 2523690 - RNA, 19 nt, Artificial Sequence
  Description of Artificial Sequence: Synthetic oligonucleotide
  Sense strand starting at position 3192 of SEQ ID NO: 1888275
uagugacauuguuugaaac

SEQ ID NO: 2523691 - RNA, 19 nt, Artificial Sequence
  Description of Artificial Sequence: Synthetic oligonucleotide
  Antisense strand to SEQ ID NO: 2523690
guuucaaacaaugucacua

SEQ ID NO: 2523692 - RNA, 19 nt, Artificial Sequence
  Description of Artificial Sequence: Synthetic oligonucleotide
  Sense strand starting at position 3193 of SEQ ID NO: 1888275
agugacauuguuugaaacu

SEQ ID NO: 2523693 - RNA, 19 nt, Artificial Sequence
  Description of Artificial Sequence: Synthetic oligonucleotide
  Antisense strand to SEQ ID NO: 2523692
aguuucaaacaaugucacu

SEQ ID NO: 2523694 - RNA, 19 nt, Artificial Sequence
  Description of Artificial Sequence: Synthetic oligonucleotide
  Sense strand starting at position 3221 of SEQ ID NO: 1888275
accaucaagacgugucagu

SEQ ID NO: 2523695 - RNA, 19 nt, Artificial Sequence
  Description of Artificial Sequence: Synthetic oligonucleotide
  Antisense strand to SEQ ID NO: 2523694
acugacacgucuugauggu

SEQ ID NO: 2523696 - RNA, 19 nt, Artificial Sequence
  Description of Artificial Sequence: Synthetic oligonucleotide
  Sense strand starting at position 3226 of SEQ ID NO: 1888275
caagacgugucaguuuaau

SEQ ID NO: 2523697 - RNA, 19 nt, Artificial Sequence
  Description of Artificial Sequence: Synthetic oligonucleotide
  Antisense strand to SEQ ID NO: 2523696
auuaaacugacacgucuug

SEQ ID NO: 2523698 - RNA, 19 nt, Artificial Sequence
  Description of Artificial Sequence: Synthetic oligonucleotide
  Sense strand starting at position 3232 of SEQ ID NO: 1888275
gugucaguuuaauugguca

SEQ ID NO: 2523699 - RNA, 19 nt, Artificial Sequence
  Description of Artificial Sequence: Synthetic oligonucleotide
  Antisense strand to SEQ ID NO: 2523698
ugaccaauuaaacugacac

SEQ ID NO: 2523700 - RNA, 19 nt, Artificial Sequence
  Description of Artificial Sequence: Synthetic oligonucleotide
  Sense strand starting at position 3234 of SEQ ID NO: 1888275
gucaguuuaauuggucagu

SEQ ID NO: 2523701 - RNA, 19 nt, Artificial Sequence
  Description of Artificial Sequence: Synthetic oligonucleotide
  Antisense strand to SEQ ID NO: 2523700
acugaccaauuaaacugac

SEQ ID NO: 2523702 - RNA, 19 nt, Artificial Sequence
  Description of Artificial Sequence: Synthetic oligonucleotide
  Sense strand starting at position 3236 of SEQ ID NO: 1888275
caguuuaauuggucagucu

SEQ ID NO: 2523703 - RNA, 19 nt, Artificial Sequence
  Description of Artificial Sequence: Synthetic oligonucleotide
  Antisense strand to SEQ ID NO: 2523702
agacugaccaauuaaacug

SEQ ID NO: 2523704 - RNA, 19 nt, Artificial Sequence
  Description of Artificial Sequence: Synthetic oligonucleotide
  Sense strand starting at position 3243 of SEQ ID NO: 1888275
auuggucagucugugagau

SEQ ID NO: 2523705 - RNA, 19 nt, Artificial Sequence
  Description of Artificial Sequence: Synthetic oligonucleotide
  Antisense strand to SEQ ID NO: 2523704
aucucacagacugaccaau

SEQ ID NO: 2523706 - RNA, 19 nt, Artificial Sequence
  Description of Artificial Sequence: Synthetic oligonucleotide
  Sense strand starting at position 3244 of SEQ ID NO: 1888275
uuggucagucugugagauc

SEQ ID NO: 2523707 - RNA, 19 nt, Artificial Sequence
  Description of Artificial Sequence: Synthetic oligonucleotide
  Antisense strand to SEQ ID NO: 2523706
gaucucacagacugaccaa

SEQ ID NO: 2523708 - RNA, 19 nt, Artificial Sequence
  Description of Artificial Sequence: Synthetic oligonucleotide
  Sense strand starting at position 3253 of SEQ ID NO: 1888275
cugugagaucguuauucuu

SEQ ID NO: 2523709 - RNA, 19 nt, Artificial Sequence
  Description of Artificial Sequence: Synthetic oligonucleotide
  Antisense strand to SEQ ID NO: 2523708
aagaauaacgaucucacag

SEQ ID NO: 2523710 - RNA, 19 nt, Artificial Sequence
  Description of Artificial Sequence: Synthetic oligonucleotide
  Sense strand starting at position 3316 of SEQ ID NO: 1888275
acacacgguucuguaaauu

SEQ ID NO: 2523711 - RNA, 19 nt, Artificial Sequence
  Description of Artificial Sequence: Synthetic oligonucleotide
  Antisense strand to SEQ ID NO: 2523710
aauuuacagaaccgugugu

SEQ ID NO: 2523712 - RNA, 19 nt, Artificial Sequence
  Description of Artificial Sequence: Synthetic oligonucleotide
  Sense strand starting at position 3534 of SEQ ID NO: 1888275
gugagucaguaccugagaa

SEQ ID NO: 2523713 - RNA, 19 nt, Artificial Sequence
  Description of Artificial Sequence: Synthetic oligonucleotide
  Antisense strand to SEQ ID NO: 2523712
uucucagguacugacucac

SEQ ID NO: 2523714 - RNA, 19 nt, Artificial Sequence
  Description of Artificial Sequence: Synthetic oligonucleotide
  Sense strand starting at position 3535 of SEQ ID NO: 1888275
ugagucaguaccugagaaa

SEQ ID NO: 2523715 - RNA, 19 nt, Artificial Sequence
  Description of Artificial Sequence: Synthetic oligonucleotide
  Antisense strand to SEQ ID NO: 2523714
uuucucagguacugacuca

SEQ ID NO: 2523716 - RNA, 19 nt, Artificial Sequence
  Description of Artificial Sequence: Synthetic oligonucleotide
  Sense strand starting at position 3651 of SEQ ID NO: 1888275
gugguaagaccuugcagag

SEQ ID NO: 2523717 - RNA, 19 nt, Artificial Sequence
  Description of Artificial Sequence: Synthetic oligonucleotide
  Antisense strand to SEQ ID NO: 2523716
cucugcaaggucuuaccac

SEQ ID NO: 2523718 - RNA, 19 nt, Artificial Sequence
  Description of Artificial Sequence: Synthetic oligonucleotide
  Sense strand starting at position 3666 of SEQ ID NO: 1888275
agaggugcucuuggcauuu

SEQ ID NO: 2523719 - RNA, 19 nt, Artificial Sequence
  Description of Artificial Sequence: Synthetic oligonucleotide
  Antisense strand to SEQ ID NO: 2523718
aaaugccaagagcaccucu

SEQ ID NO: 2523720 - RNA, 19 nt, Artificial Sequence
  Description of Artificial Sequence: Synthetic oligonucleotide
  Sense strand starting at position 3698 of SEQ ID NO: 1888275
cagggacgcugcucaauau

SEQ ID NO: 2523721 - RNA, 19 nt, Artificial Sequence
  Description of Artificial Sequence: Synthetic oligonucleotide
  Antisense strand to SEQ ID NO: 2523720
auauugagcagcgucccug

SEQ ID NO: 2523722 - RNA, 19 nt, Artificial Sequence
  Description of Artificial Sequence: Synthetic oligonucleotide
  Sense strand starting at position 3813 of SEQ ID NO: 1888275
uguuuaucccaaugauggu

SEQ ID NO: 2523723 - RNA, 19 nt, Artificial Sequence
  Description of Artificial Sequence: Synthetic oligonucleotide
  Antisense strand to SEQ ID NO: 2523722
accaucauugggauaaaca

SEQ ID NO: 2523724 - RNA, 19 nt, Artificial Sequence
  Description of Artificial Sequence: Synthetic oligonucleotide
  Sense strand starting at position 3822 of SEQ ID NO: 1888275
caaugaugguucccuuugu

SEQ ID NO: 2523725 - RNA, 19 nt, Artificial Sequence
  Description of Artificial Sequence: Synthetic oligonucleotide
  Antisense strand to SEQ ID NO: 2523724
acaaagggaaccaucauug

SEQ ID NO: 2523726 - RNA, 19 nt, Artificial Sequence
  Description of Artificial Sequence: Synthetic oligonucleotide
  Sense strand starting at position 3823 of SEQ ID NO: 1888275
aaugaugguucccuuuguu

SEQ ID NO: 2523727 - RNA, 19 nt, Artificial Sequence
  Description of Artificial Sequence: Synthetic oligonucleotide
  Antisense strand to SEQ ID NO: 2523726
aacaaagggaaccaucauu

SEQ ID NO: 2523728 - RNA, 19 nt, Artificial Sequence
  Description of Artificial Sequence: Synthetic oligonucleotide
  Sense strand starting at position 3856 of SEQ ID NO: 1888275
gguugacugucagugauug

SEQ ID NO: 2523729 - RNA, 19 nt, Artificial Sequence
  Description of Artificial Sequence: Synthetic oligonucleotide
  Antisense strand to SEQ ID NO: 2523728
caaucacugacagucaacc

SEQ ID NO: 2523730 - RNA, 19 nt, Artificial Sequence
  Description of Artificial Sequence: Synthetic oligonucleotide
  Sense strand starting at position 3858 of SEQ ID NO: 1888275
uugacugucagugauuguu

SEQ ID NO: 2523731 - RNA, 19 nt, Artificial Sequence
  Description of Artificial Sequence: Synthetic oligonucleotide
  Antisense strand to SEQ ID NO: 2523730
aacaaucacugacagucaa

SEQ ID NO: 2523732 - RNA, 19 nt, Artificial Sequence
  Description of Artificial Sequence: Synthetic oligonucleotide
  Sense strand starting at position 3916 of SEQ ID NO: 1888275
ccauaaacaguuugggaua

SEQ ID NO: 2523733 - RNA, 19 nt, Artificial Sequence
  Description of Artificial Sequence: Synthetic oligonucleotide
  Antisense strand to SEQ ID NO: 2523732
uaucccaaacuguuuaugg

SEQ ID NO: 2523734 - RNA, 19 nt, Artificial Sequence
  Description of Artificial Sequence: Synthetic oligonucleotide
  Sense strand starting at position 3919 of SEQ ID NO: 1888275
uaaacaguuugggauaaca

SEQ ID NO: 2523735 - RNA, 19 nt, Artificial Sequence
  Description of Artificial Sequence: Synthetic oligonucleotide
  Antisense strand to SEQ ID NO: 2523734
uguuaucccaaacuguuua

SEQ ID NO: 2523736 - RNA, 19 nt, Artificial Sequence
  Description of Artificial Sequence: Synthetic oligonucleotide
  Sense strand starting at position 3979 of SEQ ID NO: 1888275
auggcugucacaugaguau

SEQ ID NO: 2523737 - RNA, 19 nt, Artificial Sequence
  Description of Artificial Sequence: Synthetic oligonucleotide
  Antisense strand to SEQ ID NO: 2523736
auacucaugugacagccau

SEQ ID NO: 2523738 - RNA, 19 nt, Artificial Sequence
  Description of Artificial Sequence: Synthetic oligonucleotide
  Sense strand starting at position 3983 of SEQ ID NO: 1888275
cugucacaugaguauguca

SEQ ID NO: 2523739 - RNA, 19 nt, Artificial Sequence
  Description of Artificial Sequence: Synthetic oligonucleotide
  Antisense strand to SEQ ID NO: 2523738
ugacauacucaugugacag

SEQ ID NO: 2523740 - RNA, 19 nt, Artificial Sequence
  Description of Artificial Sequence: Synthetic oligonucleotide
  Sense strand starting at position 66 of SEQ ID NO: 1888276
uguggaacccucugauaga

SEQ ID NO: 2523741 - RNA, 19 nt, Artificial Sequence
  Description of Artificial Sequence: Synthetic oligonucleotide
  Antisense strand to SEQ ID NO: 2523740
ucuaucagaggguuccaca

SEQ ID NO: 2523742 - RNA, 19 nt, Artificial Sequence
  Description of Artificial Sequence: Synthetic oligonucleotide
  Sense strand starting at position 130 of SEQ ID NO: 1888276
guuguauugguggacccau

SEQ ID NO: 2523743 - RNA, 19 nt, Artificial Sequence
  Description of Artificial Sequence: Synthetic oligonucleotide
  Antisense strand to SEQ ID NO: 2523742
auggguccaccaauacaac

SEQ ID NO: 2523744 - RNA, 19 nt, Artificial Sequence
  Description of Artificial Sequence: Synthetic oligonucleotide
  Sense strand starting at position 179 of SEQ ID NO: 1888276
acuguauauccagagcuua

SEQ ID NO: 2523745 - RNA, 19 nt, Artificial Sequence
  Description of Artificial Sequence: Synthetic oligonucleotide
  Antisense strand to SEQ ID NO: 2523744
uaagcucuggauauacagu

SEQ ID NO: 2523746 - RNA, 19 nt, Artificial Sequence
  Description of Artificial Sequence: Synthetic oligonucleotide
  Sense strand starting at position 264 of SEQ ID NO: 1888276
acgguuugcuauuuaaauu

SEQ ID NO: 2523747 - RNA, 19 nt, Artificial Sequence
  Description of Artificial Sequence: Synthetic oligonucleotide
  Antisense strand to SEQ ID NO: 2523746
aauuuaaauagcaaaccgu

SEQ ID NO: 2523748 - RNA, 19 nt, Artificial Sequence
  Description of Artificial Sequence: Synthetic oligonucleotide
  Sense strand starting at position 416 of SEQ ID NO: 1888276
ugggaacacucugcggaaa

SEQ ID NO: 2523749 - RNA, 19 nt, Artificial Sequence
  Description of Artificial Sequence: Synthetic oligonucleotide
  Antisense strand to SEQ ID NO: 2523748
uuuccgcagaguguuccca

SEQ ID NO: 2523750 - RNA, 19 nt, Artificial Sequence
  Description of Artificial Sequence: Synthetic oligonucleotide
  Sense strand starting at position 452 of SEQ ID NO: 1888276
gugaguccaucuucuggaa

SEQ ID NO: 2523751 - RNA, 19 nt, Artificial Sequence
  Description of Artificial Sequence: Synthetic oligonucleotide
  Antisense strand to SEQ ID NO: 2523750
uuccagaagauggacucac

SEQ ID NO: 2523752 - RNA, 19 nt, Artificial Sequence
  Description of Artificial Sequence: Synthetic oligonucleotide
  Sense strand starting at position 496 of SEQ ID NO: 1888276
gucuguuuggcauugugua

SEQ ID NO: 2523753 - RNA, 19 nt, Artificial Sequence
  Description of Artificial Sequence: Synthetic oligonucleotide
  Antisense strand to SEQ ID NO: 2523752
uacacaaugccaaacagac

SEQ ID NO: 2523754 - RNA, 19 nt, Artificial Sequence
  Description of Artificial Sequence: Synthetic oligonucleotide
  Sense strand starting at position 510 of SEQ ID NO: 1888276
guguaaugguaauuuggua

SEQ ID NO: 2523755 - RNA, 19 nt, Artificial Sequence
  Description of Artificial Sequence: Synthetic oligonucleotide
  Antisense strand to SEQ ID NO: 2523754
uaccaaauuaccauuacac

SEQ ID NO: 2523756 - RNA, 19 nt, Artificial Sequence
  Description of Artificial Sequence: Synthetic oligonucleotide
  Sense strand starting at position 728 of SEQ ID NO: 1888276
caggacaguccuggguuaa

SEQ ID NO: 2523757 - RNA, 19 nt, Artificial Sequence
  Description of Artificial Sequence: Synthetic oligonucleotide
  Antisense strand to SEQ ID NO: 2523756
uuaacccaggacuguccug

SEQ ID NO: 2523758 - RNA, 19 nt, Artificial Sequence
  Description of Artificial Sequence: Synthetic oligonucleotide
  Sense strand starting at position 729 of SEQ ID NO: 1888276
aggacaguccuggguuaaa

SEQ ID NO: 2523759 - RNA, 19 nt, Artificial Sequence
  Description of Artificial Sequence: Synthetic oligonucleotide
  Antisense strand to SEQ ID NO: 2523758
uuuaacccaggacuguccu

SEQ ID NO: 2523760 - RNA, 19 nt, Artificial Sequence
  Description of Artificial Sequence: Synthetic oligonucleotide
  Sense strand starting at position 841 of SEQ ID NO: 1888276
gugaaaguccaagauugug

SEQ ID NO: 2523761 - RNA, 19 nt, Artificial Sequence
  Description of Artificial Sequence: Synthetic oligonucleotide
  Antisense strand to SEQ ID NO: 2523760
cacaaucuuggacuuucac

SEQ ID NO: 2523762 - RNA, 19 nt, Artificial Sequence
  Description of Artificial Sequence: Synthetic oligonucleotide
  Sense strand starting at position 968 of SEQ ID NO: 1888276
uuaaguucuguagauggca

SEQ ID NO: 2523763 - RNA, 19 nt, Artificial Sequence
  Description of Artificial Sequence: Synthetic oligonucleotide
  Antisense strand to SEQ ID NO: 2523762
ugccaucuacagaacuuaa

SEQ ID NO: 2523764 - RNA, 19 nt, Artificial Sequence
  Description of Artificial Sequence: Synthetic oligonucleotide
  Sense strand starting at position 980 of SEQ ID NO: 1888276
gauggcauauccuugggaa

SEQ ID NO: 2523765 - RNA, 19 nt, Artificial Sequence
  Description of Artificial Sequence: Synthetic oligonucleotide
  Antisense strand to SEQ ID NO: 2523764
uucccaaggauaugccauc

SEQ ID NO: 2523766 - RNA, 19 nt, Artificial Sequence
  Description of Artificial Sequence: Synthetic oligonucleotide
  Sense strand starting at position 981 of SEQ ID NO: 1888276
auggcauauccuugggaaa

SEQ ID NO: 2523767 - RNA, 19 nt, Artificial Sequence
  Description of Artificial Sequence: Synthetic oligonucleotide
  Antisense strand to SEQ ID NO: 2523766
uuucccaaggauaugccau

SEQ ID NO: 2523768 - RNA, 19 nt, Artificial Sequence
  Description of Artificial Sequence: Synthetic oligonucleotide
  Sense strand starting at position 1063 of SEQ ID NO: 1888276
ugggucaauuggguagaau

SEQ ID NO: 2523769 - RNA, 19 nt, Artificial Sequence
  Description of Artificial Sequence: Synthetic oligonucleotide
  Antisense strand to SEQ ID NO: 2523768
auucuacccaauugaccca

SEQ ID NO: 2523770 - RNA, 19 nt, Artificial Sequence
  Description of Artificial Sequence: Synthetic oligonucleotide
  Sense strand starting at position 1114 of SEQ ID NO: 1888276
ggcauucggaagcacaaua

SEQ ID NO: 2523771 - RNA, 19 nt, Artificial Sequence
  Description of Artificial Sequence: Synthetic oligonucleotide
  Antisense strand to SEQ ID NO: 2523770
uauugugcuuccgaaugcc

SEQ ID NO: 2523772 - RNA, 19 nt, Artificial Sequence
  Description of Artificial Sequence: Synthetic oligonucleotide
  Sense strand starting at position 1142 of SEQ ID NO: 1888276
ggagcucugaguggagaga

SEQ ID NO: 2523773 - RNA, 19 nt, Artificial Sequence
  Description of Artificial Sequence: Synthetic oligonucleotide
  Antisense strand to SEQ ID NO: 2523772
ucucuccacucagagcucc

SEQ ID NO: 2523774 - RNA, 19 nt, Artificial Sequence
  Description of Artificial Sequence: Synthetic oligonucleotide
  Sense strand starting at position 1155 of SEQ ID NO: 1888276
gagagaaaggucuguuucu

SEQ ID NO: 2523775 - RNA, 19 nt, Artificial Sequence
  Description of Artificial Sequence: Synthetic oligonucleotide
  Antisense strand to SEQ ID NO: 2523774
agaaacagaccuuucucuc

SEQ ID NO: 2523776 - RNA, 19 nt, Artificial Sequence
  Description of Artificial Sequence: Synthetic oligonucleotide
  Sense strand starting at position 1156 of SEQ ID NO: 1888276
agagaaaggucuguuucuc

SEQ ID NO: 2523777 - RNA, 19 nt, Artificial Sequence
  Description of Artificial Sequence: Synthetic oligonucleotide
  Antisense strand to SEQ ID NO: 2523776
gagaaacagaccuuucucu

SEQ ID NO: 2523778 - RNA, 19 nt, Artificial Sequence
  Description of Artificial Sequence: Synthetic oligonucleotide
  Sense strand starting at position 1278 of SEQ ID NO: 1888276
augugaccuugggcuagau

SEQ ID NO: 2523779 - RNA, 19 nt, Artificial Sequence
  Description of Artificial Sequence: Synthetic oligonucleotide
  Antisense strand to SEQ ID NO: 2523778
aucuagcccaaggucacau

SEQ ID NO: 2523780 - RNA, 19 nt, Artificial Sequence
  Description of Artificial Sequence: Synthetic oligonucleotide
  Sense strand starting at position 1346 of SEQ ID NO: 1888276
gguuguuaggaguauuaaa

SEQ ID NO: 2523781 - RNA, 19 nt, Artificial Sequence
  Description of Artificial Sequence: Synthetic oligonucleotide
  Antisense strand to SEQ ID NO: 2523780
uuuaauacuccuaacaacc

SEQ ID NO: 2523782 - RNA, 19 nt, Artificial Sequence
  Description of Artificial Sequence: Synthetic oligonucleotide
  Sense strand starting at position 1484 of SEQ ID NO: 1888276
acggcaaaugcuuaauuaa

SEQ ID NO: 2523783 - RNA, 19 nt, Artificial Sequence
  Description of Artificial Sequence: Synthetic oligonucleotide
  Antisense strand to SEQ ID NO: 2523782
uuaauuaagcauuugccgu

SEQ ID NO: 2523784 - RNA, 19 nt, Artificial Sequence
  Description of Artificial Sequence: Synthetic oligonucleotide
  Sense strand starting at position 1578 of SEQ ID NO: 1888276
ugaugcauuguaggagaaa

SEQ ID NO: 2523785 - RNA, 19 nt, Artificial Sequence
  Description of Artificial Sequence: Synthetic oligonucleotide
  Antisense strand to SEQ ID NO: 2523784
uuucuccuacaaugcauca

SEQ ID NO: 2523786 - RNA, 19 nt, Artificial Sequence
  Description of Artificial Sequence: Synthetic oligonucleotide
  Sense strand starting at position 1753 of SEQ ID NO: 1888276
caucucagucugugaaaug

SEQ ID NO: 2523787 - RNA, 19 nt, Artificial Sequence
  Description of Artificial Sequence: Synthetic oligonucleotide
  Antisense strand to SEQ ID NO: 2523786
cauuucacagacugagaug

SEQ ID NO: 2523788 - RNA, 19 nt, Artificial Sequence
  Description of Artificial Sequence: Synthetic oligonucleotide
  Sense strand starting at position 2335 of SEQ ID NO: 1888276
agacuugggaccgguuaga

SEQ ID NO: 2523789 - RNA, 19 nt, Artificial Sequence
  Description of Artificial Sequence: Synthetic oligonucleotide
  Antisense strand to SEQ ID NO: 2523788
ucuaaccggucccaagucu

SEQ ID NO: 2523790 - RNA, 19 nt, Artificial Sequence
  Description of Artificial Sequence: Synthetic oligonucleotide
  Sense strand starting at position 2479 of SEQ ID NO: 1888276
gcugaagcagggugagaau

SEQ ID NO: 2523791 - RNA, 19 nt, Artificial Sequence
  Description of Artificial Sequence: Synthetic oligonucleotide
  Antisense strand to SEQ ID NO: 2523790
auucucacccugcuucagc

SEQ ID NO: 2523792 - RNA, 19 nt, Artificial Sequence
  Description of Artificial Sequence: Synthetic oligonucleotide
  Sense strand starting at position 2489 of SEQ ID NO: 1888276
ggugagaaucugugaggga

SEQ ID NO: 2523793 - RNA, 19 nt, Artificial Sequence
  Description of Artificial Sequence: Synthetic oligonucleotide
  Antisense strand to SEQ ID NO: 2523792
ucccucacagauucucacc

SEQ ID NO: 2523794 - RNA, 19 nt, Artificial Sequence
  Description of Artificial Sequence: Synthetic oligonucleotide
  Sense strand starting at position 2555 of SEQ ID NO: 1888276
ggacuuucuaagggucuga

SEQ ID NO: 2523795 - RNA, 19 nt, Artificial Sequence
  Description of Artificial Sequence: Synthetic oligonucleotide
  Antisense strand to SEQ ID NO: 2523794
ucagacccuuagaaagucc

SEQ ID NO: 2523796 - RNA, 19 nt, Artificial Sequence
  Description of Artificial Sequence: Synthetic oligonucleotide
  Sense strand starting at position 2852 of SEQ ID NO: 1888276
gacugagguccagaguagu

SEQ ID NO: 2523797 - RNA, 19 nt, Artificial Sequence
  Description of Artificial Sequence: Synthetic oligonucleotide
  Antisense strand to SEQ ID NO: 2523796
acuacucuggaccucaguc

SEQ ID NO: 2523798 - RNA, 19 nt, Artificial Sequence
  Description of Artificial Sequence: Synthetic oligonucleotide
  Sense strand starting at position 2858 of SEQ ID NO: 1888276
gguccagaguaguugggaa

SEQ ID NO: 2523799 - RNA, 19 nt, Artificial Sequence
  Description of Artificial Sequence: Synthetic oligonucleotide
  Antisense strand to SEQ ID NO: 2523798
uucccaacuacucuggacc

SEQ ID NO: 2523800 - RNA, 19 nt, Artificial Sequence
  Description of Artificial Sequence: Synthetic oligonucleotide
  Sense strand starting at position 2860 of SEQ ID NO: 1888276
uccagaguaguugggaagu

SEQ ID NO: 2523801 - RNA, 19 nt, Artificial Sequence
  Description of Artificial Sequence: Synthetic oligonucleotide
  Antisense strand to SEQ ID NO: 2523800
acuucccaacuacucugga

SEQ ID NO: 2523802 - RNA, 19 nt, Artificial Sequence
  Description of Artificial Sequence: Synthetic oligonucleotide
  Sense strand starting at position 2945 of SEQ ID NO: 1888276
ugugaauaucagcaccaaa

SEQ ID NO: 2523803 - RNA, 19 nt, Artificial Sequence
  Description of Artificial Sequence: Synthetic oligonucleotide
  Antisense strand to SEQ ID NO: 2523802
uuuggugcugauauucaca

SEQ ID NO: 2523804 - RNA, 19 nt, Artificial Sequence
  Description of Artificial Sequence: Synthetic oligonucleotide
  Sense strand starting at position 2965 of SEQ ID NO: 1888276
ccuagugguaccuggaauu

SEQ ID NO: 2523805 - RNA, 19 nt, Artificial Sequence
  Description of Artificial Sequence: Synthetic oligonucleotide
  Antisense strand to SEQ ID NO: 2523804
aauuccagguaccacuagg

SEQ ID NO: 2523806 - RNA, 19 nt, Artificial Sequence
  Description of Artificial Sequence: Synthetic oligonucleotide
  Sense strand starting at position 3103 of SEQ ID NO: 1888276
gaccgaaggagucaugcuu

SEQ ID NO: 2523807 - RNA, 19 nt, Artificial Sequence
  Description of Artificial Sequence: Synthetic oligonucleotide
  Antisense strand to SEQ ID NO: 2523806
aagcaugacuccuucgguc

SEQ ID NO: 2523808 - RNA, 19 nt, Artificial Sequence
  Description of Artificial Sequence: Synthetic oligonucleotide
  Sense strand starting at position 3295 of SEQ ID NO: 1888276
guuugaggugcacaaacau

SEQ ID NO: 2523809 - RNA, 19 nt, Artificial Sequence
  Description of Artificial Sequence: Synthetic oligonucleotide
  Antisense strand to SEQ ID NO: 2523808
auguuugugcaccucaaac

SEQ ID NO: 2523810 - RNA, 19 nt, Artificial Sequence
  Description of Artificial Sequence: Synthetic oligonucleotide
  Sense strand starting at position 3322 of SEQ ID NO: 1888276
gcaaauaggugguugggau

SEQ ID NO: 2523811 - RNA, 19 nt, Artificial Sequence
  Description of Artificial Sequence: Synthetic oligonucleotide
  Antisense strand to SEQ ID NO: 2523810
aucccaaccaccuauuugc

SEQ ID NO: 2523812 - RNA, 19 nt, Artificial Sequence
  Description of Artificial Sequence: Synthetic oligonucleotide
  Sense strand starting at position 3452 of SEQ ID NO: 1888276
ccugcugaagcauaugaaa

SEQ ID NO: 2523813 - RNA, 19 nt, Artificial Sequence
  Description of Artificial Sequence: Synthetic oligonucleotide
  Antisense strand to SEQ ID NO: 2523812
uuucauaugcuucagcagg

SEQ ID NO: 2523814 - RNA, 19 nt, Artificial Sequence
  Description of Artificial Sequence: Synthetic oligonucleotide
  Sense strand starting at position 3532 of SEQ ID NO: 1888276
aacaauccugugugguaga

SEQ ID NO: 2523815 - RNA, 19 nt, Artificial Sequence
  Description of Artificial Sequence: Synthetic oligonucleotide
  Antisense strand to SEQ ID NO: 2523814
ucuaccacacaggauuguu

SEQ ID NO: 2523816 - RNA, 19 nt, Artificial Sequence
  Description of Artificial Sequence: Synthetic oligonucleotide
  Sense strand starting at position 3542 of SEQ ID NO: 1888276
ugugguagauaucccuaua

SEQ ID NO: 2523817 - RNA, 19 nt, Artificial Sequence
  Description of Artificial Sequence: Synthetic oligonucleotide
  Antisense strand to SEQ ID NO: 2523816
uauagggauaucuaccaca

SEQ ID NO: 2523818 - RNA, 19 nt, Artificial Sequence
  Description of Artificial Sequence: Synthetic oligonucleotide
  Sense strand starting at position 3545 of SEQ ID NO: 1888276
gguagauaucccuauaugu

SEQ ID NO: 2523819 - RNA, 19 nt, Artificial Sequence
  Description of Artificial Sequence: Synthetic oligonucleotide
  Antisense strand to SEQ ID NO: 2523818
acauauagggauaucuacc

SEQ ID NO: 2523820 - RNA, 19 nt, Artificial Sequence
  Description of Artificial Sequence: Synthetic oligonucleotide
  Sense strand starting at position 55 of SEQ ID NO: 1888277
cugaaauauugaggccuca

SEQ ID NO: 2523821 - RNA, 19 nt, Artificial Sequence
  Description of Artificial Sequence: Synthetic oligonucleotide
  Antisense strand to SEQ ID NO: 2523820
ugaggccucaauauuucag

SEQ ID NO: 2523822 - RNA, 19 nt, Artificial Sequence
  Description of Artificial Sequence: Synthetic oligonucleotide
  Sense strand starting at position 102 of SEQ ID NO: 1888277
cgucaucucuacccagaua

SEQ ID NO: 2523823 - RNA, 19 nt, Artificial Sequence
  Description of Artificial Sequence: Synthetic oligonucleotide
  Antisense strand to SEQ ID NO: 2523822
uaucuggguagagaugacg

SEQ ID NO: 2523824 - RNA, 19 nt, Artificial Sequence
  Description of Artificial Sequence: Synthetic oligonucleotide
  Sense strand starting at position 757 of SEQ ID NO: 1888277
cucccaaacgucgagugaa

SEQ ID NO: 2523825 - RNA, 19 nt, Artificial Sequence
  Description of Artificial Sequence: Synthetic oligonucleotide
  Antisense strand to SEQ ID NO: 2523824
uucacucgacguuugggag

SEQ ID NO: 2523826 - RNA, 19 nt, Artificial Sequence
  Description of Artificial Sequence: Synthetic oligonucleotide
  Sense strand starting at position 1020 of SEQ ID NO: 1888277
ucuggucuccggaggguuu

SEQ ID NO: 2523827 - RNA, 19 nt, Artificial Sequence
  Description of Artificial Sequence: Synthetic oligonucleotide
  Antisense strand to SEQ ID NO: 2523826
aaacccuccggagaccaga

SEQ ID NO: 2523828 - RNA, 19 nt, Artificial Sequence
  Description of Artificial Sequence: Synthetic oligonucleotide
  Sense strand starting at position 1717 of SEQ ID NO: 1888277
cggaaauggugcuggccau

SEQ ID NO: 2523829 - RNA, 19 nt, Artificial Sequence
  Description of Artificial Sequence: Synthetic oligonucleotide
  Antisense strand to SEQ ID NO: 2523828
auggccagcaccauuuccg

SEQ ID NO: 2523830 - RNA, 19 nt, Artificial Sequence
  Description of Artificial Sequence: Synthetic oligonucleotide
  Sense strand starting at position 2168 of SEQ ID NO: 1888277
cuuugugaggccugagagu

SEQ ID NO: 2523831 - RNA, 19 nt, Artificial Sequence
  Description of Artificial Sequence: Synthetic oligonucleotide
  Antisense strand to SEQ ID NO: 2523830
acucucaggccucacaaag

SEQ ID NO: 2523832 - RNA, 19 nt, Artificial Sequence
  Description of Artificial Sequence: Synthetic oligonucleotide
  Sense strand starting at position 2429 of SEQ ID NO: 1888277
gcaggaucugagcggagaa

SEQ ID NO: 2523833 - RNA, 19 nt, Artificial Sequence
  Description of Artificial Sequence: Synthetic oligonucleotide
  Antisense strand to SEQ ID NO: 2523832
uucuccgcucagauccugc

SEQ ID NO: 2523834 - RNA, 19 nt, Artificial Sequence
  Description of Artificial Sequence: Synthetic oligonucleotide
  Sense strand starting at position 2478 of SEQ ID NO: 1888277
aaggcuuugccgugaaaga

SEQ ID NO: 2523835 - RNA, 19 nt, Artificial Sequence
  Description of Artificial Sequence: Synthetic oligonucleotide
  Antisense strand to SEQ ID NO: 2523834
ucuuucacggcaaagccuu

SEQ ID NO: 2523836 - RNA, 19 nt, Artificial Sequence
  Description of Artificial Sequence: Synthetic oligonucleotide
  Sense strand starting at position 2479 of SEQ ID NO: 1888277
aggcuuugccgugaaagag

SEQ ID NO: 2523837 - RNA, 19 nt, Artificial Sequence
  Description of Artificial Sequence: Synthetic oligonucleotide
  Antisense strand to SEQ ID NO: 2523836
cucuuucacggcaaagccu

SEQ ID NO: 2523838 - RNA, 19 nt, Artificial Sequence
  Description of Artificial Sequence: Synthetic oligonucleotide
  Sense strand starting at position 2638 of SEQ ID NO: 1888277
gguugugcgcacuuaguga

SEQ ID NO: 2523839 - RNA, 19 nt, Artificial Sequence
  Description of Artificial Sequence: Synthetic oligonucleotide
  Antisense strand to SEQ ID NO: 2523838
ucacuaagugcgcacaacc

SEQ ID NO: 2523840 - RNA, 19 nt, Artificial Sequence
  Description of Artificial Sequence: Synthetic oligonucleotide
  Sense strand starting at position 2734 of SEQ ID NO: 1888277
uugccauugcagggaugaa

SEQ ID NO: 2523841 - RNA, 19 nt, Artificial Sequence
  Description of Artificial Sequence: Synthetic oligonucleotide
  Antisense strand to SEQ ID NO: 2523840
uucaucccugcaauggcaa

SEQ ID NO: 2523842 - RNA, 19 nt, Artificial Sequence
  Description of Artificial Sequence: Synthetic oligonucleotide
  Sense strand starting at position 3004 of SEQ ID NO: 1888277
gggugaugcccaggaaugu

SEQ ID NO: 2523843 - RNA, 19 nt, Artificial Sequence
  Description of Artificial Sequence: Synthetic oligonucleotide
  Antisense strand to SEQ ID NO: 2523842
acauuccugggcaucaccc

SEQ ID NO: 2523844 - RNA, 19 nt, Artificial Sequence
  Description of Artificial Sequence: Synthetic oligonucleotide
  Sense strand starting at position 3010 of SEQ ID NO: 1888277
ugcccaggaaugugacauu

SEQ ID NO: 2523845 - RNA, 19 nt, Artificial Sequence
  Description of Artificial Sequence: Synthetic oligonucleotide
  Antisense strand to SEQ ID NO: 2523844
aaugucacauuccugggca

SEQ ID NO: 2523846 - RNA, 19 nt, Artificial Sequence
  Description of Artificial Sequence: Synthetic oligonucleotide
  Sense strand starting at position 3107 of SEQ ID NO: 1888277
guuuccuuugccugguuga

SEQ ID NO: 2523847 - RNA, 19 nt, Artificial Sequence
  Description of Artificial Sequence: Synthetic oligonucleotide
  Antisense strand to SEQ ID NO: 2523846
ucaaccaggcaaaggaaac

SEQ ID NO: 2523848 - RNA, 19 nt, Artificial Sequence
  Description of Artificial Sequence: Synthetic oligonucleotide
  Sense strand starting at position 3108 of SEQ ID NO: 1888277
uuuccuuugccugguugaa

SEQ ID NO: 2523849 - RNA, 19 nt, Artificial Sequence
  Description of Artificial Sequence: Synthetic oligonucleotide
  Antisense strand to SEQ ID NO: 2523848
uucaaccaggcaaaggaaa

SEQ ID NO: 2523850 - RNA, 19 nt, Artificial Sequence
  Description of Artificial Sequence: Synthetic oligonucleotide
  Sense strand starting at position 3110 of SEQ ID NO: 1888277
uccuuugccugguugaaga

SEQ ID NO: 2523851 - RNA, 19 nt, Artificial Sequence
  Description of Artificial Sequence: Synthetic oligonucleotide
  Antisense strand to SEQ ID NO: 2523850
ucuucaaccaggcaaagga

SEQ ID NO: 2523852 - RNA, 19 nt, Artificial Sequence
  Description of Artificial Sequence: Synthetic oligonucleotide
  Sense strand starting at position 3112 of SEQ ID NO: 1888277
cuuugccugguugaagaaa

SEQ ID NO: 2523853 - RNA, 19 nt, Artificial Sequence
  Description of Artificial Sequence: Synthetic oligonucleotide
  Antisense strand to SEQ ID NO: 2523852
uuucuucaaccaggcaaag

SEQ ID NO: 2523854 - RNA, 19 nt, Artificial Sequence
  Description of Artificial Sequence: Synthetic oligonucleotide
  Sense strand starting at position 3183 of SEQ ID NO: 1888277
guggcaaggaucugagaac

SEQ ID NO: 2523855 - RNA, 19 nt, Artificial Sequence
  Description of Artificial Sequence: Synthetic oligonucleotide
  Antisense strand to SEQ ID NO: 2523854
guucucagauccuugccac

SEQ ID NO: 2523856 - RNA, 19 nt, Artificial Sequence
  Description of Artificial Sequence: Synthetic oligonucleotide
  Sense strand starting at position 3184 of SEQ ID NO: 1888277
uggcaaggaucugagaacu

SEQ ID NO: 2523857 - RNA, 19 nt, Artificial Sequence
  Description of Artificial Sequence: Synthetic oligonucleotide
  Antisense strand to SEQ ID NO: 2523856
aguucucagauccuugcca

SEQ ID NO: 2523858 - RNA, 19 nt, Artificial Sequence
  Description of Artificial Sequence: Synthetic oligonucleotide
  Sense strand starting at position 3338 of SEQ ID NO: 1888277
ugguuucagccuuggguua

SEQ ID NO: 2523859 - RNA, 19 nt, Artificial Sequence
  Description of Artificial Sequence: Synthetic oligonucleotide
  Antisense strand to SEQ ID NO: 2523858
uaacccaaggcugaaacca

SEQ ID NO: 2523860 - RNA, 19 nt, Artificial Sequence
  Description of Artificial Sequence: Synthetic oligonucleotide
  Sense strand starting at position 3345 of SEQ ID NO: 1888277
agccuuggguuacuaagaa

SEQ ID NO: 2523861 - RNA, 19 nt, Artificial Sequence
  Description of Artificial Sequence: Synthetic oligonucleotide
  Antisense strand to SEQ ID NO: 2523860
uucuuaguaacccaaggcu

SEQ ID NO: 2523862 - RNA, 19 nt, Artificial Sequence
  Description of Artificial Sequence: Synthetic oligonucleotide
  Sense strand starting at position 3349 of SEQ ID NO: 1888277
uuggguuacuaagaauuag

SEQ ID NO: 2523863 - RNA, 19 nt, Artificial Sequence
  Description of Artificial Sequence: Synthetic oligonucleotide
  Antisense strand to SEQ ID NO: 2523862
cuaauucuuaguaacccaa

SEQ ID NO: 2523864 - RNA, 19 nt, Artificial Sequence
  Description of Artificial Sequence: Synthetic oligonucleotide
  Sense strand starting at position 3355 of SEQ ID NO: 1888277
uacuaagaauuaggaggua

SEQ ID NO: 2523865 - RNA, 19 nt, Artificial Sequence
  Description of Artificial Sequence: Synthetic oligonucleotide
  Antisense strand to SEQ ID NO: 2523864
uaccuccuaauucuuagua

SEQ ID NO: 2523866 - RNA, 19 nt, Artificial Sequence
  Description of Artificial Sequence: Synthetic oligonucleotide
  Sense strand starting at position 3370 of SEQ ID NO: 1888277
gguaaugaaugagaguugu

SEQ ID NO: 2523867 - RNA, 19 nt, Artificial Sequence
  Description of Artificial Sequence: Synthetic oligonucleotide
  Antisense strand to SEQ ID NO: 2523866
acaacucucauucauuacc

SEQ ID NO: 2523868 - RNA, 19 nt, Artificial Sequence
  Description of Artificial Sequence: Synthetic oligonucleotide
  Sense strand starting at position 3409 of SEQ ID NO: 1888277
gugauuugcuaugaagcca

SEQ ID NO: 2523869 - RNA, 19 nt, Artificial Sequence
  Description of Artificial Sequence: Synthetic oligonucleotide
  Antisense strand to SEQ ID NO: 2523868
uggcuucauagcaaaucac

SEQ ID NO: 2523870 - RNA, 19 nt, Artificial Sequence
  Description of Artificial Sequence: Synthetic oligonucleotide
  Sense strand starting at position 3665 of SEQ ID NO: 1888277
uccagagucuucucaugug

SEQ ID NO: 2523871 - RNA, 19 nt, Artificial Sequence
  Description of Artificial Sequence: Synthetic oligonucleotide
  Antisense strand to SEQ ID NO: 2523870
cacaugagaagacucugga

SEQ ID NO: 2523872 - RNA, 19 nt, Artificial Sequence
  Description of Artificial Sequence: Synthetic oligonucleotide
  Sense strand starting at position 3668 of SEQ ID NO: 1888277
agagucuucucaugugggu

SEQ ID NO: 2523873 - RNA, 19 nt, Artificial Sequence
  Description of Artificial Sequence: Synthetic oligonucleotide
  Antisense strand to SEQ ID NO: 2523872
acccacaugagaagacucu

SEQ ID NO: 2523874 - RNA, 19 nt, Artificial Sequence
  Description of Artificial Sequence: Synthetic oligonucleotide
  Sense strand starting at position 3727 of SEQ ID NO: 1888277
ccucacacucauugugacu

SEQ ID NO: 2523875 - RNA, 19 nt, Artificial Sequence
  Description of Artificial Sequence: Synthetic oligonucleotide
  Antisense strand to SEQ ID NO: 2523874
agucacaaugagugugagg

SEQ ID NO: 2523876 - RNA, 19 nt, Artificial Sequence
  Description of Artificial Sequence: Synthetic oligonucleotide
  Sense strand starting at position 11 of SEQ ID NO: 1888278
gucccuaagaggugaaaug

SEQ ID NO: 2523877 - RNA, 19 nt, Artificial Sequence
  Description of Artificial Sequence: Synthetic oligonucleotide
  Antisense strand to SEQ ID NO: 2523876
cauuucaccucuuagggac

SEQ ID NO: 2523878 - RNA, 19 nt, Artificial Sequence
  Description of Artificial Sequence: Synthetic oligonucleotide
  Sense strand starting at position 205 of SEQ ID NO: 1888278
acgaucacugucugguaua

SEQ ID NO: 2523879 - RNA, 19 nt, Artificial Sequence
  Description of Artificial Sequence: Synthetic oligonucleotide
  Antisense strand to SEQ ID NO: 2523878
uauaccagacagugaucgu

SEQ ID NO: 2523880 - RNA, 19 nt, Artificial Sequence
  Description of Artificial Sequence: Synthetic oligonucleotide
  Sense strand starting at position 206 of SEQ ID NO: 1888278
cgaucacugucugguauag

SEQ ID NO: 2523881 - RNA, 19 nt, Artificial Sequence
  Description of Artificial Sequence: Synthetic oligonucleotide
  Antisense strand to SEQ ID NO: 2523880
cuauaccagacagugaucg

SEQ ID NO: 2523882 - RNA, 19 nt, Artificial Sequence
  Description of Artificial Sequence: Synthetic oligonucleotide
  Sense strand starting at position 208 of SEQ ID NO: 1888278
aucacugucugguauagau

SEQ ID NO: 2523883 - RNA, 19 nt, Artificial Sequence
  Description of Artificial Sequence: Synthetic oligonucleotide
  Antisense strand to SEQ ID NO: 2523882
aucuauaccagacagugau

SEQ ID NO: 2523884 - RNA, 19 nt, Artificial Sequence
  Description of Artificial Sequence: Synthetic oligonucleotide
  Sense strand starting at position 210 of SEQ ID NO: 1888278
cacugucugguauagauca

SEQ ID NO: 2523885 - RNA, 19 nt, Artificial Sequence
  Description of Artificial Sequence: Synthetic oligonucleotide
  Antisense strand to SEQ ID NO: 2523884
ugaucuauaccagacagug

SEQ ID NO: 2523886 - RNA, 19 nt, Artificial Sequence
  Description of Artificial Sequence: Synthetic oligonucleotide
  Sense strand starting at position 217 of SEQ ID NO: 1888278
ugguauagaucauccagac

SEQ ID NO: 2523887 - RNA, 19 nt, Artificial Sequence
  Description of Artificial Sequence: Synthetic oligonucleotide
  Antisense strand to SEQ ID NO: 2523886
gucuggaugaucuauacca

SEQ ID NO: 2523888 - RNA, 19 nt, Artificial Sequence
  Description of Artificial Sequence: Synthetic oligonucleotide
  Sense strand starting at position 358 of SEQ ID NO: 1888278
aacuaaagguugugguuaa

SEQ ID NO: 2523889 - RNA, 19 nt, Artificial Sequence
  Description of Artificial Sequence: Synthetic oligonucleotide
  Antisense strand to SEQ ID NO: 2523888
uuaaccacaaccuuuaguu

SEQ ID NO: 2523890 - RNA, 19 nt, Artificial Sequence
  Description of Artificial Sequence: Synthetic oligonucleotide
  Sense strand starting at position 359 of SEQ ID NO: 1888278
acuaaagguugugguuaau

SEQ ID NO: 2523891 - RNA, 19 nt, Artificial Sequence
  Description of Artificial Sequence: Synthetic oligonucleotide
  Antisense strand to SEQ ID NO: 2523890
auuaaccacaaccuuuagu

SEQ ID NO: 2523892 - RNA, 19 nt, Artificial Sequence
  Description of Artificial Sequence: Synthetic oligonucleotide
  Sense strand starting at position 362 of SEQ ID NO: 1888278
aaagguugugguuaauuaa

SEQ ID NO: 2523893 - RNA, 19 nt, Artificial Sequence
  Description of Artificial Sequence: Synthetic oligonucleotide
  Antisense strand to SEQ ID NO: 2523892
uuaauuaaccacaaccuuu

SEQ ID NO: 2523894 - RNA, 19 nt, Artificial Sequence
  Description of Artificial Sequence: Synthetic oligonucleotide
  Sense strand starting at position 467 of SEQ ID NO: 1888278
aauuuccugucugggaaau

SEQ ID NO: 2523895 - RNA, 19 nt, Artificial Sequence
  Description of Artificial Sequence: Synthetic oligonucleotide
  Antisense strand to SEQ ID NO: 2523894
auuucccagacaggaaauu

SEQ ID NO: 2523896 - RNA, 19 nt, Artificial Sequence
  Description of Artificial Sequence: Synthetic oligonucleotide
  Sense strand starting at position 535 of SEQ ID NO: 1888278
gaagaacagugaggcaauu

SEQ ID NO: 2523897 - RNA, 19 nt, Artificial Sequence
  Description of Artificial Sequence: Synthetic oligonucleotide
  Antisense strand to SEQ ID NO: 2523896
aauugccucacuguucuuc

SEQ ID NO: 2523898 - RNA, 19 nt, Artificial Sequence
  Description of Artificial Sequence: Synthetic oligonucleotide
  Sense strand starting at position 789 of SEQ ID NO: 1888278
gcccaaugcuucccaaugu

SEQ ID NO: 2523899 - RNA, 19 nt, Artificial Sequence
  Description of Artificial Sequence: Synthetic oligonucleotide
  Antisense strand to SEQ ID NO: 2523898
acauugggaagcauugggc

SEQ ID NO: 2523900 - RNA, 19 nt, Artificial Sequence
  Description of Artificial Sequence: Synthetic oligonucleotide
  Sense strand starting at position 798 of SEQ ID NO: 1888278
uucccaauguuagcguuaa

SEQ ID NO: 2523901 - RNA, 19 nt, Artificial Sequence
  Description of Artificial Sequence: Synthetic oligonucleotide
  Antisense strand to SEQ ID NO: 2523900
uuaacgcuaacauugggaa

SEQ ID NO: 2523902 - RNA, 19 nt, Artificial Sequence
  Description of Artificial Sequence: Synthetic oligonucleotide
  Sense strand starting at position 799 of SEQ ID NO: 1888278
ucccaauguuagcguuaaa

SEQ ID NO: 2523903 - RNA, 19 nt, Artificial Sequence
  Description of Artificial Sequence: Synthetic oligonucleotide
  Antisense strand to SEQ ID NO: 2523902
uuuaacgcuaacauuggga

SEQ ID NO: 2523904 - RNA, 19 nt, Artificial Sequence
  Description of Artificial Sequence: Synthetic oligonucleotide
  Sense strand starting at position 1106 of SEQ ID NO: 1888278
ggagacucaccgcagcaau

SEQ ID NO: 2523905 - RNA, 19 nt, Artificial Sequence
  Description of Artificial Sequence: Synthetic oligonucleotide
  Antisense strand to SEQ ID NO: 2523904
auugcugcggugagucucc

SEQ ID NO: 2523906 - RNA, 19 nt, Artificial Sequence
  Description of Artificial Sequence: Synthetic oligonucleotide
  Sense strand starting at position 2278 of SEQ ID NO: 1888278
ggcccuuggucgcugaauu

SEQ ID NO: 2523907 - RNA, 19 nt, Artificial Sequence
  Description of Artificial Sequence: Synthetic oligonucleotide
  Antisense strand to SEQ ID NO: 2523906
aauucagcgaccaagggcc

SEQ ID NO: 2523908 - RNA, 19 nt, Artificial Sequence
  Description of Artificial Sequence: Synthetic oligonucleotide
  Sense strand starting at position 2279 of SEQ ID NO: 1888278
gcccuuggucgcugaauua

SEQ ID NO: 2523909 - RNA, 19 nt, Artificial Sequence
  Description of Artificial Sequence: Synthetic oligonucleotide
  Antisense strand to SEQ ID NO: 2523908
uaauucagcgaccaagggc

SEQ ID NO: 2523910 - RNA, 19 nt, Artificial Sequence
  Description of Artificial Sequence: Synthetic oligonucleotide
  Sense strand starting at position 2289 of SEQ ID NO: 1888278
gcugaauuagaguggaagu

SEQ ID NO: 2523911 - RNA, 19 nt, Artificial Sequence
  Description of Artificial Sequence: Synthetic oligonucleotide
  Antisense strand to SEQ ID NO: 2523910
acuuccacucuaauucagc

SEQ ID NO: 2523912 - RNA, 19 nt, Artificial Sequence
  Description of Artificial Sequence: Synthetic oligonucleotide
  Sense strand starting at position 2290 of SEQ ID NO: 1888278
cugaauuagaguggaaguu

SEQ ID NO: 2523913 - RNA, 19 nt, Artificial Sequence
  Description of Artificial Sequence: Synthetic oligonucleotide
  Antisense strand to SEQ ID NO: 2523912
aacuuccacucuaauucag

SEQ ID NO: 2523914 - RNA, 19 nt, Artificial Sequence
  Description of Artificial Sequence: Synthetic oligonucleotide
  Sense strand starting at position 2467 of SEQ ID NO: 1888278
aaagauguauccgacaaac

SEQ ID NO: 2523915 - RNA, 19 nt, Artificial Sequence
  Description of Artificial Sequence: Synthetic oligonucleotide
  Antisense strand to SEQ ID NO: 2523914
guuugucggauacaucuuu

SEQ ID NO: 2523916 - RNA, 19 nt, Artificial Sequence
  Description of Artificial Sequence: Synthetic oligonucleotide
  Sense strand starting at position 3143 of SEQ ID NO: 1888278
cuuuguuucugcguggaac

SEQ ID NO: 2523917 - RNA, 19 nt, Artificial Sequence
  Description of Artificial Sequence: Synthetic oligonucleotide
  Antisense strand to SEQ ID NO: 2523916
guuccacgcagaaacaaag

SEQ ID NO: 2523918 - RNA, 19 nt, Artificial Sequence
  Description of Artificial Sequence: Synthetic oligonucleotide
  Sense strand starting at position 3144 of SEQ ID NO: 1888278
uuuguuucugcguggaaca

SEQ ID NO: 2523919 - RNA, 19 nt, Artificial Sequence
  Description of Artificial Sequence: Synthetic oligonucleotide
  Antisense strand to SEQ ID NO: 2523918
uguuccacgcagaaacaaa

SEQ ID NO: 2523920 - RNA, 19 nt, Artificial Sequence
  Description of Artificial Sequence: Synthetic oligonucleotide
  Sense strand starting at position 3145 of SEQ ID NO: 1888278
uuguuucugcguggaacaa

SEQ ID NO: 2523921 - RNA, 19 nt, Artificial Sequence
  Description of Artificial Sequence: Synthetic oligonucleotide
  Antisense strand to SEQ ID NO: 2523920
uuguuccacgcagaaacaa

SEQ ID NO: 2523922 - RNA, 19 nt, Artificial Sequence
  Description of Artificial Sequence: Synthetic oligonucleotide
  Sense strand starting at position 3146 of SEQ ID NO: 1888278
uguuucugcguggaacaaa

SEQ ID NO: 2523923 - RNA, 19 nt, Artificial Sequence
  Description of Artificial Sequence: Synthetic oligonucleotide
  Antisense strand to SEQ ID NO: 2523922
uuuguuccacgcagaaaca

SEQ ID NO: 2523924 - RNA, 19 nt, Artificial Sequence
  Description of Artificial Sequence: Synthetic oligonucleotide
  Sense strand starting at position 3188 of SEQ ID NO: 1888278
gaggguuucccgugugcug

SEQ ID NO: 2523925 - RNA, 19 nt, Artificial Sequence
  Description of Artificial Sequence: Synthetic oligonucleotide
  Antisense strand to SEQ ID NO: 2523924
cagcacacgggaaacccuc

SEQ ID NO: 2523926 - RNA, 19 nt, Artificial Sequence
  Description of Artificial Sequence: Synthetic oligonucleotide
  Sense strand starting at position 3200 of SEQ ID NO: 1888278
ugugcugagcgcuugcaaa

SEQ ID NO: 2523927 - RNA, 19 nt, Artificial Sequence
  Description of Artificial Sequence: Synthetic oligonucleotide
  Antisense strand to SEQ ID NO: 2523926
uuugcaagcgcucagcaca

SEQ ID NO: 2523928 - RNA, 19 nt, Artificial Sequence
  Description of Artificial Sequence: Synthetic oligonucleotide
  Sense strand starting at position 3361 of SEQ ID NO: 1888278
uucucucacggagaauguu

SEQ ID NO: 2523929 - RNA, 19 nt, Artificial Sequence
  Description of Artificial Sequence: Synthetic oligonucleotide
  Antisense strand to SEQ ID NO: 2523928
aacauucuccgugagagaa

SEQ ID NO: 2523930 - RNA, 19 nt, Artificial Sequence
  Description of Artificial Sequence: Synthetic oligonucleotide
  Sense strand starting at position 3370 of SEQ ID NO: 1888278
ggagaauguucccgcgcgu

SEQ ID NO: 2523931 - RNA, 19 nt, Artificial Sequence
  Description of Artificial Sequence: Synthetic oligonucleotide
  Antisense strand to SEQ ID NO: 2523930
acgcgcgggaacauucucc

SEQ ID NO: 2523932 - RNA, 19 nt, Artificial Sequence
  Description of Artificial Sequence: Synthetic oligonucleotide
  Sense strand starting at position 3371 of SEQ ID NO: 1888278
gagaauguucccgcgcguu

SEQ ID NO: 2523933 - RNA, 19 nt, Artificial Sequence
  Description of Artificial Sequence: Synthetic oligonucleotide
  Antisense strand to SEQ ID NO: 2523932
aacgcgcgggaacauucuc

SEQ ID NO: 2523934 - RNA, 19 nt, Artificial Sequence
  Description of Artificial Sequence: Synthetic oligonucleotide
  Sense strand starting at position 3383 of SEQ ID NO: 1888278
gcgcguucguugugcaacu

SEQ ID NO: 2523935 - RNA, 19 nt, Artificial Sequence
  Description of Artificial Sequence: Synthetic oligonucleotide
  Antisense strand to SEQ ID NO: 2523934
aguugcacaacgaacgcgc

SEQ ID NO: 2523936 - RNA, 19 nt, Artificial Sequence
  Description of Artificial Sequence: Synthetic oligonucleotide
  Sense strand starting at position 3384 of SEQ ID NO: 1888278
cgcguucguugugcaacua

SEQ ID NO: 2523937 - RNA, 19 nt, Artificial Sequence
  Description of Artificial Sequence: Synthetic oligonucleotide
  Antisense strand to SEQ ID NO: 2523936
uaguugcacaacgaacgcg

SEQ ID NO: 2523938 - RNA, 19 nt, Artificial Sequence
  Description of Artificial Sequence: Synthetic oligonucleotide
  Sense strand starting at position 3385 of SEQ ID NO: 1888278
gcguucguugugcaacuaa

SEQ ID NO: 2523939 - RNA, 19 nt, Artificial Sequence
  Description of Artificial Sequence: Synthetic oligonucleotide
  Antisense strand to SEQ ID NO: 2523938
uuaguugcacaacgaacgc

SEQ ID NO: 2523940 - RNA, 19 nt, Artificial Sequence
  Description of Artificial Sequence: Synthetic oligonucleotide
  Sense strand starting at position 3413 of SEQ ID NO: 1888278
ugaaacauccauugaggca

SEQ ID NO: 2523941 - RNA, 19 nt, Artificial Sequence
  Description of Artificial Sequence: Synthetic oligonucleotide
  Antisense strand to SEQ ID NO: 2523940
ugccucaauggauguuuca

SEQ ID NO: 2523942 - RNA, 19 nt, Artificial Sequence
  Description of Artificial Sequence: Synthetic oligonucleotide
  Sense strand starting at position 3492 of SEQ ID NO: 1888278
gcgaguucacugugaggac

SEQ ID NO: 2523943 - RNA, 19 nt, Artificial Sequence
  Description of Artificial Sequence: Synthetic oligonucleotide
  Antisense strand to SEQ ID NO: 2523942
guccucacagugaacucgc

SEQ ID NO: 2523944 - RNA, 19 nt, Artificial Sequence
  Description of Artificial Sequence: Synthetic oligonucleotide
  Sense strand starting at position 3571 of SEQ ID NO: 1888278
guggaagauucgggcgaca

SEQ ID NO: 2523945 - RNA, 19 nt, Artificial Sequence
  Description of Artificial Sequence: Synthetic oligonucleotide
  Antisense strand to SEQ ID NO: 2523944
ugucgcccgaaucuuccac

SEQ ID NO: 2523946 - RNA, 19 nt, Artificial Sequence
  Description of Artificial Sequence: Synthetic oligonucleotide
  Sense strand starting at position 3854 of SEQ ID NO: 1888278
gcuggucgucgguaggaga

SEQ ID NO: 2523947 - RNA, 19 nt, Artificial Sequence
  Description of Artificial Sequence: Synthetic oligonucleotide
  Antisense strand to SEQ ID NO: 2523946
ucuccuaccgacgaccagc

SEQ ID NO: 2523948 - RNA, 19 nt, Artificial Sequence
  Description of Artificial Sequence: Synthetic oligonucleotide
  Sense strand starting at position 3856 of SEQ ID NO: 1888278
uggucgucgguaggagaau

SEQ ID NO: 2523949 - RNA, 19 nt, Artificial Sequence
  Description of Artificial Sequence: Synthetic oligonucleotide
  Antisense strand to SEQ ID NO: 2523948
auucuccuaccgacgacca

SEQ ID NO: 2523950 - RNA, 19 nt, Artificial Sequence
  Description of Artificial Sequence: Synthetic oligonucleotide
  Sense strand starting at position 3865 of SEQ ID NO: 1888278
guaggagaaucagauuaga

SEQ ID NO: 2523951 - RNA, 19 nt, Artificial Sequence
  Description of Artificial Sequence: Synthetic oligonucleotide
  Antisense strand to SEQ ID NO: 2523950
ucuaaucugauucuccuac

SEQ ID NO: 2523952 - RNA, 19 nt, Artificial Sequence
  Description of Artificial Sequence: Synthetic oligonucleotide
  Sense strand starting at position 3870 of SEQ ID NO: 1888278
agaaucagauuagaaacau

SEQ ID NO: 2523953 - RNA, 19 nt, Artificial Sequence
  Description of Artificial Sequence: Synthetic oligonucleotide
  Antisense strand to SEQ ID NO: 2523952
auguuucuaaucugauucu

SEQ ID NO: 2523954 - RNA, 19 nt, Artificial Sequence
  Description of Artificial Sequence: Synthetic oligonucleotide
  Sense strand starting at position 3977 of SEQ ID NO: 1888278
gcuagaacgugaucuucuu

SEQ ID NO: 2523955 - RNA, 19 nt, Artificial Sequence
  Description of Artificial Sequence: Synthetic oligonucleotide
  Antisense strand to SEQ ID NO: 2523954
aagaagaucacguucuagc

SEQ ID NO: 2523956 - RNA, 19 nt, Artificial Sequence
  Description of Artificial Sequence: Synthetic oligonucleotide
  Sense strand starting at position 11 of SEQ ID NO: 1888279
gucccuaagaggugaaaug

SEQ ID NO: 2523957 - RNA, 19 nt, Artificial Sequence
  Description of Artificial Sequence: Synthetic oligonucleotide
  Antisense strand to SEQ ID NO: 2523956
cauuucaccucuuagggac

SEQ ID NO: 2523958 - RNA, 19 nt, Artificial Sequence
  Description of Artificial Sequence: Synthetic oligonucleotide
  Sense strand starting at position 205 of SEQ ID NO: 1888279
acgaucacugucugguaua

SEQ ID NO: 2523959 - RNA, 19 nt, Artificial Sequence
  Description of Artificial Sequence: Synthetic oligonucleotide
  Antisense strand to SEQ ID NO: 2523958
uauaccagacagugaucgu

SEQ ID NO: 2523960 - RNA, 19 nt, Artificial Sequence
  Description of Artificial Sequence: Synthetic oligonucleotide
  Sense strand starting at position 206 of SEQ ID NO: 1888279
cgaucacugucugguauag

SEQ ID NO: 2523961 - RNA, 19 nt, Artificial Sequence
  Description of Artificial Sequence: Synthetic oligonucleotide
  Antisense strand to SEQ ID NO: 2523960
cuauaccagacagugaucg

SEQ ID NO: 2523962 - RNA, 19 nt, Artificial Sequence
  Description of Artificial Sequence: Synthetic oligonucleotide
  Sense strand starting at position 208 of SEQ ID NO: 1888279
aucacugucugguauagau

SEQ ID NO: 2523963 - RNA, 19 nt, Artificial Sequence
  Description of Artificial Sequence: Synthetic oligonucleotide
  Antisense strand to SEQ ID NO: 2523962
aucuauaccagacagugau

SEQ ID NO: 2523964 - RNA, 19 nt, Artificial Sequence
  Description of Artificial Sequence: Synthetic oligonucleotide
  Sense strand starting at position 210 of SEQ ID NO: 1888279
cacugucugguauagauca

SEQ ID NO: 2523965 - RNA, 19 nt, Artificial Sequence
  Description of Artificial Sequence: Synthetic oligonucleotide
  Antisense strand to SEQ ID NO: 2523964
ugaucuauaccagacagug

SEQ ID NO: 2523966 - RNA, 19 nt, Artificial Sequence
  Description of Artificial Sequence: Synthetic oligonucleotide
  Sense strand starting at position 217 of SEQ ID NO: 1888279
ugguauagaucauccagac

SEQ ID NO: 2523967 - RNA, 19 nt, Artificial Sequence
  Description of Artificial Sequence: Synthetic oligonucleotide
  Antisense strand to SEQ ID NO: 2523966
gucuggaugaucuauacca

SEQ ID NO: 2523968 - RNA, 19 nt, Artificial Sequence
  Description of Artificial Sequence: Synthetic oligonucleotide
  Sense strand starting at position 358 of SEQ ID NO: 1888279
aacuaaagguugugguuaa

SEQ ID NO: 2523969 - RNA, 19 nt, Artificial Sequence
  Description of Artificial Sequence: Synthetic oligonucleotide
  Antisense strand to SEQ ID NO: 2523968
uuaaccacaaccuuuaguu

SEQ ID NO: 2523970 - RNA, 19 nt, Artificial Sequence
  Description of Artificial Sequence: Synthetic oligonucleotide
  Sense strand starting at position 359 of SEQ ID NO: 1888279
acuaaagguugugguuaau

SEQ ID NO: 2523971 - RNA, 19 nt, Artificial Sequence
  Description of Artificial Sequence: Synthetic oligonucleotide
  Antisense strand to SEQ ID NO: 2523970
auuaaccacaaccuuuagu

SEQ ID NO: 2523972 - RNA, 19 nt, Artificial Sequence
  Description of Artificial Sequence: Synthetic oligonucleotide
  Sense strand starting at position 362 of SEQ ID NO: 1888279
aaagguugugguuaauuaa

SEQ ID NO: 2523973 - RNA, 19 nt, Artificial Sequence
  Description of Artificial Sequence: Synthetic oligonucleotide
  Antisense strand to SEQ ID NO: 2523972
uuaauuaaccacaaccuuu

SEQ ID NO: 2523974 - RNA, 19 nt, Artificial Sequence
  Description of Artificial Sequence: Synthetic oligonucleotide
  Sense strand starting at position 467 of SEQ ID NO: 1888279
aauuuccugucugggaaau

SEQ ID NO: 2523975 - RNA, 19 nt, Artificial Sequence
  Description of Artificial Sequence: Synthetic oligonucleotide
  Antisense strand to SEQ ID NO: 2523974
auuucccagacaggaaauu

SEQ ID NO: 2523976 - RNA, 19 nt, Artificial Sequence
  Description of Artificial Sequence: Synthetic oligonucleotide
  Sense strand starting at position 535 of SEQ ID NO: 1888279
gaagaacagugaggcaauu

SEQ ID NO: 2523977 - RNA, 19 nt, Artificial Sequence
  Description of Artificial Sequence: Synthetic oligonucleotide
  Antisense strand to SEQ ID NO: 2523976
aauugccucacuguucuuc

SEQ ID NO: 2523978 - RNA, 19 nt, Artificial Sequence
  Description of Artificial Sequence: Synthetic oligonucleotide
  Sense strand starting at position 789 of SEQ ID NO: 1888279
gcccaaugcuucccaaugu

SEQ ID NO: 2523979 - RNA, 19 nt, Artificial Sequence
  Description of Artificial Sequence: Synthetic oligonucleotide
  Antisense strand to SEQ ID NO: 2523978
acauugggaagcauugggc

SEQ ID NO: 2523980 - RNA, 19 nt, Artificial Sequence
  Description of Artificial Sequence: Synthetic oligonucleotide
  Sense strand starting at position 798 of SEQ ID NO: 1888279
uucccaauguuagcguuaa

SEQ ID NO: 2523981 - RNA, 19 nt, Artificial Sequence
  Description of Artificial Sequence: Synthetic oligonucleotide
  Antisense strand to SEQ ID NO: 2523980
uuaacgcuaacauugggaa

SEQ ID NO: 2523982 - RNA, 19 nt, Artificial Sequence
  Description of Artificial Sequence: Synthetic oligonucleotide
  Sense strand starting at position 799 of SEQ ID NO: 1888279
ucccaauguuagcguuaaa

SEQ ID NO: 2523983 - RNA, 19 nt, Artificial Sequence
  Description of Artificial Sequence: Synthetic oligonucleotide
  Antisense strand to SEQ ID NO: 2523982
uuuaacgcuaacauuggga

SEQ ID NO: 2523984 - RNA, 19 nt, Artificial Sequence
  Description of Artificial Sequence: Synthetic oligonucleotide
  Sense strand starting at position 1106 of SEQ ID NO: 1888279
ggagacucaccgcagcaau

SEQ ID NO: 2523985 - RNA, 19 nt, Artificial Sequence
  Description of Artificial Sequence: Synthetic oligonucleotide
  Antisense strand to SEQ ID NO: 2523984
auugcugcggugagucucc

SEQ ID NO: 2523986 - RNA, 19 nt, Artificial Sequence
  Description of Artificial Sequence: Synthetic oligonucleotide
  Sense strand starting at position 2278 of SEQ ID NO: 1888279
ggcccuuggucgcugaauu

SEQ ID NO: 2523987 - RNA, 19 nt, Artificial Sequence
  Description of Artificial Sequence: Synthetic oligonucleotide
  Antisense strand to SEQ ID NO: 2523986
aauucagcgaccaagggcc

SEQ ID NO: 2523988 - RNA, 19 nt, Artificial Sequence
  Description of Artificial Sequence: Synthetic oligonucleotide
  Sense strand starting at position 2279 of SEQ ID NO: 1888279
gcccuuggucgcugaauua

SEQ ID NO: 2523989 - RNA, 19 nt, Artificial Sequence
  Description of Artificial Sequence: Synthetic oligonucleotide
  Antisense strand to SEQ ID NO: 2523988
uaauucagcgaccaagggc

SEQ ID NO: 2523990 - RNA, 19 nt, Artificial Sequence
  Description of Artificial Sequence: Synthetic oligonucleotide
  Sense strand starting at position 2289 of SEQ ID NO: 1888279
gcugaauuagaguggaagu

SEQ ID NO: 2523991 - RNA, 19 nt, Artificial Sequence
  Description of Artificial Sequence: Synthetic oligonucleotide
  Antisense strand to SEQ ID NO: 2523990
acuuccacucuaauucagc

SEQ ID NO: 2523992 - RNA, 19 nt, Artificial Sequence
  Description of Artificial Sequence: Synthetic oligonucleotide
  Sense strand starting at position 2290 of SEQ ID NO: 1888279
cugaauuagaguggaaguu

SEQ ID NO: 2523993 - RNA, 19 nt, Artificial Sequence
  Description of Artificial Sequence: Synthetic oligonucleotide
  Antisense strand to SEQ ID NO: 2523992
aacuuccacucuaauucag

SEQ ID NO: 2523994 - RNA, 19 nt, Artificial Sequence
  Description of Artificial Sequence: Synthetic oligonucleotide
  Sense strand starting at position 2467 of SEQ ID NO: 1888279
aaagauguauccgacaaac

SEQ ID NO: 2523995 - RNA, 19 nt, Artificial Sequence
  Description of Artificial Sequence: Synthetic oligonucleotide
  Antisense strand to SEQ ID NO: 2523994
guuugucggauacaucuuu

SEQ ID NO: 2523996 - RNA, 19 nt, Artificial Sequence
  Description of Artificial Sequence: Synthetic oligonucleotide
  Sense strand starting at position 3143 of SEQ ID NO: 1888279
cuuuguuucugcguggaac

SEQ ID NO: 2523997 - RNA, 19 nt, Artificial Sequence
  Description of Artificial Sequence: Synthetic oligonucleotide
  Antisense strand to SEQ ID NO: 2523996
guuccacgcagaaacaaag

SEQ ID NO: 2523998 - RNA, 19 nt, Artificial Sequence
  Description of Artificial Sequence: Synthetic oligonucleotide
  Sense strand starting at position 3144 of SEQ ID NO: 1888279
uuuguuucugcguggaaca

SEQ ID NO: 2523999 - RNA, 19 nt, Artificial Sequence
  Description of Artificial Sequence: Synthetic oligonucleotide
  Antisense strand to SEQ ID NO: 2523998
uguuccacgcagaaacaaa

SEQ ID NO: 2524000 - RNA, 19 nt, Artificial Sequence
  Description of Artificial Sequence: Synthetic oligonucleotide
  Sense strand starting at position 3145 of SEQ ID NO: 1888279
uuguuucugcguggaacaa

SEQ ID NO: 2524001 - RNA, 19 nt, Artificial Sequence
  Description of Artificial Sequence: Synthetic oligonucleotide
  Antisense strand to SEQ ID NO: 2524000
uuguuccacgcagaaacaa

SEQ ID NO: 2524002 - RNA, 19 nt, Artificial Sequence
  Description of Artificial Sequence: Synthetic oligonucleotide
  Sense strand starting at position 3146 of SEQ ID NO: 1888279
uguuucugcguggaacaaa

SEQ ID NO: 2524003 - RNA, 19 nt, Artificial Sequence
  Description of Artificial Sequence: Synthetic oligonucleotide
  Antisense strand to SEQ ID NO: 2524002
uuuguuccacgcagaaaca

SEQ ID NO: 2524004 - RNA, 19 nt, Artificial Sequence
  Description of Artificial Sequence: Synthetic oligonucleotide
  Sense strand starting at position 3188 of SEQ ID NO: 1888279
gaggguuucccgugugcug

SEQ ID NO: 2524005 - RNA, 19 nt, Artificial Sequence
  Description of Artificial Sequence: Synthetic oligonucleotide
  Antisense strand to SEQ ID NO: 2524004
cagcacacgggaaacccuc

SEQ ID NO: 2524006 - RNA, 19 nt, Artificial Sequence
  Description of Artificial Sequence: Synthetic oligonucleotide
  Sense strand starting at position 3200 of SEQ ID NO: 1888279
ugugcugagcgcuugcaaa

SEQ ID NO: 2524007 - RNA, 19 nt, Artificial Sequence
  Description of Artificial Sequence: Synthetic oligonucleotide
  Antisense strand to SEQ ID NO: 2524006
uuugcaagcgcucagcaca

SEQ ID NO: 2524008 - RNA, 19 nt, Artificial Sequence
  Description of Artificial Sequence: Synthetic oligonucleotide
  Sense strand starting at position 3361 of SEQ ID NO: 1888279
uucucucacggagaauguu

SEQ ID NO: 2524009 - RNA, 19 nt, Artificial Sequence
  Description of Artificial Sequence: Synthetic oligonucleotide
  Antisense strand to SEQ ID NO: 2524008
aacauucuccgugagagaa

SEQ ID NO: 2524010 - RNA, 19 nt, Artificial Sequence
  Description of Artificial Sequence: Synthetic oligonucleotide
  Sense strand starting at position 3370 of SEQ ID NO: 1888279
ggagaauguucccgcgcgu

SEQ ID NO: 2524011 - RNA, 19 nt, Artificial Sequence
  Description of Artificial Sequence: Synthetic oligonucleotide
  Antisense strand to SEQ ID NO: 2524010
acgcgcgggaacauucucc

SEQ ID NO: 2524012 - RNA, 19 nt, Artificial Sequence
  Description of Artificial Sequence: Synthetic oligonucleotide
  Sense strand starting at position 3371 of SEQ ID NO: 1888279
gagaauguucccgcgcguu

SEQ ID NO: 2524013 - RNA, 19 nt, Artificial Sequence
  Description of Artificial Sequence: Synthetic oligonucleotide
  Antisense strand to SEQ ID NO: 2524012
aacgcgcgggaacauucuc

SEQ ID NO: 2524014 - RNA, 19 nt, Artificial Sequence
  Description of Artificial Sequence: Synthetic oligonucleotide
  Sense strand starting at position 3383 of SEQ ID NO: 1888279
gcgcguucguugugcaacu

SEQ ID NO: 2524015 - RNA, 19 nt, Artificial Sequence
  Description of Artificial Sequence: Synthetic oligonucleotide
  Antisense strand to SEQ ID NO: 2524014
aguugcacaacgaacgcgc

SEQ ID NO: 2524016 - RNA, 19 nt, Artificial Sequence
  Description of Artificial Sequence: Synthetic oligonucleotide
  Sense strand starting at position 3384 of SEQ ID NO: 1888279
cgcguucguugugcaacua

SEQ ID NO: 2524017 - RNA, 19 nt, Artificial Sequence
  Description of Artificial Sequence: Synthetic oligonucleotide
  Antisense strand to SEQ ID NO: 2524016
uaguugcacaacgaacgcg

SEQ ID NO: 2524018 - RNA, 19 nt, Artificial Sequence
  Description of Artificial Sequence: Synthetic oligonucleotide
  Sense strand starting at position 3385 of SEQ ID NO: 1888279
gcguucguugugcaacuaa

SEQ ID NO: 2524019 - RNA, 19 nt, Artificial Sequence
  Description of Artificial Sequence: Synthetic oligonucleotide
  Antisense strand to SEQ ID NO: 2524018
uuaguugcacaacgaacgc

SEQ ID NO: 2524020 - RNA, 19 nt, Artificial Sequence
  Description of Artificial Sequence: Synthetic oligonucleotide
  Sense strand starting at position 3413 of SEQ ID NO: 1888279
ugaaacauccauugaggca

SEQ ID NO: 2524021 - RNA, 19 nt, Artificial Sequence
  Description of Artificial Sequence: Synthetic oligonucleotide
  Antisense strand to SEQ ID NO: 2524020
ugccucaauggauguuuca

SEQ ID NO: 2524022 - RNA, 19 nt, Artificial Sequence
  Description of Artificial Sequence: Synthetic oligonucleotide
  Sense strand starting at position 3492 of SEQ ID NO: 1888279
gcgaguucacugugaggac

SEQ ID NO: 2524023 - RNA, 19 nt, Artificial Sequence
  Description of Artificial Sequence: Synthetic oligonucleotide
  Antisense strand to SEQ ID NO: 2524022
guccucacagugaacucgc

SEQ ID NO: 2524024 - RNA, 19 nt, Artificial Sequence
  Description of Artificial Sequence: Synthetic oligonucleotide
  Sense strand starting at position 3571 of SEQ ID NO: 1888279
guggaagauucgggcgaca

SEQ ID NO: 2524025 - RNA, 19 nt, Artificial Sequence
  Description of Artificial Sequence: Synthetic oligonucleotide
  Antisense strand to SEQ ID NO: 2524024
ugucgcccgaaucuuccac

SEQ ID NO: 2524026 - RNA, 19 nt, Artificial Sequence
  Description of Artificial Sequence: Synthetic oligonucleotide
  Sense strand starting at position 3854 of SEQ ID NO: 1888279
gcuggucgucgguaggaga

SEQ ID NO: 2524027 - RNA, 19 nt, Artificial Sequence
  Description of Artificial Sequence: Synthetic oligonucleotide
  Antisense strand to SEQ ID NO: 2524026
ucuccuaccgacgaccagc

SEQ ID NO: 2524028 - RNA, 19 nt, Artificial Sequence
  Description of Artificial Sequence: Synthetic oligonucleotide
  Sense strand starting at position 3856 of SEQ ID NO: 1888279
uggucgucgguaggagaau

SEQ ID NO: 2524029 - RNA, 19 nt, Artificial Sequence
  Description of Artificial Sequence: Synthetic oligonucleotide
  Antisense strand to SEQ ID NO: 2524028
auucuccuaccgacgacca

SEQ ID NO: 2524030 - RNA, 19 nt, Artificial Sequence
  Description of Artificial Sequence: Synthetic oligonucleotide
  Sense strand starting at position 3865 of SEQ ID NO: 1888279
guaggagaaucagauuaga

SEQ ID NO: 2524031 - RNA, 19 nt, Artificial Sequence
  Description of Artificial Sequence: Synthetic oligonucleotide
  Antisense strand to SEQ ID NO: 2524030
ucuaaucugauucuccuac

SEQ ID NO: 2524032 - RNA, 19 nt, Artificial Sequence
  Description of Artificial Sequence: Synthetic oligonucleotide
  Sense strand starting at position 3870 of SEQ ID NO: 1888279
agaaucagauuagaaacau

SEQ ID NO: 2524033 - RNA, 19 nt, Artificial Sequence
  Description of Artificial Sequence: Synthetic oligonucleotide
  Antisense strand to SEQ ID NO: 2524032
auguuucuaaucugauucu

SEQ ID NO: 2524034 - RNA, 19 nt, Artificial Sequence
  Description of Artificial Sequence: Synthetic oligonucleotide
  Sense strand starting at position 3977 of SEQ ID NO: 1888279
gcuagaacgugaucuucuu

SEQ ID NO: 2524035 - RNA, 19 nt, Artificial Sequence
  Description of Artificial Sequence: Synthetic oligonucleotide
  Antisense strand to SEQ ID NO: 2524034
aagaagaucacguucuagc

SEQ ID NO: 2524036 - RNA, 19 nt, Artificial Sequence
  Description of Artificial Sequence: Synthetic oligonucleotide
  Sense strand starting at position 568 of SEQ ID NO: 1888280
ugagaaauucugggcaaau

SEQ ID NO: 2524037 - RNA, 19 nt, Artificial Sequence
  Description of Artificial Sequence: Synthetic oligonucleotide
  Antisense strand to SEQ ID NO: 2524036
auuugcccagaauuucuca

SEQ ID NO: 2524038 - RNA, 19 nt, Artificial Sequence
  Description of Artificial Sequence: Synthetic oligonucleotide
  Sense strand starting at position 630 of SEQ ID NO: 1888280
acuuguuuauugcuuaaga

SEQ ID NO: 2524039 - RNA, 19 nt, Artificial Sequence
  Description of Artificial Sequence: Synthetic oligonucleotide
  Antisense strand to SEQ ID NO: 2524038
ucuuaagcaauaaacaagu

SEQ ID NO: 2524040 - RNA, 19 nt, Artificial Sequence
  Description of Artificial Sequence: Synthetic oligonucleotide
  Sense strand starting at position 632 of SEQ ID NO: 1888280
uuguuuauugcuuaagacu

SEQ ID NO: 2524041 - RNA, 19 nt, Artificial Sequence
  Description of Artificial Sequence: Synthetic oligonucleotide
  Antisense strand to SEQ ID NO: 2524040
agucuuaagcaauaaacaa

SEQ ID NO: 2524042 - RNA, 19 nt, Artificial Sequence
  Description of Artificial Sequence: Synthetic oligonucleotide
  Sense strand starting at position 714 of SEQ ID NO: 1888280
acccaucaagcuggauauu

SEQ ID NO: 2524043 - RNA, 19 nt, Artificial Sequence
  Description of Artificial Sequence: Synthetic oligonucleotide
  Antisense strand to SEQ ID NO: 2524042
aauauccagcuugaugggu

SEQ ID NO: 2524044 - RNA, 19 nt, Artificial Sequence
  Description of Artificial Sequence: Synthetic oligonucleotide
  Sense strand starting at position 745 of SEQ ID NO: 1888280
acuacuguguaucuaggaa

SEQ ID NO: 2524045 - RNA, 19 nt, Artificial Sequence
  Description of Artificial Sequence: Synthetic oligonucleotide
  Antisense strand to SEQ ID NO: 2524044
uuccuagauacacaguagu

SEQ ID NO: 2524046 - RNA, 19 nt, Artificial Sequence
  Description of Artificial Sequence: Synthetic oligonucleotide
  Sense strand starting at position 845 of SEQ ID NO: 1888280
cccgauaucccaggccaaa

SEQ ID NO: 2524047 - RNA, 19 nt, Artificial Sequence
  Description of Artificial Sequence: Synthetic oligonucleotide
  Antisense strand to SEQ ID NO: 2524046
uuuggccugggauaucggg

SEQ ID NO: 2524048 - RNA, 19 nt, Artificial Sequence
  Description of Artificial Sequence: Synthetic oligonucleotide
  Sense strand starting at position 1002 of SEQ ID NO: 1888280
ggaagccaucuuuggaguu

SEQ ID NO: 2524049 - RNA, 19 nt, Artificial Sequence
  Description of Artificial Sequence: Synthetic oligonucleotide
  Antisense strand to SEQ ID NO: 2524048
aacuccaaagauggcuucc

SEQ ID NO: 2524050 - RNA, 19 nt, Artificial Sequence
  Description of Artificial Sequence: Synthetic oligonucleotide
  Sense strand starting at position 1112 of SEQ ID NO: 1888280
aguuguuaaggagagguca

SEQ ID NO: 2524051 - RNA, 19 nt, Artificial Sequence
  Description of Artificial Sequence: Synthetic oligonucleotide
  Antisense strand to SEQ ID NO: 2524050
ugaccucuccuuaacaacu

SEQ ID NO: 2524052 - RNA, 19 nt, Artificial Sequence
  Description of Artificial Sequence: Synthetic oligonucleotide
  Sense strand starting at position 1114 of SEQ ID NO: 1888280
uuguuaaggagaggucauu

SEQ ID NO: 2524053 - RNA, 19 nt, Artificial Sequence
  Description of Artificial Sequence: Synthetic oligonucleotide
  Antisense strand to SEQ ID NO: 2524052
aaugaccucuccuuaacaa

SEQ ID NO: 2524054 - RNA, 19 nt, Artificial Sequence
  Description of Artificial Sequence: Synthetic oligonucleotide
  Sense strand starting at position 1177 of SEQ ID NO: 1888280
agucauaguccaggaguga

SEQ ID NO: 2524055 - RNA, 19 nt, Artificial Sequence
  Description of Artificial Sequence: Synthetic oligonucleotide
  Antisense strand to SEQ ID NO: 2524054
ucacuccuggacuaugacu

SEQ ID NO: 2524056 - RNA, 19 nt, Artificial Sequence
  Description of Artificial Sequence: Synthetic oligonucleotide
  Sense strand starting at position 1178 of SEQ ID NO: 1888280
gucauaguccaggagugaa

SEQ ID NO: 2524057 - RNA, 19 nt, Artificial Sequence
  Description of Artificial Sequence: Synthetic oligonucleotide
  Antisense strand to SEQ ID NO: 2524056
uucacuccuggacuaugac

SEQ ID NO: 2524058 - RNA, 19 nt, Artificial Sequence
  Description of Artificial Sequence: Synthetic oligonucleotide
  Sense strand starting at position 1241 of SEQ ID NO: 1888280
gaauacuugcauuggucaa

SEQ ID NO: 2524059 - RNA, 19 nt, Artificial Sequence
  Description of Artificial Sequence: Synthetic oligonucleotide
  Antisense strand to SEQ ID NO: 2524058
uugaccaaugcaaguauuc

SEQ ID NO: 2524060 - RNA, 19 nt, Artificial Sequence
  Description of Artificial Sequence: Synthetic oligonucleotide
  Sense strand starting at position 1245 of SEQ ID NO: 1888280
acuugcauuggucaaucuu

SEQ ID NO: 2524061 - RNA, 19 nt, Artificial Sequence
  Description of Artificial Sequence: Synthetic oligonucleotide
  Antisense strand to SEQ ID NO: 2524060
aagauugaccaaugcaagu

SEQ ID NO: 2524062 - RNA, 19 nt, Artificial Sequence
  Description of Artificial Sequence: Synthetic oligonucleotide
  Sense strand starting at position 1608 of SEQ ID NO: 1888280
ccaguucuucuggaguaug

SEQ ID NO: 2524063 - RNA, 19 nt, Artificial Sequence
  Description of Artificial Sequence: Synthetic oligonucleotide
  Antisense strand to SEQ ID NO: 2524062
cauacuccagaagaacugg

SEQ ID NO: 2524064 - RNA, 19 nt, Artificial Sequence
  Description of Artificial Sequence: Synthetic oligonucleotide
  Sense strand starting at position 1611 of SEQ ID NO: 1888280
guucuucuggaguaugauu

SEQ ID NO: 2524065 - RNA, 19 nt, Artificial Sequence
  Description of Artificial Sequence: Synthetic oligonucleotide
  Antisense strand to SEQ ID NO: 2524064
aaucauacuccagaagaac

SEQ ID NO: 2524066 - RNA, 19 nt, Artificial Sequence
  Description of Artificial Sequence: Synthetic oligonucleotide
  Sense strand starting at position 1613 of SEQ ID NO: 1888280
ucuucuggaguaugauuau

SEQ ID NO: 2524067 - RNA, 19 nt, Artificial Sequence
  Description of Artificial Sequence: Synthetic oligonucleotide
  Antisense strand to SEQ ID NO: 2524066
auaaucauacuccagaaga

SEQ ID NO: 2524068 - RNA, 19 nt, Artificial Sequence
  Description of Artificial Sequence: Synthetic oligonucleotide
  Sense strand starting at position 1685 of SEQ ID NO: 1888280
ugucucugacaguacgauu

SEQ ID NO: 2524069 - RNA, 19 nt, Artificial Sequence
  Description of Artificial Sequence: Synthetic oligonucleotide
  Antisense strand to SEQ ID NO: 2524068
aaucguacugucagagaca

SEQ ID NO: 2524070 - RNA, 19 nt, Artificial Sequence
  Description of Artificial Sequence: Synthetic oligonucleotide
  Sense strand starting at position 1694 of SEQ ID NO: 1888280
caguacgauuucuugaguu

SEQ ID NO: 2524071 - RNA, 19 nt, Artificial Sequence
  Description of Artificial Sequence: Synthetic oligonucleotide
  Antisense strand to SEQ ID NO: 2524070
aacucaagaaaucguacug

SEQ ID NO: 2524072 - RNA, 19 nt, Artificial Sequence
  Description of Artificial Sequence: Synthetic oligonucleotide
  Sense strand starting at position 1698 of SEQ ID NO: 1888280
acgauuucuugaguuucuu

SEQ ID NO: 2524073 - RNA, 19 nt, Artificial Sequence
  Description of Artificial Sequence: Synthetic oligonucleotide
  Antisense strand to SEQ ID NO: 2524072
aagaaacucaagaaaucgu

SEQ ID NO: 2524074 - RNA, 19 nt, Artificial Sequence
  Description of Artificial Sequence: Synthetic oligonucleotide
  Sense strand starting at position 1702 of SEQ ID NO: 1888280
uuucuugaguuucuugaga

SEQ ID NO: 2524075 - RNA, 19 nt, Artificial Sequence
  Description of Artificial Sequence: Synthetic oligonucleotide
  Antisense strand to SEQ ID NO: 2524074
ucucaagaaacucaagaaa

SEQ ID NO: 2524076 - RNA, 19 nt, Artificial Sequence
  Description of Artificial Sequence: Synthetic oligonucleotide
  Sense strand starting at position 1764 of SEQ ID NO: 1888280
guccaauaacccugaguuu

SEQ ID NO: 2524077 - RNA, 19 nt, Artificial Sequence
  Description of Artificial Sequence: Synthetic oligonucleotide
  Antisense strand to SEQ ID NO: 2524076
aaacucaggguuauuggac

SEQ ID NO: 2524078 - RNA, 19 nt, Artificial Sequence
  Description of Artificial Sequence: Synthetic oligonucleotide
  Sense strand starting at position 1808 of SEQ ID NO: 1888280
cccaaaugcucaguugaag

SEQ ID NO: 2524079 - RNA, 19 nt, Artificial Sequence
  Description of Artificial Sequence: Synthetic oligonucleotide
  Antisense strand to SEQ ID NO: 2524078
cuucaacugagcauuuggg

SEQ ID NO: 2524080 - RNA, 19 nt, Artificial Sequence
  Description of Artificial Sequence: Synthetic oligonucleotide
  Sense strand starting at position 1836 of SEQ ID NO: 1888280
ccaggucagacauggugau

SEQ ID NO: 2524081 - RNA, 19 nt, Artificial Sequence
  Description of Artificial Sequence: Synthetic oligonucleotide
  Antisense strand to SEQ ID NO: 2524080
aucaccaugucugaccugg

SEQ ID NO: 2524082 - RNA, 19 nt, Artificial Sequence
  Description of Artificial Sequence: Synthetic oligonucleotide
  Sense strand starting at position 1908 of SEQ ID NO: 1888280
cucgcucuggcguuuacaa

SEQ ID NO: 2524083 - RNA, 19 nt, Artificial Sequence
  Description of Artificial Sequence: Synthetic oligonucleotide
  Antisense strand to SEQ ID NO: 2524082
uuguaaacgccagagcgag

SEQ ID NO: 2524084 - RNA, 19 nt, Artificial Sequence
  Description of Artificial Sequence: Synthetic oligonucleotide
  Sense strand starting at position 1909 of SEQ ID NO: 1888280
ucgcucuggcguuuacaau

SEQ ID NO: 2524085 - RNA, 19 nt, Artificial Sequence
  Description of Artificial Sequence: Synthetic oligonucleotide
  Antisense strand to SEQ ID NO: 2524084
auuguaaacgccagagcga

SEQ ID NO: 2524086 - RNA, 19 nt, Artificial Sequence
  Description of Artificial Sequence: Synthetic oligonucleotide
  Sense strand starting at position 2147 of SEQ ID NO: 1888280
aagagaacuuggguucucu

SEQ ID NO: 2524087 - RNA, 19 nt, Artificial Sequence
  Description of Artificial Sequence: Synthetic oligonucleotide
  Antisense strand to SEQ ID NO: 2524086
agagaacccaaguucucuu

SEQ ID NO: 2524088 - RNA, 19 nt, Artificial Sequence
  Description of Artificial Sequence: Synthetic oligonucleotide
  Sense strand starting at position 2415 of SEQ ID NO: 1888280
gcgaauccauucuccauuu

SEQ ID NO: 2524089 - RNA, 19 nt, Artificial Sequence
  Description of Artificial Sequence: Synthetic oligonucleotide
  Antisense strand to SEQ ID NO: 2524088
aaauggagaauggauucgc

SEQ ID NO: 2524090 - RNA, 19 nt, Artificial Sequence
  Description of Artificial Sequence: Synthetic oligonucleotide
  Sense strand starting at position 3154 of SEQ ID NO: 1888280
auuggauguuucccucauu

SEQ ID NO: 2524091 - RNA, 19 nt, Artificial Sequence
  Description of Artificial Sequence: Synthetic oligonucleotide
  Antisense strand to SEQ ID NO: 2524090
aaugagggaaacauccaau

SEQ ID NO: 2524092 - RNA, 19 nt, Artificial Sequence
  Description of Artificial Sequence: Synthetic oligonucleotide
  Sense strand starting at position 3155 of SEQ ID NO: 1888280
uuggauguuucccucauua

SEQ ID NO: 2524093 - RNA, 19 nt, Artificial Sequence
  Description of Artificial Sequence: Synthetic oligonucleotide
  Antisense strand to SEQ ID NO: 2524092
uaaugagggaaacauccaa

SEQ ID NO: 2524094 - RNA, 19 nt, Artificial Sequence
  Description of Artificial Sequence: Synthetic oligonucleotide
  Sense strand starting at position 3157 of SEQ ID NO: 1888280
ggauguuucccucauuagg

SEQ ID NO: 2524095 - RNA, 19 nt, Artificial Sequence
  Description of Artificial Sequence: Synthetic oligonucleotide
  Antisense strand to SEQ ID NO: 2524094
ccuaaugagggaaacaucc

SEQ ID NO: 2524096 - RNA, 19 nt, Artificial Sequence
  Description of Artificial Sequence: Synthetic oligonucleotide
  Sense strand starting at position 3159 of SEQ ID NO: 1888280
auguuucccucauuaggau

SEQ ID NO: 2524097 - RNA, 19 nt, Artificial Sequence
  Description of Artificial Sequence: Synthetic oligonucleotide
  Antisense strand to SEQ ID NO: 2524096
auccuaaugagggaaacau

SEQ ID NO: 2524098 - RNA, 19 nt, Artificial Sequence
  Description of Artificial Sequence: Synthetic oligonucleotide
  Sense strand starting at position 3160 of SEQ ID NO: 1888280
uguuucccucauuaggaua

SEQ ID NO: 2524099 - RNA, 19 nt, Artificial Sequence
  Description of Artificial Sequence: Synthetic oligonucleotide
  Antisense strand to SEQ ID NO: 2524098
uauccuaaugagggaaaca

SEQ ID NO: 2524100 - RNA, 19 nt, Artificial Sequence
  Description of Artificial Sequence: Synthetic oligonucleotide
  Sense strand starting at position 3194 of SEQ ID NO: 1888280
gcaagaacugucuaccuua

SEQ ID NO: 2524101 - RNA, 19 nt, Artificial Sequence
  Description of Artificial Sequence: Synthetic oligonucleotide
  Antisense strand to SEQ ID NO: 2524100
uaagguagacaguucuugc

SEQ ID NO: 2524102 - RNA, 19 nt, Artificial Sequence
  Description of Artificial Sequence: Synthetic oligonucleotide
  Sense strand starting at position 3223 of SEQ ID NO: 1888280
cacuacuucggguguauaa

SEQ ID NO: 2524103 - RNA, 19 nt, Artificial Sequence
  Description of Artificial Sequence: Synthetic oligonucleotide
  Antisense strand to SEQ ID NO: 2524102
uuauacacccgaaguagug

SEQ ID NO: 2524104 - RNA, 19 nt, Artificial Sequence
  Description of Artificial Sequence: Synthetic oligonucleotide
  Sense strand starting at position 3371 of SEQ ID NO: 1888280
gcggcucagacccagauau

SEQ ID NO: 2524105 - RNA, 19 nt, Artificial Sequence
  Description of Artificial Sequence: Synthetic oligonucleotide
  Antisense strand to SEQ ID NO: 2524104
auaucugggucugagccgc

SEQ ID NO: 2524106 - RNA, 19 nt, Artificial Sequence
  Description of Artificial Sequence: Synthetic oligonucleotide
  Sense strand starting at position 3453 of SEQ ID NO: 1888280
uugccuuuaccuugagaga

SEQ ID NO: 2524107 - RNA, 19 nt, Artificial Sequence
  Description of Artificial Sequence: Synthetic oligonucleotide
  Antisense strand to SEQ ID NO: 2524106
ucucucaagguaaaggcaa

SEQ ID NO: 2524108 - RNA, 19 nt, Artificial Sequence
  Description of Artificial Sequence: Synthetic oligonucleotide
  Sense strand starting at position 3454 of SEQ ID NO: 1888280
ugccuuuaccuugagagag

SEQ ID NO: 2524109 - RNA, 19 nt, Artificial Sequence
  Description of Artificial Sequence: Synthetic oligonucleotide
  Antisense strand to SEQ ID NO: 2524108
cucucucaagguaaaggca

SEQ ID NO: 2524110 - RNA, 19 nt, Artificial Sequence
  Description of Artificial Sequence: Synthetic oligonucleotide
  Sense strand starting at position 3631 of SEQ ID NO: 1888280
ccacaucucuuuccagagu

SEQ ID NO: 2524111 - RNA, 19 nt, Artificial Sequence
  Description of Artificial Sequence: Synthetic oligonucleotide
  Antisense strand to SEQ ID NO: 2524110
acucuggaaagagaugugg

SEQ ID NO: 2524112 - RNA, 19 nt, Artificial Sequence
  Description of Artificial Sequence: Synthetic oligonucleotide
  Sense strand starting at position 3640 of SEQ ID NO: 1888280
uuuccagaguucuccaaag

SEQ ID NO: 2524113 - RNA, 19 nt, Artificial Sequence
  Description of Artificial Sequence: Synthetic oligonucleotide
  Antisense strand to SEQ ID NO: 2524112
cuuuggagaacucuggaaa

SEQ ID NO: 2524114 - RNA, 19 nt, Artificial Sequence
  Description of Artificial Sequence: Synthetic oligonucleotide
  Sense strand starting at position 3827 of SEQ ID NO: 1888280
ggaccucucccagaugcua

SEQ ID NO: 2524115 - RNA, 19 nt, Artificial Sequence
  Description of Artificial Sequence: Synthetic oligonucleotide
  Antisense strand to SEQ ID NO: 2524114
uagcaucugggagaggucc

SEQ ID NO: 2524116 - RNA, 19 nt, Artificial Sequence
  Description of Artificial Sequence: Synthetic oligonucleotide
  Sense strand starting at position 14 of SEQ ID NO: 1888281
aaaggaaagguuugcugau

SEQ ID NO: 2524117 - RNA, 19 nt, Artificial Sequence
  Description of Artificial Sequence: Synthetic oligonucleotide
  Antisense strand to SEQ ID NO: 2524116
aucagcaaaccuuuccuuu

SEQ ID NO: 2524118 - RNA, 19 nt, Artificial Sequence
  Description of Artificial Sequence: Synthetic oligonucleotide
  Sense strand starting at position 24 of SEQ ID NO: 1888281
uuugcugaucccuaggcua

SEQ ID NO: 2524119 - RNA, 19 nt, Artificial Sequence
  Description of Artificial Sequence: Synthetic oligonucleotide
  Antisense strand to SEQ ID NO: 2524118
uagccuagggaucagcaaa

SEQ ID NO: 2524120 - RNA, 19 nt, Artificial Sequence
  Description of Artificial Sequence: Synthetic oligonucleotide
  Sense strand starting at position 26 of SEQ ID NO: 1888281
ugcugaucccuaggcuaga

SEQ ID NO: 2524121 - RNA, 19 nt, Artificial Sequence
  Description of Artificial Sequence: Synthetic oligonucleotide
  Antisense strand to SEQ ID NO: 2524120
ucuagccuagggaucagca

SEQ ID NO: 2524122 - RNA, 19 nt, Artificial Sequence
  Description of Artificial Sequence: Synthetic oligonucleotide
  Sense strand starting at position 27 of SEQ ID NO: 1888281
gcugaucccuaggcuagaa

SEQ ID NO: 2524123 - RNA, 19 nt, Artificial Sequence
  Description of Artificial Sequence: Synthetic oligonucleotide
  Antisense strand to SEQ ID NO: 2524122
uucuagccuagggaucagc

SEQ ID NO: 2524124 - RNA, 19 nt, Artificial Sequence
  Description of Artificial Sequence: Synthetic oligonucleotide
  Sense strand starting at position 47 of SEQ ID NO: 1888281
ucagguugugugcaucaua

SEQ ID NO: 2524125 - RNA, 19 nt, Artificial Sequence
  Description of Artificial Sequence: Synthetic oligonucleotide
  Antisense strand to SEQ ID NO: 2524124
uaugaugcacacaaccuga

SEQ ID NO: 2524126 - RNA, 19 nt, Artificial Sequence
  Description of Artificial Sequence: Synthetic oligonucleotide
  Sense strand starting at position 95 of SEQ ID NO: 1888281
cagcucuucccaggagcau

SEQ ID NO: 2524127 - RNA, 19 nt, Artificial Sequence
  Description of Artificial Sequence: Synthetic oligonucleotide
  Antisense strand to SEQ ID NO: 2524126
augcuccugggaagagcug

SEQ ID NO: 2524128 - RNA, 19 nt, Artificial Sequence
  Description of Artificial Sequence: Synthetic oligonucleotide
  Sense strand starting at position 96 of SEQ ID NO: 1888281
agcucuucccaggagcaua

SEQ ID NO: 2524129 - RNA, 19 nt, Artificial Sequence
  Description of Artificial Sequence: Synthetic oligonucleotide
  Antisense strand to SEQ ID NO: 2524128
uaugcuccugggaagagcu

SEQ ID NO: 2524130 - RNA, 19 nt, Artificial Sequence
  Description of Artificial Sequence: Synthetic oligonucleotide
  Sense strand starting at position 113 of SEQ ID NO: 1888281
uagagucuccuacgagacu

SEQ ID NO: 2524131 - RNA, 19 nt, Artificial Sequence
  Description of Artificial Sequence: Synthetic oligonucleotide
  Antisense strand to SEQ ID NO: 2524130
agucucguaggagacucua

SEQ ID NO: 2524132 - RNA, 19 nt, Artificial Sequence
  Description of Artificial Sequence: Synthetic oligonucleotide
  Sense strand starting at position 912 of SEQ ID NO: 1888281
uuauauguuuaggccuaga

SEQ ID NO: 2524133 - RNA, 19 nt, Artificial Sequence
  Description of Artificial Sequence: Synthetic oligonucleotide
  Antisense strand to SEQ ID NO: 2524132
ucuaggccuaaacauauaa

SEQ ID NO: 2524134 - RNA, 19 nt, Artificial Sequence
  Description of Artificial Sequence: Synthetic oligonucleotide
  Sense strand starting at position 917 of SEQ ID NO: 1888281
uguuuaggccuagacugaa

SEQ ID NO: 2524135 - RNA, 19 nt, Artificial Sequence
  Description of Artificial Sequence: Synthetic oligonucleotide
  Antisense strand to SEQ ID NO: 2524134
uucagucuaggccuaaaca

SEQ ID NO: 2524136 - RNA, 19 nt, Artificial Sequence
  Description of Artificial Sequence: Synthetic oligonucleotide
  Sense strand starting at position 1161 of SEQ ID NO: 1888281
cgauguggcaccugagaac

SEQ ID NO: 2524137 - RNA, 19 nt, Artificial Sequence
  Description of Artificial Sequence: Synthetic oligonucleotide
  Antisense strand to SEQ ID NO: 2524136
guucucaggugccacaucg

SEQ ID NO: 2524138 - RNA, 19 nt, Artificial Sequence
  Description of Artificial Sequence: Synthetic oligonucleotide
  Sense strand starting at position 1198 of SEQ ID NO: 1888281
gucacuuucccagaguauc

SEQ ID NO: 2524139 - RNA, 19 nt, Artificial Sequence
  Description of Artificial Sequence: Synthetic oligonucleotide
  Antisense strand to SEQ ID NO: 2524138
gauacucugggaaagugac

SEQ ID NO: 2524140 - RNA, 19 nt, Artificial Sequence
  Description of Artificial Sequence: Synthetic oligonucleotide
  Sense strand starting at position 1206 of SEQ ID NO: 1888281
cccagaguaucagaaagga

SEQ ID NO: 2524141 - RNA, 19 nt, Artificial Sequence
  Description of Artificial Sequence: Synthetic oligonucleotide
  Antisense strand to SEQ ID NO: 2524140
uccuuucugauacucuggg

SEQ ID NO: 2524142 - RNA, 19 nt, Artificial Sequence
  Description of Artificial Sequence: Synthetic oligonucleotide
  Sense strand starting at position 1228 of SEQ ID NO: 1888281
guaucagaguugccuggaa

SEQ ID NO: 2524143 - RNA, 19 nt, Artificial Sequence
  Description of Artificial Sequence: Synthetic oligonucleotide
  Antisense strand to SEQ ID NO: 2524142
uuccaggcaacucugauac

SEQ ID NO: 2524144 - RNA, 19 nt, Artificial Sequence
  Description of Artificial Sequence: Synthetic oligonucleotide
  Sense strand starting at position 1230 of SEQ ID NO: 1888281
aucagaguugccuggaaca

SEQ ID NO: 2524145 - RNA, 19 nt, Artificial Sequence
  Description of Artificial Sequence: Synthetic oligonucleotide
  Antisense strand to SEQ ID NO: 2524144
uguuccaggcaacucugau

SEQ ID NO: 2524146 - RNA, 19 nt, Artificial Sequence
  Description of Artificial Sequence: Synthetic oligonucleotide
  Sense strand starting at position 1232 of SEQ ID NO: 1888281
cagaguugccuggaacaca

SEQ ID NO: 2524147 - RNA, 19 nt, Artificial Sequence
  Description of Artificial Sequence: Synthetic oligonucleotide
  Antisense strand to SEQ ID NO: 2524146
uguguuccaggcaacucug

SEQ ID NO: 2524148 - RNA, 19 nt, Artificial Sequence
  Description of Artificial Sequence: Synthetic oligonucleotide
  Sense strand starting at position 1243 of SEQ ID NO: 1888281
ggaacacagacguguuuau

SEQ ID NO: 2524149 - RNA, 19 nt, Artificial Sequence
  Description of Artificial Sequence: Synthetic oligonucleotide
  Antisense strand to SEQ ID NO: 2524148
auaaacacgucuguguucc

SEQ ID NO: 2524150 - RNA, 19 nt, Artificial Sequence
  Description of Artificial Sequence: Synthetic oligonucleotide
  Sense strand starting at position 1247 of SEQ ID NO: 1888281
cacagacguguuuauugua

SEQ ID NO: 2524151 - RNA, 19 nt, Artificial Sequence
  Description of Artificial Sequence: Synthetic oligonucleotide
  Antisense strand to SEQ ID NO: 2524150
uacaauaaacacgucugug

SEQ ID NO: 2524152 - RNA, 19 nt, Artificial Sequence
  Description of Artificial Sequence: Synthetic oligonucleotide
  Sense strand starting at position 2265 of SEQ ID NO: 1888281
cgguaaugauguuugggaa

SEQ ID NO: 2524153 - RNA, 19 nt, Artificial Sequence
  Description of Artificial Sequence: Synthetic oligonucleotide
  Antisense strand to SEQ ID NO: 2524152
uucccaaacaucauuaccg

SEQ ID NO: 2524154 - RNA, 19 nt, Artificial Sequence
  Description of Artificial Sequence: Synthetic oligonucleotide
  Sense strand starting at position 2266 of SEQ ID NO: 1888281
gguaaugauguuugggaau

SEQ ID NO: 2524155 - RNA, 19 nt, Artificial Sequence
  Description of Artificial Sequence: Synthetic oligonucleotide
  Antisense strand to SEQ ID NO: 2524154
auucccaaacaucauuacc

SEQ ID NO: 2524156 - RNA, 19 nt, Artificial Sequence
  Description of Artificial Sequence: Synthetic oligonucleotide
  Sense strand starting at position 2279 of SEQ ID NO: 1888281
gggaauuaacgaggugaua

SEQ ID NO: 2524157 - RNA, 19 nt, Artificial Sequence
  Description of Artificial Sequence: Synthetic oligonucleotide
  Antisense strand to SEQ ID NO: 2524156
uaucaccucguuaauuccc

SEQ ID NO: 2524158 - RNA, 19 nt, Artificial Sequence
  Description of Artificial Sequence: Synthetic oligonucleotide
  Sense strand starting at position 2340 of SEQ ID NO: 1888281
cuaguuagagucugauaac

SEQ ID NO: 2524159 - RNA, 19 nt, Artificial Sequence
  Description of Artificial Sequence: Synthetic oligonucleotide
  Antisense strand to SEQ ID NO: 2524158
guuaucagacucuaacuag

SEQ ID NO: 2524160 - RNA, 19 nt, Artificial Sequence
  Description of Artificial Sequence: Synthetic oligonucleotide
  Sense strand starting at position 2383 of SEQ ID NO: 1888281
cacguaggaguuugccaau

SEQ ID NO: 2524161 - RNA, 19 nt, Artificial Sequence
  Description of Artificial Sequence: Synthetic oligonucleotide
  Antisense strand to SEQ ID NO: 2524160
auuggcaaacuccuacgug

SEQ ID NO: 2524162 - RNA, 19 nt, Artificial Sequence
  Description of Artificial Sequence: Synthetic oligonucleotide
  Sense strand starting at position 2474 of SEQ ID NO: 1888281
guagcaaaguaaguauuaa

SEQ ID NO: 2524163 - RNA, 19 nt, Artificial Sequence
  Description of Artificial Sequence: Synthetic oligonucleotide
  Antisense strand to SEQ ID NO: 2524162
uuaauacuuacuuugcuac

SEQ ID NO: 2524164 - RNA, 19 nt, Artificial Sequence
  Description of Artificial Sequence: Synthetic oligonucleotide
  Sense strand starting at position 2825 of SEQ ID NO: 1888281
ucaaguguuuccucaacac

SEQ ID NO: 2524165 - RNA, 19 nt, Artificial Sequence
  Description of Artificial Sequence: Synthetic oligonucleotide
  Antisense strand to SEQ ID NO: 2524164
guguugaggaaacacuuga

SEQ ID NO: 2524166 - RNA, 19 nt, Artificial Sequence
  Description of Artificial Sequence: Synthetic oligonucleotide
  Sense strand starting at position 2829 of SEQ ID NO: 1888281
guguuuccucaacacuaca

SEQ ID NO: 2524167 - RNA, 19 nt, Artificial Sequence
  Description of Artificial Sequence: Synthetic oligonucleotide
  Antisense strand to SEQ ID NO: 2524166
uguaguguugaggaaacac

SEQ ID NO: 2524168 - RNA, 19 nt, Artificial Sequence
  Description of Artificial Sequence: Synthetic oligonucleotide
  Sense strand starting at position 3071 of SEQ ID NO: 1888281
aguggacagucaguaaaua

SEQ ID NO: 2524169 - RNA, 19 nt, Artificial Sequence
  Description of Artificial Sequence: Synthetic oligonucleotide
  Antisense strand to SEQ ID NO: 2524168
uauuuacugacuguccacu

SEQ ID NO: 2524170 - RNA, 19 nt, Artificial Sequence
  Description of Artificial Sequence: Synthetic oligonucleotide
  Sense strand starting at position 3090 of SEQ ID NO: 1888281
uuugcugaaugaguuaaga

SEQ ID NO: 2524171 - RNA, 19 nt, Artificial Sequence
  Description of Artificial Sequence: Synthetic oligonucleotide
  Antisense strand to SEQ ID NO: 2524170
ucuuaacucauucagcaaa

SEQ ID NO: 2524172 - RNA, 19 nt, Artificial Sequence
  Description of Artificial Sequence: Synthetic oligonucleotide
  Sense strand starting at position 3217 of SEQ ID NO: 1888281
gaaguaaguuguuccagga

SEQ ID NO: 2524173 - RNA, 19 nt, Artificial Sequence
  Description of Artificial Sequence: Synthetic oligonucleotide
  Antisense strand to SEQ ID NO: 2524172
uccuggaacaacuuacuuc

SEQ ID NO: 2524174 - RNA, 19 nt, Artificial Sequence
  Description of Artificial Sequence: Synthetic oligonucleotide
  Sense strand starting at position 3307 of SEQ ID NO: 1888281
agcuucccuguuuaugaaa

SEQ ID NO: 2524175 - RNA, 19 nt, Artificial Sequence
  Description of Artificial Sequence: Synthetic oligonucleotide
  Antisense strand to SEQ ID NO: 2524174
uuucauaaacagggaagcu

SEQ ID NO: 2524176 - RNA, 19 nt, Artificial Sequence
  Description of Artificial Sequence: Synthetic oligonucleotide
  Sense strand starting at position 3332 of SEQ ID NO: 1888281
guuggacaugauuaacguu

SEQ ID NO: 2524177 - RNA, 19 nt, Artificial Sequence
  Description of Artificial Sequence: Synthetic oligonucleotide
  Antisense strand to SEQ ID NO: 2524176
aacguuaaucauguccaac

SEQ ID NO: 2524178 - RNA, 19 nt, Artificial Sequence
  Description of Artificial Sequence: Synthetic oligonucleotide
  Sense strand starting at position 3709 of SEQ ID NO: 1888281
aucaaagagccauguaacu

SEQ ID NO: 2524179 - RNA, 19 nt, Artificial Sequence
  Description of Artificial Sequence: Synthetic oligonucleotide
  Antisense strand to SEQ ID NO: 2524178
aguuacauggcucuuugau

SEQ ID NO: 2524180 - RNA, 19 nt, Artificial Sequence
  Description of Artificial Sequence: Synthetic oligonucleotide
  Sense strand starting at position 3740 of SEQ ID NO: 1888281
uucugaacagcuuguggua

SEQ ID NO: 2524181 - RNA, 19 nt, Artificial Sequence
  Description of Artificial Sequence: Synthetic oligonucleotide
  Antisense strand to SEQ ID NO: 2524180
uaccacaagcuguucagaa

SEQ ID NO: 2524182 - RNA, 19 nt, Artificial Sequence
  Description of Artificial Sequence: Synthetic oligonucleotide
  Sense strand starting at position 3752 of SEQ ID NO: 1888281
ugugguagccguguuauca

SEQ ID NO: 2524183 - RNA, 19 nt, Artificial Sequence
  Description of Artificial Sequence: Synthetic oligonucleotide
  Antisense strand to SEQ ID NO: 2524182
ugauaacacggcuaccaca

SEQ ID NO: 2524184 - RNA, 19 nt, Artificial Sequence
  Description of Artificial Sequence: Synthetic oligonucleotide
  Sense strand starting at position 3753 of SEQ ID NO: 1888281
gugguagccguguuaucac

SEQ ID NO: 2524185 - RNA, 19 nt, Artificial Sequence
  Description of Artificial Sequence: Synthetic oligonucleotide
  Antisense strand to SEQ ID NO: 2524184
gugauaacacggcuaccac

SEQ ID NO: 2524186 - RNA, 19 nt, Artificial Sequence
  Description of Artificial Sequence: Synthetic oligonucleotide
  Sense strand starting at position 3763 of SEQ ID NO: 1888281
uguuaucaccuugagcuga

SEQ ID NO: 2524187 - RNA, 19 nt, Artificial Sequence
  Description of Artificial Sequence: Synthetic oligonucleotide
  Antisense strand to SEQ ID NO: 2524186
ucagcucaaggugauaaca

SEQ ID NO: 2524188 - RNA, 19 nt, Artificial Sequence
  Description of Artificial Sequence: Synthetic oligonucleotide
  Sense strand starting at position 3765 of SEQ ID NO: 1888281
uuaucaccuugagcugaua

SEQ ID NO: 2524189 - RNA, 19 nt, Artificial Sequence
  Description of Artificial Sequence: Synthetic oligonucleotide
  Antisense strand to SEQ ID NO: 2524188
uaucagcucaaggugauaa

SEQ ID NO: 2524190 - RNA, 19 nt, Artificial Sequence
  Description of Artificial Sequence: Synthetic oligonucleotide
  Sense strand starting at position 3768 of SEQ ID NO: 1888281
ucaccuugagcugauacaa

SEQ ID NO: 2524191 - RNA, 19 nt, Artificial Sequence
  Description of Artificial Sequence: Synthetic oligonucleotide
  Antisense strand to SEQ ID NO: 2524190
uuguaucagcucaagguga

SEQ ID NO: 2524192 - RNA, 19 nt, Artificial Sequence
  Description of Artificial Sequence: Synthetic oligonucleotide
  Sense strand starting at position 3829 of SEQ ID NO: 1888281
ugcgauuguccuuaucauu

SEQ ID NO: 2524193 - RNA, 19 nt, Artificial Sequence
  Description of Artificial Sequence: Synthetic oligonucleotide
  Antisense strand to SEQ ID NO: 2524192
aaugauaaggacaaucgca

SEQ ID NO: 2524194 - RNA, 19 nt, Artificial Sequence
  Description of Artificial Sequence: Synthetic oligonucleotide
  Sense strand starting at position 3889 of SEQ ID NO: 1888281
guuauuaaggcccaaagau

SEQ ID NO: 2524195 - RNA, 19 nt, Artificial Sequence
  Description of Artificial Sequence: Synthetic oligonucleotide
  Antisense strand to SEQ ID NO: 2524194
aucuuugggccuuaauaac

SEQ ID NO: 2524196 - RNA, 19 nt, Artificial Sequence
  Description of Artificial Sequence: Synthetic oligonucleotide
  Sense strand starting at position 12 of SEQ ID NO: 1888282
ggaggucuucauuaguagu

SEQ ID NO: 2524197 - RNA, 19 nt, Artificial Sequence
  Description of Artificial Sequence: Synthetic oligonucleotide
  Antisense strand to SEQ ID NO: 2524196
acuacuaaugaagaccucc

SEQ ID NO: 2524198 - RNA, 19 nt, Artificial Sequence
  Description of Artificial Sequence: Synthetic oligonucleotide
  Sense strand starting at position 54 of SEQ ID NO: 1888282
agcaaagauucuguuaacu

SEQ ID NO: 2524199 - RNA, 19 nt, Artificial Sequence
  Description of Artificial Sequence: Synthetic oligonucleotide
  Antisense strand to SEQ ID NO: 2524198
aguuaacagaaucuuugcu

SEQ ID NO: 2524200 - RNA, 19 nt, Artificial Sequence
  Description of Artificial Sequence: Synthetic oligonucleotide
  Sense strand starting at position 63 of SEQ ID NO: 1888282
ucuguuaacuaccuggaaa

SEQ ID NO: 2524201 - RNA, 19 nt, Artificial Sequence
  Description of Artificial Sequence: Synthetic oligonucleotide
  Antisense strand to SEQ ID NO: 2524200
uuuccagguaguuaacaga

SEQ ID NO: 2524202 - RNA, 19 nt, Artificial Sequence
  Description of Artificial Sequence: Synthetic oligonucleotide
  Sense strand starting at position 170 of SEQ ID NO: 1888282
ggauucuagcauuaguaac

SEQ ID NO: 2524203 - RNA, 19 nt, Artificial Sequence
  Description of Artificial Sequence: Synthetic oligonucleotide
  Antisense strand to SEQ ID NO: 2524202
guuacuaaugcuagaaucc

SEQ ID NO: 2524204 - RNA, 19 nt, Artificial Sequence
  Description of Artificial Sequence: Synthetic oligonucleotide
  Sense strand starting at position 374 of SEQ ID NO: 1888282
acuguuaugccaugaggac

SEQ ID NO: 2524205 - RNA, 19 nt, Artificial Sequence
  Description of Artificial Sequence: Synthetic oligonucleotide
  Antisense strand to SEQ ID NO: 2524204
guccucauggcauaacagu

SEQ ID NO: 2524206 - RNA, 19 nt, Artificial Sequence
  Description of Artificial Sequence: Synthetic oligonucleotide
  Sense strand starting at position 375 of SEQ ID NO: 1888282
cuguuaugccaugaggaca

SEQ ID NO: 2524207 - RNA, 19 nt, Artificial Sequence
  Description of Artificial Sequence: Synthetic oligonucleotide
  Antisense strand to SEQ ID NO: 2524206
uguccucauggcauaacag

SEQ ID NO: 2524208 - RNA, 19 nt, Artificial Sequence
  Description of Artificial Sequence: Synthetic oligonucleotide
  Sense strand starting at position 547 of SEQ ID NO: 1888282
aaauauguggguuguauua

SEQ ID NO: 2524209 - RNA, 19 nt, Artificial Sequence
  Description of Artificial Sequence: Synthetic oligonucleotide
  Antisense strand to SEQ ID NO: 2524208
uaauacaacccacauauuu

SEQ ID NO: 2524210 - RNA, 19 nt, Artificial Sequence
  Description of Artificial Sequence: Synthetic oligonucleotide
  Sense strand starting at position 615 of SEQ ID NO: 1888282
uagggaaagucaccuuagu

SEQ ID NO: 2524211 - RNA, 19 nt, Artificial Sequence
  Description of Artificial Sequence: Synthetic oligonucleotide
  Antisense strand to SEQ ID NO: 2524210
acuaaggugacuuucccua

SEQ ID NO: 2524212 - RNA, 19 nt, Artificial Sequence
  Description of Artificial Sequence: Synthetic oligonucleotide
  Sense strand starting at position 628 of SEQ ID NO: 1888282
cuuagucuuccucaaggaa

SEQ ID NO: 2524213 - RNA, 19 nt, Artificial Sequence
  Description of Artificial Sequence: Synthetic oligonucleotide
  Antisense strand to SEQ ID NO: 2524212
uuccuugaggaagacuaag

SEQ ID NO: 2524214 - RNA, 19 nt, Artificial Sequence
  Description of Artificial Sequence: Synthetic oligonucleotide
  Sense strand starting at position 928 of SEQ ID NO: 1888282
uccagagucguugggauca

SEQ ID NO: 2524215 - RNA, 19 nt, Artificial Sequence
  Description of Artificial Sequence: Synthetic oligonucleotide
  Antisense strand to SEQ ID NO: 2524214
ugaucccaacgacucugga

SEQ ID NO: 2524216 - RNA, 19 nt, Artificial Sequence
  Description of Artificial Sequence: Synthetic oligonucleotide
  Sense strand starting at position 1160 of SEQ ID NO: 1888282
agucgauucgugguugcca

SEQ ID NO: 2524217 - RNA, 19 nt, Artificial Sequence
  Description of Artificial Sequence: Synthetic oligonucleotide
  Antisense strand to SEQ ID NO: 2524216
uggcaaccacgaaucgacu

SEQ ID NO: 2524218 - RNA, 19 nt, Artificial Sequence
  Description of Artificial Sequence: Synthetic oligonucleotide
  Sense strand starting at position 1173 of SEQ ID NO: 1888282
uugccaggcgucgugaaua

SEQ ID NO: 2524219 - RNA, 19 nt, Artificial Sequence
  Description of Artificial Sequence: Synthetic oligonucleotide
  Antisense strand to SEQ ID NO: 2524218
uauucacgacgccuggcaa

SEQ ID NO: 2524220 - RNA, 19 nt, Artificial Sequence
  Description of Artificial Sequence: Synthetic oligonucleotide
  Sense strand starting at position 1209 of SEQ ID NO: 1888282
ccuauuaauggguaagggu

SEQ ID NO: 2524221 - RNA, 19 nt, Artificial Sequence
  Description of Artificial Sequence: Synthetic oligonucleotide
  Antisense strand to SEQ ID NO: 2524220
acccuuacccauuaauagg

SEQ ID NO: 2524222 - RNA, 19 nt, Artificial Sequence
  Description of Artificial Sequence: Synthetic oligonucleotide
  Sense strand starting at position 1305 of SEQ ID NO: 1888282
aaggaagaacuguguggua

SEQ ID NO: 2524223 - RNA, 19 nt, Artificial Sequence
  Description of Artificial Sequence: Synthetic oligonucleotide
  Antisense strand to SEQ ID NO: 2524222
uaccacacaguucuuccuu

SEQ ID NO: 2524224 - RNA, 19 nt, Artificial Sequence
  Description of Artificial Sequence: Synthetic oligonucleotide
  Sense strand starting at position 1307 of SEQ ID NO: 1888282
ggaagaacugugugguaau

SEQ ID NO: 2524225 - RNA, 19 nt, Artificial Sequence
  Description of Artificial Sequence: Synthetic oligonucleotide
  Antisense strand to SEQ ID NO: 2524224
auuaccacacaguucuucc

SEQ ID NO: 2524226 - RNA, 19 nt, Artificial Sequence
  Description of Artificial Sequence: Synthetic oligonucleotide
  Sense strand starting at position 1483 of SEQ ID NO: 1888282
guccucuccagauggaaga

SEQ ID NO: 2524227 - RNA, 19 nt, Artificial Sequence
  Description of Artificial Sequence: Synthetic oligonucleotide
  Antisense strand to SEQ ID NO: 2524226
ucuuccaucuggagaggac

SEQ ID NO: 2524228 - RNA, 19 nt, Artificial Sequence
  Description of Artificial Sequence: Synthetic oligonucleotide
  Sense strand starting at position 2075 of SEQ ID NO: 1888282
gugagcgcucugaggaguu

SEQ ID NO: 2524229 - RNA, 19 nt, Artificial Sequence
  Description of Artificial Sequence: Synthetic oligonucleotide
  Antisense strand to SEQ ID NO: 2524228
aacuccucagagcgcucac

SEQ ID NO: 2524230 - RNA, 19 nt, Artificial Sequence
  Description of Artificial Sequence: Synthetic oligonucleotide
  Sense strand starting at position 2219 of SEQ ID NO: 1888282
uugaacucacaagguuauu

SEQ ID NO: 2524231 - RNA, 19 nt, Artificial Sequence
  Description of Artificial Sequence: Synthetic oligonucleotide
  Antisense strand to SEQ ID NO: 2524230
aauaaccuugugaguucaa

SEQ ID NO: 2524232 - RNA, 19 nt, Artificial Sequence
  Description of Artificial Sequence: Synthetic oligonucleotide
  Sense strand starting at position 2231 of SEQ ID NO: 1888282
gguuauugagaguguuuag

SEQ ID NO: 2524233 - RNA, 19 nt, Artificial Sequence
  Description of Artificial Sequence: Synthetic oligonucleotide
  Antisense strand to SEQ ID NO: 2524232
cuaaacacucucaauaacc

SEQ ID NO: 2524234 - RNA, 19 nt, Artificial Sequence
  Description of Artificial Sequence: Synthetic oligonucleotide
  Sense strand starting at position 2234 of SEQ ID NO: 1888282
uauugagaguguuuagaac

SEQ ID NO: 2524235 - RNA, 19 nt, Artificial Sequence
  Description of Artificial Sequence: Synthetic oligonucleotide
  Antisense strand to SEQ ID NO: 2524234
guucuaaacacucucaaua

SEQ ID NO: 2524236 - RNA, 19 nt, Artificial Sequence
  Description of Artificial Sequence: Synthetic oligonucleotide
  Sense strand starting at position 2295 of SEQ ID NO: 1888282
uuugcuuaccaaggauuau

SEQ ID NO: 2524237 - RNA, 19 nt, Artificial Sequence
  Description of Artificial Sequence: Synthetic oligonucleotide
  Antisense strand to SEQ ID NO: 2524236
auaauccuugguaagcaaa

SEQ ID NO: 2524238 - RNA, 19 nt, Artificial Sequence
  Description of Artificial Sequence: Synthetic oligonucleotide
  Sense strand starting at position 2353 of SEQ ID NO: 1888282
ucaucaguucuuggguacu

SEQ ID NO: 2524239 - RNA, 19 nt, Artificial Sequence
  Description of Artificial Sequence: Synthetic oligonucleotide
  Antisense strand to SEQ ID NO: 2524238
aguacccaagaacugauga

SEQ ID NO: 2524240 - RNA, 19 nt, Artificial Sequence
  Description of Artificial Sequence: Synthetic oligonucleotide
  Sense strand starting at position 2482 of SEQ ID NO: 1888282
cgaaauaguggccacucau

SEQ ID NO: 2524241 - RNA, 19 nt, Artificial Sequence
  Description of Artificial Sequence: Synthetic oligonucleotide
  Antisense strand to SEQ ID NO: 2524240
augaguggccacuauuucg

SEQ ID NO: 2524242 - RNA, 19 nt, Artificial Sequence
  Description of Artificial Sequence: Synthetic oligonucleotide
  Sense strand starting at position 2517 of SEQ ID NO: 1888282
gcuuaucaggucugauuuc

SEQ ID NO: 2524243 - RNA, 19 nt, Artificial Sequence
  Description of Artificial Sequence: Synthetic oligonucleotide
  Antisense strand to SEQ ID NO: 2524242
gaaaucagaccugauaagc

SEQ ID NO: 2524244 - RNA, 19 nt, Artificial Sequence
  Description of Artificial Sequence: Synthetic oligonucleotide
  Sense strand starting at position 2586 of SEQ ID NO: 1888282
uugguuauaucccugauau

SEQ ID NO: 2524245 - RNA, 19 nt, Artificial Sequence
  Description of Artificial Sequence: Synthetic oligonucleotide
  Antisense strand to SEQ ID NO: 2524244
auaucagggauauaaccaa

SEQ ID NO: 2524246 - RNA, 19 nt, Artificial Sequence
  Description of Artificial Sequence: Synthetic oligonucleotide
  Sense strand starting at position 2587 of SEQ ID NO: 1888282
ugguuauaucccugauauu

SEQ ID NO: 2524247 - RNA, 19 nt, Artificial Sequence
  Description of Artificial Sequence: Synthetic oligonucleotide
  Antisense strand to SEQ ID NO: 2524246
aauaucagggauauaacca

SEQ ID NO: 2524248 - RNA, 19 nt, Artificial Sequence
  Description of Artificial Sequence: Synthetic oligonucleotide
  Sense strand starting at position 2588 of SEQ ID NO: 1888282
gguuauaucccugauauug

SEQ ID NO: 2524249 - RNA, 19 nt, Artificial Sequence
  Description of Artificial Sequence: Synthetic oligonucleotide
  Antisense strand to SEQ ID NO: 2524248
caauaucagggauauaacc

SEQ ID NO: 2524250 - RNA, 19 nt, Artificial Sequence
  Description of Artificial Sequence: Synthetic oligonucleotide
  Sense strand starting at position 2711 of SEQ ID NO: 1888282
guucuuuauuauccugaga

SEQ ID NO: 2524251 - RNA, 19 nt, Artificial Sequence
  Description of Artificial Sequence: Synthetic oligonucleotide
  Antisense strand to SEQ ID NO: 2524250
ucucaggauaauaaagaac

SEQ ID NO: 2524252 - RNA, 19 nt, Artificial Sequence
  Description of Artificial Sequence: Synthetic oligonucleotide
  Sense strand starting at position 2859 of SEQ ID NO: 1888282
ucaguuauuuggucccauu

SEQ ID NO: 2524253 - RNA, 19 nt, Artificial Sequence
  Description of Artificial Sequence: Synthetic oligonucleotide
  Antisense strand to SEQ ID NO: 2524252
aaugggaccaaauaacuga

SEQ ID NO: 2524254 - RNA, 19 nt, Artificial Sequence
  Description of Artificial Sequence: Synthetic oligonucleotide
  Sense strand starting at position 3114 of SEQ ID NO: 1888282
guacaagaauaaucuguua

SEQ ID NO: 2524255 - RNA, 19 nt, Artificial Sequence
  Description of Artificial Sequence: Synthetic oligonucleotide
  Antisense strand to SEQ ID NO: 2524254
uaacagauuauucuuguac

SEQ ID NO: 2524256 - RNA, 19 nt, Artificial Sequence
  Description of Artificial Sequence: Synthetic oligonucleotide
  Sense strand starting at position 3418 of SEQ ID NO: 1888282
ugccaagcucuugaaauua

SEQ ID NO: 2524257 - RNA, 19 nt, Artificial Sequence
  Description of Artificial Sequence: Synthetic oligonucleotide
  Antisense strand to SEQ ID NO: 2524256
uaauuucaagagcuuggca

SEQ ID NO: 2524258 - RNA, 19 nt, Artificial Sequence
  Description of Artificial Sequence: Synthetic oligonucleotide
  Sense strand starting at position 3461 of SEQ ID NO: 1888282
guaucacauuuacacagau

SEQ ID NO: 2524259 - RNA, 19 nt, Artificial Sequence
  Description of Artificial Sequence: Synthetic oligonucleotide
  Antisense strand to SEQ ID NO: 2524258
aucuguguaaaugugauac

SEQ ID NO: 2524260 - RNA, 19 nt, Artificial Sequence
  Description of Artificial Sequence: Synthetic oligonucleotide
  Sense strand starting at position 3519 of SEQ ID NO: 1888282
auuucuagucuuuguucua

SEQ ID NO: 2524261 - RNA, 19 nt, Artificial Sequence
  Description of Artificial Sequence: Synthetic oligonucleotide
  Antisense strand to SEQ ID NO: 2524260
uagaacaaagacuagaaau

SEQ ID NO: 2524262 - RNA, 19 nt, Artificial Sequence
  Description of Artificial Sequence: Synthetic oligonucleotide
  Sense strand starting at position 3522 of SEQ ID NO: 1888282
ucuagucuuuguucuaaau

SEQ ID NO: 2524263 - RNA, 19 nt, Artificial Sequence
  Description of Artificial Sequence: Synthetic oligonucleotide
  Antisense strand to SEQ ID NO: 2524262
auuuagaacaaagacuaga

SEQ ID NO: 2524264 - RNA, 19 nt, Artificial Sequence
  Description of Artificial Sequence: Synthetic oligonucleotide
  Sense strand starting at position 3531 of SEQ ID NO: 1888282
uguucuaaaucaucuguga

SEQ ID NO: 2524265 - RNA, 19 nt, Artificial Sequence
  Description of Artificial Sequence: Synthetic oligonucleotide
  Antisense strand to SEQ ID NO: 2524264
ucacagaugauuuagaaca

SEQ ID NO: 2524266 - RNA, 19 nt, Artificial Sequence
  Description of Artificial Sequence: Synthetic oligonucleotide
  Sense strand starting at position 3535 of SEQ ID NO: 1888282
cuaaaucaucugugaggcu

SEQ ID NO: 2524267 - RNA, 19 nt, Artificial Sequence
  Description of Artificial Sequence: Synthetic oligonucleotide
  Antisense strand to SEQ ID NO: 2524266
agccucacagaugauuuag

SEQ ID NO: 2524268 - RNA, 19 nt, Artificial Sequence
  Description of Artificial Sequence: Synthetic oligonucleotide
  Sense strand starting at position 3842 of SEQ ID NO: 1888282
auaaaucaucauugagguu

SEQ ID NO: 2524269 - RNA, 19 nt, Artificial Sequence
  Description of Artificial Sequence: Synthetic oligonucleotide
  Antisense strand to SEQ ID NO: 2524268
aaccucaaugaugauuuau

SEQ ID NO: 2524270 - RNA, 19 nt, Artificial Sequence
  Description of Artificial Sequence: Synthetic oligonucleotide
  Sense strand starting at position 3866 of SEQ ID NO: 1888282
augcuuagugcccacugaa

SEQ ID NO: 2524271 - RNA, 19 nt, Artificial Sequence
  Description of Artificial Sequence: Synthetic oligonucleotide
  Antisense strand to SEQ ID NO: 2524270
uucagugggcacuaagcau

SEQ ID NO: 2524272 - RNA, 19 nt, Artificial Sequence
  Description of Artificial Sequence: Synthetic oligonucleotide
  Sense strand starting at position 3896 of SEQ ID NO: 1888282
gucaucccaguuuaagagu

SEQ ID NO: 2524273 - RNA, 19 nt, Artificial Sequence
  Description of Artificial Sequence: Synthetic oligonucleotide
  Antisense strand to SEQ ID NO: 2524272
acucuuaaacugggaugac

SEQ ID NO: 2524274 - RNA, 19 nt, Artificial Sequence
  Description of Artificial Sequence: Synthetic oligonucleotide
  Sense strand starting at position 3911 of SEQ ID NO: 1888282
gaguaacgugcucaagcaa

SEQ ID NO: 2524275 - RNA, 19 nt, Artificial Sequence
  Description of Artificial Sequence: Synthetic oligonucleotide
  Antisense strand to SEQ ID NO: 2524274
uugcuugagcacguuacuc

SEQ ID NO: 2524276 - RNA, 19 nt, Artificial Sequence
  Description of Artificial Sequence: Synthetic oligonucleotide
  Sense strand starting at position 224 of SEQ ID NO: 1888283
uggcuuggaccaggucaua

SEQ ID NO: 2524277 - RNA, 19 nt, Artificial Sequence
  Description of Artificial Sequence: Synthetic oligonucleotide
  Antisense strand to SEQ ID NO: 2524276
uaugaccugguccaagcca

SEQ ID NO: 2524278 - RNA, 19 nt, Artificial Sequence
  Description of Artificial Sequence: Synthetic oligonucleotide
  Sense strand starting at position 262 of SEQ ID NO: 1888283
ggauguuaacccuggccua

SEQ ID NO: 2524279 - RNA, 19 nt, Artificial Sequence
  Description of Artificial Sequence: Synthetic oligonucleotide
  Antisense strand to SEQ ID NO: 2524278
uaggccaggguuaacaucc

SEQ ID NO: 2524280 - RNA, 19 nt, Artificial Sequence
  Description of Artificial Sequence: Synthetic oligonucleotide
  Sense strand starting at position 325 of SEQ ID NO: 1888283
uggguauaggccugaagaa

SEQ ID NO: 2524281 - RNA, 19 nt, Artificial Sequence
  Description of Artificial Sequence: Synthetic oligonucleotide
  Antisense strand to SEQ ID NO: 2524280
uucuucaggccuauaccca

SEQ ID NO: 2524282 - RNA, 19 nt, Artificial Sequence
  Description of Artificial Sequence: Synthetic oligonucleotide
  Sense strand starting at position 366 of SEQ ID NO: 1888283
gcccaagucaggugugaaa

SEQ ID NO: 2524283 - RNA, 19 nt, Artificial Sequence
  Description of Artificial Sequence: Synthetic oligonucleotide
  Antisense strand to SEQ ID NO: 2524282
uuucacaccugacuugggc

SEQ ID NO: 2524284 - RNA, 19 nt, Artificial Sequence
  Description of Artificial Sequence: Synthetic oligonucleotide
  Sense strand starting at position 394 of SEQ ID NO: 1888283
cagagaauggaguggucua

SEQ ID NO: 2524285 - RNA, 19 nt, Artificial Sequence
  Description of Artificial Sequence: Synthetic oligonucleotide
  Antisense strand to SEQ ID NO: 2524284
uagaccacuccauucucug

SEQ ID NO: 2524286 - RNA, 19 nt, Artificial Sequence
  Description of Artificial Sequence: Synthetic oligonucleotide
  Sense strand starting at position 430 of SEQ ID NO: 1888283
gcaaaugguccguggccau

SEQ ID NO: 2524287 - RNA, 19 nt, Artificial Sequence
  Description of Artificial Sequence: Synthetic oligonucleotide
  Antisense strand to SEQ ID NO: 2524286
auggccacggaccauuugc

SEQ ID NO: 2524288 - RNA, 19 nt, Artificial Sequence
  Description of Artificial Sequence: Synthetic oligonucleotide
  Sense strand starting at position 575 of SEQ ID NO: 1888283
aaggaaggaugucaggaua

SEQ ID NO: 2524289 - RNA, 19 nt, Artificial Sequence
  Description of Artificial Sequence: Synthetic oligonucleotide
  Antisense strand to SEQ ID NO: 2524288
uauccugacauccuuccuu

SEQ ID NO: 2524290 - RNA, 19 nt, Artificial Sequence
  Description of Artificial Sequence: Synthetic oligonucleotide
  Sense strand starting at position 660 of SEQ ID NO: 1888283
ggaguucucaaaggcacuu

SEQ ID NO: 2524291 - RNA, 19 nt, Artificial Sequence
  Description of Artificial Sequence: Synthetic oligonucleotide
  Antisense strand to SEQ ID NO: 2524290
aagugccuuugagaacucc

SEQ ID NO: 2524292 - RNA, 19 nt, Artificial Sequence
  Description of Artificial Sequence: Synthetic oligonucleotide
  Sense strand starting at position 768 of SEQ ID NO: 1888283
gggugcuugcuggagcaua

SEQ ID NO: 2524293 - RNA, 19 nt, Artificial Sequence
  Description of Artificial Sequence: Synthetic oligonucleotide
  Antisense strand to SEQ ID NO: 2524292
uaugcuccagcaagcaccc

SEQ ID NO: 2524294 - RNA, 19 nt, Artificial Sequence
  Description of Artificial Sequence: Synthetic oligonucleotide
  Sense strand starting at position 780 of SEQ ID NO: 1888283
gagcauauacagugagcaa

SEQ ID NO: 2524295 - RNA, 19 nt, Artificial Sequence
  Description of Artificial Sequence: Synthetic oligonucleotide
  Antisense strand to SEQ ID NO: 2524294
uugcucacuguauaugcuc

SEQ ID NO: 2524296 - RNA, 19 nt, Artificial Sequence
  Description of Artificial Sequence: Synthetic oligonucleotide
  Sense strand starting at position 900 of SEQ ID NO: 1888283
agucccaaguccuaaggaa

SEQ ID NO: 2524297 - RNA, 19 nt, Artificial Sequence
  Description of Artificial Sequence: Synthetic oligonucleotide
  Antisense strand to SEQ ID NO: 2524296
uuccuuaggacuugggacu

SEQ ID NO: 2524298 - RNA, 19 nt, Artificial Sequence
  Description of Artificial Sequence: Synthetic oligonucleotide
  Sense strand starting at position 1252 of SEQ ID NO: 1888283
gagguacuaggauguagau

SEQ ID NO: 2524299 - RNA, 19 nt, Artificial Sequence
  Description of Artificial Sequence: Synthetic oligonucleotide
  Antisense strand to SEQ ID NO: 2524298
aucuacauccuaguaccuc

SEQ ID NO: 2524300 - RNA, 19 nt, Artificial Sequence
  Description of Artificial Sequence: Synthetic oligonucleotide
  Sense strand starting at position 1261 of SEQ ID NO: 1888283
ggauguagauuccagaucu

SEQ ID NO: 2524301 - RNA, 19 nt, Artificial Sequence
  Description of Artificial Sequence: Synthetic oligonucleotide
  Antisense strand to SEQ ID NO: 2524300
agaucuggaaucuacaucc

SEQ ID NO: 2524302 - RNA, 19 nt, Artificial Sequence
  Description of Artificial Sequence: Synthetic oligonucleotide
  Sense strand starting at position 1288 of SEQ ID NO: 1888283
caggaugaggugugacuuu

SEQ ID NO: 2524303 - RNA, 19 nt, Artificial Sequence
  Description of Artificial Sequence: Synthetic oligonucleotide
  Antisense strand to SEQ ID NO: 2524302
aaagucacaccucauccug

SEQ ID NO: 2524304 - RNA, 19 nt, Artificial Sequence
  Description of Artificial Sequence: Synthetic oligonucleotide
  Sense strand starting at position 1476 of SEQ ID NO: 1888283
cagggagcucaugguaauu

SEQ ID NO: 2524305 - RNA, 19 nt, Artificial Sequence
  Description of Artificial Sequence: Synthetic oligonucleotide
  Antisense strand to SEQ ID NO: 2524304
aauuaccaugagcucccug

SEQ ID NO: 2524306 - RNA, 19 nt, Artificial Sequence
  Description of Artificial Sequence: Synthetic oligonucleotide
  Sense strand starting at position 1486 of SEQ ID NO: 1888283
augguaauuucuugaucug

SEQ ID NO: 2524307 - RNA, 19 nt, Artificial Sequence
  Description of Artificial Sequence: Synthetic oligonucleotide
  Antisense strand to SEQ ID NO: 2524306
cagaucaagaaauuaccau

SEQ ID NO: 2524308 - RNA, 19 nt, Artificial Sequence
  Description of Artificial Sequence: Synthetic oligonucleotide
  Sense strand starting at position 1709 of SEQ ID NO: 1888283
gaggucuuaccuggcgagu

SEQ ID NO: 2524309 - RNA, 19 nt, Artificial Sequence
  Description of Artificial Sequence: Synthetic oligonucleotide
  Antisense strand to SEQ ID NO: 2524308
acucgccagguaagaccuc

SEQ ID NO: 2524310 - RNA, 19 nt, Artificial Sequence
  Description of Artificial Sequence: Synthetic oligonucleotide
  Sense strand starting at position 1712 of SEQ ID NO: 1888283
gucuuaccuggcgaguaga

SEQ ID NO: 2524311 - RNA, 19 nt, Artificial Sequence
  Description of Artificial Sequence: Synthetic oligonucleotide
  Antisense strand to SEQ ID NO: 2524310
ucuacucgccagguaagac

SEQ ID NO: 2524312 - RNA, 19 nt, Artificial Sequence
  Description of Artificial Sequence: Synthetic oligonucleotide
  Sense strand starting at position 2351 of SEQ ID NO: 1888283
guacgaugcucccuagcga

SEQ ID NO: 2524313 - RNA, 19 nt, Artificial Sequence
  Description of Artificial Sequence: Synthetic oligonucleotide
  Antisense strand to SEQ ID NO: 2524312
ucgcuagggagcaucguac

SEQ ID NO: 2524314 - RNA, 19 nt, Artificial Sequence
  Description of Artificial Sequence: Synthetic oligonucleotide
  Sense strand starting at position 2376 of SEQ ID NO: 1888283
uggagagugggcugguuua

SEQ ID NO: 2524315 - RNA, 19 nt, Artificial Sequence
  Description of Artificial Sequence: Synthetic oligonucleotide
  Antisense strand to SEQ ID NO: 2524314
uaaaccagcccacucucca

SEQ ID NO: 2524316 - RNA, 19 nt, Artificial Sequence
  Description of Artificial Sequence: Synthetic oligonucleotide
  Sense strand starting at position 2377 of SEQ ID NO: 1888283
ggagagugggcugguuuau

SEQ ID NO: 2524317 - RNA, 19 nt, Artificial Sequence
  Description of Artificial Sequence: Synthetic oligonucleotide
  Antisense strand to SEQ ID NO: 2524316
auaaaccagcccacucucc

SEQ ID NO: 2524318 - RNA, 19 nt, Artificial Sequence
  Description of Artificial Sequence: Synthetic oligonucleotide
  Sense strand starting at position 2558 of SEQ ID NO: 1888283
uagggucacuaugagauuu

SEQ ID NO: 2524319 - RNA, 19 nt, Artificial Sequence
  Description of Artificial Sequence: Synthetic oligonucleotide
  Antisense strand to SEQ ID NO: 2524318
aaaucucauagugacccua

SEQ ID NO: 2524320 - RNA, 19 nt, Artificial Sequence
  Description of Artificial Sequence: Synthetic oligonucleotide
  Sense strand starting at position 2570 of SEQ ID NO: 1888283
gagauuugcugagcgcuua

SEQ ID NO: 2524321 - RNA, 19 nt, Artificial Sequence
  Description of Artificial Sequence: Synthetic oligonucleotide
  Antisense strand to SEQ ID NO: 2524320
uaagcgcucagcaaaucuc

SEQ ID NO: 2524322 - RNA, 19 nt, Artificial Sequence
  Description of Artificial Sequence: Synthetic oligonucleotide
  Sense strand starting at position 2571 of SEQ ID NO: 1888283
agauuugcugagcgcuuaa

SEQ ID NO: 2524323 - RNA, 19 nt, Artificial Sequence
  Description of Artificial Sequence: Synthetic oligonucleotide
  Antisense strand to SEQ ID NO: 2524322
uuaagcgcucagcaaaucu

SEQ ID NO: 2524324 - RNA, 19 nt, Artificial Sequence
  Description of Artificial Sequence: Synthetic oligonucleotide
  Sense strand starting at position 2583 of SEQ ID NO: 1888283
cgcuuaauaucugucaggu

SEQ ID NO: 2524325 - RNA, 19 nt, Artificial Sequence
  Description of Artificial Sequence: Synthetic oligonucleotide
  Antisense strand to SEQ ID NO: 2524324
accugacagauauuaagcg

SEQ ID NO: 2524326 - RNA, 19 nt, Artificial Sequence
  Description of Artificial Sequence: Synthetic oligonucleotide
  Sense strand starting at position 2612 of SEQ ID NO: 1888283
gagcuagacgagcaacauu

SEQ ID NO: 2524327 - RNA, 19 nt, Artificial Sequence
  Description of Artificial Sequence: Synthetic oligonucleotide
  Antisense strand to SEQ ID NO: 2524326
aauguugcucgucuagcuc

SEQ ID NO: 2524328 - RNA, 19 nt, Artificial Sequence
  Description of Artificial Sequence: Synthetic oligonucleotide
  Sense strand starting at position 2653 of SEQ ID NO: 1888283
gguauugccuccucagaga

SEQ ID NO: 2524329 - RNA, 19 nt, Artificial Sequence
  Description of Artificial Sequence: Synthetic oligonucleotide
  Antisense strand to SEQ ID NO: 2524328
ucucugaggaggcaauacc

SEQ ID NO: 2524330 - RNA, 19 nt, Artificial Sequence
  Description of Artificial Sequence: Synthetic oligonucleotide
  Sense strand starting at position 2814 of SEQ ID NO: 1888283
gagaacagcuuuguuuaca

SEQ ID NO: 2524331 - RNA, 19 nt, Artificial Sequence
  Description of Artificial Sequence: Synthetic oligonucleotide
  Antisense strand to SEQ ID NO: 2524330
uguaaacaaagcuguucuc

SEQ ID NO: 2524332 - RNA, 19 nt, Artificial Sequence
  Description of Artificial Sequence: Synthetic oligonucleotide
  Sense strand starting at position 2910 of SEQ ID NO: 1888283
gccagaugcgucuaauacu

SEQ ID NO: 2524333 - RNA, 19 nt, Artificial Sequence
  Description of Artificial Sequence: Synthetic oligonucleotide
  Antisense strand to SEQ ID NO: 2524332
aguauuagacgcaucuggc

SEQ ID NO: 2524334 - RNA, 19 nt, Artificial Sequence
  Description of Artificial Sequence: Synthetic oligonucleotide
  Sense strand starting at position 2918 of SEQ ID NO: 1888283
cgucuaauacuucggcaga

SEQ ID NO: 2524335 - RNA, 19 nt, Artificial Sequence
  Description of Artificial Sequence: Synthetic oligonucleotide
  Antisense strand to SEQ ID NO: 2524334
ucugccgaaguauuagacg

SEQ ID NO: 2524336 - RNA, 19 nt, Artificial Sequence
  Description of Artificial Sequence: Synthetic oligonucleotide
  Sense strand starting at position 2920 of SEQ ID NO: 1888283
ucuaauacuucggcagaua

SEQ ID NO: 2524337 - RNA, 19 nt, Artificial Sequence
  Description of Artificial Sequence: Synthetic oligonucleotide
  Antisense strand to SEQ ID NO: 2524336
uaucugccgaaguauuaga

SEQ ID NO: 2524338 - RNA, 19 nt, Artificial Sequence
  Description of Artificial Sequence: Synthetic oligonucleotide
  Sense strand starting at position 2921 of SEQ ID NO: 1888283
cuaauacuucggcagauaa

SEQ ID NO: 2524339 - RNA, 19 nt, Artificial Sequence
  Description of Artificial Sequence: Synthetic oligonucleotide
  Antisense strand to SEQ ID NO: 2524338
uuaucugccgaaguauuag

SEQ ID NO: 2524340 - RNA, 19 nt, Artificial Sequence
  Description of Artificial Sequence: Synthetic oligonucleotide
  Sense strand starting at position 3649 of SEQ ID NO: 1888283
guggaagguccugaaaggu

SEQ ID NO: 2524341 - RNA, 19 nt, Artificial Sequence
  Description of Artificial Sequence: Synthetic oligonucleotide
  Antisense strand to SEQ ID NO: 2524340
accuuucaggaccuuccac

SEQ ID NO: 2524342 - RNA, 19 nt, Artificial Sequence
  Description of Artificial Sequence: Synthetic oligonucleotide
  Sense strand starting at position 3712 of SEQ ID NO: 1888283
agguucucugaggguuuaa

SEQ ID NO: 2524343 - RNA, 19 nt, Artificial Sequence
  Description of Artificial Sequence: Synthetic oligonucleotide
  Antisense strand to SEQ ID NO: 2524342
uuaaacccucagagaaccu

SEQ ID NO: 2524344 - RNA, 19 nt, Artificial Sequence
  Description of Artificial Sequence: Synthetic oligonucleotide
  Sense strand starting at position 3725 of SEQ ID NO: 1888283
guuuaaguccuggauuccu

SEQ ID NO: 2524345 - RNA, 19 nt, Artificial Sequence
  Description of Artificial Sequence: Synthetic oligonucleotide
  Antisense strand to SEQ ID NO: 2524344
aggaauccaggacuuaaac

SEQ ID NO: 2524346 - RNA, 19 nt, Artificial Sequence
  Description of Artificial Sequence: Synthetic oligonucleotide
  Sense strand starting at position 3770 of SEQ ID NO: 1888283
uccugaguguuccuaccau

SEQ ID NO: 2524347 - RNA, 19 nt, Artificial Sequence
  Description of Artificial Sequence: Synthetic oligonucleotide
  Antisense strand to SEQ ID NO: 2524346
augguaggaacacucagga

SEQ ID NO: 2524348 - RNA, 19 nt, Artificial Sequence
  Description of Artificial Sequence: Synthetic oligonucleotide
  Sense strand starting at position 3774 of SEQ ID NO: 1888283
gaguguuccuaccauagac

SEQ ID NO: 2524349 - RNA, 19 nt, Artificial Sequence
  Description of Artificial Sequence: Synthetic oligonucleotide
  Antisense strand to SEQ ID NO: 2524348
gucuaugguaggaacacuc

SEQ ID NO: 2524350 - RNA, 19 nt, Artificial Sequence
  Description of Artificial Sequence: Synthetic oligonucleotide
  Sense strand starting at position 3890 of SEQ ID NO: 1888283
aacccaaguccuggugaau

SEQ ID NO: 2524351 - RNA, 19 nt, Artificial Sequence
  Description of Artificial Sequence: Synthetic oligonucleotide
  Antisense strand to SEQ ID NO: 2524350
auucaccaggacuuggguu

SEQ ID NO: 2524352 - RNA, 19 nt, Artificial Sequence
  Description of Artificial Sequence: Synthetic oligonucleotide
  Sense strand starting at position 3902 of SEQ ID NO: 1888283
ggugaauuccggugaagcu

SEQ ID NO: 2524353 - RNA, 19 nt, Artificial Sequence
  Description of Artificial Sequence: Synthetic oligonucleotide
  Antisense strand to SEQ ID NO: 2524352
agcuucaccggaauucacc

SEQ ID NO: 2524354 - RNA, 19 nt, Artificial Sequence
  Description of Artificial Sequence: Synthetic oligonucleotide
  Sense strand starting at position 3937 of SEQ ID NO: 1888283
guauuaacagcacaguuaa

SEQ ID NO: 2524355 - RNA, 19 nt, Artificial Sequence
  Description of Artificial Sequence: Synthetic oligonucleotide
  Antisense strand to SEQ ID NO: 2524354
uuaacugugcuguuaauac

SEQ ID NO: 2524356 - RNA, 19 nt, Artificial Sequence
  Description of Artificial Sequence: Synthetic oligonucleotide
  Sense strand starting at position 205 of SEQ ID NO: 1888284
ccaugaucgcgccauugua

SEQ ID NO: 2524357 - RNA, 19 nt, Artificial Sequence
  Description of Artificial Sequence: Synthetic oligonucleotide
  Antisense strand to SEQ ID NO: 2524356
uacaauggcgcgaucaugg

SEQ ID NO: 2524358 - RNA, 19 nt, Artificial Sequence
  Description of Artificial Sequence: Synthetic oligonucleotide
  Sense strand starting at position 301 of SEQ ID NO: 1888284
gugcgccuguagucuuaua

SEQ ID NO: 2524359 - RNA, 19 nt, Artificial Sequence
  Description of Artificial Sequence: Synthetic oligonucleotide
  Antisense strand to SEQ ID NO: 2524358
uauaagacuacaggcgcac

SEQ ID NO: 2524360 - RNA, 19 nt, Artificial Sequence
  Description of Artificial Sequence: Synthetic oligonucleotide
  Sense strand starting at position 303 of SEQ ID NO: 1888284
gcgccuguagucuuauagu

SEQ ID NO: 2524361 - RNA, 19 nt, Artificial Sequence
  Description of Artificial Sequence: Synthetic oligonucleotide
  Antisense strand to SEQ ID NO: 2524360
acuauaagacuacaggcgc

SEQ ID NO: 2524362 - RNA, 19 nt, Artificial Sequence
  Description of Artificial Sequence: Synthetic oligonucleotide
  Sense strand starting at position 312 of SEQ ID NO: 1888284
gucuuauagucccagcuac

SEQ ID NO: 2524363 - RNA, 19 nt, Artificial Sequence
  Description of Artificial Sequence: Synthetic oligonucleotide
  Antisense strand to SEQ ID NO: 2524362
guagcugggacuauaagac

SEQ ID NO: 2524364 - RNA, 19 nt, Artificial Sequence
  Description of Artificial Sequence: Synthetic oligonucleotide
  Sense strand starting at position 366 of SEQ ID NO: 1888284
ggaguugaagauugcagua

SEQ ID NO: 2524365 - RNA, 19 nt, Artificial Sequence
  Description of Artificial Sequence: Synthetic oligonucleotide
  Antisense strand to SEQ ID NO: 2524364
uacugcaaucuucaacucc

SEQ ID NO: 2524366 - RNA, 19 nt, Artificial Sequence
  Description of Artificial Sequence: Synthetic oligonucleotide
  Sense strand starting at position 371 of SEQ ID NO: 1888284
ugaagauugcaguaagcua

SEQ ID NO: 2524367 - RNA, 19 nt, Artificial Sequence
  Description of Artificial Sequence: Synthetic oligonucleotide
  Antisense strand to SEQ ID NO: 2524366
uagcuuacugcaaucuuca

SEQ ID NO: 2524368 - RNA, 19 nt, Artificial Sequence
  Description of Artificial Sequence: Synthetic oligonucleotide
  Sense strand starting at position 551 of SEQ ID NO: 1888284
gaccgucauggcuaacagu

SEQ ID NO: 2524369 - RNA, 19 nt, Artificial Sequence
  Description of Artificial Sequence: Synthetic oligonucleotide
  Antisense strand to SEQ ID NO: 2524368
acuguuagccaugacgguc

SEQ ID NO: 2524370 - RNA, 19 nt, Artificial Sequence
  Description of Artificial Sequence: Synthetic oligonucleotide
  Sense strand starting at position 554 of SEQ ID NO: 1888284
cgucauggcuaacagugaa

SEQ ID NO: 2524371 - RNA, 19 nt, Artificial Sequence
  Description of Artificial Sequence: Synthetic oligonucleotide
  Antisense strand to SEQ ID NO: 2524370
uucacuguuagccaugacg

SEQ ID NO: 2524372 - RNA, 19 nt, Artificial Sequence
  Description of Artificial Sequence: Synthetic oligonucleotide
  Sense strand starting at position 1256 of SEQ ID NO: 1888284
ggagacuguucuggaaaca

SEQ ID NO: 2524373 - RNA, 19 nt, Artificial Sequence
  Description of Artificial Sequence: Synthetic oligonucleotide
  Antisense strand to SEQ ID NO: 2524372
uguuuccagaacagucucc

SEQ ID NO: 2524374 - RNA, 19 nt, Artificial Sequence
  Description of Artificial Sequence: Synthetic oligonucleotide
  Sense strand starting at position 2045 of SEQ ID NO: 1888284
agugauauccaaugagagu

SEQ ID NO: 2524375 - RNA, 19 nt, Artificial Sequence
  Description of Artificial Sequence: Synthetic oligonucleotide
  Antisense strand to SEQ ID NO: 2524374
acucucauuggauaucacu

SEQ ID NO: 2524376 - RNA, 19 nt, Artificial Sequence
  Description of Artificial Sequence: Synthetic oligonucleotide
  Sense strand starting at position 2078 of SEQ ID NO: 1888284
ccugguuuacccgacucaa

SEQ ID NO: 2524377 - RNA, 19 nt, Artificial Sequence
  Description of Artificial Sequence: Synthetic oligonucleotide
  Antisense strand to SEQ ID NO: 2524376
uugagucggguaaaccagg

SEQ ID NO: 2524378 - RNA, 19 nt, Artificial Sequence
  Description of Artificial Sequence: Synthetic oligonucleotide
  Sense strand starting at position 2135 of SEQ ID NO: 1888284
ggcgugguucggcgggaau

SEQ ID NO: 2524379 - RNA, 19 nt, Artificial Sequence
  Description of Artificial Sequence: Synthetic oligonucleotide
  Antisense strand to SEQ ID NO: 2524378
auucccgccgaaccacgcc

SEQ ID NO: 2524380 - RNA, 19 nt, Artificial Sequence
  Description of Artificial Sequence: Synthetic oligonucleotide
  Sense strand starting at position 2176 of SEQ ID NO: 1888284
gcgagaaucacagguagaa

SEQ ID NO: 2524381 - RNA, 19 nt, Artificial Sequence
  Description of Artificial Sequence: Synthetic oligonucleotide
  Antisense strand to SEQ ID NO: 2524380
uucuaccugugauucucgc

SEQ ID NO: 2524382 - RNA, 19 nt, Artificial Sequence
  Description of Artificial Sequence: Synthetic oligonucleotide
  Sense strand starting at position 3120 of SEQ ID NO: 1888284
ccuacuugcucccggaaga

SEQ ID NO: 2524383 - RNA, 19 nt, Artificial Sequence
  Description of Artificial Sequence: Synthetic oligonucleotide
  Antisense strand to SEQ ID NO: 2524382
ucuuccgggagcaaguagg

SEQ ID NO: 2524384 - RNA, 19 nt, Artificial Sequence
  Description of Artificial Sequence: Synthetic oligonucleotide
  Sense strand starting at position 3121 of SEQ ID NO: 1888284
cuacuugcucccggaagaa

SEQ ID NO: 2524385 - RNA, 19 nt, Artificial Sequence
  Description of Artificial Sequence: Synthetic oligonucleotide
  Antisense strand to SEQ ID NO: 2524384
uucuuccgggagcaaguag

SEQ ID NO: 2524386 - RNA, 19 nt, Artificial Sequence
  Description of Artificial Sequence: Synthetic oligonucleotide
  Sense strand starting at position 3213 of SEQ ID NO: 1888284
gguacuggucccuaggcau

SEQ ID NO: 2524387 - RNA, 19 nt, Artificial Sequence
  Description of Artificial Sequence: Synthetic oligonucleotide
  Antisense strand to SEQ ID NO: 2524386
augccuagggaccaguacc

SEQ ID NO: 2524388 - RNA, 19 nt, Artificial Sequence
  Description of Artificial Sequence: Synthetic oligonucleotide
  Sense strand starting at position 3282 of SEQ ID NO: 1888284
gugucuuccugguacucuu

SEQ ID NO: 2524389 - RNA, 19 nt, Artificial Sequence
  Description of Artificial Sequence: Synthetic oligonucleotide
  Antisense strand to SEQ ID NO: 2524388
aagaguaccaggaagacac

SEQ ID NO: 2524390 - RNA, 19 nt, Artificial Sequence
  Description of Artificial Sequence: Synthetic oligonucleotide
  Sense strand starting at position 3339 of SEQ ID NO: 1888284
gcucucgugcucucaguaa

SEQ ID NO: 2524391 - RNA, 19 nt, Artificial Sequence
  Description of Artificial Sequence: Synthetic oligonucleotide
  Antisense strand to SEQ ID NO: 2524390
uuacugagagcacgagagc

SEQ ID NO: 2524392 - RNA, 19 nt, Artificial Sequence
  Description of Artificial Sequence: Synthetic oligonucleotide
  Sense strand starting at position 3343 of SEQ ID NO: 1888284
ucgugcucucaguaauguu

SEQ ID NO: 2524393 - RNA, 19 nt, Artificial Sequence
  Description of Artificial Sequence: Synthetic oligonucleotide
  Antisense strand to SEQ ID NO: 2524392
aacauuacugagagcacga

SEQ ID NO: 2524394 - RNA, 19 nt, Artificial Sequence
  Description of Artificial Sequence: Synthetic oligonucleotide
  Sense strand starting at position 3388 of SEQ ID NO: 1888284
uccagagauucuugcucaa

SEQ ID NO: 2524395 - RNA, 19 nt, Artificial Sequence
  Description of Artificial Sequence: Synthetic oligonucleotide
  Antisense strand to SEQ ID NO: 2524394
uugagcaagaaucucugga

SEQ ID NO: 2524396 - RNA, 19 nt, Artificial Sequence
  Description of Artificial Sequence: Synthetic oligonucleotide
  Sense strand starting at position 3522 of SEQ ID NO: 1888284
gucccauucuguguugcau

SEQ ID NO: 2524397 - RNA, 19 nt, Artificial Sequence
  Description of Artificial Sequence: Synthetic oligonucleotide
  Antisense strand to SEQ ID NO: 2524396
augcaacacagaaugggac

SEQ ID NO: 2524398 - RNA, 19 nt, Artificial Sequence
  Description of Artificial Sequence: Synthetic oligonucleotide
  Sense strand starting at position 3615 of SEQ ID NO: 1888284
guguaucuguagccucaca

SEQ ID NO: 2524399 - RNA, 19 nt, Artificial Sequence
  Description of Artificial Sequence: Synthetic oligonucleotide
  Antisense strand to SEQ ID NO: 2524398
ugugaggcuacagauacac

SEQ ID NO: 2524400 - RNA, 19 nt, Artificial Sequence
  Description of Artificial Sequence: Synthetic oligonucleotide
  Sense strand starting at position 3639 of SEQ ID NO: 1888284
ccaugugagucugcaaucu

SEQ ID NO: 2524401 - RNA, 19 nt, Artificial Sequence
  Description of Artificial Sequence: Synthetic oligonucleotide
  Antisense strand to SEQ ID NO: 2524400
agauugcagacucacaugg

SEQ ID NO: 2524402 - RNA, 19 nt, Artificial Sequence
  Description of Artificial Sequence: Synthetic oligonucleotide
  Sense strand starting at position 3648 of SEQ ID NO: 1888284
ucugcaaucugucugugaa

SEQ ID NO: 2524403 - RNA, 19 nt, Artificial Sequence
  Description of Artificial Sequence: Synthetic oligonucleotide
  Antisense strand to SEQ ID NO: 2524402
uucacagacagauugcaga

SEQ ID NO: 2524404 - RNA, 19 nt, Artificial Sequence
  Description of Artificial Sequence: Synthetic oligonucleotide
  Sense strand starting at position 3649 of SEQ ID NO: 1888284
cugcaaucugucugugaau

SEQ ID NO: 2524405 - RNA, 19 nt, Artificial Sequence
  Description of Artificial Sequence: Synthetic oligonucleotide
  Antisense strand to SEQ ID NO: 2524404
auucacagacagauugcag

SEQ ID NO: 2524406 - RNA, 19 nt, Artificial Sequence
  Description of Artificial Sequence: Synthetic oligonucleotide
  Sense strand starting at position 3650 of SEQ ID NO: 1888284
ugcaaucugucugugaaug

SEQ ID NO: 2524407 - RNA, 19 nt, Artificial Sequence
  Description of Artificial Sequence: Synthetic oligonucleotide
  Antisense strand to SEQ ID NO: 2524406
cauucacagacagauugca

SEQ ID NO: 2524408 - RNA, 19 nt, Artificial Sequence
  Description of Artificial Sequence: Synthetic oligonucleotide
  Sense strand starting at position 3660 of SEQ ID NO: 1888284
cugugaaugcccuggugua

SEQ ID NO: 2524409 - RNA, 19 nt, Artificial Sequence
  Description of Artificial Sequence: Synthetic oligonucleotide
  Antisense strand to SEQ ID NO: 2524408
uacaccagggcauucacag

SEQ ID NO: 2524410 - RNA, 19 nt, Artificial Sequence
  Description of Artificial Sequence: Synthetic oligonucleotide
  Sense strand starting at position 3716 of SEQ ID NO: 1888284
aaugauagccagugcuaac

SEQ ID NO: 2524411 - RNA, 19 nt, Artificial Sequence
  Description of Artificial Sequence: Synthetic oligonucleotide
  Antisense strand to SEQ ID NO: 2524410
guuagcacuggcuaucauu

SEQ ID NO: 2524412 - RNA, 19 nt, Artificial Sequence
  Description of Artificial Sequence: Synthetic oligonucleotide
  Sense strand starting at position 3726 of SEQ ID NO: 1888284
agugcuaacuccugggaau

SEQ ID NO: 2524413 - RNA, 19 nt, Artificial Sequence
  Description of Artificial Sequence: Synthetic oligonucleotide
  Antisense strand to SEQ ID NO: 2524412
auucccaggaguuagcacu

SEQ ID NO: 2524414 - RNA, 19 nt, Artificial Sequence
  Description of Artificial Sequence: Synthetic oligonucleotide
  Sense strand starting at position 3849 of SEQ ID NO: 1888284
ggagccauccuguaaccca

SEQ ID NO: 2524415 - RNA, 19 nt, Artificial Sequence
  Description of Artificial Sequence: Synthetic oligonucleotide
  Antisense strand to SEQ ID NO: 2524414
uggguuacaggauggcucc

SEQ ID NO: 2524416 - RNA, 19 nt, Artificial Sequence
  Description of Artificial Sequence: Synthetic oligonucleotide
  Sense strand starting at position 165 of SEQ ID NO: 1888285
agacaaguuucccuuacug

SEQ ID NO: 2524417 - RNA, 19 nt, Artificial Sequence
  Description of Artificial Sequence: Synthetic oligonucleotide
  Antisense strand to SEQ ID NO: 2524416
caguaagggaaacuugucu

SEQ ID NO: 2524418 - RNA, 19 nt, Artificial Sequence
  Description of Artificial Sequence: Synthetic oligonucleotide
  Sense strand starting at position 663 of SEQ ID NO: 1888285
gccugagacuccguaaaca

SEQ ID NO: 2524419 - RNA, 19 nt, Artificial Sequence
  Description of Artificial Sequence: Synthetic oligonucleotide
  Antisense strand to SEQ ID NO: 2524418
uguuuacggagucucaggc

SEQ ID NO: 2524420 - RNA, 19 nt, Artificial Sequence
  Description of Artificial Sequence: Synthetic oligonucleotide
  Sense strand starting at position 688 of SEQ ID NO: 1888285
gcucguaaagcugaucaaa

SEQ ID NO: 2524421 - RNA, 19 nt, Artificial Sequence
  Description of Artificial Sequence: Synthetic oligonucleotide
  Antisense strand to SEQ ID NO: 2524420
uuugaucagcuuuacgagc

SEQ ID NO: 2524422 - RNA, 19 nt, Artificial Sequence
  Description of Artificial Sequence: Synthetic oligonucleotide
  Sense strand starting at position 925 of SEQ ID NO: 1888285
acugcaugucuuugacaaa

SEQ ID NO: 2524423 - RNA, 19 nt, Artificial Sequence
  Description of Artificial Sequence: Synthetic oligonucleotide
  Antisense strand to SEQ ID NO: 2524422
uuugucaaagacaugcagu

SEQ ID NO: 2524424 - RNA, 19 nt, Artificial Sequence
  Description of Artificial Sequence: Synthetic oligonucleotide
  Sense strand starting at position 1087 of SEQ ID NO: 1888285
acagccuuagacugugaaa

SEQ ID NO: 2524425 - RNA, 19 nt, Artificial Sequence
  Description of Artificial Sequence: Synthetic oligonucleotide
  Antisense strand to SEQ ID NO: 2524424
uuucacagucuaaggcugu

SEQ ID NO: 2524426 - RNA, 19 nt, Artificial Sequence
  Description of Artificial Sequence: Synthetic oligonucleotide
  Sense strand starting at position 1089 of SEQ ID NO: 1888285
agccuuagacugugaaauu

SEQ ID NO: 2524427 - RNA, 19 nt, Artificial Sequence
  Description of Artificial Sequence: Synthetic oligonucleotide
  Antisense strand to SEQ ID NO: 2524426
aauuucacagucuaaggcu

SEQ ID NO: 2524428 - RNA, 19 nt, Artificial Sequence
  Description of Artificial Sequence: Synthetic oligonucleotide
  Sense strand starting at position 1090 of SEQ ID NO: 1888285
gccuuagacugugaaauuu

SEQ ID NO: 2524429 - RNA, 19 nt, Artificial Sequence
  Description of Artificial Sequence: Synthetic oligonucleotide
  Antisense strand to SEQ ID NO: 2524428
aaauuucacagucuaaggc

SEQ ID NO: 2524430 - RNA, 19 nt, Artificial Sequence
  Description of Artificial Sequence: Synthetic oligonucleotide
  Sense strand starting at position 1231 of SEQ ID NO: 1888285
caaggauuguugggaaggu

SEQ ID NO: 2524431 - RNA, 19 nt, Artificial Sequence
  Description of Artificial Sequence: Synthetic oligonucleotide
  Antisense strand to SEQ ID NO: 2524430
accuucccaacaauccuug

SEQ ID NO: 2524432 - RNA, 19 nt, Artificial Sequence
  Description of Artificial Sequence: Synthetic oligonucleotide
  Sense strand starting at position 1398 of SEQ ID NO: 1888285
gggucucacucucucaaau

SEQ ID NO: 2524433 - RNA, 19 nt, Artificial Sequence
  Description of Artificial Sequence: Synthetic oligonucleotide
  Antisense strand to SEQ ID NO: 2524432
auuugagagagugagaccc

SEQ ID NO: 2524434 - RNA, 19 nt, Artificial Sequence
  Description of Artificial Sequence: Synthetic oligonucleotide
  Sense strand starting at position 1410 of SEQ ID NO: 1888285
cucaaaucggccugagaag

SEQ ID NO: 2524435 - RNA, 19 nt, Artificial Sequence
  Description of Artificial Sequence: Synthetic oligonucleotide
  Antisense strand to SEQ ID NO: 2524434
cuucucaggccgauuugag

SEQ ID NO: 2524436 - RNA, 19 nt, Artificial Sequence
  Description of Artificial Sequence: Synthetic oligonucleotide
  Sense strand starting at position 1719 of SEQ ID NO: 1888285
cccugucacucacugagau

SEQ ID NO: 2524437 - RNA, 19 nt, Artificial Sequence
  Description of Artificial Sequence: Synthetic oligonucleotide
  Antisense strand to SEQ ID NO: 2524436
aucucagugagugacaggg

SEQ ID NO: 2524438 - RNA, 19 nt, Artificial Sequence
  Description of Artificial Sequence: Synthetic oligonucleotide
  Sense strand starting at position 1720 of SEQ ID NO: 1888285
ccugucacucacugagaua

SEQ ID NO: 2524439 - RNA, 19 nt, Artificial Sequence
  Description of Artificial Sequence: Synthetic oligonucleotide
  Antisense strand to SEQ ID NO: 2524438
uaucucagugagugacagg

SEQ ID NO: 2524440 - RNA, 19 nt, Artificial Sequence
  Description of Artificial Sequence: Synthetic oligonucleotide
  Sense strand starting at position 1823 of SEQ ID NO: 1888285
ccuucugacgccugguaua

SEQ ID NO: 2524441 - RNA, 19 nt, Artificial Sequence
  Description of Artificial Sequence: Synthetic oligonucleotide
  Antisense strand to SEQ ID NO: 2524440
uauaccaggcgucagaagg

SEQ ID NO: 2524442 - RNA, 19 nt, Artificial Sequence
  Description of Artificial Sequence: Synthetic oligonucleotide
  Sense strand starting at position 1967 of SEQ ID NO: 1888285
gcacuuaauaggugucugu

SEQ ID NO: 2524443 - RNA, 19 nt, Artificial Sequence
  Description of Artificial Sequence: Synthetic oligonucleotide
  Antisense strand to SEQ ID NO: 2524442
acagacaccuauuaagugc

SEQ ID NO: 2524444 - RNA, 19 nt, Artificial Sequence
  Description of Artificial Sequence: Synthetic oligonucleotide
  Sense strand starting at position 1971 of SEQ ID NO: 1888285
uuaauaggugucuguggga

SEQ ID NO: 2524445 - RNA, 19 nt, Artificial Sequence
  Description of Artificial Sequence: Synthetic oligonucleotide
  Antisense strand to SEQ ID NO: 2524444
ucccacagacaccuauuaa

SEQ ID NO: 2524446 - RNA, 19 nt, Artificial Sequence
  Description of Artificial Sequence: Synthetic oligonucleotide
  Sense strand starting at position 2021 of SEQ ID NO: 1888285
cagguacuaucguuauuuc

SEQ ID NO: 2524447 - RNA, 19 nt, Artificial Sequence
  Description of Artificial Sequence: Synthetic oligonucleotide
  Antisense strand to SEQ ID NO: 2524446
gaaauaacgauaguaccug

SEQ ID NO: 2524448 - RNA, 19 nt, Artificial Sequence
  Description of Artificial Sequence: Synthetic oligonucleotide
  Sense strand starting at position 2024 of SEQ ID NO: 1888285
guacuaucguuauuuccac

SEQ ID NO: 2524449 - RNA, 19 nt, Artificial Sequence
  Description of Artificial Sequence: Synthetic oligonucleotide
  Antisense strand to SEQ ID NO: 2524448
guggaaauaacgauaguac

SEQ ID NO: 2524450 - RNA, 19 nt, Artificial Sequence
  Description of Artificial Sequence: Synthetic oligonucleotide
  Sense strand starting at position 2094 of SEQ ID NO: 1888285
gaaagucagugccuugaug

SEQ ID NO: 2524451 - RNA, 19 nt, Artificial Sequence
  Description of Artificial Sequence: Synthetic oligonucleotide
  Antisense strand to SEQ ID NO: 2524450
caucaaggcacugacuuuc

SEQ ID NO: 2524452 - RNA, 19 nt, Artificial Sequence
  Description of Artificial Sequence: Synthetic oligonucleotide
  Sense strand starting at position 2096 of SEQ ID NO: 1888285
aagucagugccuugaugau

SEQ ID NO: 2524453 - RNA, 19 nt, Artificial Sequence
  Description of Artificial Sequence: Synthetic oligonucleotide
  Antisense strand to SEQ ID NO: 2524452
aucaucaaggcacugacuu

SEQ ID NO: 2524454 - RNA, 19 nt, Artificial Sequence
  Description of Artificial Sequence: Synthetic oligonucleotide
  Sense strand starting at position 2102 of SEQ ID NO: 1888285
gugccuugaugaucaugau

SEQ ID NO: 2524455 - RNA, 19 nt, Artificial Sequence
  Description of Artificial Sequence: Synthetic oligonucleotide
  Antisense strand to SEQ ID NO: 2524454
aucaugaucaucaaggcac

SEQ ID NO: 2524456 - RNA, 19 nt, Artificial Sequence
  Description of Artificial Sequence: Synthetic oligonucleotide
  Sense strand starting at position 2105 of SEQ ID NO: 1888285
ccuugaugaucaugaugau

SEQ ID NO: 2524457 - RNA, 19 nt, Artificial Sequence
  Description of Artificial Sequence: Synthetic oligonucleotide
  Antisense strand to SEQ ID NO: 2524456
aucaucaugaucaucaagg

SEQ ID NO: 2524458 - RNA, 19 nt, Artificial Sequence
  Description of Artificial Sequence: Synthetic oligonucleotide
  Sense strand starting at position 2593 of SEQ ID NO: 1888285
gugccaucgcucugagcga

SEQ ID NO: 2524459 - RNA, 19 nt, Artificial Sequence
  Description of Artificial Sequence: Synthetic oligonucleotide
  Antisense strand to SEQ ID NO: 2524458
ucgcucagagcgauggcac

SEQ ID NO: 2524460 - RNA, 19 nt, Artificial Sequence
  Description of Artificial Sequence: Synthetic oligonucleotide
  Sense strand starting at position 2765 of SEQ ID NO: 1888285
ccaagauugugccaaggaa

SEQ ID NO: 2524461 - RNA, 19 nt, Artificial Sequence
  Description of Artificial Sequence: Synthetic oligonucleotide
  Antisense strand to SEQ ID NO: 2524460
uuccuuggcacaaucuugg

SEQ ID NO: 2524462 - RNA, 19 nt, Artificial Sequence
  Description of Artificial Sequence: Synthetic oligonucleotide
  Sense strand starting at position 2810 of SEQ ID NO: 1888285
gugcauuguaaguacguua

SEQ ID NO: 2524463 - RNA, 19 nt, Artificial Sequence
  Description of Artificial Sequence: Synthetic oligonucleotide
  Antisense strand to SEQ ID NO: 2524462
uaacguacuuacaaugcac

SEQ ID NO: 2524464 - RNA, 19 nt, Artificial Sequence
  Description of Artificial Sequence: Synthetic oligonucleotide
  Sense strand starting at position 2831 of SEQ ID NO: 1888285
gcagauaacucuuggaauc

SEQ ID NO: 2524465 - RNA, 19 nt, Artificial Sequence
  Description of Artificial Sequence: Synthetic oligonucleotide
  Antisense strand to SEQ ID NO: 2524464
gauuccaagaguuaucugc

SEQ ID NO: 2524466 - RNA, 19 nt, Artificial Sequence
  Description of Artificial Sequence: Synthetic oligonucleotide
  Sense strand starting at position 2833 of SEQ ID NO: 1888285
agauaacucuuggaauccu

SEQ ID NO: 2524467 - RNA, 19 nt, Artificial Sequence
  Description of Artificial Sequence: Synthetic oligonucleotide
  Antisense strand to SEQ ID NO: 2524466
aggauuccaagaguuaucu

SEQ ID NO: 2524468 - RNA, 19 nt, Artificial Sequence
  Description of Artificial Sequence: Synthetic oligonucleotide
  Sense strand starting at position 3031 of SEQ ID NO: 1888285
uugguuauccucuacagca

SEQ ID NO: 2524469 - RNA, 19 nt, Artificial Sequence
  Description of Artificial Sequence: Synthetic oligonucleotide
  Antisense strand to SEQ ID NO: 2524468
ugcuguagaggauaaccaa

SEQ ID NO: 2524470 - RNA, 19 nt, Artificial Sequence
  Description of Artificial Sequence: Synthetic oligonucleotide
  Sense strand starting at position 3033 of SEQ ID NO: 1888285
gguuauccucuacagcaaa

SEQ ID NO: 2524471 - RNA, 19 nt, Artificial Sequence
  Description of Artificial Sequence: Synthetic oligonucleotide
  Antisense strand to SEQ ID NO: 2524470
uuugcuguagaggauaacc

SEQ ID NO: 2524472 - RNA, 19 nt, Artificial Sequence
  Description of Artificial Sequence: Synthetic oligonucleotide
  Sense strand starting at position 3194 of SEQ ID NO: 1888285
gucucaguuucccaagacu

SEQ ID NO: 2524473 - RNA, 19 nt, Artificial Sequence
  Description of Artificial Sequence: Synthetic oligonucleotide
  Antisense strand to SEQ ID NO: 2524472
agucuugggaaacugagac

SEQ ID NO: 2524474 - RNA, 19 nt, Artificial Sequence
  Description of Artificial Sequence: Synthetic oligonucleotide
  Sense strand starting at position 3240 of SEQ ID NO: 1888285
guaagcaguucuuucucau

SEQ ID NO: 2524475 - RNA, 19 nt, Artificial Sequence
  Description of Artificial Sequence: Synthetic oligonucleotide
  Antisense strand to SEQ ID NO: 2524474
augagaaagaacugcuuac

SEQ ID NO: 2524476 - RNA, 19 nt, Artificial Sequence
  Description of Artificial Sequence: Synthetic oligonucleotide
  Sense strand starting at position 3348 of SEQ ID NO: 1888285
ucugaucuuccaggcucaa

SEQ ID NO: 2524477 - RNA, 19 nt, Artificial Sequence
  Description of Artificial Sequence: Synthetic oligonucleotide
  Antisense strand to SEQ ID NO: 2524476
uugagccuggaagaucaga

SEQ ID NO: 2524478 - RNA, 19 nt, Artificial Sequence
  Description of Artificial Sequence: Synthetic oligonucleotide
  Sense strand starting at position 3379 of SEQ ID NO: 1888285
ggugguggcuugcugagaa

SEQ ID NO: 2524479 - RNA, 19 nt, Artificial Sequence
  Description of Artificial Sequence: Synthetic oligonucleotide
  Antisense strand to SEQ ID NO: 2524478
uucucagcaagccaccacc

SEQ ID NO: 2524480 - RNA, 19 nt, Artificial Sequence
  Description of Artificial Sequence: Synthetic oligonucleotide
  Sense strand starting at position 3764 of SEQ ID NO: 1888285
gucacucaguccuugcaau

SEQ ID NO: 2524481 - RNA, 19 nt, Artificial Sequence
  Description of Artificial Sequence: Synthetic oligonucleotide
  Antisense strand to SEQ ID NO: 2524480
auugcaaggacugagugac

SEQ ID NO: 2524482 - RNA, 19 nt, Artificial Sequence
  Description of Artificial Sequence: Synthetic oligonucleotide
  Sense strand starting at position 3788 of SEQ ID NO: 1888285
aggauucagccaggguuau

SEQ ID NO: 2524483 - RNA, 19 nt, Artificial Sequence
  Description of Artificial Sequence: Synthetic oligonucleotide
  Antisense strand to SEQ ID NO: 2524482
auaacccuggcugaauccu

SEQ ID NO: 2524484 - RNA, 19 nt, Artificial Sequence
  Description of Artificial Sequence: Synthetic oligonucleotide
  Sense strand starting at position 3800 of SEQ ID NO: 1888285
ggguuauggcucugccucu

SEQ ID NO: 2524485 - RNA, 19 nt, Artificial Sequence
  Description of Artificial Sequence: Synthetic oligonucleotide
  Antisense strand to SEQ ID NO: 2524484
agaggcagagccauaaccc

SEQ ID NO: 2524486 - RNA, 19 nt, Artificial Sequence
  Description of Artificial Sequence: Synthetic oligonucleotide
  Sense strand starting at position 155 of SEQ ID NO: 1888286
ggagcaguaugaucacaaa

SEQ ID NO: 2524487 - RNA, 19 nt, Artificial Sequence
  Description of Artificial Sequence: Synthetic oligonucleotide
  Antisense strand to SEQ ID NO: 2524486
uuugugaucauacugcucc

SEQ ID NO: 2524488 - RNA, 19 nt, Artificial Sequence
  Description of Artificial Sequence: Synthetic oligonucleotide
  Sense strand starting at position 158 of SEQ ID NO: 1888286
gcaguaugaucacaaagaa

SEQ ID NO: 2524489 - RNA, 19 nt, Artificial Sequence
  Description of Artificial Sequence: Synthetic oligonucleotide
  Antisense strand to SEQ ID NO: 2524488
uucuuugugaucauacugc

SEQ ID NO: 2524490 - RNA, 19 nt, Artificial Sequence
  Description of Artificial Sequence: Synthetic oligonucleotide
  Sense strand starting at position 339 of SEQ ID NO: 1888286
caucuugggugaugagacu

SEQ ID NO: 2524491 - RNA, 19 nt, Artificial Sequence
  Description of Artificial Sequence: Synthetic oligonucleotide
  Antisense strand to SEQ ID NO: 2524490
agucucaucacccaagaug

SEQ ID NO: 2524492 - RNA, 19 nt, Artificial Sequence
  Description of Artificial Sequence: Synthetic oligonucleotide
  Sense strand starting at position 523 of SEQ ID NO: 1888286
agguccaugccguaaagau

SEQ ID NO: 2524493 - RNA, 19 nt, Artificial Sequence
  Description of Artificial Sequence: Synthetic oligonucleotide
  Antisense strand to SEQ ID NO: 2524492
aucuuuacggcauggaccu

SEQ ID NO: 2524494 - RNA, 19 nt, Artificial Sequence
  Description of Artificial Sequence: Synthetic oligonucleotide
  Sense strand starting at position 538 of SEQ ID NO: 1888286
agauuauggcagugcacau

SEQ ID NO: 2524495 - RNA, 19 nt, Artificial Sequence
  Description of Artificial Sequence: Synthetic oligonucleotide
  Antisense strand to SEQ ID NO: 2524494
augugcacugccauaaucu

SEQ ID NO: 2524496 - RNA, 19 nt, Artificial Sequence
  Description of Artificial Sequence: Synthetic oligonucleotide
  Sense strand starting at position 594 of SEQ ID NO: 1888286
gugacagccacgugauguu

SEQ ID NO: 2524497 - RNA, 19 nt, Artificial Sequence
  Description of Artificial Sequence: Synthetic oligonucleotide
  Antisense strand to SEQ ID NO: 2524496
aacaucacguggcugucac

SEQ ID NO: 2524498 - RNA, 19 nt, Artificial Sequence
  Description of Artificial Sequence: Synthetic oligonucleotide
  Sense strand starting at position 603 of SEQ ID NO: 1888286
acgugauguuaacacagaa

SEQ ID NO: 2524499 - RNA, 19 nt, Artificial Sequence
  Description of Artificial Sequence: Synthetic oligonucleotide
  Antisense strand to SEQ ID NO: 2524498
uucuguguuaacaucacgu

SEQ ID NO: 2524500 - RNA, 19 nt, Artificial Sequence
  Description of Artificial Sequence: Synthetic oligonucleotide
  Sense strand starting at position 664 of SEQ ID NO: 1888286
gccacaauuugagagcuga

SEQ ID NO: 2524501 - RNA, 19 nt, Artificial Sequence
  Description of Artificial Sequence: Synthetic oligonucleotide
  Antisense strand to SEQ ID NO: 2524500
ucagcucucaaauuguggc

SEQ ID NO: 2524502 - RNA, 19 nt, Artificial Sequence
  Description of Artificial Sequence: Synthetic oligonucleotide
  Sense strand starting at position 954 of SEQ ID NO: 1888286
ggccacaggucaucuuuaa

SEQ ID NO: 2524503 - RNA, 19 nt, Artificial Sequence
  Description of Artificial Sequence: Synthetic oligonucleotide
  Antisense strand to SEQ ID NO: 2524502
uuaaagaugaccuguggcc

SEQ ID NO: 2524504 - RNA, 19 nt, Artificial Sequence
  Description of Artificial Sequence: Synthetic oligonucleotide
  Sense strand starting at position 967 of SEQ ID NO: 1888286
cuuuaauaaucugggcaac

SEQ ID NO: 2524505 - RNA, 19 nt, Artificial Sequence
  Description of Artificial Sequence: Synthetic oligonucleotide
  Antisense strand to SEQ ID NO: 2524504
guugcccagauuauuaaag

SEQ ID NO: 2524506 - RNA, 19 nt, Artificial Sequence
  Description of Artificial Sequence: Synthetic oligonucleotide
  Sense strand starting at position 1090 of SEQ ID NO: 1888286
aucggaugcgagucgcaau

SEQ ID NO: 2524507 - RNA, 19 nt, Artificial Sequence
  Description of Artificial Sequence: Synthetic oligonucleotide
  Antisense strand to SEQ ID NO: 2524506
auugcgacucgcauccgau

SEQ ID NO: 2524508 - RNA, 19 nt, Artificial Sequence
  Description of Artificial Sequence: Synthetic oligonucleotide
  Sense strand starting at position 1091 of SEQ ID NO: 1888286
ucggaugcgagucgcaaua

SEQ ID NO: 2524509 - RNA, 19 nt, Artificial Sequence
  Description of Artificial Sequence: Synthetic oligonucleotide
  Antisense strand to SEQ ID NO: 2524508
uauugcgacucgcauccga

SEQ ID NO: 2524510 - RNA, 19 nt, Artificial Sequence
  Description of Artificial Sequence: Synthetic oligonucleotide
  Sense strand starting at position 1150 of SEQ ID NO: 1888286
cuaucaccuuguucuggaa

SEQ ID NO: 2524511 - RNA, 19 nt, Artificial Sequence
  Description of Artificial Sequence: Synthetic oligonucleotide
  Antisense strand to SEQ ID NO: 2524510
uuccagaacaaggugauag

SEQ ID NO: 2524512 - RNA, 19 nt, Artificial Sequence
  Description of Artificial Sequence: Synthetic oligonucleotide
  Sense strand starting at position 1321 of SEQ ID NO: 1888286
cccagaagcccggaauauu

SEQ ID NO: 2524513 - RNA, 19 nt, Artificial Sequence
  Description of Artificial Sequence: Synthetic oligonucleotide
  Antisense strand to SEQ ID NO: 2524512
aauauuccgggcuucuggg

SEQ ID NO: 2524514 - RNA, 19 nt, Artificial Sequence
  Description of Artificial Sequence: Synthetic oligonucleotide
  Sense strand starting at position 1329 of SEQ ID NO: 1888286
cccggaauauucuggauga

SEQ ID NO: 2524515 - RNA, 19 nt, Artificial Sequence
  Description of Artificial Sequence: Synthetic oligonucleotide
  Antisense strand to SEQ ID NO: 2524514
ucauccagaauauuccggg

SEQ ID NO: 2524516 - RNA, 19 nt, Artificial Sequence
  Description of Artificial Sequence: Synthetic oligonucleotide
  Sense strand starting at position 1330 of SEQ ID NO: 1888286
ccggaauauucuggaugau

SEQ ID NO: 2524517 - RNA, 19 nt, Artificial Sequence
  Description of Artificial Sequence: Synthetic oligonucleotide
  Antisense strand to SEQ ID NO: 2524516
aucauccagaauauuccgg

SEQ ID NO: 2524518 - RNA, 19 nt, Artificial Sequence
  Description of Artificial Sequence: Synthetic oligonucleotide
  Sense strand starting at position 1572 of SEQ ID NO: 1888286
gcuggcuccuucuugaaga

SEQ ID NO: 2524519 - RNA, 19 nt, Artificial Sequence
  Description of Artificial Sequence: Synthetic oligonucleotide
  Antisense strand to SEQ ID NO: 2524518
ucuucaagaaggagccagc

SEQ ID NO: 2524520 - RNA, 19 nt, Artificial Sequence
  Description of Artificial Sequence: Synthetic oligonucleotide
  Sense strand starting at position 2183 of SEQ ID NO: 1888286
guguguaccaagcaagagu

SEQ ID NO: 2524521 - RNA, 19 nt, Artificial Sequence
  Description of Artificial Sequence: Synthetic oligonucleotide
  Antisense strand to SEQ ID NO: 2524520
acucuugcuugguacacac

SEQ ID NO: 2524522 - RNA, 19 nt, Artificial Sequence
  Description of Artificial Sequence: Synthetic oligonucleotide
  Sense strand starting at position 2196 of SEQ ID NO: 1888286
aagagucagcucggagcaa

SEQ ID NO: 2524523 - RNA, 19 nt, Artificial Sequence
  Description of Artificial Sequence: Synthetic oligonucleotide
  Antisense strand to SEQ ID NO: 2524522
uugcuccgagcugacucuu

SEQ ID NO: 2524524 - RNA, 19 nt, Artificial Sequence
  Description of Artificial Sequence: Synthetic oligonucleotide
  Sense strand starting at position 2237 of SEQ ID NO: 1888286
gcugguccuggacaaguaa

SEQ ID NO: 2524525 - RNA, 19 nt, Artificial Sequence
  Description of Artificial Sequence: Synthetic oligonucleotide
  Antisense strand to SEQ ID NO: 2524524
uuacuuguccaggaccagc

SEQ ID NO: 2524526 - RNA, 19 nt, Artificial Sequence
  Description of Artificial Sequence: Synthetic oligonucleotide
  Sense strand starting at position 2389 of SEQ ID NO: 1888286
gggauaaauuacucaggca

SEQ ID NO: 2524527 - RNA, 19 nt, Artificial Sequence
  Description of Artificial Sequence: Synthetic oligonucleotide
  Antisense strand to SEQ ID NO: 2524526
ugccugaguaauuuauccc

SEQ ID NO: 2524528 - RNA, 19 nt, Artificial Sequence
  Description of Artificial Sequence: Synthetic oligonucleotide
  Sense strand starting at position 2425 of SEQ ID NO: 1888286
agguaucuccugcaaagac

SEQ ID NO: 2524529 - RNA, 19 nt, Artificial Sequence
  Description of Artificial Sequence: Synthetic oligonucleotide
  Antisense strand to SEQ ID NO: 2524528
gucuuugcaggagauaccu

SEQ ID NO: 2524530 - RNA, 19 nt, Artificial Sequence
  Description of Artificial Sequence: Synthetic oligonucleotide
  Sense strand starting at position 2464 of SEQ ID NO: 1888286
gcggcagauaaugguaauu

SEQ ID NO: 2524531 - RNA, 19 nt, Artificial Sequence
  Description of Artificial Sequence: Synthetic oligonucleotide
  Antisense strand to SEQ ID NO: 2524530
aauuaccauuaucugccgc

SEQ ID NO: 2524532 - RNA, 19 nt, Artificial Sequence
  Description of Artificial Sequence: Synthetic oligonucleotide
  Sense strand starting at position 2520 of SEQ ID NO: 1888286
gaaagcaggugcuugaaau

SEQ ID NO: 2524533 - RNA, 19 nt, Artificial Sequence
  Description of Artificial Sequence: Synthetic oligonucleotide
  Antisense strand to SEQ ID NO: 2524532
auuucaagcaccugcuuuc

SEQ ID NO: 2524534 - RNA, 19 nt, Artificial Sequence
  Description of Artificial Sequence: Synthetic oligonucleotide
  Sense strand starting at position 2521 of SEQ ID NO: 1888286
aaagcaggugcuugaaaua

SEQ ID NO: 2524535 - RNA, 19 nt, Artificial Sequence
  Description of Artificial Sequence: Synthetic oligonucleotide
  Antisense strand to SEQ ID NO: 2524534
uauuucaagcaccugcuuu

SEQ ID NO: 2524536 - RNA, 19 nt, Artificial Sequence
  Description of Artificial Sequence: Synthetic oligonucleotide
  Sense strand starting at position 2593 of SEQ ID NO: 1888286
ggucuuaaaugcuacaaac

SEQ ID NO: 2524537 - RNA, 19 nt, Artificial Sequence
  Description of Artificial Sequence: Synthetic oligonucleotide
  Antisense strand to SEQ ID NO: 2524536
guuuguagcauuuaagacc

SEQ ID NO: 2524538 - RNA, 19 nt, Artificial Sequence
  Description of Artificial Sequence: Synthetic oligonucleotide
  Sense strand starting at position 2734 of SEQ ID NO: 1888286
gguggacucuagcuugaag

SEQ ID NO: 2524539 - RNA, 19 nt, Artificial Sequence
  Description of Artificial Sequence: Synthetic oligonucleotide
  Antisense strand to SEQ ID NO: 2524538
cuucaagcuagaguccacc

SEQ ID NO: 2524540 - RNA, 19 nt, Artificial Sequence
  Description of Artificial Sequence: Synthetic oligonucleotide
  Sense strand starting at position 2812 of SEQ ID NO: 1888286
ccugcaaaucuguguuccu

SEQ ID NO: 2524541 - RNA, 19 nt, Artificial Sequence
  Description of Artificial Sequence: Synthetic oligonucleotide
  Antisense strand to SEQ ID NO: 2524540
aggaacacagauuugcagg

SEQ ID NO: 2524542 - RNA, 19 nt, Artificial Sequence
  Description of Artificial Sequence: Synthetic oligonucleotide
  Sense strand starting at position 2978 of SEQ ID NO: 1888286
agaccuauacugugguaua

SEQ ID NO: 2524543 - RNA, 19 nt, Artificial Sequence
  Description of Artificial Sequence: Synthetic oligonucleotide
  Antisense strand to SEQ ID NO: 2524542
uauaccacaguauaggucu

SEQ ID NO: 2524544 - RNA, 19 nt, Artificial Sequence
  Description of Artificial Sequence: Synthetic oligonucleotide
  Sense strand starting at position 3017 of SEQ ID NO: 1888286
ggauuuccuuaggguccua

SEQ ID NO: 2524545 - RNA, 19 nt, Artificial Sequence
  Description of Artificial Sequence: Synthetic oligonucleotide
  Antisense strand to SEQ ID NO: 2524544
uaggacccuaaggaaaucc

SEQ ID NO: 2524546 - RNA, 19 nt, Artificial Sequence
  Description of Artificial Sequence: Synthetic oligonucleotide
  Sense strand starting at position 3105 of SEQ ID NO: 1888286
gcccacuuccuuuguacau

SEQ ID NO: 2524547 - RNA, 19 nt, Artificial Sequence
  Description of Artificial Sequence: Synthetic oligonucleotide
  Antisense strand to SEQ ID NO: 2524546
auguacaaaggaagugggc

SEQ ID NO: 2524548 - RNA, 19 nt, Artificial Sequence
  Description of Artificial Sequence: Synthetic oligonucleotide
  Sense strand starting at position 3357 of SEQ ID NO: 1888286
ggugguugggcacaaguau

SEQ ID NO: 2524549 - RNA, 19 nt, Artificial Sequence
  Description of Artificial Sequence: Synthetic oligonucleotide
  Antisense strand to SEQ ID NO: 2524548
auacuugugcccaaccacc

SEQ ID NO: 2524550 - RNA, 19 nt, Artificial Sequence
  Description of Artificial Sequence: Synthetic oligonucleotide
  Sense strand starting at position 3419 of SEQ ID NO: 1888286
cagugacuagggugaacau

SEQ ID NO: 2524551 - RNA, 19 nt, Artificial Sequence
  Description of Artificial Sequence: Synthetic oligonucleotide
  Antisense strand to SEQ ID NO: 2524550
auguucacccuagucacug

SEQ ID NO: 2524552 - RNA, 19 nt, Artificial Sequence
  Description of Artificial Sequence: Synthetic oligonucleotide
  Sense strand starting at position 3520 of SEQ ID NO: 1888286
ucuuguugucacuggcaua

SEQ ID NO: 2524553 - RNA, 19 nt, Artificial Sequence
  Description of Artificial Sequence: Synthetic oligonucleotide
  Antisense strand to SEQ ID NO: 2524552
uaugccagugacaacaaga

SEQ ID NO: 2524554 - RNA, 19 nt, Artificial Sequence
  Description of Artificial Sequence: Synthetic oligonucleotide
  Sense strand starting at position 3525 of SEQ ID NO: 1888286
uugucacuggcauauggua

SEQ ID NO: 2524555 - RNA, 19 nt, Artificial Sequence
  Description of Artificial Sequence: Synthetic oligonucleotide
  Antisense strand to SEQ ID NO: 2524554
uaccauaugccagugacaa

SEQ ID NO: 2524556 - RNA, 19 nt, Artificial Sequence
  Description of Artificial Sequence: Synthetic oligonucleotide
  Sense strand starting at position 3533 of SEQ ID NO: 1888286
ggcauaugguaacugguuu

SEQ ID NO: 2524557 - RNA, 19 nt, Artificial Sequence
  Description of Artificial Sequence: Synthetic oligonucleotide
  Antisense strand to SEQ ID NO: 2524556
aaaccaguuaccauaugcc

SEQ ID NO: 2524558 - RNA, 19 nt, Artificial Sequence
  Description of Artificial Sequence: Synthetic oligonucleotide
  Sense strand starting at position 3655 of SEQ ID NO: 1888286
gcuggcaaugugugagaau

SEQ ID NO: 2524559 - RNA, 19 nt, Artificial Sequence
  Description of Artificial Sequence: Synthetic oligonucleotide
  Antisense strand to SEQ ID NO: 2524558
auucucacacauugccagc

SEQ ID NO: 2524560 - RNA, 19 nt, Artificial Sequence
  Description of Artificial Sequence: Synthetic oligonucleotide
  Sense strand starting at position 3656 of SEQ ID NO: 1888286
cuggcaaugugugagaaug

SEQ ID NO: 2524561 - RNA, 19 nt, Artificial Sequence
  Description of Artificial Sequence: Synthetic oligonucleotide
  Antisense strand to SEQ ID NO: 2524560
cauucucacacauugccag

SEQ ID NO: 2524562 - RNA, 19 nt, Artificial Sequence
  Description of Artificial Sequence: Synthetic oligonucleotide
  Sense strand starting at position 3681 of SEQ ID NO: 1888286
cuggaauccaggcagcauu

SEQ ID NO: 2524563 - RNA, 19 nt, Artificial Sequence
  Description of Artificial Sequence: Synthetic oligonucleotide
  Antisense strand to SEQ ID NO: 2524562
aaugcugccuggauuccag

SEQ ID NO: 2524564 - RNA, 19 nt, Artificial Sequence
  Description of Artificial Sequence: Synthetic oligonucleotide
  Sense strand starting at position 3913 of SEQ ID NO: 1888286
ucuugcauccaagaugauu

SEQ ID NO: 2524565 - RNA, 19 nt, Artificial Sequence
  Description of Artificial Sequence: Synthetic oligonucleotide
  Antisense strand to SEQ ID NO: 2524564
aaucaucuuggaugcaaga

SEQ ID NO: 2524566 - RNA, 19 nt, Artificial Sequence
  Description of Artificial Sequence: Synthetic oligonucleotide
  Sense strand starting at position 7 of SEQ ID NO: 1888287
gagugucuugcuccgccaa

SEQ ID NO: 2524567 - RNA, 19 nt, Artificial Sequence
  Description of Artificial Sequence: Synthetic oligonucleotide
  Antisense strand to SEQ ID NO: 2524566
uuggcggagcaagacacuc

SEQ ID NO: 2524568 - RNA, 19 nt, Artificial Sequence
  Description of Artificial Sequence: Synthetic oligonucleotide
  Sense strand starting at position 725 of SEQ ID NO: 1888287
gauuauaaggugugagcua

SEQ ID NO: 2524569 - RNA, 19 nt, Artificial Sequence
  Description of Artificial Sequence: Synthetic oligonucleotide
  Antisense strand to SEQ ID NO: 2524568
uagcucacaccuuauaauc

SEQ ID NO: 2524570 - RNA, 19 nt, Artificial Sequence
  Description of Artificial Sequence: Synthetic oligonucleotide
  Sense strand starting at position 828 of SEQ ID NO: 1888287
gggaguuggguguggguaa

SEQ ID NO: 2524571 - RNA, 19 nt, Artificial Sequence
  Description of Artificial Sequence: Synthetic oligonucleotide
  Antisense strand to SEQ ID NO: 2524570
uuacccacacccaacuccc

SEQ ID NO: 2524572 - RNA, 19 nt, Artificial Sequence
  Description of Artificial Sequence: Synthetic oligonucleotide
  Sense strand starting at position 896 of SEQ ID NO: 1888287
guaugacuucagggaagug

SEQ ID NO: 2524573 - RNA, 19 nt, Artificial Sequence
  Description of Artificial Sequence: Synthetic oligonucleotide
  Antisense strand to SEQ ID NO: 2524572
cacuucccugaagucauac

SEQ ID NO: 2524574 - RNA, 19 nt, Artificial Sequence
  Description of Artificial Sequence: Synthetic oligonucleotide
  Sense strand starting at position 905 of SEQ ID NO: 1888287
cagggaaguguucgagaua

SEQ ID NO: 2524575 - RNA, 19 nt, Artificial Sequence
  Description of Artificial Sequence: Synthetic oligonucleotide
  Antisense strand to SEQ ID NO: 2524574
uaucucgaacacuucccug

SEQ ID NO: 2524576 - RNA, 19 nt, Artificial Sequence
  Description of Artificial Sequence: Synthetic oligonucleotide
  Sense strand starting at position 906 of SEQ ID NO: 1888287
agggaaguguucgagauaa

SEQ ID NO: 2524577 - RNA, 19 nt, Artificial Sequence
  Description of Artificial Sequence: Synthetic oligonucleotide
  Antisense strand to SEQ ID NO: 2524576
uuaucucgaacacuucccu

SEQ ID NO: 2524578 - RNA, 19 nt, Artificial Sequence
  Description of Artificial Sequence: Synthetic oligonucleotide
  Sense strand starting at position 908 of SEQ ID NO: 1888287
ggaaguguucgagauaacu

SEQ ID NO: 2524579 - RNA, 19 nt, Artificial Sequence
  Description of Artificial Sequence: Synthetic oligonucleotide
  Antisense strand to SEQ ID NO: 2524578
aguuaucucgaacacuucc

SEQ ID NO: 2524580 - RNA, 19 nt, Artificial Sequence
  Description of Artificial Sequence: Synthetic oligonucleotide
  Sense strand starting at position 1274 of SEQ ID NO: 1888287
aggguauacucaccagauc

SEQ ID NO: 2524581 - RNA, 19 nt, Artificial Sequence
  Description of Artificial Sequence: Synthetic oligonucleotide
  Antisense strand to SEQ ID NO: 2524580
gaucuggugaguauacccu

SEQ ID NO: 2524582 - RNA, 19 nt, Artificial Sequence
  Description of Artificial Sequence: Synthetic oligonucleotide
  Sense strand starting at position 1707 of SEQ ID NO: 1888287
ccuagaaaucuuugcucug

SEQ ID NO: 2524583 - RNA, 19 nt, Artificial Sequence
  Description of Artificial Sequence: Synthetic oligonucleotide
  Antisense strand to SEQ ID NO: 2524582
cagagcaaagauuucuagg

SEQ ID NO: 2524584 - RNA, 19 nt, Artificial Sequence
  Description of Artificial Sequence: Synthetic oligonucleotide
  Sense strand starting at position 1710 of SEQ ID NO: 1888287
agaaaucuuugcucugggu

SEQ ID NO: 2524585 - RNA, 19 nt, Artificial Sequence
  Description of Artificial Sequence: Synthetic oligonucleotide
  Antisense strand to SEQ ID NO: 2524584
acccagagcaaagauuucu

SEQ ID NO: 2524586 - RNA, 19 nt, Artificial Sequence
  Description of Artificial Sequence: Synthetic oligonucleotide
  Sense strand starting at position 1716 of SEQ ID NO: 1888287
cuuugcucuggguaccaau

SEQ ID NO: 2524587 - RNA, 19 nt, Artificial Sequence
  Description of Artificial Sequence: Synthetic oligonucleotide
  Antisense strand to SEQ ID NO: 2524586
auugguacccagagcaaag

SEQ ID NO: 2524588 - RNA, 19 nt, Artificial Sequence
  Description of Artificial Sequence: Synthetic oligonucleotide
  Sense strand starting at position 2008 of SEQ ID NO: 1888287
guuugauccagccaaugag

SEQ ID NO: 2524589 - RNA, 19 nt, Artificial Sequence
  Description of Artificial Sequence: Synthetic oligonucleotide
  Antisense strand to SEQ ID NO: 2524588
cucauuggcuggaucaaac

SEQ ID NO: 2524590 - RNA, 19 nt, Artificial Sequence
  Description of Artificial Sequence: Synthetic oligonucleotide
  Sense strand starting at position 2107 of SEQ ID NO: 1888287
cugacaaccgauugguaga

SEQ ID NO: 2524591 - RNA, 19 nt, Artificial Sequence
  Description of Artificial Sequence: Synthetic oligonucleotide
  Antisense strand to SEQ ID NO: 2524590
ucuaccaaucgguugucag

SEQ ID NO: 2524592 - RNA, 19 nt, Artificial Sequence
  Description of Artificial Sequence: Synthetic oligonucleotide
  Sense strand starting at position 2108 of SEQ ID NO: 1888287
ugacaaccgauugguagau

SEQ ID NO: 2524593 - RNA, 19 nt, Artificial Sequence
  Description of Artificial Sequence: Synthetic oligonucleotide
  Antisense strand to SEQ ID NO: 2524592
aucuaccaaucgguuguca

SEQ ID NO: 2524594 - RNA, 19 nt, Artificial Sequence
  Description of Artificial Sequence: Synthetic oligonucleotide
  Sense strand starting at position 2126 of SEQ ID NO: 1888287
ugaugcugccauuaacuaa

SEQ ID NO: 2524595 - RNA, 19 nt, Artificial Sequence
  Description of Artificial Sequence: Synthetic oligonucleotide
  Antisense strand to SEQ ID NO: 2524594
uuaguuaauggcagcauca

SEQ ID NO: 2524596 - RNA, 19 nt, Artificial Sequence
  Description of Artificial Sequence: Synthetic oligonucleotide
  Sense strand starting at position 2358 of SEQ ID NO: 1888287
cuuugcugcguccuaagua

SEQ ID NO: 2524597 - RNA, 19 nt, Artificial Sequence
  Description of Artificial Sequence: Synthetic oligonucleotide
  Antisense strand to SEQ ID NO: 2524596
uacuuaggacgcagcaaag

SEQ ID NO: 2524598 - RNA, 19 nt, Artificial Sequence
  Description of Artificial Sequence: Synthetic oligonucleotide
  Sense strand starting at position 2450 of SEQ ID NO: 1888287
guccauacaucuccgcaga

SEQ ID NO: 2524599 - RNA, 19 nt, Artificial Sequence
  Description of Artificial Sequence: Synthetic oligonucleotide
  Antisense strand to SEQ ID NO: 2524598
ucugcggagauguauggac

SEQ ID NO: 2524600 - RNA, 19 nt, Artificial Sequence
  Description of Artificial Sequence: Synthetic oligonucleotide
  Sense strand starting at position 2452 of SEQ ID NO: 1888287
ccauacaucuccgcagaga

SEQ ID NO: 2524601 - RNA, 19 nt, Artificial Sequence
  Description of Artificial Sequence: Synthetic oligonucleotide
  Antisense strand to SEQ ID NO: 2524600
ucucugcggagauguaugg

SEQ ID NO: 2524602 - RNA, 19 nt, Artificial Sequence
  Description of Artificial Sequence: Synthetic oligonucleotide
  Sense strand starting at position 2453 of SEQ ID NO: 1888287
cauacaucuccgcagagau

SEQ ID NO: 2524603 - RNA, 19 nt, Artificial Sequence
  Description of Artificial Sequence: Synthetic oligonucleotide
  Antisense strand to SEQ ID NO: 2524602
aucucugcggagauguaug

SEQ ID NO: 2524604 - RNA, 19 nt, Artificial Sequence
  Description of Artificial Sequence: Synthetic oligonucleotide
  Sense strand starting at position 2455 of SEQ ID NO: 1888287
uacaucuccgcagagauga

SEQ ID NO: 2524605 - RNA, 19 nt, Artificial Sequence
  Description of Artificial Sequence: Synthetic oligonucleotide
  Antisense strand to SEQ ID NO: 2524604
ucaucucugcggagaugua

SEQ ID NO: 2524606 - RNA, 19 nt, Artificial Sequence
  Description of Artificial Sequence: Synthetic oligonucleotide
  Sense strand starting at position 2523 of SEQ ID NO: 1888287
guccguaaucccgaacacu

SEQ ID NO: 2524607 - RNA, 19 nt, Artificial Sequence
  Description of Artificial Sequence: Synthetic oligonucleotide
  Antisense strand to SEQ ID NO: 2524606
aguguucgggauuacggac

SEQ ID NO: 2524608 - RNA, 19 nt, Artificial Sequence
  Description of Artificial Sequence: Synthetic oligonucleotide
  Sense strand starting at position 2609 of SEQ ID NO: 1888287
ggagaccugucucuacuua

SEQ ID NO: 2524609 - RNA, 19 nt, Artificial Sequence
  Description of Artificial Sequence: Synthetic oligonucleotide
  Antisense strand to SEQ ID NO: 2524608
uaaguagagacaggucucc

SEQ ID NO: 2524610 - RNA, 19 nt, Artificial Sequence
  Description of Artificial Sequence: Synthetic oligonucleotide
  Sense strand starting at position 2834 of SEQ ID NO: 1888287
guggguaguguguaaccuu

SEQ ID NO: 2524611 - RNA, 19 nt, Artificial Sequence
  Description of Artificial Sequence: Synthetic oligonucleotide
  Antisense strand to SEQ ID NO: 2524610
aagguuacacacuacccac

SEQ ID NO: 2524612 - RNA, 19 nt, Artificial Sequence
  Description of Artificial Sequence: Synthetic oligonucleotide
  Sense strand starting at position 2865 of SEQ ID NO: 1888287
uuaguaucuuaaccuguaa

SEQ ID NO: 2524613 - RNA, 19 nt, Artificial Sequence
  Description of Artificial Sequence: Synthetic oligonucleotide
  Antisense strand to SEQ ID NO: 2524612
uuacagguuaagauacuaa

SEQ ID NO: 2524614 - RNA, 19 nt, Artificial Sequence
  Description of Artificial Sequence: Synthetic oligonucleotide
  Sense strand starting at position 2945 of SEQ ID NO: 1888287
ucugccauguccuuacauu

SEQ ID NO: 2524615 - RNA, 19 nt, Artificial Sequence
  Description of Artificial Sequence: Synthetic oligonucleotide
  Antisense strand to SEQ ID NO: 2524614
aauguaaggacauggcaga

SEQ ID NO: 2524616 - RNA, 19 nt, Artificial Sequence
  Description of Artificial Sequence: Synthetic oligonucleotide
  Sense strand starting at position 2946 of SEQ ID NO: 1888287
cugccauguccuuacauua

SEQ ID NO: 2524617 - RNA, 19 nt, Artificial Sequence
  Description of Artificial Sequence: Synthetic oligonucleotide
  Antisense strand to SEQ ID NO: 2524616
uaauguaaggacauggcag

SEQ ID NO: 2524618 - RNA, 19 nt, Artificial Sequence
  Description of Artificial Sequence: Synthetic oligonucleotide
  Sense strand starting at position 2958 of SEQ ID NO: 1888287
uacauuagcuggguaagga

SEQ ID NO: 2524619 - RNA, 19 nt, Artificial Sequence
  Description of Artificial Sequence: Synthetic oligonucleotide
  Antisense strand to SEQ ID NO: 2524618
uccuuacccagcuaaugua

SEQ ID NO: 2524620 - RNA, 19 nt, Artificial Sequence
  Description of Artificial Sequence: Synthetic oligonucleotide
  Sense strand starting at position 3051 of SEQ ID NO: 1888287
uacuguuaugggugagggu

SEQ ID NO: 2524621 - RNA, 19 nt, Artificial Sequence
  Description of Artificial Sequence: Synthetic oligonucleotide
  Antisense strand to SEQ ID NO: 2524620
acccucacccauaacagua

SEQ ID NO: 2524622 - RNA, 19 nt, Artificial Sequence
  Description of Artificial Sequence: Synthetic oligonucleotide
  Sense strand starting at position 3052 of SEQ ID NO: 1888287
acuguuaugggugaggguu

SEQ ID NO: 2524623 - RNA, 19 nt, Artificial Sequence
  Description of Artificial Sequence: Synthetic oligonucleotide
  Antisense strand to SEQ ID NO: 2524622
aacccucacccauaacagu

SEQ ID NO: 2524624 - RNA, 19 nt, Artificial Sequence
  Description of Artificial Sequence: Synthetic oligonucleotide
  Sense strand starting at position 3106 of SEQ ID NO: 1888287
ccuugauguucugucaauu

SEQ ID NO: 2524625 - RNA, 19 nt, Artificial Sequence
  Description of Artificial Sequence: Synthetic oligonucleotide
  Antisense strand to SEQ ID NO: 2524624
aauugacagaacaucaagg

SEQ ID NO: 2524626 - RNA, 19 nt, Artificial Sequence
  Description of Artificial Sequence: Synthetic oligonucleotide
  Sense strand starting at position 3117 of SEQ ID NO: 1888287
ugucaauucccacaaggua

SEQ ID NO: 2524627 - RNA, 19 nt, Artificial Sequence
  Description of Artificial Sequence: Synthetic oligonucleotide
  Antisense strand to SEQ ID NO: 2524626
uaccuugugggaauugaca

SEQ ID NO: 2524628 - RNA, 19 nt, Artificial Sequence
  Description of Artificial Sequence: Synthetic oligonucleotide
  Sense strand starting at position 3510 of SEQ ID NO: 1888287
ccaggcauccucuggaaca

SEQ ID NO: 2524629 - RNA, 19 nt, Artificial Sequence
  Description of Artificial Sequence: Synthetic oligonucleotide
  Antisense strand to SEQ ID NO: 2524628
uguuccagaggaugccugg

SEQ ID NO: 2524630 - RNA, 19 nt, Artificial Sequence
  Description of Artificial Sequence: Synthetic oligonucleotide
  Sense strand starting at position 3710 of SEQ ID NO: 1888287
gagaguggucauugccuga

SEQ ID NO: 2524631 - RNA, 19 nt, Artificial Sequence
  Description of Artificial Sequence: Synthetic oligonucleotide
  Antisense strand to SEQ ID NO: 2524630
ucaggcaaugaccacucuc

SEQ ID NO: 2524632 - RNA, 19 nt, Artificial Sequence
  Description of Artificial Sequence: Synthetic oligonucleotide
  Sense strand starting at position 3804 of SEQ ID NO: 1888287
ggaugcgguuuacaauuua

SEQ ID NO: 2524633 - RNA, 19 nt, Artificial Sequence
  Description of Artificial Sequence: Synthetic oligonucleotide
  Antisense strand to SEQ ID NO: 2524632
uaaauuguaaaccgcaucc

SEQ ID NO: 2524634 - RNA, 19 nt, Artificial Sequence
  Description of Artificial Sequence: Synthetic oligonucleotide
  Sense strand starting at position 3812 of SEQ ID NO: 1888287
uuuacaauuuaguacggaa

SEQ ID NO: 2524635 - RNA, 19 nt, Artificial Sequence
  Description of Artificial Sequence: Synthetic oligonucleotide
  Antisense strand to SEQ ID NO: 2524634
uuccguacuaaauuguaaa

SEQ ID NO: 2524636 - RNA, 19 nt, Artificial Sequence
  Description of Artificial Sequence: Synthetic oligonucleotide
  Sense strand starting at position 3848 of SEQ ID NO: 1888287
ugggaaugguuccuugaga

SEQ ID NO: 2524637 - RNA, 19 nt, Artificial Sequence
  Description of Artificial Sequence: Synthetic oligonucleotide
  Antisense strand to SEQ ID NO: 2524636
ucucaaggaaccauuccca

SEQ ID NO: 2524638 - RNA, 19 nt, Artificial Sequence
  Description of Artificial Sequence: Synthetic oligonucleotide
  Sense strand starting at position 3849 of SEQ ID NO: 1888287
gggaaugguuccuugagac

SEQ ID NO: 2524639 - RNA, 19 nt, Artificial Sequence
  Description of Artificial Sequence: Synthetic oligonucleotide
  Antisense strand to SEQ ID NO: 2524638
gucucaaggaaccauuccc

SEQ ID NO: 2524640 - RNA, 19 nt, Artificial Sequence
  Description of Artificial Sequence: Synthetic oligonucleotide
  Sense strand starting at position 3886 of SEQ ID NO: 1888287
augcuucauggaugggaga

SEQ ID NO: 2524641 - RNA, 19 nt, Artificial Sequence
  Description of Artificial Sequence: Synthetic oligonucleotide
  Antisense strand to SEQ ID NO: 2524640
ucucccauccaugaagcau

SEQ ID NO: 2524642 - RNA, 19 nt, Artificial Sequence
  Description of Artificial Sequence: Synthetic oligonucleotide
  Sense strand starting at position 3915 of SEQ ID NO: 1888287
gugacuuauuuauagccuu

SEQ ID NO: 2524643 - RNA, 19 nt, Artificial Sequence
  Description of Artificial Sequence: Synthetic oligonucleotide
  Antisense strand to SEQ ID NO: 2524642
aaggcuauaaauaagucac

SEQ ID NO: 2524644 - RNA, 19 nt, Artificial Sequence
  Description of Artificial Sequence: Synthetic oligonucleotide
  Sense strand starting at position 3960 of SEQ ID NO: 1888287
ucuugaaugguguggugaa

SEQ ID NO: 2524645 - RNA, 19 nt, Artificial Sequence
  Description of Artificial Sequence: Synthetic oligonucleotide
  Antisense strand to SEQ ID NO: 2524644
uucaccacaccauucaaga

SEQ ID NO: 2524646 - RNA, 19 nt, Artificial Sequence
  Description of Artificial Sequence: Synthetic oligonucleotide
  Sense strand starting at position 14 of SEQ ID NO: 1888288
ugccaagugcucuuguauu

SEQ ID NO: 2524647 - RNA, 19 nt, Artificial Sequence
  Description of Artificial Sequence: Synthetic oligonucleotide
  Antisense strand to SEQ ID NO: 2524646
aauacaagagcacuuggca

SEQ ID NO: 2524648 - RNA, 19 nt, Artificial Sequence
  Description of Artificial Sequence: Synthetic oligonucleotide
  Sense strand starting at position 20 of SEQ ID NO: 1888288
gugcucuuguauuccacua

SEQ ID NO: 2524649 - RNA, 19 nt, Artificial Sequence
  Description of Artificial Sequence: Synthetic oligonucleotide
  Antisense strand to SEQ ID NO: 2524648
uaguggaauacaagagcac

SEQ ID NO: 2524650 - RNA, 19 nt, Artificial Sequence
  Description of Artificial Sequence: Synthetic oligonucleotide
  Sense strand starting at position 25 of SEQ ID NO: 1888288
cuuguauuccacuagacag

SEQ ID NO: 2524651 - RNA, 19 nt, Artificial Sequence
  Description of Artificial Sequence: Synthetic oligonucleotide
  Antisense strand to SEQ ID NO: 2524650
cugucuaguggaauacaag

SEQ ID NO: 2524652 - RNA, 19 nt, Artificial Sequence
  Description of Artificial Sequence: Synthetic oligonucleotide
  Sense strand starting at position 130 of SEQ ID NO: 1888288
gcuguuaacccagauugua

SEQ ID NO: 2524653 - RNA, 19 nt, Artificial Sequence
  Description of Artificial Sequence: Synthetic oligonucleotide
  Antisense strand to SEQ ID NO: 2524652
uacaaucuggguuaacagc

SEQ ID NO: 2524654 - RNA, 19 nt, Artificial Sequence
  Description of Artificial Sequence: Synthetic oligonucleotide
  Sense strand starting at position 139 of SEQ ID NO: 1888288
ccagauuguagguagccaa

SEQ ID NO: 2524655 - RNA, 19 nt, Artificial Sequence
  Description of Artificial Sequence: Synthetic oligonucleotide
  Antisense strand to SEQ ID NO: 2524654
uuggcuaccuacaaucugg

SEQ ID NO: 2524656 - RNA, 19 nt, Artificial Sequence
  Description of Artificial Sequence: Synthetic oligonucleotide
  Sense strand starting at position 247 of SEQ ID NO: 1888288
guaggaguguuauucuggu

SEQ ID NO: 2524657 - RNA, 19 nt, Artificial Sequence
  Description of Artificial Sequence: Synthetic oligonucleotide
  Antisense strand to SEQ ID NO: 2524656
accagaauaacacuccuac

SEQ ID NO: 2524658 - RNA, 19 nt, Artificial Sequence
  Description of Artificial Sequence: Synthetic oligonucleotide
  Sense strand starting at position 254 of SEQ ID NO: 1888288
uguuauucuggugagaagu

SEQ ID NO: 2524659 - RNA, 19 nt, Artificial Sequence
  Description of Artificial Sequence: Synthetic oligonucleotide
  Antisense strand to SEQ ID NO: 2524658
acuucucaccagaauaaca

SEQ ID NO: 2524660 - RNA, 19 nt, Artificial Sequence
  Description of Artificial Sequence: Synthetic oligonucleotide
  Sense strand starting at position 341 of SEQ ID NO: 1888288
ugaauugacucagcacugu

SEQ ID NO: 2524661 - RNA, 19 nt, Artificial Sequence
  Description of Artificial Sequence: Synthetic oligonucleotide
  Antisense strand to SEQ ID NO: 2524660
acagugcugagucaauuca

SEQ ID NO: 2524662 - RNA, 19 nt, Artificial Sequence
  Description of Artificial Sequence: Synthetic oligonucleotide
  Sense strand starting at position 398 of SEQ ID NO: 1888288
cuccgcuauucugcaagaa

SEQ ID NO: 2524663 - RNA, 19 nt, Artificial Sequence
  Description of Artificial Sequence: Synthetic oligonucleotide
  Antisense strand to SEQ ID NO: 2524662
uucuugcagaauagcggag

SEQ ID NO: 2524664 - RNA, 19 nt, Artificial Sequence
  Description of Artificial Sequence: Synthetic oligonucleotide
  Sense strand starting at position 399 of SEQ ID NO: 1888288
uccgcuauucugcaagaag

SEQ ID NO: 2524665 - RNA, 19 nt, Artificial Sequence
  Description of Artificial Sequence: Synthetic oligonucleotide
  Antisense strand to SEQ ID NO: 2524664
cuucuugcagaauagcgga

SEQ ID NO: 2524666 - RNA, 19 nt, Artificial Sequence
  Description of Artificial Sequence: Synthetic oligonucleotide
  Sense strand starting at position 518 of SEQ ID NO: 1888288
aaguauggcuccuugagac

SEQ ID NO: 2524667 - RNA, 19 nt, Artificial Sequence
  Description of Artificial Sequence: Synthetic oligonucleotide
  Antisense strand to SEQ ID NO: 2524666
gucucaaggagccauacuu

SEQ ID NO: 2524668 - RNA, 19 nt, Artificial Sequence
  Description of Artificial Sequence: Synthetic oligonucleotide
  Sense strand starting at position 612 of SEQ ID NO: 1888288
cgcugcuguggccuuaaau

SEQ ID NO: 2524669 - RNA, 19 nt, Artificial Sequence
  Description of Artificial Sequence: Synthetic oligonucleotide
  Antisense strand to SEQ ID NO: 2524668
auuuaaggccacagcagcg

SEQ ID NO: 2524670 - RNA, 19 nt, Artificial Sequence
  Description of Artificial Sequence: Synthetic oligonucleotide
  Sense strand starting at position 632 of SEQ ID NO: 1888288
ugccaaugauugcuguacu

SEQ ID NO: 2524671 - RNA, 19 nt, Artificial Sequence
  Description of Artificial Sequence: Synthetic oligonucleotide
  Antisense strand to SEQ ID NO: 2524670
aguacagcaaucauuggca

SEQ ID NO: 2524672 - RNA, 19 nt, Artificial Sequence
  Description of Artificial Sequence: Synthetic oligonucleotide
  Sense strand starting at position 635 of SEQ ID NO: 1888288
caaugauugcuguacucag

SEQ ID NO: 2524673 - RNA, 19 nt, Artificial Sequence
  Description of Artificial Sequence: Synthetic oligonucleotide
  Antisense strand to SEQ ID NO: 2524672
cugaguacagcaaucauug

SEQ ID NO: 2524674 - RNA, 19 nt, Artificial Sequence
  Description of Artificial Sequence: Synthetic oligonucleotide
  Sense strand starting at position 695 of SEQ ID NO: 1888288
cuguuugcuuccuccauca

SEQ ID NO: 2524675 - RNA, 19 nt, Artificial Sequence
  Description of Artificial Sequence: Synthetic oligonucleotide
  Antisense strand to SEQ ID NO: 2524674
ugauggaggaagcaaacag

SEQ ID NO: 2524676 - RNA, 19 nt, Artificial Sequence
  Description of Artificial Sequence: Synthetic oligonucleotide
  Sense strand starting at position 697 of SEQ ID NO: 1888288
guuugcuuccuccaucaga

SEQ ID NO: 2524677 - RNA, 19 nt, Artificial Sequence
  Description of Artificial Sequence: Synthetic oligonucleotide
  Antisense strand to SEQ ID NO: 2524676
ucugauggaggaagcaaac

SEQ ID NO: 2524678 - RNA, 19 nt, Artificial Sequence
  Description of Artificial Sequence: Synthetic oligonucleotide
  Sense strand starting at position 845 of SEQ ID NO: 1888288
gggaacuucugagcugaac

SEQ ID NO: 2524679 - RNA, 19 nt, Artificial Sequence
  Description of Artificial Sequence: Synthetic oligonucleotide
  Antisense strand to SEQ ID NO: 2524678
guucagcucagaaguuccc

SEQ ID NO: 2524680 - RNA, 19 nt, Artificial Sequence
  Description of Artificial Sequence: Synthetic oligonucleotide
  Sense strand starting at position 900 of SEQ ID NO: 1888288
gagugagcgucuccacaga

SEQ ID NO: 2524681 - RNA, 19 nt, Artificial Sequence
  Description of Artificial Sequence: Synthetic oligonucleotide
  Antisense strand to SEQ ID NO: 2524680
ucuguggagacgcucacuc

SEQ ID NO: 2524682 - RNA, 19 nt, Artificial Sequence
  Description of Artificial Sequence: Synthetic oligonucleotide
  Sense strand starting at position 931 of SEQ ID NO: 1888288
aggauaugcuucccucacu

SEQ ID NO: 2524683 - RNA, 19 nt, Artificial Sequence
  Description of Artificial Sequence: Synthetic oligonucleotide
  Antisense strand to SEQ ID NO: 2524682
agugagggaagcauauccu

SEQ ID NO: 2524684 - RNA, 19 nt, Artificial Sequence
  Description of Artificial Sequence: Synthetic oligonucleotide
  Sense strand starting at position 1027 of SEQ ID NO: 1888288
gggcuucccucaguugaau

SEQ ID NO: 2524685 - RNA, 19 nt, Artificial Sequence
  Description of Artificial Sequence: Synthetic oligonucleotide
  Antisense strand to SEQ ID NO: 2524684
auucaacugagggaagccc

SEQ ID NO: 2524686 - RNA, 19 nt, Artificial Sequence
  Description of Artificial Sequence: Synthetic oligonucleotide
  Sense strand starting at position 1168 of SEQ ID NO: 1888288
ccaucuguauccucgaaca

SEQ ID NO: 2524687 - RNA, 19 nt, Artificial Sequence
  Description of Artificial Sequence: Synthetic oligonucleotide
  Antisense strand to SEQ ID NO: 2524686
uguucgaggauacagaugg

SEQ ID NO: 2524688 - RNA, 19 nt, Artificial Sequence
  Description of Artificial Sequence: Synthetic oligonucleotide
  Sense strand starting at position 1181 of SEQ ID NO: 1888288
cgaacaggagacugguaau

SEQ ID NO: 2524689 - RNA, 19 nt, Artificial Sequence
  Description of Artificial Sequence: Synthetic oligonucleotide
  Antisense strand to SEQ ID NO: 2524688
auuaccagucuccuguucg

SEQ ID NO: 2524690 - RNA, 19 nt, Artificial Sequence
  Description of Artificial Sequence: Synthetic oligonucleotide
  Sense strand starting at position 1184 of SEQ ID NO: 1888288
acaggagacugguaaugau

SEQ ID NO: 2524691 - RNA, 19 nt, Artificial Sequence
  Description of Artificial Sequence: Synthetic oligonucleotide
  Antisense strand to SEQ ID NO: 2524690
aucauuaccagucuccugu

SEQ ID NO: 2524692 - RNA, 19 nt, Artificial Sequence
  Description of Artificial Sequence: Synthetic oligonucleotide
  Sense strand starting at position 1264 of SEQ ID NO: 1888288
ucacuuaucaugcggagac

SEQ ID NO: 2524693 - RNA, 19 nt, Artificial Sequence
  Description of Artificial Sequence: Synthetic oligonucleotide
  Antisense strand to SEQ ID NO: 2524692
gucuccgcaugauaaguga

SEQ ID NO: 2524694 - RNA, 19 nt, Artificial Sequence
  Description of Artificial Sequence: Synthetic oligonucleotide
  Sense strand starting at position 2099 of SEQ ID NO: 1888288
aaggaaauaucugcgugcu

SEQ ID NO: 2524695 - RNA, 19 nt, Artificial Sequence
  Description of Artificial Sequence: Synthetic oligonucleotide
  Antisense strand to SEQ ID NO: 2524694
agcacgcagauauuuccuu

SEQ ID NO: 2524696 - RNA, 19 nt, Artificial Sequence
  Description of Artificial Sequence: Synthetic oligonucleotide
  Sense strand starting at position 2100 of SEQ ID NO: 1888288
aggaaauaucugcgugcuc

SEQ ID NO: 2524697 - RNA, 19 nt, Artificial Sequence
  Description of Artificial Sequence: Synthetic oligonucleotide
  Antisense strand to SEQ ID NO: 2524696
gagcacgcagauauuuccu

SEQ ID NO: 2524698 - RNA, 19 nt, Artificial Sequence
  Description of Artificial Sequence: Synthetic oligonucleotide
  Sense strand starting at position 2166 of SEQ ID NO: 1888288
uugugaugugcuuagugag

SEQ ID NO: 2524699 - RNA, 19 nt, Artificial Sequence
  Description of Artificial Sequence: Synthetic oligonucleotide
  Antisense strand to SEQ ID NO: 2524698
cucacuaagcacaucacaa

SEQ ID NO: 2524700 - RNA, 19 nt, Artificial Sequence
  Description of Artificial Sequence: Synthetic oligonucleotide
  Sense strand starting at position 2208 of SEQ ID NO: 1888288
ggaaggcgcgauugugaaa

SEQ ID NO: 2524701 - RNA, 19 nt, Artificial Sequence
  Description of Artificial Sequence: Synthetic oligonucleotide
  Antisense strand to SEQ ID NO: 2524700
uuucacaaucgcgccuucc

SEQ ID NO: 2524702 - RNA, 19 nt, Artificial Sequence
  Description of Artificial Sequence: Synthetic oligonucleotide
  Sense strand starting at position 2280 of SEQ ID NO: 1888288
ccugucuaguuccuaucua

SEQ ID NO: 2524703 - RNA, 19 nt, Artificial Sequence
  Description of Artificial Sequence: Synthetic oligonucleotide
  Antisense strand to SEQ ID NO: 2524702
uagauaggaacuagacagg

SEQ ID NO: 2524704 - RNA, 19 nt, Artificial Sequence
  Description of Artificial Sequence: Synthetic oligonucleotide
  Sense strand starting at position 2284 of SEQ ID NO: 1888288
ucuaguuccuaucuagauc

SEQ ID NO: 2524705 - RNA, 19 nt, Artificial Sequence
  Description of Artificial Sequence: Synthetic oligonucleotide
  Antisense strand to SEQ ID NO: 2524704
gaucuagauaggaacuaga

SEQ ID NO: 2524706 - RNA, 19 nt, Artificial Sequence
  Description of Artificial Sequence: Synthetic oligonucleotide
  Sense strand starting at position 2677 of SEQ ID NO: 1888288
auagacaucucugaagaag

SEQ ID NO: 2524707 - RNA, 19 nt, Artificial Sequence
  Description of Artificial Sequence: Synthetic oligonucleotide
  Antisense strand to SEQ ID NO: 2524706
cuucuucagagaugucuau

SEQ ID NO: 2524708 - RNA, 19 nt, Artificial Sequence
  Description of Artificial Sequence: Synthetic oligonucleotide
  Sense strand starting at position 2716 of SEQ ID NO: 1888288
cuuacauucuagucguaga

SEQ ID NO: 2524709 - RNA, 19 nt, Artificial Sequence
  Description of Artificial Sequence: Synthetic oligonucleotide
  Antisense strand to SEQ ID NO: 2524708
ucuacgacuagaauguaag

SEQ ID NO: 2524710 - RNA, 19 nt, Artificial Sequence
  Description of Artificial Sequence: Synthetic oligonucleotide
  Sense strand starting at position 2726 of SEQ ID NO: 1888288
agucguagacagcaaguaa

SEQ ID NO: 2524711 - RNA, 19 nt, Artificial Sequence
  Description of Artificial Sequence: Synthetic oligonucleotide
  Antisense strand to SEQ ID NO: 2524710
uuacuugcugucuacgacu

SEQ ID NO: 2524712 - RNA, 19 nt, Artificial Sequence
  Description of Artificial Sequence: Synthetic oligonucleotide
  Sense strand starting at position 2820 of SEQ ID NO: 1888288
cuccuaagguggucauauu

SEQ ID NO: 2524713 - RNA, 19 nt, Artificial Sequence
  Description of Artificial Sequence: Synthetic oligonucleotide
  Antisense strand to SEQ ID NO: 2524712
aauaugaccaccuuaggag

SEQ ID NO: 2524714 - RNA, 19 nt, Artificial Sequence
  Description of Artificial Sequence: Synthetic oligonucleotide
  Sense strand starting at position 2928 of SEQ ID NO: 1888288
agguacuccuccuuuauua

SEQ ID NO: 2524715 - RNA, 19 nt, Artificial Sequence
  Description of Artificial Sequence: Synthetic oligonucleotide
  Antisense strand to SEQ ID NO: 2524714
uaauaaaggaggaguaccu

SEQ ID NO: 2524716 - RNA, 19 nt, Artificial Sequence
  Description of Artificial Sequence: Synthetic oligonucleotide
  Sense strand starting at position 2944 of SEQ ID NO: 1888288
uuauaaauugucugagaag

SEQ ID NO: 2524717 - RNA, 19 nt, Artificial Sequence
  Description of Artificial Sequence: Synthetic oligonucleotide
  Antisense strand to SEQ ID NO: 2524716
cuucucagacaauuuauaa

SEQ ID NO: 2524718 - RNA, 19 nt, Artificial Sequence
  Description of Artificial Sequence: Synthetic oligonucleotide
  Sense strand starting at position 2963 of SEQ ID NO: 1888288
cccuuauauggauguagac

SEQ ID NO: 2524719 - RNA, 19 nt, Artificial Sequence
  Description of Artificial Sequence: Synthetic oligonucleotide
  Antisense strand to SEQ ID NO: 2524718
gucuacauccauauaaggg

SEQ ID NO: 2524720 - RNA, 19 nt, Artificial Sequence
  Description of Artificial Sequence: Synthetic oligonucleotide
  Sense strand starting at position 3104 of SEQ ID NO: 1888288
ucaucaccuuugucugaua

SEQ ID NO: 2524721 - RNA, 19 nt, Artificial Sequence
  Description of Artificial Sequence: Synthetic oligonucleotide
  Antisense strand to SEQ ID NO: 2524720
uaucagacaaaggugauga

SEQ ID NO: 2524722 - RNA, 19 nt, Artificial Sequence
  Description of Artificial Sequence: Synthetic oligonucleotide
  Sense strand starting at position 3359 of SEQ ID NO: 1888288
ggacacacaucagauuaaa

SEQ ID NO: 2524723 - RNA, 19 nt, Artificial Sequence
  Description of Artificial Sequence: Synthetic oligonucleotide
  Antisense strand to SEQ ID NO: 2524722
uuuaaucugaugugugucc

SEQ ID NO: 2524724 - RNA, 19 nt, Artificial Sequence
  Description of Artificial Sequence: Synthetic oligonucleotide
  Sense strand starting at position 3552 of SEQ ID NO: 1888288
gcaggugagugacuccuua

SEQ ID NO: 2524725 - RNA, 19 nt, Artificial Sequence
  Description of Artificial Sequence: Synthetic oligonucleotide
  Antisense strand to SEQ ID NO: 2524724
uaaggagucacucaccugc

SEQ ID NO: 2524726 - RNA, 19 nt, Artificial Sequence
  Description of Artificial Sequence: Synthetic oligonucleotide
  Sense strand starting at position 438 of SEQ ID NO: 1888289
gucugugccucuccagaau

SEQ ID NO: 2524727 - RNA, 19 nt, Artificial Sequence
  Description of Artificial Sequence: Synthetic oligonucleotide
  Antisense strand to SEQ ID NO: 2524726
auucuggagaggcacagac

SEQ ID NO: 2524728 - RNA, 19 nt, Artificial Sequence
  Description of Artificial Sequence: Synthetic oligonucleotide
  Sense strand starting at position 441 of SEQ ID NO: 1888289
ugugccucuccagaaucuu

SEQ ID NO: 2524729 - RNA, 19 nt, Artificial Sequence
  Description of Artificial Sequence: Synthetic oligonucleotide
  Antisense strand to SEQ ID NO: 2524728
aagauucuggagaggcaca

SEQ ID NO: 2524730 - RNA, 19 nt, Artificial Sequence
  Description of Artificial Sequence: Synthetic oligonucleotide
  Sense strand starting at position 473 of SEQ ID NO: 1888289
gugugcuuguguucuuaga

SEQ ID NO: 2524731 - RNA, 19 nt, Artificial Sequence
  Description of Artificial Sequence: Synthetic oligonucleotide
  Antisense strand to SEQ ID NO: 2524730
ucuaagaacacaagcacac

SEQ ID NO: 2524732 - RNA, 19 nt, Artificial Sequence
  Description of Artificial Sequence: Synthetic oligonucleotide
  Sense strand starting at position 475 of SEQ ID NO: 1888289
gugcuuguguucuuagaaa

SEQ ID NO: 2524733 - RNA, 19 nt, Artificial Sequence
  Description of Artificial Sequence: Synthetic oligonucleotide
  Antisense strand to SEQ ID NO: 2524732
uuucuaagaacacaagcac

SEQ ID NO: 2524734 - RNA, 19 nt, Artificial Sequence
  Description of Artificial Sequence: Synthetic oligonucleotide
  Sense strand starting at position 864 of SEQ ID NO: 1888289
cugucauggucucagggaa

SEQ ID NO: 2524735 - RNA, 19 nt, Artificial Sequence
  Description of Artificial Sequence: Synthetic oligonucleotide
  Antisense strand to SEQ ID NO: 2524734
uucccugagaccaugacag

SEQ ID NO: 2524736 - RNA, 19 nt, Artificial Sequence
  Description of Artificial Sequence: Synthetic oligonucleotide
  Sense strand starting at position 936 of SEQ ID NO: 1888289
agcccaucucucggagaaa

SEQ ID NO: 2524737 - RNA, 19 nt, Artificial Sequence
  Description of Artificial Sequence: Synthetic oligonucleotide
  Antisense strand to SEQ ID NO: 2524736
uuucuccgagagaugggcu

SEQ ID NO: 2524738 - RNA, 19 nt, Artificial Sequence
  Description of Artificial Sequence: Synthetic oligonucleotide
  Sense strand starting at position 1114 of SEQ ID NO: 1888289
ccaagacugcucuggugga

SEQ ID NO: 2524739 - RNA, 19 nt, Artificial Sequence
  Description of Artificial Sequence: Synthetic oligonucleotide
  Antisense strand to SEQ ID NO: 2524738
uccaccagagcagucuugg

SEQ ID NO: 2524740 - RNA, 19 nt, Artificial Sequence
  Description of Artificial Sequence: Synthetic oligonucleotide
  Sense strand starting at position 1990 of SEQ ID NO: 1888289
guaaguaggucugcagaca

SEQ ID NO: 2524741 - RNA, 19 nt, Artificial Sequence
  Description of Artificial Sequence: Synthetic oligonucleotide
  Antisense strand to SEQ ID NO: 2524740
ugucugcagaccuacuuac

SEQ ID NO: 2524742 - RNA, 19 nt, Artificial Sequence
  Description of Artificial Sequence: Synthetic oligonucleotide
  Sense strand starting at position 1991 of SEQ ID NO: 1888289
uaaguaggucugcagacaa

SEQ ID NO: 2524743 - RNA, 19 nt, Artificial Sequence
  Description of Artificial Sequence: Synthetic oligonucleotide
  Antisense strand to SEQ ID NO: 2524742
uugucugcagaccuacuua

SEQ ID NO: 2524744 - RNA, 19 nt, Artificial Sequence
  Description of Artificial Sequence: Synthetic oligonucleotide
  Sense strand starting at position 2011 of SEQ ID NO: 1888289
gaguccugcccuggaggaa

SEQ ID NO: 2524745 - RNA, 19 nt, Artificial Sequence
  Description of Artificial Sequence: Synthetic oligonucleotide
  Antisense strand to SEQ ID NO: 2524744
uuccuccagggcaggacuc

SEQ ID NO: 2524746 - RNA, 19 nt, Artificial Sequence
  Description of Artificial Sequence: Synthetic oligonucleotide
  Sense strand starting at position 2012 of SEQ ID NO: 1888289
aguccugcccuggaggaaa

SEQ ID NO: 2524747 - RNA, 19 nt, Artificial Sequence
  Description of Artificial Sequence: Synthetic oligonucleotide
  Antisense strand to SEQ ID NO: 2524746
uuuccuccagggcaggacu

SEQ ID NO: 2524748 - RNA, 19 nt, Artificial Sequence
  Description of Artificial Sequence: Synthetic oligonucleotide
  Sense strand starting at position 2047 of SEQ ID NO: 1888289
gccuccugccugugguauu

SEQ ID NO: 2524749 - RNA, 19 nt, Artificial Sequence
  Description of Artificial Sequence: Synthetic oligonucleotide
  Antisense strand to SEQ ID NO: 2524748
aauaccacaggcaggaggc

SEQ ID NO: 2524750 - RNA, 19 nt, Artificial Sequence
  Description of Artificial Sequence: Synthetic oligonucleotide
  Sense strand starting at position 2259 of SEQ ID NO: 1888289
cuuccaguucuggauugga

SEQ ID NO: 2524751 - RNA, 19 nt, Artificial Sequence
  Description of Artificial Sequence: Synthetic oligonucleotide
  Antisense strand to SEQ ID NO: 2524750
uccaauccagaacuggaag

SEQ ID NO: 2524752 - RNA, 19 nt, Artificial Sequence
  Description of Artificial Sequence: Synthetic oligonucleotide
  Sense strand starting at position 2282 of SEQ ID NO: 1888289
gcagggcuggguugugaau

SEQ ID NO: 2524753 - RNA, 19 nt, Artificial Sequence
  Description of Artificial Sequence: Synthetic oligonucleotide
  Antisense strand to SEQ ID NO: 2524752
auucacaacccagcccugc

SEQ ID NO: 2524754 - RNA, 19 nt, Artificial Sequence
  Description of Artificial Sequence: Synthetic oligonucleotide
  Sense strand starting at position 2289 of SEQ ID NO: 1888289
uggguugugaauuagugaa

SEQ ID NO: 2524755 - RNA, 19 nt, Artificial Sequence
  Description of Artificial Sequence: Synthetic oligonucleotide
  Antisense strand to SEQ ID NO: 2524754
uucacuaauucacaaccca

SEQ ID NO: 2524756 - RNA, 19 nt, Artificial Sequence
  Description of Artificial Sequence: Synthetic oligonucleotide
  Sense strand starting at position 2311 of SEQ ID NO: 1888289
cgcacuguccaguagagua

SEQ ID NO: 2524757 - RNA, 19 nt, Artificial Sequence
  Description of Artificial Sequence: Synthetic oligonucleotide
  Antisense strand to SEQ ID NO: 2524756
uacucuacuggacagugcg

SEQ ID NO: 2524758 - RNA, 19 nt, Artificial Sequence
  Description of Artificial Sequence: Synthetic oligonucleotide
  Sense strand starting at position 2405 of SEQ ID NO: 1888289
uuuaaagugcuugauaguc

SEQ ID NO: 2524759 - RNA, 19 nt, Artificial Sequence
  Description of Artificial Sequence: Synthetic oligonucleotide
  Antisense strand to SEQ ID NO: 2524758
gacuaucaagcacuuuaaa

SEQ ID NO: 2524760 - RNA, 19 nt, Artificial Sequence
  Description of Artificial Sequence: Synthetic oligonucleotide
  Sense strand starting at position 2442 of SEQ ID NO: 1888289
cuggguuucggccauaauc

SEQ ID NO: 2524761 - RNA, 19 nt, Artificial Sequence
  Description of Artificial Sequence: Synthetic oligonucleotide
  Antisense strand to SEQ ID NO: 2524760
gauuauggccgaaacccag

SEQ ID NO: 2524762 - RNA, 19 nt, Artificial Sequence
  Description of Artificial Sequence: Synthetic oligonucleotide
  Sense strand starting at position 2481 of SEQ ID NO: 1888289
ggccauaacaccgaauguu

SEQ ID NO: 2524763 - RNA, 19 nt, Artificial Sequence
  Description of Artificial Sequence: Synthetic oligonucleotide
  Antisense strand to SEQ ID NO: 2524762
aacauucgguguuauggcc

SEQ ID NO: 2524764 - RNA, 19 nt, Artificial Sequence
  Description of Artificial Sequence: Synthetic oligonucleotide
  Sense strand starting at position 2535 of SEQ ID NO: 1888289
aucccugaugucuaauuga

SEQ ID NO: 2524765 - RNA, 19 nt, Artificial Sequence
  Description of Artificial Sequence: Synthetic oligonucleotide
  Antisense strand to SEQ ID NO: 2524764
ucaauuagacaucagggau

SEQ ID NO: 2524766 - RNA, 19 nt, Artificial Sequence
  Description of Artificial Sequence: Synthetic oligonucleotide
  Sense strand starting at position 2538 of SEQ ID NO: 1888289
ccugaugucuaauugaauc

SEQ ID NO: 2524767 - RNA, 19 nt, Artificial Sequence
  Description of Artificial Sequence: Synthetic oligonucleotide
  Antisense strand to SEQ ID NO: 2524766
gauucaauuagacaucagg

SEQ ID NO: 2524768 - RNA, 19 nt, Artificial Sequence
  Description of Artificial Sequence: Synthetic oligonucleotide
  Sense strand starting at position 2677 of SEQ ID NO: 1888289
cauuuaggauuauggugau

SEQ ID NO: 2524769 - RNA, 19 nt, Artificial Sequence
  Description of Artificial Sequence: Synthetic oligonucleotide
  Antisense strand to SEQ ID NO: 2524768
aucaccauaauccuaaaug

SEQ ID NO: 2524770 - RNA, 19 nt, Artificial Sequence
  Description of Artificial Sequence: Synthetic oligonucleotide
  Sense strand starting at position 2836 of SEQ ID NO: 1888289
ugaacugucaccugggaga

SEQ ID NO: 2524771 - RNA, 19 nt, Artificial Sequence
  Description of Artificial Sequence: Synthetic oligonucleotide
  Antisense strand to SEQ ID NO: 2524770
ucucccaggugacaguuca

SEQ ID NO: 2524772 - RNA, 19 nt, Artificial Sequence
  Description of Artificial Sequence: Synthetic oligonucleotide
  Sense strand starting at position 3003 of SEQ ID NO: 1888289
cagagaggugccugaaaug

SEQ ID NO: 2524773 - RNA, 19 nt, Artificial Sequence
  Description of Artificial Sequence: Synthetic oligonucleotide
  Antisense strand to SEQ ID NO: 2524772
cauuucaggcaccucucug

SEQ ID NO: 2524774 - RNA, 19 nt, Artificial Sequence
  Description of Artificial Sequence: Synthetic oligonucleotide
  Sense strand starting at position 3014 of SEQ ID NO: 1888289
cugaaauggcucugucugu

SEQ ID NO: 2524775 - RNA, 19 nt, Artificial Sequence
  Description of Artificial Sequence: Synthetic oligonucleotide
  Antisense strand to SEQ ID NO: 2524774
acagacagagccauuucag

SEQ ID NO: 2524776 - RNA, 19 nt, Artificial Sequence
  Description of Artificial Sequence: Synthetic oligonucleotide
  Sense strand starting at position 3021 of SEQ ID NO: 1888289
ggcucugucugugccaaga

SEQ ID NO: 2524777 - RNA, 19 nt, Artificial Sequence
  Description of Artificial Sequence: Synthetic oligonucleotide
  Antisense strand to SEQ ID NO: 2524776
ucuuggcacagacagagcc

SEQ ID NO: 2524778 - RNA, 19 nt, Artificial Sequence
  Description of Artificial Sequence: Synthetic oligonucleotide
  Sense strand starting at position 3043 of SEQ ID NO: 1888289
gugacaagaucuccagagu

SEQ ID NO: 2524779 - RNA, 19 nt, Artificial Sequence
  Description of Artificial Sequence: Synthetic oligonucleotide
  Antisense strand to SEQ ID NO: 2524778
acucuggagaucuugucac

SEQ ID NO: 2524780 - RNA, 19 nt, Artificial Sequence
  Description of Artificial Sequence: Synthetic oligonucleotide
  Sense strand starting at position 3110 of SEQ ID NO: 1888289
guuuauucccuccggguuu

SEQ ID NO: 2524781 - RNA, 19 nt, Artificial Sequence
  Description of Artificial Sequence: Synthetic oligonucleotide
  Antisense strand to SEQ ID NO: 2524780
aaacccggagggaauaaac

SEQ ID NO: 2524782 - RNA, 19 nt, Artificial Sequence
  Description of Artificial Sequence: Synthetic oligonucleotide
  Sense strand starting at position 3254 of SEQ ID NO: 1888289
gggucuguugccugcuauu

SEQ ID NO: 2524783 - RNA, 19 nt, Artificial Sequence
  Description of Artificial Sequence: Synthetic oligonucleotide
  Antisense strand to SEQ ID NO: 2524782
aauagcaggcaacagaccc

SEQ ID NO: 2524784 - RNA, 19 nt, Artificial Sequence
  Description of Artificial Sequence: Synthetic oligonucleotide
  Sense strand starting at position 3290 of SEQ ID NO: 1888289
gacauuugccuuugucguu

SEQ ID NO: 2524785 - RNA, 19 nt, Artificial Sequence
  Description of Artificial Sequence: Synthetic oligonucleotide
  Antisense strand to SEQ ID NO: 2524784
aacgacaaaggcaaauguc

SEQ ID NO: 2524786 - RNA, 19 nt, Artificial Sequence
  Description of Artificial Sequence: Synthetic oligonucleotide
  Sense strand starting at position 3291 of SEQ ID NO: 1888289
acauuugccuuugucguua

SEQ ID NO: 2524787 - RNA, 19 nt, Artificial Sequence
  Description of Artificial Sequence: Synthetic oligonucleotide
  Antisense strand to SEQ ID NO: 2524786
uaacgacaaaggcaaaugu

SEQ ID NO: 2524788 - RNA, 19 nt, Artificial Sequence
  Description of Artificial Sequence: Synthetic oligonucleotide
  Sense strand starting at position 3294 of SEQ ID NO: 1888289
uuugccuuugucguuagau

SEQ ID NO: 2524789 - RNA, 19 nt, Artificial Sequence
  Description of Artificial Sequence: Synthetic oligonucleotide
  Antisense strand to SEQ ID NO: 2524788
aucuaacgacaaaggcaaa

SEQ ID NO: 2524790 - RNA, 19 nt, Artificial Sequence
  Description of Artificial Sequence: Synthetic oligonucleotide
  Sense strand starting at position 3295 of SEQ ID NO: 1888289
uugccuuugucguuagaua

SEQ ID NO: 2524791 - RNA, 19 nt, Artificial Sequence
  Description of Artificial Sequence: Synthetic oligonucleotide
  Antisense strand to SEQ ID NO: 2524790
uaucuaacgacaaaggcaa

SEQ ID NO: 2524792 - RNA, 19 nt, Artificial Sequence
  Description of Artificial Sequence: Synthetic oligonucleotide
  Sense strand starting at position 3296 of SEQ ID NO: 1888289
ugccuuugucguuagauac

SEQ ID NO: 2524793 - RNA, 19 nt, Artificial Sequence
  Description of Artificial Sequence: Synthetic oligonucleotide
  Antisense strand to SEQ ID NO: 2524792
guaucuaacgacaaaggca

SEQ ID NO: 2524794 - RNA, 19 nt, Artificial Sequence
  Description of Artificial Sequence: Synthetic oligonucleotide
  Sense strand starting at position 3303 of SEQ ID NO: 1888289
gucguuagauacucuucuu

SEQ ID NO: 2524795 - RNA, 19 nt, Artificial Sequence
  Description of Artificial Sequence: Synthetic oligonucleotide
  Antisense strand to SEQ ID NO: 2524794
aagaagaguaucuaacgac

SEQ ID NO: 2524796 - RNA, 19 nt, Artificial Sequence
  Description of Artificial Sequence: Synthetic oligonucleotide
  Sense strand starting at position 3306 of SEQ ID NO: 1888289
guuagauacucuucuugua

SEQ ID NO: 2524797 - RNA, 19 nt, Artificial Sequence
  Description of Artificial Sequence: Synthetic oligonucleotide
  Antisense strand to SEQ ID NO: 2524796
uacaagaagaguaucuaac

SEQ ID NO: 2524798 - RNA, 19 nt, Artificial Sequence
  Description of Artificial Sequence: Synthetic oligonucleotide
  Sense strand starting at position 3309 of SEQ ID NO: 1888289
agauacucuucuuguaaag

SEQ ID NO: 2524799 - RNA, 19 nt, Artificial Sequence
  Description of Artificial Sequence: Synthetic oligonucleotide
  Antisense strand to SEQ ID NO: 2524798
cuuuacaagaagaguaucu

SEQ ID NO: 2524800 - RNA, 19 nt, Artificial Sequence
  Description of Artificial Sequence: Synthetic oligonucleotide
  Sense strand starting at position 3320 of SEQ ID NO: 1888289
uuguaaagcucauuuguag

SEQ ID NO: 2524801 - RNA, 19 nt, Artificial Sequence
  Description of Artificial Sequence: Synthetic oligonucleotide
  Antisense strand to SEQ ID NO: 2524800
cuacaaaugagcuuuacaa

SEQ ID NO: 2524802 - RNA, 19 nt, Artificial Sequence
  Description of Artificial Sequence: Synthetic oligonucleotide
  Sense strand starting at position 3557 of SEQ ID NO: 1888289
aagugaucucacuagccag

SEQ ID NO: 2524803 - RNA, 19 nt, Artificial Sequence
  Description of Artificial Sequence: Synthetic oligonucleotide
  Antisense strand to SEQ ID NO: 2524802
cuggcuagugagaucacuu

SEQ ID NO: 2524804 - RNA, 19 nt, Artificial Sequence
  Description of Artificial Sequence: Synthetic oligonucleotide
  Sense strand starting at position 3645 of SEQ ID NO: 1888289
gcucauuuguaagaauaag

SEQ ID NO: 2524805 - RNA, 19 nt, Artificial Sequence
  Description of Artificial Sequence: Synthetic oligonucleotide
  Antisense strand to SEQ ID NO: 2524804
cuuauucuuacaaaugagc

SEQ ID NO: 2524806 - RNA, 19 nt, Artificial Sequence
  Description of Artificial Sequence: Synthetic oligonucleotide
  Sense strand starting at position 3130 of SEQ ID NO: 1888290
ggguuaaagugcuaaacau

SEQ ID NO: 2524807 - RNA, 19 nt, Artificial Sequence
  Description of Artificial Sequence: Synthetic oligonucleotide
  Antisense strand to SEQ ID NO: 2524806
auguuuagcacuuuaaccc

SEQ ID NO: 2524808 - RNA, 19 nt, Artificial Sequence
  Description of Artificial Sequence: Synthetic oligonucleotide
  Sense strand starting at position 3137 of SEQ ID NO: 1888290
agugcuaaacaucaaggua

SEQ ID NO: 2524809 - RNA, 19 nt, Artificial Sequence
  Description of Artificial Sequence: Synthetic oligonucleotide
  Antisense strand to SEQ ID NO: 2524808
uaccuugauguuuagcacu

SEQ ID NO: 2524810 - RNA, 19 nt, Artificial Sequence
  Description of Artificial Sequence: Synthetic oligonucleotide
  Sense strand starting at position 3179 of SEQ ID NO: 1888290
agggauuaucugugggcuu

SEQ ID NO: 2524811 - RNA, 19 nt, Artificial Sequence
  Description of Artificial Sequence: Synthetic oligonucleotide
  Antisense strand to SEQ ID NO: 2524810
aagcccacagauaaucccu

SEQ ID NO: 2524812 - RNA, 19 nt, Artificial Sequence
  Description of Artificial Sequence: Synthetic oligonucleotide
  Sense strand starting at position 3180 of SEQ ID NO: 1888290
gggauuaucugugggcuuu

SEQ ID NO: 2524813 - RNA, 19 nt, Artificial Sequence
  Description of Artificial Sequence: Synthetic oligonucleotide
  Antisense strand to SEQ ID NO: 2524812
aaagcccacagauaauccc

SEQ ID NO: 2524814 - RNA, 19 nt, Artificial Sequence
  Description of Artificial Sequence: Synthetic oligonucleotide
  Sense strand starting at position 3181 of SEQ ID NO: 1888290
ggauuaucugugggcuuug

SEQ ID NO: 2524815 - RNA, 19 nt, Artificial Sequence
  Description of Artificial Sequence: Synthetic oligonucleotide
  Antisense strand to SEQ ID NO: 2524814
caaagcccacagauaaucc

SEQ ID NO: 2524816 - RNA, 19 nt, Artificial Sequence
  Description of Artificial Sequence: Synthetic oligonucleotide
  Sense strand starting at position 3199 of SEQ ID NO: 1888290
gggagugucccggaaacuc

SEQ ID NO: 2524817 - RNA, 19 nt, Artificial Sequence
  Description of Artificial Sequence: Synthetic oligonucleotide
  Antisense strand to SEQ ID NO: 2524816
gaguuuccgggacacuccc

SEQ ID NO: 2524818 - RNA, 19 nt, Artificial Sequence
  Description of Artificial Sequence: Synthetic oligonucleotide
  Sense strand starting at position 3639 of SEQ ID NO: 1888290
agccuucuggcccaaggau

SEQ ID NO: 2524819 - RNA, 19 nt, Artificial Sequence
  Description of Artificial Sequence: Synthetic oligonucleotide
  Antisense strand to SEQ ID NO: 2524818
auccuugggccagaaggcu

SEQ ID NO: 2524820 - RNA, 19 nt, Artificial Sequence
  Description of Artificial Sequence: Synthetic oligonucleotide
  Sense strand starting at position 3696 of SEQ ID NO: 1888290
caaagugcuccuggaacuu

SEQ ID NO: 2524821 - RNA, 19 nt, Artificial Sequence
  Description of Artificial Sequence: Synthetic oligonucleotide
  Antisense strand to SEQ ID NO: 2524820
aaguuccaggagcacuuug

SEQ ID NO: 2524822 - RNA, 19 nt, Artificial Sequence
  Description of Artificial Sequence: Synthetic oligonucleotide
  Sense strand starting at position 3916 of SEQ ID NO: 1888290
gucggauugcgaguguuug

SEQ ID NO: 2524823 - RNA, 19 nt, Artificial Sequence
  Description of Artificial Sequence: Synthetic oligonucleotide
  Antisense strand to SEQ ID NO: 2524822
caaacacucgcaauccgac

SEQ ID NO: 2524824 - RNA, 19 nt, Artificial Sequence
  Description of Artificial Sequence: Synthetic oligonucleotide
  Sense strand starting at position 3917 of SEQ ID NO: 1888290
ucggauugcgaguguuugu

SEQ ID NO: 2524825 - RNA, 19 nt, Artificial Sequence
  Description of Artificial Sequence: Synthetic oligonucleotide
  Antisense strand to SEQ ID NO: 2524824
acaaacacucgcaauccga

SEQ ID NO: 2524826 - RNA, 19 nt, Artificial Sequence
  Description of Artificial Sequence: Synthetic oligonucleotide
  Sense strand starting at position 3918 of SEQ ID NO: 1888290
cggauugcgaguguuugua

SEQ ID NO: 2524827 - RNA, 19 nt, Artificial Sequence
  Description of Artificial Sequence: Synthetic oligonucleotide
  Antisense strand to SEQ ID NO: 2524826
uacaaacacucgcaauccg

SEQ ID NO: 2524828 - RNA, 19 nt, Artificial Sequence
  Description of Artificial Sequence: Synthetic oligonucleotide
  Sense strand starting at position 3920 of SEQ ID NO: 1888290
gauugcgaguguuuguaua

SEQ ID NO: 2524829 - RNA, 19 nt, Artificial Sequence
  Description of Artificial Sequence: Synthetic oligonucleotide
  Antisense strand to SEQ ID NO: 2524828
uauacaaacacucgcaauc

SEQ ID NO: 2524830 - RNA, 19 nt, Artificial Sequence
  Description of Artificial Sequence: Synthetic oligonucleotide
  Sense strand starting at position 3922 of SEQ ID NO: 1888290
uugcgaguguuuguauaaa

SEQ ID NO: 2524831 - RNA, 19 nt, Artificial Sequence
  Description of Artificial Sequence: Synthetic oligonucleotide
  Antisense strand to SEQ ID NO: 2524830
uuuauacaaacacucgcaa

SEQ ID NO: 2524832 - RNA, 19 nt, Artificial Sequence
  Description of Artificial Sequence: Synthetic oligonucleotide
  Sense strand starting at position 3958 of SEQ ID NO: 1888290
gguuguuacuugucacagc

SEQ ID NO: 2524833 - RNA, 19 nt, Artificial Sequence
  Description of Artificial Sequence: Synthetic oligonucleotide
  Antisense strand to SEQ ID NO: 2524832
gcugugacaaguaacaacc

SEQ ID NO: 2524834 - RNA, 19 nt, Artificial Sequence
  Description of Artificial Sequence: Synthetic oligonucleotide
  Sense strand starting at position 3959 of SEQ ID NO: 1888290
guuguuacuugucacagca

SEQ ID NO: 2524835 - RNA, 19 nt, Artificial Sequence
  Description of Artificial Sequence: Synthetic oligonucleotide
  Antisense strand to SEQ ID NO: 2524834
ugcugugacaaguaacaac

SEQ ID NO: 2524836 - RNA, 19 nt, Artificial Sequence
  Description of Artificial Sequence: Synthetic oligonucleotide
  Sense strand starting at position 2422 of SEQ ID NO: 1888291
gugccuauuucuugacgau

SEQ ID NO: 2524837 - RNA, 19 nt, Artificial Sequence
  Description of Artificial Sequence: Synthetic oligonucleotide
  Antisense strand to SEQ ID NO: 2524836
aucgucaagaaauaggcac

SEQ ID NO: 2524838 - RNA, 19 nt, Artificial Sequence
  Description of Artificial Sequence: Synthetic oligonucleotide
  Sense strand starting at position 2425 of SEQ ID NO: 1888291
ccuauuucuugacgaugac

SEQ ID NO: 2524839 - RNA, 19 nt, Artificial Sequence
  Description of Artificial Sequence: Synthetic oligonucleotide
  Antisense strand to SEQ ID NO: 2524838
gucaucgucaagaaauagg

SEQ ID NO: 2524840 - RNA, 19 nt, Artificial Sequence
  Description of Artificial Sequence: Synthetic oligonucleotide
  Sense strand starting at position 2434 of SEQ ID NO: 1888291
ugacgaugacaucaguuau

SEQ ID NO: 2524841 - RNA, 19 nt, Artificial Sequence
  Description of Artificial Sequence: Synthetic oligonucleotide
  Antisense strand to SEQ ID NO: 2524840
auaacugaugucaucguca

SEQ ID NO: 2524842 - RNA, 19 nt, Artificial Sequence
  Description of Artificial Sequence: Synthetic oligonucleotide
  Sense strand starting at position 2471 of SEQ ID NO: 1888291
aggcaucugccuuggacuu

SEQ ID NO: 2524843 - RNA, 19 nt, Artificial Sequence
  Description of Artificial Sequence: Synthetic oligonucleotide
  Antisense strand to SEQ ID NO: 2524842
aaguccaaggcagaugccu

SEQ ID NO: 2524844 - RNA, 19 nt, Artificial Sequence
  Description of Artificial Sequence: Synthetic oligonucleotide
  Sense strand starting at position 2473 of SEQ ID NO: 1888291
gcaucugccuuggacuuua

SEQ ID NO: 2524845 - RNA, 19 nt, Artificial Sequence
  Description of Artificial Sequence: Synthetic oligonucleotide
  Antisense strand to SEQ ID NO: 2524844
uaaaguccaaggcagaugc

SEQ ID NO: 2524846 - RNA, 19 nt, Artificial Sequence
  Description of Artificial Sequence: Synthetic oligonucleotide
  Sense strand starting at position 2508 of SEQ ID NO: 1888291
uaaugaaccugcuguuagu

SEQ ID NO: 2524847 - RNA, 19 nt, Artificial Sequence
  Description of Artificial Sequence: Synthetic oligonucleotide
  Antisense strand to SEQ ID NO: 2524846
acuaacagcagguucauua

SEQ ID NO: 2524848 - RNA, 19 nt, Artificial Sequence
  Description of Artificial Sequence: Synthetic oligonucleotide
  Sense strand starting at position 2517 of SEQ ID NO: 1888291
ugcuguuaguccuugagga

SEQ ID NO: 2524849 - RNA, 19 nt, Artificial Sequence
  Description of Artificial Sequence: Synthetic oligonucleotide
  Antisense strand to SEQ ID NO: 2524848
uccucaaggacuaacagca

SEQ ID NO: 2524850 - RNA, 19 nt, Artificial Sequence
  Description of Artificial Sequence: Synthetic oligonucleotide
  Sense strand starting at position 2518 of SEQ ID NO: 1888291
gcuguuaguccuugaggag

SEQ ID NO: 2524851 - RNA, 19 nt, Artificial Sequence
  Description of Artificial Sequence: Synthetic oligonucleotide
  Antisense strand to SEQ ID NO: 2524850
cuccucaaggacuaacagc

SEQ ID NO: 2524852 - RNA, 19 nt, Artificial Sequence
  Description of Artificial Sequence: Synthetic oligonucleotide
  Sense strand starting at position 2521 of SEQ ID NO: 1888291
guuaguccuugaggaggaa

SEQ ID NO: 2524853 - RNA, 19 nt, Artificial Sequence
  Description of Artificial Sequence: Synthetic oligonucleotide
  Antisense strand to SEQ ID NO: 2524852
uuccuccucaaggacuaac

SEQ ID NO: 2524854 - RNA, 19 nt, Artificial Sequence
  Description of Artificial Sequence: Synthetic oligonucleotide
  Sense strand starting at position 2587 of SEQ ID NO: 1888291
ugugcuguggcccagagua

SEQ ID NO: 2524855 - RNA, 19 nt, Artificial Sequence
  Description of Artificial Sequence: Synthetic oligonucleotide
  Antisense strand to SEQ ID NO: 2524854
uacucugggccacagcaca

SEQ ID NO: 2524856 - RNA, 19 nt, Artificial Sequence
  Description of Artificial Sequence: Synthetic oligonucleotide
  Sense strand starting at position 3337 of SEQ ID NO: 1888291
ccaggaguggccuacuauu

SEQ ID NO: 2524857 - RNA, 19 nt, Artificial Sequence
  Description of Artificial Sequence: Synthetic oligonucleotide
  Antisense strand to SEQ ID NO: 2524856
aauaguaggccacuccugg

SEQ ID NO: 2524858 - RNA, 19 nt, Artificial Sequence
  Description of Artificial Sequence: Synthetic oligonucleotide
  Sense strand starting at position 3346 of SEQ ID NO: 1888291
gccuacuauugaggaguau

SEQ ID NO: 2524859 - RNA, 19 nt, Artificial Sequence
  Description of Artificial Sequence: Synthetic oligonucleotide
  Antisense strand to SEQ ID NO: 2524858
auacuccucaauaguaggc

SEQ ID NO: 2524860 - RNA, 19 nt, Artificial Sequence
  Description of Artificial Sequence: Synthetic oligonucleotide
  Sense strand starting at position 3355 of SEQ ID NO: 1888291
ugaggaguaugaccuccau

SEQ ID NO: 2524861 - RNA, 19 nt, Artificial Sequence
  Description of Artificial Sequence: Synthetic oligonucleotide
  Antisense strand to SEQ ID NO: 2524860
auggaggucauacuccuca

SEQ ID NO: 2524862 - RNA, 19 nt, Artificial Sequence
  Description of Artificial Sequence: Synthetic oligonucleotide
  Sense strand starting at position 3507 of SEQ ID NO: 1888291
ccaggacuucucugugcac

SEQ ID NO: 2524863 - RNA, 19 nt, Artificial Sequence
  Description of Artificial Sequence: Synthetic oligonucleotide
  Antisense strand to SEQ ID NO: 2524862
gugcacagagaaguccugg

SEQ ID NO: 2524864 - RNA, 19 nt, Artificial Sequence
  Description of Artificial Sequence: Synthetic oligonucleotide
  Sense strand starting at position 3508 of SEQ ID NO: 1888291
caggacuucucugugcaca

SEQ ID NO: 2524865 - RNA, 19 nt, Artificial Sequence
  Description of Artificial Sequence: Synthetic oligonucleotide
  Antisense strand to SEQ ID NO: 2524864
ugugcacagagaaguccug

SEQ ID NO: 2524866 - RNA, 19 nt, Artificial Sequence
  Description of Artificial Sequence: Synthetic oligonucleotide
  Sense strand starting at position 3509 of SEQ ID NO: 1888291
aggacuucucugugcacau

SEQ ID NO: 2524867 - RNA, 19 nt, Artificial Sequence
  Description of Artificial Sequence: Synthetic oligonucleotide
  Antisense strand to SEQ ID NO: 2524866
augugcacagagaaguccu

SEQ ID NO: 2524868 - RNA, 19 nt, Artificial Sequence
  Description of Artificial Sequence: Synthetic oligonucleotide
  Sense strand starting at position 3510 of SEQ ID NO: 1888291
ggacuucucugugcacauc

SEQ ID NO: 2524869 - RNA, 19 nt, Artificial Sequence
  Description of Artificial Sequence: Synthetic oligonucleotide
  Antisense strand to SEQ ID NO: 2524868
gaugugcacagagaagucc

SEQ ID NO: 2524870 - RNA, 19 nt, Artificial Sequence
  Description of Artificial Sequence: Synthetic oligonucleotide
  Sense strand starting at position 3519 of SEQ ID NO: 1888291
ugugcacauccuugacuga

SEQ ID NO: 2524871 - RNA, 19 nt, Artificial Sequence
  Description of Artificial Sequence: Synthetic oligonucleotide
  Antisense strand to SEQ ID NO: 2524870
ucagucaaggaugugcaca

SEQ ID NO: 2524872 - RNA, 19 nt, Artificial Sequence
  Description of Artificial Sequence: Synthetic oligonucleotide
  Sense strand starting at position 3831 of SEQ ID NO: 1888291
gguggaguuucagauuugu

SEQ ID NO: 2524873 - RNA, 19 nt, Artificial Sequence
  Description of Artificial Sequence: Synthetic oligonucleotide
  Antisense strand to SEQ ID NO: 2524872
acaaaucugaaacuccacc

SEQ ID NO: 2524874 - RNA, 19 nt, Artificial Sequence
  Description of Artificial Sequence: Synthetic oligonucleotide
  Sense strand starting at position 3845 of SEQ ID NO: 1888291
uuuguuuaugccugucgga

SEQ ID NO: 2524875 - RNA, 19 nt, Artificial Sequence
  Description of Artificial Sequence: Synthetic oligonucleotide
  Antisense strand to SEQ ID NO: 2524874
uccgacaggcauaaacaaa

SEQ ID NO: 2524876 - RNA, 19 nt, Artificial Sequence
  Description of Artificial Sequence: Synthetic oligonucleotide
  Sense strand starting at position 3933 of SEQ ID NO: 1888291
cucagauauccuuguccug

SEQ ID NO: 2524877 - RNA, 19 nt, Artificial Sequence
  Description of Artificial Sequence: Synthetic oligonucleotide
  Antisense strand to SEQ ID NO: 2524876
caggacaaggauaucugag

SEQ ID NO: 2524878 - RNA, 19 nt, Artificial Sequence
  Description of Artificial Sequence: Synthetic oligonucleotide
  Sense strand starting at position 179 of SEQ ID NO: 1888292
uuugguucucuguaaauuc

SEQ ID NO: 2524879 - RNA, 19 nt, Artificial Sequence
  Description of Artificial Sequence: Synthetic oligonucleotide
  Antisense strand to SEQ ID NO: 2524878
gaauuuacagagaaccaaa

SEQ ID NO: 2524880 - RNA, 19 nt, Artificial Sequence
  Description of Artificial Sequence: Synthetic oligonucleotide
  Sense strand starting at position 207 of SEQ ID NO: 1888292
ucacauuguuaacuuggaa

SEQ ID NO: 2524881 - RNA, 19 nt, Artificial Sequence
  Description of Artificial Sequence: Synthetic oligonucleotide
  Antisense strand to SEQ ID NO: 2524880
uuccaaguuaacaauguga

SEQ ID NO: 2524882 - RNA, 19 nt, Artificial Sequence
  Description of Artificial Sequence: Synthetic oligonucleotide
  Sense strand starting at position 251 of SEQ ID NO: 1888292
aguauuucccagcgaucag

SEQ ID NO: 2524883 - RNA, 19 nt, Artificial Sequence
  Description of Artificial Sequence: Synthetic oligonucleotide
  Antisense strand to SEQ ID NO: 2524882
cugaucgcugggaaauacu

SEQ ID NO: 2524884 - RNA, 19 nt, Artificial Sequence
  Description of Artificial Sequence: Synthetic oligonucleotide
  Sense strand starting at position 280 of SEQ ID NO: 1888292
gguuaagagcgugaacucu

SEQ ID NO: 2524885 - RNA, 19 nt, Artificial Sequence
  Description of Artificial Sequence: Synthetic oligonucleotide
  Antisense strand to SEQ ID NO: 2524884
agaguucacgcucuuaacc

SEQ ID NO: 2524886 - RNA, 19 nt, Artificial Sequence
  Description of Artificial Sequence: Synthetic oligonucleotide
  Sense strand starting at position 332 of SEQ ID NO: 1888292
ggguaacuuuggguaaguu

SEQ ID NO: 2524887 - RNA, 19 nt, Artificial Sequence
  Description of Artificial Sequence: Synthetic oligonucleotide
  Antisense strand to SEQ ID NO: 2524886
aacuuacccaaaguuaccc

SEQ ID NO: 2524888 - RNA, 19 nt, Artificial Sequence
  Description of Artificial Sequence: Synthetic oligonucleotide
  Sense strand starting at position 333 of SEQ ID NO: 1888292
gguaacuuuggguaaguua

SEQ ID NO: 2524889 - RNA, 19 nt, Artificial Sequence
  Description of Artificial Sequence: Synthetic oligonucleotide
  Antisense strand to SEQ ID NO: 2524888
uaacuuacccaaaguuacc

SEQ ID NO: 2524890 - RNA, 19 nt, Artificial Sequence
  Description of Artificial Sequence: Synthetic oligonucleotide
  Sense strand starting at position 562 of SEQ ID NO: 1888292
uugucuguccucgucggaa

SEQ ID NO: 2524891 - RNA, 19 nt, Artificial Sequence
  Description of Artificial Sequence: Synthetic oligonucleotide
  Antisense strand to SEQ ID NO: 2524890
uuccgacgaggacagacaa

SEQ ID NO: 2524892 - RNA, 19 nt, Artificial Sequence
  Description of Artificial Sequence: Synthetic oligonucleotide
  Sense strand starting at position 578 of SEQ ID NO: 1888292
gaagguaagcucugugaga

SEQ ID NO: 2524893 - RNA, 19 nt, Artificial Sequence
  Description of Artificial Sequence: Synthetic oligonucleotide
  Antisense strand to SEQ ID NO: 2524892
ucucacagagcuuaccuuc

SEQ ID NO: 2524894 - RNA, 19 nt, Artificial Sequence
  Description of Artificial Sequence: Synthetic oligonucleotide
  Sense strand starting at position 579 of SEQ ID NO: 1888292
aagguaagcucugugagag

SEQ ID NO: 2524895 - RNA, 19 nt, Artificial Sequence
  Description of Artificial Sequence: Synthetic oligonucleotide
  Antisense strand to SEQ ID NO: 2524894
cucucacagagcuuaccuu

SEQ ID NO: 2524896 - RNA, 19 nt, Artificial Sequence
  Description of Artificial Sequence: Synthetic oligonucleotide
  Sense strand starting at position 603 of SEQ ID NO: 1888292
gccuuaucugucuugugca

SEQ ID NO: 2524897 - RNA, 19 nt, Artificial Sequence
  Description of Artificial Sequence: Synthetic oligonucleotide
  Antisense strand to SEQ ID NO: 2524896
ugcacaagacagauaaggc

SEQ ID NO: 2524898 - RNA, 19 nt, Artificial Sequence
  Description of Artificial Sequence: Synthetic oligonucleotide
  Sense strand starting at position 670 of SEQ ID NO: 1888292
aaagaaugagcaugucaga

SEQ ID NO: 2524899 - RNA, 19 nt, Artificial Sequence
  Description of Artificial Sequence: Synthetic oligonucleotide
  Antisense strand to SEQ ID NO: 2524898
ucugacaugcucauucuuu

SEQ ID NO: 2524900 - RNA, 19 nt, Artificial Sequence
  Description of Artificial Sequence: Synthetic oligonucleotide
  Sense strand starting at position 783 of SEQ ID NO: 1888292
gguaauaguaucugggaga

SEQ ID NO: 2524901 - RNA, 19 nt, Artificial Sequence
  Description of Artificial Sequence: Synthetic oligonucleotide
  Antisense strand to SEQ ID NO: 2524900
ucucccagauacuauuacc

SEQ ID NO: 2524902 - RNA, 19 nt, Artificial Sequence
  Description of Artificial Sequence: Synthetic oligonucleotide
  Sense strand starting at position 938 of SEQ ID NO: 1888292
gcccaaucccaucagaagu

SEQ ID NO: 2524903 - RNA, 19 nt, Artificial Sequence
  Description of Artificial Sequence: Synthetic oligonucleotide
  Antisense strand to SEQ ID NO: 2524902
acuucugaugggauugggc

SEQ ID NO: 2524904 - RNA, 19 nt, Artificial Sequence
  Description of Artificial Sequence: Synthetic oligonucleotide
  Sense strand starting at position 962 of SEQ ID NO: 1888292
ggagguucauuuguugguu

SEQ ID NO: 2524905 - RNA, 19 nt, Artificial Sequence
  Description of Artificial Sequence: Synthetic oligonucleotide
  Antisense strand to SEQ ID NO: 2524904
aaccaacaaaugaaccucc

SEQ ID NO: 2524906 - RNA, 19 nt, Artificial Sequence
  Description of Artificial Sequence: Synthetic oligonucleotide
  Sense strand starting at position 1011 of SEQ ID NO: 1888292
uuuauuuacuaggcguaua

SEQ ID NO: 2524907 - RNA, 19 nt, Artificial Sequence
  Description of Artificial Sequence: Synthetic oligonucleotide
  Antisense strand to SEQ ID NO: 2524906
uauacgccuaguaaauaaa

SEQ ID NO: 2524908 - RNA, 19 nt, Artificial Sequence
  Description of Artificial Sequence: Synthetic oligonucleotide
  Sense strand starting at position 2168 of SEQ ID NO: 1888292
gccagcuucguguuaagug

SEQ ID NO: 2524909 - RNA, 19 nt, Artificial Sequence
  Description of Artificial Sequence: Synthetic oligonucleotide
  Antisense strand to SEQ ID NO: 2524908
cacuuaacacgaagcuggc

SEQ ID NO: 2524910 - RNA, 19 nt, Artificial Sequence
  Description of Artificial Sequence: Synthetic oligonucleotide
  Sense strand starting at position 2175 of SEQ ID NO: 1888292
ucguguuaagugcuuuauu

SEQ ID NO: 2524911 - RNA, 19 nt, Artificial Sequence
  Description of Artificial Sequence: Synthetic oligonucleotide
  Antisense strand to SEQ ID NO: 2524910
aauaaagcacuuaacacga

SEQ ID NO: 2524912 - RNA, 19 nt, Artificial Sequence
  Description of Artificial Sequence: Synthetic oligonucleotide
  Sense strand starting at position 2271 of SEQ ID NO: 1888292
uagugaaaguacuuaguau

SEQ ID NO: 2524913 - RNA, 19 nt, Artificial Sequence
  Description of Artificial Sequence: Synthetic oligonucleotide
  Antisense strand to SEQ ID NO: 2524912
auacuaaguacuuucacua

SEQ ID NO: 2524914 - RNA, 19 nt, Artificial Sequence
  Description of Artificial Sequence: Synthetic oligonucleotide
  Sense strand starting at position 2272 of SEQ ID NO: 1888292
agugaaaguacuuaguaua

SEQ ID NO: 2524915 - RNA, 19 nt, Artificial Sequence
  Description of Artificial Sequence: Synthetic oligonucleotide
  Antisense strand to SEQ ID NO: 2524914
uauacuaaguacuuucacu

SEQ ID NO: 2524916 - RNA, 19 nt, Artificial Sequence
  Description of Artificial Sequence: Synthetic oligonucleotide
  Sense strand starting at position 2296 of SEQ ID NO: 1888292
aauguuuaugggugaguga

SEQ ID NO: 2524917 - RNA, 19 nt, Artificial Sequence
  Description of Artificial Sequence: Synthetic oligonucleotide
  Antisense strand to SEQ ID NO: 2524916
ucacucacccauaaacauu

SEQ ID NO: 2524918 - RNA, 19 nt, Artificial Sequence
  Description of Artificial Sequence: Synthetic oligonucleotide
  Sense strand starting at position 2297 of SEQ ID NO: 1888292
auguuuaugggugagugau

SEQ ID NO: 2524919 - RNA, 19 nt, Artificial Sequence
  Description of Artificial Sequence: Synthetic oligonucleotide
  Antisense strand to SEQ ID NO: 2524918
aucacucacccauaaacau

SEQ ID NO: 2524920 - RNA, 19 nt, Artificial Sequence
  Description of Artificial Sequence: Synthetic oligonucleotide
  Sense strand starting at position 2299 of SEQ ID NO: 1888292
guuuaugggugagugauau

SEQ ID NO: 2524921 - RNA, 19 nt, Artificial Sequence
  Description of Artificial Sequence: Synthetic oligonucleotide
  Antisense strand to SEQ ID NO: 2524920
auaucacucacccauaaac

SEQ ID NO: 2524922 - RNA, 19 nt, Artificial Sequence
  Description of Artificial Sequence: Synthetic oligonucleotide
  Sense strand starting at position 2452 of SEQ ID NO: 1888292
acguuaaauguuuacuaug

SEQ ID NO: 2524923 - RNA, 19 nt, Artificial Sequence
  Description of Artificial Sequence: Synthetic oligonucleotide
  Antisense strand to SEQ ID NO: 2524922
cauaguaaacauuuaacgu

SEQ ID NO: 2524924 - RNA, 19 nt, Artificial Sequence
  Description of Artificial Sequence: Synthetic oligonucleotide
  Sense strand starting at position 2483 of SEQ ID NO: 1888292
ugcugaauucuuuacuagu

SEQ ID NO: 2524925 - RNA, 19 nt, Artificial Sequence
  Description of Artificial Sequence: Synthetic oligonucleotide
  Antisense strand to SEQ ID NO: 2524924
acuaguaaagaauucagca

SEQ ID NO: 2524926 - RNA, 19 nt, Artificial Sequence
  Description of Artificial Sequence: Synthetic oligonucleotide
  Sense strand starting at position 2573 of SEQ ID NO: 1888292
uuuacuauagccuagugaa

SEQ ID NO: 2524927 - RNA, 19 nt, Artificial Sequence
  Description of Artificial Sequence: Synthetic oligonucleotide
  Antisense strand to SEQ ID NO: 2524926
uucacuaggcuauaguaaa

SEQ ID NO: 2524928 - RNA, 19 nt, Artificial Sequence
  Description of Artificial Sequence: Synthetic oligonucleotide
  Sense strand starting at position 2614 of SEQ ID NO: 1888292
ccacacacguaaguuaaau

SEQ ID NO: 2524929 - RNA, 19 nt, Artificial Sequence
  Description of Artificial Sequence: Synthetic oligonucleotide
  Antisense strand to SEQ ID NO: 2524928
auuuaacuuacgugugugg

SEQ ID NO: 2524930 - RNA, 19 nt, Artificial Sequence
  Description of Artificial Sequence: Synthetic oligonucleotide
  Sense strand starting at position 2656 of SEQ ID NO: 1888292
agaucugcuugaccucaaa

SEQ ID NO: 2524931 - RNA, 19 nt, Artificial Sequence
  Description of Artificial Sequence: Synthetic oligonucleotide
  Antisense strand to SEQ ID NO: 2524930
uuugaggucaagcagaucu

SEQ ID NO: 2524932 - RNA, 19 nt, Artificial Sequence
  Description of Artificial Sequence: Synthetic oligonucleotide
  Sense strand starting at position 2687 of SEQ ID NO: 1888292
acaucaugauuaccguuua

SEQ ID NO: 2524933 - RNA, 19 nt, Artificial Sequence
  Description of Artificial Sequence: Synthetic oligonucleotide
  Antisense strand to SEQ ID NO: 2524932
uaaacgguaaucaugaugu

SEQ ID NO: 2524934 - RNA, 19 nt, Artificial Sequence
  Description of Artificial Sequence: Synthetic oligonucleotide
  Sense strand starting at position 2692 of SEQ ID NO: 1888292
augauuaccguuuaaauug

SEQ ID NO: 2524935 - RNA, 19 nt, Artificial Sequence
  Description of Artificial Sequence: Synthetic oligonucleotide
  Antisense strand to SEQ ID NO: 2524934
caauuuaaacgguaaucau

SEQ ID NO: 2524936 - RNA, 19 nt, Artificial Sequence
  Description of Artificial Sequence: Synthetic oligonucleotide
  Sense strand starting at position 2723 of SEQ ID NO: 1888292
uuauguuuacuauggaagu

SEQ ID NO: 2524937 - RNA, 19 nt, Artificial Sequence
  Description of Artificial Sequence: Synthetic oligonucleotide
  Antisense strand to SEQ ID NO: 2524936
acuuccauaguaaacauaa

SEQ ID NO: 2524938 - RNA, 19 nt, Artificial Sequence
  Description of Artificial Sequence: Synthetic oligonucleotide
  Sense strand starting at position 2784 of SEQ ID NO: 1888292
gugagacaaauguggcaaa

SEQ ID NO: 2524939 - RNA, 19 nt, Artificial Sequence
  Description of Artificial Sequence: Synthetic oligonucleotide
  Antisense strand to SEQ ID NO: 2524938
uuugccacauuugucucac

SEQ ID NO: 2524940 - RNA, 19 nt, Artificial Sequence
  Description of Artificial Sequence: Synthetic oligonucleotide
  Sense strand starting at position 3138 of SEQ ID NO: 1888292
gcauacuuaccuugugaaa

SEQ ID NO: 2524941 - RNA, 19 nt, Artificial Sequence
  Description of Artificial Sequence: Synthetic oligonucleotide
  Antisense strand to SEQ ID NO: 2524940
uuucacaagguaaguaugc

SEQ ID NO: 2524942 - RNA, 19 nt, Artificial Sequence
  Description of Artificial Sequence: Synthetic oligonucleotide
  Sense strand starting at position 3151 of SEQ ID NO: 1888292
gugaaaguccaauaucuuu

SEQ ID NO: 2524943 - RNA, 19 nt, Artificial Sequence
  Description of Artificial Sequence: Synthetic oligonucleotide
  Antisense strand to SEQ ID NO: 2524942
aaagauauuggacuuucac

SEQ ID NO: 2524944 - RNA, 19 nt, Artificial Sequence
  Description of Artificial Sequence: Synthetic oligonucleotide
  Sense strand starting at position 3218 of SEQ ID NO: 1888292
uuuggaguacuuuaaucac

SEQ ID NO: 2524945 - RNA, 19 nt, Artificial Sequence
  Description of Artificial Sequence: Synthetic oligonucleotide
  Antisense strand to SEQ ID NO: 2524944
gugauuaaaguacuccaaa

SEQ ID NO: 2524946 - RNA, 19 nt, Artificial Sequence
  Description of Artificial Sequence: Synthetic oligonucleotide
  Sense strand starting at position 3221 of SEQ ID NO: 1888292
ggaguacuuuaaucaccca

SEQ ID NO: 2524947 - RNA, 19 nt, Artificial Sequence
  Description of Artificial Sequence: Synthetic oligonucleotide
  Antisense strand to SEQ ID NO: 2524946
ugggugauuaaaguacucc

SEQ ID NO: 2524948 - RNA, 19 nt, Artificial Sequence
  Description of Artificial Sequence: Synthetic oligonucleotide
  Sense strand starting at position 3329 of SEQ ID NO: 1888292
agucaacauuaguuuagau

SEQ ID NO: 2524949 - RNA, 19 nt, Artificial Sequence
  Description of Artificial Sequence: Synthetic oligonucleotide
  Antisense strand to SEQ ID NO: 2524948
aucuaaacuaauguugacu

SEQ ID NO: 2524950 - RNA, 19 nt, Artificial Sequence
  Description of Artificial Sequence: Synthetic oligonucleotide
  Sense strand starting at position 3428 of SEQ ID NO: 1888292
ugagguaaauccuuuaaau

SEQ ID NO: 2524951 - RNA, 19 nt, Artificial Sequence
  Description of Artificial Sequence: Synthetic oligonucleotide
  Antisense strand to SEQ ID NO: 2524950
auuuaaaggauuuaccuca

SEQ ID NO: 2524952 - RNA, 19 nt, Artificial Sequence
  Description of Artificial Sequence: Synthetic oligonucleotide
  Sense strand starting at position 3832 of SEQ ID NO: 1888292
gcccuuguucuugacagau

SEQ ID NO: 2524953 - RNA, 19 nt, Artificial Sequence
  Description of Artificial Sequence: Synthetic oligonucleotide
  Antisense strand to SEQ ID NO: 2524952
aucugucaagaacaagggc

SEQ ID NO: 2524954 - RNA, 19 nt, Artificial Sequence
  Description of Artificial Sequence: Synthetic oligonucleotide
  Sense strand starting at position 3928 of SEQ ID NO: 1888292
cucauugcuccucaggagu

SEQ ID NO: 2524955 - RNA, 19 nt, Artificial Sequence
  Description of Artificial Sequence: Synthetic oligonucleotide
  Antisense strand to SEQ ID NO: 2524954
acuccugaggagcaaugag

SEQ ID NO: 2524956 - RNA, 19 nt, Artificial Sequence
  Description of Artificial Sequence: Synthetic oligonucleotide
  Sense strand starting at position 3939 of SEQ ID NO: 1888292
ucaggaguccagugacaau

SEQ ID NO: 2524957 - RNA, 19 nt, Artificial Sequence
  Description of Artificial Sequence: Synthetic oligonucleotide
  Antisense strand to SEQ ID NO: 2524956
auugucacuggacuccuga

SEQ ID NO: 2524958 - RNA, 19 nt, Artificial Sequence
  Description of Artificial Sequence: Synthetic oligonucleotide
  Sense strand starting at position 18 of SEQ ID NO: 1888293
caugaaauguggccaguaa

SEQ ID NO: 2524959 - RNA, 19 nt, Artificial Sequence
  Description of Artificial Sequence: Synthetic oligonucleotide
  Antisense strand to SEQ ID NO: 2524958
uuacuggccacauuucaug

SEQ ID NO: 2524960 - RNA, 19 nt, Artificial Sequence
  Description of Artificial Sequence: Synthetic oligonucleotide
  Sense strand starting at position 19 of SEQ ID NO: 1888293
augaaauguggccaguaag

SEQ ID NO: 2524961 - RNA, 19 nt, Artificial Sequence
  Description of Artificial Sequence: Synthetic oligonucleotide
  Antisense strand to SEQ ID NO: 2524960
cuuacuggccacauuucau

SEQ ID NO: 2524962 - RNA, 19 nt, Artificial Sequence
  Description of Artificial Sequence: Synthetic oligonucleotide
  Sense strand starting at position 22 of SEQ ID NO: 1888293
aaauguggccaguaagauc

SEQ ID NO: 2524963 - RNA, 19 nt, Artificial Sequence
  Description of Artificial Sequence: Synthetic oligonucleotide
  Antisense strand to SEQ ID NO: 2524962
gaucuuacuggccacauuu

SEQ ID NO: 2524964 - RNA, 19 nt, Artificial Sequence
  Description of Artificial Sequence: Synthetic oligonucleotide
  Sense strand starting at position 143 of SEQ ID NO: 1888293
gcuaucauuguuggguuaa

SEQ ID NO: 2524965 - RNA, 19 nt, Artificial Sequence
  Description of Artificial Sequence: Synthetic oligonucleotide
  Antisense strand to SEQ ID NO: 2524964
uuaacccaacaaugauagc

SEQ ID NO: 2524966 - RNA, 19 nt, Artificial Sequence
  Description of Artificial Sequence: Synthetic oligonucleotide
  Sense strand starting at position 192 of SEQ ID NO: 1888293
augugacugugagaaauuu

SEQ ID NO: 2524967 - RNA, 19 nt, Artificial Sequence
  Description of Artificial Sequence: Synthetic oligonucleotide
  Antisense strand to SEQ ID NO: 2524966
aaauuucucacagucacau

SEQ ID NO: 2524968 - RNA, 19 nt, Artificial Sequence
  Description of Artificial Sequence: Synthetic oligonucleotide
  Sense strand starting at position 273 of SEQ ID NO: 1888293
gcuggcagaguuggauuua

SEQ ID NO: 2524969 - RNA, 19 nt, Artificial Sequence
  Description of Artificial Sequence: Synthetic oligonucleotide
  Antisense strand to SEQ ID NO: 2524968
uaaauccaacucugccagc

SEQ ID NO: 2524970 - RNA, 19 nt, Artificial Sequence
  Description of Artificial Sequence: Synthetic oligonucleotide
  Sense strand starting at position 282 of SEQ ID NO: 1888293
guuggauuuagcugccuuu

SEQ ID NO: 2524971 - RNA, 19 nt, Artificial Sequence
  Description of Artificial Sequence: Synthetic oligonucleotide
  Antisense strand to SEQ ID NO: 2524970
aaaggcagcuaaauccaac

SEQ ID NO: 2524972 - RNA, 19 nt, Artificial Sequence
  Description of Artificial Sequence: Synthetic oligonucleotide
  Sense strand starting at position 373 of SEQ ID NO: 1888293
uuaucuuacguagagcuca

SEQ ID NO: 2524973 - RNA, 19 nt, Artificial Sequence
  Description of Artificial Sequence: Synthetic oligonucleotide
  Antisense strand to SEQ ID NO: 2524972
ugagcucuacguaagauaa

SEQ ID NO: 2524974 - RNA, 19 nt, Artificial Sequence
  Description of Artificial Sequence: Synthetic oligonucleotide
  Sense strand starting at position 378 of SEQ ID NO: 1888293
uuacguagagcucaugaaa

SEQ ID NO: 2524975 - RNA, 19 nt, Artificial Sequence
  Description of Artificial Sequence: Synthetic oligonucleotide
  Antisense strand to SEQ ID NO: 2524974
uuucaugagcucuacguaa

SEQ ID NO: 2524976 - RNA, 19 nt, Artificial Sequence
  Description of Artificial Sequence: Synthetic oligonucleotide
  Sense strand starting at position 381 of SEQ ID NO: 1888293
cguagagcucaugaaauaa

SEQ ID NO: 2524977 - RNA, 19 nt, Artificial Sequence
  Description of Artificial Sequence: Synthetic oligonucleotide
  Antisense strand to SEQ ID NO: 2524976
uuauuucaugagcucuacg

SEQ ID NO: 2524978 - RNA, 19 nt, Artificial Sequence
  Description of Artificial Sequence: Synthetic oligonucleotide
  Sense strand starting at position 428 of SEQ ID NO: 1888293
ccugccuauugaucugaca

SEQ ID NO: 2524979 - RNA, 19 nt, Artificial Sequence
  Description of Artificial Sequence: Synthetic oligonucleotide
  Antisense strand to SEQ ID NO: 2524978
ugucagaucaauaggcagg

SEQ ID NO: 2524980 - RNA, 19 nt, Artificial Sequence
  Description of Artificial Sequence: Synthetic oligonucleotide
  Sense strand starting at position 501 of SEQ ID NO: 1888293
gaugcucagcucuagauuc

SEQ ID NO: 2524981 - RNA, 19 nt, Artificial Sequence
  Description of Artificial Sequence: Synthetic oligonucleotide
  Antisense strand to SEQ ID NO: 2524980
gaaucuagagcugagcauc

SEQ ID NO: 2524982 - RNA, 19 nt, Artificial Sequence
  Description of Artificial Sequence: Synthetic oligonucleotide
  Sense strand starting at position 503 of SEQ ID NO: 1888293
ugcucagcucuagauucua

SEQ ID NO: 2524983 - RNA, 19 nt, Artificial Sequence
  Description of Artificial Sequence: Synthetic oligonucleotide
  Antisense strand to SEQ ID NO: 2524982
uagaaucuagagcugagca

SEQ ID NO: 2524984 - RNA, 19 nt, Artificial Sequence
  Description of Artificial Sequence: Synthetic oligonucleotide
  Sense strand starting at position 531 of SEQ ID NO: 1888293
auccuuucuuguguaauuc

SEQ ID NO: 2524985 - RNA, 19 nt, Artificial Sequence
  Description of Artificial Sequence: Synthetic oligonucleotide
  Antisense strand to SEQ ID NO: 2524984
gaauuacacaagaaaggau

SEQ ID NO: 2524986 - RNA, 19 nt, Artificial Sequence
  Description of Artificial Sequence: Synthetic oligonucleotide
  Sense strand starting at position 532 of SEQ ID NO: 1888293
uccuuucuuguguaauucu

SEQ ID NO: 2524987 - RNA, 19 nt, Artificial Sequence
  Description of Artificial Sequence: Synthetic oligonucleotide
  Antisense strand to SEQ ID NO: 2524986
agaauuacacaagaaagga

SEQ ID NO: 2524988 - RNA, 19 nt, Artificial Sequence
  Description of Artificial Sequence: Synthetic oligonucleotide
  Sense strand starting at position 590 of SEQ ID NO: 1888293
gcccuuguccuuuauagaa

SEQ ID NO: 2524989 - RNA, 19 nt, Artificial Sequence
  Description of Artificial Sequence: Synthetic oligonucleotide
  Antisense strand to SEQ ID NO: 2524988
uucuauaaaggacaagggc

SEQ ID NO: 2524990 - RNA, 19 nt, Artificial Sequence
  Description of Artificial Sequence: Synthetic oligonucleotide
  Sense strand starting at position 675 of SEQ ID NO: 1888293
aacacaucucuaggcguaa

SEQ ID NO: 2524991 - RNA, 19 nt, Artificial Sequence
  Description of Artificial Sequence: Synthetic oligonucleotide
  Antisense strand to SEQ ID NO: 2524990
uuacgccuagagauguguu

SEQ ID NO: 2524992 - RNA, 19 nt, Artificial Sequence
  Description of Artificial Sequence: Synthetic oligonucleotide
  Sense strand starting at position 992 of SEQ ID NO: 1888293
ucuggagaugguuguugaa

SEQ ID NO: 2524993 - RNA, 19 nt, Artificial Sequence
  Description of Artificial Sequence: Synthetic oligonucleotide
  Antisense strand to SEQ ID NO: 2524992
uucaacaaccaucuccaga

SEQ ID NO: 2524994 - RNA, 19 nt, Artificial Sequence
  Description of Artificial Sequence: Synthetic oligonucleotide
  Sense strand starting at position 994 of SEQ ID NO: 1888293
uggagaugguuguugaaga

SEQ ID NO: 2524995 - RNA, 19 nt, Artificial Sequence
  Description of Artificial Sequence: Synthetic oligonucleotide
  Antisense strand to SEQ ID NO: 2524994
ucuucaacaaccaucucca

SEQ ID NO: 2524996 - RNA, 19 nt, Artificial Sequence
  Description of Artificial Sequence: Synthetic oligonucleotide
  Sense strand starting at position 1059 of SEQ ID NO: 1888293
gucucacaucgcugaggga

SEQ ID NO: 2524997 - RNA, 19 nt, Artificial Sequence
  Description of Artificial Sequence: Synthetic oligonucleotide
  Antisense strand to SEQ ID NO: 2524996
ucccucagcgaugugagac

SEQ ID NO: 2524998 - RNA, 19 nt, Artificial Sequence
  Description of Artificial Sequence: Synthetic oligonucleotide
  Sense strand starting at position 1712 of SEQ ID NO: 1888293
ggucaugguuccuuagcaa

SEQ ID NO: 2524999 - RNA, 19 nt, Artificial Sequence
  Description of Artificial Sequence: Synthetic oligonucleotide
  Antisense strand to SEQ ID NO: 2524998
uugcuaaggaaccaugacc

SEQ ID NO: 2525000 - RNA, 19 nt, Artificial Sequence
  Description of Artificial Sequence: Synthetic oligonucleotide
  Sense strand starting at position 2136 of SEQ ID NO: 1888293
cccugaagcuucuuugaug

SEQ ID NO: 2525001 - RNA, 19 nt, Artificial Sequence
  Description of Artificial Sequence: Synthetic oligonucleotide
  Antisense strand to SEQ ID NO: 2525000
caucaaagaagcuucaggg

SEQ ID NO: 2525002 - RNA, 19 nt, Artificial Sequence
  Description of Artificial Sequence: Synthetic oligonucleotide
  Sense strand starting at position 2261 of SEQ ID NO: 1888293
aaggccuuccuguaagaag

SEQ ID NO: 2525003 - RNA, 19 nt, Artificial Sequence
  Description of Artificial Sequence: Synthetic oligonucleotide
  Antisense strand to SEQ ID NO: 2525002
cuucuuacaggaaggccuu

SEQ ID NO: 2525004 - RNA, 19 nt, Artificial Sequence
  Description of Artificial Sequence: Synthetic oligonucleotide
  Sense strand starting at position 2541 of SEQ ID NO: 1888293
ggcucagugaaaugugauu

SEQ ID NO: 2525005 - RNA, 19 nt, Artificial Sequence
  Description of Artificial Sequence: Synthetic oligonucleotide
  Antisense strand to SEQ ID NO: 2525004
aaucacauuucacugagcc

SEQ ID NO: 2525006 - RNA, 19 nt, Artificial Sequence
  Description of Artificial Sequence: Synthetic oligonucleotide
  Sense strand starting at position 2587 of SEQ ID NO: 1888293
uuuguaggaguauguauca

SEQ ID NO: 2525007 - RNA, 19 nt, Artificial Sequence
  Description of Artificial Sequence: Synthetic oligonucleotide
  Antisense strand to SEQ ID NO: 2525006
ugauacauacuccuacaaa

SEQ ID NO: 2525008 - RNA, 19 nt, Artificial Sequence
  Description of Artificial Sequence: Synthetic oligonucleotide
  Sense strand starting at position 2669 of SEQ ID NO: 1888293
gucugucuacuggaaagca

SEQ ID NO: 2525009 - RNA, 19 nt, Artificial Sequence
  Description of Artificial Sequence: Synthetic oligonucleotide
  Antisense strand to SEQ ID NO: 2525008
ugcuuuccaguagacagac

SEQ ID NO: 2525010 - RNA, 19 nt, Artificial Sequence
  Description of Artificial Sequence: Synthetic oligonucleotide
  Sense strand starting at position 2750 of SEQ ID NO: 1888293
uucuuugaauaaucaguga

SEQ ID NO: 2525011 - RNA, 19 nt, Artificial Sequence
  Description of Artificial Sequence: Synthetic oligonucleotide
  Antisense strand to SEQ ID NO: 2525010
ucacugauuauucaaagaa

SEQ ID NO: 2525012 - RNA, 19 nt, Artificial Sequence
  Description of Artificial Sequence: Synthetic oligonucleotide
  Sense strand starting at position 2772 of SEQ ID NO: 1888293
ucugauauucgcuaaaguu

SEQ ID NO: 2525013 - RNA, 19 nt, Artificial Sequence
  Description of Artificial Sequence: Synthetic oligonucleotide
  Antisense strand to SEQ ID NO: 2525012
aacuuuagcgaauaucaga

SEQ ID NO: 2525014 - RNA, 19 nt, Artificial Sequence
  Description of Artificial Sequence: Synthetic oligonucleotide
  Sense strand starting at position 3136 of SEQ ID NO: 1888293
gcgcauugacuuuccguua

SEQ ID NO: 2525015 - RNA, 19 nt, Artificial Sequence
  Description of Artificial Sequence: Synthetic oligonucleotide
  Antisense strand to SEQ ID NO: 2525014
uaacggaaagucaaugcgc

SEQ ID NO: 2525016 - RNA, 19 nt, Artificial Sequence
  Description of Artificial Sequence: Synthetic oligonucleotide
  Sense strand starting at position 3141 of SEQ ID NO: 1888293
uugacuuuccguuacuaaa

SEQ ID NO: 2525017 - RNA, 19 nt, Artificial Sequence
  Description of Artificial Sequence: Synthetic oligonucleotide
  Antisense strand to SEQ ID NO: 2525016
uuuaguaacggaaagucaa

SEQ ID NO: 2525018 - RNA, 19 nt, Artificial Sequence
  Description of Artificial Sequence: Synthetic oligonucleotide
  Sense strand starting at position 3183 of SEQ ID NO: 1888293
caagcuguucccgggauua

SEQ ID NO: 2525019 - RNA, 19 nt, Artificial Sequence
  Description of Artificial Sequence: Synthetic oligonucleotide
  Antisense strand to SEQ ID NO: 2525018
uaaucccgggaacagcuug

SEQ ID NO: 2525020 - RNA, 19 nt, Artificial Sequence
  Description of Artificial Sequence: Synthetic oligonucleotide
  Sense strand starting at position 3351 of SEQ ID NO: 1888293
gacugcguagucguuugua

SEQ ID NO: 2525021 - RNA, 19 nt, Artificial Sequence
  Description of Artificial Sequence: Synthetic oligonucleotide
  Antisense strand to SEQ ID NO: 2525020
uacaaacgacuacgcaguc

SEQ ID NO: 2525022 - RNA, 19 nt, Artificial Sequence
  Description of Artificial Sequence: Synthetic oligonucleotide
  Sense strand starting at position 3353 of SEQ ID NO: 1888293
cugcguagucguuuguaaa

SEQ ID NO: 2525023 - RNA, 19 nt, Artificial Sequence
  Description of Artificial Sequence: Synthetic oligonucleotide
  Antisense strand to SEQ ID NO: 2525022
uuuacaaacgacuacgcag

SEQ ID NO: 2525024 - RNA, 19 nt, Artificial Sequence
  Description of Artificial Sequence: Synthetic oligonucleotide
  Sense strand starting at position 3383 of SEQ ID NO: 1888293
gguagcaguuaagugagau

SEQ ID NO: 2525025 - RNA, 19 nt, Artificial Sequence
  Description of Artificial Sequence: Synthetic oligonucleotide
  Antisense strand to SEQ ID NO: 2525024
aucucacuuaacugcuacc

SEQ ID NO: 2525026 - RNA, 19 nt, Artificial Sequence
  Description of Artificial Sequence: Synthetic oligonucleotide
  Sense strand starting at position 3384 of SEQ ID NO: 1888293
guagcaguuaagugagaua

SEQ ID NO: 2525027 - RNA, 19 nt, Artificial Sequence
  Description of Artificial Sequence: Synthetic oligonucleotide
  Antisense strand to SEQ ID NO: 2525026
uaucucacuuaacugcuac

SEQ ID NO: 2525028 - RNA, 19 nt, Artificial Sequence
  Description of Artificial Sequence: Synthetic oligonucleotide
  Sense strand starting at position 3594 of SEQ ID NO: 1888293
uaggucucccuggaaggua

SEQ ID NO: 2525029 - RNA, 19 nt, Artificial Sequence
  Description of Artificial Sequence: Synthetic oligonucleotide
  Antisense strand to SEQ ID NO: 2525028
uaccuuccagggagaccua

SEQ ID NO: 2525030 - RNA, 19 nt, Artificial Sequence
  Description of Artificial Sequence: Synthetic oligonucleotide
  Sense strand starting at position 3637 of SEQ ID NO: 1888293
cgaguagauagccagugau

SEQ ID NO: 2525031 - RNA, 19 nt, Artificial Sequence
  Description of Artificial Sequence: Synthetic oligonucleotide
  Antisense strand to SEQ ID NO: 2525030
aucacuggcuaucuacucg

SEQ ID NO: 2525032 - RNA, 19 nt, Artificial Sequence
  Description of Artificial Sequence: Synthetic oligonucleotide
  Sense strand starting at position 3640 of SEQ ID NO: 1888293
guagauagccagugaucca

SEQ ID NO: 2525033 - RNA, 19 nt, Artificial Sequence
  Description of Artificial Sequence: Synthetic oligonucleotide
  Antisense strand to SEQ ID NO: 2525032
uggaucacuggcuaucuac

SEQ ID NO: 2525034 - RNA, 19 nt, Artificial Sequence
  Description of Artificial Sequence: Synthetic oligonucleotide
  Sense strand starting at position 3693 of SEQ ID NO: 1888293
cucagacacucucuauagu

SEQ ID NO: 2525035 - RNA, 19 nt, Artificial Sequence
  Description of Artificial Sequence: Synthetic oligonucleotide
  Antisense strand to SEQ ID NO: 2525034
acuauagagagugucugag

SEQ ID NO: 2525036 - RNA, 19 nt, Artificial Sequence
  Description of Artificial Sequence: Synthetic oligonucleotide
  Sense strand starting at position 3725 of SEQ ID NO: 1888293
cgggaaggaucgucuuaaa

SEQ ID NO: 2525037 - RNA, 19 nt, Artificial Sequence
  Description of Artificial Sequence: Synthetic oligonucleotide
  Antisense strand to SEQ ID NO: 2525036
uuuaagacgauccuucccg

SEQ ID NO: 2525038 - RNA, 19 nt, Artificial Sequence
  Description of Artificial Sequence: Synthetic oligonucleotide
  Sense strand starting at position 35 of SEQ ID NO: 1888294
cacggccaccuuuguaauu

SEQ ID NO: 2525039 - RNA, 19 nt, Artificial Sequence
  Description of Artificial Sequence: Synthetic oligonucleotide
  Antisense strand to SEQ ID NO: 2525038
aauuacaaagguggccgug

SEQ ID NO: 2525040 - RNA, 19 nt, Artificial Sequence
  Description of Artificial Sequence: Synthetic oligonucleotide
  Sense strand starting at position 37 of SEQ ID NO: 1888294
cggccaccuuuguaauuga

SEQ ID NO: 2525041 - RNA, 19 nt, Artificial Sequence
  Description of Artificial Sequence: Synthetic oligonucleotide
  Antisense strand to SEQ ID NO: 2525040
ucaauuacaaagguggccg

SEQ ID NO: 2525042 - RNA, 19 nt, Artificial Sequence
  Description of Artificial Sequence: Synthetic oligonucleotide
  Sense strand starting at position 47 of SEQ ID NO: 1888294
uguaauugacauuacguua

SEQ ID NO: 2525043 - RNA, 19 nt, Artificial Sequence
  Description of Artificial Sequence: Synthetic oligonucleotide
  Antisense strand to SEQ ID NO: 2525042
uaacguaaugucaauuaca

SEQ ID NO: 2525044 - RNA, 19 nt, Artificial Sequence
  Description of Artificial Sequence: Synthetic oligonucleotide
  Sense strand starting at position 60 of SEQ ID NO: 1888294
acguuaauguuugccaguu

SEQ ID NO: 2525045 - RNA, 19 nt, Artificial Sequence
  Description of Artificial Sequence: Synthetic oligonucleotide
  Antisense strand to SEQ ID NO: 2525044
aacuggcaaacauuaacgu

SEQ ID NO: 2525046 - RNA, 19 nt, Artificial Sequence
  Description of Artificial Sequence: Synthetic oligonucleotide
  Sense strand starting at position 61 of SEQ ID NO: 1888294
cguuaauguuugccaguuc

SEQ ID NO: 2525047 - RNA, 19 nt, Artificial Sequence
  Description of Artificial Sequence: Synthetic oligonucleotide
  Antisense strand to SEQ ID NO: 2525046
gaacuggcaaacauuaacg

SEQ ID NO: 2525048 - RNA, 19 nt, Artificial Sequence
  Description of Artificial Sequence: Synthetic oligonucleotide
  Sense strand starting at position 68 of SEQ ID NO: 1888294
guuugccaguuccauguau

SEQ ID NO: 2525049 - RNA, 19 nt, Artificial Sequence
  Description of Artificial Sequence: Synthetic oligonucleotide
  Antisense strand to SEQ ID NO: 2525048
auacauggaacuggcaaac

SEQ ID NO: 2525050 - RNA, 19 nt, Artificial Sequence
  Description of Artificial Sequence: Synthetic oligonucleotide
  Sense strand starting at position 70 of SEQ ID NO: 1888294
uugccaguuccauguauuu

SEQ ID NO: 2525051 - RNA, 19 nt, Artificial Sequence
  Description of Artificial Sequence: Synthetic oligonucleotide
  Antisense strand to SEQ ID NO: 2525050
aaauacauggaacuggcaa

SEQ ID NO: 2525052 - RNA, 19 nt, Artificial Sequence
  Description of Artificial Sequence: Synthetic oligonucleotide
  Sense strand starting at position 418 of SEQ ID NO: 1888294
gaguuaagcacgugucuuu

SEQ ID NO: 2525053 - RNA, 19 nt, Artificial Sequence
  Description of Artificial Sequence: Synthetic oligonucleotide
  Antisense strand to SEQ ID NO: 2525052
aaagacacgugcuuaacuc

SEQ ID NO: 2525054 - RNA, 19 nt, Artificial Sequence
  Description of Artificial Sequence: Synthetic oligonucleotide
  Sense strand starting at position 498 of SEQ ID NO: 1888294
cggcuaacuucguaaggga

SEQ ID NO: 2525055 - RNA, 19 nt, Artificial Sequence
  Description of Artificial Sequence: Synthetic oligonucleotide
  Antisense strand to SEQ ID NO: 2525054
ucccuuacgaaguuagccg

SEQ ID NO: 2525056 - RNA, 19 nt, Artificial Sequence
  Description of Artificial Sequence: Synthetic oligonucleotide
  Sense strand starting at position 501 of SEQ ID NO: 1888294
cuaacuucguaagggagaa

SEQ ID NO: 2525057 - RNA, 19 nt, Artificial Sequence
  Description of Artificial Sequence: Synthetic oligonucleotide
  Antisense strand to SEQ ID NO: 2525056
uucucccuuacgaaguuag

SEQ ID NO: 2525058 - RNA, 19 nt, Artificial Sequence
  Description of Artificial Sequence: Synthetic oligonucleotide
  Sense strand starting at position 1033 of SEQ ID NO: 1888294
ccucaugaaucauggaguu

SEQ ID NO: 2525059 - RNA, 19 nt, Artificial Sequence
  Description of Artificial Sequence: Synthetic oligonucleotide
  Antisense strand to SEQ ID NO: 2525058
aacuccaugauucaugagg

SEQ ID NO: 2525060 - RNA, 19 nt, Artificial Sequence
  Description of Artificial Sequence: Synthetic oligonucleotide
  Sense strand starting at position 1886 of SEQ ID NO: 1888294
gguggugaaauccaguaau

SEQ ID NO: 2525061 - RNA, 19 nt, Artificial Sequence
  Description of Artificial Sequence: Synthetic oligonucleotide
  Antisense strand to SEQ ID NO: 2525060
auuacuggauuucaccacc

SEQ ID NO: 2525062 - RNA, 19 nt, Artificial Sequence
  Description of Artificial Sequence: Synthetic oligonucleotide
  Sense strand starting at position 2109 of SEQ ID NO: 1888294
gugagugucuccuguggga

SEQ ID NO: 2525063 - RNA, 19 nt, Artificial Sequence
  Description of Artificial Sequence: Synthetic oligonucleotide
  Antisense strand to SEQ ID NO: 2525062
ucccacaggagacacucac

SEQ ID NO: 2525064 - RNA, 19 nt, Artificial Sequence
  Description of Artificial Sequence: Synthetic oligonucleotide
  Sense strand starting at position 2111 of SEQ ID NO: 1888294
gagugucuccugugggaag

SEQ ID NO: 2525065 - RNA, 19 nt, Artificial Sequence
  Description of Artificial Sequence: Synthetic oligonucleotide
  Antisense strand to SEQ ID NO: 2525064
cuucccacaggagacacuc

SEQ ID NO: 2525066 - RNA, 19 nt, Artificial Sequence
  Description of Artificial Sequence: Synthetic oligonucleotide
  Sense strand starting at position 2366 of SEQ ID NO: 1888294
uagggauucuaucauauug

SEQ ID NO: 2525067 - RNA, 19 nt, Artificial Sequence
  Description of Artificial Sequence: Synthetic oligonucleotide
  Antisense strand to SEQ ID NO: 2525066
caauaugauagaaucccua

SEQ ID NO: 2525068 - RNA, 19 nt, Artificial Sequence
  Description of Artificial Sequence: Synthetic oligonucleotide
  Sense strand starting at position 2368 of SEQ ID NO: 1888294
gggauucuaucauauugcu

SEQ ID NO: 2525069 - RNA, 19 nt, Artificial Sequence
  Description of Artificial Sequence: Synthetic oligonucleotide
  Antisense strand to SEQ ID NO: 2525068
agcaauaugauagaauccc

SEQ ID NO: 2525070 - RNA, 19 nt, Artificial Sequence
  Description of Artificial Sequence: Synthetic oligonucleotide
  Sense strand starting at position 2374 of SEQ ID NO: 1888294
cuaucauauugcuugaugu

SEQ ID NO: 2525071 - RNA, 19 nt, Artificial Sequence
  Description of Artificial Sequence: Synthetic oligonucleotide
  Antisense strand to SEQ ID NO: 2525070
acaucaagcaauaugauag

SEQ ID NO: 2525072 - RNA, 19 nt, Artificial Sequence
  Description of Artificial Sequence: Synthetic oligonucleotide
  Sense strand starting at position 2376 of SEQ ID NO: 1888294
aucauauugcuugauguaa

SEQ ID NO: 2525073 - RNA, 19 nt, Artificial Sequence
  Description of Artificial Sequence: Synthetic oligonucleotide
  Antisense strand to SEQ ID NO: 2525072
uuacaucaagcaauaugau

SEQ ID NO: 2525074 - RNA, 19 nt, Artificial Sequence
  Description of Artificial Sequence: Synthetic oligonucleotide
  Sense strand starting at position 2621 of SEQ ID NO: 1888294
gggagaaucacucgaacuc

SEQ ID NO: 2525075 - RNA, 19 nt, Artificial Sequence
  Description of Artificial Sequence: Synthetic oligonucleotide
  Antisense strand to SEQ ID NO: 2525074
gaguucgagugauucuccc

SEQ ID NO: 2525076 - RNA, 19 nt, Artificial Sequence
  Description of Artificial Sequence: Synthetic oligonucleotide
  Sense strand starting at position 3457 of SEQ ID NO: 1888294
agagaaagauuccaucaua

SEQ ID NO: 2525077 - RNA, 19 nt, Artificial Sequence
  Description of Artificial Sequence: Synthetic oligonucleotide
  Antisense strand to SEQ ID NO: 2525076
uaugauggaaucuuucucu

SEQ ID NO: 2525078 - RNA, 19 nt, Artificial Sequence
  Description of Artificial Sequence: Synthetic oligonucleotide
  Sense strand starting at position 3468 of SEQ ID NO: 1888294
ccaucauauuccuugagag

SEQ ID NO: 2525079 - RNA, 19 nt, Artificial Sequence
  Description of Artificial Sequence: Synthetic oligonucleotide
  Antisense strand to SEQ ID NO: 2525078
cucucaaggaauaugaugg

SEQ ID NO: 2525080 - RNA, 19 nt, Artificial Sequence
  Description of Artificial Sequence: Synthetic oligonucleotide
  Sense strand starting at position 3470 of SEQ ID NO: 1888294
aucauauuccuugagagca

SEQ ID NO: 2525081 - RNA, 19 nt, Artificial Sequence
  Description of Artificial Sequence: Synthetic oligonucleotide
  Antisense strand to SEQ ID NO: 2525080
ugcucucaaggaauaugau

SEQ ID NO: 2525082 - RNA, 19 nt, Artificial Sequence
  Description of Artificial Sequence: Synthetic oligonucleotide
  Sense strand starting at position 3485 of SEQ ID NO: 1888294
agcauaguguugccuuuau

SEQ ID NO: 2525083 - RNA, 19 nt, Artificial Sequence
  Description of Artificial Sequence: Synthetic oligonucleotide
  Antisense strand to SEQ ID NO: 2525082
auaaaggcaacacuaugcu

SEQ ID NO: 2525084 - RNA, 19 nt, Artificial Sequence
  Description of Artificial Sequence: Synthetic oligonucleotide
  Sense strand starting at position 3522 of SEQ ID NO: 1888294
ccuucuuauuuagguucua

SEQ ID NO: 2525085 - RNA, 19 nt, Artificial Sequence
  Description of Artificial Sequence: Synthetic oligonucleotide
  Antisense strand to SEQ ID NO: 2525084
uagaaccuaaauaagaagg

SEQ ID NO: 2525086 - RNA, 19 nt, Artificial Sequence
  Description of Artificial Sequence: Synthetic oligonucleotide
  Sense strand starting at position 3565 of SEQ ID NO: 1888294
gucagaguuagccauagca

SEQ ID NO: 2525087 - RNA, 19 nt, Artificial Sequence
  Description of Artificial Sequence: Synthetic oligonucleotide
  Antisense strand to SEQ ID NO: 2525086
ugcuauggcuaacucugac

SEQ ID NO: 2525088 - RNA, 19 nt, Artificial Sequence
  Description of Artificial Sequence: Synthetic oligonucleotide
  Sense strand starting at position 3567 of SEQ ID NO: 1888294
cagaguuagccauagcagu

SEQ ID NO: 2525089 - RNA, 19 nt, Artificial Sequence
  Description of Artificial Sequence: Synthetic oligonucleotide
  Antisense strand to SEQ ID NO: 2525088
acugcuauggcuaacucug

SEQ ID NO: 2525090 - RNA, 19 nt, Artificial Sequence
  Description of Artificial Sequence: Synthetic oligonucleotide
  Sense strand starting at position 3578 of SEQ ID NO: 1888294
auagcaguaucucagauuu

SEQ ID NO: 2525091 - RNA, 19 nt, Artificial Sequence
  Description of Artificial Sequence: Synthetic oligonucleotide
  Antisense strand to SEQ ID NO: 2525090
aaaucugagauacugcuau

SEQ ID NO: 2525092 - RNA, 19 nt, Artificial Sequence
  Description of Artificial Sequence: Synthetic oligonucleotide
  Sense strand starting at position 3580 of SEQ ID NO: 1888294
agcaguaucucagauuuaa

SEQ ID NO: 2525093 - RNA, 19 nt, Artificial Sequence
  Description of Artificial Sequence: Synthetic oligonucleotide
  Antisense strand to SEQ ID NO: 2525092
uuaaaucugagauacugcu

SEQ ID NO: 2525094 - RNA, 19 nt, Artificial Sequence
  Description of Artificial Sequence: Synthetic oligonucleotide
  Sense strand starting at position 3624 of SEQ ID NO: 1888294
uuguuaagcugauuagcuu

SEQ ID NO: 2525095 - RNA, 19 nt, Artificial Sequence
  Description of Artificial Sequence: Synthetic oligonucleotide
  Antisense strand to SEQ ID NO: 2525094
aagcuaaucagcuuaacaa

SEQ ID NO: 2525096 - RNA, 19 nt, Artificial Sequence
  Description of Artificial Sequence: Synthetic oligonucleotide
  Sense strand starting at position 3709 of SEQ ID NO: 1888294
gugauauguucucggcuca

SEQ ID NO: 2525097 - RNA, 19 nt, Artificial Sequence
  Description of Artificial Sequence: Synthetic oligonucleotide
  Antisense strand to SEQ ID NO: 2525096
ugagccgagaacauaucac

SEQ ID NO: 2525098 - RNA, 19 nt, Artificial Sequence
  Description of Artificial Sequence: Synthetic oligonucleotide
  Sense strand starting at position 3960 of SEQ ID NO: 1888294
cugauuagcuuucugagaa

SEQ ID NO: 2525099 - RNA, 19 nt, Artificial Sequence
  Description of Artificial Sequence: Synthetic oligonucleotide
  Antisense strand to SEQ ID NO: 2525098
uucucagaaagcuaaucag

SEQ ID NO: 2525100 - RNA, 19 nt, Artificial Sequence
  Description of Artificial Sequence: Synthetic oligonucleotide
  Sense strand starting at position 3961 of SEQ ID NO: 1888294
ugauuagcuuucugagaaa

SEQ ID NO: 2525101 - RNA, 19 nt, Artificial Sequence
  Description of Artificial Sequence: Synthetic oligonucleotide
  Antisense strand to SEQ ID NO: 2525100
uuucucagaaagcuaauca

SEQ ID NO: 2525102 - RNA, 19 nt, Artificial Sequence
  Description of Artificial Sequence: Synthetic oligonucleotide
  Sense strand starting at position 22 of SEQ ID NO: 1888295
gugcuuacacucugaguac

SEQ ID NO: 2525103 - RNA, 19 nt, Artificial Sequence
  Description of Artificial Sequence: Synthetic oligonucleotide
  Antisense strand to SEQ ID NO: 2525102
guacucagaguguaagcac

SEQ ID NO: 2525104 - RNA, 19 nt, Artificial Sequence
  Description of Artificial Sequence: Synthetic oligonucleotide
  Sense strand starting at position 34 of SEQ ID NO: 1888295
ugaguacaggcccaugaua

SEQ ID NO: 2525105 - RNA, 19 nt, Artificial Sequence
  Description of Artificial Sequence: Synthetic oligonucleotide
  Antisense strand to SEQ ID NO: 2525104
uaucaugggccuguacuca

SEQ ID NO: 2525106 - RNA, 19 nt, Artificial Sequence
  Description of Artificial Sequence: Synthetic oligonucleotide
  Sense strand starting at position 36 of SEQ ID NO: 1888295
aguacaggcccaugauaga

SEQ ID NO: 2525107 - RNA, 19 nt, Artificial Sequence
  Description of Artificial Sequence: Synthetic oligonucleotide
  Antisense strand to SEQ ID NO: 2525106
ucuaucaugggccuguacu

SEQ ID NO: 2525108 - RNA, 19 nt, Artificial Sequence
  Description of Artificial Sequence: Synthetic oligonucleotide
  Sense strand starting at position 66 of SEQ ID NO: 1888295
cuggaagaguugaggaagu

SEQ ID NO: 2525109 - RNA, 19 nt, Artificial Sequence
  Description of Artificial Sequence: Synthetic oligonucleotide
  Antisense strand to SEQ ID NO: 2525108
acuuccucaacucuuccag

SEQ ID NO: 2525110 - RNA, 19 nt, Artificial Sequence
  Description of Artificial Sequence: Synthetic oligonucleotide
  Sense strand starting at position 76 of SEQ ID NO: 1888295
ugaggaaguaguuggcauu

SEQ ID NO: 2525111 - RNA, 19 nt, Artificial Sequence
  Description of Artificial Sequence: Synthetic oligonucleotide
  Antisense strand to SEQ ID NO: 2525110
aaugccaacuacuuccuca

SEQ ID NO: 2525112 - RNA, 19 nt, Artificial Sequence
  Description of Artificial Sequence: Synthetic oligonucleotide
  Sense strand starting at position 190 of SEQ ID NO: 1888295
ucacauguguucccaugaa

SEQ ID NO: 2525113 - RNA, 19 nt, Artificial Sequence
  Description of Artificial Sequence: Synthetic oligonucleotide
  Antisense strand to SEQ ID NO: 2525112
uucaugggaacacauguga

SEQ ID NO: 2525114 - RNA, 19 nt, Artificial Sequence
  Description of Artificial Sequence: Synthetic oligonucleotide
  Sense strand starting at position 254 of SEQ ID NO: 1888295
uuaguuauguagucgggca

SEQ ID NO: 2525115 - RNA, 19 nt, Artificial Sequence
  Description of Artificial Sequence: Synthetic oligonucleotide
  Antisense strand to SEQ ID NO: 2525114
ugcccgacuacauaacuaa

SEQ ID NO: 2525116 - RNA, 19 nt, Artificial Sequence
  Description of Artificial Sequence: Synthetic oligonucleotide
  Sense strand starting at position 500 of SEQ ID NO: 1888295
uuugaacugugagaauaaa

SEQ ID NO: 2525117 - RNA, 19 nt, Artificial Sequence
  Description of Artificial Sequence: Synthetic oligonucleotide
  Antisense strand to SEQ ID NO: 2525116
uuuauucucacaguucaaa

SEQ ID NO: 2525118 - RNA, 19 nt, Artificial Sequence
  Description of Artificial Sequence: Synthetic oligonucleotide
  Sense strand starting at position 658 of SEQ ID NO: 1888295
uugugaguugcugggauua

SEQ ID NO: 2525119 - RNA, 19 nt, Artificial Sequence
  Description of Artificial Sequence: Synthetic oligonucleotide
  Antisense strand to SEQ ID NO: 2525118
uaaucccagcaacucacaa

SEQ ID NO: 2525120 - RNA, 19 nt, Artificial Sequence
  Description of Artificial Sequence: Synthetic oligonucleotide
  Sense strand starting at position 858 of SEQ ID NO: 1888295
ccuaauaaaugcucgauag

SEQ ID NO: 2525121 - RNA, 19 nt, Artificial Sequence
  Description of Artificial Sequence: Synthetic oligonucleotide
  Antisense strand to SEQ ID NO: 2525120
cuaucgagcauuuauuagg

SEQ ID NO: 2525122 - RNA, 19 nt, Artificial Sequence
  Description of Artificial Sequence: Synthetic oligonucleotide
  Sense strand starting at position 859 of SEQ ID NO: 1888295
cuaauaaaugcucgauaga

SEQ ID NO: 2525123 - RNA, 19 nt, Artificial Sequence
  Description of Artificial Sequence: Synthetic oligonucleotide
  Antisense strand to SEQ ID NO: 2525122
ucuaucgagcauuuauuag

SEQ ID NO: 2525124 - RNA, 19 nt, Artificial Sequence
  Description of Artificial Sequence: Synthetic oligonucleotide
  Sense strand starting at position 872 of SEQ ID NO: 1888295
gauagaaagugcuuuguua

SEQ ID NO: 2525125 - RNA, 19 nt, Artificial Sequence
  Description of Artificial Sequence: Synthetic oligonucleotide
  Antisense strand to SEQ ID NO: 2525124
uaacaaagcacuuucuauc

SEQ ID NO: 2525126 - RNA, 19 nt, Artificial Sequence
  Description of Artificial Sequence: Synthetic oligonucleotide
  Sense strand starting at position 874 of SEQ ID NO: 1888295
uagaaagugcuuuguuaaa

SEQ ID NO: 2525127 - RNA, 19 nt, Artificial Sequence
  Description of Artificial Sequence: Synthetic oligonucleotide
  Antisense strand to SEQ ID NO: 2525126
uuuaacaaagcacuuucua

SEQ ID NO: 2525128 - RNA, 19 nt, Artificial Sequence
  Description of Artificial Sequence: Synthetic oligonucleotide
  Sense strand starting at position 876 of SEQ ID NO: 1888295
gaaagugcuuuguuaaauc

SEQ ID NO: 2525129 - RNA, 19 nt, Artificial Sequence
  Description of Artificial Sequence: Synthetic oligonucleotide
  Antisense strand to SEQ ID NO: 2525128
gauuuaacaaagcacuuuc

SEQ ID NO: 2525130 - RNA, 19 nt, Artificial Sequence
  Description of Artificial Sequence: Synthetic oligonucleotide
  Sense strand starting at position 962 of SEQ ID NO: 1888295
aagacuuacucgucaggag

SEQ ID NO: 2525131 - RNA, 19 nt, Artificial Sequence
  Description of Artificial Sequence: Synthetic oligonucleotide
  Antisense strand to SEQ ID NO: 2525130
cuccugacgaguaagucuu

SEQ ID NO: 2525132 - RNA, 19 nt, Artificial Sequence
  Description of Artificial Sequence: Synthetic oligonucleotide
  Sense strand starting at position 1067 of SEQ ID NO: 1888295
ugcucuaaccugugaacca

SEQ ID NO: 2525133 - RNA, 19 nt, Artificial Sequence
  Description of Artificial Sequence: Synthetic oligonucleotide
  Antisense strand to SEQ ID NO: 2525132
ugguucacagguuagagca

SEQ ID NO: 2525134 - RNA, 19 nt, Artificial Sequence
  Description of Artificial Sequence: Synthetic oligonucleotide
  Sense strand starting at position 1107 of SEQ ID NO: 1888295
ccaucuucccacggucaga

SEQ ID NO: 2525135 - RNA, 19 nt, Artificial Sequence
  Description of Artificial Sequence: Synthetic oligonucleotide
  Antisense strand to SEQ ID NO: 2525134
ucugaccgugggaagaugg

SEQ ID NO: 2525136 - RNA, 19 nt, Artificial Sequence
  Description of Artificial Sequence: Synthetic oligonucleotide
  Sense strand starting at position 1404 of SEQ ID NO: 1888295
agaggucuccaacgaagaa

SEQ ID NO: 2525137 - RNA, 19 nt, Artificial Sequence
  Description of Artificial Sequence: Synthetic oligonucleotide
  Antisense strand to SEQ ID NO: 2525136
uucuucguuggagaccucu

SEQ ID NO: 2525138 - RNA, 19 nt, Artificial Sequence
  Description of Artificial Sequence: Synthetic oligonucleotide
  Sense strand starting at position 2524 of SEQ ID NO: 1888295
ccuguacucucuuuagugu

SEQ ID NO: 2525139 - RNA, 19 nt, Artificial Sequence
  Description of Artificial Sequence: Synthetic oligonucleotide
  Antisense strand to SEQ ID NO: 2525138
acacuaaagagaguacagg

SEQ ID NO: 2525140 - RNA, 19 nt, Artificial Sequence
  Description of Artificial Sequence: Synthetic oligonucleotide
  Sense strand starting at position 3017 of SEQ ID NO: 1888295
ccagcuugaucaucacuga

SEQ ID NO: 2525141 - RNA, 19 nt, Artificial Sequence
  Description of Artificial Sequence: Synthetic oligonucleotide
  Antisense strand to SEQ ID NO: 2525140
ucagugaugaucaagcugg

SEQ ID NO: 2525142 - RNA, 19 nt, Artificial Sequence
  Description of Artificial Sequence: Synthetic oligonucleotide
  Sense strand starting at position 3302 of SEQ ID NO: 1888295
agggcuggguuugauaaga

SEQ ID NO: 2525143 - RNA, 19 nt, Artificial Sequence
  Description of Artificial Sequence: Synthetic oligonucleotide
  Antisense strand to SEQ ID NO: 2525142
ucuuaucaaacccagcccu

SEQ ID NO: 2525144 - RNA, 19 nt, Artificial Sequence
  Description of Artificial Sequence: Synthetic oligonucleotide
  Sense strand starting at position 3443 of SEQ ID NO: 1888295
uuuagaacucagugaagac

SEQ ID NO: 2525145 - RNA, 19 nt, Artificial Sequence
  Description of Artificial Sequence: Synthetic oligonucleotide
  Antisense strand to SEQ ID NO: 2525144
gucuucacugaguucuaaa

SEQ ID NO: 2525146 - RNA, 19 nt, Artificial Sequence
  Description of Artificial Sequence: Synthetic oligonucleotide
  Sense strand starting at position 3479 of SEQ ID NO: 1888295
ugcugaggacucugaguca

SEQ ID NO: 2525147 - RNA, 19 nt, Artificial Sequence
  Description of Artificial Sequence: Synthetic oligonucleotide
  Antisense strand to SEQ ID NO: 2525146
ugacucagaguccucagca

SEQ ID NO: 2525148 - RNA, 19 nt, Artificial Sequence
  Description of Artificial Sequence: Synthetic oligonucleotide
  Sense strand starting at position 3544 of SEQ ID NO: 1888295
uugagaagcucccuuaaag

SEQ ID NO: 2525149 - RNA, 19 nt, Artificial Sequence
  Description of Artificial Sequence: Synthetic oligonucleotide
  Antisense strand to SEQ ID NO: 2525148
cuuuaagggagcuucucaa

SEQ ID NO: 2525150 - RNA, 19 nt, Artificial Sequence
  Description of Artificial Sequence: Synthetic oligonucleotide
  Sense strand starting at position 3644 of SEQ ID NO: 1888295
cuagcugguccugaggaaa

SEQ ID NO: 2525151 - RNA, 19 nt, Artificial Sequence
  Description of Artificial Sequence: Synthetic oligonucleotide
  Antisense strand to SEQ ID NO: 2525150
uuuccucaggaccagcuag

SEQ ID NO: 2525152 - RNA, 19 nt, Artificial Sequence
  Description of Artificial Sequence: Synthetic oligonucleotide
  Sense strand starting at position 3678 of SEQ ID NO: 1888295
gccaaaccuccugguuauu

SEQ ID NO: 2525153 - RNA, 19 nt, Artificial Sequence
  Description of Artificial Sequence: Synthetic oligonucleotide
  Antisense strand to SEQ ID NO: 2525152
aauaaccaggagguuuggc

SEQ ID NO: 2525154 - RNA, 19 nt, Artificial Sequence
  Description of Artificial Sequence: Synthetic oligonucleotide
  Sense strand starting at position 3817 of SEQ ID NO: 1888295
gcaagcuauuggguacuau

SEQ ID NO: 2525155 - RNA, 19 nt, Artificial Sequence
  Description of Artificial Sequence: Synthetic oligonucleotide
  Antisense strand to SEQ ID NO: 2525154
auaguacccaauagcuugc

SEQ ID NO: 2525156 - RNA, 19 nt, Artificial Sequence
  Description of Artificial Sequence: Synthetic oligonucleotide
  Sense strand starting at position 3818 of SEQ ID NO: 1888295
caagcuauuggguacuaua

SEQ ID NO: 2525157 - RNA, 19 nt, Artificial Sequence
  Description of Artificial Sequence: Synthetic oligonucleotide
  Antisense strand to SEQ ID NO: 2525156
uauaguacccaauagcuug

SEQ ID NO: 2525158 - RNA, 19 nt, Artificial Sequence
  Description of Artificial Sequence: Synthetic oligonucleotide
  Sense strand starting at position 3821 of SEQ ID NO: 1888295
gcuauuggguacuauauaa

SEQ ID NO: 2525159 - RNA, 19 nt, Artificial Sequence
  Description of Artificial Sequence: Synthetic oligonucleotide
  Antisense strand to SEQ ID NO: 2525158
uuauauaguacccaauagc

SEQ ID NO: 2525160 - RNA, 19 nt, Artificial Sequence
  Description of Artificial Sequence: Synthetic oligonucleotide
  Sense strand starting at position 3829 of SEQ ID NO: 1888295
guacuauauaaguggcaga

SEQ ID NO: 2525161 - RNA, 19 nt, Artificial Sequence
  Description of Artificial Sequence: Synthetic oligonucleotide
  Antisense strand to SEQ ID NO: 2525160
ucugccacuuauauaguac

SEQ ID NO: 2525162 - RNA, 19 nt, Artificial Sequence
  Description of Artificial Sequence: Synthetic oligonucleotide
  Sense strand starting at position 3832 of SEQ ID NO: 1888295
cuauauaaguggcagauau

SEQ ID NO: 2525163 - RNA, 19 nt, Artificial Sequence
  Description of Artificial Sequence: Synthetic oligonucleotide
  Antisense strand to SEQ ID NO: 2525162
auaucugccacuuauauag

SEQ ID NO: 2525164 - RNA, 19 nt, Artificial Sequence
  Description of Artificial Sequence: Synthetic oligonucleotide
  Sense strand starting at position 3834 of SEQ ID NO: 1888295
auauaaguggcagauaugu

SEQ ID NO: 2525165 - RNA, 19 nt, Artificial Sequence
  Description of Artificial Sequence: Synthetic oligonucleotide
  Antisense strand to SEQ ID NO: 2525164
acauaucugccacuuauau

SEQ ID NO: 2525166 - RNA, 19 nt, Artificial Sequence
  Description of Artificial Sequence: Synthetic oligonucleotide
  Sense strand starting at position 3836 of SEQ ID NO: 1888295
auaaguggcagauauguaa

SEQ ID NO: 2525167 - RNA, 19 nt, Artificial Sequence
  Description of Artificial Sequence: Synthetic oligonucleotide
  Antisense strand to SEQ ID NO: 2525166
uuacauaucugccacuuau

SEQ ID NO: 2525168 - RNA, 19 nt, Artificial Sequence
  Description of Artificial Sequence: Synthetic oligonucleotide
  Sense strand starting at position 3847 of SEQ ID NO: 1888295
auauguaaaugccagauaa

SEQ ID NO: 2525169 - RNA, 19 nt, Artificial Sequence
  Description of Artificial Sequence: Synthetic oligonucleotide
  Antisense strand to SEQ ID NO: 2525168
uuaucuggcauuuacauau

SEQ ID NO: 2525170 - RNA, 19 nt, Artificial Sequence
  Description of Artificial Sequence: Synthetic oligonucleotide
  Sense strand starting at position 3918 of SEQ ID NO: 1888295
gcaacaauauugucugcuu

SEQ ID NO: 2525171 - RNA, 19 nt, Artificial Sequence
  Description of Artificial Sequence: Synthetic oligonucleotide
  Antisense strand to SEQ ID NO: 2525170
aagcagacaauauuguugc

SEQ ID NO: 2525172 - RNA, 19 nt, Artificial Sequence
  Description of Artificial Sequence: Synthetic oligonucleotide
  Sense strand starting at position 3926 of SEQ ID NO: 1888295
auugucugcuucuuaggaa

SEQ ID NO: 2525173 - RNA, 19 nt, Artificial Sequence
  Description of Artificial Sequence: Synthetic oligonucleotide
  Antisense strand to SEQ ID NO: 2525172
uuccuaagaagcagacaau

SEQ ID NO: 2525174 - RNA, 19 nt, Artificial Sequence
  Description of Artificial Sequence: Synthetic oligonucleotide
  Sense strand starting at position 3930 of SEQ ID NO: 1888295
ucugcuucuuaggaaagga

SEQ ID NO: 2525175 - RNA, 19 nt, Artificial Sequence
  Description of Artificial Sequence: Synthetic oligonucleotide
  Antisense strand to SEQ ID NO: 2525174
uccuuuccuaagaagcaga

SEQ ID NO: 2525176 - RNA, 19 nt, Artificial Sequence
  Description of Artificial Sequence: Synthetic oligonucleotide
  Sense strand starting at position 3957 of SEQ ID NO: 1888295
ccuagcaacugauuaagua

SEQ ID NO: 2525177 - RNA, 19 nt, Artificial Sequence
  Description of Artificial Sequence: Synthetic oligonucleotide
  Antisense strand to SEQ ID NO: 2525176
uacuuaaucaguugcuagg

SEQ ID NO: 2525178 - RNA, 19 nt, Artificial Sequence
  Description of Artificial Sequence: Synthetic oligonucleotide
  Sense strand starting at position 3958 of SEQ ID NO: 1888295
cuagcaacugauuaaguaa

SEQ ID NO: 2525179 - RNA, 19 nt, Artificial Sequence
  Description of Artificial Sequence: Synthetic oligonucleotide
  Antisense strand to SEQ ID NO: 2525178
uuacuuaaucaguugcuag

SEQ ID NO: 2525180 - RNA, 19 nt, Artificial Sequence
  Description of Artificial Sequence: Synthetic oligonucleotide
  Sense strand starting at position 3961 of SEQ ID NO: 1888295
gcaacugauuaaguaacuu

SEQ ID NO: 2525181 - RNA, 19 nt, Artificial Sequence
  Description of Artificial Sequence: Synthetic oligonucleotide
  Antisense strand to SEQ ID NO: 2525180
aaguuacuuaaucaguugc

SEQ ID NO: 2525182 - RNA, 19 nt, Artificial Sequence
  Description of Artificial Sequence: Synthetic oligonucleotide
  Sense strand starting at position 29 of SEQ ID NO: 1888296
gccugugucuacucagcca

SEQ ID NO: 2525183 - RNA, 19 nt, Artificial Sequence
  Description of Artificial Sequence: Synthetic oligonucleotide
  Antisense strand to SEQ ID NO: 2525182
uggcugaguagacacaggc

SEQ ID NO: 2525184 - RNA, 19 nt, Artificial Sequence
  Description of Artificial Sequence: Synthetic oligonucleotide
  Sense strand starting at position 34 of SEQ ID NO: 1888296
ugucuacucagccagggaa

SEQ ID NO: 2525185 - RNA, 19 nt, Artificial Sequence
  Description of Artificial Sequence: Synthetic oligonucleotide
  Antisense strand to SEQ ID NO: 2525184
uucccuggcugaguagaca

SEQ ID NO: 2525186 - RNA, 19 nt, Artificial Sequence
  Description of Artificial Sequence: Synthetic oligonucleotide
  Sense strand starting at position 326 of SEQ ID NO: 1888296
ggaaguucuugagugagga

SEQ ID NO: 2525187 - RNA, 19 nt, Artificial Sequence
  Description of Artificial Sequence: Synthetic oligonucleotide
  Antisense strand to SEQ ID NO: 2525186
uccucacucaagaacuucc

SEQ ID NO: 2525188 - RNA, 19 nt, Artificial Sequence
  Description of Artificial Sequence: Synthetic oligonucleotide
  Sense strand starting at position 327 of SEQ ID NO: 1888296
gaaguucuugagugaggag

SEQ ID NO: 2525189 - RNA, 19 nt, Artificial Sequence
  Description of Artificial Sequence: Synthetic oligonucleotide
  Antisense strand to SEQ ID NO: 2525188
cuccucacucaagaacuuc

SEQ ID NO: 2525190 - RNA, 19 nt, Artificial Sequence
  Description of Artificial Sequence: Synthetic oligonucleotide
  Sense strand starting at position 328 of SEQ ID NO: 1888296
aaguucuugagugaggagu

SEQ ID NO: 2525191 - RNA, 19 nt, Artificial Sequence
  Description of Artificial Sequence: Synthetic oligonucleotide
  Antisense strand to SEQ ID NO: 2525190
acuccucacucaagaacuu

SEQ ID NO: 2525192 - RNA, 19 nt, Artificial Sequence
  Description of Artificial Sequence: Synthetic oligonucleotide
  Sense strand starting at position 365 of SEQ ID NO: 1888296
ggaguaagauuugguuggu

SEQ ID NO: 2525193 - RNA, 19 nt, Artificial Sequence
  Description of Artificial Sequence: Synthetic oligonucleotide
  Antisense strand to SEQ ID NO: 2525192
accaaccaaaucuuacucc

SEQ ID NO: 2525194 - RNA, 19 nt, Artificial Sequence
  Description of Artificial Sequence: Synthetic oligonucleotide
  Sense strand starting at position 401 of SEQ ID NO: 1888296
auuugcauucgguguuuga

SEQ ID NO: 2525195 - RNA, 19 nt, Artificial Sequence
  Description of Artificial Sequence: Synthetic oligonucleotide
  Antisense strand to SEQ ID NO: 2525194
ucaaacaccgaaugcaaau

SEQ ID NO: 2525196 - RNA, 19 nt, Artificial Sequence
  Description of Artificial Sequence: Synthetic oligonucleotide
  Sense strand starting at position 417 of SEQ ID NO: 1888296
ugagcacuucuguguugua

SEQ ID NO: 2525197 - RNA, 19 nt, Artificial Sequence
  Description of Artificial Sequence: Synthetic oligonucleotide
  Antisense strand to SEQ ID NO: 2525196
uacaacacagaagugcuca

SEQ ID NO: 2525198 - RNA, 19 nt, Artificial Sequence
  Description of Artificial Sequence: Synthetic oligonucleotide
  Sense strand starting at position 418 of SEQ ID NO: 1888296
gagcacuucuguguuguau

SEQ ID NO: 2525199 - RNA, 19 nt, Artificial Sequence
  Description of Artificial Sequence: Synthetic oligonucleotide
  Antisense strand to SEQ ID NO: 2525198
auacaacacagaagugcuc

SEQ ID NO: 2525200 - RNA, 19 nt, Artificial Sequence
  Description of Artificial Sequence: Synthetic oligonucleotide
  Sense strand starting at position 446 of SEQ ID NO: 1888296
ggcaauaacuugguagcca

SEQ ID NO: 2525201 - RNA, 19 nt, Artificial Sequence
  Description of Artificial Sequence: Synthetic oligonucleotide
  Antisense strand to SEQ ID NO: 2525200
uggcuaccaaguuauugcc

SEQ ID NO: 2525202 - RNA, 19 nt, Artificial Sequence
  Description of Artificial Sequence: Synthetic oligonucleotide
  Sense strand starting at position 447 of SEQ ID NO: 1888296
gcaauaacuugguagccaa

SEQ ID NO: 2525203 - RNA, 19 nt, Artificial Sequence
  Description of Artificial Sequence: Synthetic oligonucleotide
  Antisense strand to SEQ ID NO: 2525202
uuggcuaccaaguuauugc

SEQ ID NO: 2525204 - RNA, 19 nt, Artificial Sequence
  Description of Artificial Sequence: Synthetic oligonucleotide
  Sense strand starting at position 486 of SEQ ID NO: 1888296
gugcuuacacucugaguac

SEQ ID NO: 2525205 - RNA, 19 nt, Artificial Sequence
  Description of Artificial Sequence: Synthetic oligonucleotide
  Antisense strand to SEQ ID NO: 2525204
guacucagaguguaagcac

SEQ ID NO: 2525206 - RNA, 19 nt, Artificial Sequence
  Description of Artificial Sequence: Synthetic oligonucleotide
  Sense strand starting at position 487 of SEQ ID NO: 1888296
ugcuuacacucugaguaca

SEQ ID NO: 2525207 - RNA, 19 nt, Artificial Sequence
  Description of Artificial Sequence: Synthetic oligonucleotide
  Antisense strand to SEQ ID NO: 2525206
uguacucagaguguaagca

SEQ ID NO: 2525208 - RNA, 19 nt, Artificial Sequence
  Description of Artificial Sequence: Synthetic oligonucleotide
  Sense strand starting at position 498 of SEQ ID NO: 1888296
ugaguacaggcccaugaua

SEQ ID NO: 2525209 - RNA, 19 nt, Artificial Sequence
  Description of Artificial Sequence: Synthetic oligonucleotide
  Antisense strand to SEQ ID NO: 2525208
uaucaugggccuguacuca

SEQ ID NO: 2525210 - RNA, 19 nt, Artificial Sequence
  Description of Artificial Sequence: Synthetic oligonucleotide
  Sense strand starting at position 500 of SEQ ID NO: 1888296
aguacaggcccaugauaga

SEQ ID NO: 2525211 - RNA, 19 nt, Artificial Sequence
  Description of Artificial Sequence: Synthetic oligonucleotide
  Antisense strand to SEQ ID NO: 2525210
ucuaucaugggccuguacu

SEQ ID NO: 2525212 - RNA, 19 nt, Artificial Sequence
  Description of Artificial Sequence: Synthetic oligonucleotide
  Sense strand starting at position 530 of SEQ ID NO: 1888296
cuggaagaguugaggaagu

SEQ ID NO: 2525213 - RNA, 19 nt, Artificial Sequence
  Description of Artificial Sequence: Synthetic oligonucleotide
  Antisense strand to SEQ ID NO: 2525212
acuuccucaacucuuccag

SEQ ID NO: 2525214 - RNA, 19 nt, Artificial Sequence
  Description of Artificial Sequence: Synthetic oligonucleotide
  Sense strand starting at position 540 of SEQ ID NO: 1888296
ugaggaaguaguuggcauu

SEQ ID NO: 2525215 - RNA, 19 nt, Artificial Sequence
  Description of Artificial Sequence: Synthetic oligonucleotide
  Antisense strand to SEQ ID NO: 2525214
aaugccaacuacuuccuca

SEQ ID NO: 2525216 - RNA, 19 nt, Artificial Sequence
  Description of Artificial Sequence: Synthetic oligonucleotide
  Sense strand starting at position 654 of SEQ ID NO: 1888296
ucacauguguucccaugaa

SEQ ID NO: 2525217 - RNA, 19 nt, Artificial Sequence
  Description of Artificial Sequence: Synthetic oligonucleotide
  Antisense strand to SEQ ID NO: 2525216
uucaugggaacacauguga

SEQ ID NO: 2525218 - RNA, 19 nt, Artificial Sequence
  Description of Artificial Sequence: Synthetic oligonucleotide
  Sense strand starting at position 718 of SEQ ID NO: 1888296
uuaguuauguagucgggca

SEQ ID NO: 2525219 - RNA, 19 nt, Artificial Sequence
  Description of Artificial Sequence: Synthetic oligonucleotide
  Antisense strand to SEQ ID NO: 2525218
ugcccgacuacauaacuaa

SEQ ID NO: 2525220 - RNA, 19 nt, Artificial Sequence
  Description of Artificial Sequence: Synthetic oligonucleotide
  Sense strand starting at position 858 of SEQ ID NO: 1888296
auguuuaaguggcauuaaa

SEQ ID NO: 2525221 - RNA, 19 nt, Artificial Sequence
  Description of Artificial Sequence: Synthetic oligonucleotide
  Antisense strand to SEQ ID NO: 2525220
uuuaaugccacuuaaacau

SEQ ID NO: 2525222 - RNA, 19 nt, Artificial Sequence
  Description of Artificial Sequence: Synthetic oligonucleotide
  Sense strand starting at position 964 of SEQ ID NO: 1888296
uuugaacugugagaauaaa

SEQ ID NO: 2525223 - RNA, 19 nt, Artificial Sequence
  Description of Artificial Sequence: Synthetic oligonucleotide
  Antisense strand to SEQ ID NO: 2525222
uuuauucucacaguucaaa

SEQ ID NO: 2525224 - RNA, 19 nt, Artificial Sequence
  Description of Artificial Sequence: Synthetic oligonucleotide
  Sense strand starting at position 1122 of SEQ ID NO: 1888296
uugugaguugcugggauua

SEQ ID NO: 2525225 - RNA, 19 nt, Artificial Sequence
  Description of Artificial Sequence: Synthetic oligonucleotide
  Antisense strand to SEQ ID NO: 2525224
uaaucccagcaacucacaa

SEQ ID NO: 2525226 - RNA, 19 nt, Artificial Sequence
  Description of Artificial Sequence: Synthetic oligonucleotide
  Sense strand starting at position 1124 of SEQ ID NO: 1888296
gugaguugcugggauuaca

SEQ ID NO: 2525227 - RNA, 19 nt, Artificial Sequence
  Description of Artificial Sequence: Synthetic oligonucleotide
  Antisense strand to SEQ ID NO: 2525226
uguaaucccagcaacucac

SEQ ID NO: 2525228 - RNA, 19 nt, Artificial Sequence
  Description of Artificial Sequence: Synthetic oligonucleotide
  Sense strand starting at position 1322 of SEQ ID NO: 1888296
ccuaauaaaugcucgauag

SEQ ID NO: 2525229 - RNA, 19 nt, Artificial Sequence
  Description of Artificial Sequence: Synthetic oligonucleotide
  Antisense strand to SEQ ID NO: 2525228
cuaucgagcauuuauuagg

SEQ ID NO: 2525230 - RNA, 19 nt, Artificial Sequence
  Description of Artificial Sequence: Synthetic oligonucleotide
  Sense strand starting at position 1323 of SEQ ID NO: 1888296
cuaauaaaugcucgauaga

SEQ ID NO: 2525231 - RNA, 19 nt, Artificial Sequence
  Description of Artificial Sequence: Synthetic oligonucleotide
  Antisense strand to SEQ ID NO: 2525230
ucuaucgagcauuuauuag

SEQ ID NO: 2525232 - RNA, 19 nt, Artificial Sequence
  Description of Artificial Sequence: Synthetic oligonucleotide
  Sense strand starting at position 1336 of SEQ ID NO: 1888296
gauagaaagugcuuuguua

SEQ ID NO: 2525233 - RNA, 19 nt, Artificial Sequence
  Description of Artificial Sequence: Synthetic oligonucleotide
  Antisense strand to SEQ ID NO: 2525232
uaacaaagcacuuucuauc

SEQ ID NO: 2525234 - RNA, 19 nt, Artificial Sequence
  Description of Artificial Sequence: Synthetic oligonucleotide
  Sense strand starting at position 1338 of SEQ ID NO: 1888296
uagaaagugcuuuguuaaa

SEQ ID NO: 2525235 - RNA, 19 nt, Artificial Sequence
  Description of Artificial Sequence: Synthetic oligonucleotide
  Antisense strand to SEQ ID NO: 2525234
uuuaacaaagcacuuucua

SEQ ID NO: 2525236 - RNA, 19 nt, Artificial Sequence
  Description of Artificial Sequence: Synthetic oligonucleotide
  Sense strand starting at position 1340 of SEQ ID NO: 1888296
gaaagugcuuuguuaaauc

SEQ ID NO: 2525237 - RNA, 19 nt, Artificial Sequence
  Description of Artificial Sequence: Synthetic oligonucleotide
  Antisense strand to SEQ ID NO: 2525236
gauuuaacaaagcacuuuc

SEQ ID NO: 2525238 - RNA, 19 nt, Artificial Sequence
  Description of Artificial Sequence: Synthetic oligonucleotide
  Sense strand starting at position 1426 of SEQ ID NO: 1888296
aagacuuacucgucaggag

SEQ ID NO: 2525239 - RNA, 19 nt, Artificial Sequence
  Description of Artificial Sequence: Synthetic oligonucleotide
  Antisense strand to SEQ ID NO: 2525238
cuccugacgaguaagucuu

SEQ ID NO: 2525240 - RNA, 19 nt, Artificial Sequence
  Description of Artificial Sequence: Synthetic oligonucleotide
  Sense strand starting at position 1531 of SEQ ID NO: 1888296
ugcucuaaccugugaacca

SEQ ID NO: 2525241 - RNA, 19 nt, Artificial Sequence
  Description of Artificial Sequence: Synthetic oligonucleotide
  Antisense strand to SEQ ID NO: 2525240
ugguucacagguuagagca

SEQ ID NO: 2525242 - RNA, 19 nt, Artificial Sequence
  Description of Artificial Sequence: Synthetic oligonucleotide
  Sense strand starting at position 1532 of SEQ ID NO: 1888296
gcucuaaccugugaaccaa

SEQ ID NO: 2525243 - RNA, 19 nt, Artificial Sequence
  Description of Artificial Sequence: Synthetic oligonucleotide
  Antisense strand to SEQ ID NO: 2525242
uugguucacagguuagagc

SEQ ID NO: 2525244 - RNA, 19 nt, Artificial Sequence
  Description of Artificial Sequence: Synthetic oligonucleotide
  Sense strand starting at position 1571 of SEQ ID NO: 1888296
ccaucuucccacggucaga

SEQ ID NO: 2525245 - RNA, 19 nt, Artificial Sequence
  Description of Artificial Sequence: Synthetic oligonucleotide
  Antisense strand to SEQ ID NO: 2525244
ucugaccgugggaagaugg

SEQ ID NO: 2525246 - RNA, 19 nt, Artificial Sequence
  Description of Artificial Sequence: Synthetic oligonucleotide
  Sense strand starting at position 1615 of SEQ ID NO: 1888296
gccgauguaucagaacuaa

SEQ ID NO: 2525247 - RNA, 19 nt, Artificial Sequence
  Description of Artificial Sequence: Synthetic oligonucleotide
  Antisense strand to SEQ ID NO: 2525246
uuaguucugauacaucggc

SEQ ID NO: 2525248 - RNA, 19 nt, Artificial Sequence
  Description of Artificial Sequence: Synthetic oligonucleotide
  Sense strand starting at position 1868 of SEQ ID NO: 1888296
agaggucuccaacgaagaa

SEQ ID NO: 2525249 - RNA, 19 nt, Artificial Sequence
  Description of Artificial Sequence: Synthetic oligonucleotide
  Antisense strand to SEQ ID NO: 2525248
uucuucguuggagaccucu

SEQ ID NO: 2525250 - RNA, 19 nt, Artificial Sequence
  Description of Artificial Sequence: Synthetic oligonucleotide
  Sense strand starting at position 2988 of SEQ ID NO: 1888296
ccuguacucucuuuagugu

SEQ ID NO: 2525251 - RNA, 19 nt, Artificial Sequence
  Description of Artificial Sequence: Synthetic oligonucleotide
  Antisense strand to SEQ ID NO: 2525250
acacuaaagagaguacagg

SEQ ID NO: 2525252 - RNA, 19 nt, Artificial Sequence
  Description of Artificial Sequence: Synthetic oligonucleotide
  Sense strand starting at position 3481 of SEQ ID NO: 1888296
ccagcuugaucaucacuga

SEQ ID NO: 2525253 - RNA, 19 nt, Artificial Sequence
  Description of Artificial Sequence: Synthetic oligonucleotide
  Antisense strand to SEQ ID NO: 2525252
ucagugaugaucaagcugg

SEQ ID NO: 2525254 - RNA, 19 nt, Artificial Sequence
  Description of Artificial Sequence: Synthetic oligonucleotide
  Sense strand starting at position 3766 of SEQ ID NO: 1888296
agggcuggguuugauaaga

SEQ ID NO: 2525255 - RNA, 19 nt, Artificial Sequence
  Description of Artificial Sequence: Synthetic oligonucleotide
  Antisense strand to SEQ ID NO: 2525254
ucuuaucaaacccagcccu

SEQ ID NO: 2525256 - RNA, 19 nt, Artificial Sequence
  Description of Artificial Sequence: Synthetic oligonucleotide
  Sense strand starting at position 3882 of SEQ ID NO: 1888296
agucacaguuuccaauuau

SEQ ID NO: 2525257 - RNA, 19 nt, Artificial Sequence
  Description of Artificial Sequence: Synthetic oligonucleotide
  Antisense strand to SEQ ID NO: 2525256
auaauuggaaacugugacu

SEQ ID NO: 2525258 - RNA, 19 nt, Artificial Sequence
  Description of Artificial Sequence: Synthetic oligonucleotide
  Sense strand starting at position 3907 of SEQ ID NO: 1888296
uuuagaacucagugaagac

SEQ ID NO: 2525259 - RNA, 19 nt, Artificial Sequence
  Description of Artificial Sequence: Synthetic oligonucleotide
  Antisense strand to SEQ ID NO: 2525258
gucuucacugaguucuaaa

SEQ ID NO: 2525260 - RNA, 19 nt, Artificial Sequence
  Description of Artificial Sequence: Synthetic oligonucleotide
  Sense strand starting at position 3943 of SEQ ID NO: 1888296
ugcugaggacucugaguca

SEQ ID NO: 2525261 - RNA, 19 nt, Artificial Sequence
  Description of Artificial Sequence: Synthetic oligonucleotide
  Antisense strand to SEQ ID NO: 2525260
ugacucagaguccucagca

SEQ ID NO: 2525262 - RNA, 19 nt, Artificial Sequence
  Description of Artificial Sequence: Synthetic oligonucleotide
  Sense strand starting at position 71 of SEQ ID NO: 1888297
aggucuuaucacuggauca

SEQ ID NO: 2525263 - RNA, 19 nt, Artificial Sequence
  Description of Artificial Sequence: Synthetic oligonucleotide
  Antisense strand to SEQ ID NO: 2525262
ugauccagugauaagaccu

SEQ ID NO: 2525264 - RNA, 19 nt, Artificial Sequence
  Description of Artificial Sequence: Synthetic oligonucleotide
  Sense strand starting at position 73 of SEQ ID NO: 1888297
gucuuaucacuggaucaua

SEQ ID NO: 2525265 - RNA, 19 nt, Artificial Sequence
  Description of Artificial Sequence: Synthetic oligonucleotide
  Antisense strand to SEQ ID NO: 2525264
uaugauccagugauaagac

SEQ ID NO: 2525266 - RNA, 19 nt, Artificial Sequence
  Description of Artificial Sequence: Synthetic oligonucleotide
  Sense strand starting at position 498 of SEQ ID NO: 1888297
agaaguaaaucccugagca

SEQ ID NO: 2525267 - RNA, 19 nt, Artificial Sequence
  Description of Artificial Sequence: Synthetic oligonucleotide
  Antisense strand to SEQ ID NO: 2525266
ugcucagggauuuacuucu

SEQ ID NO: 2525268 - RNA, 19 nt, Artificial Sequence
  Description of Artificial Sequence: Synthetic oligonucleotide
  Sense strand starting at position 510 of SEQ ID NO: 1888297
cugagcaacuuaccugaaa

SEQ ID NO: 2525269 - RNA, 19 nt, Artificial Sequence
  Description of Artificial Sequence: Synthetic oligonucleotide
  Antisense strand to SEQ ID NO: 2525268
uuucagguaaguugcucag

SEQ ID NO: 2525270 - RNA, 19 nt, Artificial Sequence
  Description of Artificial Sequence: Synthetic oligonucleotide
  Sense strand starting at position 511 of SEQ ID NO: 1888297
ugagcaacuuaccugaaau

SEQ ID NO: 2525271 - RNA, 19 nt, Artificial Sequence
  Description of Artificial Sequence: Synthetic oligonucleotide
  Antisense strand to SEQ ID NO: 2525270
auuucagguaaguugcuca

SEQ ID NO: 2525272 - RNA, 19 nt, Artificial Sequence
  Description of Artificial Sequence: Synthetic oligonucleotide
  Sense strand starting at position 609 of SEQ ID NO: 1888297
ucaugagcgauuuggcuca

SEQ ID NO: 2525273 - RNA, 19 nt, Artificial Sequence
  Description of Artificial Sequence: Synthetic oligonucleotide
  Antisense strand to SEQ ID NO: 2525272
ugagccaaaucgcucauga

SEQ ID NO: 2525274 - RNA, 19 nt, Artificial Sequence
  Description of Artificial Sequence: Synthetic oligonucleotide
  Sense strand starting at position 714 of SEQ ID NO: 1888297
ugaggaaacguucacuugu

SEQ ID NO: 2525275 - RNA, 19 nt, Artificial Sequence
  Description of Artificial Sequence: Synthetic oligonucleotide
  Antisense strand to SEQ ID NO: 2525274
acaagugaacguuuccuca

SEQ ID NO: 2525276 - RNA, 19 nt, Artificial Sequence
  Description of Artificial Sequence: Synthetic oligonucleotide
  Sense strand starting at position 843 of SEQ ID NO: 1888297
aacgucugaguccaauuaa

SEQ ID NO: 2525277 - RNA, 19 nt, Artificial Sequence
  Description of Artificial Sequence: Synthetic oligonucleotide
  Antisense strand to SEQ ID NO: 2525276
uuaauuggacucagacguu

SEQ ID NO: 2525278 - RNA, 19 nt, Artificial Sequence
  Description of Artificial Sequence: Synthetic oligonucleotide
  Sense strand starting at position 866 of SEQ ID NO: 1888297
agacuaggucaacgaaagu

SEQ ID NO: 2525279 - RNA, 19 nt, Artificial Sequence
  Description of Artificial Sequence: Synthetic oligonucleotide
  Antisense strand to SEQ ID NO: 2525278
acuuucguugaccuagucu

SEQ ID NO: 2525280 - RNA, 19 nt, Artificial Sequence
  Description of Artificial Sequence: Synthetic oligonucleotide
  Sense strand starting at position 873 of SEQ ID NO: 1888297
gucaacgaaaguuaguaua

SEQ ID NO: 2525281 - RNA, 19 nt, Artificial Sequence
  Description of Artificial Sequence: Synthetic oligonucleotide
  Antisense strand to SEQ ID NO: 2525280
uauacuaacuuucguugac

SEQ ID NO: 2525282 - RNA, 19 nt, Artificial Sequence
  Description of Artificial Sequence: Synthetic oligonucleotide
  Sense strand starting at position 875 of SEQ ID NO: 1888297
caacgaaaguuaguauaua

SEQ ID NO: 2525283 - RNA, 19 nt, Artificial Sequence
  Description of Artificial Sequence: Synthetic oligonucleotide
  Antisense strand to SEQ ID NO: 2525282
uauauacuaacuuucguug

SEQ ID NO: 2525284 - RNA, 19 nt, Artificial Sequence
  Description of Artificial Sequence: Synthetic oligonucleotide
  Sense strand starting at position 1035 of SEQ ID NO: 1888297
gaaugaaagugcuuuaagg

SEQ ID NO: 2525285 - RNA, 19 nt, Artificial Sequence
  Description of Artificial Sequence: Synthetic oligonucleotide
  Antisense strand to SEQ ID NO: 2525284
ccuuaaagcacuuucauuc

SEQ ID NO: 2525286 - RNA, 19 nt, Artificial Sequence
  Description of Artificial Sequence: Synthetic oligonucleotide
  Sense strand starting at position 1037 of SEQ ID NO: 1888297
augaaagugcuuuaaggug

SEQ ID NO: 2525287 - RNA, 19 nt, Artificial Sequence
  Description of Artificial Sequence: Synthetic oligonucleotide
  Antisense strand to SEQ ID NO: 2525286
caccuuaaagcacuuucau

SEQ ID NO: 2525288 - RNA, 19 nt, Artificial Sequence
  Description of Artificial Sequence: Synthetic oligonucleotide
  Sense strand starting at position 1139 of SEQ ID NO: 1888297
guaaaugugguagaugaca

SEQ ID NO: 2525289 - RNA, 19 nt, Artificial Sequence
  Description of Artificial Sequence: Synthetic oligonucleotide
  Antisense strand to SEQ ID NO: 2525288
ugucaucuaccacauuuac

SEQ ID NO: 2525290 - RNA, 19 nt, Artificial Sequence
  Description of Artificial Sequence: Synthetic oligonucleotide
  Sense strand starting at position 1199 of SEQ ID NO: 1888297
uggaucugucacuagcaaa

SEQ ID NO: 2525291 - RNA, 19 nt, Artificial Sequence
  Description of Artificial Sequence: Synthetic oligonucleotide
  Antisense strand to SEQ ID NO: 2525290
uuugcuagugacagaucca

SEQ ID NO: 2525292 - RNA, 19 nt, Artificial Sequence
  Description of Artificial Sequence: Synthetic oligonucleotide
  Sense strand starting at position 1212 of SEQ ID NO: 1888297
agcaaacugcauuacugaa

SEQ ID NO: 2525293 - RNA, 19 nt, Artificial Sequence
  Description of Artificial Sequence: Synthetic oligonucleotide
  Antisense strand to SEQ ID NO: 2525292
uucaguaaugcaguuugcu

SEQ ID NO: 2525294 - RNA, 19 nt, Artificial Sequence
  Description of Artificial Sequence: Synthetic oligonucleotide
  Sense strand starting at position 1391 of SEQ ID NO: 1888297
uagggaaugacauguaugu

SEQ ID NO: 2525295 - RNA, 19 nt, Artificial Sequence
  Description of Artificial Sequence: Synthetic oligonucleotide
  Antisense strand to SEQ ID NO: 2525294
acauacaugucauucccua

SEQ ID NO: 2525296 - RNA, 19 nt, Artificial Sequence
  Description of Artificial Sequence: Synthetic oligonucleotide
  Sense strand starting at position 1393 of SEQ ID NO: 1888297
gggaaugacauguaugugu

SEQ ID NO: 2525297 - RNA, 19 nt, Artificial Sequence
  Description of Artificial Sequence: Synthetic oligonucleotide
  Antisense strand to SEQ ID NO: 2525296
acacauacaugucauuccc

SEQ ID NO: 2525298 - RNA, 19 nt, Artificial Sequence
  Description of Artificial Sequence: Synthetic oligonucleotide
  Sense strand starting at position 1401 of SEQ ID NO: 1888297
cauguauguguuuaggaag

SEQ ID NO: 2525299 - RNA, 19 nt, Artificial Sequence
  Description of Artificial Sequence: Synthetic oligonucleotide
  Antisense strand to SEQ ID NO: 2525298
cuuccuaaacacauacaug

SEQ ID NO: 2525300 - RNA, 19 nt, Artificial Sequence
  Description of Artificial Sequence: Synthetic oligonucleotide
  Sense strand starting at position 1408 of SEQ ID NO: 1888297
guguuuaggaagugaugaa

SEQ ID NO: 2525301 - RNA, 19 nt, Artificial Sequence
  Description of Artificial Sequence: Synthetic oligonucleotide
  Antisense strand to SEQ ID NO: 2525300
uucaucacuuccuaaacac

SEQ ID NO: 2525302 - RNA, 19 nt, Artificial Sequence
  Description of Artificial Sequence: Synthetic oligonucleotide
  Sense strand starting at position 1483 of SEQ ID NO: 1888297
agauaccuccagugaagug

SEQ ID NO: 2525303 - RNA, 19 nt, Artificial Sequence
  Description of Artificial Sequence: Synthetic oligonucleotide
  Antisense strand to SEQ ID NO: 2525302
cacuucacuggagguaucu

SEQ ID NO: 2525304 - RNA, 19 nt, Artificial Sequence
  Description of Artificial Sequence: Synthetic oligonucleotide
  Sense strand starting at position 1570 of SEQ ID NO: 1888297
uuugcugagcuauaauaau

SEQ ID NO: 2525305 - RNA, 19 nt, Artificial Sequence
  Description of Artificial Sequence: Synthetic oligonucleotide
  Antisense strand to SEQ ID NO: 2525304
auuauuauagcucagcaaa

SEQ ID NO: 2525306 - RNA, 19 nt, Artificial Sequence
  Description of Artificial Sequence: Synthetic oligonucleotide
  Sense strand starting at position 1584 of SEQ ID NO: 1888297
auaaucaauggcugcaaga

SEQ ID NO: 2525307 - RNA, 19 nt, Artificial Sequence
  Description of Artificial Sequence: Synthetic oligonucleotide
  Antisense strand to SEQ ID NO: 2525306
ucuugcagccauugauuau

SEQ ID NO: 2525308 - RNA, 19 nt, Artificial Sequence
  Description of Artificial Sequence: Synthetic oligonucleotide
  Sense strand starting at position 1676 of SEQ ID NO: 1888297
cgccuucuucgggcaaauc

SEQ ID NO: 2525309 - RNA, 19 nt, Artificial Sequence
  Description of Artificial Sequence: Synthetic oligonucleotide
  Antisense strand to SEQ ID NO: 2525308
gauuugcccgaagaaggcg

SEQ ID NO: 2525310 - RNA, 19 nt, Artificial Sequence
  Description of Artificial Sequence: Synthetic oligonucleotide
  Sense strand starting at position 2169 of SEQ ID NO: 1888297
cugcuuuaacuacagaguu

SEQ ID NO: 2525311 - RNA, 19 nt, Artificial Sequence
  Description of Artificial Sequence: Synthetic oligonucleotide
  Antisense strand to SEQ ID NO: 2525310
aacucuguaguuaaagcag

SEQ ID NO: 2525312 - RNA, 19 nt, Artificial Sequence
  Description of Artificial Sequence: Synthetic oligonucleotide
  Sense strand starting at position 2449 of SEQ ID NO: 1888297
gauauccgaguuuaacauu

SEQ ID NO: 2525313 - RNA, 19 nt, Artificial Sequence
  Description of Artificial Sequence: Synthetic oligonucleotide
  Antisense strand to SEQ ID NO: 2525312
aauguuaaacucggauauc

SEQ ID NO: 2525314 - RNA, 19 nt, Artificial Sequence
  Description of Artificial Sequence: Synthetic oligonucleotide
  Sense strand starting at position 2480 of SEQ ID NO: 1888297
uucugacagcuuuacaaag

SEQ ID NO: 2525315 - RNA, 19 nt, Artificial Sequence
  Description of Artificial Sequence: Synthetic oligonucleotide
  Antisense strand to SEQ ID NO: 2525314
cuuuguaaagcugucagaa

SEQ ID NO: 2525316 - RNA, 19 nt, Artificial Sequence
  Description of Artificial Sequence: Synthetic oligonucleotide
  Sense strand starting at position 2504 of SEQ ID NO: 1888297
cucauauaggucuaguaau

SEQ ID NO: 2525317 - RNA, 19 nt, Artificial Sequence
  Description of Artificial Sequence: Synthetic oligonucleotide
  Antisense strand to SEQ ID NO: 2525316
auuacuagaccuauaugag

SEQ ID NO: 2525318 - RNA, 19 nt, Artificial Sequence
  Description of Artificial Sequence: Synthetic oligonucleotide
  Sense strand starting at position 2512 of SEQ ID NO: 1888297
ggucuaguaauuuguuauu

SEQ ID NO: 2525319 - RNA, 19 nt, Artificial Sequence
  Description of Artificial Sequence: Synthetic oligonucleotide
  Antisense strand to SEQ ID NO: 2525318
aauaacaaauuacuagacc

SEQ ID NO: 2525320 - RNA, 19 nt, Artificial Sequence
  Description of Artificial Sequence: Synthetic oligonucleotide
  Sense strand starting at position 2686 of SEQ ID NO: 1888297
ggcaaucucgucuuugugu

SEQ ID NO: 2525321 - RNA, 19 nt, Artificial Sequence
  Description of Artificial Sequence: Synthetic oligonucleotide
  Antisense strand to SEQ ID NO: 2525320
acacaaagacgagauugcc

SEQ ID NO: 2525322 - RNA, 19 nt, Artificial Sequence
  Description of Artificial Sequence: Synthetic oligonucleotide
  Sense strand starting at position 2711 of SEQ ID NO: 1888297
cauggaggguucuuacaca

SEQ ID NO: 2525323 - RNA, 19 nt, Artificial Sequence
  Description of Artificial Sequence: Synthetic oligonucleotide
  Antisense strand to SEQ ID NO: 2525322
uguguaagaacccuccaug

SEQ ID NO: 2525324 - RNA, 19 nt, Artificial Sequence
  Description of Artificial Sequence: Synthetic oligonucleotide
  Sense strand starting at position 2941 of SEQ ID NO: 1888297
caucguugacuggaacauu

SEQ ID NO: 2525325 - RNA, 19 nt, Artificial Sequence
  Description of Artificial Sequence: Synthetic oligonucleotide
  Antisense strand to SEQ ID NO: 2525324
aauguuccagucaacgaug

SEQ ID NO: 2525326 - RNA, 19 nt, Artificial Sequence
  Description of Artificial Sequence: Synthetic oligonucleotide
  Sense strand starting at position 2967 of SEQ ID NO: 1888297
uaugcaugacuguauauga

SEQ ID NO: 2525327 - RNA, 19 nt, Artificial Sequence
  Description of Artificial Sequence: Synthetic oligonucleotide
  Antisense strand to SEQ ID NO: 2525326
ucauauacagucaugcaua

SEQ ID NO: 2525328 - RNA, 19 nt, Artificial Sequence
  Description of Artificial Sequence: Synthetic oligonucleotide
  Sense strand starting at position 3038 of SEQ ID NO: 1888297
gcaugaaaguuucugacaa

SEQ ID NO: 2525329 - RNA, 19 nt, Artificial Sequence
  Description of Artificial Sequence: Synthetic oligonucleotide
  Antisense strand to SEQ ID NO: 2525328
uugucagaaacuuucaugc

SEQ ID NO: 2525330 - RNA, 19 nt, Artificial Sequence
  Description of Artificial Sequence: Synthetic oligonucleotide
  Sense strand starting at position 3482 of SEQ ID NO: 1888297
aacauucuaggccagugaa

SEQ ID NO: 2525331 - RNA, 19 nt, Artificial Sequence
  Description of Artificial Sequence: Synthetic oligonucleotide
  Antisense strand to SEQ ID NO: 2525330
uucacuggccuagaauguu

SEQ ID NO: 2525332 - RNA, 19 nt, Artificial Sequence
  Description of Artificial Sequence: Synthetic oligonucleotide
  Sense strand starting at position 3495 of SEQ ID NO: 1888297
agugaaguuccuggaugac

SEQ ID NO: 2525333 - RNA, 19 nt, Artificial Sequence
  Description of Artificial Sequence: Synthetic oligonucleotide
  Antisense strand to SEQ ID NO: 2525332
gucauccaggaacuucacu

SEQ ID NO: 2525334 - RNA, 19 nt, Artificial Sequence
  Description of Artificial Sequence: Synthetic oligonucleotide
  Sense strand starting at position 3537 of SEQ ID NO: 1888297
agcugaugccaguaaacau

SEQ ID NO: 2525335 - RNA, 19 nt, Artificial Sequence
  Description of Artificial Sequence: Synthetic oligonucleotide
  Antisense strand to SEQ ID NO: 2525334
auguuuacuggcaucagcu

SEQ ID NO: 2525336 - RNA, 19 nt, Artificial Sequence
  Description of Artificial Sequence: Synthetic oligonucleotide
  Sense strand starting at position 3694 of SEQ ID NO: 1888297
uugagaaaggcuuauuguu

SEQ ID NO: 2525337 - RNA, 19 nt, Artificial Sequence
  Description of Artificial Sequence: Synthetic oligonucleotide
  Antisense strand to SEQ ID NO: 2525336
aacaauaagccuuucucaa

SEQ ID NO: 2525338 - RNA, 19 nt, Artificial Sequence
  Description of Artificial Sequence: Synthetic oligonucleotide
  Sense strand starting at position 3696 of SEQ ID NO: 1888297
gagaaaggcuuauuguuaa

SEQ ID NO: 2525339 - RNA, 19 nt, Artificial Sequence
  Description of Artificial Sequence: Synthetic oligonucleotide
  Antisense strand to SEQ ID NO: 2525338
uuaacaauaagccuuucuc

SEQ ID NO: 2525340 - RNA, 19 nt, Artificial Sequence
  Description of Artificial Sequence: Synthetic oligonucleotide
  Sense strand starting at position 3748 of SEQ ID NO: 1888297
acuaaccauuuggaguaaa

SEQ ID NO: 2525341 - RNA, 19 nt, Artificial Sequence
  Description of Artificial Sequence: Synthetic oligonucleotide
  Antisense strand to SEQ ID NO: 2525340
uuuacuccaaaugguuagu

SEQ ID NO: 2525342 - RNA, 19 nt, Artificial Sequence
  Description of Artificial Sequence: Synthetic oligonucleotide
  Sense strand starting at position 9 of SEQ ID NO: 1888298
uuagacgacuugucacaaa

SEQ ID NO: 2525343 - RNA, 19 nt, Artificial Sequence
  Description of Artificial Sequence: Synthetic oligonucleotide
  Antisense strand to SEQ ID NO: 2525342
uuugugacaagucgucuaa

SEQ ID NO: 2525344 - RNA, 19 nt, Artificial Sequence
  Description of Artificial Sequence: Synthetic oligonucleotide
  Sense strand starting at position 261 of SEQ ID NO: 1888298
gcugauugcuaaucuaaau

SEQ ID NO: 2525345 - RNA, 19 nt, Artificial Sequence
  Description of Artificial Sequence: Synthetic oligonucleotide
  Antisense strand to SEQ ID NO: 2525344
auuuagauuagcaaucagc

SEQ ID NO: 2525346 - RNA, 19 nt, Artificial Sequence
  Description of Artificial Sequence: Synthetic oligonucleotide
  Sense strand starting at position 301 of SEQ ID NO: 1888298
ccuauacgucaaugaggua

SEQ ID NO: 2525347 - RNA, 19 nt, Artificial Sequence
  Description of Artificial Sequence: Synthetic oligonucleotide
  Antisense strand to SEQ ID NO: 2525346
uaccucauugacguauagg

SEQ ID NO: 2525348 - RNA, 19 nt, Artificial Sequence
  Description of Artificial Sequence: Synthetic oligonucleotide
  Sense strand starting at position 302 of SEQ ID NO: 1888298
cuauacgucaaugagguaa

SEQ ID NO: 2525349 - RNA, 19 nt, Artificial Sequence
  Description of Artificial Sequence: Synthetic oligonucleotide
  Antisense strand to SEQ ID NO: 2525348
uuaccucauugacguauag

SEQ ID NO: 2525350 - RNA, 19 nt, Artificial Sequence
  Description of Artificial Sequence: Synthetic oligonucleotide
  Sense strand starting at position 344 of SEQ ID NO: 1888298
gaggaaugccuauggguuu

SEQ ID NO: 2525351 - RNA, 19 nt, Artificial Sequence
  Description of Artificial Sequence: Synthetic oligonucleotide
  Antisense strand to SEQ ID NO: 2525350
aaacccauaggcauuccuc

SEQ ID NO: 2525352 - RNA, 19 nt, Artificial Sequence
  Description of Artificial Sequence: Synthetic oligonucleotide
  Sense strand starting at position 356 of SEQ ID NO: 1888298
uggguuuauucuccaccau

SEQ ID NO: 2525353 - RNA, 19 nt, Artificial Sequence
  Description of Artificial Sequence: Synthetic oligonucleotide
  Antisense strand to SEQ ID NO: 2525352
augguggagaauaaaccca

SEQ ID NO: 2525354 - RNA, 19 nt, Artificial Sequence
  Description of Artificial Sequence: Synthetic oligonucleotide
  Sense strand starting at position 357 of SEQ ID NO: 1888298
ggguuuauucuccaccaua

SEQ ID NO: 2525355 - RNA, 19 nt, Artificial Sequence
  Description of Artificial Sequence: Synthetic oligonucleotide
  Antisense strand to SEQ ID NO: 2525354
uaugguggagaauaaaccc

SEQ ID NO: 2525356 - RNA, 19 nt, Artificial Sequence
  Description of Artificial Sequence: Synthetic oligonucleotide
  Sense strand starting at position 368 of SEQ ID NO: 1888298
ccaccauagcaaugagaug

SEQ ID NO: 2525357 - RNA, 19 nt, Artificial Sequence
  Description of Artificial Sequence: Synthetic oligonucleotide
  Antisense strand to SEQ ID NO: 2525356
caucucauugcuauggugg

SEQ ID NO: 2525358 - RNA, 19 nt, Artificial Sequence
  Description of Artificial Sequence: Synthetic oligonucleotide
  Sense strand starting at position 380 of SEQ ID NO: 1888298
ugagaugucaacugugauu

SEQ ID NO: 2525359 - RNA, 19 nt, Artificial Sequence
  Description of Artificial Sequence: Synthetic oligonucleotide
  Antisense strand to SEQ ID NO: 2525358
aaucacaguugacaucuca

SEQ ID NO: 2525360 - RNA, 19 nt, Artificial Sequence
  Description of Artificial Sequence: Synthetic oligonucleotide
  Sense strand starting at position 382 of SEQ ID NO: 1888298
agaugucaacugugauugu

SEQ ID NO: 2525361 - RNA, 19 nt, Artificial Sequence
  Description of Artificial Sequence: Synthetic oligonucleotide
  Antisense strand to SEQ ID NO: 2525360
acaaucacaguugacaucu

SEQ ID NO: 2525362 - RNA, 19 nt, Artificial Sequence
  Description of Artificial Sequence: Synthetic oligonucleotide
  Sense strand starting at position 428 of SEQ ID NO: 1888298
agucuaacgcugcagaaga

SEQ ID NO: 2525363 - RNA, 19 nt, Artificial Sequence
  Description of Artificial Sequence: Synthetic oligonucleotide
  Antisense strand to SEQ ID NO: 2525362
ucuucugcagcguuagacu

SEQ ID NO: 2525364 - RNA, 19 nt, Artificial Sequence
  Description of Artificial Sequence: Synthetic oligonucleotide
  Sense strand starting at position 490 of SEQ ID NO: 1888298
gaacaucaguggucuguua

SEQ ID NO: 2525365 - RNA, 19 nt, Artificial Sequence
  Description of Artificial Sequence: Synthetic oligonucleotide
  Antisense strand to SEQ ID NO: 2525364
uaacagaccacugauguuc

SEQ ID NO: 2525366 - RNA, 19 nt, Artificial Sequence
  Description of Artificial Sequence: Synthetic oligonucleotide
  Sense strand starting at position 492 of SEQ ID NO: 1888298
acaucaguggucuguuaag

SEQ ID NO: 2525367 - RNA, 19 nt, Artificial Sequence
  Description of Artificial Sequence: Synthetic oligonucleotide
  Antisense strand to SEQ ID NO: 2525366
cuuaacagaccacugaugu

SEQ ID NO: 2525368 - RNA, 19 nt, Artificial Sequence
  Description of Artificial Sequence: Synthetic oligonucleotide
  Sense strand starting at position 588 of SEQ ID NO: 1888298
ccacguggucucgcuuaca

SEQ ID NO: 2525369 - RNA, 19 nt, Artificial Sequence
  Description of Artificial Sequence: Synthetic oligonucleotide
  Antisense strand to SEQ ID NO: 2525368
uguaagcgagaccacgugg

SEQ ID NO: 2525370 - RNA, 19 nt, Artificial Sequence
  Description of Artificial Sequence: Synthetic oligonucleotide
  Sense strand starting at position 668 of SEQ ID NO: 1888298
gugugcgcuguguucuaau

SEQ ID NO: 2525371 - RNA, 19 nt, Artificial Sequence
  Description of Artificial Sequence: Synthetic oligonucleotide
  Antisense strand to SEQ ID NO: 2525370
auuagaacacagcgcacac

SEQ ID NO: 2525372 - RNA, 19 nt, Artificial Sequence
  Description of Artificial Sequence: Synthetic oligonucleotide
  Sense strand starting at position 1131 of SEQ ID NO: 1888298
agguaauuggccuguaccu

SEQ ID NO: 2525373 - RNA, 19 nt, Artificial Sequence
  Description of Artificial Sequence: Synthetic oligonucleotide
  Antisense strand to SEQ ID NO: 2525372
agguacaggccaauuaccu

SEQ ID NO: 2525374 - RNA, 19 nt, Artificial Sequence
  Description of Artificial Sequence: Synthetic oligonucleotide
  Sense strand starting at position 1133 of SEQ ID NO: 1888298
guaauuggccuguaccuga

SEQ ID NO: 2525375 - RNA, 19 nt, Artificial Sequence
  Description of Artificial Sequence: Synthetic oligonucleotide
  Antisense strand to SEQ ID NO: 2525374
ucagguacaggccaauuac

SEQ ID NO: 2525376 - RNA, 19 nt, Artificial Sequence
  Description of Artificial Sequence: Synthetic oligonucleotide
  Sense strand starting at position 1214 of SEQ ID NO: 1888298
agacaaagauuagagauua

SEQ ID NO: 2525377 - RNA, 19 nt, Artificial Sequence
  Description of Artificial Sequence: Synthetic oligonucleotide
  Antisense strand to SEQ ID NO: 2525376
uaaucucuaaucuuugucu

SEQ ID NO: 2525378 - RNA, 19 nt, Artificial Sequence
  Description of Artificial Sequence: Synthetic oligonucleotide
  Sense strand starting at position 1262 of SEQ ID NO: 1888298
ggagacaagaguugcuaca

SEQ ID NO: 2525379 - RNA, 19 nt, Artificial Sequence
  Description of Artificial Sequence: Synthetic oligonucleotide
  Antisense strand to SEQ ID NO: 2525378
uguagcaacucuugucucc

SEQ ID NO: 2525380 - RNA, 19 nt, Artificial Sequence
  Description of Artificial Sequence: Synthetic oligonucleotide
  Sense strand starting at position 1281 of SEQ ID NO: 1888298
gcccuuccgcggguuuaaa

SEQ ID NO: 2525381 - RNA, 19 nt, Artificial Sequence
  Description of Artificial Sequence: Synthetic oligonucleotide
  Antisense strand to SEQ ID NO: 2525380
uuuaaacccgcggaagggc

SEQ ID NO: 2525382 - RNA, 19 nt, Artificial Sequence
  Description of Artificial Sequence: Synthetic oligonucleotide
  Sense strand starting at position 1452 of SEQ ID NO: 1888298
uacuaaacggguuguaaga

SEQ ID NO: 2525383 - RNA, 19 nt, Artificial Sequence
  Description of Artificial Sequence: Synthetic oligonucleotide
  Antisense strand to SEQ ID NO: 2525382
ucuuacaacccguuuagua

SEQ ID NO: 2525384 - RNA, 19 nt, Artificial Sequence
  Description of Artificial Sequence: Synthetic oligonucleotide
  Sense strand starting at position 1957 of SEQ ID NO: 1888298
gagacagaucgcgggaauu

SEQ ID NO: 2525385 - RNA, 19 nt, Artificial Sequence
  Description of Artificial Sequence: Synthetic oligonucleotide
  Antisense strand to SEQ ID NO: 2525384
aauucccgcgaucugucuc

SEQ ID NO: 2525386 - RNA, 19 nt, Artificial Sequence
  Description of Artificial Sequence: Synthetic oligonucleotide
  Sense strand starting at position 2677 of SEQ ID NO: 1888298
ggacuuaagcccugcuuua

SEQ ID NO: 2525387 - RNA, 19 nt, Artificial Sequence
  Description of Artificial Sequence: Synthetic oligonucleotide
  Antisense strand to SEQ ID NO: 2525386
uaaagcagggcuuaagucc

SEQ ID NO: 2525388 - RNA, 19 nt, Artificial Sequence
  Description of Artificial Sequence: Synthetic oligonucleotide
  Sense strand starting at position 3087 of SEQ ID NO: 1888298
ucauguuugcccuauaguu

SEQ ID NO: 2525389 - RNA, 19 nt, Artificial Sequence
  Description of Artificial Sequence: Synthetic oligonucleotide
  Antisense strand to SEQ ID NO: 2525388
aacuauagggcaaacauga

SEQ ID NO: 2525390 - RNA, 19 nt, Artificial Sequence
  Description of Artificial Sequence: Synthetic oligonucleotide
  Sense strand starting at position 3193 of SEQ ID NO: 1888298
cggagaaaucuauacccgu

SEQ ID NO: 2525391 - RNA, 19 nt, Artificial Sequence
  Description of Artificial Sequence: Synthetic oligonucleotide
  Antisense strand to SEQ ID NO: 2525390
acggguauagauuucuccg

SEQ ID NO: 2525392 - RNA, 19 nt, Artificial Sequence
  Description of Artificial Sequence: Synthetic oligonucleotide
  Sense strand starting at position 3196 of SEQ ID NO: 1888298
agaaaucuauacccguuau

SEQ ID NO: 2525393 - RNA, 19 nt, Artificial Sequence
  Description of Artificial Sequence: Synthetic oligonucleotide
  Antisense strand to SEQ ID NO: 2525392
auaacggguauagauuucu

SEQ ID NO: 2525394 - RNA, 19 nt, Artificial Sequence
  Description of Artificial Sequence: Synthetic oligonucleotide
  Sense strand starting at position 3249 of SEQ ID NO: 1888298
caucguaaugucgcuuuau

SEQ ID NO: 2525395 - RNA, 19 nt, Artificial Sequence
  Description of Artificial Sequence: Synthetic oligonucleotide
  Antisense strand to SEQ ID NO: 2525394
auaaagcgacauuacgaug

SEQ ID NO: 2525396 - RNA, 19 nt, Artificial Sequence
  Description of Artificial Sequence: Synthetic oligonucleotide
  Sense strand starting at position 3251 of SEQ ID NO: 1888298
ucguaaugucgcuuuaucu

SEQ ID NO: 2525397 - RNA, 19 nt, Artificial Sequence
  Description of Artificial Sequence: Synthetic oligonucleotide
  Antisense strand to SEQ ID NO: 2525396
agauaaagcgacauuacga

SEQ ID NO: 2525398 - RNA, 19 nt, Artificial Sequence
  Description of Artificial Sequence: Synthetic oligonucleotide
  Sense strand starting at position 3252 of SEQ ID NO: 1888298
cguaaugucgcuuuaucuu

SEQ ID NO: 2525399 - RNA, 19 nt, Artificial Sequence
  Description of Artificial Sequence: Synthetic oligonucleotide
  Antisense strand to SEQ ID NO: 2525398
aagauaaagcgacauuacg

SEQ ID NO: 2525400 - RNA, 19 nt, Artificial Sequence
  Description of Artificial Sequence: Synthetic oligonucleotide
  Sense strand starting at position 3281 of SEQ ID NO: 1888298
cugaaauagacuugcugga

SEQ ID NO: 2525401 - RNA, 19 nt, Artificial Sequence
  Description of Artificial Sequence: Synthetic oligonucleotide
  Antisense strand to SEQ ID NO: 2525400
uccagcaagucuauuucag

SEQ ID NO: 2525402 - RNA, 19 nt, Artificial Sequence
  Description of Artificial Sequence: Synthetic oligonucleotide
  Sense strand starting at position 3421 of SEQ ID NO: 1888298
ccauauugccuccaguauc

SEQ ID NO: 2525403 - RNA, 19 nt, Artificial Sequence
  Description of Artificial Sequence: Synthetic oligonucleotide
  Antisense strand to SEQ ID NO: 2525402
gauacuggaggcaauaugg

SEQ ID NO: 2525404 - RNA, 19 nt, Artificial Sequence
  Description of Artificial Sequence: Synthetic oligonucleotide
  Sense strand starting at position 3457 of SEQ ID NO: 1888298
cauauuuaccuguguguua

SEQ ID NO: 2525405 - RNA, 19 nt, Artificial Sequence
  Description of Artificial Sequence: Synthetic oligonucleotide
  Antisense strand to SEQ ID NO: 2525404
uaacacacagguaaauaug

SEQ ID NO: 2525406 - RNA, 19 nt, Artificial Sequence
  Description of Artificial Sequence: Synthetic oligonucleotide
  Sense strand starting at position 3458 of SEQ ID NO: 1888298
auauuuaccuguguguuau

SEQ ID NO: 2525407 - RNA, 19 nt, Artificial Sequence
  Description of Artificial Sequence: Synthetic oligonucleotide
  Antisense strand to SEQ ID NO: 2525406
auaacacacagguaaauau

SEQ ID NO: 2525408 - RNA, 19 nt, Artificial Sequence
  Description of Artificial Sequence: Synthetic oligonucleotide
  Sense strand starting at position 3459 of SEQ ID NO: 1888298
uauuuaccuguguguuauu

SEQ ID NO: 2525409 - RNA, 19 nt, Artificial Sequence
  Description of Artificial Sequence: Synthetic oligonucleotide
  Antisense strand to SEQ ID NO: 2525408
aauaacacacagguaaaua

SEQ ID NO: 2525410 - RNA, 19 nt, Artificial Sequence
  Description of Artificial Sequence: Synthetic oligonucleotide
  Sense strand starting at position 3460 of SEQ ID NO: 1888298
auuuaccuguguguuauua

SEQ ID NO: 2525411 - RNA, 19 nt, Artificial Sequence
  Description of Artificial Sequence: Synthetic oligonucleotide
  Antisense strand to SEQ ID NO: 2525410
uaauaacacacagguaaau

SEQ ID NO: 2525412 - RNA, 19 nt, Artificial Sequence
  Description of Artificial Sequence: Synthetic oligonucleotide
  Sense strand starting at position 3482 of SEQ ID NO: 1888298
agcugaguccugugcauuu

SEQ ID NO: 2525413 - RNA, 19 nt, Artificial Sequence
  Description of Artificial Sequence: Synthetic oligonucleotide
  Antisense strand to SEQ ID NO: 2525412
aaaugcacaggacucagcu

SEQ ID NO: 2525414 - RNA, 19 nt, Artificial Sequence
  Description of Artificial Sequence: Synthetic oligonucleotide
  Sense strand starting at position 3539 of SEQ ID NO: 1888298
cccagaguuugggcuuuaa

SEQ ID NO: 2525415 - RNA, 19 nt, Artificial Sequence
  Description of Artificial Sequence: Synthetic oligonucleotide
  Antisense strand to SEQ ID NO: 2525414
uuaaagcccaaacucuggg

SEQ ID NO: 2525416 - RNA, 19 nt, Artificial Sequence
  Description of Artificial Sequence: Synthetic oligonucleotide
  Sense strand starting at position 3677 of SEQ ID NO: 1888298
cccuguaauacuugggaag

SEQ ID NO: 2525417 - RNA, 19 nt, Artificial Sequence
  Description of Artificial Sequence: Synthetic oligonucleotide
  Antisense strand to SEQ ID NO: 2525416
cuucccaaguauuacaggg

SEQ ID NO: 2525418 - RNA, 19 nt, Artificial Sequence
  Description of Artificial Sequence: Synthetic oligonucleotide
  Sense strand starting at position 3855 of SEQ ID NO: 1888298
guguguccuccacauucuu

SEQ ID NO: 2525419 - RNA, 19 nt, Artificial Sequence
  Description of Artificial Sequence: Synthetic oligonucleotide
  Antisense strand to SEQ ID NO: 2525418
aagaauguggaggacacac

SEQ ID NO: 2525420 - RNA, 19 nt, Artificial Sequence
  Description of Artificial Sequence: Synthetic oligonucleotide
  Sense strand starting at position 3969 of SEQ ID NO: 1888298
cuuaaugcaucugucaaag

SEQ ID NO: 2525421 - RNA, 19 nt, Artificial Sequence
  Description of Artificial Sequence: Synthetic oligonucleotide
  Antisense strand to SEQ ID NO: 2525420
cuuugacagaugcauuaag

SEQ ID NO: 2525422 - RNA, 19 nt, Artificial Sequence
  Description of Artificial Sequence: Synthetic oligonucleotide
  Sense strand starting at position 141 of SEQ ID NO: 1888299
aacagaauagggugcucua

SEQ ID NO: 2525423 - RNA, 19 nt, Artificial Sequence
  Description of Artificial Sequence: Synthetic oligonucleotide
  Antisense strand to SEQ ID NO: 2525422
uagagcacccuauucuguu

SEQ ID NO: 2525424 - RNA, 19 nt, Artificial Sequence
  Description of Artificial Sequence: Synthetic oligonucleotide
  Sense strand starting at position 150 of SEQ ID NO: 1888299
gggugcucuacacaaaguu

SEQ ID NO: 2525425 - RNA, 19 nt, Artificial Sequence
  Description of Artificial Sequence: Synthetic oligonucleotide
  Antisense strand to SEQ ID NO: 2525424
aacuuuguguagagcaccc

SEQ ID NO: 2525426 - RNA, 19 nt, Artificial Sequence
  Description of Artificial Sequence: Synthetic oligonucleotide
  Sense strand starting at position 189 of SEQ ID NO: 1888299
uuagacgacuugucacaaa

SEQ ID NO: 2525427 - RNA, 19 nt, Artificial Sequence
  Description of Artificial Sequence: Synthetic oligonucleotide
  Antisense strand to SEQ ID NO: 2525426
uuugugacaagucgucuaa

SEQ ID NO: 2525428 - RNA, 19 nt, Artificial Sequence
  Description of Artificial Sequence: Synthetic oligonucleotide
  Sense strand starting at position 441 of SEQ ID NO: 1888299
gcugauugcuaaucuaaau

SEQ ID NO: 2525429 - RNA, 19 nt, Artificial Sequence
  Description of Artificial Sequence: Synthetic oligonucleotide
  Antisense strand to SEQ ID NO: 2525428
auuuagauuagcaaucagc

SEQ ID NO: 2525430 - RNA, 19 nt, Artificial Sequence
  Description of Artificial Sequence: Synthetic oligonucleotide
  Sense strand starting at position 481 of SEQ ID NO: 1888299
ccuauacgucaaugaggua

SEQ ID NO: 2525431 - RNA, 19 nt, Artificial Sequence
  Description of Artificial Sequence: Synthetic oligonucleotide
  Antisense strand to SEQ ID NO: 2525430
uaccucauugacguauagg

SEQ ID NO: 2525432 - RNA, 19 nt, Artificial Sequence
  Description of Artificial Sequence: Synthetic oligonucleotide
  Sense strand starting at position 482 of SEQ ID NO: 1888299
cuauacgucaaugagguaa

SEQ ID NO: 2525433 - RNA, 19 nt, Artificial Sequence
  Description of Artificial Sequence: Synthetic oligonucleotide
  Antisense strand to SEQ ID NO: 2525432
uuaccucauugacguauag

SEQ ID NO: 2525434 - RNA, 19 nt, Artificial Sequence
  Description of Artificial Sequence: Synthetic oligonucleotide
  Sense strand starting at position 524 of SEQ ID NO: 1888299
gaggaaugccuauggguuu

SEQ ID NO: 2525435 - RNA, 19 nt, Artificial Sequence
  Description of Artificial Sequence: Synthetic oligonucleotide
  Antisense strand to SEQ ID NO: 2525434
aaacccauaggcauuccuc

SEQ ID NO: 2525436 - RNA, 19 nt, Artificial Sequence
  Description of Artificial Sequence: Synthetic oligonucleotide
  Sense strand starting at position 536 of SEQ ID NO: 1888299
uggguuuauucuccaccau

SEQ ID NO: 2525437 - RNA, 19 nt, Artificial Sequence
  Description of Artificial Sequence: Synthetic oligonucleotide
  Antisense strand to SEQ ID NO: 2525436
augguggagaauaaaccca

SEQ ID NO: 2525438 - RNA, 19 nt, Artificial Sequence
  Description of Artificial Sequence: Synthetic oligonucleotide
  Sense strand starting at position 537 of SEQ ID NO: 1888299
ggguuuauucuccaccaua

SEQ ID NO: 2525439 - RNA, 19 nt, Artificial Sequence
  Description of Artificial Sequence: Synthetic oligonucleotide
  Antisense strand to SEQ ID NO: 2525438
uaugguggagaauaaaccc

SEQ ID NO: 2525440 - RNA, 19 nt, Artificial Sequence
  Description of Artificial Sequence: Synthetic oligonucleotide
  Sense strand starting at position 548 of SEQ ID NO: 1888299
ccaccauagcaaugagaug

SEQ ID NO: 2525441 - RNA, 19 nt, Artificial Sequence
  Description of Artificial Sequence: Synthetic oligonucleotide
  Antisense strand to SEQ ID NO: 2525440
caucucauugcuauggugg

SEQ ID NO: 2525442 - RNA, 19 nt, Artificial Sequence
  Description of Artificial Sequence: Synthetic oligonucleotide
  Sense strand starting at position 560 of SEQ ID NO: 1888299
ugagaugucaacugugauu

SEQ ID NO: 2525443 - RNA, 19 nt, Artificial Sequence
  Description of Artificial Sequence: Synthetic oligonucleotide
  Antisense strand to SEQ ID NO: 2525442
aaucacaguugacaucuca

SEQ ID NO: 2525444 - RNA, 19 nt, Artificial Sequence
  Description of Artificial Sequence: Synthetic oligonucleotide
  Sense strand starting at position 562 of SEQ ID NO: 1888299
agaugucaacugugauugu

SEQ ID NO: 2525445 - RNA, 19 nt, Artificial Sequence
  Description of Artificial Sequence: Synthetic oligonucleotide
  Antisense strand to SEQ ID NO: 2525444
acaaucacaguugacaucu

SEQ ID NO: 2525446 - RNA, 19 nt, Artificial Sequence
  Description of Artificial Sequence: Synthetic oligonucleotide
  Sense strand starting at position 608 of SEQ ID NO: 1888299
agucuaacgcugcagaaga

SEQ ID NO: 2525447 - RNA, 19 nt, Artificial Sequence
  Description of Artificial Sequence: Synthetic oligonucleotide
  Antisense strand to SEQ ID NO: 2525446
ucuucugcagcguuagacu

SEQ ID NO: 2525448 - RNA, 19 nt, Artificial Sequence
  Description of Artificial Sequence: Synthetic oligonucleotide
  Sense strand starting at position 670 of SEQ ID NO: 1888299
gaacaucaguggucuguua

SEQ ID NO: 2525449 - RNA, 19 nt, Artificial Sequence
  Description of Artificial Sequence: Synthetic oligonucleotide
  Antisense strand to SEQ ID NO: 2525448
uaacagaccacugauguuc

SEQ ID NO: 2525450 - RNA, 19 nt, Artificial Sequence
  Description of Artificial Sequence: Synthetic oligonucleotide
  Sense strand starting at position 672 of SEQ ID NO: 1888299
acaucaguggucuguuaag

SEQ ID NO: 2525451 - RNA, 19 nt, Artificial Sequence
  Description of Artificial Sequence: Synthetic oligonucleotide
  Antisense strand to SEQ ID NO: 2525450
cuuaacagaccacugaugu

SEQ ID NO: 2525452 - RNA, 19 nt, Artificial Sequence
  Description of Artificial Sequence: Synthetic oligonucleotide
  Sense strand starting at position 768 of SEQ ID NO: 1888299
ccacguggucucgcuuaca

SEQ ID NO: 2525453 - RNA, 19 nt, Artificial Sequence
  Description of Artificial Sequence: Synthetic oligonucleotide
  Antisense strand to SEQ ID NO: 2525452
uguaagcgagaccacgugg

SEQ ID NO: 2525454 - RNA, 19 nt, Artificial Sequence
  Description of Artificial Sequence: Synthetic oligonucleotide
  Sense strand starting at position 848 of SEQ ID NO: 1888299
gugugcgcuguguucuaau

SEQ ID NO: 2525455 - RNA, 19 nt, Artificial Sequence
  Description of Artificial Sequence: Synthetic oligonucleotide
  Antisense strand to SEQ ID NO: 2525454
auuagaacacagcgcacac

SEQ ID NO: 2525456 - RNA, 19 nt, Artificial Sequence
  Description of Artificial Sequence: Synthetic oligonucleotide
  Sense strand starting at position 1311 of SEQ ID NO: 1888299
agguaauuggccuguaccu

SEQ ID NO: 2525457 - RNA, 19 nt, Artificial Sequence
  Description of Artificial Sequence: Synthetic oligonucleotide
  Antisense strand to SEQ ID NO: 2525456
agguacaggccaauuaccu

SEQ ID NO: 2525458 - RNA, 19 nt, Artificial Sequence
  Description of Artificial Sequence: Synthetic oligonucleotide
  Sense strand starting at position 1313 of SEQ ID NO: 1888299
guaauuggccuguaccuga

SEQ ID NO: 2525459 - RNA, 19 nt, Artificial Sequence
  Description of Artificial Sequence: Synthetic oligonucleotide
  Antisense strand to SEQ ID NO: 2525458
ucagguacaggccaauuac

SEQ ID NO: 2525460 - RNA, 19 nt, Artificial Sequence
  Description of Artificial Sequence: Synthetic oligonucleotide
  Sense strand starting at position 1394 of SEQ ID NO: 1888299
agacaaagauuagagauua

SEQ ID NO: 2525461 - RNA, 19 nt, Artificial Sequence
  Description of Artificial Sequence: Synthetic oligonucleotide
  Antisense strand to SEQ ID NO: 2525460
uaaucucuaaucuuugucu

SEQ ID NO: 2525462 - RNA, 19 nt, Artificial Sequence
  Description of Artificial Sequence: Synthetic oligonucleotide
  Sense strand starting at position 1442 of SEQ ID NO: 1888299
ggagacaagaguugcuaca

SEQ ID NO: 2525463 - RNA, 19 nt, Artificial Sequence
  Description of Artificial Sequence: Synthetic oligonucleotide
  Antisense strand to SEQ ID NO: 2525462
uguagcaacucuugucucc

SEQ ID NO: 2525464 - RNA, 19 nt, Artificial Sequence
  Description of Artificial Sequence: Synthetic oligonucleotide
  Sense strand starting at position 1461 of SEQ ID NO: 1888299
gcccuuccgcggguuuaaa

SEQ ID NO: 2525465 - RNA, 19 nt, Artificial Sequence
  Description of Artificial Sequence: Synthetic oligonucleotide
  Antisense strand to SEQ ID NO: 2525464
uuuaaacccgcggaagggc

SEQ ID NO: 2525466 - RNA, 19 nt, Artificial Sequence
  Description of Artificial Sequence: Synthetic oligonucleotide
  Sense strand starting at position 1632 of SEQ ID NO: 1888299
uacuaaacggguuguaaga

SEQ ID NO: 2525467 - RNA, 19 nt, Artificial Sequence
  Description of Artificial Sequence: Synthetic oligonucleotide
  Antisense strand to SEQ ID NO: 2525466
ucuuacaacccguuuagua

SEQ ID NO: 2525468 - RNA, 19 nt, Artificial Sequence
  Description of Artificial Sequence: Synthetic oligonucleotide
  Sense strand starting at position 2137 of SEQ ID NO: 1888299
gagacagaucgcgggaauu

SEQ ID NO: 2525469 - RNA, 19 nt, Artificial Sequence
  Description of Artificial Sequence: Synthetic oligonucleotide
  Antisense strand to SEQ ID NO: 2525468
aauucccgcgaucugucuc

SEQ ID NO: 2525470 - RNA, 19 nt, Artificial Sequence
  Description of Artificial Sequence: Synthetic oligonucleotide
  Sense strand starting at position 2857 of SEQ ID NO: 1888299
ggacuuaagcccugcuuua

SEQ ID NO: 2525471 - RNA, 19 nt, Artificial Sequence
  Description of Artificial Sequence: Synthetic oligonucleotide
  Antisense strand to SEQ ID NO: 2525470
uaaagcagggcuuaagucc

SEQ ID NO: 2525472 - RNA, 19 nt, Artificial Sequence
  Description of Artificial Sequence: Synthetic oligonucleotide
  Sense strand starting at position 3267 of SEQ ID NO: 1888299
ucauguuugcccuauaguu

SEQ ID NO: 2525473 - RNA, 19 nt, Artificial Sequence
  Description of Artificial Sequence: Synthetic oligonucleotide
  Antisense strand to SEQ ID NO: 2525472
aacuauagggcaaacauga

SEQ ID NO: 2525474 - RNA, 19 nt, Artificial Sequence
  Description of Artificial Sequence: Synthetic oligonucleotide
  Sense strand starting at position 3373 of SEQ ID NO: 1888299
cggagaaaucuauacccgu

SEQ ID NO: 2525475 - RNA, 19 nt, Artificial Sequence
  Description of Artificial Sequence: Synthetic oligonucleotide
  Antisense strand to SEQ ID NO: 2525474
acggguauagauuucuccg

SEQ ID NO: 2525476 - RNA, 19 nt, Artificial Sequence
  Description of Artificial Sequence: Synthetic oligonucleotide
  Sense strand starting at position 3376 of SEQ ID NO: 1888299
agaaaucuauacccguuau

SEQ ID NO: 2525477 - RNA, 19 nt, Artificial Sequence
  Description of Artificial Sequence: Synthetic oligonucleotide
  Antisense strand to SEQ ID NO: 2525476
auaacggguauagauuucu

SEQ ID NO: 2525478 - RNA, 19 nt, Artificial Sequence
  Description of Artificial Sequence: Synthetic oligonucleotide
  Sense strand starting at position 3429 of SEQ ID NO: 1888299
caucguaaugucgcuuuau

SEQ ID NO: 2525479 - RNA, 19 nt, Artificial Sequence
  Description of Artificial Sequence: Synthetic oligonucleotide
  Antisense strand to SEQ ID NO: 2525478
auaaagcgacauuacgaug

SEQ ID NO: 2525480 - RNA, 19 nt, Artificial Sequence
  Description of Artificial Sequence: Synthetic oligonucleotide
  Sense strand starting at position 3431 of SEQ ID NO: 1888299
ucguaaugucgcuuuaucu

SEQ ID NO: 2525481 - RNA, 19 nt, Artificial Sequence
  Description of Artificial Sequence: Synthetic oligonucleotide
  Antisense strand to SEQ ID NO: 2525480
agauaaagcgacauuacga

SEQ ID NO: 2525482 - RNA, 19 nt, Artificial Sequence
  Description of Artificial Sequence: Synthetic oligonucleotide
  Sense strand starting at position 3432 of SEQ ID NO: 1888299
cguaaugucgcuuuaucuu

SEQ ID NO: 2525483 - RNA, 19 nt, Artificial Sequence
  Description of Artificial Sequence: Synthetic oligonucleotide
  Antisense strand to SEQ ID NO: 2525482
aagauaaagcgacauuacg

SEQ ID NO: 2525484 - RNA, 19 nt, Artificial Sequence
  Description of Artificial Sequence: Synthetic oligonucleotide
  Sense strand starting at position 3461 of SEQ ID NO: 1888299
cugaaauagacuugcugga

SEQ ID NO: 2525485 - RNA, 19 nt, Artificial Sequence
  Description of Artificial Sequence: Synthetic oligonucleotide
  Antisense strand to SEQ ID NO: 2525484
uccagcaagucuauuucag

SEQ ID NO: 2525486 - RNA, 19 nt, Artificial Sequence
  Description of Artificial Sequence: Synthetic oligonucleotide
  Sense strand starting at position 3601 of SEQ ID NO: 1888299
ccauauugccuccaguauc

SEQ ID NO: 2525487 - RNA, 19 nt, Artificial Sequence
  Description of Artificial Sequence: Synthetic oligonucleotide
  Antisense strand to SEQ ID NO: 2525486
gauacuggaggcaauaugg

SEQ ID NO: 2525488 - RNA, 19 nt, Artificial Sequence
  Description of Artificial Sequence: Synthetic oligonucleotide
  Sense strand starting at position 3637 of SEQ ID NO: 1888299
cauauuuaccuguguguua

SEQ ID NO: 2525489 - RNA, 19 nt, Artificial Sequence
  Description of Artificial Sequence: Synthetic oligonucleotide
  Antisense strand to SEQ ID NO: 2525488
uaacacacagguaaauaug

SEQ ID NO: 2525490 - RNA, 19 nt, Artificial Sequence
  Description of Artificial Sequence: Synthetic oligonucleotide
  Sense strand starting at position 3638 of SEQ ID NO: 1888299
auauuuaccuguguguuau

SEQ ID NO: 2525491 - RNA, 19 nt, Artificial Sequence
  Description of Artificial Sequence: Synthetic oligonucleotide
  Antisense strand to SEQ ID NO: 2525490
auaacacacagguaaauau

SEQ ID NO: 2525492 - RNA, 19 nt, Artificial Sequence
  Description of Artificial Sequence: Synthetic oligonucleotide
  Sense strand starting at position 3639 of SEQ ID NO: 1888299
uauuuaccuguguguuauu

SEQ ID NO: 2525493 - RNA, 19 nt, Artificial Sequence
  Description of Artificial Sequence: Synthetic oligonucleotide
  Antisense strand to SEQ ID NO: 2525492
aauaacacacagguaaaua

SEQ ID NO: 2525494 - RNA, 19 nt, Artificial Sequence
  Description of Artificial Sequence: Synthetic oligonucleotide
  Sense strand starting at position 3640 of SEQ ID NO: 1888299
auuuaccuguguguuauua

SEQ ID NO: 2525495 - RNA, 19 nt, Artificial Sequence
  Description of Artificial Sequence: Synthetic oligonucleotide
  Antisense strand to SEQ ID NO: 2525494
uaauaacacacagguaaau

SEQ ID NO: 2525496 - RNA, 19 nt, Artificial Sequence
  Description of Artificial Sequence: Synthetic oligonucleotide
  Sense strand starting at position 3662 of SEQ ID NO: 1888299
agcugaguccugugcauuu

SEQ ID NO: 2525497 - RNA, 19 nt, Artificial Sequence
  Description of Artificial Sequence: Synthetic oligonucleotide
  Antisense strand to SEQ ID NO: 2525496
aaaugcacaggacucagcu

SEQ ID NO: 2525498 - RNA, 19 nt, Artificial Sequence
  Description of Artificial Sequence: Synthetic oligonucleotide
  Sense strand starting at position 3719 of SEQ ID NO: 1888299
cccagaguuugggcuuuaa

SEQ ID NO: 2525499 - RNA, 19 nt, Artificial Sequence
  Description of Artificial Sequence: Synthetic oligonucleotide
  Antisense strand to SEQ ID NO: 2525498
uuaaagcccaaacucuggg

SEQ ID NO: 2525500 - RNA, 19 nt, Artificial Sequence
  Description of Artificial Sequence: Synthetic oligonucleotide
  Sense strand starting at position 3857 of SEQ ID NO: 1888299
cccuguaauacuugggaag

SEQ ID NO: 2525501 - RNA, 19 nt, Artificial Sequence
  Description of Artificial Sequence: Synthetic oligonucleotide
  Antisense strand to SEQ ID NO: 2525500
cuucccaaguauuacaggg

SEQ ID NO: 2525502 - RNA, 19 nt, Artificial Sequence
  Description of Artificial Sequence: Synthetic oligonucleotide
  Sense strand starting at position 45 of SEQ ID NO: 1888300
cccauuuccuggugcgaau

SEQ ID NO: 2525503 - RNA, 19 nt, Artificial Sequence
  Description of Artificial Sequence: Synthetic oligonucleotide
  Antisense strand to SEQ ID NO: 2525502
auucgcaccaggaaauggg

SEQ ID NO: 2525504 - RNA, 19 nt, Artificial Sequence
  Description of Artificial Sequence: Synthetic oligonucleotide
  Sense strand starting at position 724 of SEQ ID NO: 1888300
ugagaucuccuaggaagcu

SEQ ID NO: 2525505 - RNA, 19 nt, Artificial Sequence
  Description of Artificial Sequence: Synthetic oligonucleotide
  Antisense strand to SEQ ID NO: 2525504
agcuuccuaggagaucuca

SEQ ID NO: 2525506 - RNA, 19 nt, Artificial Sequence
  Description of Artificial Sequence: Synthetic oligonucleotide
  Sense strand starting at position 774 of SEQ ID NO: 1888300
aguccaguacuucgaguuu

SEQ ID NO: 2525507 - RNA, 19 nt, Artificial Sequence
  Description of Artificial Sequence: Synthetic oligonucleotide
  Antisense strand to SEQ ID NO: 2525506
aaacucgaaguacuggacu

SEQ ID NO: 2525508 - RNA, 19 nt, Artificial Sequence
  Description of Artificial Sequence: Synthetic oligonucleotide
  Sense strand starting at position 787 of SEQ ID NO: 1888300
gaguuugcacccuaucugu

SEQ ID NO: 2525509 - RNA, 19 nt, Artificial Sequence
  Description of Artificial Sequence: Synthetic oligonucleotide
  Antisense strand to SEQ ID NO: 2525508
acagauagggugcaaacuc

SEQ ID NO: 2525510 - RNA, 19 nt, Artificial Sequence
  Description of Artificial Sequence: Synthetic oligonucleotide
  Sense strand starting at position 831 of SEQ ID NO: 1888300
agaccauucuuggucugua

SEQ ID NO: 2525511 - RNA, 19 nt, Artificial Sequence
  Description of Artificial Sequence: Synthetic oligonucleotide
  Antisense strand to SEQ ID NO: 2525510
uacagaccaagaauggucu

SEQ ID NO: 2525512 - RNA, 19 nt, Artificial Sequence
  Description of Artificial Sequence: Synthetic oligonucleotide
  Sense strand starting at position 832 of SEQ ID NO: 1888300
gaccauucuuggucuguau

SEQ ID NO: 2525513 - RNA, 19 nt, Artificial Sequence
  Description of Artificial Sequence: Synthetic oligonucleotide
  Antisense strand to SEQ ID NO: 2525512
auacagaccaagaaugguc

SEQ ID NO: 2525514 - RNA, 19 nt, Artificial Sequence
  Description of Artificial Sequence: Synthetic oligonucleotide
  Sense strand starting at position 834 of SEQ ID NO: 1888300
ccauucuuggucuguauuu

SEQ ID NO: 2525515 - RNA, 19 nt, Artificial Sequence
  Description of Artificial Sequence: Synthetic oligonucleotide
  Antisense strand to SEQ ID NO: 2525514
aaauacagaccaagaaugg

SEQ ID NO: 2525516 - RNA, 19 nt, Artificial Sequence
  Description of Artificial Sequence: Synthetic oligonucleotide
  Sense strand starting at position 843 of SEQ ID NO: 1888300
gucuguauuucccacaaua

SEQ ID NO: 2525517 - RNA, 19 nt, Artificial Sequence
  Description of Artificial Sequence: Synthetic oligonucleotide
  Antisense strand to SEQ ID NO: 2525516
uauugugggaaauacagac

SEQ ID NO: 2525518 - RNA, 19 nt, Artificial Sequence
  Description of Artificial Sequence: Synthetic oligonucleotide
  Sense strand starting at position 929 of SEQ ID NO: 1888300
cauggaggugcucaguguu

SEQ ID NO: 2525519 - RNA, 19 nt, Artificial Sequence
  Description of Artificial Sequence: Synthetic oligonucleotide
  Antisense strand to SEQ ID NO: 2525518
aacacugagcaccuccaug

SEQ ID NO: 2525520 - RNA, 19 nt, Artificial Sequence
  Description of Artificial Sequence: Synthetic oligonucleotide
  Sense strand starting at position 942 of SEQ ID NO: 1888300
aguguuugcugucuccaaa

SEQ ID NO: 2525521 - RNA, 19 nt, Artificial Sequence
  Description of Artificial Sequence: Synthetic oligonucleotide
  Antisense strand to SEQ ID NO: 2525520
uuuggagacagcaaacacu

SEQ ID NO: 2525522 - RNA, 19 nt, Artificial Sequence
  Description of Artificial Sequence: Synthetic oligonucleotide
  Sense strand starting at position 1099 of SEQ ID NO: 1888300
gugucaguuuaauuuguaa

SEQ ID NO: 2525523 - RNA, 19 nt, Artificial Sequence
  Description of Artificial Sequence: Synthetic oligonucleotide
  Antisense strand to SEQ ID NO: 2525522
uuacaaauuaaacugacac

SEQ ID NO: 2525524 - RNA, 19 nt, Artificial Sequence
  Description of Artificial Sequence: Synthetic oligonucleotide
  Sense strand starting at position 1270 of SEQ ID NO: 1888300
cgcagaaguucuucguggu

SEQ ID NO: 2525525 - RNA, 19 nt, Artificial Sequence
  Description of Artificial Sequence: Synthetic oligonucleotide
  Antisense strand to SEQ ID NO: 2525524
accacgaagaacuucugcg

SEQ ID NO: 2525526 - RNA, 19 nt, Artificial Sequence
  Description of Artificial Sequence: Synthetic oligonucleotide
  Sense strand starting at position 1271 of SEQ ID NO: 1888300
gcagaaguucuucgugguc

SEQ ID NO: 2525527 - RNA, 19 nt, Artificial Sequence
  Description of Artificial Sequence: Synthetic oligonucleotide
  Antisense strand to SEQ ID NO: 2525526
gaccacgaagaacuucugc

SEQ ID NO: 2525528 - RNA, 19 nt, Artificial Sequence
  Description of Artificial Sequence: Synthetic oligonucleotide
  Sense strand starting at position 1273 of SEQ ID NO: 1888300
agaaguucuucguggucag

SEQ ID NO: 2525529 - RNA, 19 nt, Artificial Sequence
  Description of Artificial Sequence: Synthetic oligonucleotide
  Antisense strand to SEQ ID NO: 2525528
cugaccacgaagaacuucu

SEQ ID NO: 2525530 - RNA, 19 nt, Artificial Sequence
  Description of Artificial Sequence: Synthetic oligonucleotide
  Sense strand starting at position 2099 of SEQ ID NO: 1888300
gcacgugaguccuccaggu

SEQ ID NO: 2525531 - RNA, 19 nt, Artificial Sequence
  Description of Artificial Sequence: Synthetic oligonucleotide
  Antisense strand to SEQ ID NO: 2525530
accuggaggacucacgugc

SEQ ID NO: 2525532 - RNA, 19 nt, Artificial Sequence
  Description of Artificial Sequence: Synthetic oligonucleotide
  Sense strand starting at position 2101 of SEQ ID NO: 1888300
acgugaguccuccaggucu

SEQ ID NO: 2525533 - RNA, 19 nt, Artificial Sequence
  Description of Artificial Sequence: Synthetic oligonucleotide
  Antisense strand to SEQ ID NO: 2525532
agaccuggaggacucacgu

SEQ ID NO: 2525534 - RNA, 19 nt, Artificial Sequence
  Description of Artificial Sequence: Synthetic oligonucleotide
  Sense strand starting at position 2215 of SEQ ID NO: 1888300
cagggaucuccaggcugua

SEQ ID NO: 2525535 - RNA, 19 nt, Artificial Sequence
  Description of Artificial Sequence: Synthetic oligonucleotide
  Antisense strand to SEQ ID NO: 2525534
uacagccuggagaucccug

SEQ ID NO: 2525536 - RNA, 19 nt, Artificial Sequence
  Description of Artificial Sequence: Synthetic oligonucleotide
  Sense strand starting at position 2393 of SEQ ID NO: 1888300
agaucagggucucacuauu

SEQ ID NO: 2525537 - RNA, 19 nt, Artificial Sequence
  Description of Artificial Sequence: Synthetic oligonucleotide
  Antisense strand to SEQ ID NO: 2525536
aauagugagacccugaucu

SEQ ID NO: 2525538 - RNA, 19 nt, Artificial Sequence
  Description of Artificial Sequence: Synthetic oligonucleotide
  Sense strand starting at position 2504 of SEQ ID NO: 1888300
gggaucccauuaucucuua

SEQ ID NO: 2525539 - RNA, 19 nt, Artificial Sequence
  Description of Artificial Sequence: Synthetic oligonucleotide
  Antisense strand to SEQ ID NO: 2525538
uaagagauaaugggauccc

SEQ ID NO: 2525540 - RNA, 19 nt, Artificial Sequence
  Description of Artificial Sequence: Synthetic oligonucleotide
  Sense strand starting at position 2626 of SEQ ID NO: 1888300
ggguccuauccaggucuca

SEQ ID NO: 2525541 - RNA, 19 nt, Artificial Sequence
  Description of Artificial Sequence: Synthetic oligonucleotide
  Antisense strand to SEQ ID NO: 2525540
ugagaccuggauaggaccc

SEQ ID NO: 2525542 - RNA, 19 nt, Artificial Sequence
  Description of Artificial Sequence: Synthetic oligonucleotide
  Sense strand starting at position 2742 of SEQ ID NO: 1888300
ugcaccaagucccguaaua

SEQ ID NO: 2525543 - RNA, 19 nt, Artificial Sequence
  Description of Artificial Sequence: Synthetic oligonucleotide
  Antisense strand to SEQ ID NO: 2525542
uauuacgggacuuggugca

SEQ ID NO: 2525544 - RNA, 19 nt, Artificial Sequence
  Description of Artificial Sequence: Synthetic oligonucleotide
  Sense strand starting at position 2753 of SEQ ID NO: 1888300
ccguaauagcucuagagac

SEQ ID NO: 2525545 - RNA, 19 nt, Artificial Sequence
  Description of Artificial Sequence: Synthetic oligonucleotide
  Antisense strand to SEQ ID NO: 2525544
gucucuagagcuauuacgg

SEQ ID NO: 2525546 - RNA, 19 nt, Artificial Sequence
  Description of Artificial Sequence: Synthetic oligonucleotide
  Sense strand starting at position 2755 of SEQ ID NO: 1888300
guaauagcucuagagacau

SEQ ID NO: 2525547 - RNA, 19 nt, Artificial Sequence
  Description of Artificial Sequence: Synthetic oligonucleotide
  Antisense strand to SEQ ID NO: 2525546
augucucuagagcuauuac

SEQ ID NO: 2525548 - RNA, 19 nt, Artificial Sequence
  Description of Artificial Sequence: Synthetic oligonucleotide
  Sense strand starting at position 2777 of SEQ ID NO: 1888300
gguccuuucccauggaguu

SEQ ID NO: 2525549 - RNA, 19 nt, Artificial Sequence
  Description of Artificial Sequence: Synthetic oligonucleotide
  Antisense strand to SEQ ID NO: 2525548
aacuccaugggaaaggacc

SEQ ID NO: 2525550 - RNA, 19 nt, Artificial Sequence
  Description of Artificial Sequence: Synthetic oligonucleotide
  Sense strand starting at position 2778 of SEQ ID NO: 1888300
guccuuucccauggaguua

SEQ ID NO: 2525551 - RNA, 19 nt, Artificial Sequence
  Description of Artificial Sequence: Synthetic oligonucleotide
  Antisense strand to SEQ ID NO: 2525550
uaacuccaugggaaaggac

SEQ ID NO: 2525552 - RNA, 19 nt, Artificial Sequence
  Description of Artificial Sequence: Synthetic oligonucleotide
  Sense strand starting at position 3302 of SEQ ID NO: 1888300
gugguuugcacuugaguac

SEQ ID NO: 2525553 - RNA, 19 nt, Artificial Sequence
  Description of Artificial Sequence: Synthetic oligonucleotide
  Antisense strand to SEQ ID NO: 2525552
guacucaagugcaaaccac

SEQ ID NO: 2525554 - RNA, 19 nt, Artificial Sequence
  Description of Artificial Sequence: Synthetic oligonucleotide
  Sense strand starting at position 3351 of SEQ ID NO: 1888300
ugcuuaagccuaggaagua

SEQ ID NO: 2525555 - RNA, 19 nt, Artificial Sequence
  Description of Artificial Sequence: Synthetic oligonucleotide
  Antisense strand to SEQ ID NO: 2525554
uacuuccuaggcuuaagca

SEQ ID NO: 2525556 - RNA, 19 nt, Artificial Sequence
  Description of Artificial Sequence: Synthetic oligonucleotide
  Sense strand starting at position 3434 of SEQ ID NO: 1888300
cucaauaaucaauguguga

SEQ ID NO: 2525557 - RNA, 19 nt, Artificial Sequence
  Description of Artificial Sequence: Synthetic oligonucleotide
  Antisense strand to SEQ ID NO: 2525556
ucacacauugauuauugag

SEQ ID NO: 2525558 - RNA, 19 nt, Artificial Sequence
  Description of Artificial Sequence: Synthetic oligonucleotide
  Sense strand starting at position 3438 of SEQ ID NO: 1888300
auaaucaaugugugauagu

SEQ ID NO: 2525559 - RNA, 19 nt, Artificial Sequence
  Description of Artificial Sequence: Synthetic oligonucleotide
  Antisense strand to SEQ ID NO: 2525558
acuaucacacauugauuau

SEQ ID NO: 2525560 - RNA, 19 nt, Artificial Sequence
  Description of Artificial Sequence: Synthetic oligonucleotide
  Sense strand starting at position 3439 of SEQ ID NO: 1888300
uaaucaaugugugauagug

SEQ ID NO: 2525561 - RNA, 19 nt, Artificial Sequence
  Description of Artificial Sequence: Synthetic oligonucleotide
  Antisense strand to SEQ ID NO: 2525560
cacuaucacacauugauua

SEQ ID NO: 2525562 - RNA, 19 nt, Artificial Sequence
  Description of Artificial Sequence: Synthetic oligonucleotide
  Sense strand starting at position 3447 of SEQ ID NO: 1888300
gugugauagugguuucaaa

SEQ ID NO: 2525563 - RNA, 19 nt, Artificial Sequence
  Description of Artificial Sequence: Synthetic oligonucleotide
  Antisense strand to SEQ ID NO: 2525562
uuugaaaccacuaucacac

SEQ ID NO: 2525564 - RNA, 19 nt, Artificial Sequence
  Description of Artificial Sequence: Synthetic oligonucleotide
  Sense strand starting at position 3888 of SEQ ID NO: 1888300
ugugguggcuccucuguaa

SEQ ID NO: 2525565 - RNA, 19 nt, Artificial Sequence
  Description of Artificial Sequence: Synthetic oligonucleotide
  Antisense strand to SEQ ID NO: 2525564
uuacagaggagccaccaca

SEQ ID NO: 2525566 - RNA, 19 nt, Artificial Sequence
  Description of Artificial Sequence: Synthetic oligonucleotide
  Sense strand starting at position 1019 of SEQ ID NO: 1888301
uuaggagauuccuugcuga

SEQ ID NO: 2525567 - RNA, 19 nt, Artificial Sequence
  Description of Artificial Sequence: Synthetic oligonucleotide
  Antisense strand to SEQ ID NO: 2525566
ucagcaaggaaucuccuaa

SEQ ID NO: 2525568 - RNA, 19 nt, Artificial Sequence
  Description of Artificial Sequence: Synthetic oligonucleotide
  Sense strand starting at position 1022 of SEQ ID NO: 1888301
ggagauuccuugcugaagc

SEQ ID NO: 2525569 - RNA, 19 nt, Artificial Sequence
  Description of Artificial Sequence: Synthetic oligonucleotide
  Antisense strand to SEQ ID NO: 2525568
gcuucagcaaggaaucucc

SEQ ID NO: 2525570 - RNA, 19 nt, Artificial Sequence
  Description of Artificial Sequence: Synthetic oligonucleotide
  Sense strand starting at position 1032 of SEQ ID NO: 1888301
ugcugaagccuuuauacag

SEQ ID NO: 2525571 - RNA, 19 nt, Artificial Sequence
  Description of Artificial Sequence: Synthetic oligonucleotide
  Antisense strand to SEQ ID NO: 2525570
cuguauaaaggcuucagca

SEQ ID NO: 2525572 - RNA, 19 nt, Artificial Sequence
  Description of Artificial Sequence: Synthetic oligonucleotide
  Sense strand starting at position 1108 of SEQ ID NO: 1888301
gugucuuccacguauaagc

SEQ ID NO: 2525573 - RNA, 19 nt, Artificial Sequence
  Description of Artificial Sequence: Synthetic oligonucleotide
  Antisense strand to SEQ ID NO: 2525572
gcuuauacguggaagacac

SEQ ID NO: 2525574 - RNA, 19 nt, Artificial Sequence
  Description of Artificial Sequence: Synthetic oligonucleotide
  Sense strand starting at position 1251 of SEQ ID NO: 1888301
ugcaguuugagguacgaca

SEQ ID NO: 2525575 - RNA, 19 nt, Artificial Sequence
  Description of Artificial Sequence: Synthetic oligonucleotide
  Antisense strand to SEQ ID NO: 2525574
ugucguaccucaaacugca

SEQ ID NO: 2525576 - RNA, 19 nt, Artificial Sequence
  Description of Artificial Sequence: Synthetic oligonucleotide
  Sense strand starting at position 1314 of SEQ ID NO: 1888301
gcuagaagauucguucuua

SEQ ID NO: 2525577 - RNA, 19 nt, Artificial Sequence
  Description of Artificial Sequence: Synthetic oligonucleotide
  Antisense strand to SEQ ID NO: 2525576
uaagaacgaaucuucuagc

SEQ ID NO: 2525578 - RNA, 19 nt, Artificial Sequence
  Description of Artificial Sequence: Synthetic oligonucleotide
  Sense strand starting at position 1315 of SEQ ID NO: 1888301
cuagaagauucguucuuac

SEQ ID NO: 2525579 - RNA, 19 nt, Artificial Sequence
  Description of Artificial Sequence: Synthetic oligonucleotide
  Antisense strand to SEQ ID NO: 2525578
guaagaacgaaucuucuag

SEQ ID NO: 2525580 - RNA, 19 nt, Artificial Sequence
  Description of Artificial Sequence: Synthetic oligonucleotide
  Sense strand starting at position 1345 of SEQ ID NO: 1888301
guaagcucagcauacgauu

SEQ ID NO: 2525581 - RNA, 19 nt, Artificial Sequence
  Description of Artificial Sequence: Synthetic oligonucleotide
  Antisense strand to SEQ ID NO: 2525580
aaucguaugcugagcuuac

SEQ ID NO: 2525582 - RNA, 19 nt, Artificial Sequence
  Description of Artificial Sequence: Synthetic oligonucleotide
  Sense strand starting at position 1553 of SEQ ID NO: 1888301
guaacuaacagaugguaga

SEQ ID NO: 2525583 - RNA, 19 nt, Artificial Sequence
  Description of Artificial Sequence: Synthetic oligonucleotide
  Antisense strand to SEQ ID NO: 2525582
ucuaccaucuguuaguuac

SEQ ID NO: 2525584 - RNA, 19 nt, Artificial Sequence
  Description of Artificial Sequence: Synthetic oligonucleotide
  Sense strand starting at position 1569 of SEQ ID NO: 1888301
agagguauguuggacaaag

SEQ ID NO: 2525585 - RNA, 19 nt, Artificial Sequence
  Description of Artificial Sequence: Synthetic oligonucleotide
  Antisense strand to SEQ ID NO: 2525584
cuuuguccaacauaccucu

SEQ ID NO: 2525586 - RNA, 19 nt, Artificial Sequence
  Description of Artificial Sequence: Synthetic oligonucleotide
  Sense strand starting at position 1634 of SEQ ID NO: 1888301
ucauuaggccaauggaaau

SEQ ID NO: 2525587 - RNA, 19 nt, Artificial Sequence
  Description of Artificial Sequence: Synthetic oligonucleotide
  Antisense strand to SEQ ID NO: 2525586
auuuccauuggccuaauga

SEQ ID NO: 2525588 - RNA, 19 nt, Artificial Sequence
  Description of Artificial Sequence: Synthetic oligonucleotide
  Sense strand starting at position 1752 of SEQ ID NO: 1888301
gggacacuaccguacuuaa

SEQ ID NO: 2525589 - RNA, 19 nt, Artificial Sequence
  Description of Artificial Sequence: Synthetic oligonucleotide
  Antisense strand to SEQ ID NO: 2525588
uuaaguacgguaguguccc

SEQ ID NO: 2525590 - RNA, 19 nt, Artificial Sequence
  Description of Artificial Sequence: Synthetic oligonucleotide
  Sense strand starting at position 1760 of SEQ ID NO: 1888301
accguacuuaacuggagaa

SEQ ID NO: 2525591 - RNA, 19 nt, Artificial Sequence
  Description of Artificial Sequence: Synthetic oligonucleotide
  Antisense strand to SEQ ID NO: 2525590
uucuccaguuaaguacggu

SEQ ID NO: 2525592 - RNA, 19 nt, Artificial Sequence
  Description of Artificial Sequence: Synthetic oligonucleotide
  Sense strand starting at position 1788 of SEQ ID NO: 1888301
uugcuucugugaccacaga

SEQ ID NO: 2525593 - RNA, 19 nt, Artificial Sequence
  Description of Artificial Sequence: Synthetic oligonucleotide
  Antisense strand to SEQ ID NO: 2525592
ucuguggucacagaagcaa

SEQ ID NO: 2525594 - RNA, 19 nt, Artificial Sequence
  Description of Artificial Sequence: Synthetic oligonucleotide
  Sense strand starting at position 1789 of SEQ ID NO: 1888301
ugcuucugugaccacagaa

SEQ ID NO: 2525595 - RNA, 19 nt, Artificial Sequence
  Description of Artificial Sequence: Synthetic oligonucleotide
  Antisense strand to SEQ ID NO: 2525594
uucuguggucacagaagca

SEQ ID NO: 2525596 - RNA, 19 nt, Artificial Sequence
  Description of Artificial Sequence: Synthetic oligonucleotide
  Sense strand starting at position 2662 of SEQ ID NO: 1888301
uggaacucuccgggucaga

SEQ ID NO: 2525597 - RNA, 19 nt, Artificial Sequence
  Description of Artificial Sequence: Synthetic oligonucleotide
  Antisense strand to SEQ ID NO: 2525596
ucugacccggagaguucca

SEQ ID NO: 2525598 - RNA, 19 nt, Artificial Sequence
  Description of Artificial Sequence: Synthetic oligonucleotide
  Sense strand starting at position 2974 of SEQ ID NO: 1888301
ucccgacuccucgguggaa

SEQ ID NO: 2525599 - RNA, 19 nt, Artificial Sequence
  Description of Artificial Sequence: Synthetic oligonucleotide
  Antisense strand to SEQ ID NO: 2525598
uuccaccgaggagucggga

SEQ ID NO: 2525600 - RNA, 19 nt, Artificial Sequence
  Description of Artificial Sequence: Synthetic oligonucleotide
  Sense strand starting at position 2975 of SEQ ID NO: 1888301
cccgacuccucgguggaau

SEQ ID NO: 2525601 - RNA, 19 nt, Artificial Sequence
  Description of Artificial Sequence: Synthetic oligonucleotide
  Antisense strand to SEQ ID NO: 2525600
auuccaccgaggagucggg

SEQ ID NO: 2525602 - RNA, 19 nt, Artificial Sequence
  Description of Artificial Sequence: Synthetic oligonucleotide
  Sense strand starting at position 3020 of SEQ ID NO: 1888301
cuguccucuugucucagaa

SEQ ID NO: 2525603 - RNA, 19 nt, Artificial Sequence
  Description of Artificial Sequence: Synthetic oligonucleotide
  Antisense strand to SEQ ID NO: 2525602
uucugagacaagaggacag

SEQ ID NO: 2525604 - RNA, 19 nt, Artificial Sequence
  Description of Artificial Sequence: Synthetic oligonucleotide
  Sense strand starting at position 3030 of SEQ ID NO: 1888301
gucucagaauucucguuga

SEQ ID NO: 2525605 - RNA, 19 nt, Artificial Sequence
  Description of Artificial Sequence: Synthetic oligonucleotide
  Antisense strand to SEQ ID NO: 2525604
ucaacgagaauucugagac

SEQ ID NO: 2525606 - RNA, 19 nt, Artificial Sequence
  Description of Artificial Sequence: Synthetic oligonucleotide
  Sense strand starting at position 3112 of SEQ ID NO: 1888301
ucacuugcugagugaacuu

SEQ ID NO: 2525607 - RNA, 19 nt, Artificial Sequence
  Description of Artificial Sequence: Synthetic oligonucleotide
  Antisense strand to SEQ ID NO: 2525606
aaguucacucagcaaguga

SEQ ID NO: 2525608 - RNA, 19 nt, Artificial Sequence
  Description of Artificial Sequence: Synthetic oligonucleotide
  Sense strand starting at position 3121 of SEQ ID NO: 1888301
gagugaacuugagcaaguu

SEQ ID NO: 2525609 - RNA, 19 nt, Artificial Sequence
  Description of Artificial Sequence: Synthetic oligonucleotide
  Antisense strand to SEQ ID NO: 2525608
aacuugcucaaguucacuc

SEQ ID NO: 2525610 - RNA, 19 nt, Artificial Sequence
  Description of Artificial Sequence: Synthetic oligonucleotide
  Sense strand starting at position 3243 of SEQ ID NO: 1888301
guagcuugaccuuaccaaa

SEQ ID NO: 2525611 - RNA, 19 nt, Artificial Sequence
  Description of Artificial Sequence: Synthetic oligonucleotide
  Antisense strand to SEQ ID NO: 2525610
uuugguaaggucaagcuac

SEQ ID NO: 2525612 - RNA, 19 nt, Artificial Sequence
  Description of Artificial Sequence: Synthetic oligonucleotide
  Sense strand starting at position 3387 of SEQ ID NO: 1888301
ugaggcacugcuuacuuua

SEQ ID NO: 2525613 - RNA, 19 nt, Artificial Sequence
  Description of Artificial Sequence: Synthetic oligonucleotide
  Antisense strand to SEQ ID NO: 2525612
uaaaguaagcagugccuca

SEQ ID NO: 2525614 - RNA, 19 nt, Artificial Sequence
  Description of Artificial Sequence: Synthetic oligonucleotide
  Sense strand starting at position 3453 of SEQ ID NO: 1888301
uuucuuaagugagaugaau

SEQ ID NO: 2525615 - RNA, 19 nt, Artificial Sequence
  Description of Artificial Sequence: Synthetic oligonucleotide
  Antisense strand to SEQ ID NO: 2525614
auucaucucacuuaagaaa

SEQ ID NO: 2525616 - RNA, 19 nt, Artificial Sequence
  Description of Artificial Sequence: Synthetic oligonucleotide
  Sense strand starting at position 3455 of SEQ ID NO: 1888301
ucuuaagugagaugaaugu

SEQ ID NO: 2525617 - RNA, 19 nt, Artificial Sequence
  Description of Artificial Sequence: Synthetic oligonucleotide
  Antisense strand to SEQ ID NO: 2525616
acauucaucucacuuaaga

SEQ ID NO: 2525618 - RNA, 19 nt, Artificial Sequence
  Description of Artificial Sequence: Synthetic oligonucleotide
  Sense strand starting at position 3490 of SEQ ID NO: 1888301
uguaaagcaguuuagaaau

SEQ ID NO: 2525619 - RNA, 19 nt, Artificial Sequence
  Description of Artificial Sequence: Synthetic oligonucleotide
  Antisense strand to SEQ ID NO: 2525618
auuucuaaacugcuuuaca

SEQ ID NO: 2525620 - RNA, 19 nt, Artificial Sequence
  Description of Artificial Sequence: Synthetic oligonucleotide
  Sense strand starting at position 3519 of SEQ ID NO: 1888301
ucuuguuauggccauguga

SEQ ID NO: 2525621 - RNA, 19 nt, Artificial Sequence
  Description of Artificial Sequence: Synthetic oligonucleotide
  Antisense strand to SEQ ID NO: 2525620
ucacauggccauaacaaga

SEQ ID NO: 2525622 - RNA, 19 nt, Artificial Sequence
  Description of Artificial Sequence: Synthetic oligonucleotide
  Sense strand starting at position 3521 of SEQ ID NO: 1888301
uuguuauggccaugugaga

SEQ ID NO: 2525623 - RNA, 19 nt, Artificial Sequence
  Description of Artificial Sequence: Synthetic oligonucleotide
  Antisense strand to SEQ ID NO: 2525622
ucucacauggccauaacaa

SEQ ID NO: 2525624 - RNA, 19 nt, Artificial Sequence
  Description of Artificial Sequence: Synthetic oligonucleotide
  Sense strand starting at position 3596 of SEQ ID NO: 1888301
cacucagaagucugcuagu

SEQ ID NO: 2525625 - RNA, 19 nt, Artificial Sequence
  Description of Artificial Sequence: Synthetic oligonucleotide
  Antisense strand to SEQ ID NO: 2525624
acuagcagacuucugagug

SEQ ID NO: 2525626 - RNA, 19 nt, Artificial Sequence
  Description of Artificial Sequence: Synthetic oligonucleotide
  Sense strand starting at position 3639 of SEQ ID NO: 1888301
auuuaccuuucugaaagga

SEQ ID NO: 2525627 - RNA, 19 nt, Artificial Sequence
  Description of Artificial Sequence: Synthetic oligonucleotide
  Antisense strand to SEQ ID NO: 2525626
uccuuucagaaagguaaau

SEQ ID NO: 2525628 - RNA, 19 nt, Artificial Sequence
  Description of Artificial Sequence: Synthetic oligonucleotide
  Sense strand starting at position 3709 of SEQ ID NO: 1888301
ucuccauucuaauaggaga

SEQ ID NO: 2525629 - RNA, 19 nt, Artificial Sequence
  Description of Artificial Sequence: Synthetic oligonucleotide
  Antisense strand to SEQ ID NO: 2525628
ucuccuauuagaauggaga

SEQ ID NO: 2525630 - RNA, 19 nt, Artificial Sequence
  Description of Artificial Sequence: Synthetic oligonucleotide
  Sense strand starting at position 3712 of SEQ ID NO: 1888301
ccauucuaauaggagaaca

SEQ ID NO: 2525631 - RNA, 19 nt, Artificial Sequence
  Description of Artificial Sequence: Synthetic oligonucleotide
  Antisense strand to SEQ ID NO: 2525630
uguucuccuauuagaaugg

SEQ ID NO: 2525632 - RNA, 19 nt, Artificial Sequence
  Description of Artificial Sequence: Synthetic oligonucleotide
  Sense strand starting at position 3745 of SEQ ID NO: 1888301
gaggaugcuucucugcuga

SEQ ID NO: 2525633 - RNA, 19 nt, Artificial Sequence
  Description of Artificial Sequence: Synthetic oligonucleotide
  Antisense strand to SEQ ID NO: 2525632
ucagcagagaagcauccuc

SEQ ID NO: 2525634 - RNA, 19 nt, Artificial Sequence
  Description of Artificial Sequence: Synthetic oligonucleotide
  Sense strand starting at position 3747 of SEQ ID NO: 1888301
ggaugcuucucugcugaua

SEQ ID NO: 2525635 - RNA, 19 nt, Artificial Sequence
  Description of Artificial Sequence: Synthetic oligonucleotide
  Antisense strand to SEQ ID NO: 2525634
uaucagcagagaagcaucc

SEQ ID NO: 2525636 - RNA, 19 nt, Artificial Sequence
  Description of Artificial Sequence: Synthetic oligonucleotide
  Sense strand starting at position 3759 of SEQ ID NO: 1888301
gcugauagucaacagauau

SEQ ID NO: 2525637 - RNA, 19 nt, Artificial Sequence
  Description of Artificial Sequence: Synthetic oligonucleotide
  Antisense strand to SEQ ID NO: 2525636
auaucuguugacuaucagc

SEQ ID NO: 2525638 - RNA, 19 nt, Artificial Sequence
  Description of Artificial Sequence: Synthetic oligonucleotide
  Sense strand starting at position 3766 of SEQ ID NO: 1888301
gucaacagauauucuggaa

SEQ ID NO: 2525639 - RNA, 19 nt, Artificial Sequence
  Description of Artificial Sequence: Synthetic oligonucleotide
  Antisense strand to SEQ ID NO: 2525638
uuccagaauaucuguugac

SEQ ID NO: 2525640 - RNA, 19 nt, Artificial Sequence
  Description of Artificial Sequence: Synthetic oligonucleotide
  Sense strand starting at position 3801 of SEQ ID NO: 1888301
gcugcaugcgcuguauuca

SEQ ID NO: 2525641 - RNA, 19 nt, Artificial Sequence
  Description of Artificial Sequence: Synthetic oligonucleotide
  Antisense strand to SEQ ID NO: 2525640
ugaauacagcgcaugcagc

SEQ ID NO: 2525642 - RNA, 19 nt, Artificial Sequence
  Description of Artificial Sequence: Synthetic oligonucleotide
  Sense strand starting at position 3902 of SEQ ID NO: 1888301
ggugauaaguacuaaacac

SEQ ID NO: 2525643 - RNA, 19 nt, Artificial Sequence
  Description of Artificial Sequence: Synthetic oligonucleotide
  Antisense strand to SEQ ID NO: 2525642
guguuuaguacuuaucacc

SEQ ID NO: 2525644 - RNA, 19 nt, Artificial Sequence
  Description of Artificial Sequence: Synthetic oligonucleotide
  Sense strand starting at position 3960 of SEQ ID NO: 1888301
gaugccacuuuggauagaa

SEQ ID NO: 2525645 - RNA, 19 nt, Artificial Sequence
  Description of Artificial Sequence: Synthetic oligonucleotide
  Antisense strand to SEQ ID NO: 2525644
uucuauccaaaguggcauc

SEQ ID NO: 2525646 - RNA, 19 nt, Artificial Sequence
  Description of Artificial Sequence: Synthetic oligonucleotide
  Sense strand starting at position 129 of SEQ ID NO: 1888302
ucugaauacuugcugaaag

SEQ ID NO: 2525647 - RNA, 19 nt, Artificial Sequence
  Description of Artificial Sequence: Synthetic oligonucleotide
  Antisense strand to SEQ ID NO: 2525646
cuuucagcaaguauucaga

SEQ ID NO: 2525648 - RNA, 19 nt, Artificial Sequence
  Description of Artificial Sequence: Synthetic oligonucleotide
  Sense strand starting at position 131 of SEQ ID NO: 1888302
ugaauacuugcugaaagcu

SEQ ID NO: 2525649 - RNA, 19 nt, Artificial Sequence
  Description of Artificial Sequence: Synthetic oligonucleotide
  Antisense strand to SEQ ID NO: 2525648
agcuuucagcaaguauuca

SEQ ID NO: 2525650 - RNA, 19 nt, Artificial Sequence
  Description of Artificial Sequence: Synthetic oligonucleotide
  Sense strand starting at position 242 of SEQ ID NO: 1888302
guauuaauaccuuaguguu

SEQ ID NO: 2525651 - RNA, 19 nt, Artificial Sequence
  Description of Artificial Sequence: Synthetic oligonucleotide
  Antisense strand to SEQ ID NO: 2525650
aacacuaagguauuaauac

SEQ ID NO: 2525652 - RNA, 19 nt, Artificial Sequence
  Description of Artificial Sequence: Synthetic oligonucleotide
  Sense strand starting at position 436 of SEQ ID NO: 1888302
gugugaauucgcucauguu

SEQ ID NO: 2525653 - RNA, 19 nt, Artificial Sequence
  Description of Artificial Sequence: Synthetic oligonucleotide
  Antisense strand to SEQ ID NO: 2525652
aacaugagcgaauucacac

SEQ ID NO: 2525654 - RNA, 19 nt, Artificial Sequence
  Description of Artificial Sequence: Synthetic oligonucleotide
  Sense strand starting at position 663 of SEQ ID NO: 1888302
gcauuuauauaguuucucu

SEQ ID NO: 2525655 - RNA, 19 nt, Artificial Sequence
  Description of Artificial Sequence: Synthetic oligonucleotide
  Antisense strand to SEQ ID NO: 2525654
agagaaacuauauaaaugc

SEQ ID NO: 2525656 - RNA, 19 nt, Artificial Sequence
  Description of Artificial Sequence: Synthetic oligonucleotide
  Sense strand starting at position 863 of SEQ ID NO: 1888302
cucugaugcuaucugagau

SEQ ID NO: 2525657 - RNA, 19 nt, Artificial Sequence
  Description of Artificial Sequence: Synthetic oligonucleotide
  Antisense strand to SEQ ID NO: 2525656
aucucagauagcaucagag

SEQ ID NO: 2525658 - RNA, 19 nt, Artificial Sequence
  Description of Artificial Sequence: Synthetic oligonucleotide
  Sense strand starting at position 944 of SEQ ID NO: 1888302
agcucucuggcuuugugua

SEQ ID NO: 2525659 - RNA, 19 nt, Artificial Sequence
  Description of Artificial Sequence: Synthetic oligonucleotide
  Antisense strand to SEQ ID NO: 2525658
uacacaaagccagagagcu

SEQ ID NO: 2525660 - RNA, 19 nt, Artificial Sequence
  Description of Artificial Sequence: Synthetic oligonucleotide
  Sense strand starting at position 1120 of SEQ ID NO: 1888302
uuaauucucugauugggag

SEQ ID NO: 2525661 - RNA, 19 nt, Artificial Sequence
  Description of Artificial Sequence: Synthetic oligonucleotide
  Antisense strand to SEQ ID NO: 2525660
cucccaaucagagaauuaa

SEQ ID NO: 2525662 - RNA, 19 nt, Artificial Sequence
  Description of Artificial Sequence: Synthetic oligonucleotide
  Sense strand starting at position 1121 of SEQ ID NO: 1888302
uaauucucugauugggagu

SEQ ID NO: 2525663 - RNA, 19 nt, Artificial Sequence
  Description of Artificial Sequence: Synthetic oligonucleotide
  Antisense strand to SEQ ID NO: 2525662
acucccaaucagagaauua

SEQ ID NO: 2525664 - RNA, 19 nt, Artificial Sequence
  Description of Artificial Sequence: Synthetic oligonucleotide
  Sense strand starting at position 1336 of SEQ ID NO: 1888302
ucuuuacacucaucagguu

SEQ ID NO: 2525665 - RNA, 19 nt, Artificial Sequence
  Description of Artificial Sequence: Synthetic oligonucleotide
  Antisense strand to SEQ ID NO: 2525664
aaccugaugaguguaaaga

SEQ ID NO: 2525666 - RNA, 19 nt, Artificial Sequence
  Description of Artificial Sequence: Synthetic oligonucleotide
  Sense strand starting at position 1370 of SEQ ID NO: 1888302
uucuuugauguuggguaaa

SEQ ID NO: 2525667 - RNA, 19 nt, Artificial Sequence
  Description of Artificial Sequence: Synthetic oligonucleotide
  Antisense strand to SEQ ID NO: 2525666
uuuacccaacaucaaagaa

SEQ ID NO: 2525668 - RNA, 19 nt, Artificial Sequence
  Description of Artificial Sequence: Synthetic oligonucleotide
  Sense strand starting at position 1373 of SEQ ID NO: 1888302
uuugauguuggguaaaguu

SEQ ID NO: 2525669 - RNA, 19 nt, Artificial Sequence
  Description of Artificial Sequence: Synthetic oligonucleotide
  Antisense strand to SEQ ID NO: 2525668
aacuuuacccaacaucaaa

SEQ ID NO: 2525670 - RNA, 19 nt, Artificial Sequence
  Description of Artificial Sequence: Synthetic oligonucleotide
  Sense strand starting at position 1498 of SEQ ID NO: 1888302
acaauacuuguauaguagu

SEQ ID NO: 2525671 - RNA, 19 nt, Artificial Sequence
  Description of Artificial Sequence: Synthetic oligonucleotide
  Antisense strand to SEQ ID NO: 2525670
acuacuauacaaguauugu

SEQ ID NO: 2525672 - RNA, 19 nt, Artificial Sequence
  Description of Artificial Sequence: Synthetic oligonucleotide
  Sense strand starting at position 1812 of SEQ ID NO: 1888302
cuaaauuccagauguggag

SEQ ID NO: 2525673 - RNA, 19 nt, Artificial Sequence
  Description of Artificial Sequence: Synthetic oligonucleotide
  Antisense strand to SEQ ID NO: 2525672
cuccacaucuggaauuuag

SEQ ID NO: 2525674 - RNA, 19 nt, Artificial Sequence
  Description of Artificial Sequence: Synthetic oligonucleotide
  Sense strand starting at position 1844 of SEQ ID NO: 1888302
gagggcucugcagaaaucu

SEQ ID NO: 2525675 - RNA, 19 nt, Artificial Sequence
  Description of Artificial Sequence: Synthetic oligonucleotide
  Antisense strand to SEQ ID NO: 2525674
agauuucugcagagcccuc

SEQ ID NO: 2525676 - RNA, 19 nt, Artificial Sequence
  Description of Artificial Sequence: Synthetic oligonucleotide
  Sense strand starting at position 1895 of SEQ ID NO: 1888302
aggaguuuccgagaggagu

SEQ ID NO: 2525677 - RNA, 19 nt, Artificial Sequence
  Description of Artificial Sequence: Synthetic oligonucleotide
  Antisense strand to SEQ ID NO: 2525676
acuccucucggaaacuccu

SEQ ID NO: 2525678 - RNA, 19 nt, Artificial Sequence
  Description of Artificial Sequence: Synthetic oligonucleotide
  Sense strand starting at position 2086 of SEQ ID NO: 1888302
cuccgacaugaugaguuau

SEQ ID NO: 2525679 - RNA, 19 nt, Artificial Sequence
  Description of Artificial Sequence: Synthetic oligonucleotide
  Antisense strand to SEQ ID NO: 2525678
auaacucaucaugucggag

SEQ ID NO: 2525680 - RNA, 19 nt, Artificial Sequence
  Description of Artificial Sequence: Synthetic oligonucleotide
  Sense strand starting at position 2088 of SEQ ID NO: 1888302
ccgacaugaugaguuauuc

SEQ ID NO: 2525681 - RNA, 19 nt, Artificial Sequence
  Description of Artificial Sequence: Synthetic oligonucleotide
  Antisense strand to SEQ ID NO: 2525680
gaauaacucaucaugucgg

SEQ ID NO: 2525682 - RNA, 19 nt, Artificial Sequence
  Description of Artificial Sequence: Synthetic oligonucleotide
  Sense strand starting at position 2099 of SEQ ID NO: 1888302
aguuauucagggcggaaga

SEQ ID NO: 2525683 - RNA, 19 nt, Artificial Sequence
  Description of Artificial Sequence: Synthetic oligonucleotide
  Antisense strand to SEQ ID NO: 2525682
ucuuccgcccugaauaacu

SEQ ID NO: 2525684 - RNA, 19 nt, Artificial Sequence
  Description of Artificial Sequence: Synthetic oligonucleotide
  Sense strand starting at position 2100 of SEQ ID NO: 1888302
guuauucagggcggaagaa

SEQ ID NO: 2525685 - RNA, 19 nt, Artificial Sequence
  Description of Artificial Sequence: Synthetic oligonucleotide
  Antisense strand to SEQ ID NO: 2525684
uucuuccgcccugaauaac

SEQ ID NO: 2525686 - RNA, 19 nt, Artificial Sequence
  Description of Artificial Sequence: Synthetic oligonucleotide
  Sense strand starting at position 2109 of SEQ ID NO: 1888302
ggcggaagaaucgggaauu

SEQ ID NO: 2525687 - RNA, 19 nt, Artificial Sequence
  Description of Artificial Sequence: Synthetic oligonucleotide
  Antisense strand to SEQ ID NO: 2525686
aauucccgauucuuccgcc

SEQ ID NO: 2525688 - RNA, 19 nt, Artificial Sequence
  Description of Artificial Sequence: Synthetic oligonucleotide
  Sense strand starting at position 2120 of SEQ ID NO: 1888302
cgggaauugcuucaagagc

SEQ ID NO: 2525689 - RNA, 19 nt, Artificial Sequence
  Description of Artificial Sequence: Synthetic oligonucleotide
  Antisense strand to SEQ ID NO: 2525688
gcucuugaagcaauucccg

SEQ ID NO: 2525690 - RNA, 19 nt, Artificial Sequence
  Description of Artificial Sequence: Synthetic oligonucleotide
  Sense strand starting at position 2504 of SEQ ID NO: 1888302
ucaggugauacggaugcau

SEQ ID NO: 2525691 - RNA, 19 nt, Artificial Sequence
  Description of Artificial Sequence: Synthetic oligonucleotide
  Antisense strand to SEQ ID NO: 2525690
augcauccguaucaccuga

SEQ ID NO: 2525692 - RNA, 19 nt, Artificial Sequence
  Description of Artificial Sequence: Synthetic oligonucleotide
  Sense strand starting at position 2543 of SEQ ID NO: 1888302
cugcaaaucucccuuggga

SEQ ID NO: 2525693 - RNA, 19 nt, Artificial Sequence
  Description of Artificial Sequence: Synthetic oligonucleotide
  Antisense strand to SEQ ID NO: 2525692
ucccaagggagauuugcag

SEQ ID NO: 2525694 - RNA, 19 nt, Artificial Sequence
  Description of Artificial Sequence: Synthetic oligonucleotide
  Sense strand starting at position 2545 of SEQ ID NO: 1888302
gcaaaucucccuugggaac

SEQ ID NO: 2525695 - RNA, 19 nt, Artificial Sequence
  Description of Artificial Sequence: Synthetic oligonucleotide
  Antisense strand to SEQ ID NO: 2525694
guucccaagggagauuugc

SEQ ID NO: 2525696 - RNA, 19 nt, Artificial Sequence
  Description of Artificial Sequence: Synthetic oligonucleotide
  Sense strand starting at position 2586 of SEQ ID NO: 1888302
acagauggaccuugaguuu

SEQ ID NO: 2525697 - RNA, 19 nt, Artificial Sequence
  Description of Artificial Sequence: Synthetic oligonucleotide
  Antisense strand to SEQ ID NO: 2525696
aaacucaagguccaucugu

SEQ ID NO: 2525698 - RNA, 19 nt, Artificial Sequence
  Description of Artificial Sequence: Synthetic oligonucleotide
  Sense strand starting at position 2633 of SEQ ID NO: 1888302
caggguucugcagagauac

SEQ ID NO: 2525699 - RNA, 19 nt, Artificial Sequence
  Description of Artificial Sequence: Synthetic oligonucleotide
  Antisense strand to SEQ ID NO: 2525698
guaucucugcagaacccug

SEQ ID NO: 2525700 - RNA, 19 nt, Artificial Sequence
  Description of Artificial Sequence: Synthetic oligonucleotide
  Sense strand starting at position 2635 of SEQ ID NO: 1888302
ggguucugcagagauacca

SEQ ID NO: 2525701 - RNA, 19 nt, Artificial Sequence
  Description of Artificial Sequence: Synthetic oligonucleotide
  Antisense strand to SEQ ID NO: 2525700
ugguaucucugcagaaccc

SEQ ID NO: 2525702 - RNA, 19 nt, Artificial Sequence
  Description of Artificial Sequence: Synthetic oligonucleotide
  Sense strand starting at position 2674 of SEQ ID NO: 1888302
agggaaggcucaguccuua

SEQ ID NO: 2525703 - RNA, 19 nt, Artificial Sequence
  Description of Artificial Sequence: Synthetic oligonucleotide
  Antisense strand to SEQ ID NO: 2525702
uaaggacugagccuucccu

SEQ ID NO: 2525704 - RNA, 19 nt, Artificial Sequence
  Description of Artificial Sequence: Synthetic oligonucleotide
  Sense strand starting at position 2848 of SEQ ID NO: 1888302
guggguaacaccgacuuua

SEQ ID NO: 2525705 - RNA, 19 nt, Artificial Sequence
  Description of Artificial Sequence: Synthetic oligonucleotide
  Antisense strand to SEQ ID NO: 2525704
uaaagucgguguuacccac

SEQ ID NO: 2525706 - RNA, 19 nt, Artificial Sequence
  Description of Artificial Sequence: Synthetic oligonucleotide
  Sense strand starting at position 2925 of SEQ ID NO: 1888302
gccgcauuuccagagugcu

SEQ ID NO: 2525707 - RNA, 19 nt, Artificial Sequence
  Description of Artificial Sequence: Synthetic oligonucleotide
  Antisense strand to SEQ ID NO: 2525706
agcacucuggaaaugcggc

SEQ ID NO: 2525708 - RNA, 19 nt, Artificial Sequence
  Description of Artificial Sequence: Synthetic oligonucleotide
  Sense strand starting at position 2931 of SEQ ID NO: 1888302
uuuccagagugcuuagaaa

SEQ ID NO: 2525709 - RNA, 19 nt, Artificial Sequence
  Description of Artificial Sequence: Synthetic oligonucleotide
  Antisense strand to SEQ ID NO: 2525708
uuucuaagcacucuggaaa

SEQ ID NO: 2525710 - RNA, 19 nt, Artificial Sequence
  Description of Artificial Sequence: Synthetic oligonucleotide
  Sense strand starting at position 3179 of SEQ ID NO: 1888302
gauaguacagcauaaagua

SEQ ID NO: 2525711 - RNA, 19 nt, Artificial Sequence
  Description of Artificial Sequence: Synthetic oligonucleotide
  Antisense strand to SEQ ID NO: 2525710
uacuuuaugcuguacuauc

SEQ ID NO: 2525712 - RNA, 19 nt, Artificial Sequence
  Description of Artificial Sequence: Synthetic oligonucleotide
  Sense strand starting at position 3202 of SEQ ID NO: 1888302
uuguaagaauuguucucau

SEQ ID NO: 2525713 - RNA, 19 nt, Artificial Sequence
  Description of Artificial Sequence: Synthetic oligonucleotide
  Antisense strand to SEQ ID NO: 2525712
augagaacaauucuuacaa

SEQ ID NO: 2525714 - RNA, 19 nt, Artificial Sequence
  Description of Artificial Sequence: Synthetic oligonucleotide
  Sense strand starting at position 3238 of SEQ ID NO: 1888302
guuugaccagcugaugaau

SEQ ID NO: 2525715 - RNA, 19 nt, Artificial Sequence
  Description of Artificial Sequence: Synthetic oligonucleotide
  Antisense strand to SEQ ID NO: 2525714
auucaucagcuggucaaac

SEQ ID NO: 2525716 - RNA, 19 nt, Artificial Sequence
  Description of Artificial Sequence: Synthetic oligonucleotide
  Sense strand starting at position 3334 of SEQ ID NO: 1888302
ccuuuauucugaucaggaa

SEQ ID NO: 2525717 - RNA, 19 nt, Artificial Sequence
  Description of Artificial Sequence: Synthetic oligonucleotide
  Antisense strand to SEQ ID NO: 2525716
uuccugaucagaauaaagg

SEQ ID NO: 2525718 - RNA, 19 nt, Artificial Sequence
  Description of Artificial Sequence: Synthetic oligonucleotide
  Sense strand starting at position 3423 of SEQ ID NO: 1888302
ugcuuucuagacggacaga

SEQ ID NO: 2525719 - RNA, 19 nt, Artificial Sequence
  Description of Artificial Sequence: Synthetic oligonucleotide
  Antisense strand to SEQ ID NO: 2525718
ucuguccgucuagaaagca

SEQ ID NO: 2525720 - RNA, 19 nt, Artificial Sequence
  Description of Artificial Sequence: Synthetic oligonucleotide
  Sense strand starting at position 3424 of SEQ ID NO: 1888302
gcuuucuagacggacagau

SEQ ID NO: 2525721 - RNA, 19 nt, Artificial Sequence
  Description of Artificial Sequence: Synthetic oligonucleotide
  Antisense strand to SEQ ID NO: 2525720
aucuguccgucuagaaagc

SEQ ID NO: 2525722 - RNA, 19 nt, Artificial Sequence
  Description of Artificial Sequence: Synthetic oligonucleotide
  Sense strand starting at position 3486 of SEQ ID NO: 1888302
gugggauuugcgcaaguuu

SEQ ID NO: 2525723 - RNA, 19 nt, Artificial Sequence
  Description of Artificial Sequence: Synthetic oligonucleotide
  Antisense strand to SEQ ID NO: 2525722
aaacuugcgcaaaucccac

SEQ ID NO: 2525724 - RNA, 19 nt, Artificial Sequence
  Description of Artificial Sequence: Synthetic oligonucleotide
  Sense strand starting at position 3954 of SEQ ID NO: 1888302
aggaaaggaguuugucaac

SEQ ID NO: 2525725 - RNA, 19 nt, Artificial Sequence
  Description of Artificial Sequence: Synthetic oligonucleotide
  Antisense strand to SEQ ID NO: 2525724
guugacaaacuccuuuccu

SEQ ID NO: 2525726 - RNA, 19 nt, Artificial Sequence
  Description of Artificial Sequence: Synthetic oligonucleotide
  Sense strand starting at position 7 of SEQ ID NO: 1888303
gguacucaguaauuaacca

SEQ ID NO: 2525727 - RNA, 19 nt, Artificial Sequence
  Description of Artificial Sequence: Synthetic oligonucleotide
  Antisense strand to SEQ ID NO: 2525726
ugguuaauuacugaguacc

SEQ ID NO: 2525728 - RNA, 19 nt, Artificial Sequence
  Description of Artificial Sequence: Synthetic oligonucleotide
  Sense strand starting at position 71 of SEQ ID NO: 1888303
caucaauuccagugugaag

SEQ ID NO: 2525729 - RNA, 19 nt, Artificial Sequence
  Description of Artificial Sequence: Synthetic oligonucleotide
  Antisense strand to SEQ ID NO: 2525728
cuucacacuggaauugaug

SEQ ID NO: 2525730 - RNA, 19 nt, Artificial Sequence
  Description of Artificial Sequence: Synthetic oligonucleotide
  Sense strand starting at position 119 of SEQ ID NO: 1888303
ucauuucuuucuccguaca

SEQ ID NO: 2525731 - RNA, 19 nt, Artificial Sequence
  Description of Artificial Sequence: Synthetic oligonucleotide
  Antisense strand to SEQ ID NO: 2525730
uguacggagaaagaaauga

SEQ ID NO: 2525732 - RNA, 19 nt, Artificial Sequence
  Description of Artificial Sequence: Synthetic oligonucleotide
  Sense strand starting at position 121 of SEQ ID NO: 1888303
auuucuuucuccguacauu

SEQ ID NO: 2525733 - RNA, 19 nt, Artificial Sequence
  Description of Artificial Sequence: Synthetic oligonucleotide
  Antisense strand to SEQ ID NO: 2525732
aauguacggagaaagaaau

SEQ ID NO: 2525734 - RNA, 19 nt, Artificial Sequence
  Description of Artificial Sequence: Synthetic oligonucleotide
  Sense strand starting at position 309 of SEQ ID NO: 1888303
cuggcugucuaauugagga

SEQ ID NO: 2525735 - RNA, 19 nt, Artificial Sequence
  Description of Artificial Sequence: Synthetic oligonucleotide
  Antisense strand to SEQ ID NO: 2525734
uccucaauuagacagccag

SEQ ID NO: 2525736 - RNA, 19 nt, Artificial Sequence
  Description of Artificial Sequence: Synthetic oligonucleotide
  Sense strand starting at position 314 of SEQ ID NO: 1888303
ugucuaauugaggagcuuu

SEQ ID NO: 2525737 - RNA, 19 nt, Artificial Sequence
  Description of Artificial Sequence: Synthetic oligonucleotide
  Antisense strand to SEQ ID NO: 2525736
aaagcuccucaauuagaca

SEQ ID NO: 2525738 - RNA, 19 nt, Artificial Sequence
  Description of Artificial Sequence: Synthetic oligonucleotide
  Sense strand starting at position 355 of SEQ ID NO: 1888303
cucaaacucggauaugcuu

SEQ ID NO: 2525739 - RNA, 19 nt, Artificial Sequence
  Description of Artificial Sequence: Synthetic oligonucleotide
  Antisense strand to SEQ ID NO: 2525738
aagcauauccgaguuugag

SEQ ID NO: 2525740 - RNA, 19 nt, Artificial Sequence
  Description of Artificial Sequence: Synthetic oligonucleotide
  Sense strand starting at position 362 of SEQ ID NO: 1888303
ucggauaugcuuuaacucu

SEQ ID NO: 2525741 - RNA, 19 nt, Artificial Sequence
  Description of Artificial Sequence: Synthetic oligonucleotide
  Antisense strand to SEQ ID NO: 2525740
agaguuaaagcauauccga

SEQ ID NO: 2525742 - RNA, 19 nt, Artificial Sequence
  Description of Artificial Sequence: Synthetic oligonucleotide
  Sense strand starting at position 368 of SEQ ID NO: 1888303
augcuuuaacucugaguug

SEQ ID NO: 2525743 - RNA, 19 nt, Artificial Sequence
  Description of Artificial Sequence: Synthetic oligonucleotide
  Antisense strand to SEQ ID NO: 2525742
caacucagaguuaaagcau

SEQ ID NO: 2525744 - RNA, 19 nt, Artificial Sequence
  Description of Artificial Sequence: Synthetic oligonucleotide
  Sense strand starting at position 454 of SEQ ID NO: 1888303
guggauuucugacaacucu

SEQ ID NO: 2525745 - RNA, 19 nt, Artificial Sequence
  Description of Artificial Sequence: Synthetic oligonucleotide
  Antisense strand to SEQ ID NO: 2525744
agaguugucagaaauccac

SEQ ID NO: 2525746 - RNA, 19 nt, Artificial Sequence
  Description of Artificial Sequence: Synthetic oligonucleotide
  Sense strand starting at position 727 of SEQ ID NO: 1888303
ccugacuucucaucuguca

SEQ ID NO: 2525747 - RNA, 19 nt, Artificial Sequence
  Description of Artificial Sequence: Synthetic oligonucleotide
  Antisense strand to SEQ ID NO: 2525746
ugacagaugagaagucagg

SEQ ID NO: 2525748 - RNA, 19 nt, Artificial Sequence
  Description of Artificial Sequence: Synthetic oligonucleotide
  Sense strand starting at position 842 of SEQ ID NO: 1888303
gcacauggaaaguguuuga

SEQ ID NO: 2525749 - RNA, 19 nt, Artificial Sequence
  Description of Artificial Sequence: Synthetic oligonucleotide
  Antisense strand to SEQ ID NO: 2525748
ucaaacacuuuccaugugc

SEQ ID NO: 2525750 - RNA, 19 nt, Artificial Sequence
  Description of Artificial Sequence: Synthetic oligonucleotide
  Sense strand starting at position 946 of SEQ ID NO: 1888303
cuuugagacgccgaaagau

SEQ ID NO: 2525751 - RNA, 19 nt, Artificial Sequence
  Description of Artificial Sequence: Synthetic oligonucleotide
  Antisense strand to SEQ ID NO: 2525750
aucuuucggcgucucaaag

SEQ ID NO: 2525752 - RNA, 19 nt, Artificial Sequence
  Description of Artificial Sequence: Synthetic oligonucleotide
  Sense strand starting at position 954 of SEQ ID NO: 1888303
cgccgaaagaucgcuuagu

SEQ ID NO: 2525753 - RNA, 19 nt, Artificial Sequence
  Description of Artificial Sequence: Synthetic oligonucleotide
  Antisense strand to SEQ ID NO: 2525752
acuaagcgaucuuucggcg

SEQ ID NO: 2525754 - RNA, 19 nt, Artificial Sequence
  Description of Artificial Sequence: Synthetic oligonucleotide
  Sense strand starting at position 1116 of SEQ ID NO: 1888303
aaggcucagugagcugauu

SEQ ID NO: 2525755 - RNA, 19 nt, Artificial Sequence
  Description of Artificial Sequence: Synthetic oligonucleotide
  Antisense strand to SEQ ID NO: 2525754
aaucagcucacugagccuu

SEQ ID NO: 2525756 - RNA, 19 nt, Artificial Sequence
  Description of Artificial Sequence: Synthetic oligonucleotide
  Sense strand starting at position 1220 of SEQ ID NO: 1888303
cgaacauuccaacgaccau

SEQ ID NO: 2525757 - RNA, 19 nt, Artificial Sequence
  Description of Artificial Sequence: Synthetic oligonucleotide
  Antisense strand to SEQ ID NO: 2525756
auggucguuggaauguucg

SEQ ID NO: 2525758 - RNA, 19 nt, Artificial Sequence
  Description of Artificial Sequence: Synthetic oligonucleotide
  Sense strand starting at position 1269 of SEQ ID NO: 1888303
aggaaauuaucgccaaggu

SEQ ID NO: 2525759 - RNA, 19 nt, Artificial Sequence
  Description of Artificial Sequence: Synthetic oligonucleotide
  Antisense strand to SEQ ID NO: 2525758
accuuggcgauaauuuccu

SEQ ID NO: 2525760 - RNA, 19 nt, Artificial Sequence
  Description of Artificial Sequence: Synthetic oligonucleotide
  Sense strand starting at position 1270 of SEQ ID NO: 1888303
ggaaauuaucgccaaggug

SEQ ID NO: 2525761 - RNA, 19 nt, Artificial Sequence
  Description of Artificial Sequence: Synthetic oligonucleotide
  Antisense strand to SEQ ID NO: 2525760
caccuuggcgauaauuucc

SEQ ID NO: 2525762 - RNA, 19 nt, Artificial Sequence
  Description of Artificial Sequence: Synthetic oligonucleotide
  Sense strand starting at position 1300 of SEQ ID NO: 1888303
uuaugaaagccauacuuug

SEQ ID NO: 2525763 - RNA, 19 nt, Artificial Sequence
  Description of Artificial Sequence: Synthetic oligonucleotide
  Antisense strand to SEQ ID NO: 2525762
caaaguauggcuuucauaa

SEQ ID NO: 2525764 - RNA, 19 nt, Artificial Sequence
  Description of Artificial Sequence: Synthetic oligonucleotide
  Sense strand starting at position 1383 of SEQ ID NO: 1888303
cugugaauggagugaaagu

SEQ ID NO: 2525765 - RNA, 19 nt, Artificial Sequence
  Description of Artificial Sequence: Synthetic oligonucleotide
  Antisense strand to SEQ ID NO: 2525764
acuuucacuccauucacag

SEQ ID NO: 2525766 - RNA, 19 nt, Artificial Sequence
  Description of Artificial Sequence: Synthetic oligonucleotide
  Sense strand starting at position 1399 of SEQ ID NO: 1888303
aguggaguggguggucaaa

SEQ ID NO: 2525767 - RNA, 19 nt, Artificial Sequence
  Description of Artificial Sequence: Synthetic oligonucleotide
  Antisense strand to SEQ ID NO: 2525766
uuugaccacccacuccacu

SEQ ID NO: 2525768 - RNA, 19 nt, Artificial Sequence
  Description of Artificial Sequence: Synthetic oligonucleotide
  Sense strand starting at position 2182 of SEQ ID NO: 1888303
ggcaaucugccggaagagu

SEQ ID NO: 2525769 - RNA, 19 nt, Artificial Sequence
  Description of Artificial Sequence: Synthetic oligonucleotide
  Antisense strand to SEQ ID NO: 2525768
acucuuccggcagauugcc

SEQ ID NO: 2525770 - RNA, 19 nt, Artificial Sequence
  Description of Artificial Sequence: Synthetic oligonucleotide
  Sense strand starting at position 2252 of SEQ ID NO: 1888303
gcagcauugaacuagaugu

SEQ ID NO: 2525771 - RNA, 19 nt, Artificial Sequence
  Description of Artificial Sequence: Synthetic oligonucleotide
  Antisense strand to SEQ ID NO: 2525770
acaucuaguucaaugcugc

SEQ ID NO: 2525772 - RNA, 19 nt, Artificial Sequence
  Description of Artificial Sequence: Synthetic oligonucleotide
  Sense strand starting at position 2424 of SEQ ID NO: 1888303
uccuuuagggcagaaacuu

SEQ ID NO: 2525773 - RNA, 19 nt, Artificial Sequence
  Description of Artificial Sequence: Synthetic oligonucleotide
  Antisense strand to SEQ ID NO: 2525772
aaguuucugcccuaaagga

SEQ ID NO: 2525774 - RNA, 19 nt, Artificial Sequence
  Description of Artificial Sequence: Synthetic oligonucleotide
  Sense strand starting at position 2430 of SEQ ID NO: 1888303
agggcagaaacuugaucuu

SEQ ID NO: 2525775 - RNA, 19 nt, Artificial Sequence
  Description of Artificial Sequence: Synthetic oligonucleotide
  Antisense strand to SEQ ID NO: 2525774
aagaucaaguuucugcccu

SEQ ID NO: 2525776 - RNA, 19 nt, Artificial Sequence
  Description of Artificial Sequence: Synthetic oligonucleotide
  Sense strand starting at position 2433 of SEQ ID NO: 1888303
gcagaaacuugaucuugac

SEQ ID NO: 2525777 - RNA, 19 nt, Artificial Sequence
  Description of Artificial Sequence: Synthetic oligonucleotide
  Antisense strand to SEQ ID NO: 2525776
gucaagaucaaguuucugc

SEQ ID NO: 2525778 - RNA, 19 nt, Artificial Sequence
  Description of Artificial Sequence: Synthetic oligonucleotide
  Sense strand starting at position 2709 of SEQ ID NO: 1888303
gcugauggaucagccuuaa

SEQ ID NO: 2525779 - RNA, 19 nt, Artificial Sequence
  Description of Artificial Sequence: Synthetic oligonucleotide
  Antisense strand to SEQ ID NO: 2525778
uuaaggcugauccaucagc

SEQ ID NO: 2525780 - RNA, 19 nt, Artificial Sequence
  Description of Artificial Sequence: Synthetic oligonucleotide
  Sense strand starting at position 2801 of SEQ ID NO: 1888303
ugggucugguuucucauua

SEQ ID NO: 2525781 - RNA, 19 nt, Artificial Sequence
  Description of Artificial Sequence: Synthetic oligonucleotide
  Antisense strand to SEQ ID NO: 2525780
uaaugagaaaccagaccca

SEQ ID NO: 2525782 - RNA, 19 nt, Artificial Sequence
  Description of Artificial Sequence: Synthetic oligonucleotide
  Sense strand starting at position 2805 of SEQ ID NO: 1888303
ucugguuucucauuacuua

SEQ ID NO: 2525783 - RNA, 19 nt, Artificial Sequence
  Description of Artificial Sequence: Synthetic oligonucleotide
  Antisense strand to SEQ ID NO: 2525782
uaaguaaugagaaaccaga

SEQ ID NO: 2525784 - RNA, 19 nt, Artificial Sequence
  Description of Artificial Sequence: Synthetic oligonucleotide
  Sense strand starting at position 2806 of SEQ ID NO: 1888303
cugguuucucauuacuuau

SEQ ID NO: 2525785 - RNA, 19 nt, Artificial Sequence
  Description of Artificial Sequence: Synthetic oligonucleotide
  Antisense strand to SEQ ID NO: 2525784
auaaguaaugagaaaccag

SEQ ID NO: 2525786 - RNA, 19 nt, Artificial Sequence
  Description of Artificial Sequence: Synthetic oligonucleotide
  Sense strand starting at position 3006 of SEQ ID NO: 1888303
uccugauuagcugggacau

SEQ ID NO: 2525787 - RNA, 19 nt, Artificial Sequence
  Description of Artificial Sequence: Synthetic oligonucleotide
  Antisense strand to SEQ ID NO: 2525786
augucccagcuaaucagga

SEQ ID NO: 2525788 - RNA, 19 nt, Artificial Sequence
  Description of Artificial Sequence: Synthetic oligonucleotide
  Sense strand starting at position 3007 of SEQ ID NO: 1888303
ccugauuagcugggacaua

SEQ ID NO: 2525789 - RNA, 19 nt, Artificial Sequence
  Description of Artificial Sequence: Synthetic oligonucleotide
  Antisense strand to SEQ ID NO: 2525788
uaugucccagcuaaucagg

SEQ ID NO: 2525790 - RNA, 19 nt, Artificial Sequence
  Description of Artificial Sequence: Synthetic oligonucleotide
  Sense strand starting at position 3223 of SEQ ID NO: 1888303
cuggcuuuacuggaaguua

SEQ ID NO: 2525791 - RNA, 19 nt, Artificial Sequence
  Description of Artificial Sequence: Synthetic oligonucleotide
  Antisense strand to SEQ ID NO: 2525790
uaacuuccaguaaagccag

SEQ ID NO: 2525792 - RNA, 19 nt, Artificial Sequence
  Description of Artificial Sequence: Synthetic oligonucleotide
  Sense strand starting at position 3231 of SEQ ID NO: 1888303
acuggaaguuaucuuacuu

SEQ ID NO: 2525793 - RNA, 19 nt, Artificial Sequence
  Description of Artificial Sequence: Synthetic oligonucleotide
  Antisense strand to SEQ ID NO: 2525792
aaguaagauaacuuccagu

SEQ ID NO: 2525794 - RNA, 19 nt, Artificial Sequence
  Description of Artificial Sequence: Synthetic oligonucleotide
  Sense strand starting at position 3235 of SEQ ID NO: 1888303
gaaguuaucuuacuuugag

SEQ ID NO: 2525795 - RNA, 19 nt, Artificial Sequence
  Description of Artificial Sequence: Synthetic oligonucleotide
  Antisense strand to SEQ ID NO: 2525794
cucaaaguaagauaacuuc

SEQ ID NO: 2525796 - RNA, 19 nt, Artificial Sequence
  Description of Artificial Sequence: Synthetic oligonucleotide
  Sense strand starting at position 3656 of SEQ ID NO: 1888303
gugggaggcuagagacaua

SEQ ID NO: 2525797 - RNA, 19 nt, Artificial Sequence
  Description of Artificial Sequence: Synthetic oligonucleotide
  Antisense strand to SEQ ID NO: 2525796
uaugucucuagccucccac

SEQ ID NO: 2525798 - RNA, 19 nt, Artificial Sequence
  Description of Artificial Sequence: Synthetic oligonucleotide
  Sense strand starting at position 3696 of SEQ ID NO: 1888303
cuacauucugggcaagcau

SEQ ID NO: 2525799 - RNA, 19 nt, Artificial Sequence
  Description of Artificial Sequence: Synthetic oligonucleotide
  Antisense strand to SEQ ID NO: 2525798
augcuugcccagaauguag

SEQ ID NO: 2525800 - RNA, 19 nt, Artificial Sequence
  Description of Artificial Sequence: Synthetic oligonucleotide
  Sense strand starting at position 3745 of SEQ ID NO: 1888303
ucaucuguacacugaagga

SEQ ID NO: 2525801 - RNA, 19 nt, Artificial Sequence
  Description of Artificial Sequence: Synthetic oligonucleotide
  Antisense strand to SEQ ID NO: 2525800
uccuucaguguacagauga

SEQ ID NO: 2525802 - RNA, 19 nt, Artificial Sequence
  Description of Artificial Sequence: Synthetic oligonucleotide
  Sense strand starting at position 3760 of SEQ ID NO: 1888303
aggaguuagacuugauguc

SEQ ID NO: 2525803 - RNA, 19 nt, Artificial Sequence
  Description of Artificial Sequence: Synthetic oligonucleotide
  Antisense strand to SEQ ID NO: 2525802
gacaucaagucuaacuccu

SEQ ID NO: 2525804 - RNA, 19 nt, Artificial Sequence
  Description of Artificial Sequence: Synthetic oligonucleotide
  Sense strand starting at position 3761 of SEQ ID NO: 1888303
ggaguuagacuugaugucu

SEQ ID NO: 2525805 - RNA, 19 nt, Artificial Sequence
  Description of Artificial Sequence: Synthetic oligonucleotide
  Antisense strand to SEQ ID NO: 2525804
agacaucaagucuaacucc

SEQ ID NO: 2525806 - RNA, 19 nt, Artificial Sequence
  Description of Artificial Sequence: Synthetic oligonucleotide
  Sense strand starting at position 557 of SEQ ID NO: 1888304
gcuaucaaaguugaauaau

SEQ ID NO: 2525807 - RNA, 19 nt, Artificial Sequence
  Description of Artificial Sequence: Synthetic oligonucleotide
  Antisense strand to SEQ ID NO: 2525806
auuauucaacuuugauagc

SEQ ID NO: 2525808 - RNA, 19 nt, Artificial Sequence
  Description of Artificial Sequence: Synthetic oligonucleotide
  Sense strand starting at position 2689 of SEQ ID NO: 1888304
uguauuuccugggauuuau

SEQ ID NO: 2525809 - RNA, 19 nt, Artificial Sequence
  Description of Artificial Sequence: Synthetic oligonucleotide
  Antisense strand to SEQ ID NO: 2525808
auaaaucccaggaaauaca

SEQ ID NO: 2525810 - RNA, 19 nt, Artificial Sequence
  Description of Artificial Sequence: Synthetic oligonucleotide
  Sense strand starting at position 2462 of SEQ ID NO: 1888304
aacugcgagcguguauaua

SEQ ID NO: 2525811 - RNA, 19 nt, Artificial Sequence
  Description of Artificial Sequence: Synthetic oligonucleotide
  Antisense strand to SEQ ID NO: 2525810
uauauacacgcucgcaguu

SEQ ID NO: 2525812 - RNA, 19 nt, Artificial Sequence
  Description of Artificial Sequence: Synthetic oligonucleotide
  Sense strand starting at position 3620 of SEQ ID NO: 1888304
acaugaagguuuguaagaa

SEQ ID NO: 2525813 - RNA, 19 nt, Artificial Sequence
  Description of Artificial Sequence: Synthetic oligonucleotide
  Antisense strand to SEQ ID NO: 2525812
uucuuacaaaccuucaugu

SEQ ID NO: 2525814 - RNA, 19 nt, Artificial Sequence
  Description of Artificial Sequence: Synthetic oligonucleotide
  Sense strand starting at position 1035 of SEQ ID NO: 1888304
uagugaugauaagugaaac

SEQ ID NO: 2525815 - RNA, 19 nt, Artificial Sequence
  Description of Artificial Sequence: Synthetic oligonucleotide
  Antisense strand to SEQ ID NO: 2525814
guuucacuuaucaucacua

SEQ ID NO: 2525816 - RNA, 19 nt, Artificial Sequence
  Description of Artificial Sequence: Synthetic oligonucleotide
  Sense strand starting at position 2647 of SEQ ID NO: 1888304
uuacaaggauggguauuau

SEQ ID NO: 2525817 - RNA, 19 nt, Artificial Sequence
  Description of Artificial Sequence: Synthetic oligonucleotide
  Antisense strand to SEQ ID NO: 2525816
auaauacccauccuuguaa

SEQ ID NO: 2525818 - RNA, 19 nt, Artificial Sequence
  Description of Artificial Sequence: Synthetic oligonucleotide
  Sense strand starting at position 3399 of SEQ ID NO: 1888304
ccuugauuggugggagaag

SEQ ID NO: 2525819 - RNA, 19 nt, Artificial Sequence
  Description of Artificial Sequence: Synthetic oligonucleotide
  Antisense strand to SEQ ID NO: 2525818
cuucucccaccaaucaagg

SEQ ID NO: 2525820 - RNA, 19 nt, Artificial Sequence
  Description of Artificial Sequence: Synthetic oligonucleotide
  Sense strand starting at position 3297 of SEQ ID NO: 1888304
gucuuugaccucuaggaau

SEQ ID NO: 2525821 - RNA, 19 nt, Artificial Sequence
  Description of Artificial Sequence: Synthetic oligonucleotide
  Antisense strand to SEQ ID NO: 2525820
auuccuagaggucaaagac

SEQ ID NO: 2525822 - RNA, 19 nt, Artificial Sequence
  Description of Artificial Sequence: Synthetic oligonucleotide
  Sense strand starting at position 2752 of SEQ ID NO: 1888304
uccugcuuucuggaagaag

SEQ ID NO: 2525823 - RNA, 19 nt, Artificial Sequence
  Description of Artificial Sequence: Synthetic oligonucleotide
  Antisense strand to SEQ ID NO: 2525822
cuucuuccagaaagcagga

SEQ ID NO: 2525824 - RNA, 19 nt, Artificial Sequence
  Description of Artificial Sequence: Synthetic oligonucleotide
  Sense strand starting at position 3833 of SEQ ID NO: 1888304
ucaugagacgguggaauaa

SEQ ID NO: 2525825 - RNA, 19 nt, Artificial Sequence
  Description of Artificial Sequence: Synthetic oligonucleotide
  Antisense strand to SEQ ID NO: 2525824
uuauuccaccgucucauga

SEQ ID NO: 2525826 - RNA, 19 nt, Artificial Sequence
  Description of Artificial Sequence: Synthetic oligonucleotide
  Sense strand starting at position 2803 of SEQ ID NO: 1888304
ggccauagaaugggugaaa

SEQ ID NO: 2525827 - RNA, 19 nt, Artificial Sequence
  Description of Artificial Sequence: Synthetic oligonucleotide
  Antisense strand to SEQ ID NO: 2525826
uuucacccauucuauggcc

SEQ ID NO: 2525828 - RNA, 19 nt, Artificial Sequence
  Description of Artificial Sequence: Synthetic oligonucleotide
  Sense strand starting at position 3299 of SEQ ID NO: 1888304
cuuugaccucuaggaauca

SEQ ID NO: 2525829 - RNA, 19 nt, Artificial Sequence
  Description of Artificial Sequence: Synthetic oligonucleotide
  Antisense strand to SEQ ID NO: 2525828
ugauuccuagaggucaaag

SEQ ID NO: 2525830 - RNA, 19 nt, Artificial Sequence
  Description of Artificial Sequence: Synthetic oligonucleotide
  Sense strand starting at position 3592 of SEQ ID NO: 1888304
agauaagacugugcaaaug

SEQ ID NO: 2525831 - RNA, 19 nt, Artificial Sequence
  Description of Artificial Sequence: Synthetic oligonucleotide
  Antisense strand to SEQ ID NO: 2525830
cauuugcacagucuuaucu

SEQ ID NO: 2525832 - RNA, 19 nt, Artificial Sequence
  Description of Artificial Sequence: Synthetic oligonucleotide
  Sense strand starting at position 2931 of SEQ ID NO: 1888304
gcuuguuuggcccuaugca

SEQ ID NO: 2525833 - RNA, 19 nt, Artificial Sequence
  Description of Artificial Sequence: Synthetic oligonucleotide
  Antisense strand to SEQ ID NO: 2525832
ugcauagggccaaacaagc

SEQ ID NO: 2525834 - RNA, 19 nt, Artificial Sequence
  Description of Artificial Sequence: Synthetic oligonucleotide
  Sense strand starting at position 51 of SEQ ID NO: 1888304
ggaugcuaaucacuaccaa

SEQ ID NO: 2525835 - RNA, 19 nt, Artificial Sequence
  Description of Artificial Sequence: Synthetic oligonucleotide
  Antisense strand to SEQ ID NO: 2525834
uugguagugauuagcaucc

SEQ ID NO: 2525836 - RNA, 19 nt, Artificial Sequence
  Description of Artificial Sequence: Synthetic oligonucleotide
  Sense strand starting at position 3723 of SEQ ID NO: 1888304
aggaucagauauucgcaaa

SEQ ID NO: 2525837 - RNA, 19 nt, Artificial Sequence
  Description of Artificial Sequence: Synthetic oligonucleotide
  Antisense strand to SEQ ID NO: 2525836
uuugcgaauaucugauccu

SEQ ID NO: 2525838 - RNA, 19 nt, Artificial Sequence
  Description of Artificial Sequence: Synthetic oligonucleotide
  Sense strand starting at position 1030 of SEQ ID NO: 1888304
uuguauagugaugauaagu

SEQ ID NO: 2525839 - RNA, 19 nt, Artificial Sequence
  Description of Artificial Sequence: Synthetic oligonucleotide
  Antisense strand to SEQ ID NO: 2525838
acuuaucaucacuauacaa

SEQ ID NO: 2525840 - RNA, 19 nt, Artificial Sequence
  Description of Artificial Sequence: Synthetic oligonucleotide
  Sense strand starting at position 728 of SEQ ID NO: 1888304
gcgcaauugagccugccau

SEQ ID NO: 2525841 - RNA, 19 nt, Artificial Sequence
  Description of Artificial Sequence: Synthetic oligonucleotide
  Antisense strand to SEQ ID NO: 2525840
auggcaggcucaauugcgc

SEQ ID NO: 2525842 - RNA, 19 nt, Artificial Sequence
  Description of Artificial Sequence: Synthetic oligonucleotide
  Sense strand starting at position 2192 of SEQ ID NO: 1888304
gaauaagugucaguagaau

SEQ ID NO: 2525843 - RNA, 19 nt, Artificial Sequence
  Description of Artificial Sequence: Synthetic oligonucleotide
  Antisense strand to SEQ ID NO: 2525842
auucuacugacacuuauuc

SEQ ID NO: 2525844 - RNA, 19 nt, Artificial Sequence
  Description of Artificial Sequence: Synthetic oligonucleotide
  Sense strand starting at position 536 of SEQ ID NO: 1888304
guggauuccugaucuauga

SEQ ID NO: 2525845 - RNA, 19 nt, Artificial Sequence
  Description of Artificial Sequence: Synthetic oligonucleotide
  Antisense strand to SEQ ID NO: 2525844
ucauagaucaggaauccac

SEQ ID NO: 2525846 - RNA, 19 nt, Artificial Sequence
  Description of Artificial Sequence: Synthetic oligonucleotide
  Sense strand starting at position 2140 of SEQ ID NO: 1888304
ugguauuuauacguuugua

SEQ ID NO: 2525847 - RNA, 19 nt, Artificial Sequence
  Description of Artificial Sequence: Synthetic oligonucleotide
  Antisense strand to SEQ ID NO: 2525846
uacaaacguauaaauacca

SEQ ID NO: 2525848 - RNA, 19 nt, Artificial Sequence
  Description of Artificial Sequence: Synthetic oligonucleotide
  Sense strand starting at position 1276 of SEQ ID NO: 1888304
ggaucacucaaugguagua

SEQ ID NO: 2525849 - RNA, 19 nt, Artificial Sequence
  Description of Artificial Sequence: Synthetic oligonucleotide
  Antisense strand to SEQ ID NO: 2525848
uacuaccauugagugaucc

SEQ ID NO: 2525850 - RNA, 19 nt, Artificial Sequence
  Description of Artificial Sequence: Synthetic oligonucleotide
  Sense strand starting at position 3688 of SEQ ID NO: 1888304
agauuugccuaggaaauag

SEQ ID NO: 2525851 - RNA, 19 nt, Artificial Sequence
  Description of Artificial Sequence: Synthetic oligonucleotide
  Antisense strand to SEQ ID NO: 2525850
cuauuuccuaggcaaaucu

SEQ ID NO: 2525852 - RNA, 19 nt, Artificial Sequence
  Description of Artificial Sequence: Synthetic oligonucleotide
  Sense strand starting at position 12 of SEQ ID NO: 1888304
uaauaaacauguuucggau

SEQ ID NO: 2525853 - RNA, 19 nt, Artificial Sequence
  Description of Artificial Sequence: Synthetic oligonucleotide
  Antisense strand to SEQ ID NO: 2525852
auccgaaacauguuuauua

SEQ ID NO: 2525854 - RNA, 19 nt, Artificial Sequence
  Description of Artificial Sequence: Synthetic oligonucleotide
  Sense strand starting at position 2139 of SEQ ID NO: 1888304
augguauuuauacguuugu

SEQ ID NO: 2525855 - RNA, 19 nt, Artificial Sequence
  Description of Artificial Sequence: Synthetic oligonucleotide
  Antisense strand to SEQ ID NO: 2525854
acaaacguauaaauaccau

SEQ ID NO: 2525856 - RNA, 19 nt, Artificial Sequence
  Description of Artificial Sequence: Synthetic oligonucleotide
  Sense strand starting at position 765 of SEQ ID NO: 1888304
agaggcaugcuauagugau

SEQ ID NO: 2525857 - RNA, 19 nt, Artificial Sequence
  Description of Artificial Sequence: Synthetic oligonucleotide
  Antisense strand to SEQ ID NO: 2525856
aucacuauagcaugccucu

SEQ ID NO: 2525858 - RNA, 19 nt, Artificial Sequence
  Description of Artificial Sequence: Synthetic oligonucleotide
  Sense strand starting at position 582 of SEQ ID NO: 1888304
ggaaacaaacgguguuuga

SEQ ID NO: 2525859 - RNA, 19 nt, Artificial Sequence
  Description of Artificial Sequence: Synthetic oligonucleotide
  Antisense strand to SEQ ID NO: 2525858
ucaaacaccguuuguuucc

SEQ ID NO: 2525860 - RNA, 19 nt, Artificial Sequence
  Description of Artificial Sequence: Synthetic oligonucleotide
  Sense strand starting at position 1275 of SEQ ID NO: 1888304
gggaucacucaaugguagu

SEQ ID NO: 2525861 - RNA, 19 nt, Artificial Sequence
  Description of Artificial Sequence: Synthetic oligonucleotide
  Antisense strand to SEQ ID NO: 2525860
acuaccauugagugauccc

SEQ ID NO: 2525862 - RNA, 19 nt, Artificial Sequence
  Description of Artificial Sequence: Synthetic oligonucleotide
  Sense strand starting at position 195 of SEQ ID NO: 1888304
ugaagucaauauguaagua

SEQ ID NO: 2525863 - RNA, 19 nt, Artificial Sequence
  Description of Artificial Sequence: Synthetic oligonucleotide
  Antisense strand to SEQ ID NO: 2525862
uacuuacauauugacuuca

SEQ ID NO: 2525864 - RNA, 19 nt, Artificial Sequence
  Description of Artificial Sequence: Synthetic oligonucleotide
  Sense strand starting at position 585 of SEQ ID NO: 1888304
aacaaacgguguuugaaua

SEQ ID NO: 2525865 - RNA, 19 nt, Artificial Sequence
  Description of Artificial Sequence: Synthetic oligonucleotide
  Antisense strand to SEQ ID NO: 2525864
uauucaaacaccguuuguu

SEQ ID NO: 2525866 - RNA, 19 nt, Artificial Sequence
  Description of Artificial Sequence: Synthetic oligonucleotide
  Sense strand starting at position 1631 of SEQ ID NO: 1888304
agagaacuuuaccugugua

SEQ ID NO: 2525867 - RNA, 19 nt, Artificial Sequence
  Description of Artificial Sequence: Synthetic oligonucleotide
  Antisense strand to SEQ ID NO: 2525866
uacacagguaaaguucucu

SEQ ID NO: 2525868 - RNA, 19 nt, Artificial Sequence
  Description of Artificial Sequence: Synthetic oligonucleotide
  Sense strand starting at position 2952 of SEQ ID NO: 1888304
gaggaaguuguagguuuaa

SEQ ID NO: 2525869 - RNA, 19 nt, Artificial Sequence
  Description of Artificial Sequence: Synthetic oligonucleotide
  Antisense strand to SEQ ID NO: 2525868
uuaaaccuacaacuuccuc

SEQ ID NO: 2525870 - RNA, 19 nt, Artificial Sequence
  Description of Artificial Sequence: Synthetic oligonucleotide
  Sense strand starting at position 2633 of SEQ ID NO: 1888304
ggccauguaguauauuaca

SEQ ID NO: 2525871 - RNA, 19 nt, Artificial Sequence
  Description of Artificial Sequence: Synthetic oligonucleotide
  Antisense strand to SEQ ID NO: 2525870
uguaauauacuacauggcc

SEQ ID NO: 2525872 - RNA, 19 nt, Artificial Sequence
  Description of Artificial Sequence: Synthetic oligonucleotide
  Sense strand starting at position 2626 of SEQ ID NO: 1888304
aagauaaggccauguagua

SEQ ID NO: 2525873 - RNA, 19 nt, Artificial Sequence
  Description of Artificial Sequence: Synthetic oligonucleotide
  Antisense strand to SEQ ID NO: 2525872
uacuacauggccuuaucuu

SEQ ID NO: 2525874 - RNA, 19 nt, Artificial Sequence
  Description of Artificial Sequence: Synthetic oligonucleotide
  Sense strand starting at position 1145 of SEQ ID NO: 1888304
guagaagcaugaguuauag

SEQ ID NO: 2525875 - RNA, 19 nt, Artificial Sequence
  Description of Artificial Sequence: Synthetic oligonucleotide
  Antisense strand to SEQ ID NO: 2525874
cuauaacucaugcuucuac

SEQ ID NO: 2525876 - RNA, 19 nt, Artificial Sequence
  Description of Artificial Sequence: Synthetic oligonucleotide
  Sense strand starting at position 3466 of SEQ ID NO: 1888304
gugugugggaacuauagua

SEQ ID NO: 2525877 - RNA, 19 nt, Artificial Sequence
  Description of Artificial Sequence: Synthetic oligonucleotide
  Antisense strand to SEQ ID NO: 2525876
uacuauaguucccacacac

SEQ ID NO: 2525878 - RNA, 19 nt, Artificial Sequence
  Description of Artificial Sequence: Synthetic oligonucleotide
  Sense strand starting at position 2504 of SEQ ID NO: 1888304
ugcuuugaggcagauacuu

SEQ ID NO: 2525879 - RNA, 19 nt, Artificial Sequence
  Description of Artificial Sequence: Synthetic oligonucleotide
  Antisense strand to SEQ ID NO: 2525878
aaguaucugccucaaagca

SEQ ID NO: 2525880 - RNA, 19 nt, Artificial Sequence
  Description of Artificial Sequence: Synthetic oligonucleotide
  Sense strand starting at position 3785 of SEQ ID NO: 1888304
cuagcugggcuaugaaaga

SEQ ID NO: 2525881 - RNA, 19 nt, Artificial Sequence
  Description of Artificial Sequence: Synthetic oligonucleotide
  Antisense strand to SEQ ID NO: 2525880
ucuuucauagcccagcuag

SEQ ID NO: 2525882 - RNA, 19 nt, Artificial Sequence
  Description of Artificial Sequence: Synthetic oligonucleotide
  Sense strand starting at position 2535 of SEQ ID NO: 1888304
augucauugguuugaugaa

SEQ ID NO: 2525883 - RNA, 19 nt, Artificial Sequence
  Description of Artificial Sequence: Synthetic oligonucleotide
  Antisense strand to SEQ ID NO: 2525882
uucaucaaaccaaugacau

SEQ ID NO: 2525884 - RNA, 19 nt, Artificial Sequence
  Description of Artificial Sequence: Synthetic oligonucleotide
  Sense strand starting at position 18 of SEQ ID NO: 1888304
acauguuucggaugacuga

SEQ ID NO: 2525885 - RNA, 19 nt, Artificial Sequence
  Description of Artificial Sequence: Synthetic oligonucleotide
  Antisense strand to SEQ ID NO: 2525884
ucagucauccgaaacaugu

SEQ ID NO: 2525886 - RNA, 19 nt, Artificial Sequence
  Description of Artificial Sequence: Synthetic oligonucleotide
  Sense strand starting at position 3729 of SEQ ID NO: 1888305
cgggacacauucuuaaaga

SEQ ID NO: 2525887 - RNA, 19 nt, Artificial Sequence
  Description of Artificial Sequence: Synthetic oligonucleotide
  Antisense strand to SEQ ID NO: 2525886
ucuuuaagaaugugucccg

SEQ ID NO: 2525888 - RNA, 19 nt, Artificial Sequence
  Description of Artificial Sequence: Synthetic oligonucleotide
  Sense strand starting at position 821 of SEQ ID NO: 1888305
gcagaucuccgacauagaa

SEQ ID NO: 2525889 - RNA, 19 nt, Artificial Sequence
  Description of Artificial Sequence: Synthetic oligonucleotide
  Antisense strand to SEQ ID NO: 2525888
uucuaugucggagaucugc

SEQ ID NO: 2525890 - RNA, 19 nt, Artificial Sequence
  Description of Artificial Sequence: Synthetic oligonucleotide
  Sense strand starting at position 315 of SEQ ID NO: 1888305
cgcaaugagagacaguuaa

SEQ ID NO: 2525891 - RNA, 19 nt, Artificial Sequence
  Description of Artificial Sequence: Synthetic oligonucleotide
  Antisense strand to SEQ ID NO: 2525890
uuaacugucucucauugcg

SEQ ID NO: 2525892 - RNA, 19 nt, Artificial Sequence
  Description of Artificial Sequence: Synthetic oligonucleotide
  Sense strand starting at position 2946 of SEQ ID NO: 1888305
ugauaagcauauguagaaa

SEQ ID NO: 2525893 - RNA, 19 nt, Artificial Sequence
  Description of Artificial Sequence: Synthetic oligonucleotide
  Antisense strand to SEQ ID NO: 2525892
uuucuacauaugcuuauca

SEQ ID NO: 2525894 - RNA, 19 nt, Artificial Sequence
  Description of Artificial Sequence: Synthetic oligonucleotide
  Sense strand starting at position 3380 of SEQ ID NO: 1888305
cgagguccgcgccuauaaa

SEQ ID NO: 2525895 - RNA, 19 nt, Artificial Sequence
  Description of Artificial Sequence: Synthetic oligonucleotide
  Antisense strand to SEQ ID NO: 2525894
uuuauaggcgcggaccucg

SEQ ID NO: 2525896 - RNA, 19 nt, Artificial Sequence
  Description of Artificial Sequence: Synthetic oligonucleotide
  Sense strand starting at position 3770 of SEQ ID NO: 1888305
guguauuucuguguaacag

SEQ ID NO: 2525897 - RNA, 19 nt, Artificial Sequence
  Description of Artificial Sequence: Synthetic oligonucleotide
  Antisense strand to SEQ ID NO: 2525896
cuguuacacagaaauacac

SEQ ID NO: 2525898 - RNA, 19 nt, Artificial Sequence
  Description of Artificial Sequence: Synthetic oligonucleotide
  Sense strand starting at position 3024 of SEQ ID NO: 1888305
aaaguuugauaggcaaacu

SEQ ID NO: 2525899 - RNA, 19 nt, Artificial Sequence
  Description of Artificial Sequence: Synthetic oligonucleotide
  Antisense strand to SEQ ID NO: 2525898
aguuugccuaucaaacuuu

SEQ ID NO: 2525900 - RNA, 19 nt, Artificial Sequence
  Description of Artificial Sequence: Synthetic oligonucleotide
  Sense strand starting at position 701 of SEQ ID NO: 1888305
guuauacuucgagaacgga

SEQ ID NO: 2525901 - RNA, 19 nt, Artificial Sequence
  Description of Artificial Sequence: Synthetic oligonucleotide
  Antisense strand to SEQ ID NO: 2525900
uccguucucgaaguauaac

SEQ ID NO: 2525902 - RNA, 19 nt, Artificial Sequence
  Description of Artificial Sequence: Synthetic oligonucleotide
  Sense strand starting at position 110 of SEQ ID NO: 1888305
gugggauauacccagucuu

SEQ ID NO: 2525903 - RNA, 19 nt, Artificial Sequence
  Description of Artificial Sequence: Synthetic oligonucleotide
  Antisense strand to SEQ ID NO: 2525902
aagacuggguauaucccac

SEQ ID NO: 2525904 - RNA, 19 nt, Artificial Sequence
  Description of Artificial Sequence: Synthetic oligonucleotide
  Sense strand starting at position 3761 of SEQ ID NO: 1888305
ggacguuguguguauuucu

SEQ ID NO: 2525905 - RNA, 19 nt, Artificial Sequence
  Description of Artificial Sequence: Synthetic oligonucleotide
  Antisense strand to SEQ ID NO: 2525904
agaaauacacacaacgucc

SEQ ID NO: 2525906 - RNA, 19 nt, Artificial Sequence
  Description of Artificial Sequence: Synthetic oligonucleotide
  Sense strand starting at position 3769 of SEQ ID NO: 1888305
uguguauuucuguguaaca

SEQ ID NO: 2525907 - RNA, 19 nt, Artificial Sequence
  Description of Artificial Sequence: Synthetic oligonucleotide
  Antisense strand to SEQ ID NO: 2525906
uguuacacagaaauacaca

SEQ ID NO: 2525908 - RNA, 19 nt, Artificial Sequence
  Description of Artificial Sequence: Synthetic oligonucleotide
  Sense strand starting at position 13 of SEQ ID NO: 1888305
uucucagagcuggaucgau

SEQ ID NO: 2525909 - RNA, 19 nt, Artificial Sequence
  Description of Artificial Sequence: Synthetic oligonucleotide
  Antisense strand to SEQ ID NO: 2525908
aucgauccagcucugagaa

SEQ ID NO: 2525910 - RNA, 19 nt, Artificial Sequence
  Description of Artificial Sequence: Synthetic oligonucleotide
  Sense strand starting at position 101 of SEQ ID NO: 1888305
guagauguagugggauaua

SEQ ID NO: 2525911 - RNA, 19 nt, Artificial Sequence
  Description of Artificial Sequence: Synthetic oligonucleotide
  Antisense strand to SEQ ID NO: 2525910
uauaucccacuacaucuac

SEQ ID NO: 2525912 - RNA, 19 nt, Artificial Sequence
  Description of Artificial Sequence: Synthetic oligonucleotide
  Sense strand starting at position 2903 of SEQ ID NO: 1888305
cugacuguuccacaguuau

SEQ ID NO: 2525913 - RNA, 19 nt, Artificial Sequence
  Description of Artificial Sequence: Synthetic oligonucleotide
  Antisense strand to SEQ ID NO: 2525912
auaacuguggaacagucag

SEQ ID NO: 2525914 - RNA, 19 nt, Artificial Sequence
  Description of Artificial Sequence: Synthetic oligonucleotide
  Sense strand starting at position 3163 of SEQ ID NO: 1888305
ucaaauugagguuguacua

SEQ ID NO: 2525915 - RNA, 19 nt, Artificial Sequence
  Description of Artificial Sequence: Synthetic oligonucleotide
  Antisense strand to SEQ ID NO: 2525914
uaguacaaccucaauuuga

SEQ ID NO: 2525916 - RNA, 19 nt, Artificial Sequence
  Description of Artificial Sequence: Synthetic oligonucleotide
  Sense strand starting at position 3006 of SEQ ID NO: 1888305
aguucucugcacgaagaua

SEQ ID NO: 2525917 - RNA, 19 nt, Artificial Sequence
  Description of Artificial Sequence: Synthetic oligonucleotide
  Antisense strand to SEQ ID NO: 2525916
uaucuucgugcagagaacu

SEQ ID NO: 2525918 - RNA, 19 nt, Artificial Sequence
  Description of Artificial Sequence: Synthetic oligonucleotide
  Sense strand starting at position 709 of SEQ ID NO: 1888305
ucgagaacggaaugcaaua

SEQ ID NO: 2525919 - RNA, 19 nt, Artificial Sequence
  Description of Artificial Sequence: Synthetic oligonucleotide
  Antisense strand to SEQ ID NO: 2525918
uauugcauuccguucucga

SEQ ID NO: 2525920 - RNA, 19 nt, Artificial Sequence
  Description of Artificial Sequence: Synthetic oligonucleotide
  Sense strand starting at position 3759 of SEQ ID NO: 1888305
gaggacguuguguguauuu

SEQ ID NO: 2525921 - RNA, 19 nt, Artificial Sequence
  Description of Artificial Sequence: Synthetic oligonucleotide
  Antisense strand to SEQ ID NO: 2525920
aaauacacacaacguccuc

SEQ ID NO: 2525922 - RNA, 19 nt, Artificial Sequence
  Description of Artificial Sequence: Synthetic oligonucleotide
  Sense strand starting at position 3745 of SEQ ID NO: 1888305
agagauacgugccugagga

SEQ ID NO: 2525923 - RNA, 19 nt, Artificial Sequence
  Description of Artificial Sequence: Synthetic oligonucleotide
  Antisense strand to SEQ ID NO: 2525922
uccucaggcacguaucucu

SEQ ID NO: 2525924 - RNA, 19 nt, Artificial Sequence
  Description of Artificial Sequence: Synthetic oligonucleotide
  Sense strand starting at position 720 of SEQ ID NO: 1888305
augcaauaaugguuaguaa

SEQ ID NO: 2525925 - RNA, 19 nt, Artificial Sequence
  Description of Artificial Sequence: Synthetic oligonucleotide
  Antisense strand to SEQ ID NO: 2525924
uuacuaaccauuauugcau

SEQ ID NO: 2525926 - RNA, 19 nt, Artificial Sequence
  Description of Artificial Sequence: Synthetic oligonucleotide
  Sense strand starting at position 100 of SEQ ID NO: 1888305
uguagauguagugggauau

SEQ ID NO: 2525927 - RNA, 19 nt, Artificial Sequence
  Description of Artificial Sequence: Synthetic oligonucleotide
  Antisense strand to SEQ ID NO: 2525926
auaucccacuacaucuaca

SEQ ID NO: 2525928 - RNA, 19 nt, Artificial Sequence
  Description of Artificial Sequence: Synthetic oligonucleotide
  Sense strand starting at position 3768 of SEQ ID NO: 1888305
guguguauuucuguguaac

SEQ ID NO: 2525929 - RNA, 19 nt, Artificial Sequence
  Description of Artificial Sequence: Synthetic oligonucleotide
  Antisense strand to SEQ ID NO: 2525928
guuacacagaaauacacac

SEQ ID NO: 2525930 - RNA, 19 nt, Artificial Sequence
  Description of Artificial Sequence: Synthetic oligonucleotide
  Sense strand starting at position 3746 of SEQ ID NO: 1888305
gagauacgugccugaggac

SEQ ID NO: 2525931 - RNA, 19 nt, Artificial Sequence
  Description of Artificial Sequence: Synthetic oligonucleotide
  Antisense strand to SEQ ID NO: 2525930
guccucaggcacguaucuc

SEQ ID NO: 2525932 - RNA, 19 nt, Artificial Sequence
  Description of Artificial Sequence: Synthetic oligonucleotide
  Sense strand starting at position 3720 of SEQ ID NO: 1888305
acgccuucucgggacacau

SEQ ID NO: 2525933 - RNA, 19 nt, Artificial Sequence
  Description of Artificial Sequence: Synthetic oligonucleotide
  Antisense strand to SEQ ID NO: 2525932
augugucccgagaaggcgu

SEQ ID NO: 2525934 - RNA, 19 nt, Artificial Sequence
  Description of Artificial Sequence: Synthetic oligonucleotide
  Sense strand starting at position 634 of SEQ ID NO: 1888305
acgguucuaucaucuuaau

SEQ ID NO: 2525935 - RNA, 19 nt, Artificial Sequence
  Description of Artificial Sequence: Synthetic oligonucleotide
  Antisense strand to SEQ ID NO: 2525934
auuaagaugauagaaccgu

SEQ ID NO: 2525936 - RNA, 19 nt, Artificial Sequence
  Description of Artificial Sequence: Synthetic oligonucleotide
  Sense strand starting at position 3766 of SEQ ID NO: 1888305
uuguguguauuucugugua

SEQ ID NO: 2525937 - RNA, 19 nt, Artificial Sequence
  Description of Artificial Sequence: Synthetic oligonucleotide
  Antisense strand to SEQ ID NO: 2525936
uacacagaaauacacacaa

SEQ ID NO: 2525938 - RNA, 19 nt, Artificial Sequence
  Description of Artificial Sequence: Synthetic oligonucleotide
  Sense strand starting at position 818 of SEQ ID NO: 1888305
ggugcagaucuccgacaua

SEQ ID NO: 2525939 - RNA, 19 nt, Artificial Sequence
  Description of Artificial Sequence: Synthetic oligonucleotide
  Antisense strand to SEQ ID NO: 2525938
uaugucggagaucugcacc

SEQ ID NO: 2525940 - RNA, 19 nt, Artificial Sequence
  Description of Artificial Sequence: Synthetic oligonucleotide
  Sense strand starting at position 3730 of SEQ ID NO: 1888305
gggacacauucuuaaagag

SEQ ID NO: 2525941 - RNA, 19 nt, Artificial Sequence
  Description of Artificial Sequence: Synthetic oligonucleotide
  Antisense strand to SEQ ID NO: 2525940
cucuuuaagaauguguccc

SEQ ID NO: 2525942 - RNA, 19 nt, Artificial Sequence
  Description of Artificial Sequence: Synthetic oligonucleotide
  Sense strand starting at position 698 of SEQ ID NO: 1888305
uucguuauacuucgagaac

SEQ ID NO: 2525943 - RNA, 19 nt, Artificial Sequence
  Description of Artificial Sequence: Synthetic oligonucleotide
  Antisense strand to SEQ ID NO: 2525942
guucucgaaguauaacgaa

SEQ ID NO: 2525944 - RNA, 19 nt, Artificial Sequence
  Description of Artificial Sequence: Synthetic oligonucleotide
  Sense strand starting at position 2615 of SEQ ID NO: 1888305
cccggaguugccugggaca

SEQ ID NO: 2525945 - RNA, 19 nt, Artificial Sequence
  Description of Artificial Sequence: Synthetic oligonucleotide
  Antisense strand to SEQ ID NO: 2525944
ugucccaggcaacuccggg

SEQ ID NO: 2525946 - RNA, 19 nt, Artificial Sequence
  Description of Artificial Sequence: Synthetic oligonucleotide
  Sense strand starting at position 3005 of SEQ ID NO: 1888305
caguucucugcacgaagau

SEQ ID NO: 2525947 - RNA, 19 nt, Artificial Sequence
  Description of Artificial Sequence: Synthetic oligonucleotide
  Antisense strand to SEQ ID NO: 2525946
aucuucgugcagagaacug

SEQ ID NO: 2525948 - RNA, 19 nt, Artificial Sequence
  Description of Artificial Sequence: Synthetic oligonucleotide
  Sense strand starting at position 3003 of SEQ ID NO: 1888305
ugcaguucucugcacgaag

SEQ ID NO: 2525949 - RNA, 19 nt, Artificial Sequence
  Description of Artificial Sequence: Synthetic oligonucleotide
  Antisense strand to SEQ ID NO: 2525948
cuucgugcagagaacugca

SEQ ID NO: 2525950 - RNA, 19 nt, Artificial Sequence
  Description of Artificial Sequence: Synthetic oligonucleotide
  Sense strand starting at position 727 of SEQ ID NO: 1888305
aaugguuaguaagaaggaa

SEQ ID NO: 2525951 - RNA, 19 nt, Artificial Sequence
  Description of Artificial Sequence: Synthetic oligonucleotide
  Antisense strand to SEQ ID NO: 2525950
uuccuucuuacuaaccauu

SEQ ID NO: 2525952 - RNA, 19 nt, Artificial Sequence
  Description of Artificial Sequence: Synthetic oligonucleotide
  Sense strand starting at position 2663 of SEQ ID NO: 1888305
ccgucauccucacuguaga

SEQ ID NO: 2525953 - RNA, 19 nt, Artificial Sequence
  Description of Artificial Sequence: Synthetic oligonucleotide
  Antisense strand to SEQ ID NO: 2525952
ucuacagugaggaugacgg

SEQ ID NO: 2525954 - RNA, 19 nt, Artificial Sequence
  Description of Artificial Sequence: Synthetic oligonucleotide
  Sense strand starting at position 671 of SEQ ID NO: 1888305
agaaacaaguuugauauca

SEQ ID NO: 2525955 - RNA, 19 nt, Artificial Sequence
  Description of Artificial Sequence: Synthetic oligonucleotide
  Antisense strand to SEQ ID NO: 2525954
ugauaucaaacuuguuucu

SEQ ID NO: 2525956 - RNA, 19 nt, Artificial Sequence
  Description of Artificial Sequence: Synthetic oligonucleotide
  Sense strand starting at position 3381 of SEQ ID NO: 1888305
gagguccgcgccuauaaau

SEQ ID NO: 2525957 - RNA, 19 nt, Artificial Sequence
  Description of Artificial Sequence: Synthetic oligonucleotide
  Antisense strand to SEQ ID NO: 2525956
auuuauaggcgcggaccuc

SEQ ID NO: 2525958 - RNA, 19 nt, Artificial Sequence
  Description of Artificial Sequence: Synthetic oligonucleotide
  Sense strand starting at position 2661 of SEQ ID NO: 1888305
gcccgucauccucacugua

SEQ ID NO: 2525959 - RNA, 19 nt, Artificial Sequence
  Description of Artificial Sequence: Synthetic oligonucleotide
  Antisense strand to SEQ ID NO: 2525958
uacagugaggaugacgggc

SEQ ID NO: 2525960 - RNA, 19 nt, Artificial Sequence
  Description of Artificial Sequence: Synthetic oligonucleotide
  Sense strand starting at position 3758 of SEQ ID NO: 1888305
ugaggacguuguguguauu

SEQ ID NO: 2525961 - RNA, 19 nt, Artificial Sequence
  Description of Artificial Sequence: Synthetic oligonucleotide
  Antisense strand to SEQ ID NO: 2525960
aauacacacaacguccuca

SEQ ID NO: 2525962 - RNA, 19 nt, Artificial Sequence
  Description of Artificial Sequence: Synthetic oligonucleotide
  Sense strand starting at position 151 of SEQ ID NO: 1888305
gggcaucacucacagacaa

SEQ ID NO: 2525963 - RNA, 19 nt, Artificial Sequence
  Description of Artificial Sequence: Synthetic oligonucleotide
  Antisense strand to SEQ ID NO: 2525962
uugucugugagugaugccc

SEQ ID NO: 2525964 - RNA, 19 nt, Artificial Sequence
  Description of Artificial Sequence: Synthetic oligonucleotide
  Sense strand starting at position 3021 of SEQ ID NO: 1888305
gauaaaguuugauaggcaa

SEQ ID NO: 2525965 - RNA, 19 nt, Artificial Sequence
  Description of Artificial Sequence: Synthetic oligonucleotide
  Antisense strand to SEQ ID NO: 2525964
uugccuaucaaacuuuauc

SEQ ID NO: 2525966 - RNA, 19 nt, Artificial Sequence
  Description of Artificial Sequence: Synthetic oligonucleotide
  Sense strand starting at position 691 of SEQ ID NO: 1888306
augucaucacaauagcgaa

SEQ ID NO: 2525967 - RNA, 19 nt, Artificial Sequence
  Description of Artificial Sequence: Synthetic oligonucleotide
  Antisense strand to SEQ ID NO: 2525966
uucgcuauugugaugacau

SEQ ID NO: 2525968 - RNA, 19 nt, Artificial Sequence
  Description of Artificial Sequence: Synthetic oligonucleotide
  Sense strand starting at position 3466 of SEQ ID NO: 1888306
ccgcuuucgccuucuuuaa

SEQ ID NO: 2525969 - RNA, 19 nt, Artificial Sequence
  Description of Artificial Sequence: Synthetic oligonucleotide
  Antisense strand to SEQ ID NO: 2525968
uuaaagaaggcgaaagcgg

SEQ ID NO: 2525970 - RNA, 19 nt, Artificial Sequence
  Description of Artificial Sequence: Synthetic oligonucleotide
  Sense strand starting at position 3465 of SEQ ID NO: 1888306
uccgcuuucgccuucuuua

SEQ ID NO: 2525971 - RNA, 19 nt, Artificial Sequence
  Description of Artificial Sequence: Synthetic oligonucleotide
  Antisense strand to SEQ ID NO: 2525970
uaaagaaggcgaaagcgga

SEQ ID NO: 2525972 - RNA, 19 nt, Artificial Sequence
  Description of Artificial Sequence: Synthetic oligonucleotide
  Sense strand starting at position 437 of SEQ ID NO: 1888306
ggaacucauguuugugaca

SEQ ID NO: 2525973 - RNA, 19 nt, Artificial Sequence
  Description of Artificial Sequence: Synthetic oligonucleotide
  Antisense strand to SEQ ID NO: 2525972
ugucacaaacaugaguucc

SEQ ID NO: 2525974 - RNA, 19 nt, Artificial Sequence
  Description of Artificial Sequence: Synthetic oligonucleotide
  Sense strand starting at position 438 of SEQ ID NO: 1888306
gaacucauguuugugacau

SEQ ID NO: 2525975 - RNA, 19 nt, Artificial Sequence
  Description of Artificial Sequence: Synthetic oligonucleotide
  Antisense strand to SEQ ID NO: 2525974
augucacaaacaugaguuc

SEQ ID NO: 2525976 - RNA, 19 nt, Artificial Sequence
  Description of Artificial Sequence: Synthetic oligonucleotide
  Sense strand starting at position 1858 of SEQ ID NO: 1888306
ucaagauuccugcggaaac

SEQ ID NO: 2525977 - RNA, 19 nt, Artificial Sequence
  Description of Artificial Sequence: Synthetic oligonucleotide
  Antisense strand to SEQ ID NO: 2525976
guuuccgcaggaaucuuga

SEQ ID NO: 2525978 - RNA, 19 nt, Artificial Sequence
  Description of Artificial Sequence: Synthetic oligonucleotide
  Sense strand starting at position 311 of SEQ ID NO: 1888306
ugcuuaugaggucauucuu

SEQ ID NO: 2525979 - RNA, 19 nt, Artificial Sequence
  Description of Artificial Sequence: Synthetic oligonucleotide
  Antisense strand to SEQ ID NO: 2525978
aagaaugaccucauaagca

SEQ ID NO: 2525980 - RNA, 19 nt, Artificial Sequence
  Description of Artificial Sequence: Synthetic oligonucleotide
  Sense strand starting at position 1461 of SEQ ID NO: 1888306
gguggugacuucucagacu

SEQ ID NO: 2525981 - RNA, 19 nt, Artificial Sequence
  Description of Artificial Sequence: Synthetic oligonucleotide
  Antisense strand to SEQ ID NO: 2525980
agucugagaagucaccacc

SEQ ID NO: 2525982 - RNA, 19 nt, Artificial Sequence
  Description of Artificial Sequence: Synthetic oligonucleotide
  Sense strand starting at position 2462 of SEQ ID NO: 1888306
ccgagaauauggucccgau

SEQ ID NO: 2525983 - RNA, 19 nt, Artificial Sequence
  Description of Artificial Sequence: Synthetic oligonucleotide
  Antisense strand to SEQ ID NO: 2525982
aucgggaccauauucucgg

SEQ ID NO: 2525984 - RNA, 19 nt, Artificial Sequence
  Description of Artificial Sequence: Synthetic oligonucleotide
  Sense strand starting at position 2678 of SEQ ID NO: 1888306
ccucuaucaugaguagucu

SEQ ID NO: 2525985 - RNA, 19 nt, Artificial Sequence
  Description of Artificial Sequence: Synthetic oligonucleotide
  Antisense strand to SEQ ID NO: 2525984
agacuacucaugauagagg

SEQ ID NO: 2525986 - RNA, 19 nt, Artificial Sequence
  Description of Artificial Sequence: Synthetic oligonucleotide
  Sense strand starting at position 3131 of SEQ ID NO: 1888306
aguagugacgcccggaaua

SEQ ID NO: 2525987 - RNA, 19 nt, Artificial Sequence
  Description of Artificial Sequence: Synthetic oligonucleotide
  Antisense strand to SEQ ID NO: 2525986
uauuccgggcgucacuacu

SEQ ID NO: 2525988 - RNA, 19 nt, Artificial Sequence
  Description of Artificial Sequence: Synthetic oligonucleotide
  Sense strand starting at position 618 of SEQ ID NO: 1888306
uguagaaauuaauagcaca

SEQ ID NO: 2525989 - RNA, 19 nt, Artificial Sequence
  Description of Artificial Sequence: Synthetic oligonucleotide
  Antisense strand to SEQ ID NO: 2525988
ugugcuauuaauuucuaca

SEQ ID NO: 2525990 - RNA, 19 nt, Artificial Sequence
  Description of Artificial Sequence: Synthetic oligonucleotide
  Sense strand starting at position 440 of SEQ ID NO: 1888306
acucauguuugugacauaa

SEQ ID NO: 2525991 - RNA, 19 nt, Artificial Sequence
  Description of Artificial Sequence: Synthetic oligonucleotide
  Antisense strand to SEQ ID NO: 2525990
uuaugucacaaacaugagu

SEQ ID NO: 2525992 - RNA, 19 nt, Artificial Sequence
  Description of Artificial Sequence: Synthetic oligonucleotide
  Sense strand starting at position 2689 of SEQ ID NO: 1888306
aguagucuggcccgcgaua

SEQ ID NO: 2525993 - RNA, 19 nt, Artificial Sequence
  Description of Artificial Sequence: Synthetic oligonucleotide
  Antisense strand to SEQ ID NO: 2525992
uaucgcgggccagacuacu

SEQ ID NO: 2525994 - RNA, 19 nt, Artificial Sequence
  Description of Artificial Sequence: Synthetic oligonucleotide
  Sense strand starting at position 320 of SEQ ID NO: 1888306
ggucauucuuaggaaggcu

SEQ ID NO: 2525995 - RNA, 19 nt, Artificial Sequence
  Description of Artificial Sequence: Synthetic oligonucleotide
  Antisense strand to SEQ ID NO: 2525994
agccuuccuaagaaugacc

SEQ ID NO: 2525996 - RNA, 19 nt, Artificial Sequence
  Description of Artificial Sequence: Synthetic oligonucleotide
  Sense strand starting at position 576 of SEQ ID NO: 1888306
guucuaugcguuugucuuu

SEQ ID NO: 2525997 - RNA, 19 nt, Artificial Sequence
  Description of Artificial Sequence: Synthetic oligonucleotide
  Antisense strand to SEQ ID NO: 2525996
aaagacaaacgcauagaac

SEQ ID NO: 2525998 - RNA, 19 nt, Artificial Sequence
  Description of Artificial Sequence: Synthetic oligonucleotide
  Sense strand starting at position 1856 of SEQ ID NO: 1888306
ucucaagauuccugcggaa

SEQ ID NO: 2525999 - RNA, 19 nt, Artificial Sequence
  Description of Artificial Sequence: Synthetic oligonucleotide
  Antisense strand to SEQ ID NO: 2525998
uuccgcaggaaucuugaga

SEQ ID NO: 2526000 - RNA, 19 nt, Artificial Sequence
  Description of Artificial Sequence: Synthetic oligonucleotide
  Sense strand starting at position 2465 of SEQ ID NO: 1888306
agaauauggucccgauagc

SEQ ID NO: 2526001 - RNA, 19 nt, Artificial Sequence
  Description of Artificial Sequence: Synthetic oligonucleotide
  Antisense strand to SEQ ID NO: 2526000
gcuaucgggaccauauucu

SEQ ID NO: 2526002 - RNA, 19 nt, Artificial Sequence
  Description of Artificial Sequence: Synthetic oligonucleotide
  Sense strand starting at position 2451 of SEQ ID NO: 1888306
guaugccacuaccgagaau

SEQ ID NO: 2526003 - RNA, 19 nt, Artificial Sequence
  Description of Artificial Sequence: Synthetic oligonucleotide
  Antisense strand to SEQ ID NO: 2526002
auucucgguaguggcauac

SEQ ID NO: 2526004 - RNA, 19 nt, Artificial Sequence
  Description of Artificial Sequence: Synthetic oligonucleotide
  Sense strand starting at position 308 of SEQ ID NO: 1888306
gccugcuuaugaggucauu

SEQ ID NO: 2526005 - RNA, 19 nt, Artificial Sequence
  Description of Artificial Sequence: Synthetic oligonucleotide
  Antisense strand to SEQ ID NO: 2526004
aaugaccucauaagcaggc

SEQ ID NO: 2526006 - RNA, 19 nt, Artificial Sequence
  Description of Artificial Sequence: Synthetic oligonucleotide
  Sense strand starting at position 1570 of SEQ ID NO: 1888307
gggccuucccgggaagaaa

SEQ ID NO: 2526007 - RNA, 19 nt, Artificial Sequence
  Description of Artificial Sequence: Synthetic oligonucleotide
  Antisense strand to SEQ ID NO: 2526006
uuucuucccgggaaggccc

SEQ ID NO: 2526008 - RNA, 19 nt, Artificial Sequence
  Description of Artificial Sequence: Synthetic oligonucleotide
  Sense strand starting at position 3829 of SEQ ID NO: 1888307
acacaucuagcuugaagag

SEQ ID NO: 2526009 - RNA, 19 nt, Artificial Sequence
  Description of Artificial Sequence: Synthetic oligonucleotide
  Antisense strand to SEQ ID NO: 2526008
cucuucaagcuagaugugu

SEQ ID NO: 2526010 - RNA, 19 nt, Artificial Sequence
  Description of Artificial Sequence: Synthetic oligonucleotide
  Sense strand starting at position 3830 of SEQ ID NO: 1888307
cacaucuagcuugaagagu

SEQ ID NO: 2526011 - RNA, 19 nt, Artificial Sequence
  Description of Artificial Sequence: Synthetic oligonucleotide
  Antisense strand to SEQ ID NO: 2526010
acucuucaagcuagaugug

SEQ ID NO: 2526012 - RNA, 19 nt, Artificial Sequence
  Description of Artificial Sequence: Synthetic oligonucleotide
  Sense strand starting at position 1270 of SEQ ID NO: 1888307
uugaaaugguuacuggacu

SEQ ID NO: 2526013 - RNA, 19 nt, Artificial Sequence
  Description of Artificial Sequence: Synthetic oligonucleotide
  Antisense strand to SEQ ID NO: 2526012
aguccaguaaccauuucaa

SEQ ID NO: 2526014 - RNA, 19 nt, Artificial Sequence
  Description of Artificial Sequence: Synthetic oligonucleotide
  Sense strand starting at position 3334 of SEQ ID NO: 1888307
gagggaaacucggcugagu

SEQ ID NO: 2526015 - RNA, 19 nt, Artificial Sequence
  Description of Artificial Sequence: Synthetic oligonucleotide
  Antisense strand to SEQ ID NO: 2526014
acucagccgaguuucccuc

SEQ ID NO: 2526016 - RNA, 19 nt, Artificial Sequence
  Description of Artificial Sequence: Synthetic oligonucleotide
  Sense strand starting at position 3816 of SEQ ID NO: 1888307
ugucgaauuguuuacacau

SEQ ID NO: 2526017 - RNA, 19 nt, Artificial Sequence
  Description of Artificial Sequence: Synthetic oligonucleotide
  Antisense strand to SEQ ID NO: 2526016
auguguaaacaauucgaca

SEQ ID NO: 2526018 - RNA, 19 nt, Artificial Sequence
  Description of Artificial Sequence: Synthetic oligonucleotide
  Sense strand starting at position 3804 of SEQ ID NO: 1888307
auaucuuaucuaugucgaa

SEQ ID NO: 2526019 - RNA, 19 nt, Artificial Sequence
  Description of Artificial Sequence: Synthetic oligonucleotide
  Antisense strand to SEQ ID NO: 2526018
uucgacauagauaagauau

SEQ ID NO: 2526020 - RNA, 19 nt, Artificial Sequence
  Description of Artificial Sequence: Synthetic oligonucleotide
  Sense strand starting at position 3808 of SEQ ID NO: 1888307
cuuaucuaugucgaauugu

SEQ ID NO: 2526021 - RNA, 19 nt, Artificial Sequence
  Description of Artificial Sequence: Synthetic oligonucleotide
  Antisense strand to SEQ ID NO: 2526020
acaauucgacauagauaag

SEQ ID NO: 2526022 - RNA, 19 nt, Artificial Sequence
  Description of Artificial Sequence: Synthetic oligonucleotide
  Sense strand starting at position 3583 of SEQ ID NO: 1888307
uugauuguggcaugaucac

SEQ ID NO: 2526023 - RNA, 19 nt, Artificial Sequence
  Description of Artificial Sequence: Synthetic oligonucleotide
  Antisense strand to SEQ ID NO: 2526022
gugaucaugccacaaucaa

SEQ ID NO: 2526024 - RNA, 19 nt, Artificial Sequence
  Description of Artificial Sequence: Synthetic oligonucleotide
  Sense strand starting at position 3611 of SEQ ID NO: 1888307
ggaguucguggguacagua

SEQ ID NO: 2526025 - RNA, 19 nt, Artificial Sequence
  Description of Artificial Sequence: Synthetic oligonucleotide
  Antisense strand to SEQ ID NO: 2526024
uacuguacccacgaacucc

SEQ ID NO: 2526026 - RNA, 19 nt, Artificial Sequence
  Description of Artificial Sequence: Synthetic oligonucleotide
  Sense strand starting at position 3860 of SEQ ID NO: 1888307
gcgcccucugauuauguga

SEQ ID NO: 2526027 - RNA, 19 nt, Artificial Sequence
  Description of Artificial Sequence: Synthetic oligonucleotide
  Antisense strand to SEQ ID NO: 2526026
ucacauaaucagagggcgc

SEQ ID NO: 2526028 - RNA, 19 nt, Artificial Sequence
  Description of Artificial Sequence: Synthetic oligonucleotide
  Sense strand starting at position 3610 of SEQ ID NO: 1888307
gggaguucguggguacagu

SEQ ID NO: 2526029 - RNA, 19 nt, Artificial Sequence
  Description of Artificial Sequence: Synthetic oligonucleotide
  Antisense strand to SEQ ID NO: 2526028
acuguacccacgaacuccc

SEQ ID NO: 2526030 - RNA, 19 nt, Artificial Sequence
  Description of Artificial Sequence: Synthetic oligonucleotide
  Sense strand starting at position 3867 of SEQ ID NO: 1888307
cugauuaugugauagggac

SEQ ID NO: 2526031 - RNA, 19 nt, Artificial Sequence
  Description of Artificial Sequence: Synthetic oligonucleotide
  Antisense strand to SEQ ID NO: 2526030
gucccuaucacauaaucag

SEQ ID NO: 2526032 - RNA, 19 nt, Artificial Sequence
  Description of Artificial Sequence: Synthetic oligonucleotide
  Sense strand starting at position 1271 of SEQ ID NO: 1888307
ugaaaugguuacuggacuu

SEQ ID NO: 2526033 - RNA, 19 nt, Artificial Sequence
  Description of Artificial Sequence: Synthetic oligonucleotide
  Antisense strand to SEQ ID NO: 2526032
aaguccaguaaccauuuca

SEQ ID NO: 2526034 - RNA, 19 nt, Artificial Sequence
  Description of Artificial Sequence: Synthetic oligonucleotide
  Sense strand starting at position 3581 of SEQ ID NO: 1888307
gauugauuguggcaugauc

SEQ ID NO: 2526035 - RNA, 19 nt, Artificial Sequence
  Description of Artificial Sequence: Synthetic oligonucleotide
  Antisense strand to SEQ ID NO: 2526034
gaucaugccacaaucaauc

SEQ ID NO: 2526036 - RNA, 19 nt, Artificial Sequence
  Description of Artificial Sequence: Synthetic oligonucleotide
  Sense strand starting at position 3818 of SEQ ID NO: 1888307
ucgaauuguuuacacaucu

SEQ ID NO: 2526037 - RNA, 19 nt, Artificial Sequence
  Description of Artificial Sequence: Synthetic oligonucleotide
  Antisense strand to SEQ ID NO: 2526036
agauguguaaacaauucga

SEQ ID NO: 2526038 - RNA, 19 nt, Artificial Sequence
  Description of Artificial Sequence: Synthetic oligonucleotide
  Sense strand starting at position 3579 of SEQ ID NO: 1888307
gagauugauuguggcauga

SEQ ID NO: 2526039 - RNA, 19 nt, Artificial Sequence
  Description of Artificial Sequence: Synthetic oligonucleotide
  Antisense strand to SEQ ID NO: 2526038
ucaugccacaaucaaucuc

SEQ ID NO: 2526040 - RNA, 19 nt, Artificial Sequence
  Description of Artificial Sequence: Synthetic oligonucleotide
  Sense strand starting at position 3578 of SEQ ID NO: 1888307
ggagauugauuguggcaug

SEQ ID NO: 2526041 - RNA, 19 nt, Artificial Sequence
  Description of Artificial Sequence: Synthetic oligonucleotide
  Antisense strand to SEQ ID NO: 2526040
caugccacaaucaaucucc

SEQ ID NO: 2526042 - RNA, 19 nt, Artificial Sequence
  Description of Artificial Sequence: Synthetic oligonucleotide
  Sense strand starting at position 3862 of SEQ ID NO: 1888307
gcccucugauuaugugaua

SEQ ID NO: 2526043 - RNA, 19 nt, Artificial Sequence
  Description of Artificial Sequence: Synthetic oligonucleotide
  Antisense strand to SEQ ID NO: 2526042
uaucacauaaucagagggc

SEQ ID NO: 2526044 - RNA, 19 nt, Artificial Sequence
  Description of Artificial Sequence: Synthetic oligonucleotide
  Sense strand starting at position 1298 of SEQ ID NO: 1888308
gguugaagaucacugaauu

SEQ ID NO: 2526045 - RNA, 19 nt, Artificial Sequence
  Description of Artificial Sequence: Synthetic oligonucleotide
  Antisense strand to SEQ ID NO: 2526044
aauucagugaucuucaacc

SEQ ID NO: 2526046 - RNA, 19 nt, Artificial Sequence
  Description of Artificial Sequence: Synthetic oligonucleotide
  Sense strand starting at position 1299 of SEQ ID NO: 1888308
guugaagaucacugaauug

SEQ ID NO: 2526047 - RNA, 19 nt, Artificial Sequence
  Description of Artificial Sequence: Synthetic oligonucleotide
  Antisense strand to SEQ ID NO: 2526046
caauucagugaucuucaac

SEQ ID NO: 2526048 - RNA, 19 nt, Artificial Sequence
  Description of Artificial Sequence: Synthetic oligonucleotide
  Sense strand starting at position 1126 of SEQ ID NO: 1888308
aucuuugugcaagaaggau

SEQ ID NO: 2526049 - RNA, 19 nt, Artificial Sequence
  Description of Artificial Sequence: Synthetic oligonucleotide
  Antisense strand to SEQ ID NO: 2526048
auccuucuugcacaaagau

SEQ ID NO: 2526050 - RNA, 19 nt, Artificial Sequence
  Description of Artificial Sequence: Synthetic oligonucleotide
  Sense strand starting at position 2791 of SEQ ID NO: 1888308
ccuuaagacucaguaauga

SEQ ID NO: 2526051 - RNA, 19 nt, Artificial Sequence
  Description of Artificial Sequence: Synthetic oligonucleotide
  Antisense strand to SEQ ID NO: 2526050
ucauuacugagucuuaagg

SEQ ID NO: 2526052 - RNA, 19 nt, Artificial Sequence
  Description of Artificial Sequence: Synthetic oligonucleotide
  Sense strand starting at position 426 of SEQ ID NO: 1888308
gguauugacauguauccag

SEQ ID NO: 2526053 - RNA, 19 nt, Artificial Sequence
  Description of Artificial Sequence: Synthetic oligonucleotide
  Antisense strand to SEQ ID NO: 2526052
cuggauacaugucaauacc

SEQ ID NO: 2526054 - RNA, 19 nt, Artificial Sequence
  Description of Artificial Sequence: Synthetic oligonucleotide
  Sense strand starting at position 1064 of SEQ ID NO: 1888308
ccauguuccuaauuuguuu

SEQ ID NO: 2526055 - RNA, 19 nt, Artificial Sequence
  Description of Artificial Sequence: Synthetic oligonucleotide
  Antisense strand to SEQ ID NO: 2526054
aaacaaauuaggaacaugg

SEQ ID NO: 2526056 - RNA, 19 nt, Artificial Sequence
  Description of Artificial Sequence: Synthetic oligonucleotide
  Sense strand starting at position 3761 of SEQ ID NO: 1888308
ugagauucugcauaccuca

SEQ ID NO: 2526057 - RNA, 19 nt, Artificial Sequence
  Description of Artificial Sequence: Synthetic oligonucleotide
  Antisense strand to SEQ ID NO: 2526056
ugagguaugcagaaucuca

SEQ ID NO: 2526058 - RNA, 19 nt, Artificial Sequence
  Description of Artificial Sequence: Synthetic oligonucleotide
  Sense strand starting at position 411 of SEQ ID NO: 1888308
uguaauuuauaugucggua

SEQ ID NO: 2526059 - RNA, 19 nt, Artificial Sequence
  Description of Artificial Sequence: Synthetic oligonucleotide
  Antisense strand to SEQ ID NO: 2526058
uaccgacauauaaauuaca

SEQ ID NO: 2526060 - RNA, 19 nt, Artificial Sequence
  Description of Artificial Sequence: Synthetic oligonucleotide
  Sense strand starting at position 3373 of SEQ ID NO: 1888308
gcguguaauaugcaaauuu

SEQ ID NO: 2526061 - RNA, 19 nt, Artificial Sequence
  Description of Artificial Sequence: Synthetic oligonucleotide
  Antisense strand to SEQ ID NO: 2526060
aaauuugcauauuacacgc

SEQ ID NO: 2526062 - RNA, 19 nt, Artificial Sequence
  Description of Artificial Sequence: Synthetic oligonucleotide
  Sense strand starting at position 1915 of SEQ ID NO: 1888308
gccggagcauuuguagaca

SEQ ID NO: 2526063 - RNA, 19 nt, Artificial Sequence
  Description of Artificial Sequence: Synthetic oligonucleotide
  Antisense strand to SEQ ID NO: 2526062
ugucuacaaaugcuccggc

SEQ ID NO: 2526064 - RNA, 19 nt, Artificial Sequence
  Description of Artificial Sequence: Synthetic oligonucleotide
  Sense strand starting at position 410 of SEQ ID NO: 1888308
auguaauuuauaugucggu

SEQ ID NO: 2526065 - RNA, 19 nt, Artificial Sequence
  Description of Artificial Sequence: Synthetic oligonucleotide
  Antisense strand to SEQ ID NO: 2526064
accgacauauaaauuacau

SEQ ID NO: 2526066 - RNA, 19 nt, Artificial Sequence
  Description of Artificial Sequence: Synthetic oligonucleotide
  Sense strand starting at position 1314 of SEQ ID NO: 1888308
auugaaugauauguucuca

SEQ ID NO: 2526067 - RNA, 19 nt, Artificial Sequence
  Description of Artificial Sequence: Synthetic oligonucleotide
  Antisense strand to SEQ ID NO: 2526066
ugagaacauaucauucaau

SEQ ID NO: 2526068 - RNA, 19 nt, Artificial Sequence
  Description of Artificial Sequence: Synthetic oligonucleotide
  Sense strand starting at position 232 of SEQ ID NO: 1888308
aaauuacucuggucuugga

SEQ ID NO: 2526069 - RNA, 19 nt, Artificial Sequence
  Description of Artificial Sequence: Synthetic oligonucleotide
  Antisense strand to SEQ ID NO: 2526068
uccaagaccagaguaauuu

SEQ ID NO: 2526070 - RNA, 19 nt, Artificial Sequence
  Description of Artificial Sequence: Synthetic oligonucleotide
  Sense strand starting at position 612 of SEQ ID NO: 1888308
ugagguguccguagcugga

SEQ ID NO: 2526071 - RNA, 19 nt, Artificial Sequence
  Description of Artificial Sequence: Synthetic oligonucleotide
  Antisense strand to SEQ ID NO: 2526070
uccagcuacggacaccuca

SEQ ID NO: 2526072 - RNA, 19 nt, Artificial Sequence
  Description of Artificial Sequence: Synthetic oligonucleotide
  Sense strand starting at position 236 of SEQ ID NO: 1888308
uacucuggucuuggaaaca

SEQ ID NO: 2526073 - RNA, 19 nt, Artificial Sequence
  Description of Artificial Sequence: Synthetic oligonucleotide
  Antisense strand to SEQ ID NO: 2526072
uguuuccaagaccagagua

SEQ ID NO: 2526074 - RNA, 19 nt, Artificial Sequence
  Description of Artificial Sequence: Synthetic oligonucleotide
  Sense strand starting at position 3982 of SEQ ID NO: 1888308
augcaugcuuguccauuua

SEQ ID NO: 2526075 - RNA, 19 nt, Artificial Sequence
  Description of Artificial Sequence: Synthetic oligonucleotide
  Antisense strand to SEQ ID NO: 2526074
uaaauggacaagcaugcau

SEQ ID NO: 2526076 - RNA, 19 nt, Artificial Sequence
  Description of Artificial Sequence: Synthetic oligonucleotide
  Sense strand starting at position 2438 of SEQ ID NO: 1888308
ucaucaaacuuggugugaa

SEQ ID NO: 2526077 - RNA, 19 nt, Artificial Sequence
  Description of Artificial Sequence: Synthetic oligonucleotide
  Antisense strand to SEQ ID NO: 2526076
uucacaccaaguuugauga

SEQ ID NO: 2526078 - RNA, 19 nt, Artificial Sequence
  Description of Artificial Sequence: Synthetic oligonucleotide
  Sense strand starting at position 3711 of SEQ ID NO: 1888308
cuaaguagguacuuugaau

SEQ ID NO: 2526079 - RNA, 19 nt, Artificial Sequence
  Description of Artificial Sequence: Synthetic oligonucleotide
  Antisense strand to SEQ ID NO: 2526078
auucaaaguaccuacuuag

SEQ ID NO: 2526080 - RNA, 19 nt, Artificial Sequence
  Description of Artificial Sequence: Synthetic oligonucleotide
  Sense strand starting at position 489 of SEQ ID NO: 1888308
agagcagagcucuaagucu

SEQ ID NO: 2526081 - RNA, 19 nt, Artificial Sequence
  Description of Artificial Sequence: Synthetic oligonucleotide
  Antisense strand to SEQ ID NO: 2526080
agacuuagagcucugcucu

SEQ ID NO: 2526082 - RNA, 19 nt, Artificial Sequence
  Description of Artificial Sequence: Synthetic oligonucleotide
  Sense strand starting at position 208 of SEQ ID NO: 1888308
ugaagaagucauuguagua

SEQ ID NO: 2526083 - RNA, 19 nt, Artificial Sequence
  Description of Artificial Sequence: Synthetic oligonucleotide
  Antisense strand to SEQ ID NO: 2526082
uacuacaaugacuucuuca

SEQ ID NO: 2526084 - RNA, 19 nt, Artificial Sequence
  Description of Artificial Sequence: Synthetic oligonucleotide
  Sense strand starting at position 1123 of SEQ ID NO: 1888308
gucaucuuugugcaagaag

SEQ ID NO: 2526085 - RNA, 19 nt, Artificial Sequence
  Description of Artificial Sequence: Synthetic oligonucleotide
  Antisense strand to SEQ ID NO: 2526084
cuucuugcacaaagaugac

SEQ ID NO: 2526086 - RNA, 19 nt, Artificial Sequence
  Description of Artificial Sequence: Synthetic oligonucleotide
  Sense strand starting at position 338 of SEQ ID NO: 1888308
ccugaacgauucccugauu

SEQ ID NO: 2526087 - RNA, 19 nt, Artificial Sequence
  Description of Artificial Sequence: Synthetic oligonucleotide
  Antisense strand to SEQ ID NO: 2526086
aaucagggaaucguucagg

SEQ ID NO: 2526088 - RNA, 19 nt, Artificial Sequence
  Description of Artificial Sequence: Synthetic oligonucleotide
  Sense strand starting at position 2953 of SEQ ID NO: 1888308
uuagguuucugacucuuga

SEQ ID NO: 2526089 - RNA, 19 nt, Artificial Sequence
  Description of Artificial Sequence: Synthetic oligonucleotide
  Antisense strand to SEQ ID NO: 2526088
ucaagagucagaaaccuaa

SEQ ID NO: 2526090 - RNA, 19 nt, Artificial Sequence
  Description of Artificial Sequence: Synthetic oligonucleotide
  Sense strand starting at position 45 of SEQ ID NO: 1888308
aucucaucugccuggaaug

SEQ ID NO: 2526091 - RNA, 19 nt, Artificial Sequence
  Description of Artificial Sequence: Synthetic oligonucleotide
  Antisense strand to SEQ ID NO: 2526090
cauuccaggcagaugagau

SEQ ID NO: 2526092 - RNA, 19 nt, Artificial Sequence
  Description of Artificial Sequence: Synthetic oligonucleotide
  Sense strand starting at position 2772 of SEQ ID NO: 1888308
ugcuaaauacagugaggua

SEQ ID NO: 2526093 - RNA, 19 nt, Artificial Sequence
  Description of Artificial Sequence: Synthetic oligonucleotide
  Antisense strand to SEQ ID NO: 2526092
uaccucacuguauuuagca

SEQ ID NO: 2526094 - RNA, 19 nt, Artificial Sequence
  Description of Artificial Sequence: Synthetic oligonucleotide
  Sense strand starting at position 416 of SEQ ID NO: 1888308
uuuauaugucgguauugac

SEQ ID NO: 2526095 - RNA, 19 nt, Artificial Sequence
  Description of Artificial Sequence: Synthetic oligonucleotide
  Antisense strand to SEQ ID NO: 2526094
gucaauaccgacauauaaa

SEQ ID NO: 2526096 - RNA, 19 nt, Artificial Sequence
  Description of Artificial Sequence: Synthetic oligonucleotide
  Sense strand starting at position 3581 of SEQ ID NO: 1888308
acguuaccuccuggagaug

SEQ ID NO: 2526097 - RNA, 19 nt, Artificial Sequence
  Description of Artificial Sequence: Synthetic oligonucleotide
  Antisense strand to SEQ ID NO: 2526096
caucuccaggagguaacgu

SEQ ID NO: 2526098 - RNA, 19 nt, Artificial Sequence
  Description of Artificial Sequence: Synthetic oligonucleotide
  Sense strand starting at position 3010 of SEQ ID NO: 1888308
gcaguaaucagauguugga

SEQ ID NO: 2526099 - RNA, 19 nt, Artificial Sequence
  Description of Artificial Sequence: Synthetic oligonucleotide
  Antisense strand to SEQ ID NO: 2526098
uccaacaucugauuacugc

SEQ ID NO: 2526100 - RNA, 19 nt, Artificial Sequence
  Description of Artificial Sequence: Synthetic oligonucleotide
  Sense strand starting at position 3664 of SEQ ID NO: 1888308
uugcaaagguucuuccaga

SEQ ID NO: 2526101 - RNA, 19 nt, Artificial Sequence
  Description of Artificial Sequence: Synthetic oligonucleotide
  Antisense strand to SEQ ID NO: 2526100
ucuggaagaaccuuugcaa

SEQ ID NO: 2526102 - RNA, 19 nt, Artificial Sequence
  Description of Artificial Sequence: Synthetic oligonucleotide
  Sense strand starting at position 3079 of SEQ ID NO: 1888308
guuauauguggccaccuau

SEQ ID NO: 2526103 - RNA, 19 nt, Artificial Sequence
  Description of Artificial Sequence: Synthetic oligonucleotide
  Antisense strand to SEQ ID NO: 2526102
auagguggccacauauaac

SEQ ID NO: 2526104 - RNA, 19 nt, Artificial Sequence
  Description of Artificial Sequence: Synthetic oligonucleotide
  Sense strand starting at position 1025 of SEQ ID NO: 1888308
guucucugaagcgauucua

SEQ ID NO: 2526105 - RNA, 19 nt, Artificial Sequence
  Description of Artificial Sequence: Synthetic oligonucleotide
  Antisense strand to SEQ ID NO: 2526104
uagaaucgcuucagagaac

SEQ ID NO: 2526106 - RNA, 19 nt, Artificial Sequence
  Description of Artificial Sequence: Synthetic oligonucleotide
  Sense strand starting at position 2046 of SEQ ID NO: 1888308
ucagauuuccugugcgcau

SEQ ID NO: 2526107 - RNA, 19 nt, Artificial Sequence
  Description of Artificial Sequence: Synthetic oligonucleotide
  Antisense strand to SEQ ID NO: 2526106
augcgcacaggaaaucuga

SEQ ID NO: 2526108 - RNA, 19 nt, Artificial Sequence
  Description of Artificial Sequence: Synthetic oligonucleotide
  Sense strand starting at position 2437 of SEQ ID NO: 1888308
gucaucaaacuugguguga

SEQ ID NO: 2526109 - RNA, 19 nt, Artificial Sequence
  Description of Artificial Sequence: Synthetic oligonucleotide
  Antisense strand to SEQ ID NO: 2526108
ucacaccaaguuugaugac

SEQ ID NO: 2526110 - RNA, 19 nt, Artificial Sequence
  Description of Artificial Sequence: Synthetic oligonucleotide
  Sense strand starting at position 2998 of SEQ ID NO: 1888308
gcaacugaaucugcaguaa

SEQ ID NO: 2526111 - RNA, 19 nt, Artificial Sequence
  Description of Artificial Sequence: Synthetic oligonucleotide
  Antisense strand to SEQ ID NO: 2526110
uuacugcagauucaguugc

SEQ ID NO: 2526112 - RNA, 19 nt, Artificial Sequence
  Description of Artificial Sequence: Synthetic oligonucleotide
  Sense strand starting at position 3426 of SEQ ID NO: 1888308
augauugcauguguauuaa

SEQ ID NO: 2526113 - RNA, 19 nt, Artificial Sequence
  Description of Artificial Sequence: Synthetic oligonucleotide
  Antisense strand to SEQ ID NO: 2526112
uuaauacacaugcaaucau

SEQ ID NO: 2526114 - RNA, 19 nt, Artificial Sequence
  Description of Artificial Sequence: Synthetic oligonucleotide
  Sense strand starting at position 3303 of SEQ ID NO: 1888308
uagguaaaugcaugcugau

SEQ ID NO: 2526115 - RNA, 19 nt, Artificial Sequence
  Description of Artificial Sequence: Synthetic oligonucleotide
  Antisense strand to SEQ ID NO: 2526114
aucagcaugcauuuaccua

SEQ ID NO: 2526116 - RNA, 19 nt, Artificial Sequence
  Description of Artificial Sequence: Synthetic oligonucleotide
  Sense strand starting at position 3653 of SEQ ID NO: 1888308
caagguugucuuugcaaag

SEQ ID NO: 2526117 - RNA, 19 nt, Artificial Sequence
  Description of Artificial Sequence: Synthetic oligonucleotide
  Antisense strand to SEQ ID NO: 2526116
cuuugcaaagacaaccuug

SEQ ID NO: 2526118 - RNA, 19 nt, Artificial Sequence
  Description of Artificial Sequence: Synthetic oligonucleotide
  Sense strand starting at position 144 of SEQ ID NO: 1888308
auucguuucccuuauccuu

SEQ ID NO: 2526119 - RNA, 19 nt, Artificial Sequence
  Description of Artificial Sequence: Synthetic oligonucleotide
  Antisense strand to SEQ ID NO: 2526118
aaggauaagggaaacgaau

SEQ ID NO: 2526120 - RNA, 19 nt, Artificial Sequence
  Description of Artificial Sequence: Synthetic oligonucleotide
  Sense strand starting at position 358 of SEQ ID NO: 1888308
uuauacuuggagcgcaaua

SEQ ID NO: 2526121 - RNA, 19 nt, Artificial Sequence
  Description of Artificial Sequence: Synthetic oligonucleotide
  Antisense strand to SEQ ID NO: 2526120
uauugcgcuccaaguauaa

SEQ ID NO: 2526122 - RNA, 19 nt, Artificial Sequence
  Description of Artificial Sequence: Synthetic oligonucleotide
  Sense strand starting at position 3485 of SEQ ID NO: 1888308
aaagucaguucgucuuaag

SEQ ID NO: 2526123 - RNA, 19 nt, Artificial Sequence
  Description of Artificial Sequence: Synthetic oligonucleotide
  Antisense strand to SEQ ID NO: 2526122
cuuaagacgaacugacuuu

SEQ ID NO: 2526124 - RNA, 19 nt, Artificial Sequence
  Description of Artificial Sequence: Synthetic oligonucleotide
  Sense strand starting at position 3089 of SEQ ID NO: 1888309
gggaauaacuaguuuauua

SEQ ID NO: 2526125 - RNA, 19 nt, Artificial Sequence
  Description of Artificial Sequence: Synthetic oligonucleotide
  Antisense strand to SEQ ID NO: 2526124
uaauaaacuaguuauuccc

SEQ ID NO: 2526126 - RNA, 19 nt, Artificial Sequence
  Description of Artificial Sequence: Synthetic oligonucleotide
  Sense strand starting at position 3418 of SEQ ID NO: 1888309
caaagaaccuguucuagag

SEQ ID NO: 2526127 - RNA, 19 nt, Artificial Sequence
  Description of Artificial Sequence: Synthetic oligonucleotide
  Antisense strand to SEQ ID NO: 2526126
cucuagaacagguucuuug

SEQ ID NO: 2526128 - RNA, 19 nt, Artificial Sequence
  Description of Artificial Sequence: Synthetic oligonucleotide
  Sense strand starting at position 3422 of SEQ ID NO: 1888309
gaaccuguucuagaggagu

SEQ ID NO: 2526129 - RNA, 19 nt, Artificial Sequence
  Description of Artificial Sequence: Synthetic oligonucleotide
  Antisense strand to SEQ ID NO: 2526128
acuccucuagaacagguuc

SEQ ID NO: 2526130 - RNA, 19 nt, Artificial Sequence
  Description of Artificial Sequence: Synthetic oligonucleotide
  Sense strand starting at position 3115 of SEQ ID NO: 1888309
auuaguuugaacgaugacu

SEQ ID NO: 2526131 - RNA, 19 nt, Artificial Sequence
  Description of Artificial Sequence: Synthetic oligonucleotide
  Antisense strand to SEQ ID NO: 2526130
agucaucguucaaacuaau

SEQ ID NO: 2526132 - RNA, 19 nt, Artificial Sequence
  Description of Artificial Sequence: Synthetic oligonucleotide
  Sense strand starting at position 3885 of SEQ ID NO: 1888309
ggcugaaagaauggucaaa

SEQ ID NO: 2526133 - RNA, 19 nt, Artificial Sequence
  Description of Artificial Sequence: Synthetic oligonucleotide
  Antisense strand to SEQ ID NO: 2526132
uuugaccauucuuucagcc

SEQ ID NO: 2526134 - RNA, 19 nt, Artificial Sequence
  Description of Artificial Sequence: Synthetic oligonucleotide
  Sense strand starting at position 1803 of SEQ ID NO: 1888309
auaccuauaguuugaauag

SEQ ID NO: 2526135 - RNA, 19 nt, Artificial Sequence
  Description of Artificial Sequence: Synthetic oligonucleotide
  Antisense strand to SEQ ID NO: 2526134
cuauucaaacuauagguau

SEQ ID NO: 2526136 - RNA, 19 nt, Artificial Sequence
  Description of Artificial Sequence: Synthetic oligonucleotide
  Sense strand starting at position 3876 of SEQ ID NO: 1888309
uuacaaucuggcugaaaga

SEQ ID NO: 2526137 - RNA, 19 nt, Artificial Sequence
  Description of Artificial Sequence: Synthetic oligonucleotide
  Antisense strand to SEQ ID NO: 2526136
ucuuucagccagauuguaa

SEQ ID NO: 2526138 - RNA, 19 nt, Artificial Sequence
  Description of Artificial Sequence: Synthetic oligonucleotide
  Sense strand starting at position 3425 of SEQ ID NO: 1888309
ccuguucuagaggagugau

SEQ ID NO: 2526139 - RNA, 19 nt, Artificial Sequence
  Description of Artificial Sequence: Synthetic oligonucleotide
  Antisense strand to SEQ ID NO: 2526138
aucacuccucuagaacagg

SEQ ID NO: 2526140 - RNA, 19 nt, Artificial Sequence
  Description of Artificial Sequence: Synthetic oligonucleotide
  Sense strand starting at position 847 of SEQ ID NO: 1888309
gucuucuuccaggaaacuu

SEQ ID NO: 2526141 - RNA, 19 nt, Artificial Sequence
  Description of Artificial Sequence: Synthetic oligonucleotide
  Antisense strand to SEQ ID NO: 2526140
aaguuuccuggaagaagac

SEQ ID NO: 2526142 - RNA, 19 nt, Artificial Sequence
  Description of Artificial Sequence: Synthetic oligonucleotide
  Sense strand starting at position 1099 of SEQ ID NO: 1888309
uucucaaauugaguugaua

SEQ ID NO: 2526143 - RNA, 19 nt, Artificial Sequence
  Description of Artificial Sequence: Synthetic oligonucleotide
  Antisense strand to SEQ ID NO: 2526142
uaucaacucaauuugagaa

SEQ ID NO: 2526144 - RNA, 19 nt, Artificial Sequence
  Description of Artificial Sequence: Synthetic oligonucleotide
  Sense strand starting at position 1449 of SEQ ID NO: 1888309
guaugcguucaugugaguu

SEQ ID NO: 2526145 - RNA, 19 nt, Artificial Sequence
  Description of Artificial Sequence: Synthetic oligonucleotide
  Antisense strand to SEQ ID NO: 2526144
aacucacaugaacgcauac

SEQ ID NO: 2526146 - RNA, 19 nt, Artificial Sequence
  Description of Artificial Sequence: Synthetic oligonucleotide
  Sense strand starting at position 3875 of SEQ ID NO: 1888309
cuuacaaucuggcugaaag

SEQ ID NO: 2526147 - RNA, 19 nt, Artificial Sequence
  Description of Artificial Sequence: Synthetic oligonucleotide
  Antisense strand to SEQ ID NO: 2526146
cuuucagccagauuguaag

SEQ ID NO: 2526148 - RNA, 19 nt, Artificial Sequence
  Description of Artificial Sequence: Synthetic oligonucleotide
  Sense strand starting at position 1861 of SEQ ID NO: 1888309
agggaaaguuaaucguaau

SEQ ID NO: 2526149 - RNA, 19 nt, Artificial Sequence
  Description of Artificial Sequence: Synthetic oligonucleotide
  Antisense strand to SEQ ID NO: 2526148
auuacgauuaacuuucccu

SEQ ID NO: 2526150 - RNA, 19 nt, Artificial Sequence
  Description of Artificial Sequence: Synthetic oligonucleotide
  Sense strand starting at position 1663 of SEQ ID NO: 1888309
ugcuauuugugaccacugu

SEQ ID NO: 2526151 - RNA, 19 nt, Artificial Sequence
  Description of Artificial Sequence: Synthetic oligonucleotide
  Antisense strand to SEQ ID NO: 2526150
acaguggucacaaauagca

SEQ ID NO: 2526152 - RNA, 19 nt, Artificial Sequence
  Description of Artificial Sequence: Synthetic oligonucleotide
  Sense strand starting at position 1 of SEQ ID NO: 1888309
aagggaagauguuccuguu

SEQ ID NO: 2526153 - RNA, 19 nt, Artificial Sequence
  Description of Artificial Sequence: Synthetic oligonucleotide
  Antisense strand to SEQ ID NO: 2526152
aacaggaacaucuucccuu

SEQ ID NO: 2526154 - RNA, 19 nt, Artificial Sequence
  Description of Artificial Sequence: Synthetic oligonucleotide
  Sense strand starting at position 3424 of SEQ ID NO: 1888309
accuguucuagaggaguga

SEQ ID NO: 2526155 - RNA, 19 nt, Artificial Sequence
  Description of Artificial Sequence: Synthetic oligonucleotide
  Antisense strand to SEQ ID NO: 2526154
ucacuccucuagaacaggu

SEQ ID NO: 2526156 - RNA, 19 nt, Artificial Sequence
  Description of Artificial Sequence: Synthetic oligonucleotide
  Sense strand starting at position 3428 of SEQ ID NO: 1888309
guucuagaggagugauauu

SEQ ID NO: 2526157 - RNA, 19 nt, Artificial Sequence
  Description of Artificial Sequence: Synthetic oligonucleotide
  Antisense strand to SEQ ID NO: 2526156
aauaucacuccucuagaac

SEQ ID NO: 2526158 - RNA, 19 nt, Artificial Sequence
  Description of Artificial Sequence: Synthetic oligonucleotide
  Sense strand starting at position 172 of SEQ ID NO: 1888309
guccucuuaguauacacau

SEQ ID NO: 2526159 - RNA, 19 nt, Artificial Sequence
  Description of Artificial Sequence: Synthetic oligonucleotide
  Antisense strand to SEQ ID NO: 2526158
auguguauacuaagaggac

SEQ ID NO: 2526160 - RNA, 19 nt, Artificial Sequence
  Description of Artificial Sequence: Synthetic oligonucleotide
  Sense strand starting at position 520 of SEQ ID NO: 1888309
caaggaugucacuguuaac

SEQ ID NO: 2526161 - RNA, 19 nt, Artificial Sequence
  Description of Artificial Sequence: Synthetic oligonucleotide
  Antisense strand to SEQ ID NO: 2526160
guuaacagugacauccuug

SEQ ID NO: 2526162 - RNA, 19 nt, Artificial Sequence
  Description of Artificial Sequence: Synthetic oligonucleotide
  Sense strand starting at position 2758 of SEQ ID NO: 1888309
gaaagaaacugggaauaau

SEQ ID NO: 2526163 - RNA, 19 nt, Artificial Sequence
  Description of Artificial Sequence: Synthetic oligonucleotide
  Antisense strand to SEQ ID NO: 2526162
auuauucccaguuucuuuc

SEQ ID NO: 2526164 - RNA, 19 nt, Artificial Sequence
  Description of Artificial Sequence: Synthetic oligonucleotide
  Sense strand starting at position 1557 of SEQ ID NO: 1888309
agauuagagagcuguucca

SEQ ID NO: 2526165 - RNA, 19 nt, Artificial Sequence
  Description of Artificial Sequence: Synthetic oligonucleotide
  Antisense strand to SEQ ID NO: 2526164
uggaacagcucucuaaucu

SEQ ID NO: 2526166 - RNA, 19 nt, Artificial Sequence
  Description of Artificial Sequence: Synthetic oligonucleotide
  Sense strand starting at position 2379 of SEQ ID NO: 1888309
aggcaauaagcaugugaag

SEQ ID NO: 2526167 - RNA, 19 nt, Artificial Sequence
  Description of Artificial Sequence: Synthetic oligonucleotide
  Antisense strand to SEQ ID NO: 2526166
cuucacaugcuuauugccu

SEQ ID NO: 2526168 - RNA, 19 nt, Artificial Sequence
  Description of Artificial Sequence: Synthetic oligonucleotide
  Sense strand starting at position 1862 of SEQ ID NO: 1888309
gggaaaguuaaucguaauu

SEQ ID NO: 2526169 - RNA, 19 nt, Artificial Sequence
  Description of Artificial Sequence: Synthetic oligonucleotide
  Antisense strand to SEQ ID NO: 2526168
aauuacgauuaacuuuccc

SEQ ID NO: 2526170 - RNA, 19 nt, Artificial Sequence
  Description of Artificial Sequence: Synthetic oligonucleotide
  Sense strand starting at position 3306 of SEQ ID NO: 1888309
ccaagauucuggcuaccac

SEQ ID NO: 2526171 - RNA, 19 nt, Artificial Sequence
  Description of Artificial Sequence: Synthetic oligonucleotide
  Antisense strand to SEQ ID NO: 2526170
gugguagccagaaucuugg

SEQ ID NO: 2526172 - RNA, 19 nt, Artificial Sequence
  Description of Artificial Sequence: Synthetic oligonucleotide
  Sense strand starting at position 161 of SEQ ID NO: 1888309
gggacagaguaguccucuu

SEQ ID NO: 2526173 - RNA, 19 nt, Artificial Sequence
  Description of Artificial Sequence: Synthetic oligonucleotide
  Antisense strand to SEQ ID NO: 2526172
aagaggacuacucuguccc

SEQ ID NO: 2526174 - RNA, 19 nt, Artificial Sequence
  Description of Artificial Sequence: Synthetic oligonucleotide
  Sense strand starting at position 1951 of SEQ ID NO: 1888309
aaagaauccgagugagcug

SEQ ID NO: 2526175 - RNA, 19 nt, Artificial Sequence
  Description of Artificial Sequence: Synthetic oligonucleotide
  Antisense strand to SEQ ID NO: 2526174
cagcucacucggauucuuu

SEQ ID NO: 2526176 - RNA, 19 nt, Artificial Sequence
  Description of Artificial Sequence: Synthetic oligonucleotide
  Sense strand starting at position 2305 of SEQ ID NO: 1888309
cugucugauggaugagcaa

SEQ ID NO: 2526177 - RNA, 19 nt, Artificial Sequence
  Description of Artificial Sequence: Synthetic oligonucleotide
  Antisense strand to SEQ ID NO: 2526176
uugcucauccaucagacag

SEQ ID NO: 2526178 - RNA, 19 nt, Artificial Sequence
  Description of Artificial Sequence: Synthetic oligonucleotide
  Sense strand starting at position 1120 of SEQ ID NO: 1888309
aguuguuuccuccacuaac

SEQ ID NO: 2526179 - RNA, 19 nt, Artificial Sequence
  Description of Artificial Sequence: Synthetic oligonucleotide
  Antisense strand to SEQ ID NO: 2526178
guuaguggaggaaacaacu

SEQ ID NO: 2526180 - RNA, 19 nt, Artificial Sequence
  Description of Artificial Sequence: Synthetic oligonucleotide
  Sense strand starting at position 676 of SEQ ID NO: 1888309
caaucacagcgguacuauu

SEQ ID NO: 2526181 - RNA, 19 nt, Artificial Sequence
  Description of Artificial Sequence: Synthetic oligonucleotide
  Antisense strand to SEQ ID NO: 2526180
aauaguaccgcugugauug

SEQ ID NO: 2526182 - RNA, 19 nt, Artificial Sequence
  Description of Artificial Sequence: Synthetic oligonucleotide
  Sense strand starting at position 846 of SEQ ID NO: 1888309
ugucuucuuccaggaaacu

SEQ ID NO: 2526183 - RNA, 19 nt, Artificial Sequence
  Description of Artificial Sequence: Synthetic oligonucleotide
  Antisense strand to SEQ ID NO: 2526182
aguuuccuggaagaagaca

SEQ ID NO: 2526184 - RNA, 19 nt, Artificial Sequence
  Description of Artificial Sequence: Synthetic oligonucleotide
  Sense strand starting at position 2381 of SEQ ID NO: 1888309
gcaauaagcaugugaagau

SEQ ID NO: 2526185 - RNA, 19 nt, Artificial Sequence
  Description of Artificial Sequence: Synthetic oligonucleotide
  Antisense strand to SEQ ID NO: 2526184
aucuucacaugcuuauugc

SEQ ID NO: 2526186 - RNA, 19 nt, Artificial Sequence
  Description of Artificial Sequence: Synthetic oligonucleotide
  Sense strand starting at position 1239 of SEQ ID NO: 1888309
uauagcaugcuaugggaau

SEQ ID NO: 2526187 - RNA, 19 nt, Artificial Sequence
  Description of Artificial Sequence: Synthetic oligonucleotide
  Antisense strand to SEQ ID NO: 2526186
auucccauagcaugcuaua

SEQ ID NO: 2526188 - RNA, 19 nt, Artificial Sequence
  Description of Artificial Sequence: Synthetic oligonucleotide
  Sense strand starting at position 3117 of SEQ ID NO: 1888309
uaguuugaacgaugacuuu

SEQ ID NO: 2526189 - RNA, 19 nt, Artificial Sequence
  Description of Artificial Sequence: Synthetic oligonucleotide
  Antisense strand to SEQ ID NO: 2526188
aaagucaucguucaaacua

SEQ ID NO: 2526190 - RNA, 19 nt, Artificial Sequence
  Description of Artificial Sequence: Synthetic oligonucleotide
  Sense strand starting at position 1867 of SEQ ID NO: 1888309
aguuaaucguaauuacaug

SEQ ID NO: 2526191 - RNA, 19 nt, Artificial Sequence
  Description of Artificial Sequence: Synthetic oligonucleotide
  Antisense strand to SEQ ID NO: 2526190
cauguaauuacgauuaacu

SEQ ID NO: 2526192 - RNA, 19 nt, Artificial Sequence
  Description of Artificial Sequence: Synthetic oligonucleotide
  Sense strand starting at position 1510 of SEQ ID NO: 1888309
ugccuuagccuugaaacuu

SEQ ID NO: 2526193 - RNA, 19 nt, Artificial Sequence
  Description of Artificial Sequence: Synthetic oligonucleotide
  Antisense strand to SEQ ID NO: 2526192
aaguuucaaggcuaaggca

SEQ ID NO: 2526194 - RNA, 19 nt, Artificial Sequence
  Description of Artificial Sequence: Synthetic oligonucleotide
  Sense strand starting at position 1266 of SEQ ID NO: 1888309
ugucuauuagacuguaacu

SEQ ID NO: 2526195 - RNA, 19 nt, Artificial Sequence
  Description of Artificial Sequence: Synthetic oligonucleotide
  Antisense strand to SEQ ID NO: 2526194
aguuacagucuaauagaca

SEQ ID NO: 2526196 - RNA, 19 nt, Artificial Sequence
  Description of Artificial Sequence: Synthetic oligonucleotide
  Sense strand starting at position 2691 of SEQ ID NO: 1888309
gcaacuguccacugacuga

SEQ ID NO: 2526197 - RNA, 19 nt, Artificial Sequence
  Description of Artificial Sequence: Synthetic oligonucleotide
  Antisense strand to SEQ ID NO: 2526196
ucagucaguggacaguugc

SEQ ID NO: 2526198 - RNA, 19 nt, Artificial Sequence
  Description of Artificial Sequence: Synthetic oligonucleotide
  Sense strand starting at position 1681 of SEQ ID NO: 1888309
uugccaaccugcucaaaga

SEQ ID NO: 2526199 - RNA, 19 nt, Artificial Sequence
  Description of Artificial Sequence: Synthetic oligonucleotide
  Antisense strand to SEQ ID NO: 2526198
ucuuugagcagguuggcaa

SEQ ID NO: 2526200 - RNA, 19 nt, Artificial Sequence
  Description of Artificial Sequence: Synthetic oligonucleotide
  Sense strand starting at position 1161 of SEQ ID NO: 1888309
cccuaaggcuuucuugauu

SEQ ID NO: 2526201 - RNA, 19 nt, Artificial Sequence
  Description of Artificial Sequence: Synthetic oligonucleotide
  Antisense strand to SEQ ID NO: 2526200
aaucaagaaagccuuaggg

SEQ ID NO: 2526202 - RNA, 19 nt, Artificial Sequence
  Description of Artificial Sequence: Synthetic oligonucleotide
  Sense strand starting at position 3948 of SEQ ID NO: 1888309
cgauaaauauguccauugu

SEQ ID NO: 2526203 - RNA, 19 nt, Artificial Sequence
  Description of Artificial Sequence: Synthetic oligonucleotide
  Antisense strand to SEQ ID NO: 2526202
acaauggacauauuuaucg

SEQ ID NO: 2526204 - RNA, 19 nt, Artificial Sequence
  Description of Artificial Sequence: Synthetic oligonucleotide
  Sense strand starting at position 2388 of SEQ ID NO: 1888310
ggugguucccauaguguag

SEQ ID NO: 2526205 - RNA, 19 nt, Artificial Sequence
  Description of Artificial Sequence: Synthetic oligonucleotide
  Antisense strand to SEQ ID NO: 2526204
cuacacuaugggaaccacc

SEQ ID NO: 2526206 - RNA, 19 nt, Artificial Sequence
  Description of Artificial Sequence: Synthetic oligonucleotide
  Sense strand starting at position 3921 of SEQ ID NO: 1888310
cucauagguccucagacua

SEQ ID NO: 2526207 - RNA, 19 nt, Artificial Sequence
  Description of Artificial Sequence: Synthetic oligonucleotide
  Antisense strand to SEQ ID NO: 2526206
uagucugaggaccuaugag

SEQ ID NO: 2526208 - RNA, 19 nt, Artificial Sequence
  Description of Artificial Sequence: Synthetic oligonucleotide
  Sense strand starting at position 3131 of SEQ ID NO: 1888310
guaauuguucgaguugcuc

SEQ ID NO: 2526209 - RNA, 19 nt, Artificial Sequence
  Description of Artificial Sequence: Synthetic oligonucleotide
  Antisense strand to SEQ ID NO: 2526208
gagcaacucgaacaauuac

SEQ ID NO: 2526210 - RNA, 19 nt, Artificial Sequence
  Description of Artificial Sequence: Synthetic oligonucleotide
  Sense strand starting at position 3322 of SEQ ID NO: 1888310
ccagaagagcgaggaauua

SEQ ID NO: 2526211 - RNA, 19 nt, Artificial Sequence
  Description of Artificial Sequence: Synthetic oligonucleotide
  Antisense strand to SEQ ID NO: 2526210
uaauuccucgcucuucugg

SEQ ID NO: 2526212 - RNA, 19 nt, Artificial Sequence
  Description of Artificial Sequence: Synthetic oligonucleotide
  Sense strand starting at position 1898 of SEQ ID NO: 1888310
aacgcuaggucacucauuu

SEQ ID NO: 2526213 - RNA, 19 nt, Artificial Sequence
  Description of Artificial Sequence: Synthetic oligonucleotide
  Antisense strand to SEQ ID NO: 2526212
aaaugagugaccuagcguu

SEQ ID NO: 2526214 - RNA, 19 nt, Artificial Sequence
  Description of Artificial Sequence: Synthetic oligonucleotide
  Sense strand starting at position 168 of SEQ ID NO: 1888310
gggauccuauauuccugau

SEQ ID NO: 2526215 - RNA, 19 nt, Artificial Sequence
  Description of Artificial Sequence: Synthetic oligonucleotide
  Antisense strand to SEQ ID NO: 2526214
aucaggaauauaggauccc

SEQ ID NO: 2526216 - RNA, 19 nt, Artificial Sequence
  Description of Artificial Sequence: Synthetic oligonucleotide
  Sense strand starting at position 3738 of SEQ ID NO: 1888310
gacagcuaucacuagaguu

SEQ ID NO: 2526217 - RNA, 19 nt, Artificial Sequence
  Description of Artificial Sequence: Synthetic oligonucleotide
  Antisense strand to SEQ ID NO: 2526216
aacucuagugauagcuguc

SEQ ID NO: 2526218 - RNA, 19 nt, Artificial Sequence
  Description of Artificial Sequence: Synthetic oligonucleotide
  Sense strand starting at position 2541 of SEQ ID NO: 1888310
gggauacuaaugcaugcua

SEQ ID NO: 2526219 - RNA, 19 nt, Artificial Sequence
  Description of Artificial Sequence: Synthetic oligonucleotide
  Antisense strand to SEQ ID NO: 2526218
uagcaugcauuaguauccc

SEQ ID NO: 2526220 - RNA, 19 nt, Artificial Sequence
  Description of Artificial Sequence: Synthetic oligonucleotide
  Sense strand starting at position 2692 of SEQ ID NO: 1888310
aucaaauggaucuggguuu

SEQ ID NO: 2526221 - RNA, 19 nt, Artificial Sequence
  Description of Artificial Sequence: Synthetic oligonucleotide
  Antisense strand to SEQ ID NO: 2526220
aaacccagauccauuugau

SEQ ID NO: 2526222 - RNA, 19 nt, Artificial Sequence
  Description of Artificial Sequence: Synthetic oligonucleotide
  Sense strand starting at position 2230 of SEQ ID NO: 1888310
cugugauggacauagucuu

SEQ ID NO: 2526223 - RNA, 19 nt, Artificial Sequence
  Description of Artificial Sequence: Synthetic oligonucleotide
  Antisense strand to SEQ ID NO: 2526222
aagacuauguccaucacag

SEQ ID NO: 2526224 - RNA, 19 nt, Artificial Sequence
  Description of Artificial Sequence: Synthetic oligonucleotide
  Sense strand starting at position 3746 of SEQ ID NO: 1888310
ucacuagaguuagugaaua

SEQ ID NO: 2526225 - RNA, 19 nt, Artificial Sequence
  Description of Artificial Sequence: Synthetic oligonucleotide
  Antisense strand to SEQ ID NO: 2526224
uauucacuaacucuaguga

SEQ ID NO: 2526226 - RNA, 19 nt, Artificial Sequence
  Description of Artificial Sequence: Synthetic oligonucleotide
  Sense strand starting at position 2225 of SEQ ID NO: 1888310
cccaccugugauggacaua

SEQ ID NO: 2526227 - RNA, 19 nt, Artificial Sequence
  Description of Artificial Sequence: Synthetic oligonucleotide
  Antisense strand to SEQ ID NO: 2526226
uauguccaucacagguggg

SEQ ID NO: 2526228 - RNA, 19 nt, Artificial Sequence
  Description of Artificial Sequence: Synthetic oligonucleotide
  Sense strand starting at position 2305 of SEQ ID NO: 1888310
agugacuuugcagauaucu

SEQ ID NO: 2526229 - RNA, 19 nt, Artificial Sequence
  Description of Artificial Sequence: Synthetic oligonucleotide
  Antisense strand to SEQ ID NO: 2526228
agauaucugcaaagucacu

SEQ ID NO: 2526230 - RNA, 19 nt, Artificial Sequence
  Description of Artificial Sequence: Synthetic oligonucleotide
  Sense strand starting at position 191 of SEQ ID NO: 1888310
uacuuuccaggugaguuau

SEQ ID NO: 2526231 - RNA, 19 nt, Artificial Sequence
  Description of Artificial Sequence: Synthetic oligonucleotide
  Antisense strand to SEQ ID NO: 2526230
auaacucaccuggaaagua

SEQ ID NO: 2526232 - RNA, 19 nt, Artificial Sequence
  Description of Artificial Sequence: Synthetic oligonucleotide
  Sense strand starting at position 3023 of SEQ ID NO: 1888310
ugccauaaaucagcaggaa

SEQ ID NO: 2526233 - RNA, 19 nt, Artificial Sequence
  Description of Artificial Sequence: Synthetic oligonucleotide
  Antisense strand to SEQ ID NO: 2526232
uuccugcugauuuauggca

SEQ ID NO: 2526234 - RNA, 19 nt, Artificial Sequence
  Description of Artificial Sequence: Synthetic oligonucleotide
  Sense strand starting at position 2273 of SEQ ID NO: 1888310
agucaagacuuagucucaa

SEQ ID NO: 2526235 - RNA, 19 nt, Artificial Sequence
  Description of Artificial Sequence: Synthetic oligonucleotide
  Antisense strand to SEQ ID NO: 2526234
uugagacuaagucuugacu

SEQ ID NO: 2526236 - RNA, 19 nt, Artificial Sequence
  Description of Artificial Sequence: Synthetic oligonucleotide
  Sense strand starting at position 236 of SEQ ID NO: 1888310
uggaucucuuauguaacca

SEQ ID NO: 2526237 - RNA, 19 nt, Artificial Sequence
  Description of Artificial Sequence: Synthetic oligonucleotide
  Antisense strand to SEQ ID NO: 2526236
ugguuacauaagagaucca

SEQ ID NO: 2526238 - RNA, 19 nt, Artificial Sequence
  Description of Artificial Sequence: Synthetic oligonucleotide
  Sense strand starting at position 3867 of SEQ ID NO: 1888310
acugcuuggcaucaacaua

SEQ ID NO: 2526239 - RNA, 19 nt, Artificial Sequence
  Description of Artificial Sequence: Synthetic oligonucleotide
  Antisense strand to SEQ ID NO: 2526238
uauguugaugccaagcagu

SEQ ID NO: 2526240 - RNA, 19 nt, Artificial Sequence
  Description of Artificial Sequence: Synthetic oligonucleotide
  Sense strand starting at position 3801 of SEQ ID NO: 1888310
gccggugagaguuaacaaa

SEQ ID NO: 2526241 - RNA, 19 nt, Artificial Sequence
  Description of Artificial Sequence: Synthetic oligonucleotide
  Antisense strand to SEQ ID NO: 2526240
uuuguuaacucucaccggc

SEQ ID NO: 2526242 - RNA, 19 nt, Artificial Sequence
  Description of Artificial Sequence: Synthetic oligonucleotide
  Sense strand starting at position 3502 of SEQ ID NO: 1888310
cggagacagugguuaaaug

SEQ ID NO: 2526243 - RNA, 19 nt, Artificial Sequence
  Description of Artificial Sequence: Synthetic oligonucleotide
  Antisense strand to SEQ ID NO: 2526242
cauuuaaccacugucuccg

SEQ ID NO: 2526244 - RNA, 19 nt, Artificial Sequence
  Description of Artificial Sequence: Synthetic oligonucleotide
  Sense strand starting at position 2759 of SEQ ID NO: 1888310
ucuucucaucuguaaagua

SEQ ID NO: 2526245 - RNA, 19 nt, Artificial Sequence
  Description of Artificial Sequence: Synthetic oligonucleotide
  Antisense strand to SEQ ID NO: 2526244
uacuuuacagaugagaaga

SEQ ID NO: 2526246 - RNA, 19 nt, Artificial Sequence
  Description of Artificial Sequence: Synthetic oligonucleotide
  Sense strand starting at position 1250 of SEQ ID NO: 1888310
cgucccauucucuagacaa

SEQ ID NO: 2526247 - RNA, 19 nt, Artificial Sequence
  Description of Artificial Sequence: Synthetic oligonucleotide
  Antisense strand to SEQ ID NO: 2526246
uugucuagagaaugggacg

SEQ ID NO: 2526248 - RNA, 19 nt, Artificial Sequence
  Description of Artificial Sequence: Synthetic oligonucleotide
  Sense strand starting at position 1914 of SEQ ID NO: 1888310
uuuacaacggacuguaaua

SEQ ID NO: 2526249 - RNA, 19 nt, Artificial Sequence
  Description of Artificial Sequence: Synthetic oligonucleotide
  Antisense strand to SEQ ID NO: 2526248
uauuacaguccguuguaaa

SEQ ID NO: 2526250 - RNA, 19 nt, Artificial Sequence
  Description of Artificial Sequence: Synthetic oligonucleotide
  Sense strand starting at position 3118 of SEQ ID NO: 1888310
aacugagagcauuguaauu

SEQ ID NO: 2526251 - RNA, 19 nt, Artificial Sequence
  Description of Artificial Sequence: Synthetic oligonucleotide
  Antisense strand to SEQ ID NO: 2526250
aauuacaaugcucucaguu

SEQ ID NO: 2526252 - RNA, 19 nt, Artificial Sequence
  Description of Artificial Sequence: Synthetic oligonucleotide
  Sense strand starting at position 202 of SEQ ID NO: 1888310
ugaguuaucuccucuggag

SEQ ID NO: 2526253 - RNA, 19 nt, Artificial Sequence
  Description of Artificial Sequence: Synthetic oligonucleotide
  Antisense strand to SEQ ID NO: 2526252
cuccagaggagauaacuca

SEQ ID NO: 2526254 - RNA, 19 nt, Artificial Sequence
  Description of Artificial Sequence: Synthetic oligonucleotide
  Sense strand starting at position 2302 of SEQ ID NO: 1888310
uuaagugacuuugcagaua

SEQ ID NO: 2526255 - RNA, 19 nt, Artificial Sequence
  Description of Artificial Sequence: Synthetic oligonucleotide
  Antisense strand to SEQ ID NO: 2526254
uaucugcaaagucacuuaa

SEQ ID NO: 2526256 - RNA, 19 nt, Artificial Sequence
  Description of Artificial Sequence: Synthetic oligonucleotide
  Sense strand starting at position 2170 of SEQ ID NO: 1888310
ugaauagcaucagcuacau

SEQ ID NO: 2526257 - RNA, 19 nt, Artificial Sequence
  Description of Artificial Sequence: Synthetic oligonucleotide
  Antisense strand to SEQ ID NO: 2526256
auguagcugaugcuauuca

SEQ ID NO: 2526258 - RNA, 19 nt, Artificial Sequence
  Description of Artificial Sequence: Synthetic oligonucleotide
  Sense strand starting at position 1805 of SEQ ID NO: 1888310
cggagaucauguucucaug

SEQ ID NO: 2526259 - RNA, 19 nt, Artificial Sequence
  Description of Artificial Sequence: Synthetic oligonucleotide
  Antisense strand to SEQ ID NO: 2526258
caugagaacaugaucuccg

SEQ ID NO: 2526260 - RNA, 19 nt, Artificial Sequence
  Description of Artificial Sequence: Synthetic oligonucleotide
  Sense strand starting at position 1761 of SEQ ID NO: 1888310
guuggaguauugcugagga

SEQ ID NO: 2526261 - RNA, 19 nt, Artificial Sequence
  Description of Artificial Sequence: Synthetic oligonucleotide
  Antisense strand to SEQ ID NO: 2526260
uccucagcaauacuccaac

SEQ ID NO: 2526262 - RNA, 19 nt, Artificial Sequence
  Description of Artificial Sequence: Synthetic oligonucleotide
  Sense strand starting at position 110 of SEQ ID NO: 1888310
guuucuucucucugagaua

SEQ ID NO: 2526263 - RNA, 19 nt, Artificial Sequence
  Description of Artificial Sequence: Synthetic oligonucleotide
  Antisense strand to SEQ ID NO: 2526262
uaucucagagagaagaaac

SEQ ID NO: 2526264 - RNA, 19 nt, Artificial Sequence
  Description of Artificial Sequence: Synthetic oligonucleotide
  Sense strand starting at position 1390 of SEQ ID NO: 1888310
auagcauauggauguguua

SEQ ID NO: 2526265 - RNA, 19 nt, Artificial Sequence
  Description of Artificial Sequence: Synthetic oligonucleotide
  Antisense strand to SEQ ID NO: 2526264
uaacacauccauaugcuau

SEQ ID NO: 2526266 - RNA, 19 nt, Artificial Sequence
  Description of Artificial Sequence: Synthetic oligonucleotide
  Sense strand starting at position 1392 of SEQ ID NO: 1888310
agcauauggauguguuaac

SEQ ID NO: 2526267 - RNA, 19 nt, Artificial Sequence
  Description of Artificial Sequence: Synthetic oligonucleotide
  Antisense strand to SEQ ID NO: 2526266
guuaacacauccauaugcu

SEQ ID NO: 2526268 - RNA, 19 nt, Artificial Sequence
  Description of Artificial Sequence: Synthetic oligonucleotide
  Sense strand starting at position 2102 of SEQ ID NO: 1888310
uugcuugcuguccaaggaa

SEQ ID NO: 2526269 - RNA, 19 nt, Artificial Sequence
  Description of Artificial Sequence: Synthetic oligonucleotide
  Antisense strand to SEQ ID NO: 2526268
uuccuuggacagcaagcaa

SEQ ID NO: 2526270 - RNA, 19 nt, Artificial Sequence
  Description of Artificial Sequence: Synthetic oligonucleotide
  Sense strand starting at position 2298 of SEQ ID NO: 1888310
ucuauuaagugacuuugca

SEQ ID NO: 2526271 - RNA, 19 nt, Artificial Sequence
  Description of Artificial Sequence: Synthetic oligonucleotide
  Antisense strand to SEQ ID NO: 2526270
ugcaaagucacuuaauaga

SEQ ID NO: 2526272 - RNA, 19 nt, Artificial Sequence
  Description of Artificial Sequence: Synthetic oligonucleotide
  Sense strand starting at position 20 of SEQ ID NO: 1888310
ucuaaucagcaguguaaac

SEQ ID NO: 2526273 - RNA, 19 nt, Artificial Sequence
  Description of Artificial Sequence: Synthetic oligonucleotide
  Antisense strand to SEQ ID NO: 2526272
guuuacacugcugauuaga

SEQ ID NO: 2526274 - RNA, 19 nt, Artificial Sequence
  Description of Artificial Sequence: Synthetic oligonucleotide
  Sense strand starting at position 109 of SEQ ID NO: 1888310
uguuucuucucucugagau

SEQ ID NO: 2526275 - RNA, 19 nt, Artificial Sequence
  Description of Artificial Sequence: Synthetic oligonucleotide
  Antisense strand to SEQ ID NO: 2526274
aucucagagagaagaaaca

SEQ ID NO: 2526276 - RNA, 19 nt, Artificial Sequence
  Description of Artificial Sequence: Synthetic oligonucleotide
  Sense strand starting at position 3920 of SEQ ID NO: 1888310
gcucauagguccucagacu

SEQ ID NO: 2526277 - RNA, 19 nt, Artificial Sequence
  Description of Artificial Sequence: Synthetic oligonucleotide
  Antisense strand to SEQ ID NO: 2526276
agucugaggaccuaugagc

SEQ ID NO: 2526278 - RNA, 19 nt, Artificial Sequence
  Description of Artificial Sequence: Synthetic oligonucleotide
  Sense strand starting at position 3500 of SEQ ID NO: 1888310
ugcggagacagugguuaaa

SEQ ID NO: 2526279 - RNA, 19 nt, Artificial Sequence
  Description of Artificial Sequence: Synthetic oligonucleotide
  Antisense strand to SEQ ID NO: 2526278
uuuaaccacugucuccgca

SEQ ID NO: 2526280 - RNA, 19 nt, Artificial Sequence
  Description of Artificial Sequence: Synthetic oligonucleotide
  Sense strand starting at position 3404 of SEQ ID NO: 1888310
cuuaguugucaguagguug

SEQ ID NO: 2526281 - RNA, 19 nt, Artificial Sequence
  Description of Artificial Sequence: Synthetic oligonucleotide
  Antisense strand to SEQ ID NO: 2526280
caaccuacugacaacuaag

SEQ ID NO: 2526282 - RNA, 19 nt, Artificial Sequence
  Description of Artificial Sequence: Synthetic oligonucleotide
  Sense strand starting at position 3520 of SEQ ID NO: 1888310
gcuaaauugucagcccaaa

SEQ ID NO: 2526283 - RNA, 19 nt, Artificial Sequence
  Description of Artificial Sequence: Synthetic oligonucleotide
  Antisense strand to SEQ ID NO: 2526282
uuugggcugacaauuuagc

SEQ ID NO: 2526284 - RNA, 19 nt, Artificial Sequence
  Description of Artificial Sequence: Synthetic oligonucleotide
  Sense strand starting at position 1054 of SEQ ID NO: 1888311
gugucaucauuucugaucu

SEQ ID NO: 2526285 - RNA, 19 nt, Artificial Sequence
  Description of Artificial Sequence: Synthetic oligonucleotide
  Antisense strand to SEQ ID NO: 2526284
agaucagaaaugaugacac

SEQ ID NO: 2526286 - RNA, 19 nt, Artificial Sequence
  Description of Artificial Sequence: Synthetic oligonucleotide
  Sense strand starting at position 53 of SEQ ID NO: 1888311
agcugugcaauccugugua

SEQ ID NO: 2526287 - RNA, 19 nt, Artificial Sequence
  Description of Artificial Sequence: Synthetic oligonucleotide
  Antisense strand to SEQ ID NO: 2526286
uacacaggauugcacagcu

SEQ ID NO: 2526288 - RNA, 19 nt, Artificial Sequence
  Description of Artificial Sequence: Synthetic oligonucleotide
  Sense strand starting at position 452 of SEQ ID NO: 1888311
auggaauggcugggauuga

SEQ ID NO: 2526289 - RNA, 19 nt, Artificial Sequence
  Description of Artificial Sequence: Synthetic oligonucleotide
  Antisense strand to SEQ ID NO: 2526288
ucaaucccagccauuccau

SEQ ID NO: 2526290 - RNA, 19 nt, Artificial Sequence
  Description of Artificial Sequence: Synthetic oligonucleotide
  Sense strand starting at position 1876 of SEQ ID NO: 1888311
ugucauuauuugcuuacau

SEQ ID NO: 2526291 - RNA, 19 nt, Artificial Sequence
  Description of Artificial Sequence: Synthetic oligonucleotide
  Antisense strand to SEQ ID NO: 2526290
auguaagcaaauaaugaca

SEQ ID NO: 2526292 - RNA, 19 nt, Artificial Sequence
  Description of Artificial Sequence: Synthetic oligonucleotide
  Sense strand starting at position 1877 of SEQ ID NO: 1888311
gucauuauuugcuuacauc

SEQ ID NO: 2526293 - RNA, 19 nt, Artificial Sequence
  Description of Artificial Sequence: Synthetic oligonucleotide
  Antisense strand to SEQ ID NO: 2526292
gauguaagcaaauaaugac

SEQ ID NO: 2526294 - RNA, 19 nt, Artificial Sequence
  Description of Artificial Sequence: Synthetic oligonucleotide
  Sense strand starting at position 138 of SEQ ID NO: 1888311
aguguuuguguuucagucu

SEQ ID NO: 2526295 - RNA, 19 nt, Artificial Sequence
  Description of Artificial Sequence: Synthetic oligonucleotide
  Antisense strand to SEQ ID NO: 2526294
agacugaaacacaaacacu

SEQ ID NO: 2526296 - RNA, 19 nt, Artificial Sequence
  Description of Artificial Sequence: Synthetic oligonucleotide
  Sense strand starting at position 1121 of SEQ ID NO: 1888311
augaccagagcuugggaua

SEQ ID NO: 2526297 - RNA, 19 nt, Artificial Sequence
  Description of Artificial Sequence: Synthetic oligonucleotide
  Antisense strand to SEQ ID NO: 2526296
uaucccaagcucuggucau

SEQ ID NO: 2526298 - RNA, 19 nt, Artificial Sequence
  Description of Artificial Sequence: Synthetic oligonucleotide
  Sense strand starting at position 1209 of SEQ ID NO: 1888311
cuuggucaaucauugaaag

SEQ ID NO: 2526299 - RNA, 19 nt, Artificial Sequence
  Description of Artificial Sequence: Synthetic oligonucleotide
  Antisense strand to SEQ ID NO: 2526298
cuuucaaugauugaccaag

SEQ ID NO: 2526300 - RNA, 19 nt, Artificial Sequence
  Description of Artificial Sequence: Synthetic oligonucleotide
  Sense strand starting at position 465 of SEQ ID NO: 1888311
gauugaauugugugaggaa

SEQ ID NO: 2526301 - RNA, 19 nt, Artificial Sequence
  Description of Artificial Sequence: Synthetic oligonucleotide
  Antisense strand to SEQ ID NO: 2526300
uuccucacacaauucaauc

SEQ ID NO: 2526302 - RNA, 19 nt, Artificial Sequence
  Description of Artificial Sequence: Synthetic oligonucleotide
  Sense strand starting at position 1243 of SEQ ID NO: 1888311
cuugaugucuuugucauuu

SEQ ID NO: 2526303 - RNA, 19 nt, Artificial Sequence
  Description of Artificial Sequence: Synthetic oligonucleotide
  Antisense strand to SEQ ID NO: 2526302
aaaugacaaagacaucaag

SEQ ID NO: 2526304 - RNA, 19 nt, Artificial Sequence
  Description of Artificial Sequence: Synthetic oligonucleotide
  Sense strand starting at position 1247 of SEQ ID NO: 1888311
augucuuugucauuuggua

SEQ ID NO: 2526305 - RNA, 19 nt, Artificial Sequence
  Description of Artificial Sequence: Synthetic oligonucleotide
  Antisense strand to SEQ ID NO: 2526304
uaccaaaugacaaagacau

SEQ ID NO: 2526306 - RNA, 19 nt, Artificial Sequence
  Description of Artificial Sequence: Synthetic oligonucleotide
  Sense strand starting at position 158 of SEQ ID NO: 1888311
agauaauacugucuacuug

SEQ ID NO: 2526307 - RNA, 19 nt, Artificial Sequence
  Description of Artificial Sequence: Synthetic oligonucleotide
  Antisense strand to SEQ ID NO: 2526306
caaguagacaguauuaucu

SEQ ID NO: 2526308 - RNA, 19 nt, Artificial Sequence
  Description of Artificial Sequence: Synthetic oligonucleotide
  Sense strand starting at position 1249 of SEQ ID NO: 1888311
gucuuugucauuugguaac

SEQ ID NO: 2526309 - RNA, 19 nt, Artificial Sequence
  Description of Artificial Sequence: Synthetic oligonucleotide
  Antisense strand to SEQ ID NO: 2526308
guuaccaaaugacaaagac

SEQ ID NO: 2526310 - RNA, 19 nt, Artificial Sequence
  Description of Artificial Sequence: Synthetic oligonucleotide
  Sense strand starting at position 1122 of SEQ ID NO: 1888311
ugaccagagcuugggauau

SEQ ID NO: 2526311 - RNA, 19 nt, Artificial Sequence
  Description of Artificial Sequence: Synthetic oligonucleotide
  Antisense strand to SEQ ID NO: 2526310
auaucccaagcucugguca

SEQ ID NO: 2526312 - RNA, 19 nt, Artificial Sequence
  Description of Artificial Sequence: Synthetic oligonucleotide
  Sense strand starting at position 1094 of SEQ ID NO: 1888311
ccaguaucagaacgauaau

SEQ ID NO: 2526313 - RNA, 19 nt, Artificial Sequence
  Description of Artificial Sequence: Synthetic oligonucleotide
  Antisense strand to SEQ ID NO: 2526312
auuaucguucugauacugg

SEQ ID NO: 2526314 - RNA, 19 nt, Artificial Sequence
  Description of Artificial Sequence: Synthetic oligonucleotide
  Sense strand starting at position 1875 of SEQ ID NO: 1888311
gugucauuauuugcuuaca

SEQ ID NO: 2526315 - RNA, 19 nt, Artificial Sequence
  Description of Artificial Sequence: Synthetic oligonucleotide
  Antisense strand to SEQ ID NO: 2526314
uguaagcaaauaaugacac

SEQ ID NO: 2526316 - RNA, 19 nt, Artificial Sequence
  Description of Artificial Sequence: Synthetic oligonucleotide
  Sense strand starting at position 162 of SEQ ID NO: 1888311
aauacugucuacuugggau

SEQ ID NO: 2526317 - RNA, 19 nt, Artificial Sequence
  Description of Artificial Sequence: Synthetic oligonucleotide
  Antisense strand to SEQ ID NO: 2526316
aucccaaguagacaguauu

SEQ ID NO: 2526318 - RNA, 19 nt, Artificial Sequence
  Description of Artificial Sequence: Synthetic oligonucleotide
  Sense strand starting at position 2362 of SEQ ID NO: 1888311
acagauaucuauguccauu

SEQ ID NO: 2526319 - RNA, 19 nt, Artificial Sequence
  Description of Artificial Sequence: Synthetic oligonucleotide
  Antisense strand to SEQ ID NO: 2526318
aauggacauagauaucugu

SEQ ID NO: 2526320 - RNA, 19 nt, Artificial Sequence
  Description of Artificial Sequence: Synthetic oligonucleotide
  Sense strand starting at position 1072 of SEQ ID NO: 1888311
ucuuguaaugguuaucaug

SEQ ID NO: 2526321 - RNA, 19 nt, Artificial Sequence
  Description of Artificial Sequence: Synthetic oligonucleotide
  Antisense strand to SEQ ID NO: 2526320
caugauaaccauuacaaga

SEQ ID NO: 2526322 - RNA, 19 nt, Artificial Sequence
  Description of Artificial Sequence: Synthetic oligonucleotide
  Sense strand starting at position 461 of SEQ ID NO: 1888311
cugggauugaauuguguga

SEQ ID NO: 2526323 - RNA, 19 nt, Artificial Sequence
  Description of Artificial Sequence: Synthetic oligonucleotide
  Antisense strand to SEQ ID NO: 2526322
ucacacaauucaaucccag

SEQ ID NO: 2526324 - RNA, 19 nt, Artificial Sequence
  Description of Artificial Sequence: Synthetic oligonucleotide
  Sense strand starting at position 1210 of SEQ ID NO: 1888311
uuggucaaucauugaaagu

SEQ ID NO: 2526325 - RNA, 19 nt, Artificial Sequence
  Description of Artificial Sequence: Synthetic oligonucleotide
  Antisense strand to SEQ ID NO: 2526324
acuuucaaugauugaccaa

SEQ ID NO: 2526326 - RNA, 19 nt, Artificial Sequence
  Description of Artificial Sequence: Synthetic oligonucleotide
  Sense strand starting at position 2038 of SEQ ID NO: 1888311
uuuagauuguuaccucaca

SEQ ID NO: 2526327 - RNA, 19 nt, Artificial Sequence
  Description of Artificial Sequence: Synthetic oligonucleotide
  Antisense strand to SEQ ID NO: 2526326
ugugagguaacaaucuaaa

SEQ ID NO: 2526328 - RNA, 19 nt, Artificial Sequence
  Description of Artificial Sequence: Synthetic oligonucleotide
  Sense strand starting at position 270 of SEQ ID NO: 1888311
uguuuauccagucaggagu

SEQ ID NO: 2526329 - RNA, 19 nt, Artificial Sequence
  Description of Artificial Sequence: Synthetic oligonucleotide
  Antisense strand to SEQ ID NO: 2526328
acuccugacuggauaaaca

SEQ ID NO: 2526330 - RNA, 19 nt, Artificial Sequence
  Description of Artificial Sequence: Synthetic oligonucleotide
  Sense strand starting at position 238 of SEQ ID NO: 1888311
ucagcuugagccuaucaau

SEQ ID NO: 2526331 - RNA, 19 nt, Artificial Sequence
  Description of Artificial Sequence: Synthetic oligonucleotide
  Antisense strand to SEQ ID NO: 2526330
auugauaggcucaagcuga

SEQ ID NO: 2526332 - RNA, 19 nt, Artificial Sequence
  Description of Artificial Sequence: Synthetic oligonucleotide
  Sense strand starting at position 1787 of SEQ ID NO: 1888311
cacauuguagccuggauaa

SEQ ID NO: 2526333 - RNA, 19 nt, Artificial Sequence
  Description of Artificial Sequence: Synthetic oligonucleotide
  Antisense strand to SEQ ID NO: 2526332
uuauccaggcuacaaugug

SEQ ID NO: 2526334 - RNA, 19 nt, Artificial Sequence
  Description of Artificial Sequence: Synthetic oligonucleotide
  Sense strand starting at position 1272 of SEQ ID NO: 1888311
guaaucuugcagcaucaga

SEQ ID NO: 2526335 - RNA, 19 nt, Artificial Sequence
  Description of Artificial Sequence: Synthetic oligonucleotide
  Antisense strand to SEQ ID NO: 2526334
ucugaugcugcaagauuac

SEQ ID NO: 2526336 - RNA, 19 nt, Artificial Sequence
  Description of Artificial Sequence: Synthetic oligonucleotide
  Sense strand starting at position 305 of SEQ ID NO: 1888311
agauguugguucccuugaa

SEQ ID NO: 2526337 - RNA, 19 nt, Artificial Sequence
  Description of Artificial Sequence: Synthetic oligonucleotide
  Antisense strand to SEQ ID NO: 2526336
uucaagggaaccaacaucu

SEQ ID NO: 2526338 - RNA, 19 nt, Artificial Sequence
  Description of Artificial Sequence: Synthetic oligonucleotide
  Sense strand starting at position 306 of SEQ ID NO: 1888311
gauguugguucccuugaaa

SEQ ID NO: 2526339 - RNA, 19 nt, Artificial Sequence
  Description of Artificial Sequence: Synthetic oligonucleotide
  Antisense strand to SEQ ID NO: 2526338
uuucaagggaaccaacauc

SEQ ID NO: 2526340 - RNA, 19 nt, Artificial Sequence
  Description of Artificial Sequence: Synthetic oligonucleotide
  Sense strand starting at position 1048 of SEQ ID NO: 1888311
gggcucgugucaucauuuc

SEQ ID NO: 2526341 - RNA, 19 nt, Artificial Sequence
  Description of Artificial Sequence: Synthetic oligonucleotide
  Antisense strand to SEQ ID NO: 2526340
gaaaugaugacacgagccc

SEQ ID NO: 2526342 - RNA, 19 nt, Artificial Sequence
  Description of Artificial Sequence: Synthetic oligonucleotide
  Sense strand starting at position 1614 of SEQ ID NO: 1888311
auuccuuccuggcuuagaa

SEQ ID NO: 2526343 - RNA, 19 nt, Artificial Sequence
  Description of Artificial Sequence: Synthetic oligonucleotide
  Antisense strand to SEQ ID NO: 2526342
uucuaagccaggaaggaau

SEQ ID NO: 2526344 - RNA, 19 nt, Artificial Sequence
  Description of Artificial Sequence: Synthetic oligonucleotide
  Sense strand starting at position 2018 of SEQ ID NO: 1888311
guugcacuagcucaaacau

SEQ ID NO: 2526345 - RNA, 19 nt, Artificial Sequence
  Description of Artificial Sequence: Synthetic oligonucleotide
  Antisense strand to SEQ ID NO: 2526344
auguuugagcuagugcaac

SEQ ID NO: 2526346 - RNA, 19 nt, Artificial Sequence
  Description of Artificial Sequence: Synthetic oligonucleotide
  Sense strand starting at position 1873 of SEQ ID NO: 1888311
ucgugucauuauuugcuua

SEQ ID NO: 2526347 - RNA, 19 nt, Artificial Sequence
  Description of Artificial Sequence: Synthetic oligonucleotide
  Antisense strand to SEQ ID NO: 2526346
uaagcaaauaaugacacga

SEQ ID NO: 2526348 - RNA, 19 nt, Artificial Sequence
  Description of Artificial Sequence: Synthetic oligonucleotide
  Sense strand starting at position 302 of SEQ ID NO: 1888311
auaagauguugguucccuu

SEQ ID NO: 2526349 - RNA, 19 nt, Artificial Sequence
  Description of Artificial Sequence: Synthetic oligonucleotide
  Antisense strand to SEQ ID NO: 2526348
aagggaaccaacaucuuau

SEQ ID NO: 2526350 - RNA, 19 nt, Artificial Sequence
  Description of Artificial Sequence: Synthetic oligonucleotide
  Sense strand starting at position 697 of SEQ ID NO: 1888311
augugauaguaaguuguaa

SEQ ID NO: 2526351 - RNA, 19 nt, Artificial Sequence
  Description of Artificial Sequence: Synthetic oligonucleotide
  Antisense strand to SEQ ID NO: 2526350
uuacaacuuacuaucacau

SEQ ID NO: 2526352 - RNA, 19 nt, Artificial Sequence
  Description of Artificial Sequence: Synthetic oligonucleotide
  Sense strand starting at position 688 of SEQ ID NO: 1888311
uugucaugaaugugauagu

SEQ ID NO: 2526353 - RNA, 19 nt, Artificial Sequence
  Description of Artificial Sequence: Synthetic oligonucleotide
  Antisense strand to SEQ ID NO: 2526352
acuaucacauucaugacaa

SEQ ID NO: 2526354 - RNA, 19 nt, Artificial Sequence
  Description of Artificial Sequence: Synthetic oligonucleotide
  Sense strand starting at position 1839 of SEQ ID NO: 1888311
gcaagcugaucuucugaua

SEQ ID NO: 2526355 - RNA, 19 nt, Artificial Sequence
  Description of Artificial Sequence: Synthetic oligonucleotide
  Antisense strand to SEQ ID NO: 2526354
uaucagaagaucagcuugc

SEQ ID NO: 2526356 - RNA, 19 nt, Artificial Sequence
  Description of Artificial Sequence: Synthetic oligonucleotide
  Sense strand starting at position 1200 of SEQ ID NO: 1888311
gcacaacuccuuggucaau

SEQ ID NO: 2526357 - RNA, 19 nt, Artificial Sequence
  Description of Artificial Sequence: Synthetic oligonucleotide
  Antisense strand to SEQ ID NO: 2526356
auugaccaaggaguugugc

SEQ ID NO: 2526358 - RNA, 19 nt, Artificial Sequence
  Description of Artificial Sequence: Synthetic oligonucleotide
  Sense strand starting at position 1199 of SEQ ID NO: 1888311
ugcacaacuccuuggucaa

SEQ ID NO: 2526359 - RNA, 19 nt, Artificial Sequence
  Description of Artificial Sequence: Synthetic oligonucleotide
  Antisense strand to SEQ ID NO: 2526358
uugaccaaggaguugugca

SEQ ID NO: 2526360 - RNA, 19 nt, Artificial Sequence
  Description of Artificial Sequence: Synthetic oligonucleotide
  Sense strand starting at position 1283 of SEQ ID NO: 1888311
gcaucagaucacuguccca

SEQ ID NO: 2526361 - RNA, 19 nt, Artificial Sequence
  Description of Artificial Sequence: Synthetic oligonucleotide
  Antisense strand to SEQ ID NO: 2526360
ugggacagugaucugaugc

SEQ ID NO: 2526362 - RNA, 19 nt, Artificial Sequence
  Description of Artificial Sequence: Synthetic oligonucleotide
  Sense strand starting at position 1078 of SEQ ID NO: 1888311
aaugguuaucauggugcca

SEQ ID NO: 2526363 - RNA, 19 nt, Artificial Sequence
  Description of Artificial Sequence: Synthetic oligonucleotide
  Antisense strand to SEQ ID NO: 2526362
uggcaccaugauaaccauu

SEQ ID NO: 2526364 - RNA, 19 nt, Artificial Sequence
  Description of Artificial Sequence: Synthetic oligonucleotide
  Sense strand starting at position 3912 of SEQ ID NO: 1888312
cagcaucuuguauaaggaa

SEQ ID NO: 2526365 - RNA, 19 nt, Artificial Sequence
  Description of Artificial Sequence: Synthetic oligonucleotide
  Antisense strand to SEQ ID NO: 2526364
uuccuuauacaagaugcug

SEQ ID NO: 2526366 - RNA, 19 nt, Artificial Sequence
  Description of Artificial Sequence: Synthetic oligonucleotide
  Sense strand starting at position 3489 of SEQ ID NO: 1888312
ggaauagaaucauuggucu

SEQ ID NO: 2526367 - RNA, 19 nt, Artificial Sequence
  Description of Artificial Sequence: Synthetic oligonucleotide
  Antisense strand to SEQ ID NO: 2526366
agaccaaugauucuauucc

SEQ ID NO: 2526368 - RNA, 19 nt, Artificial Sequence
  Description of Artificial Sequence: Synthetic oligonucleotide
  Sense strand starting at position 3198 of SEQ ID NO: 1888312
cugcguucccggcugaaga

SEQ ID NO: 2526369 - RNA, 19 nt, Artificial Sequence
  Description of Artificial Sequence: Synthetic oligonucleotide
  Antisense strand to SEQ ID NO: 2526368
ucuucagccgggaacgcag

SEQ ID NO: 2526370 - RNA, 19 nt, Artificial Sequence
  Description of Artificial Sequence: Synthetic oligonucleotide
  Sense strand starting at position 76 of SEQ ID NO: 1888312
ugucauuauuugcuuacau

SEQ ID NO: 2526371 - RNA, 19 nt, Artificial Sequence
  Description of Artificial Sequence: Synthetic oligonucleotide
  Antisense strand to SEQ ID NO: 2526370
auguaagcaaauaaugaca

SEQ ID NO: 2526372 - RNA, 19 nt, Artificial Sequence
  Description of Artificial Sequence: Synthetic oligonucleotide
  Sense strand starting at position 77 of SEQ ID NO: 1888312
gucauuauuugcuuacauc

SEQ ID NO: 2526373 - RNA, 19 nt, Artificial Sequence
  Description of Artificial Sequence: Synthetic oligonucleotide
  Antisense strand to SEQ ID NO: 2526372
gauguaagcaaauaaugac

SEQ ID NO: 2526374 - RNA, 19 nt, Artificial Sequence
  Description of Artificial Sequence: Synthetic oligonucleotide
  Sense strand starting at position 3606 of SEQ ID NO: 1888312
gcuugugcuccuuucuacu

SEQ ID NO: 2526375 - RNA, 19 nt, Artificial Sequence
  Description of Artificial Sequence: Synthetic oligonucleotide
  Antisense strand to SEQ ID NO: 2526374
aguagaaaggagcacaagc

SEQ ID NO: 2526376 - RNA, 19 nt, Artificial Sequence
  Description of Artificial Sequence: Synthetic oligonucleotide
  Sense strand starting at position 3475 of SEQ ID NO: 1888312
ccacuuguucccuaggaau

SEQ ID NO: 2526377 - RNA, 19 nt, Artificial Sequence
  Description of Artificial Sequence: Synthetic oligonucleotide
  Antisense strand to SEQ ID NO: 2526376
auuccuagggaacaagugg

SEQ ID NO: 2526378 - RNA, 19 nt, Artificial Sequence
  Description of Artificial Sequence: Synthetic oligonucleotide
  Sense strand starting at position 3630 of SEQ ID NO: 1888312
auauuuguugaacgcagua

SEQ ID NO: 2526379 - RNA, 19 nt, Artificial Sequence
  Description of Artificial Sequence: Synthetic oligonucleotide
  Antisense strand to SEQ ID NO: 2526378
uacugcguucaacaaauau

SEQ ID NO: 2526380 - RNA, 19 nt, Artificial Sequence
  Description of Artificial Sequence: Synthetic oligonucleotide
  Sense strand starting at position 75 of SEQ ID NO: 1888312
gugucauuauuugcuuaca

SEQ ID NO: 2526381 - RNA, 19 nt, Artificial Sequence
  Description of Artificial Sequence: Synthetic oligonucleotide
  Antisense strand to SEQ ID NO: 2526380
uguaagcaaauaaugacac

SEQ ID NO: 2526382 - RNA, 19 nt, Artificial Sequence
  Description of Artificial Sequence: Synthetic oligonucleotide
  Sense strand starting at position 3420 of SEQ ID NO: 1888312
uguaacucgcgcucugauu

SEQ ID NO: 2526383 - RNA, 19 nt, Artificial Sequence
  Description of Artificial Sequence: Synthetic oligonucleotide
  Antisense strand to SEQ ID NO: 2526382
aaucagagcgcgaguuaca

SEQ ID NO: 2526384 - RNA, 19 nt, Artificial Sequence
  Description of Artificial Sequence: Synthetic oligonucleotide
  Sense strand starting at position 3419 of SEQ ID NO: 1888312
uuguaacucgcgcucugau

SEQ ID NO: 2526385 - RNA, 19 nt, Artificial Sequence
  Description of Artificial Sequence: Synthetic oligonucleotide
  Antisense strand to SEQ ID NO: 2526384
aucagagcgcgaguuacaa

SEQ ID NO: 2526386 - RNA, 19 nt, Artificial Sequence
  Description of Artificial Sequence: Synthetic oligonucleotide
  Sense strand starting at position 3493 of SEQ ID NO: 1888312
uagaaucauuggucucuga

SEQ ID NO: 2526387 - RNA, 19 nt, Artificial Sequence
  Description of Artificial Sequence: Synthetic oligonucleotide
  Antisense strand to SEQ ID NO: 2526386
ucagagaccaaugauucua

SEQ ID NO: 2526388 - RNA, 19 nt, Artificial Sequence
  Description of Artificial Sequence: Synthetic oligonucleotide
  Sense strand starting at position 3604 of SEQ ID NO: 1888312
gugcuugugcuccuuucua

SEQ ID NO: 2526389 - RNA, 19 nt, Artificial Sequence
  Description of Artificial Sequence: Synthetic oligonucleotide
  Antisense strand to SEQ ID NO: 2526388
uagaaaggagcacaagcac

SEQ ID NO: 2526390 - RNA, 19 nt, Artificial Sequence
  Description of Artificial Sequence: Synthetic oligonucleotide
  Sense strand starting at position 3477 of SEQ ID NO: 1888312
acuuguucccuaggaauag

SEQ ID NO: 2526391 - RNA, 19 nt, Artificial Sequence
  Description of Artificial Sequence: Synthetic oligonucleotide
  Antisense strand to SEQ ID NO: 2526390
cuauuccuagggaacaagu

SEQ ID NO: 2526392 - RNA, 19 nt, Artificial Sequence
  Description of Artificial Sequence: Synthetic oligonucleotide
  Sense strand starting at position 562 of SEQ ID NO: 1888312
acagauaucuauguccauu

SEQ ID NO: 2526393 - RNA, 19 nt, Artificial Sequence
  Description of Artificial Sequence: Synthetic oligonucleotide
  Antisense strand to SEQ ID NO: 2526392
aauggacauagauaucugu

SEQ ID NO: 2526394 - RNA, 19 nt, Artificial Sequence
  Description of Artificial Sequence: Synthetic oligonucleotide
  Sense strand starting at position 2880 of SEQ ID NO: 1888312
cgaccuugcccugagggau

SEQ ID NO: 2526395 - RNA, 19 nt, Artificial Sequence
  Description of Artificial Sequence: Synthetic oligonucleotide
  Antisense strand to SEQ ID NO: 2526394
aucccucagggcaaggucg

SEQ ID NO: 2526396 - RNA, 19 nt, Artificial Sequence
  Description of Artificial Sequence: Synthetic oligonucleotide
  Sense strand starting at position 238 of SEQ ID NO: 1888312
uuuagauuguuaccucaca

SEQ ID NO: 2526397 - RNA, 19 nt, Artificial Sequence
  Description of Artificial Sequence: Synthetic oligonucleotide
  Antisense strand to SEQ ID NO: 2526396
ugugagguaacaaucuaaa

SEQ ID NO: 2526398 - RNA, 19 nt, Artificial Sequence
  Description of Artificial Sequence: Synthetic oligonucleotide
  Sense strand starting at position 3474 of SEQ ID NO: 1888312
cccacuuguucccuaggaa

SEQ ID NO: 2526399 - RNA, 19 nt, Artificial Sequence
  Description of Artificial Sequence: Synthetic oligonucleotide
  Antisense strand to SEQ ID NO: 2526398
uuccuagggaacaaguggg

SEQ ID NO: 2526400 - RNA, 19 nt, Artificial Sequence
  Description of Artificial Sequence: Synthetic oligonucleotide
  Sense strand starting at position 3757 of SEQ ID NO: 1888312
ugugaacuugguuaauguu

SEQ ID NO: 2526401 - RNA, 19 nt, Artificial Sequence
  Description of Artificial Sequence: Synthetic oligonucleotide
  Antisense strand to SEQ ID NO: 2526400
aacauuaaccaaguucaca

SEQ ID NO: 2526402 - RNA, 19 nt, Artificial Sequence
  Description of Artificial Sequence: Synthetic oligonucleotide
  Sense strand starting at position 3947 of SEQ ID NO: 1888312
aagagcuucugagugaucu

SEQ ID NO: 2526403 - RNA, 19 nt, Artificial Sequence
  Description of Artificial Sequence: Synthetic oligonucleotide
  Antisense strand to SEQ ID NO: 2526402
agaucacucagaagcucuu

SEQ ID NO: 2526404 - RNA, 19 nt, Artificial Sequence
  Description of Artificial Sequence: Synthetic oligonucleotide
  Sense strand starting at position 3058 of SEQ ID NO: 1888312
cgaggaguuggugagcauu

SEQ ID NO: 2526405 - RNA, 19 nt, Artificial Sequence
  Description of Artificial Sequence: Synthetic oligonucleotide
  Antisense strand to SEQ ID NO: 2526404
aaugcucaccaacuccucg

SEQ ID NO: 2526406 - RNA, 19 nt, Artificial Sequence
  Description of Artificial Sequence: Synthetic oligonucleotide
  Sense strand starting at position 3497 of SEQ ID NO: 1888312
aucauuggucucugaaggu

SEQ ID NO: 2526407 - RNA, 19 nt, Artificial Sequence
  Description of Artificial Sequence: Synthetic oligonucleotide
  Antisense strand to SEQ ID NO: 2526406
accuucagagaccaaugau

SEQ ID NO: 2526408 - RNA, 19 nt, Artificial Sequence
  Description of Artificial Sequence: Synthetic oligonucleotide
  Sense strand starting at position 218 of SEQ ID NO: 1888312
guugcacuagcucaaacau

SEQ ID NO: 2526409 - RNA, 19 nt, Artificial Sequence
  Description of Artificial Sequence: Synthetic oligonucleotide
  Antisense strand to SEQ ID NO: 2526408
auguuugagcuagugcaac

SEQ ID NO: 2526410 - RNA, 19 nt, Artificial Sequence
  Description of Artificial Sequence: Synthetic oligonucleotide
  Sense strand starting at position 3004 of SEQ ID NO: 1888312
ccaguuguugccgaagaga

SEQ ID NO: 2526411 - RNA, 19 nt, Artificial Sequence
  Description of Artificial Sequence: Synthetic oligonucleotide
  Antisense strand to SEQ ID NO: 2526410
ucucuucggcaacaacugg

SEQ ID NO: 2526412 - RNA, 19 nt, Artificial Sequence
  Description of Artificial Sequence: Synthetic oligonucleotide
  Sense strand starting at position 73 of SEQ ID NO: 1888312
ucgugucauuauuugcuua

SEQ ID NO: 2526413 - RNA, 19 nt, Artificial Sequence
  Description of Artificial Sequence: Synthetic oligonucleotide
  Antisense strand to SEQ ID NO: 2526412
uaagcaaauaaugacacga

SEQ ID NO: 2526414 - RNA, 19 nt, Artificial Sequence
  Description of Artificial Sequence: Synthetic oligonucleotide
  Sense strand starting at position 3643 of SEQ ID NO: 1888312
gcaguaguugauugaugag

SEQ ID NO: 2526415 - RNA, 19 nt, Artificial Sequence
  Description of Artificial Sequence: Synthetic oligonucleotide
  Antisense strand to SEQ ID NO: 2526414
cucaucaaucaacuacugc

SEQ ID NO: 2526416 - RNA, 19 nt, Artificial Sequence
  Description of Artificial Sequence: Synthetic oligonucleotide
  Sense strand starting at position 3948 of SEQ ID NO: 1888312
agagcuucugagugaucuu

SEQ ID NO: 2526417 - RNA, 19 nt, Artificial Sequence
  Description of Artificial Sequence: Synthetic oligonucleotide
  Antisense strand to SEQ ID NO: 2526416
aagaucacucagaagcucu

SEQ ID NO: 2526418 - RNA, 19 nt, Artificial Sequence
  Description of Artificial Sequence: Synthetic oligonucleotide
  Sense strand starting at position 3516 of SEQ ID NO: 1888312
ggagaaauguucuuguguu

SEQ ID NO: 2526419 - RNA, 19 nt, Artificial Sequence
  Description of Artificial Sequence: Synthetic oligonucleotide
  Antisense strand to SEQ ID NO: 2526418
aacacaagaacauuucucc

SEQ ID NO: 2526420 - RNA, 19 nt, Artificial Sequence
  Description of Artificial Sequence: Synthetic oligonucleotide
  Sense strand starting at position 39 of SEQ ID NO: 1888312
gcaagcugaucuucugaua

SEQ ID NO: 2526421 - RNA, 19 nt, Artificial Sequence
  Description of Artificial Sequence: Synthetic oligonucleotide
  Antisense strand to SEQ ID NO: 2526420
uaucagaagaucagcuugc

SEQ ID NO: 2526422 - RNA, 19 nt, Artificial Sequence
  Description of Artificial Sequence: Synthetic oligonucleotide
  Sense strand starting at position 2583 of SEQ ID NO: 1888312
ugaccugacuccuugucuu

SEQ ID NO: 2526423 - RNA, 19 nt, Artificial Sequence
  Description of Artificial Sequence: Synthetic oligonucleotide
  Antisense strand to SEQ ID NO: 2526422
aagacaaggagucagguca

SEQ ID NO: 2526424 - RNA, 19 nt, Artificial Sequence
  Description of Artificial Sequence: Synthetic oligonucleotide
  Sense strand starting at position 3756 of SEQ ID NO: 1888312
uugugaacuugguuaaugu

SEQ ID NO: 2526425 - RNA, 19 nt, Artificial Sequence
  Description of Artificial Sequence: Synthetic oligonucleotide
  Antisense strand to SEQ ID NO: 2526424
acauuaaccaaguucacaa

SEQ ID NO: 2526426 - RNA, 19 nt, Artificial Sequence
  Description of Artificial Sequence: Synthetic oligonucleotide
  Sense strand starting at position 3639 of SEQ ID NO: 1888312
gaacgcaguaguugauuga

SEQ ID NO: 2526427 - RNA, 19 nt, Artificial Sequence
  Description of Artificial Sequence: Synthetic oligonucleotide
  Antisense strand to SEQ ID NO: 2526426
ucaaucaacuacugcguuc

SEQ ID NO: 2526428 - RNA, 19 nt, Artificial Sequence
  Description of Artificial Sequence: Synthetic oligonucleotide
  Sense strand starting at position 3635 of SEQ ID NO: 1888312
uguugaacgcaguaguuga

SEQ ID NO: 2526429 - RNA, 19 nt, Artificial Sequence
  Description of Artificial Sequence: Synthetic oligonucleotide
  Antisense strand to SEQ ID NO: 2526428
ucaacuacugcguucaaca

SEQ ID NO: 2526430 - RNA, 19 nt, Artificial Sequence
  Description of Artificial Sequence: Synthetic oligonucleotide
  Sense strand starting at position 3642 of SEQ ID NO: 1888312
cgcaguaguugauugauga

SEQ ID NO: 2526431 - RNA, 19 nt, Artificial Sequence
  Description of Artificial Sequence: Synthetic oligonucleotide
  Antisense strand to SEQ ID NO: 2526430
ucaucaaucaacuacugcg

SEQ ID NO: 2526432 - RNA, 19 nt, Artificial Sequence
  Description of Artificial Sequence: Synthetic oligonucleotide
  Sense strand starting at position 2105 of SEQ ID NO: 1888312
gucacuuucuccucaucga

SEQ ID NO: 2526433 - RNA, 19 nt, Artificial Sequence
  Description of Artificial Sequence: Synthetic oligonucleotide
  Antisense strand to SEQ ID NO: 2526432
ucgaugaggagaaagugac

SEQ ID NO: 2526434 - RNA, 19 nt, Artificial Sequence
  Description of Artificial Sequence: Synthetic oligonucleotide
  Sense strand starting at position 3576 of SEQ ID NO: 1888312
cuugcagcuguaugaauau

SEQ ID NO: 2526435 - RNA, 19 nt, Artificial Sequence
  Description of Artificial Sequence: Synthetic oligonucleotide
  Antisense strand to SEQ ID NO: 2526434
auauucauacagcugcaag

SEQ ID NO: 2526436 - RNA, 19 nt, Artificial Sequence
  Description of Artificial Sequence: Synthetic oligonucleotide
  Sense strand starting at position 2451 of SEQ ID NO: 1888312
cucucaucgagucggguaa

SEQ ID NO: 2526437 - RNA, 19 nt, Artificial Sequence
  Description of Artificial Sequence: Synthetic oligonucleotide
  Antisense strand to SEQ ID NO: 2526436
uuacccgacucgaugagag

SEQ ID NO: 2526438 - RNA, 19 nt, Artificial Sequence
  Description of Artificial Sequence: Synthetic oligonucleotide
  Sense strand starting at position 3200 of SEQ ID NO: 1888312
gcguucccggcugaagauu

SEQ ID NO: 2526439 - RNA, 19 nt, Artificial Sequence
  Description of Artificial Sequence: Synthetic oligonucleotide
  Antisense strand to SEQ ID NO: 2526438
aaucuucagccgggaacgc

SEQ ID NO: 2526440 - RNA, 19 nt, Artificial Sequence
  Description of Artificial Sequence: Synthetic oligonucleotide
  Sense strand starting at position 3736 of SEQ ID NO: 1888312
gcauuacagucucauuucu

SEQ ID NO: 2526441 - RNA, 19 nt, Artificial Sequence
  Description of Artificial Sequence: Synthetic oligonucleotide
  Antisense strand to SEQ ID NO: 2526440
agaaaugagacuguaaugc

SEQ ID NO: 2526442 - RNA, 19 nt, Artificial Sequence
  Description of Artificial Sequence: Synthetic oligonucleotide
  Sense strand starting at position 2181 of SEQ ID NO: 1888312
gguccucucuuggcgcaaa

SEQ ID NO: 2526443 - RNA, 19 nt, Artificial Sequence
  Description of Artificial Sequence: Synthetic oligonucleotide
  Antisense strand to SEQ ID NO: 2526442
uuugcgccaagagaggacc

SEQ ID NO: 2526444 - RNA, 19 nt, Artificial Sequence
  Description of Artificial Sequence: Synthetic oligonucleotide
  Sense strand starting at position 2404 of SEQ ID NO: 1888313
cguucagguugauuuggau

SEQ ID NO: 2526445 - RNA, 19 nt, Artificial Sequence
  Description of Artificial Sequence: Synthetic oligonucleotide
  Antisense strand to SEQ ID NO: 2526444
auccaaaucaaccugaacg

SEQ ID NO: 2526446 - RNA, 19 nt, Artificial Sequence
  Description of Artificial Sequence: Synthetic oligonucleotide
  Sense strand starting at position 140 of SEQ ID NO: 1888313
gaauuucuccacggugcaa

SEQ ID NO: 2526447 - RNA, 19 nt, Artificial Sequence
  Description of Artificial Sequence: Synthetic oligonucleotide
  Antisense strand to SEQ ID NO: 2526446
uugcaccguggagaaauuc

SEQ ID NO: 2526448 - RNA, 19 nt, Artificial Sequence
  Description of Artificial Sequence: Synthetic oligonucleotide
  Sense strand starting at position 139 of SEQ ID NO: 1888313
ggaauuucuccacggugca

SEQ ID NO: 2526449 - RNA, 19 nt, Artificial Sequence
  Description of Artificial Sequence: Synthetic oligonucleotide
  Antisense strand to SEQ ID NO: 2526448
ugcaccguggagaaauucc

SEQ ID NO: 2526450 - RNA, 19 nt, Artificial Sequence
  Description of Artificial Sequence: Synthetic oligonucleotide
  Sense strand starting at position 1101 of SEQ ID NO: 1888313
uuuacauugggcgacuaaa

SEQ ID NO: 2526451 - RNA, 19 nt, Artificial Sequence
  Description of Artificial Sequence: Synthetic oligonucleotide
  Antisense strand to SEQ ID NO: 2526450
uuuagucgcccaauguaaa

SEQ ID NO: 2526452 - RNA, 19 nt, Artificial Sequence
  Description of Artificial Sequence: Synthetic oligonucleotide
  Sense strand starting at position 2459 of SEQ ID NO: 1888313
gcgacccucccagaaauau

SEQ ID NO: 2526453 - RNA, 19 nt, Artificial Sequence
  Description of Artificial Sequence: Synthetic oligonucleotide
  Antisense strand to SEQ ID NO: 2526452
auauuucugggagggucgc

SEQ ID NO: 2526454 - RNA, 19 nt, Artificial Sequence
  Description of Artificial Sequence: Synthetic oligonucleotide
  Sense strand starting at position 1821 of SEQ ID NO: 1888313
ggauguugccaagagcaac

SEQ ID NO: 2526455 - RNA, 19 nt, Artificial Sequence
  Description of Artificial Sequence: Synthetic oligonucleotide
  Antisense strand to SEQ ID NO: 2526454
guugcucuuggcaacaucc

SEQ ID NO: 2526456 - RNA, 19 nt, Artificial Sequence
  Description of Artificial Sequence: Synthetic oligonucleotide
  Sense strand starting at position 2410 of SEQ ID NO: 1888313
gguugauuuggauggcguu

SEQ ID NO: 2526457 - RNA, 19 nt, Artificial Sequence
  Description of Artificial Sequence: Synthetic oligonucleotide
  Antisense strand to SEQ ID NO: 2526456
aacgccauccaaaucaacc

SEQ ID NO: 2526458 - RNA, 19 nt, Artificial Sequence
  Description of Artificial Sequence: Synthetic oligonucleotide
  Sense strand starting at position 2977 of SEQ ID NO: 1888313
uauguuugauggucaggga

SEQ ID NO: 2526459 - RNA, 19 nt, Artificial Sequence
  Description of Artificial Sequence: Synthetic oligonucleotide
  Antisense strand to SEQ ID NO: 2526458
ucccugaccaucaaacaua

SEQ ID NO: 2526460 - RNA, 19 nt, Artificial Sequence
  Description of Artificial Sequence: Synthetic oligonucleotide
  Sense strand starting at position 2127 of SEQ ID NO: 1888313
ggagauacgugggcugaga

SEQ ID NO: 2526461 - RNA, 19 nt, Artificial Sequence
  Description of Artificial Sequence: Synthetic oligonucleotide
  Antisense strand to SEQ ID NO: 2526460
ucucagcccacguaucucc

SEQ ID NO: 2526462 - RNA, 19 nt, Artificial Sequence
  Description of Artificial Sequence: Synthetic oligonucleotide
  Sense strand starting at position 2027 of SEQ ID NO: 1888313
gugacuguugucgcggcaa

SEQ ID NO: 2526463 - RNA, 19 nt, Artificial Sequence
  Description of Artificial Sequence: Synthetic oligonucleotide
  Antisense strand to SEQ ID NO: 2526462
uugccgcgacaacagucac

SEQ ID NO: 2526464 - RNA, 19 nt, Artificial Sequence
  Description of Artificial Sequence: Synthetic oligonucleotide
  Sense strand starting at position 2968 of SEQ ID NO: 1888313
uggacuucuuauguuugau

SEQ ID NO: 2526465 - RNA, 19 nt, Artificial Sequence
  Description of Artificial Sequence: Synthetic oligonucleotide
  Antisense strand to SEQ ID NO: 2526464
aucaaacauaagaagucca

SEQ ID NO: 2526466 - RNA, 19 nt, Artificial Sequence
  Description of Artificial Sequence: Synthetic oligonucleotide
  Sense strand starting at position 2114 of SEQ ID NO: 1888313
gauuuccacucagggagau

SEQ ID NO: 2526467 - RNA, 19 nt, Artificial Sequence
  Description of Artificial Sequence: Synthetic oligonucleotide
  Antisense strand to SEQ ID NO: 2526466
aucucccugaguggaaauc

SEQ ID NO: 2526468 - RNA, 19 nt, Artificial Sequence
  Description of Artificial Sequence: Synthetic oligonucleotide
  Sense strand starting at position 1100 of SEQ ID NO: 1888313
cuuuacauugggcgacuaa

SEQ ID NO: 2526469 - RNA, 19 nt, Artificial Sequence
  Description of Artificial Sequence: Synthetic oligonucleotide
  Antisense strand to SEQ ID NO: 2526468
uuagucgcccaauguaaag

SEQ ID NO: 2526470 - RNA, 19 nt, Artificial Sequence
  Description of Artificial Sequence: Synthetic oligonucleotide
  Sense strand starting at position 69 of SEQ ID NO: 1888313
uauugaguuuguguuggaa

SEQ ID NO: 2526471 - RNA, 19 nt, Artificial Sequence
  Description of Artificial Sequence: Synthetic oligonucleotide
  Antisense strand to SEQ ID NO: 2526470
uuccaacacaaacucaaua

SEQ ID NO: 2526472 - RNA, 19 nt, Artificial Sequence
  Description of Artificial Sequence: Synthetic oligonucleotide
  Sense strand starting at position 3018 of SEQ ID NO: 1888313
ggaguaauauuaucgucuc

SEQ ID NO: 2526473 - RNA, 19 nt, Artificial Sequence
  Description of Artificial Sequence: Synthetic oligonucleotide
  Antisense strand to SEQ ID NO: 2526472
gagacgauaauauuacucc

SEQ ID NO: 2526474 - RNA, 19 nt, Artificial Sequence
  Description of Artificial Sequence: Synthetic oligonucleotide
  Sense strand starting at position 127 of SEQ ID NO: 1888313
ccaugacccucaggaauuu

SEQ ID NO: 2526475 - RNA, 19 nt, Artificial Sequence
  Description of Artificial Sequence: Synthetic oligonucleotide
  Antisense strand to SEQ ID NO: 2526474
aaauuccugagggucaugg

SEQ ID NO: 2526476 - RNA, 19 nt, Artificial Sequence
  Description of Artificial Sequence: Synthetic oligonucleotide
  Sense strand starting at position 1656 of SEQ ID NO: 1888313
guacugaggcguugagaag

SEQ ID NO: 2526477 - RNA, 19 nt, Artificial Sequence
  Description of Artificial Sequence: Synthetic oligonucleotide
  Antisense strand to SEQ ID NO: 2526476
cuucucaacgccucaguac

SEQ ID NO: 2526478 - RNA, 19 nt, Artificial Sequence
  Description of Artificial Sequence: Synthetic oligonucleotide
  Sense strand starting at position 2516 of SEQ ID NO: 1888313
gcgucagucgcuguuuauu

SEQ ID NO: 2526479 - RNA, 19 nt, Artificial Sequence
  Description of Artificial Sequence: Synthetic oligonucleotide
  Antisense strand to SEQ ID NO: 2526478
aauaaacagcgacugacgc

SEQ ID NO: 2526480 - RNA, 19 nt, Artificial Sequence
  Description of Artificial Sequence: Synthetic oligonucleotide
  Sense strand starting at position 3416 of SEQ ID NO: 1888313
uugggauacuaggaacaau

SEQ ID NO: 2526481 - RNA, 19 nt, Artificial Sequence
  Description of Artificial Sequence: Synthetic oligonucleotide
  Antisense strand to SEQ ID NO: 2526480
auuguuccuaguaucccaa

SEQ ID NO: 2526482 - RNA, 19 nt, Artificial Sequence
  Description of Artificial Sequence: Synthetic oligonucleotide
  Sense strand starting at position 1170 of SEQ ID NO: 1888313
acacgugauuaauugcacu

SEQ ID NO: 2526483 - RNA, 19 nt, Artificial Sequence
  Description of Artificial Sequence: Synthetic oligonucleotide
  Antisense strand to SEQ ID NO: 2526482
agugcaauuaaucacgugu

SEQ ID NO: 2526484 - RNA, 19 nt, Artificial Sequence
  Description of Artificial Sequence: Synthetic oligonucleotide
  Sense strand starting at position 1520 of SEQ ID NO: 1888313
ccuugagccgcccauuaua

SEQ ID NO: 2526485 - RNA, 19 nt, Artificial Sequence
  Description of Artificial Sequence: Synthetic oligonucleotide
  Antisense strand to SEQ ID NO: 2526484
uauaaugggcggcucaagg

SEQ ID NO: 2526486 - RNA, 19 nt, Artificial Sequence
  Description of Artificial Sequence: Synthetic oligonucleotide
  Sense strand starting at position 3032 of SEQ ID NO: 1888313
gucucccgcccugaauauu

SEQ ID NO: 2526487 - RNA, 19 nt, Artificial Sequence
  Description of Artificial Sequence: Synthetic oligonucleotide
  Antisense strand to SEQ ID NO: 2526486
aauauucagggcgggagac

SEQ ID NO: 2526488 - RNA, 19 nt, Artificial Sequence
  Description of Artificial Sequence: Synthetic oligonucleotide
  Sense strand starting at position 330 of SEQ ID NO: 1888313
guaucaucccgucaaguuc

SEQ ID NO: 2526489 - RNA, 19 nt, Artificial Sequence
  Description of Artificial Sequence: Synthetic oligonucleotide
  Antisense strand to SEQ ID NO: 2526488
gaacuugacgggaugauac

SEQ ID NO: 2526490 - RNA, 19 nt, Artificial Sequence
  Description of Artificial Sequence: Synthetic oligonucleotide
  Sense strand starting at position 3902 of SEQ ID NO: 1888313
aggugauccgccugauuca

SEQ ID NO: 2526491 - RNA, 19 nt, Artificial Sequence
  Description of Artificial Sequence: Synthetic oligonucleotide
  Antisense strand to SEQ ID NO: 2526490
ugaaucaggcggaucaccu

SEQ ID NO: 2526492 - RNA, 19 nt, Artificial Sequence
  Description of Artificial Sequence: Synthetic oligonucleotide
  Sense strand starting at position 2284 of SEQ ID NO: 1888313
cuguuuccggccugggaaa

SEQ ID NO: 2526493 - RNA, 19 nt, Artificial Sequence
  Description of Artificial Sequence: Synthetic oligonucleotide
  Antisense strand to SEQ ID NO: 2526492
uuucccaggccggaaacag

SEQ ID NO: 2526494 - RNA, 19 nt, Artificial Sequence
  Description of Artificial Sequence: Synthetic oligonucleotide
  Sense strand starting at position 1099 of SEQ ID NO: 1888313
gcuuuacauugggcgacua

SEQ ID NO: 2526495 - RNA, 19 nt, Artificial Sequence
  Description of Artificial Sequence: Synthetic oligonucleotide
  Antisense strand to SEQ ID NO: 2526494
uagucgcccaauguaaagc

SEQ ID NO: 2526496 - RNA, 19 nt, Artificial Sequence
  Description of Artificial Sequence: Synthetic oligonucleotide
  Sense strand starting at position 951 of SEQ ID NO: 1888313
cggaaaguucugcggcaaa

SEQ ID NO: 2526497 - RNA, 19 nt, Artificial Sequence
  Description of Artificial Sequence: Synthetic oligonucleotide
  Antisense strand to SEQ ID NO: 2526496
uuugccgcagaacuuuccg

SEQ ID NO: 2526498 - RNA, 19 nt, Artificial Sequence
  Description of Artificial Sequence: Synthetic oligonucleotide
  Sense strand starting at position 254 of SEQ ID NO: 1888313
gcaaauaguuacguuugua

SEQ ID NO: 2526499 - RNA, 19 nt, Artificial Sequence
  Description of Artificial Sequence: Synthetic oligonucleotide
  Antisense strand to SEQ ID NO: 2526498
uacaaacguaacuauuugc

SEQ ID NO: 2526500 - RNA, 19 nt, Artificial Sequence
  Description of Artificial Sequence: Synthetic oligonucleotide
  Sense strand starting at position 950 of SEQ ID NO: 1888313
ccggaaaguucugcggcaa

SEQ ID NO: 2526501 - RNA, 19 nt, Artificial Sequence
  Description of Artificial Sequence: Synthetic oligonucleotide
  Antisense strand to SEQ ID NO: 2526500
uugccgcagaacuuuccgg

SEQ ID NO: 2526502 - RNA, 19 nt, Artificial Sequence
  Description of Artificial Sequence: Synthetic oligonucleotide
  Sense strand starting at position 285 of SEQ ID NO: 1888313
acacgauaguuauauaaac

SEQ ID NO: 2526503 - RNA, 19 nt, Artificial Sequence
  Description of Artificial Sequence: Synthetic oligonucleotide
  Antisense strand to SEQ ID NO: 2526502
guuuauauaacuaucgugu

SEQ ID NO: 2526504 - RNA, 19 nt, Artificial Sequence
  Description of Artificial Sequence: Synthetic oligonucleotide
  Sense strand starting at position 432 of SEQ ID NO: 1888313
ggaucacacuuguaauccu

SEQ ID NO: 2526505 - RNA, 19 nt, Artificial Sequence
  Description of Artificial Sequence: Synthetic oligonucleotide
  Antisense strand to SEQ ID NO: 2526504
aggauuacaagugugaucc

SEQ ID NO: 2526506 - RNA, 19 nt, Artificial Sequence
  Description of Artificial Sequence: Synthetic oligonucleotide
  Sense strand starting at position 2457 of SEQ ID NO: 1888313
gagcgacccucccagaaau

SEQ ID NO: 2526507 - RNA, 19 nt, Artificial Sequence
  Description of Artificial Sequence: Synthetic oligonucleotide
  Antisense strand to SEQ ID NO: 2526506
auuucugggagggucgcuc

SEQ ID NO: 2526508 - RNA, 19 nt, Artificial Sequence
  Description of Artificial Sequence: Synthetic oligonucleotide
  Sense strand starting at position 2980 of SEQ ID NO: 1888313
guuugauggucagggaaug

SEQ ID NO: 2526509 - RNA, 19 nt, Artificial Sequence
  Description of Artificial Sequence: Synthetic oligonucleotide
  Antisense strand to SEQ ID NO: 2526508
cauucccugaccaucaaac

SEQ ID NO: 2526510 - RNA, 19 nt, Artificial Sequence
  Description of Artificial Sequence: Synthetic oligonucleotide
  Sense strand starting at position 2029 of SEQ ID NO: 1888313
gacuguugucgcggcaacu

SEQ ID NO: 2526511 - RNA, 19 nt, Artificial Sequence
  Description of Artificial Sequence: Synthetic oligonucleotide
  Antisense strand to SEQ ID NO: 2526510
aguugccgcgacaacaguc

SEQ ID NO: 2526512 - RNA, 19 nt, Artificial Sequence
  Description of Artificial Sequence: Synthetic oligonucleotide
  Sense strand starting at position 1173 of SEQ ID NO: 1888313
cgugauuaauugcacuaag

SEQ ID NO: 2526513 - RNA, 19 nt, Artificial Sequence
  Description of Artificial Sequence: Synthetic oligonucleotide
  Antisense strand to SEQ ID NO: 2526512
cuuagugcaauuaaucacg

SEQ ID NO: 2526514 - RNA, 19 nt, Artificial Sequence
  Description of Artificial Sequence: Synthetic oligonucleotide
  Sense strand starting at position 2967 of SEQ ID NO: 1888313
auggacuucuuauguuuga

SEQ ID NO: 2526515 - RNA, 19 nt, Artificial Sequence
  Description of Artificial Sequence: Synthetic oligonucleotide
  Antisense strand to SEQ ID NO: 2526514
ucaaacauaagaaguccau

SEQ ID NO: 2526516 - RNA, 19 nt, Artificial Sequence
  Description of Artificial Sequence: Synthetic oligonucleotide
  Sense strand starting at position 327 of SEQ ID NO: 1888313
gaaguaucaucccgucaag

SEQ ID NO: 2526517 - RNA, 19 nt, Artificial Sequence
  Description of Artificial Sequence: Synthetic oligonucleotide
  Antisense strand to SEQ ID NO: 2526516
cuugacgggaugauacuuc

SEQ ID NO: 2526518 - RNA, 19 nt, Artificial Sequence
  Description of Artificial Sequence: Synthetic oligonucleotide
  Sense strand starting at position 2515 of SEQ ID NO: 1888313
ggcgucagucgcuguuuau

SEQ ID NO: 2526519 - RNA, 19 nt, Artificial Sequence
  Description of Artificial Sequence: Synthetic oligonucleotide
  Antisense strand to SEQ ID NO: 2526518
auaaacagcgacugacgcc

SEQ ID NO: 2526520 - RNA, 19 nt, Artificial Sequence
  Description of Artificial Sequence: Synthetic oligonucleotide
  Sense strand starting at position 3306 of SEQ ID NO: 1888313
cuucgcuguugggaguaau

SEQ ID NO: 2526521 - RNA, 19 nt, Artificial Sequence
  Description of Artificial Sequence: Synthetic oligonucleotide
  Antisense strand to SEQ ID NO: 2526520
auuacucccaacagcgaag

SEQ ID NO: 2526522 - RNA, 19 nt, Artificial Sequence
  Description of Artificial Sequence: Synthetic oligonucleotide
  Sense strand starting at position 2321 of SEQ ID NO: 1888313
agaacugagucuugcuguu

SEQ ID NO: 2526523 - RNA, 19 nt, Artificial Sequence
  Description of Artificial Sequence: Synthetic oligonucleotide
  Antisense strand to SEQ ID NO: 2526522
aacagcaagacucaguucu

SEQ ID NO: 2526524 - RNA, 19 nt, Artificial Sequence
  Description of Artificial Sequence: Synthetic oligonucleotide
  Sense strand starting at position 661 of SEQ ID NO: 1888314
gguuaaauaaauuacggua

SEQ ID NO: 2526525 - RNA, 19 nt, Artificial Sequence
  Description of Artificial Sequence: Synthetic oligonucleotide
  Antisense strand to SEQ ID NO: 2526524
uaccguaauuuauuuaacc

SEQ ID NO: 2526526 - RNA, 19 nt, Artificial Sequence
  Description of Artificial Sequence: Synthetic oligonucleotide
  Sense strand starting at position 241 of SEQ ID NO: 1888314
augacaauagcuugaacau

SEQ ID NO: 2526527 - RNA, 19 nt, Artificial Sequence
  Description of Artificial Sequence: Synthetic oligonucleotide
  Antisense strand to SEQ ID NO: 2526526
auguucaagcuauugucau

SEQ ID NO: 2526528 - RNA, 19 nt, Artificial Sequence
  Description of Artificial Sequence: Synthetic oligonucleotide
  Sense strand starting at position 3566 of SEQ ID NO: 1888314
agagguuuccaguaaggua

SEQ ID NO: 2526529 - RNA, 19 nt, Artificial Sequence
  Description of Artificial Sequence: Synthetic oligonucleotide
  Antisense strand to SEQ ID NO: 2526528
uaccuuacuggaaaccucu

SEQ ID NO: 2526530 - RNA, 19 nt, Artificial Sequence
  Description of Artificial Sequence: Synthetic oligonucleotide
  Sense strand starting at position 56 of SEQ ID NO: 1888314
aagagaaucguuugaacac

SEQ ID NO: 2526531 - RNA, 19 nt, Artificial Sequence
  Description of Artificial Sequence: Synthetic oligonucleotide
  Antisense strand to SEQ ID NO: 2526530
guguucaaacgauucucuu

SEQ ID NO: 2526532 - RNA, 19 nt, Artificial Sequence
  Description of Artificial Sequence: Synthetic oligonucleotide
  Sense strand starting at position 1560 of SEQ ID NO: 1888314
uuccuuguuccugaaagac

SEQ ID NO: 2526533 - RNA, 19 nt, Artificial Sequence
  Description of Artificial Sequence: Synthetic oligonucleotide
  Antisense strand to SEQ ID NO: 2526532
gucuuucaggaacaaggaa

SEQ ID NO: 2526534 - RNA, 19 nt, Artificial Sequence
  Description of Artificial Sequence: Synthetic oligonucleotide
  Sense strand starting at position 3600 of SEQ ID NO: 1888314
gcauuucuguuacucuuua

SEQ ID NO: 2526535 - RNA, 19 nt, Artificial Sequence
  Description of Artificial Sequence: Synthetic oligonucleotide
  Antisense strand to SEQ ID NO: 2526534
uaaagaguaacagaaaugc

SEQ ID NO: 2526536 - RNA, 19 nt, Artificial Sequence
  Description of Artificial Sequence: Synthetic oligonucleotide
  Sense strand starting at position 3228 of SEQ ID NO: 1888314
ggaacagaagccuggaguu

SEQ ID NO: 2526537 - RNA, 19 nt, Artificial Sequence
  Description of Artificial Sequence: Synthetic oligonucleotide
  Antisense strand to SEQ ID NO: 2526536
aacuccaggcuucuguucc

SEQ ID NO: 2526538 - RNA, 19 nt, Artificial Sequence
  Description of Artificial Sequence: Synthetic oligonucleotide
  Sense strand starting at position 1729 of SEQ ID NO: 1888314
gcuauaaagcuguagaaau

SEQ ID NO: 2526539 - RNA, 19 nt, Artificial Sequence
  Description of Artificial Sequence: Synthetic oligonucleotide
  Antisense strand to SEQ ID NO: 2526538
auuucuacagcuuuauagc

SEQ ID NO: 2526540 - RNA, 19 nt, Artificial Sequence
  Description of Artificial Sequence: Synthetic oligonucleotide
  Sense strand starting at position 1478 of SEQ ID NO: 1888314
cucacuaagcuuuggaaag

SEQ ID NO: 2526541 - RNA, 19 nt, Artificial Sequence
  Description of Artificial Sequence: Synthetic oligonucleotide
  Antisense strand to SEQ ID NO: 2526540
cuuuccaaagcuuagugag

SEQ ID NO: 2526542 - RNA, 19 nt, Artificial Sequence
  Description of Artificial Sequence: Synthetic oligonucleotide
  Sense strand starting at position 3766 of SEQ ID NO: 1888314
ggauguaguuacucagaau

SEQ ID NO: 2526543 - RNA, 19 nt, Artificial Sequence
  Description of Artificial Sequence: Synthetic oligonucleotide
  Antisense strand to SEQ ID NO: 2526542
auucugaguaacuacaucc

SEQ ID NO: 2526544 - RNA, 19 nt, Artificial Sequence
  Description of Artificial Sequence: Synthetic oligonucleotide
  Sense strand starting at position 3443 of SEQ ID NO: 1888314
uuagauugcugaucuuaaa

SEQ ID NO: 2526545 - RNA, 19 nt, Artificial Sequence
  Description of Artificial Sequence: Synthetic oligonucleotide
  Antisense strand to SEQ ID NO: 2526544
uuuaagaucagcaaucuaa

SEQ ID NO: 2526546 - RNA, 19 nt, Artificial Sequence
  Description of Artificial Sequence: Synthetic oligonucleotide
  Sense strand starting at position 649 of SEQ ID NO: 1888314
guuuauggaacugguuaaa

SEQ ID NO: 2526547 - RNA, 19 nt, Artificial Sequence
  Description of Artificial Sequence: Synthetic oligonucleotide
  Antisense strand to SEQ ID NO: 2526546
uuuaaccaguuccauaaac

SEQ ID NO: 2526548 - RNA, 19 nt, Artificial Sequence
  Description of Artificial Sequence: Synthetic oligonucleotide
  Sense strand starting at position 3575 of SEQ ID NO: 1888314
caguaagguagguaguuua

SEQ ID NO: 2526549 - RNA, 19 nt, Artificial Sequence
  Description of Artificial Sequence: Synthetic oligonucleotide
  Antisense strand to SEQ ID NO: 2526548
uaaacuaccuaccuuacug

SEQ ID NO: 2526550 - RNA, 19 nt, Artificial Sequence
  Description of Artificial Sequence: Synthetic oligonucleotide
  Sense strand starting at position 3619 of SEQ ID NO: 1888314
uuugguuugagaggaguac

SEQ ID NO: 2526551 - RNA, 19 nt, Artificial Sequence
  Description of Artificial Sequence: Synthetic oligonucleotide
  Antisense strand to SEQ ID NO: 2526550
guacuccucucaaaccaaa

SEQ ID NO: 2526552 - RNA, 19 nt, Artificial Sequence
  Description of Artificial Sequence: Synthetic oligonucleotide
  Sense strand starting at position 648 of SEQ ID NO: 1888314
uguuuauggaacugguuaa

SEQ ID NO: 2526553 - RNA, 19 nt, Artificial Sequence
  Description of Artificial Sequence: Synthetic oligonucleotide
  Antisense strand to SEQ ID NO: 2526552
uuaaccaguuccauaaaca

SEQ ID NO: 2526554 - RNA, 19 nt, Artificial Sequence
  Description of Artificial Sequence: Synthetic oligonucleotide
  Sense strand starting at position 2711 of SEQ ID NO: 1888314
gaggccucgcgagaacaaa

SEQ ID NO: 2526555 - RNA, 19 nt, Artificial Sequence
  Description of Artificial Sequence: Synthetic oligonucleotide
  Antisense strand to SEQ ID NO: 2526554
uuuguucucgcgaggccuc

SEQ ID NO: 2526556 - RNA, 19 nt, Artificial Sequence
  Description of Artificial Sequence: Synthetic oligonucleotide
  Sense strand starting at position 3615 of SEQ ID NO: 1888314
uuuauuugguuugagagga

SEQ ID NO: 2526557 - RNA, 19 nt, Artificial Sequence
  Description of Artificial Sequence: Synthetic oligonucleotide
  Antisense strand to SEQ ID NO: 2526556
uccucucaaaccaaauaaa

SEQ ID NO: 2526558 - RNA, 19 nt, Artificial Sequence
  Description of Artificial Sequence: Synthetic oligonucleotide
  Sense strand starting at position 2001 of SEQ ID NO: 1888314
cuaugauccucuuugugac

SEQ ID NO: 2526559 - RNA, 19 nt, Artificial Sequence
  Description of Artificial Sequence: Synthetic oligonucleotide
  Antisense strand to SEQ ID NO: 2526558
gucacaaagaggaucauag

SEQ ID NO: 2526560 - RNA, 19 nt, Artificial Sequence
  Description of Artificial Sequence: Synthetic oligonucleotide
  Sense strand starting at position 2032 of SEQ ID NO: 1888314
accagaguuccaugcuaau

SEQ ID NO: 2526561 - RNA, 19 nt, Artificial Sequence
  Description of Artificial Sequence: Synthetic oligonucleotide
  Antisense strand to SEQ ID NO: 2526560
auuagcauggaacucuggu

SEQ ID NO: 2526562 - RNA, 19 nt, Artificial Sequence
  Description of Artificial Sequence: Synthetic oligonucleotide
  Sense strand starting at position 1167 of SEQ ID NO: 1888314
uuuagaggaucauaagaaa

SEQ ID NO: 2526563 - RNA, 19 nt, Artificial Sequence
  Description of Artificial Sequence: Synthetic oligonucleotide
  Antisense strand to SEQ ID NO: 2526562
uuucuuaugauccucuaaa

SEQ ID NO: 2526564 - RNA, 19 nt, Artificial Sequence
  Description of Artificial Sequence: Synthetic oligonucleotide
  Sense strand starting at position 1715 of SEQ ID NO: 1888314
cuaagagcucuguagcuau

SEQ ID NO: 2526565 - RNA, 19 nt, Artificial Sequence
  Description of Artificial Sequence: Synthetic oligonucleotide
  Antisense strand to SEQ ID NO: 2526564
auagcuacagagcucuuag

SEQ ID NO: 2526566 - RNA, 19 nt, Artificial Sequence
  Description of Artificial Sequence: Synthetic oligonucleotide
  Sense strand starting at position 3825 of SEQ ID NO: 1888314
guuaauaacuuggugaugu

SEQ ID NO: 2526567 - RNA, 19 nt, Artificial Sequence
  Description of Artificial Sequence: Synthetic oligonucleotide
  Antisense strand to SEQ ID NO: 2526566
acaucaccaaguuauuaac

SEQ ID NO: 2526568 - RNA, 19 nt, Artificial Sequence
  Description of Artificial Sequence: Synthetic oligonucleotide
  Sense strand starting at position 3898 of SEQ ID NO: 1888314
ggacgacaauaauaggaaa

SEQ ID NO: 2526569 - RNA, 19 nt, Artificial Sequence
  Description of Artificial Sequence: Synthetic oligonucleotide
  Antisense strand to SEQ ID NO: 2526568
uuuccuauuauugucgucc

SEQ ID NO: 2526570 - RNA, 19 nt, Artificial Sequence
  Description of Artificial Sequence: Synthetic oligonucleotide
  Sense strand starting at position 460 of SEQ ID NO: 1888314
auccuaauguuugcugaua

SEQ ID NO: 2526571 - RNA, 19 nt, Artificial Sequence
  Description of Artificial Sequence: Synthetic oligonucleotide
  Antisense strand to SEQ ID NO: 2526570
uaucagcaaacauuaggau

SEQ ID NO: 2526572 - RNA, 19 nt, Artificial Sequence
  Description of Artificial Sequence: Synthetic oligonucleotide
  Sense strand starting at position 3824 of SEQ ID NO: 1888314
cguuaauaacuuggugaug

SEQ ID NO: 2526573 - RNA, 19 nt, Artificial Sequence
  Description of Artificial Sequence: Synthetic oligonucleotide
  Antisense strand to SEQ ID NO: 2526572
caucaccaaguuauuaacg

SEQ ID NO: 2526574 - RNA, 19 nt, Artificial Sequence
  Description of Artificial Sequence: Synthetic oligonucleotide
  Sense strand starting at position 1718 of SEQ ID NO: 1888314
agagcucuguagcuauaaa

SEQ ID NO: 2526575 - RNA, 19 nt, Artificial Sequence
  Description of Artificial Sequence: Synthetic oligonucleotide
  Antisense strand to SEQ ID NO: 2526574
uuuauagcuacagagcucu

SEQ ID NO: 2526576 - RNA, 19 nt, Artificial Sequence
  Description of Artificial Sequence: Synthetic oligonucleotide
  Sense strand starting at position 1280 of SEQ ID NO: 1888314
aaugaauucgcaugcacag

SEQ ID NO: 2526577 - RNA, 19 nt, Artificial Sequence
  Description of Artificial Sequence: Synthetic oligonucleotide
  Antisense strand to SEQ ID NO: 2526576
cugugcaugcgaauucauu

SEQ ID NO: 2526578 - RNA, 19 nt, Artificial Sequence
  Description of Artificial Sequence: Synthetic oligonucleotide
  Sense strand starting at position 2394 of SEQ ID NO: 1888314
uguggaagcgaguauucga

SEQ ID NO: 2526579 - RNA, 19 nt, Artificial Sequence
  Description of Artificial Sequence: Synthetic oligonucleotide
  Antisense strand to SEQ ID NO: 2526578
ucgaauacucgcuuccaca

SEQ ID NO: 2526580 - RNA, 19 nt, Artificial Sequence
  Description of Artificial Sequence: Synthetic oligonucleotide
  Sense strand starting at position 3823 of SEQ ID NO: 1888314
ucguuaauaacuuggugau

SEQ ID NO: 2526581 - RNA, 19 nt, Artificial Sequence
  Description of Artificial Sequence: Synthetic oligonucleotide
  Antisense strand to SEQ ID NO: 2526580
aucaccaaguuauuaacga

SEQ ID NO: 2526582 - RNA, 19 nt, Artificial Sequence
  Description of Artificial Sequence: Synthetic oligonucleotide
  Sense strand starting at position 1316 of SEQ ID NO: 1888314
aaacuucuaguucggugau

SEQ ID NO: 2526583 - RNA, 19 nt, Artificial Sequence
  Description of Artificial Sequence: Synthetic oligonucleotide
  Antisense strand to SEQ ID NO: 2526582
aucaccgaacuagaaguuu

SEQ ID NO: 2526584 - RNA, 19 nt, Artificial Sequence
  Description of Artificial Sequence: Synthetic oligonucleotide
  Sense strand starting at position 1318 of SEQ ID NO: 1888314
acuucuaguucggugauga

SEQ ID NO: 2526585 - RNA, 19 nt, Artificial Sequence
  Description of Artificial Sequence: Synthetic oligonucleotide
  Antisense strand to SEQ ID NO: 2526584
ucaucaccgaacuagaagu

SEQ ID NO: 2526586 - RNA, 19 nt, Artificial Sequence
  Description of Artificial Sequence: Synthetic oligonucleotide
  Sense strand starting at position 1369 of SEQ ID NO: 1888314
gcaaucacccugugaaggu

SEQ ID NO: 2526587 - RNA, 19 nt, Artificial Sequence
  Description of Artificial Sequence: Synthetic oligonucleotide
  Antisense strand to SEQ ID NO: 2526586
accuucacagggugauugc

SEQ ID NO: 2526588 - RNA, 19 nt, Artificial Sequence
  Description of Artificial Sequence: Synthetic oligonucleotide
  Sense strand starting at position 1998 of SEQ ID NO: 1888314
ucucuaugauccucuuugu

SEQ ID NO: 2526589 - RNA, 19 nt, Artificial Sequence
  Description of Artificial Sequence: Synthetic oligonucleotide
  Antisense strand to SEQ ID NO: 2526588
acaaagaggaucauagaga

SEQ ID NO: 2526590 - RNA, 19 nt, Artificial Sequence
  Description of Artificial Sequence: Synthetic oligonucleotide
  Sense strand starting at position 461 of SEQ ID NO: 1888314
uccuaauguuugcugauau

SEQ ID NO: 2526591 - RNA, 19 nt, Artificial Sequence
  Description of Artificial Sequence: Synthetic oligonucleotide
  Antisense strand to SEQ ID NO: 2526590
auaucagcaaacauuagga

SEQ ID NO: 2526592 - RNA, 19 nt, Artificial Sequence
  Description of Artificial Sequence: Synthetic oligonucleotide
  Sense strand starting at position 2401 of SEQ ID NO: 1888314
gcgaguauucgaccgccgu

SEQ ID NO: 2526593 - RNA, 19 nt, Artificial Sequence
  Description of Artificial Sequence: Synthetic oligonucleotide
  Antisense strand to SEQ ID NO: 2526592
acggcggucgaauacucgc

SEQ ID NO: 2526594 - RNA, 19 nt, Artificial Sequence
  Description of Artificial Sequence: Synthetic oligonucleotide
  Sense strand starting at position 1503 of SEQ ID NO: 1888314
gucauagaauugcuugcaa

SEQ ID NO: 2526595 - RNA, 19 nt, Artificial Sequence
  Description of Artificial Sequence: Synthetic oligonucleotide
  Antisense strand to SEQ ID NO: 2526594
uugcaagcaauucuaugac

SEQ ID NO: 2526596 - RNA, 19 nt, Artificial Sequence
  Description of Artificial Sequence: Synthetic oligonucleotide
  Sense strand starting at position 3252 of SEQ ID NO: 1888314
ucugguucugagugaccuu

SEQ ID NO: 2526597 - RNA, 19 nt, Artificial Sequence
  Description of Artificial Sequence: Synthetic oligonucleotide
  Antisense strand to SEQ ID NO: 2526596
aaggucacucagaaccaga

SEQ ID NO: 2526598 - RNA, 19 nt, Artificial Sequence
  Description of Artificial Sequence: Synthetic oligonucleotide
  Sense strand starting at position 1319 of SEQ ID NO: 1888314
cuucuaguucggugaugag

SEQ ID NO: 2526599 - RNA, 19 nt, Artificial Sequence
  Description of Artificial Sequence: Synthetic oligonucleotide
  Antisense strand to SEQ ID NO: 2526598
cucaucaccgaacuagaag

SEQ ID NO: 2526600 - RNA, 19 nt, Artificial Sequence
  Description of Artificial Sequence: Synthetic oligonucleotide
  Sense strand starting at position 3506 of SEQ ID NO: 1888314
caguuaauuccauguuacg

SEQ ID NO: 2526601 - RNA, 19 nt, Artificial Sequence
  Description of Artificial Sequence: Synthetic oligonucleotide
  Antisense strand to SEQ ID NO: 2526600
cguaacauggaauuaacug

SEQ ID NO: 2526602 - RNA, 19 nt, Artificial Sequence
  Description of Artificial Sequence: Synthetic oligonucleotide
  Sense strand starting at position 3973 of SEQ ID NO: 1888314
cacaguaauuuaggaaguu

SEQ ID NO: 2526603 - RNA, 19 nt, Artificial Sequence
  Description of Artificial Sequence: Synthetic oligonucleotide
  Antisense strand to SEQ ID NO: 2526602
aacuuccuaaauuacugug

SEQ ID NO: 2526604 - RNA, 19 nt, Artificial Sequence
  Description of Artificial Sequence: Synthetic oligonucleotide
  Sense strand starting at position 953 of SEQ ID NO: 1888315
gcucauauucuggaaauau

SEQ ID NO: 2526605 - RNA, 19 nt, Artificial Sequence
  Description of Artificial Sequence: Synthetic oligonucleotide
  Antisense strand to SEQ ID NO: 2526604
auauuuccagaauaugagc

SEQ ID NO: 2526606 - RNA, 19 nt, Artificial Sequence
  Description of Artificial Sequence: Synthetic oligonucleotide
  Sense strand starting at position 1740 of SEQ ID NO: 1888315
ggcaacuuacgagaacauu

SEQ ID NO: 2526607 - RNA, 19 nt, Artificial Sequence
  Description of Artificial Sequence: Synthetic oligonucleotide
  Antisense strand to SEQ ID NO: 2526606
aauguucucguaaguugcc

SEQ ID NO: 2526608 - RNA, 19 nt, Artificial Sequence
  Description of Artificial Sequence: Synthetic oligonucleotide
  Sense strand starting at position 3185 of SEQ ID NO: 1888315
cugauuugauaccaaggaa

SEQ ID NO: 2526609 - RNA, 19 nt, Artificial Sequence
  Description of Artificial Sequence: Synthetic oligonucleotide
  Antisense strand to SEQ ID NO: 2526608
uuccuugguaucaaaucag

SEQ ID NO: 2526610 - RNA, 19 nt, Artificial Sequence
  Description of Artificial Sequence: Synthetic oligonucleotide
  Sense strand starting at position 3879 of SEQ ID NO: 1888315
ugauaaugagacugugacu

SEQ ID NO: 2526611 - RNA, 19 nt, Artificial Sequence
  Description of Artificial Sequence: Synthetic oligonucleotide
  Antisense strand to SEQ ID NO: 2526610
agucacagucucauuauca

SEQ ID NO: 2526612 - RNA, 19 nt, Artificial Sequence
  Description of Artificial Sequence: Synthetic oligonucleotide
  Sense strand starting at position 3228 of SEQ ID NO: 1888315
aucaguucugaucauccua

SEQ ID NO: 2526613 - RNA, 19 nt, Artificial Sequence
  Description of Artificial Sequence: Synthetic oligonucleotide
  Antisense strand to SEQ ID NO: 2526612
uaggaugaucagaacugau

SEQ ID NO: 2526614 - RNA, 19 nt, Artificial Sequence
  Description of Artificial Sequence: Synthetic oligonucleotide
  Sense strand starting at position 2853 of SEQ ID NO: 1888315
gcaugucugggagaccaau

SEQ ID NO: 2526615 - RNA, 19 nt, Artificial Sequence
  Description of Artificial Sequence: Synthetic oligonucleotide
  Antisense strand to SEQ ID NO: 2526614
auuggucucccagacaugc

SEQ ID NO: 2526616 - RNA, 19 nt, Artificial Sequence
  Description of Artificial Sequence: Synthetic oligonucleotide
  Sense strand starting at position 1830 of SEQ ID NO: 1888315
cucuauagagucuaaaguu

SEQ ID NO: 2526617 - RNA, 19 nt, Artificial Sequence
  Description of Artificial Sequence: Synthetic oligonucleotide
  Antisense strand to SEQ ID NO: 2526616
aacuuuagacucuauagag

SEQ ID NO: 2526618 - RNA, 19 nt, Artificial Sequence
  Description of Artificial Sequence: Synthetic oligonucleotide
  Sense strand starting at position 3836 of SEQ ID NO: 1888315
auuauacuugaugacguua

SEQ ID NO: 2526619 - RNA, 19 nt, Artificial Sequence
  Description of Artificial Sequence: Synthetic oligonucleotide
  Antisense strand to SEQ ID NO: 2526618
uaacgucaucaaguauaau

SEQ ID NO: 2526620 - RNA, 19 nt, Artificial Sequence
  Description of Artificial Sequence: Synthetic oligonucleotide
  Sense strand starting at position 3804 of SEQ ID NO: 1888315
gcggaaucugaacauuacu

SEQ ID NO: 2526621 - RNA, 19 nt, Artificial Sequence
  Description of Artificial Sequence: Synthetic oligonucleotide
  Antisense strand to SEQ ID NO: 2526620
aguaauguucagauuccgc

SEQ ID NO: 2526622 - RNA, 19 nt, Artificial Sequence
  Description of Artificial Sequence: Synthetic oligonucleotide
  Sense strand starting at position 1749 of SEQ ID NO: 1888315
cgagaacauucucuuaaua

SEQ ID NO: 2526623 - RNA, 19 nt, Artificial Sequence
  Description of Artificial Sequence: Synthetic oligonucleotide
  Antisense strand to SEQ ID NO: 2526622
uauuaagagaauguucucg

SEQ ID NO: 2526624 - RNA, 19 nt, Artificial Sequence
  Description of Artificial Sequence: Synthetic oligonucleotide
  Sense strand starting at position 1748 of SEQ ID NO: 1888315
acgagaacauucucuuaau

SEQ ID NO: 2526625 - RNA, 19 nt, Artificial Sequence
  Description of Artificial Sequence: Synthetic oligonucleotide
  Antisense strand to SEQ ID NO: 2526624
auuaagagaauguucucgu

SEQ ID NO: 2526626 - RNA, 19 nt, Artificial Sequence
  Description of Artificial Sequence: Synthetic oligonucleotide
  Sense strand starting at position 782 of SEQ ID NO: 1888315
uuuagagcuuaaguagaaa

SEQ ID NO: 2526627 - RNA, 19 nt, Artificial Sequence
  Description of Artificial Sequence: Synthetic oligonucleotide
  Antisense strand to SEQ ID NO: 2526626
uuucuacuuaagcucuaaa

SEQ ID NO: 2526628 - RNA, 19 nt, Artificial Sequence
  Description of Artificial Sequence: Synthetic oligonucleotide
  Sense strand starting at position 2025 of SEQ ID NO: 1888315
auauuugaauuggaaguga

SEQ ID NO: 2526629 - RNA, 19 nt, Artificial Sequence
  Description of Artificial Sequence: Synthetic oligonucleotide
  Antisense strand to SEQ ID NO: 2526628
ucacuuccaauucaaauau

SEQ ID NO: 2526630 - RNA, 19 nt, Artificial Sequence
  Description of Artificial Sequence: Synthetic oligonucleotide
  Sense strand starting at position 3206 of SEQ ID NO: 1888315
aguucuguucucuacaaag

SEQ ID NO: 2526631 - RNA, 19 nt, Artificial Sequence
  Description of Artificial Sequence: Synthetic oligonucleotide
  Antisense strand to SEQ ID NO: 2526630
cuuuguagagaacagaacu

SEQ ID NO: 2526632 - RNA, 19 nt, Artificial Sequence
  Description of Artificial Sequence: Synthetic oligonucleotide
  Sense strand starting at position 3957 of SEQ ID NO: 1888315
guguguuagcuaggauuug

SEQ ID NO: 2526633 - RNA, 19 nt, Artificial Sequence
  Description of Artificial Sequence: Synthetic oligonucleotide
  Antisense strand to SEQ ID NO: 2526632
caaauccuagcuaacacac

SEQ ID NO: 2526634 - RNA, 19 nt, Artificial Sequence
  Description of Artificial Sequence: Synthetic oligonucleotide
  Sense strand starting at position 3831 of SEQ ID NO: 1888315
uuagcauuauacuugauga

SEQ ID NO: 2526635 - RNA, 19 nt, Artificial Sequence
  Description of Artificial Sequence: Synthetic oligonucleotide
  Antisense strand to SEQ ID NO: 2526634
ucaucaaguauaaugcuaa

SEQ ID NO: 2526636 - RNA, 19 nt, Artificial Sequence
  Description of Artificial Sequence: Synthetic oligonucleotide
  Sense strand starting at position 512 of SEQ ID NO: 1888315
agaauagccaaguguggaa

SEQ ID NO: 2526637 - RNA, 19 nt, Artificial Sequence
  Description of Artificial Sequence: Synthetic oligonucleotide
  Antisense strand to SEQ ID NO: 2526636
uuccacacuuggcuauucu

SEQ ID NO: 2526638 - RNA, 19 nt, Artificial Sequence
  Description of Artificial Sequence: Synthetic oligonucleotide
  Sense strand starting at position 262 of SEQ ID NO: 1888315
ucauuauaaggcugaacuu

SEQ ID NO: 2526639 - RNA, 19 nt, Artificial Sequence
  Description of Artificial Sequence: Synthetic oligonucleotide
  Antisense strand to SEQ ID NO: 2526638
aaguucagccuuauaauga

SEQ ID NO: 2526640 - RNA, 19 nt, Artificial Sequence
  Description of Artificial Sequence: Synthetic oligonucleotide
  Sense strand starting at position 2565 of SEQ ID NO: 1888315
ucucuaguaguuuacacua

SEQ ID NO: 2526641 - RNA, 19 nt, Artificial Sequence
  Description of Artificial Sequence: Synthetic oligonucleotide
  Antisense strand to SEQ ID NO: 2526640
uaguguaaacuacuagaga

SEQ ID NO: 2526642 - RNA, 19 nt, Artificial Sequence
  Description of Artificial Sequence: Synthetic oligonucleotide
  Sense strand starting at position 3691 of SEQ ID NO: 1888315
aguuuaaauccuugaucug

SEQ ID NO: 2526643 - RNA, 19 nt, Artificial Sequence
  Description of Artificial Sequence: Synthetic oligonucleotide
  Antisense strand to SEQ ID NO: 2526642
cagaucaaggauuuaaacu

SEQ ID NO: 2526644 - RNA, 19 nt, Artificial Sequence
  Description of Artificial Sequence: Synthetic oligonucleotide
  Sense strand starting at position 2036 of SEQ ID NO: 1888315
ggaagugaggcuugacuua

SEQ ID NO: 2526645 - RNA, 19 nt, Artificial Sequence
  Description of Artificial Sequence: Synthetic oligonucleotide
  Antisense strand to SEQ ID NO: 2526644
uaagucaagccucacuucc

SEQ ID NO: 2526646 - RNA, 19 nt, Artificial Sequence
  Description of Artificial Sequence: Synthetic oligonucleotide
  Sense strand starting at position 2654 of SEQ ID NO: 1888315
aguagucacaugugauaaa

SEQ ID NO: 2526647 - RNA, 19 nt, Artificial Sequence
  Description of Artificial Sequence: Synthetic oligonucleotide
  Antisense strand to SEQ ID NO: 2526646
uuuaucacaugugacuacu

SEQ ID NO: 2526648 - RNA, 19 nt, Artificial Sequence
  Description of Artificial Sequence: Synthetic oligonucleotide
  Sense strand starting at position 3867 of SEQ ID NO: 1888315
cuuuaaauggugugauaau

SEQ ID NO: 2526649 - RNA, 19 nt, Artificial Sequence
  Description of Artificial Sequence: Synthetic oligonucleotide
  Antisense strand to SEQ ID NO: 2526648
auuaucacaccauuuaaag

SEQ ID NO: 2526650 - RNA, 19 nt, Artificial Sequence
  Description of Artificial Sequence: Synthetic oligonucleotide
  Sense strand starting at position 576 of SEQ ID NO: 1888315
uguaccugauacuuauauu

SEQ ID NO: 2526651 - RNA, 19 nt, Artificial Sequence
  Description of Artificial Sequence: Synthetic oligonucleotide
  Antisense strand to SEQ ID NO: 2526650
aauauaaguaucagguaca

SEQ ID NO: 2526652 - RNA, 19 nt, Artificial Sequence
  Description of Artificial Sequence: Synthetic oligonucleotide
  Sense strand starting at position 1917 of SEQ ID NO: 1888315
guuuaaguauucuugaaac

SEQ ID NO: 2526653 - RNA, 19 nt, Artificial Sequence
  Description of Artificial Sequence: Synthetic oligonucleotide
  Antisense strand to SEQ ID NO: 2526652
guuucaagaauacuuaaac

SEQ ID NO: 2526654 - RNA, 19 nt, Artificial Sequence
  Description of Artificial Sequence: Synthetic oligonucleotide
  Sense strand starting at position 2739 of SEQ ID NO: 1888315
agaguauaaugaucugcuu

SEQ ID NO: 2526655 - RNA, 19 nt, Artificial Sequence
  Description of Artificial Sequence: Synthetic oligonucleotide
  Antisense strand to SEQ ID NO: 2526654
aagcagaucauuauacucu

SEQ ID NO: 2526656 - RNA, 19 nt, Artificial Sequence
  Description of Artificial Sequence: Synthetic oligonucleotide
  Sense strand starting at position 3283 of SEQ ID NO: 1888315
gcucuucuccaucaaguga

SEQ ID NO: 2526657 - RNA, 19 nt, Artificial Sequence
  Description of Artificial Sequence: Synthetic oligonucleotide
  Antisense strand to SEQ ID NO: 2526656
ucacuugauggagaagagc

SEQ ID NO: 2526658 - RNA, 19 nt, Artificial Sequence
  Description of Artificial Sequence: Synthetic oligonucleotide
  Sense strand starting at position 3723 of SEQ ID NO: 1888315
gcaugaucucuguaagcaa

SEQ ID NO: 2526659 - RNA, 19 nt, Artificial Sequence
  Description of Artificial Sequence: Synthetic oligonucleotide
  Antisense strand to SEQ ID NO: 2526658
uugcuuacagagaucaugc

SEQ ID NO: 2526660 - RNA, 19 nt, Artificial Sequence
  Description of Artificial Sequence: Synthetic oligonucleotide
  Sense strand starting at position 3720 of SEQ ID NO: 1888315
gaugcaugaucucuguaag

SEQ ID NO: 2526661 - RNA, 19 nt, Artificial Sequence
  Description of Artificial Sequence: Synthetic oligonucleotide
  Antisense strand to SEQ ID NO: 2526660
cuuacagagaucaugcauc

SEQ ID NO: 2526662 - RNA, 19 nt, Artificial Sequence
  Description of Artificial Sequence: Synthetic oligonucleotide
  Sense strand starting at position 1868 of SEQ ID NO: 1888315
gcuuucuuugagcacuaag

SEQ ID NO: 2526663 - RNA, 19 nt, Artificial Sequence
  Description of Artificial Sequence: Synthetic oligonucleotide
  Antisense strand to SEQ ID NO: 2526662
cuuagugcucaaagaaagc

SEQ ID NO: 2526664 - RNA, 19 nt, Artificial Sequence
  Description of Artificial Sequence: Synthetic oligonucleotide
  Sense strand starting at position 915 of SEQ ID NO: 1888315
uuuggauaacacuguugua

SEQ ID NO: 2526665 - RNA, 19 nt, Artificial Sequence
  Description of Artificial Sequence: Synthetic oligonucleotide
  Antisense strand to SEQ ID NO: 2526664
uacaacaguguuauccaaa

SEQ ID NO: 2526666 - RNA, 19 nt, Artificial Sequence
  Description of Artificial Sequence: Synthetic oligonucleotide
  Sense strand starting at position 1040 of SEQ ID NO: 1888315
acccaaaugugugcaaaca

SEQ ID NO: 2526667 - RNA, 19 nt, Artificial Sequence
  Description of Artificial Sequence: Synthetic oligonucleotide
  Antisense strand to SEQ ID NO: 2526666
uguuugcacacauuugggu

SEQ ID NO: 2526668 - RNA, 19 nt, Artificial Sequence
  Description of Artificial Sequence: Synthetic oligonucleotide
  Sense strand starting at position 726 of SEQ ID NO: 1888315
aauaaaguagugugaguac

SEQ ID NO: 2526669 - RNA, 19 nt, Artificial Sequence
  Description of Artificial Sequence: Synthetic oligonucleotide
  Antisense strand to SEQ ID NO: 2526668
guacucacacuacuuuauu

SEQ ID NO: 2526670 - RNA, 19 nt, Artificial Sequence
  Description of Artificial Sequence: Synthetic oligonucleotide
  Sense strand starting at position 287 of SEQ ID NO: 1888315
gaacaaccuguguggucaa

SEQ ID NO: 2526671 - RNA, 19 nt, Artificial Sequence
  Description of Artificial Sequence: Synthetic oligonucleotide
  Antisense strand to SEQ ID NO: 2526670
uugaccacacagguuguuc

SEQ ID NO: 2526672 - RNA, 19 nt, Artificial Sequence
  Description of Artificial Sequence: Synthetic oligonucleotide
  Sense strand starting at position 3040 of SEQ ID NO: 1888315
cuugcacuuggugaguuaa

SEQ ID NO: 2526673 - RNA, 19 nt, Artificial Sequence
  Description of Artificial Sequence: Synthetic oligonucleotide
  Antisense strand to SEQ ID NO: 2526672
uuaacucaccaagugcaag

SEQ ID NO: 2526674 - RNA, 19 nt, Artificial Sequence
  Description of Artificial Sequence: Synthetic oligonucleotide
  Sense strand starting at position 866 of SEQ ID NO: 1888315
uuccguacucauuagcaaa

SEQ ID NO: 2526675 - RNA, 19 nt, Artificial Sequence
  Description of Artificial Sequence: Synthetic oligonucleotide
  Antisense strand to SEQ ID NO: 2526674
uuugcuaaugaguacggaa

SEQ ID NO: 2526676 - RNA, 19 nt, Artificial Sequence
  Description of Artificial Sequence: Synthetic oligonucleotide
  Sense strand starting at position 1698 of SEQ ID NO: 1888315
uuggcacaaucuguuagau

SEQ ID NO: 2526677 - RNA, 19 nt, Artificial Sequence
  Description of Artificial Sequence: Synthetic oligonucleotide
  Antisense strand to SEQ ID NO: 2526676
aucuaacagauugugccaa

SEQ ID NO: 2526678 - RNA, 19 nt, Artificial Sequence
  Description of Artificial Sequence: Synthetic oligonucleotide
  Sense strand starting at position 2753 of SEQ ID NO: 1888315
ugcuuuauuugacaaagau

SEQ ID NO: 2526679 - RNA, 19 nt, Artificial Sequence
  Description of Artificial Sequence: Synthetic oligonucleotide
  Antisense strand to SEQ ID NO: 2526678
aucuuugucaaauaaagca

SEQ ID NO: 2526680 - RNA, 19 nt, Artificial Sequence
  Description of Artificial Sequence: Synthetic oligonucleotide
  Sense strand starting at position 3391 of SEQ ID NO: 1888315
uaaugugauuuauggacaa

SEQ ID NO: 2526681 - RNA, 19 nt, Artificial Sequence
  Description of Artificial Sequence: Synthetic oligonucleotide
  Antisense strand to SEQ ID NO: 2526680
uuguccauaaaucacauua

SEQ ID NO: 2526682 - RNA, 19 nt, Artificial Sequence
  Description of Artificial Sequence: Synthetic oligonucleotide
  Sense strand starting at position 1652 of SEQ ID NO: 1888315
gguuauagccuuuacugua

SEQ ID NO: 2526683 - RNA, 19 nt, Artificial Sequence
  Description of Artificial Sequence: Synthetic oligonucleotide
  Antisense strand to SEQ ID NO: 2526682
uacaguaaaggcuauaacc

SEQ ID NO: 2526684 - RNA, 19 nt, Artificial Sequence
  Description of Artificial Sequence: Synthetic oligonucleotide
  Sense strand starting at position 1701 of SEQ ID NO: 1888316
ggacgugguccagagggaa

SEQ ID NO: 2526685 - RNA, 19 nt, Artificial Sequence
  Description of Artificial Sequence: Synthetic oligonucleotide
  Antisense strand to SEQ ID NO: 2526684
uucccucuggaccacgucc

SEQ ID NO: 2526686 - RNA, 19 nt, Artificial Sequence
  Description of Artificial Sequence: Synthetic oligonucleotide
  Sense strand starting at position 438 of SEQ ID NO: 1888316
guuguacauuuacugucaa

SEQ ID NO: 2526687 - RNA, 19 nt, Artificial Sequence
  Description of Artificial Sequence: Synthetic oligonucleotide
  Antisense strand to SEQ ID NO: 2526686
uugacaguaaauguacaac

SEQ ID NO: 2526688 - RNA, 19 nt, Artificial Sequence
  Description of Artificial Sequence: Synthetic oligonucleotide
  Sense strand starting at position 3903 of SEQ ID NO: 1888316
ugugucuaguuauuuauag

SEQ ID NO: 2526689 - RNA, 19 nt, Artificial Sequence
  Description of Artificial Sequence: Synthetic oligonucleotide
  Antisense strand to SEQ ID NO: 2526688
cuauaaauaacuagacaca

SEQ ID NO: 2526690 - RNA, 19 nt, Artificial Sequence
  Description of Artificial Sequence: Synthetic oligonucleotide
  Sense strand starting at position 1487 of SEQ ID NO: 1888316
ggugauugucuggagauau

SEQ ID NO: 2526691 - RNA, 19 nt, Artificial Sequence
  Description of Artificial Sequence: Synthetic oligonucleotide
  Antisense strand to SEQ ID NO: 2526690
auaucuccagacaaucacc

SEQ ID NO: 2526692 - RNA, 19 nt, Artificial Sequence
  Description of Artificial Sequence: Synthetic oligonucleotide
  Sense strand starting at position 3921 of SEQ ID NO: 1888316
gccuguauaacugucgguu

SEQ ID NO: 2526693 - RNA, 19 nt, Artificial Sequence
  Description of Artificial Sequence: Synthetic oligonucleotide
  Antisense strand to SEQ ID NO: 2526692
aaccgacaguuauacaggc

SEQ ID NO: 2526694 - RNA, 19 nt, Artificial Sequence
  Description of Artificial Sequence: Synthetic oligonucleotide
  Sense strand starting at position 3261 of SEQ ID NO: 1888316
ugggaagacuuugcuagga

SEQ ID NO: 2526695 - RNA, 19 nt, Artificial Sequence
  Description of Artificial Sequence: Synthetic oligonucleotide
  Antisense strand to SEQ ID NO: 2526694
uccuagcaaagucuuccca

SEQ ID NO: 2526696 - RNA, 19 nt, Artificial Sequence
  Description of Artificial Sequence: Synthetic oligonucleotide
  Sense strand starting at position 3910 of SEQ ID NO: 1888316
aguuauuuauagccuguau

SEQ ID NO: 2526697 - RNA, 19 nt, Artificial Sequence
  Description of Artificial Sequence: Synthetic oligonucleotide
  Antisense strand to SEQ ID NO: 2526696
auacaggcuauaaauaacu

SEQ ID NO: 2526698 - RNA, 19 nt, Artificial Sequence
  Description of Artificial Sequence: Synthetic oligonucleotide
  Sense strand starting at position 1252 of SEQ ID NO: 1888316
ucugaacauuucuaaagga

SEQ ID NO: 2526699 - RNA, 19 nt, Artificial Sequence
  Description of Artificial Sequence: Synthetic oligonucleotide
  Antisense strand to SEQ ID NO: 2526698
uccuuuagaaauguucaga

SEQ ID NO: 2526700 - RNA, 19 nt, Artificial Sequence
  Description of Artificial Sequence: Synthetic oligonucleotide
  Sense strand starting at position 1085 of SEQ ID NO: 1888316
aguguuuccagggaaguga

SEQ ID NO: 2526701 - RNA, 19 nt, Artificial Sequence
  Description of Artificial Sequence: Synthetic oligonucleotide
  Antisense strand to SEQ ID NO: 2526700
ucacuucccuggaaacacu

SEQ ID NO: 2526702 - RNA, 19 nt, Artificial Sequence
  Description of Artificial Sequence: Synthetic oligonucleotide
  Sense strand starting at position 1500 of SEQ ID NO: 1888316
agauaugaaugcuuucuaa

SEQ ID NO: 2526703 - RNA, 19 nt, Artificial Sequence
  Description of Artificial Sequence: Synthetic oligonucleotide
  Antisense strand to SEQ ID NO: 2526702
uuagaaagcauucauaucu

SEQ ID NO: 2526704 - RNA, 19 nt, Artificial Sequence
  Description of Artificial Sequence: Synthetic oligonucleotide
  Sense strand starting at position 3222 of SEQ ID NO: 1888316
cgcaguguugccuuacacu

SEQ ID NO: 2526705 - RNA, 19 nt, Artificial Sequence
  Description of Artificial Sequence: Synthetic oligonucleotide
  Antisense strand to SEQ ID NO: 2526704
aguguaaggcaacacugcg

SEQ ID NO: 2526706 - RNA, 19 nt, Artificial Sequence
  Description of Artificial Sequence: Synthetic oligonucleotide
  Sense strand starting at position 3859 of SEQ ID NO: 1888316
uaagguaucugagcagaua

SEQ ID NO: 2526707 - RNA, 19 nt, Artificial Sequence
  Description of Artificial Sequence: Synthetic oligonucleotide
  Antisense strand to SEQ ID NO: 2526706
uaucugcucagauaccuua

SEQ ID NO: 2526708 - RNA, 19 nt, Artificial Sequence
  Description of Artificial Sequence: Synthetic oligonucleotide
  Sense strand starting at position 3900 of SEQ ID NO: 1888316
uucugugucuaguuauuua

SEQ ID NO: 2526709 - RNA, 19 nt, Artificial Sequence
  Description of Artificial Sequence: Synthetic oligonucleotide
  Antisense strand to SEQ ID NO: 2526708
uaaauaacuagacacagaa

SEQ ID NO: 2526710 - RNA, 19 nt, Artificial Sequence
  Description of Artificial Sequence: Synthetic oligonucleotide
  Sense strand starting at position 469 of SEQ ID NO: 1888316
caguauauuguauacagua

SEQ ID NO: 2526711 - RNA, 19 nt, Artificial Sequence
  Description of Artificial Sequence: Synthetic oligonucleotide
  Antisense strand to SEQ ID NO: 2526710
uacuguauacaauauacug

SEQ ID NO: 2526712 - RNA, 19 nt, Artificial Sequence
  Description of Artificial Sequence: Synthetic oligonucleotide
  Sense strand starting at position 1242 of SEQ ID NO: 1888316
ccagaccuggucugaacau

SEQ ID NO: 2526713 - RNA, 19 nt, Artificial Sequence
  Description of Artificial Sequence: Synthetic oligonucleotide
  Antisense strand to SEQ ID NO: 2526712
auguucagaccaggucugg

SEQ ID NO: 2526714 - RNA, 19 nt, Artificial Sequence
  Description of Artificial Sequence: Synthetic oligonucleotide
  Sense strand starting at position 1497 of SEQ ID NO: 1888316
uggagauaugaaugcuuuc

SEQ ID NO: 2526715 - RNA, 19 nt, Artificial Sequence
  Description of Artificial Sequence: Synthetic oligonucleotide
  Antisense strand to SEQ ID NO: 2526714
gaaagcauucauaucucca

SEQ ID NO: 2526716 - RNA, 19 nt, Artificial Sequence
  Description of Artificial Sequence: Synthetic oligonucleotide
  Sense strand starting at position 603 of SEQ ID NO: 1888316
uuuacagauaggugguaua

SEQ ID NO: 2526717 - RNA, 19 nt, Artificial Sequence
  Description of Artificial Sequence: Synthetic oligonucleotide
  Antisense strand to SEQ ID NO: 2526716
uauaccaccuaucuguaaa

SEQ ID NO: 2526718 - RNA, 19 nt, Artificial Sequence
  Description of Artificial Sequence: Synthetic oligonucleotide
  Sense strand starting at position 39 of SEQ ID NO: 1888316
ugaugaaaguagcuaagua

SEQ ID NO: 2526719 - RNA, 19 nt, Artificial Sequence
  Description of Artificial Sequence: Synthetic oligonucleotide
  Antisense strand to SEQ ID NO: 2526718
uacuuagcuacuuucauca

SEQ ID NO: 2526720 - RNA, 19 nt, Artificial Sequence
  Description of Artificial Sequence: Synthetic oligonucleotide
  Sense strand starting at position 43 of SEQ ID NO: 1888316
gaaaguagcuaaguagacu

SEQ ID NO: 2526721 - RNA, 19 nt, Artificial Sequence
  Description of Artificial Sequence: Synthetic oligonucleotide
  Antisense strand to SEQ ID NO: 2526720
agucuacuuagcuacuuuc

SEQ ID NO: 2526722 - RNA, 19 nt, Artificial Sequence
  Description of Artificial Sequence: Synthetic oligonucleotide
  Sense strand starting at position 462 of SEQ ID NO: 1888316
ucaguaucaguauauugua

SEQ ID NO: 2526723 - RNA, 19 nt, Artificial Sequence
  Description of Artificial Sequence: Synthetic oligonucleotide
  Antisense strand to SEQ ID NO: 2526722
uacaauauacugauacuga

SEQ ID NO: 2526724 - RNA, 19 nt, Artificial Sequence
  Description of Artificial Sequence: Synthetic oligonucleotide
  Sense strand starting at position 685 of SEQ ID NO: 1888316
caauguuaaguguaaagca

SEQ ID NO: 2526725 - RNA, 19 nt, Artificial Sequence
  Description of Artificial Sequence: Synthetic oligonucleotide
  Antisense strand to SEQ ID NO: 2526724
ugcuuuacacuuaacauug

SEQ ID NO: 2526726 - RNA, 19 nt, Artificial Sequence
  Description of Artificial Sequence: Synthetic oligonucleotide
  Sense strand starting at position 3442 of SEQ ID NO: 1888316
ugugcuguggacuaaggau

SEQ ID NO: 2526727 - RNA, 19 nt, Artificial Sequence
  Description of Artificial Sequence: Synthetic oligonucleotide
  Antisense strand to SEQ ID NO: 2526726
auccuuaguccacagcaca

SEQ ID NO: 2526728 - RNA, 19 nt, Artificial Sequence
  Description of Artificial Sequence: Synthetic oligonucleotide
  Sense strand starting at position 414 of SEQ ID NO: 1888316
cggccagaauacucaaauc

SEQ ID NO: 2526729 - RNA, 19 nt, Artificial Sequence
  Description of Artificial Sequence: Synthetic oligonucleotide
  Antisense strand to SEQ ID NO: 2526728
gauuugaguauucuggccg

SEQ ID NO: 2526730 - RNA, 19 nt, Artificial Sequence
  Description of Artificial Sequence: Synthetic oligonucleotide
  Sense strand starting at position 601 of SEQ ID NO: 1888316
ccuuuacagauagguggua

SEQ ID NO: 2526731 - RNA, 19 nt, Artificial Sequence
  Description of Artificial Sequence: Synthetic oligonucleotide
  Antisense strand to SEQ ID NO: 2526730
uaccaccuaucuguaaagg

SEQ ID NO: 2526732 - RNA, 19 nt, Artificial Sequence
  Description of Artificial Sequence: Synthetic oligonucleotide
  Sense strand starting at position 3408 of SEQ ID NO: 1888316
agaguugauuaagcccauu

SEQ ID NO: 2526733 - RNA, 19 nt, Artificial Sequence
  Description of Artificial Sequence: Synthetic oligonucleotide
  Antisense strand to SEQ ID NO: 2526732
aaugggcuuaaucaacucu

SEQ ID NO: 2526734 - RNA, 19 nt, Artificial Sequence
  Description of Artificial Sequence: Synthetic oligonucleotide
  Sense strand starting at position 1774 of SEQ ID NO: 1888316
uucugugagugacuccaaa

SEQ ID NO: 2526735 - RNA, 19 nt, Artificial Sequence
  Description of Artificial Sequence: Synthetic oligonucleotide
  Antisense strand to SEQ ID NO: 2526734
uuuggagucacucacagaa

SEQ ID NO: 2526736 - RNA, 19 nt, Artificial Sequence
  Description of Artificial Sequence: Synthetic oligonucleotide
  Sense strand starting at position 485 of SEQ ID NO: 1888316
guauacaguaauugacagu

SEQ ID NO: 2526737 - RNA, 19 nt, Artificial Sequence
  Description of Artificial Sequence: Synthetic oligonucleotide
  Antisense strand to SEQ ID NO: 2526736
acugucaauuacuguauac

SEQ ID NO: 2526738 - RNA, 19 nt, Artificial Sequence
  Description of Artificial Sequence: Synthetic oligonucleotide
  Sense strand starting at position 3414 of SEQ ID NO: 1888316
gauuaagcccauuggugau

SEQ ID NO: 2526739 - RNA, 19 nt, Artificial Sequence
  Description of Artificial Sequence: Synthetic oligonucleotide
  Antisense strand to SEQ ID NO: 2526738
aucaccaaugggcuuaauc

SEQ ID NO: 2526740 - RNA, 19 nt, Artificial Sequence
  Description of Artificial Sequence: Synthetic oligonucleotide
  Sense strand starting at position 733 of SEQ ID NO: 1888316
gagugugacuaggauuuga

SEQ ID NO: 2526741 - RNA, 19 nt, Artificial Sequence
  Description of Artificial Sequence: Synthetic oligonucleotide
  Antisense strand to SEQ ID NO: 2526740
ucaaauccuagucacacuc

SEQ ID NO: 2526742 - RNA, 19 nt, Artificial Sequence
  Description of Artificial Sequence: Synthetic oligonucleotide
  Sense strand starting at position 425 of SEQ ID NO: 1888316
cucaaaucucaauguugua

SEQ ID NO: 2526743 - RNA, 19 nt, Artificial Sequence
  Description of Artificial Sequence: Synthetic oligonucleotide
  Antisense strand to SEQ ID NO: 2526742
uacaacauugagauuugag

SEQ ID NO: 2526744 - RNA, 19 nt, Artificial Sequence
  Description of Artificial Sequence: Synthetic oligonucleotide
  Sense strand starting at position 3066 of SEQ ID NO: 1888316
gacgcagaccugugagaac

SEQ ID NO: 2526745 - RNA, 19 nt, Artificial Sequence
  Description of Artificial Sequence: Synthetic oligonucleotide
  Antisense strand to SEQ ID NO: 2526744
guucucacaggucugcguc

SEQ ID NO: 2526746 - RNA, 19 nt, Artificial Sequence
  Description of Artificial Sequence: Synthetic oligonucleotide
  Sense strand starting at position 1503 of SEQ ID NO: 1888316
uaugaaugcuuucuaaggu

SEQ ID NO: 2526747 - RNA, 19 nt, Artificial Sequence
  Description of Artificial Sequence: Synthetic oligonucleotide
  Antisense strand to SEQ ID NO: 2526746
accuuagaaagcauucaua

SEQ ID NO: 2526748 - RNA, 19 nt, Artificial Sequence
  Description of Artificial Sequence: Synthetic oligonucleotide
  Sense strand starting at position 729 of SEQ ID NO: 1888316
uguugagugugacuaggau

SEQ ID NO: 2526749 - RNA, 19 nt, Artificial Sequence
  Description of Artificial Sequence: Synthetic oligonucleotide
  Antisense strand to SEQ ID NO: 2526748
auccuagucacacucaaca

SEQ ID NO: 2526750 - RNA, 19 nt, Artificial Sequence
  Description of Artificial Sequence: Synthetic oligonucleotide
  Sense strand starting at position 3397 of SEQ ID NO: 1888316
cagugugucccagaguuga

SEQ ID NO: 2526751 - RNA, 19 nt, Artificial Sequence
  Description of Artificial Sequence: Synthetic oligonucleotide
  Antisense strand to SEQ ID NO: 2526750
ucaacucugggacacacug

SEQ ID NO: 2526752 - RNA, 19 nt, Artificial Sequence
  Description of Artificial Sequence: Synthetic oligonucleotide
  Sense strand starting at position 1084 of SEQ ID NO: 1888316
uaguguuuccagggaagug

SEQ ID NO: 2526753 - RNA, 19 nt, Artificial Sequence
  Description of Artificial Sequence: Synthetic oligonucleotide
  Antisense strand to SEQ ID NO: 2526752
cacuucccuggaaacacua

SEQ ID NO: 2526754 - RNA, 19 nt, Artificial Sequence
  Description of Artificial Sequence: Synthetic oligonucleotide
  Sense strand starting at position 1080 of SEQ ID NO: 1888316
uucuuaguguuuccaggga

SEQ ID NO: 2526755 - RNA, 19 nt, Artificial Sequence
  Description of Artificial Sequence: Synthetic oligonucleotide
  Antisense strand to SEQ ID NO: 2526754
ucccuggaaacacuaagaa

SEQ ID NO: 2526756 - RNA, 19 nt, Artificial Sequence
  Description of Artificial Sequence: Synthetic oligonucleotide
  Sense strand starting at position 1562 of SEQ ID NO: 1888316
aagcucuguccagguagaa

SEQ ID NO: 2526757 - RNA, 19 nt, Artificial Sequence
  Description of Artificial Sequence: Synthetic oligonucleotide
  Antisense strand to SEQ ID NO: 2526756
uucuaccuggacagagcuu

SEQ ID NO: 2526758 - RNA, 19 nt, Artificial Sequence
  Description of Artificial Sequence: Synthetic oligonucleotide
  Sense strand starting at position 3401 of SEQ ID NO: 1888316
gugucccagaguugauuaa

SEQ ID NO: 2526759 - RNA, 19 nt, Artificial Sequence
  Description of Artificial Sequence: Synthetic oligonucleotide
  Antisense strand to SEQ ID NO: 2526758
uuaaucaacucugggacac

SEQ ID NO: 2526760 - RNA, 19 nt, Artificial Sequence
  Description of Artificial Sequence: Synthetic oligonucleotide
  Sense strand starting at position 3877 of SEQ ID NO: 1888316
acacuucuugugugauuac

SEQ ID NO: 2526761 - RNA, 19 nt, Artificial Sequence
  Description of Artificial Sequence: Synthetic oligonucleotide
  Antisense strand to SEQ ID NO: 2526760
guaaucacacaagaagugu

SEQ ID NO: 2526762 - RNA, 19 nt, Artificial Sequence
  Description of Artificial Sequence: Synthetic oligonucleotide
  Sense strand starting at position 1484 of SEQ ID NO: 1888316
gcuggugauugucuggaga

SEQ ID NO: 2526763 - RNA, 19 nt, Artificial Sequence
  Description of Artificial Sequence: Synthetic oligonucleotide
  Antisense strand to SEQ ID NO: 2526762
ucuccagacaaucaccagc

SEQ ID NO: 2526764 - RNA, 19 nt, Artificial Sequence
  Description of Artificial Sequence: Synthetic oligonucleotide
  Sense strand starting at position 2656 of SEQ ID NO: 1888317
gaauuagaugaaugucauu

SEQ ID NO: 2526765 - RNA, 19 nt, Artificial Sequence
  Description of Artificial Sequence: Synthetic oligonucleotide
  Antisense strand to SEQ ID NO: 2526764
aaugacauucaucuaauuc

SEQ ID NO: 2526766 - RNA, 19 nt, Artificial Sequence
  Description of Artificial Sequence: Synthetic oligonucleotide
  Sense strand starting at position 1359 of SEQ ID NO: 1888317
auggaauucugucugaaga

SEQ ID NO: 2526767 - RNA, 19 nt, Artificial Sequence
  Description of Artificial Sequence: Synthetic oligonucleotide
  Antisense strand to SEQ ID NO: 2526766
ucuucagacagaauuccau

SEQ ID NO: 2526768 - RNA, 19 nt, Artificial Sequence
  Description of Artificial Sequence: Synthetic oligonucleotide
  Sense strand starting at position 3899 of SEQ ID NO: 1888317
gagagcaaugauuaugcua

SEQ ID NO: 2526769 - RNA, 19 nt, Artificial Sequence
  Description of Artificial Sequence: Synthetic oligonucleotide
  Antisense strand to SEQ ID NO: 2526768
uagcauaaucauugcucuc

SEQ ID NO: 2526770 - RNA, 19 nt, Artificial Sequence
  Description of Artificial Sequence: Synthetic oligonucleotide
  Sense strand starting at position 1049 of SEQ ID NO: 1888317
gguauaauucuuuaaaggu

SEQ ID NO: 2526771 - RNA, 19 nt, Artificial Sequence
  Description of Artificial Sequence: Synthetic oligonucleotide
  Antisense strand to SEQ ID NO: 2526770
accuuuaaagaauuauacc

SEQ ID NO: 2526772 - RNA, 19 nt, Artificial Sequence
  Description of Artificial Sequence: Synthetic oligonucleotide
  Sense strand starting at position 167 of SEQ ID NO: 1888317
cagauaccuguugggaaau

SEQ ID NO: 2526773 - RNA, 19 nt, Artificial Sequence
  Description of Artificial Sequence: Synthetic oligonucleotide
  Antisense strand to SEQ ID NO: 2526772
auuucccaacagguaucug

SEQ ID NO: 2526774 - RNA, 19 nt, Artificial Sequence
  Description of Artificial Sequence: Synthetic oligonucleotide
  Sense strand starting at position 1441 of SEQ ID NO: 1888317
gugcauuugccugauuauu

SEQ ID NO: 2526775 - RNA, 19 nt, Artificial Sequence
  Description of Artificial Sequence: Synthetic oligonucleotide
  Antisense strand to SEQ ID NO: 2526774
aauaaucaggcaaaugcac

SEQ ID NO: 2526776 - RNA, 19 nt, Artificial Sequence
  Description of Artificial Sequence: Synthetic oligonucleotide
  Sense strand starting at position 1443 of SEQ ID NO: 1888317
gcauuugccugauuauuau

SEQ ID NO: 2526777 - RNA, 19 nt, Artificial Sequence
  Description of Artificial Sequence: Synthetic oligonucleotide
  Antisense strand to SEQ ID NO: 2526776
auaauaaucaggcaaaugc

SEQ ID NO: 2526778 - RNA, 19 nt, Artificial Sequence
  Description of Artificial Sequence: Synthetic oligonucleotide
  Sense strand starting at position 3212 of SEQ ID NO: 1888317
cuaaguucuggccagggaa

SEQ ID NO: 2526779 - RNA, 19 nt, Artificial Sequence
  Description of Artificial Sequence: Synthetic oligonucleotide
  Antisense strand to SEQ ID NO: 2526778
uucccuggccagaacuuag

SEQ ID NO: 2526780 - RNA, 19 nt, Artificial Sequence
  Description of Artificial Sequence: Synthetic oligonucleotide
  Sense strand starting at position 1048 of SEQ ID NO: 1888317
ugguauaauucuuuaaagg

SEQ ID NO: 2526781 - RNA, 19 nt, Artificial Sequence
  Description of Artificial Sequence: Synthetic oligonucleotide
  Antisense strand to SEQ ID NO: 2526780
ccuuuaaagaauuauacca

SEQ ID NO: 2526782 - RNA, 19 nt, Artificial Sequence
  Description of Artificial Sequence: Synthetic oligonucleotide
  Sense strand starting at position 1901 of SEQ ID NO: 1888317
uucugauugguuuaacauu

SEQ ID NO: 2526783 - RNA, 19 nt, Artificial Sequence
  Description of Artificial Sequence: Synthetic oligonucleotide
  Antisense strand to SEQ ID NO: 2526782
aauguuaaaccaaucagaa

SEQ ID NO: 2526784 - RNA, 19 nt, Artificial Sequence
  Description of Artificial Sequence: Synthetic oligonucleotide
  Sense strand starting at position 337 of SEQ ID NO: 1888317
cuggcaaguagaugaaaua

SEQ ID NO: 2526785 - RNA, 19 nt, Artificial Sequence
  Description of Artificial Sequence: Synthetic oligonucleotide
  Antisense strand to SEQ ID NO: 2526784
uauuucaucuacuugccag

SEQ ID NO: 2526786 - RNA, 19 nt, Artificial Sequence
  Description of Artificial Sequence: Synthetic oligonucleotide
  Sense strand starting at position 1360 of SEQ ID NO: 1888317
uggaauucugucugaagau

SEQ ID NO: 2526787 - RNA, 19 nt, Artificial Sequence
  Description of Artificial Sequence: Synthetic oligonucleotide
  Antisense strand to SEQ ID NO: 2526786
aucuucagacagaauucca

SEQ ID NO: 2526788 - RNA, 19 nt, Artificial Sequence
  Description of Artificial Sequence: Synthetic oligonucleotide
  Sense strand starting at position 280 of SEQ ID NO: 1888317
gucaacaaauguuugaaau

SEQ ID NO: 2526789 - RNA, 19 nt, Artificial Sequence
  Description of Artificial Sequence: Synthetic oligonucleotide
  Antisense strand to SEQ ID NO: 2526788
auuucaaacauuuguugac

SEQ ID NO: 2526790 - RNA, 19 nt, Artificial Sequence
  Description of Artificial Sequence: Synthetic oligonucleotide
  Sense strand starting at position 254 of SEQ ID NO: 1888317
ggcacuuuaguauaggauu

SEQ ID NO: 2526791 - RNA, 19 nt, Artificial Sequence
  Description of Artificial Sequence: Synthetic oligonucleotide
  Antisense strand to SEQ ID NO: 2526790
aauccuauacuaaagugcc

SEQ ID NO: 2526792 - RNA, 19 nt, Artificial Sequence
  Description of Artificial Sequence: Synthetic oligonucleotide
  Sense strand starting at position 1459 of SEQ ID NO: 1888317
uauguuuaccugcagggaa

SEQ ID NO: 2526793 - RNA, 19 nt, Artificial Sequence
  Description of Artificial Sequence: Synthetic oligonucleotide
  Antisense strand to SEQ ID NO: 2526792
uucccugcagguaaacaua

SEQ ID NO: 2526794 - RNA, 19 nt, Artificial Sequence
  Description of Artificial Sequence: Synthetic oligonucleotide
  Sense strand starting at position 180 of SEQ ID NO: 1888317
ggaaaugcuguugaaaguu

SEQ ID NO: 2526795 - RNA, 19 nt, Artificial Sequence
  Description of Artificial Sequence: Synthetic oligonucleotide
  Antisense strand to SEQ ID NO: 2526794
aacuuucaacagcauuucc

SEQ ID NO: 2526796 - RNA, 19 nt, Artificial Sequence
  Description of Artificial Sequence: Synthetic oligonucleotide
  Sense strand starting at position 3564 of SEQ ID NO: 1888317
cuaguuugacauugaacua

SEQ ID NO: 2526797 - RNA, 19 nt, Artificial Sequence
  Description of Artificial Sequence: Synthetic oligonucleotide
  Antisense strand to SEQ ID NO: 2526796
uaguucaaugucaaacuag

SEQ ID NO: 2526798 - RNA, 19 nt, Artificial Sequence
  Description of Artificial Sequence: Synthetic oligonucleotide
  Sense strand starting at position 1226 of SEQ ID NO: 1888317
uugcuaguugaacaauacu

SEQ ID NO: 2526799 - RNA, 19 nt, Artificial Sequence
  Description of Artificial Sequence: Synthetic oligonucleotide
  Antisense strand to SEQ ID NO: 2526798
aguauuguucaacuagcaa

SEQ ID NO: 2526800 - RNA, 19 nt, Artificial Sequence
  Description of Artificial Sequence: Synthetic oligonucleotide
  Sense strand starting at position 1062 of SEQ ID NO: 1888317
aaagguagacauugcuuaa

SEQ ID NO: 2526801 - RNA, 19 nt, Artificial Sequence
  Description of Artificial Sequence: Synthetic oligonucleotide
  Antisense strand to SEQ ID NO: 2526800
uuaagcaaugucuaccuuu

SEQ ID NO: 2526802 - RNA, 19 nt, Artificial Sequence
  Description of Artificial Sequence: Synthetic oligonucleotide
  Sense strand starting at position 2745 of SEQ ID NO: 1888317
uggcuccugacaugagaau

SEQ ID NO: 2526803 - RNA, 19 nt, Artificial Sequence
  Description of Artificial Sequence: Synthetic oligonucleotide
  Antisense strand to SEQ ID NO: 2526802
auucucaugucaggagcca

SEQ ID NO: 2526804 - RNA, 19 nt, Artificial Sequence
  Description of Artificial Sequence: Synthetic oligonucleotide
  Sense strand starting at position 3895 of SEQ ID NO: 1888317
uguggagagcaaugauuau

SEQ ID NO: 2526805 - RNA, 19 nt, Artificial Sequence
  Description of Artificial Sequence: Synthetic oligonucleotide
  Antisense strand to SEQ ID NO: 2526804
auaaucauugcucuccaca

SEQ ID NO: 2526806 - RNA, 19 nt, Artificial Sequence
  Description of Artificial Sequence: Synthetic oligonucleotide
  Sense strand starting at position 3214 of SEQ ID NO: 1888317
aaguucuggccagggaaua

SEQ ID NO: 2526807 - RNA, 19 nt, Artificial Sequence
  Description of Artificial Sequence: Synthetic oligonucleotide
  Antisense strand to SEQ ID NO: 2526806
uauucccuggccagaacuu

SEQ ID NO: 2526808 - RNA, 19 nt, Artificial Sequence
  Description of Artificial Sequence: Synthetic oligonucleotide
  Sense strand starting at position 1375 of SEQ ID NO: 1888317
agauuagguuucucuauca

SEQ ID NO: 2526809 - RNA, 19 nt, Artificial Sequence
  Description of Artificial Sequence: Synthetic oligonucleotide
  Antisense strand to SEQ ID NO: 2526808
ugauagagaaaccuaaucu

SEQ ID NO: 2526810 - RNA, 19 nt, Artificial Sequence
  Description of Artificial Sequence: Synthetic oligonucleotide
  Sense strand starting at position 1656 of SEQ ID NO: 1888317
auguucuuagaguaugagu

SEQ ID NO: 2526811 - RNA, 19 nt, Artificial Sequence
  Description of Artificial Sequence: Synthetic oligonucleotide
  Antisense strand to SEQ ID NO: 2526810
acucauacucuaagaacau

SEQ ID NO: 2526812 - RNA, 19 nt, Artificial Sequence
  Description of Artificial Sequence: Synthetic oligonucleotide
  Sense strand starting at position 956 of SEQ ID NO: 1888317
cguuacucucacuaugaca

SEQ ID NO: 2526813 - RNA, 19 nt, Artificial Sequence
  Description of Artificial Sequence: Synthetic oligonucleotide
  Antisense strand to SEQ ID NO: 2526812
ugucauagugagaguaacg

SEQ ID NO: 2526814 - RNA, 19 nt, Artificial Sequence
  Description of Artificial Sequence: Synthetic oligonucleotide
  Sense strand starting at position 1439 of SEQ ID NO: 1888317
cugugcauuugccugauua

SEQ ID NO: 2526815 - RNA, 19 nt, Artificial Sequence
  Description of Artificial Sequence: Synthetic oligonucleotide
  Antisense strand to SEQ ID NO: 2526814
uaaucaggcaaaugcacag

SEQ ID NO: 2526816 - RNA, 19 nt, Artificial Sequence
  Description of Artificial Sequence: Synthetic oligonucleotide
  Sense strand starting at position 1065 of SEQ ID NO: 1888317
gguagacauugcuuaagac

SEQ ID NO: 2526817 - RNA, 19 nt, Artificial Sequence
  Description of Artificial Sequence: Synthetic oligonucleotide
  Antisense strand to SEQ ID NO: 2526816
gucuuaagcaaugucuacc

SEQ ID NO: 2526818 - RNA, 19 nt, Artificial Sequence
  Description of Artificial Sequence: Synthetic oligonucleotide
  Sense strand starting at position 1074 of SEQ ID NO: 1888317
ugcuuaagaccuugagacu

SEQ ID NO: 2526819 - RNA, 19 nt, Artificial Sequence
  Description of Artificial Sequence: Synthetic oligonucleotide
  Antisense strand to SEQ ID NO: 2526818
agucucaaggucuuaagca

SEQ ID NO: 2526820 - RNA, 19 nt, Artificial Sequence
  Description of Artificial Sequence: Synthetic oligonucleotide
  Sense strand starting at position 1933 of SEQ ID NO: 1888317
ccuuuagaugggugguaga

SEQ ID NO: 2526821 - RNA, 19 nt, Artificial Sequence
  Description of Artificial Sequence: Synthetic oligonucleotide
  Antisense strand to SEQ ID NO: 2526820
ucuaccacccaucuaaagg

SEQ ID NO: 2526822 - RNA, 19 nt, Artificial Sequence
  Description of Artificial Sequence: Synthetic oligonucleotide
  Sense strand starting at position 87 of SEQ ID NO: 1888317
uauugugacucuguaagag

SEQ ID NO: 2526823 - RNA, 19 nt, Artificial Sequence
  Description of Artificial Sequence: Synthetic oligonucleotide
  Antisense strand to SEQ ID NO: 2526822
cucuuacagagucacaaua

SEQ ID NO: 2526824 - RNA, 19 nt, Artificial Sequence
  Description of Artificial Sequence: Synthetic oligonucleotide
  Sense strand starting at position 1440 of SEQ ID NO: 1888317
ugugcauuugccugauuau

SEQ ID NO: 2526825 - RNA, 19 nt, Artificial Sequence
  Description of Artificial Sequence: Synthetic oligonucleotide
  Antisense strand to SEQ ID NO: 2526824
auaaucaggcaaaugcaca

SEQ ID NO: 2526826 - RNA, 19 nt, Artificial Sequence
  Description of Artificial Sequence: Synthetic oligonucleotide
  Sense strand starting at position 235 of SEQ ID NO: 1888317
gaucccuugcagggauauu

SEQ ID NO: 2526827 - RNA, 19 nt, Artificial Sequence
  Description of Artificial Sequence: Synthetic oligonucleotide
  Antisense strand to SEQ ID NO: 2526826
aauaucccugcaagggauc

SEQ ID NO: 2526828 - RNA, 19 nt, Artificial Sequence
  Description of Artificial Sequence: Synthetic oligonucleotide
  Sense strand starting at position 3587 of SEQ ID NO: 1888317
uuauuagacuugccacuga

SEQ ID NO: 2526829 - RNA, 19 nt, Artificial Sequence
  Description of Artificial Sequence: Synthetic oligonucleotide
  Antisense strand to SEQ ID NO: 2526828
ucaguggcaagucuaauaa

SEQ ID NO: 2526830 - RNA, 19 nt, Artificial Sequence
  Description of Artificial Sequence: Synthetic oligonucleotide
  Sense strand starting at position 3198 of SEQ ID NO: 1888317
gugggacucuaugucuaag

SEQ ID NO: 2526831 - RNA, 19 nt, Artificial Sequence
  Description of Artificial Sequence: Synthetic oligonucleotide
  Antisense strand to SEQ ID NO: 2526830
cuuagacauagagucccac

SEQ ID NO: 2526832 - RNA, 19 nt, Artificial Sequence
  Description of Artificial Sequence: Synthetic oligonucleotide
  Sense strand starting at position 3215 of SEQ ID NO: 1888317
aguucuggccagggaauau

SEQ ID NO: 2526833 - RNA, 19 nt, Artificial Sequence
  Description of Artificial Sequence: Synthetic oligonucleotide
  Antisense strand to SEQ ID NO: 2526832
auauucccuggccagaacu

SEQ ID NO: 2526834 - RNA, 19 nt, Artificial Sequence
  Description of Artificial Sequence: Synthetic oligonucleotide
  Sense strand starting at position 1899 of SEQ ID NO: 1888317
ucuucugauugguuuaaca

SEQ ID NO: 2526835 - RNA, 19 nt, Artificial Sequence
  Description of Artificial Sequence: Synthetic oligonucleotide
  Antisense strand to SEQ ID NO: 2526834
uguuaaaccaaucagaaga

SEQ ID NO: 2526836 - RNA, 19 nt, Artificial Sequence
  Description of Artificial Sequence: Synthetic oligonucleotide
  Sense strand starting at position 2332 of SEQ ID NO: 1888317
uccucaucuugggucauga

SEQ ID NO: 2526837 - RNA, 19 nt, Artificial Sequence
  Description of Artificial Sequence: Synthetic oligonucleotide
  Antisense strand to SEQ ID NO: 2526836
ucaugacccaagaugagga

SEQ ID NO: 2526838 - RNA, 19 nt, Artificial Sequence
  Description of Artificial Sequence: Synthetic oligonucleotide
  Sense strand starting at position 3914 of SEQ ID NO: 1888317
gcuacugugccacagaaca

SEQ ID NO: 2526839 - RNA, 19 nt, Artificial Sequence
  Description of Artificial Sequence: Synthetic oligonucleotide
  Antisense strand to SEQ ID NO: 2526838
uguucuguggcacaguagc

SEQ ID NO: 2526840 - RNA, 19 nt, Artificial Sequence
  Description of Artificial Sequence: Synthetic oligonucleotide
  Sense strand starting at position 2659 of SEQ ID NO: 1888317
uuagaugaaugucauuuac

SEQ ID NO: 2526841 - RNA, 19 nt, Artificial Sequence
  Description of Artificial Sequence: Synthetic oligonucleotide
  Antisense strand to SEQ ID NO: 2526840
guaaaugacauucaucuaa

SEQ ID NO: 2526842 - RNA, 19 nt, Artificial Sequence
  Description of Artificial Sequence: Synthetic oligonucleotide
  Sense strand starting at position 3390 of SEQ ID NO: 1888317
acuuuccgggucuauuauu

SEQ ID NO: 2526843 - RNA, 19 nt, Artificial Sequence
  Description of Artificial Sequence: Synthetic oligonucleotide
  Antisense strand to SEQ ID NO: 2526842
aauaauagacccggaaagu

SEQ ID NO: 2526844 - RNA, 19 nt, Artificial Sequence
  Description of Artificial Sequence: Synthetic oligonucleotide
  Sense strand starting at position 2781 of SEQ ID NO: 1888319
acaucugugcgugcaaacu

SEQ ID NO: 2526845 - RNA, 19 nt, Artificial Sequence
  Description of Artificial Sequence: Synthetic oligonucleotide
  Antisense strand to SEQ ID NO: 2526844
aguuugcacgcacagaugu

SEQ ID NO: 2526846 - RNA, 19 nt, Artificial Sequence
  Description of Artificial Sequence: Synthetic oligonucleotide
  Sense strand starting at position 1493 of SEQ ID NO: 1888319
ccaccugaccaguggagaa

SEQ ID NO: 2526847 - RNA, 19 nt, Artificial Sequence
  Description of Artificial Sequence: Synthetic oligonucleotide
  Antisense strand to SEQ ID NO: 2526846
uucuccacuggucaggugg

SEQ ID NO: 2526848 - RNA, 19 nt, Artificial Sequence
  Description of Artificial Sequence: Synthetic oligonucleotide
  Sense strand starting at position 708 of SEQ ID NO: 1888319
ggcaguuccguccugcaga

SEQ ID NO: 2526849 - RNA, 19 nt, Artificial Sequence
  Description of Artificial Sequence: Synthetic oligonucleotide
  Antisense strand to SEQ ID NO: 2526848
ucugcaggacggaacugcc

SEQ ID NO: 2526850 - RNA, 19 nt, Artificial Sequence
  Description of Artificial Sequence: Synthetic oligonucleotide
  Sense strand starting at position 2874 of SEQ ID NO: 1888319
uuucaugugggaugagaac

SEQ ID NO: 2526851 - RNA, 19 nt, Artificial Sequence
  Description of Artificial Sequence: Synthetic oligonucleotide
  Antisense strand to SEQ ID NO: 2526850
guucucaucccacaugaaa

SEQ ID NO: 2526852 - RNA, 19 nt, Artificial Sequence
  Description of Artificial Sequence: Synthetic oligonucleotide
  Sense strand starting at position 581 of SEQ ID NO: 1888319
ccaguuaaugcugaauuag

SEQ ID NO: 2526853 - RNA, 19 nt, Artificial Sequence
  Description of Artificial Sequence: Synthetic oligonucleotide
  Antisense strand to SEQ ID NO: 2526852
cuaauucagcauuaacugg

SEQ ID NO: 2526854 - RNA, 19 nt, Artificial Sequence
  Description of Artificial Sequence: Synthetic oligonucleotide
  Sense strand starting at position 538 of SEQ ID NO: 1888319
ugaguuacugcggaaccaa

SEQ ID NO: 2526855 - RNA, 19 nt, Artificial Sequence
  Description of Artificial Sequence: Synthetic oligonucleotide
  Antisense strand to SEQ ID NO: 2526854
uugguuccgcaguaacuca

SEQ ID NO: 2526856 - RNA, 19 nt, Artificial Sequence
  Description of Artificial Sequence: Synthetic oligonucleotide
  Sense strand starting at position 93 of SEQ ID NO: 1888319
gcaaaucaagcuuggaaau

SEQ ID NO: 2526857 - RNA, 19 nt, Artificial Sequence
  Description of Artificial Sequence: Synthetic oligonucleotide
  Antisense strand to SEQ ID NO: 2526856
auuuccaagcuugauuugc

SEQ ID NO: 2526858 - RNA, 19 nt, Artificial Sequence
  Description of Artificial Sequence: Synthetic oligonucleotide
  Sense strand starting at position 455 of SEQ ID NO: 1888319
gggucauaugaguggaucu

SEQ ID NO: 2526859 - RNA, 19 nt, Artificial Sequence
  Description of Artificial Sequence: Synthetic oligonucleotide
  Antisense strand to SEQ ID NO: 2526858
agauccacucauaugaccc

SEQ ID NO: 2526860 - RNA, 19 nt, Artificial Sequence
  Description of Artificial Sequence: Synthetic oligonucleotide
  Sense strand starting at position 651 of SEQ ID NO: 1888319
caguguuuggaggauagcu

SEQ ID NO: 2526861 - RNA, 19 nt, Artificial Sequence
  Description of Artificial Sequence: Synthetic oligonucleotide
  Antisense strand to SEQ ID NO: 2526860
agcuauccuccaaacacug

SEQ ID NO: 2526862 - RNA, 19 nt, Artificial Sequence
  Description of Artificial Sequence: Synthetic oligonucleotide
  Sense strand starting at position 1958 of SEQ ID NO: 1888319
gcaggagguuucucagaug

SEQ ID NO: 2526863 - RNA, 19 nt, Artificial Sequence
  Description of Artificial Sequence: Synthetic oligonucleotide
  Antisense strand to SEQ ID NO: 2526862
caucugagaaaccuccugc

SEQ ID NO: 2526864 - RNA, 19 nt, Artificial Sequence
  Description of Artificial Sequence: Synthetic oligonucleotide
  Sense strand starting at position 109 of SEQ ID NO: 1888319
aaugguguccuggagcuua

SEQ ID NO: 2526865 - RNA, 19 nt, Artificial Sequence
  Description of Artificial Sequence: Synthetic oligonucleotide
  Antisense strand to SEQ ID NO: 2526864
uaagcuccaggacaccauu

SEQ ID NO: 2526866 - RNA, 19 nt, Artificial Sequence
  Description of Artificial Sequence: Synthetic oligonucleotide
  Sense strand starting at position 1550 of SEQ ID NO: 1888319
ccuccaaucccuggucaga

SEQ ID NO: 2526867 - RNA, 19 nt, Artificial Sequence
  Description of Artificial Sequence: Synthetic oligonucleotide
  Antisense strand to SEQ ID NO: 2526866
ucugaccagggauuggagg

SEQ ID NO: 2526868 - RNA, 19 nt, Artificial Sequence
  Description of Artificial Sequence: Synthetic oligonucleotide
  Sense strand starting at position 133 of SEQ ID NO: 1888319
guuggaaaccauggcuuau

SEQ ID NO: 2526869 - RNA, 19 nt, Artificial Sequence
  Description of Artificial Sequence: Synthetic oligonucleotide
  Antisense strand to SEQ ID NO: 2526868
auaagccaugguuuccaac

SEQ ID NO: 2526870 - RNA, 19 nt, Artificial Sequence
  Description of Artificial Sequence: Synthetic oligonucleotide
  Sense strand starting at position 1505 of SEQ ID NO: 1888319
uggagaacucgcgagcacu

SEQ ID NO: 2526871 - RNA, 19 nt, Artificial Sequence
  Description of Artificial Sequence: Synthetic oligonucleotide
  Antisense strand to SEQ ID NO: 2526870
agugcucgcgaguucucca

SEQ ID NO: 2526872 - RNA, 19 nt, Artificial Sequence
  Description of Artificial Sequence: Synthetic oligonucleotide
  Sense strand starting at position 1860 of SEQ ID NO: 1888319
uuugauguguuuccacuga

SEQ ID NO: 2526873 - RNA, 19 nt, Artificial Sequence
  Description of Artificial Sequence: Synthetic oligonucleotide
  Antisense strand to SEQ ID NO: 2526872
ucaguggaaacacaucaaa

SEQ ID NO: 2526874 - RNA, 19 nt, Artificial Sequence
  Description of Artificial Sequence: Synthetic oligonucleotide
  Sense strand starting at position 3014 of SEQ ID NO: 1888319
uaguuugagugacuuucga

SEQ ID NO: 2526875 - RNA, 19 nt, Artificial Sequence
  Description of Artificial Sequence: Synthetic oligonucleotide
  Antisense strand to SEQ ID NO: 2526874
ucgaaagucacucaaacua

SEQ ID NO: 2526876 - RNA, 19 nt, Artificial Sequence
  Description of Artificial Sequence: Synthetic oligonucleotide
  Sense strand starting at position 1864 of SEQ ID NO: 1888319
auguguuuccacugagggu

SEQ ID NO: 2526877 - RNA, 19 nt, Artificial Sequence
  Description of Artificial Sequence: Synthetic oligonucleotide
  Antisense strand to SEQ ID NO: 2526876
acccucaguggaaacacau

SEQ ID NO: 2526878 - RNA, 19 nt, Artificial Sequence
  Description of Artificial Sequence: Synthetic oligonucleotide
  Sense strand starting at position 615 of SEQ ID NO: 1888319
gucaaauauuaacagagga

SEQ ID NO: 2526879 - RNA, 19 nt, Artificial Sequence
  Description of Artificial Sequence: Synthetic oligonucleotide
  Antisense strand to SEQ ID NO: 2526878
uccucuguuaauauuugac

SEQ ID NO: 2526880 - RNA, 19 nt, Artificial Sequence
  Description of Artificial Sequence: Synthetic oligonucleotide
  Sense strand starting at position 747 of SEQ ID NO: 1888319
gcccuuacuggccaguuua

SEQ ID NO: 2526881 - RNA, 19 nt, Artificial Sequence
  Description of Artificial Sequence: Synthetic oligonucleotide
  Antisense strand to SEQ ID NO: 2526880
uaaacuggccaguaagggc

SEQ ID NO: 2526882 - RNA, 19 nt, Artificial Sequence
  Description of Artificial Sequence: Synthetic oligonucleotide
  Sense strand starting at position 560 of SEQ ID NO: 1888319
gcucauggccauugaguga

SEQ ID NO: 2526883 - RNA, 19 nt, Artificial Sequence
  Description of Artificial Sequence: Synthetic oligonucleotide
  Antisense strand to SEQ ID NO: 2526882
ucacucaauggccaugagc

SEQ ID NO: 2526884 - RNA, 19 nt, Artificial Sequence
  Description of Artificial Sequence: Synthetic oligonucleotide
  Sense strand starting at position 2906 of SEQ ID NO: 1888319
gagugugacuccucugguu

SEQ ID NO: 2526885 - RNA, 19 nt, Artificial Sequence
  Description of Artificial Sequence: Synthetic oligonucleotide
  Antisense strand to SEQ ID NO: 2526884
aaccagaggagucacacuc

SEQ ID NO: 2526886 - RNA, 19 nt, Artificial Sequence
  Description of Artificial Sequence: Synthetic oligonucleotide
  Sense strand starting at position 612 of SEQ ID NO: 1888319
ugagucaaauauuaacaga

SEQ ID NO: 2526887 - RNA, 19 nt, Artificial Sequence
  Description of Artificial Sequence: Synthetic oligonucleotide
  Antisense strand to SEQ ID NO: 2526886
ucuguuaauauuugacuca

SEQ ID NO: 2526888 - RNA, 19 nt, Artificial Sequence
  Description of Artificial Sequence: Synthetic oligonucleotide
  Sense strand starting at position 146 of SEQ ID NO: 1888319
gcuuauguuccauggugac

SEQ ID NO: 2526889 - RNA, 19 nt, Artificial Sequence
  Description of Artificial Sequence: Synthetic oligonucleotide
  Antisense strand to SEQ ID NO: 2526888
gucaccauggaacauaagc

SEQ ID NO: 2526890 - RNA, 19 nt, Artificial Sequence
  Description of Artificial Sequence: Synthetic oligonucleotide
  Sense strand starting at position 175 of SEQ ID NO: 1888319
aggguuagcugguccaguu

SEQ ID NO: 2526891 - RNA, 19 nt, Artificial Sequence
  Description of Artificial Sequence: Synthetic oligonucleotide
  Antisense strand to SEQ ID NO: 2526890
aacuggaccagcuaacccu

SEQ ID NO: 2526892 - RNA, 19 nt, Artificial Sequence
  Description of Artificial Sequence: Synthetic oligonucleotide
  Sense strand starting at position 2015 of SEQ ID NO: 1888319
gugggucugacuuguggca

SEQ ID NO: 2526893 - RNA, 19 nt, Artificial Sequence
  Description of Artificial Sequence: Synthetic oligonucleotide
  Antisense strand to SEQ ID NO: 2526892
ugccacaagucagacccac

SEQ ID NO: 2526894 - RNA, 19 nt, Artificial Sequence
  Description of Artificial Sequence: Synthetic oligonucleotide
  Sense strand starting at position 1949 of SEQ ID NO: 1888319
uagccauucgcaggagguu

SEQ ID NO: 2526895 - RNA, 19 nt, Artificial Sequence
  Description of Artificial Sequence: Synthetic oligonucleotide
  Antisense strand to SEQ ID NO: 2526894
aaccuccugcgaauggcua

SEQ ID NO: 2526896 - RNA, 19 nt, Artificial Sequence
  Description of Artificial Sequence: Synthetic oligonucleotide
  Sense strand starting at position 2872 of SEQ ID NO: 1888319
ucuuucaugugggaugaga

SEQ ID NO: 2526897 - RNA, 19 nt, Artificial Sequence
  Description of Artificial Sequence: Synthetic oligonucleotide
  Antisense strand to SEQ ID NO: 2526896
ucucaucccacaugaaaga

SEQ ID NO: 2526898 - RNA, 19 nt, Artificial Sequence
  Description of Artificial Sequence: Synthetic oligonucleotide
  Sense strand starting at position 207 of SEQ ID NO: 1888319
cggucuggucccugagugu

SEQ ID NO: 2526899 - RNA, 19 nt, Artificial Sequence
  Description of Artificial Sequence: Synthetic oligonucleotide
  Antisense strand to SEQ ID NO: 2526898
acacucagggaccagaccg

SEQ ID NO: 2526900 - RNA, 19 nt, Artificial Sequence
  Description of Artificial Sequence: Synthetic oligonucleotide
  Sense strand starting at position 449 of SEQ ID NO: 1888319
cuccaagggucauaugagu

SEQ ID NO: 2526901 - RNA, 19 nt, Artificial Sequence
  Description of Artificial Sequence: Synthetic oligonucleotide
  Antisense strand to SEQ ID NO: 2526900
acucauaugacccuuggag

SEQ ID NO: 2526902 - RNA, 19 nt, Artificial Sequence
  Description of Artificial Sequence: Synthetic oligonucleotide
  Sense strand starting at position 1330 of SEQ ID NO: 1888319
gcagcucugcuguggguua

SEQ ID NO: 2526903 - RNA, 19 nt, Artificial Sequence
  Description of Artificial Sequence: Synthetic oligonucleotide
  Antisense strand to SEQ ID NO: 2526902
uaacccacagcagagcugc

SEQ ID NO: 2526904 - RNA, 19 nt, Artificial Sequence
  Description of Artificial Sequence: Synthetic oligonucleotide
  Sense strand starting at position 2779 of SEQ ID NO: 1888319
gcacaucugugcgugcaaa

SEQ ID NO: 2526905 - RNA, 19 nt, Artificial Sequence
  Description of Artificial Sequence: Synthetic oligonucleotide
  Antisense strand to SEQ ID NO: 2526904
uuugcacgcacagaugugc

SEQ ID NO: 2526906 - RNA, 19 nt, Artificial Sequence
  Description of Artificial Sequence: Synthetic oligonucleotide
  Sense strand starting at position 1993 of SEQ ID NO: 1888319
cagucagucucaugaggac

SEQ ID NO: 2526907 - RNA, 19 nt, Artificial Sequence
  Description of Artificial Sequence: Synthetic oligonucleotide
  Antisense strand to SEQ ID NO: 2526906
guccucaugagacugacug

SEQ ID NO: 2526908 - RNA, 19 nt, Artificial Sequence
  Description of Artificial Sequence: Synthetic oligonucleotide
  Sense strand starting at position 161 of SEQ ID NO: 1888319
ugacaugguucuugagggu

SEQ ID NO: 2526909 - RNA, 19 nt, Artificial Sequence
  Description of Artificial Sequence: Synthetic oligonucleotide
  Antisense strand to SEQ ID NO: 2526908
acccucaagaaccauguca

SEQ ID NO: 2526910 - RNA, 19 nt, Artificial Sequence
  Description of Artificial Sequence: Synthetic oligonucleotide
  Sense strand starting at position 859 of SEQ ID NO: 1888319
uuuggaaucugaggcugua

SEQ ID NO: 2526911 - RNA, 19 nt, Artificial Sequence
  Description of Artificial Sequence: Synthetic oligonucleotide
  Antisense strand to SEQ ID NO: 2526910
uacagccucagauuccaaa

SEQ ID NO: 2526912 - RNA, 19 nt, Artificial Sequence
  Description of Artificial Sequence: Synthetic oligonucleotide
  Sense strand starting at position 580 of SEQ ID NO: 1888319
uccaguuaaugcugaauua

SEQ ID NO: 2526913 - RNA, 19 nt, Artificial Sequence
  Description of Artificial Sequence: Synthetic oligonucleotide
  Antisense strand to SEQ ID NO: 2526912
uaauucagcauuaacugga

SEQ ID NO: 2526914 - RNA, 19 nt, Artificial Sequence
  Description of Artificial Sequence: Synthetic oligonucleotide
  Sense strand starting at position 537 of SEQ ID NO: 1888319
cugaguuacugcggaacca

SEQ ID NO: 2526915 - RNA, 19 nt, Artificial Sequence
  Description of Artificial Sequence: Synthetic oligonucleotide
  Antisense strand to SEQ ID NO: 2526914
ugguuccgcaguaacucag

SEQ ID NO: 2526916 - RNA, 19 nt, Artificial Sequence
  Description of Artificial Sequence: Synthetic oligonucleotide
  Sense strand starting at position 3018 of SEQ ID NO: 1888319
uugagugacuuucgaguua

SEQ ID NO: 2526917 - RNA, 19 nt, Artificial Sequence
  Description of Artificial Sequence: Synthetic oligonucleotide
  Antisense strand to SEQ ID NO: 2526916
uaacucgaaagucacucaa

SEQ ID NO: 2526918 - RNA, 19 nt, Artificial Sequence
  Description of Artificial Sequence: Synthetic oligonucleotide
  Sense strand starting at position 1363 of SEQ ID NO: 1888319
ggcgaggguucccgggaua

SEQ ID NO: 2526919 - RNA, 19 nt, Artificial Sequence
  Description of Artificial Sequence: Synthetic oligonucleotide
  Antisense strand to SEQ ID NO: 2526918
uaucccgggaacccucgcc

SEQ ID NO: 2526920 - RNA, 19 nt, Artificial Sequence
  Description of Artificial Sequence: Synthetic oligonucleotide
  Sense strand starting at position 1853 of SEQ ID NO: 1888319
ccuucucuuugauguguuu

SEQ ID NO: 2526921 - RNA, 19 nt, Artificial Sequence
  Description of Artificial Sequence: Synthetic oligonucleotide
  Antisense strand to SEQ ID NO: 2526920
aaacacaucaaagagaagg

SEQ ID NO: 2526922 - RNA, 19 nt, Artificial Sequence
  Description of Artificial Sequence: Synthetic oligonucleotide
  Sense strand starting at position 2811 of SEQ ID NO: 1888318
acaucugugcgugcaaacu

SEQ ID NO: 2526923 - RNA, 19 nt, Artificial Sequence
  Description of Artificial Sequence: Synthetic oligonucleotide
  Antisense strand to SEQ ID NO: 2526922
aguuugcacgcacagaugu

SEQ ID NO: 2526924 - RNA, 19 nt, Artificial Sequence
  Description of Artificial Sequence: Synthetic oligonucleotide
  Sense strand starting at position 1523 of SEQ ID NO: 1888318
ccaccugaccaguggagaa

SEQ ID NO: 2526925 - RNA, 19 nt, Artificial Sequence
  Description of Artificial Sequence: Synthetic oligonucleotide
  Antisense strand to SEQ ID NO: 2526924
uucuccacuggucaggugg

SEQ ID NO: 2526926 - RNA, 19 nt, Artificial Sequence
  Description of Artificial Sequence: Synthetic oligonucleotide
  Sense strand starting at position 738 of SEQ ID NO: 1888318
ggcaguuccguccugcaga

SEQ ID NO: 2526927 - RNA, 19 nt, Artificial Sequence
  Description of Artificial Sequence: Synthetic oligonucleotide
  Antisense strand to SEQ ID NO: 2526926
ucugcaggacggaacugcc

SEQ ID NO: 2526928 - RNA, 19 nt, Artificial Sequence
  Description of Artificial Sequence: Synthetic oligonucleotide
  Sense strand starting at position 2904 of SEQ ID NO: 1888318
uuucaugugggaugagaac

SEQ ID NO: 2526929 - RNA, 19 nt, Artificial Sequence
  Description of Artificial Sequence: Synthetic oligonucleotide
  Antisense strand to SEQ ID NO: 2526928
guucucaucccacaugaaa

SEQ ID NO: 2526930 - RNA, 19 nt, Artificial Sequence
  Description of Artificial Sequence: Synthetic oligonucleotide
  Sense strand starting at position 611 of SEQ ID NO: 1888318
ccaguuaaugcugaauuag

SEQ ID NO: 2526931 - RNA, 19 nt, Artificial Sequence
  Description of Artificial Sequence: Synthetic oligonucleotide
  Antisense strand to SEQ ID NO: 2526930
cuaauucagcauuaacugg

SEQ ID NO: 2526932 - RNA, 19 nt, Artificial Sequence
  Description of Artificial Sequence: Synthetic oligonucleotide
  Sense strand starting at position 568 of SEQ ID NO: 1888318
ugaguuacugcggaaccaa

SEQ ID NO: 2526933 - RNA, 19 nt, Artificial Sequence
  Description of Artificial Sequence: Synthetic oligonucleotide
  Antisense strand to SEQ ID NO: 2526932
uugguuccgcaguaacuca

SEQ ID NO: 2526934 - RNA, 19 nt, Artificial Sequence
  Description of Artificial Sequence: Synthetic oligonucleotide
  Sense strand starting at position 123 of SEQ ID NO: 1888318
gcaaaucaagcuuggaaau

SEQ ID NO: 2526935 - RNA, 19 nt, Artificial Sequence
  Description of Artificial Sequence: Synthetic oligonucleotide
  Antisense strand to SEQ ID NO: 2526934
auuuccaagcuugauuugc

SEQ ID NO: 2526936 - RNA, 19 nt, Artificial Sequence
  Description of Artificial Sequence: Synthetic oligonucleotide
  Sense strand starting at position 485 of SEQ ID NO: 1888318
gggucauaugaguggaucu

SEQ ID NO: 2526937 - RNA, 19 nt, Artificial Sequence
  Description of Artificial Sequence: Synthetic oligonucleotide
  Antisense strand to SEQ ID NO: 2526936
agauccacucauaugaccc

SEQ ID NO: 2526938 - RNA, 19 nt, Artificial Sequence
  Description of Artificial Sequence: Synthetic oligonucleotide
  Sense strand starting at position 681 of SEQ ID NO: 1888318
caguguuuggaggauagcu

SEQ ID NO: 2526939 - RNA, 19 nt, Artificial Sequence
  Description of Artificial Sequence: Synthetic oligonucleotide
  Antisense strand to SEQ ID NO: 2526938
agcuauccuccaaacacug

SEQ ID NO: 2526940 - RNA, 19 nt, Artificial Sequence
  Description of Artificial Sequence: Synthetic oligonucleotide
  Sense strand starting at position 1988 of SEQ ID NO: 1888318
gcaggagguuucucagaug

SEQ ID NO: 2526941 - RNA, 19 nt, Artificial Sequence
  Description of Artificial Sequence: Synthetic oligonucleotide
  Antisense strand to SEQ ID NO: 2526940
caucugagaaaccuccugc

SEQ ID NO: 2526942 - RNA, 19 nt, Artificial Sequence
  Description of Artificial Sequence: Synthetic oligonucleotide
  Sense strand starting at position 139 of SEQ ID NO: 1888318
aaugguguccuggagcuua

SEQ ID NO: 2526943 - RNA, 19 nt, Artificial Sequence
  Description of Artificial Sequence: Synthetic oligonucleotide
  Antisense strand to SEQ ID NO: 2526942
uaagcuccaggacaccauu

SEQ ID NO: 2526944 - RNA, 19 nt, Artificial Sequence
  Description of Artificial Sequence: Synthetic oligonucleotide
  Sense strand starting at position 1580 of SEQ ID NO: 1888318
ccuccaaucccuggucaga

SEQ ID NO: 2526945 - RNA, 19 nt, Artificial Sequence
  Description of Artificial Sequence: Synthetic oligonucleotide
  Antisense strand to SEQ ID NO: 2526944
ucugaccagggauuggagg

SEQ ID NO: 2526946 - RNA, 19 nt, Artificial Sequence
  Description of Artificial Sequence: Synthetic oligonucleotide
  Sense strand starting at position 23 of SEQ ID NO: 1888318
aucuccuucccagaguguu

SEQ ID NO: 2526947 - RNA, 19 nt, Artificial Sequence
  Description of Artificial Sequence: Synthetic oligonucleotide
  Antisense strand to SEQ ID NO: 2526946
aacacucugggaaggagau

SEQ ID NO: 2526948 - RNA, 19 nt, Artificial Sequence
  Description of Artificial Sequence: Synthetic oligonucleotide
  Sense strand starting at position 163 of SEQ ID NO: 1888318
guuggaaaccauggcuuau

SEQ ID NO: 2526949 - RNA, 19 nt, Artificial Sequence
  Description of Artificial Sequence: Synthetic oligonucleotide
  Antisense strand to SEQ ID NO: 2526948
auaagccaugguuuccaac

SEQ ID NO: 2526950 - RNA, 19 nt, Artificial Sequence
  Description of Artificial Sequence: Synthetic oligonucleotide
  Sense strand starting at position 1535 of SEQ ID NO: 1888318
uggagaacucgcgagcacu

SEQ ID NO: 2526951 - RNA, 19 nt, Artificial Sequence
  Description of Artificial Sequence: Synthetic oligonucleotide
  Antisense strand to SEQ ID NO: 2526950
agugcucgcgaguucucca

SEQ ID NO: 2526952 - RNA, 19 nt, Artificial Sequence
  Description of Artificial Sequence: Synthetic oligonucleotide
  Sense strand starting at position 1890 of SEQ ID NO: 1888318
uuugauguguuuccacuga

SEQ ID NO: 2526953 - RNA, 19 nt, Artificial Sequence
  Description of Artificial Sequence: Synthetic oligonucleotide
  Antisense strand to SEQ ID NO: 2526952
ucaguggaaacacaucaaa

SEQ ID NO: 2526954 - RNA, 19 nt, Artificial Sequence
  Description of Artificial Sequence: Synthetic oligonucleotide
  Sense strand starting at position 3044 of SEQ ID NO: 1888318
uaguuugagugacuuucga

SEQ ID NO: 2526955 - RNA, 19 nt, Artificial Sequence
  Description of Artificial Sequence: Synthetic oligonucleotide
  Antisense strand to SEQ ID NO: 2526954
ucgaaagucacucaaacua

SEQ ID NO: 2526956 - RNA, 19 nt, Artificial Sequence
  Description of Artificial Sequence: Synthetic oligonucleotide
  Sense strand starting at position 1894 of SEQ ID NO: 1888318
auguguuuccacugagggu

SEQ ID NO: 2526957 - RNA, 19 nt, Artificial Sequence
  Description of Artificial Sequence: Synthetic oligonucleotide
  Antisense strand to SEQ ID NO: 2526956
acccucaguggaaacacau

SEQ ID NO: 2526958 - RNA, 19 nt, Artificial Sequence
  Description of Artificial Sequence: Synthetic oligonucleotide
  Sense strand starting at position 645 of SEQ ID NO: 1888318
gucaaauauuaacagagga

SEQ ID NO: 2526959 - RNA, 19 nt, Artificial Sequence
  Description of Artificial Sequence: Synthetic oligonucleotide
  Antisense strand to SEQ ID NO: 2526958
uccucuguuaauauuugac

SEQ ID NO: 2526960 - RNA, 19 nt, Artificial Sequence
  Description of Artificial Sequence: Synthetic oligonucleotide
  Sense strand starting at position 777 of SEQ ID NO: 1888318
gcccuuacuggccaguuua

SEQ ID NO: 2526961 - RNA, 19 nt, Artificial Sequence
  Description of Artificial Sequence: Synthetic oligonucleotide
  Antisense strand to SEQ ID NO: 2526960
uaaacuggccaguaagggc

SEQ ID NO: 2526962 - RNA, 19 nt, Artificial Sequence
  Description of Artificial Sequence: Synthetic oligonucleotide
  Sense strand starting at position 590 of SEQ ID NO: 1888318
gcucauggccauugaguga

SEQ ID NO: 2526963 - RNA, 19 nt, Artificial Sequence
  Description of Artificial Sequence: Synthetic oligonucleotide
  Antisense strand to SEQ ID NO: 2526962
ucacucaauggccaugagc

SEQ ID NO: 2526964 - RNA, 19 nt, Artificial Sequence
  Description of Artificial Sequence: Synthetic oligonucleotide
  Sense strand starting at position 2936 of SEQ ID NO: 1888318
gagugugacuccucugguu

SEQ ID NO: 2526965 - RNA, 19 nt, Artificial Sequence
  Description of Artificial Sequence: Synthetic oligonucleotide
  Antisense strand to SEQ ID NO: 2526964
aaccagaggagucacacuc

SEQ ID NO: 2526966 - RNA, 19 nt, Artificial Sequence
  Description of Artificial Sequence: Synthetic oligonucleotide
  Sense strand starting at position 642 of SEQ ID NO: 1888318
ugagucaaauauuaacaga

SEQ ID NO: 2526967 - RNA, 19 nt, Artificial Sequence
  Description of Artificial Sequence: Synthetic oligonucleotide
  Antisense strand to SEQ ID NO: 2526966
ucuguuaauauuugacuca

SEQ ID NO: 2526968 - RNA, 19 nt, Artificial Sequence
  Description of Artificial Sequence: Synthetic oligonucleotide
  Sense strand starting at position 176 of SEQ ID NO: 1888318
gcuuauguuccauggugac

SEQ ID NO: 2526969 - RNA, 19 nt, Artificial Sequence
  Description of Artificial Sequence: Synthetic oligonucleotide
  Antisense strand to SEQ ID NO: 2526968
gucaccauggaacauaagc

SEQ ID NO: 2526970 - RNA, 19 nt, Artificial Sequence
  Description of Artificial Sequence: Synthetic oligonucleotide
  Sense strand starting at position 205 of SEQ ID NO: 1888318
aggguuagcugguccaguu

SEQ ID NO: 2526971 - RNA, 19 nt, Artificial Sequence
  Description of Artificial Sequence: Synthetic oligonucleotide
  Antisense strand to SEQ ID NO: 2526970
aacuggaccagcuaacccu

SEQ ID NO: 2526972 - RNA, 19 nt, Artificial Sequence
  Description of Artificial Sequence: Synthetic oligonucleotide
  Sense strand starting at position 2045 of SEQ ID NO: 1888318
gugggucugacuuguggca

SEQ ID NO: 2526973 - RNA, 19 nt, Artificial Sequence
  Description of Artificial Sequence: Synthetic oligonucleotide
  Antisense strand to SEQ ID NO: 2526972
ugccacaagucagacccac

SEQ ID NO: 2526974 - RNA, 19 nt, Artificial Sequence
  Description of Artificial Sequence: Synthetic oligonucleotide
  Sense strand starting at position 1979 of SEQ ID NO: 1888318
uagccauucgcaggagguu

SEQ ID NO: 2526975 - RNA, 19 nt, Artificial Sequence
  Description of Artificial Sequence: Synthetic oligonucleotide
  Antisense strand to SEQ ID NO: 2526974
aaccuccugcgaauggcua

SEQ ID NO: 2526976 - RNA, 19 nt, Artificial Sequence
  Description of Artificial Sequence: Synthetic oligonucleotide
  Sense strand starting at position 2902 of SEQ ID NO: 1888318
ucuuucaugugggaugaga

SEQ ID NO: 2526977 - RNA, 19 nt, Artificial Sequence
  Description of Artificial Sequence: Synthetic oligonucleotide
  Antisense strand to SEQ ID NO: 2526976
ucucaucccacaugaaaga

SEQ ID NO: 2526978 - RNA, 19 nt, Artificial Sequence
  Description of Artificial Sequence: Synthetic oligonucleotide
  Sense strand starting at position 237 of SEQ ID NO: 1888318
cggucuggucccugagugu

SEQ ID NO: 2526979 - RNA, 19 nt, Artificial Sequence
  Description of Artificial Sequence: Synthetic oligonucleotide
  Antisense strand to SEQ ID NO: 2526978
acacucagggaccagaccg

SEQ ID NO: 2526980 - RNA, 19 nt, Artificial Sequence
  Description of Artificial Sequence: Synthetic oligonucleotide
  Sense strand starting at position 479 of SEQ ID NO: 1888318
cuccaagggucauaugagu

SEQ ID NO: 2526981 - RNA, 19 nt, Artificial Sequence
  Description of Artificial Sequence: Synthetic oligonucleotide
  Antisense strand to SEQ ID NO: 2526980
acucauaugacccuuggag

SEQ ID NO: 2526982 - RNA, 19 nt, Artificial Sequence
  Description of Artificial Sequence: Synthetic oligonucleotide
  Sense strand starting at position 1360 of SEQ ID NO: 1888318
gcagcucugcuguggguua

SEQ ID NO: 2526983 - RNA, 19 nt, Artificial Sequence
  Description of Artificial Sequence: Synthetic oligonucleotide
  Antisense strand to SEQ ID NO: 2526982
uaacccacagcagagcugc

SEQ ID NO: 2526984 - RNA, 19 nt, Artificial Sequence
  Description of Artificial Sequence: Synthetic oligonucleotide
  Sense strand starting at position 2809 of SEQ ID NO: 1888318
gcacaucugugcgugcaaa

SEQ ID NO: 2526985 - RNA, 19 nt, Artificial Sequence
  Description of Artificial Sequence: Synthetic oligonucleotide
  Antisense strand to SEQ ID NO: 2526984
uuugcacgcacagaugugc

SEQ ID NO: 2526986 - RNA, 19 nt, Artificial Sequence
  Description of Artificial Sequence: Synthetic oligonucleotide
  Sense strand starting at position 2023 of SEQ ID NO: 1888318
cagucagucucaugaggac

SEQ ID NO: 2526987 - RNA, 19 nt, Artificial Sequence
  Description of Artificial Sequence: Synthetic oligonucleotide
  Antisense strand to SEQ ID NO: 2526986
guccucaugagacugacug

SEQ ID NO: 2526988 - RNA, 19 nt, Artificial Sequence
  Description of Artificial Sequence: Synthetic oligonucleotide
  Sense strand starting at position 191 of SEQ ID NO: 1888318
ugacaugguucuugagggu

SEQ ID NO: 2526989 - RNA, 19 nt, Artificial Sequence
  Description of Artificial Sequence: Synthetic oligonucleotide
  Antisense strand to SEQ ID NO: 2526988
acccucaagaaccauguca

SEQ ID NO: 2526990 - RNA, 19 nt, Artificial Sequence
  Description of Artificial Sequence: Synthetic oligonucleotide
  Sense strand starting at position 889 of SEQ ID NO: 1888318
uuuggaaucugaggcugua

SEQ ID NO: 2526991 - RNA, 19 nt, Artificial Sequence
  Description of Artificial Sequence: Synthetic oligonucleotide
  Antisense strand to SEQ ID NO: 2526990
uacagccucagauuccaaa

SEQ ID NO: 2526992 - RNA, 19 nt, Artificial Sequence
  Description of Artificial Sequence: Synthetic oligonucleotide
  Sense strand starting at position 610 of SEQ ID NO: 1888318
uccaguuaaugcugaauua

SEQ ID NO: 2526993 - RNA, 19 nt, Artificial Sequence
  Description of Artificial Sequence: Synthetic oligonucleotide
  Antisense strand to SEQ ID NO: 2526992
uaauucagcauuaacugga

SEQ ID NO: 2526994 - RNA, 19 nt, Artificial Sequence
  Description of Artificial Sequence: Synthetic oligonucleotide
  Sense strand starting at position 567 of SEQ ID NO: 1888318
cugaguuacugcggaacca

SEQ ID NO: 2526995 - RNA, 19 nt, Artificial Sequence
  Description of Artificial Sequence: Synthetic oligonucleotide
  Antisense strand to SEQ ID NO: 2526994
ugguuccgcaguaacucag

SEQ ID NO: 2526996 - RNA, 19 nt, Artificial Sequence
  Description of Artificial Sequence: Synthetic oligonucleotide
  Sense strand starting at position 3048 of SEQ ID NO: 1888318
uugagugacuuucgaguua

SEQ ID NO: 2526997 - RNA, 19 nt, Artificial Sequence
  Description of Artificial Sequence: Synthetic oligonucleotide
  Antisense strand to SEQ ID NO: 2526996
uaacucgaaagucacucaa

SEQ ID NO: 2526998 - RNA, 19 nt, Artificial Sequence
  Description of Artificial Sequence: Synthetic oligonucleotide
  Sense strand starting at position 1393 of SEQ ID NO: 1888318
ggcgaggguucccgggaua

SEQ ID NO: 2526999 - RNA, 19 nt, Artificial Sequence
  Description of Artificial Sequence: Synthetic oligonucleotide
  Antisense strand to SEQ ID NO: 2526998
uaucccgggaacccucgcc

SEQ ID NO: 2527000 - RNA, 19 nt, Artificial Sequence
  Description of Artificial Sequence: Synthetic oligonucleotide
  Sense strand starting at position 1883 of SEQ ID NO: 1888318
ccuucucuuugauguguuu

SEQ ID NO: 2527001 - RNA, 19 nt, Artificial Sequence
  Description of Artificial Sequence: Synthetic oligonucleotide
  Antisense strand to SEQ ID NO: 2527000
aaacacaucaaagagaagg

SEQ ID NO: 2527002 - RNA, 19 nt, Artificial Sequence
  Description of Artificial Sequence: Synthetic oligonucleotide
  Sense strand starting at position 1243 of SEQ ID NO: 1888320
ggcagaauccugggaaacu

SEQ ID NO: 2527003 - RNA, 19 nt, Artificial Sequence
  Description of Artificial Sequence: Synthetic oligonucleotide
  Antisense strand to SEQ ID NO: 2527002
aguuucccaggauucugcc

SEQ ID NO: 2527004 - RNA, 19 nt, Artificial Sequence
  Description of Artificial Sequence: Synthetic oligonucleotide
  Sense strand starting at position 3588 of SEQ ID NO: 1888320
agcagucauagggaacagu

SEQ ID NO: 2527005 - RNA, 19 nt, Artificial Sequence
  Description of Artificial Sequence: Synthetic oligonucleotide
  Antisense strand to SEQ ID NO: 2527004
acuguucccuaugacugcu

SEQ ID NO: 2527006 - RNA, 19 nt, Artificial Sequence
  Description of Artificial Sequence: Synthetic oligonucleotide
  Sense strand starting at position 2594 of SEQ ID NO: 1888320
ggaaucugugcuuagagau

SEQ ID NO: 2527007 - RNA, 19 nt, Artificial Sequence
  Description of Artificial Sequence: Synthetic oligonucleotide
  Antisense strand to SEQ ID NO: 2527006
aucucuaagcacagauucc

SEQ ID NO: 2527008 - RNA, 19 nt, Artificial Sequence
  Description of Artificial Sequence: Synthetic oligonucleotide
  Sense strand starting at position 2149 of SEQ ID NO: 1888320
gcauuucaugguggcagau

SEQ ID NO: 2527009 - RNA, 19 nt, Artificial Sequence
  Description of Artificial Sequence: Synthetic oligonucleotide
  Antisense strand to SEQ ID NO: 2527008
aucugccaccaugaaaugc

SEQ ID NO: 2527010 - RNA, 19 nt, Artificial Sequence
  Description of Artificial Sequence: Synthetic oligonucleotide
  Sense strand starting at position 2918 of SEQ ID NO: 1888320
gagagaccuuccuuccaug

SEQ ID NO: 2527011 - RNA, 19 nt, Artificial Sequence
  Description of Artificial Sequence: Synthetic oligonucleotide
  Antisense strand to SEQ ID NO: 2527010
cauggaaggaaggucucuc

SEQ ID NO: 2527012 - RNA, 19 nt, Artificial Sequence
  Description of Artificial Sequence: Synthetic oligonucleotide
  Sense strand starting at position 2614 of SEQ ID NO: 1888320
gugagacagggucaaguuu

SEQ ID NO: 2527013 - RNA, 19 nt, Artificial Sequence
  Description of Artificial Sequence: Synthetic oligonucleotide
  Antisense strand to SEQ ID NO: 2527012
aaacuugacccugucucac

SEQ ID NO: 2527014 - RNA, 19 nt, Artificial Sequence
  Description of Artificial Sequence: Synthetic oligonucleotide
  Sense strand starting at position 3586 of SEQ ID NO: 1888320
ugagcagucauagggaaca

SEQ ID NO: 2527015 - RNA, 19 nt, Artificial Sequence
  Description of Artificial Sequence: Synthetic oligonucleotide
  Antisense strand to SEQ ID NO: 2527014
uguucccuaugacugcuca

SEQ ID NO: 2527016 - RNA, 19 nt, Artificial Sequence
  Description of Artificial Sequence: Synthetic oligonucleotide
  Sense strand starting at position 490 of SEQ ID NO: 1888320
uccugauugcugggaacag

SEQ ID NO: 2527017 - RNA, 19 nt, Artificial Sequence
  Description of Artificial Sequence: Synthetic oligonucleotide
  Antisense strand to SEQ ID NO: 2527016
cuguucccagcaaucagga

SEQ ID NO: 2527018 - RNA, 19 nt, Artificial Sequence
  Description of Artificial Sequence: Synthetic oligonucleotide
  Sense strand starting at position 2645 of SEQ ID NO: 1888320
cuccucugucugcagagaa

SEQ ID NO: 2527019 - RNA, 19 nt, Artificial Sequence
  Description of Artificial Sequence: Synthetic oligonucleotide
  Antisense strand to SEQ ID NO: 2527018
uucucugcagacagaggag

SEQ ID NO: 2527020 - RNA, 19 nt, Artificial Sequence
  Description of Artificial Sequence: Synthetic oligonucleotide
  Sense strand starting at position 2593 of SEQ ID NO: 1888320
uggaaucugugcuuagaga

SEQ ID NO: 2527021 - RNA, 19 nt, Artificial Sequence
  Description of Artificial Sequence: Synthetic oligonucleotide
  Antisense strand to SEQ ID NO: 2527020
ucucuaagcacagauucca

SEQ ID NO: 2527022 - RNA, 19 nt, Artificial Sequence
  Description of Artificial Sequence: Synthetic oligonucleotide
  Sense strand starting at position 447 of SEQ ID NO: 1888320
gauccugugguaugaucaa

SEQ ID NO: 2527023 - RNA, 19 nt, Artificial Sequence
  Description of Artificial Sequence: Synthetic oligonucleotide
  Antisense strand to SEQ ID NO: 2527022
uugaucauaccacaggauc

SEQ ID NO: 2527024 - RNA, 19 nt, Artificial Sequence
  Description of Artificial Sequence: Synthetic oligonucleotide
  Sense strand starting at position 1315 of SEQ ID NO: 1888320
uacuguggcccaugaagau

SEQ ID NO: 2527025 - RNA, 19 nt, Artificial Sequence
  Description of Artificial Sequence: Synthetic oligonucleotide
  Antisense strand to SEQ ID NO: 2527024
aucuucaugggccacagua

SEQ ID NO: 2527026 - RNA, 19 nt, Artificial Sequence
  Description of Artificial Sequence: Synthetic oligonucleotide
  Sense strand starting at position 1963 of SEQ ID NO: 1888320
cgcugagucagaugaaaug

SEQ ID NO: 2527027 - RNA, 19 nt, Artificial Sequence
  Description of Artificial Sequence: Synthetic oligonucleotide
  Antisense strand to SEQ ID NO: 2527026
cauuucaucugacucagcg

SEQ ID NO: 2527028 - RNA, 19 nt, Artificial Sequence
  Description of Artificial Sequence: Synthetic oligonucleotide
  Sense strand starting at position 1206 of SEQ ID NO: 1888320
gacagauauucccucguau

SEQ ID NO: 2527029 - RNA, 19 nt, Artificial Sequence
  Description of Artificial Sequence: Synthetic oligonucleotide
  Antisense strand to SEQ ID NO: 2527028
auacgagggaauaucuguc

SEQ ID NO: 2527030 - RNA, 19 nt, Artificial Sequence
  Description of Artificial Sequence: Synthetic oligonucleotide
  Sense strand starting at position 2601 of SEQ ID NO: 1888320
gugcuuagagauugugaga

SEQ ID NO: 2527031 - RNA, 19 nt, Artificial Sequence
  Description of Artificial Sequence: Synthetic oligonucleotide
  Antisense strand to SEQ ID NO: 2527030
ucucacaaucucuaagcac

SEQ ID NO: 2527032 - RNA, 19 nt, Artificial Sequence
  Description of Artificial Sequence: Synthetic oligonucleotide
  Sense strand starting at position 1278 of SEQ ID NO: 1888320
gcccuuauacgaugaugau

SEQ ID NO: 2527033 - RNA, 19 nt, Artificial Sequence
  Description of Artificial Sequence: Synthetic oligonucleotide
  Antisense strand to SEQ ID NO: 2527032
aucaucaucguauaagggc

SEQ ID NO: 2527034 - RNA, 19 nt, Artificial Sequence
  Description of Artificial Sequence: Synthetic oligonucleotide
  Sense strand starting at position 2591 of SEQ ID NO: 1888320
ucuggaaucugugcuuaga

SEQ ID NO: 2527035 - RNA, 19 nt, Artificial Sequence
  Description of Artificial Sequence: Synthetic oligonucleotide
  Antisense strand to SEQ ID NO: 2527034
ucuaagcacagauuccaga

SEQ ID NO: 2527036 - RNA, 19 nt, Artificial Sequence
  Description of Artificial Sequence: Synthetic oligonucleotide
  Sense strand starting at position 2489 of SEQ ID NO: 1888320
ccguuuguucguuugcuca

SEQ ID NO: 2527037 - RNA, 19 nt, Artificial Sequence
  Description of Artificial Sequence: Synthetic oligonucleotide
  Antisense strand to SEQ ID NO: 2527036
ugagcaaacgaacaaacgg

SEQ ID NO: 2527038 - RNA, 19 nt, Artificial Sequence
  Description of Artificial Sequence: Synthetic oligonucleotide
  Sense strand starting at position 1208 of SEQ ID NO: 1888320
cagauauucccucguaugg

SEQ ID NO: 2527039 - RNA, 19 nt, Artificial Sequence
  Description of Artificial Sequence: Synthetic oligonucleotide
  Antisense strand to SEQ ID NO: 2527038
ccauacgagggaauaucug

SEQ ID NO: 2527040 - RNA, 19 nt, Artificial Sequence
  Description of Artificial Sequence: Synthetic oligonucleotide
  Sense strand starting at position 3057 of SEQ ID NO: 1888320
gguagugucccaggaacuc

SEQ ID NO: 2527041 - RNA, 19 nt, Artificial Sequence
  Description of Artificial Sequence: Synthetic oligonucleotide
  Antisense strand to SEQ ID NO: 2527040
gaguuccugggacacuacc

SEQ ID NO: 2527042 - RNA, 19 nt, Artificial Sequence
  Description of Artificial Sequence: Synthetic oligonucleotide
  Sense strand starting at position 2493 of SEQ ID NO: 1888320
uuguucguuugcucauuua

SEQ ID NO: 2527043 - RNA, 19 nt, Artificial Sequence
  Description of Artificial Sequence: Synthetic oligonucleotide
  Antisense strand to SEQ ID NO: 2527042
uaaaugagcaaacgaacaa

SEQ ID NO: 2527044 - RNA, 19 nt, Artificial Sequence
  Description of Artificial Sequence: Synthetic oligonucleotide
  Sense strand starting at position 1764 of SEQ ID NO: 1888320
cuggaucuuugugccagau

SEQ ID NO: 2527045 - RNA, 19 nt, Artificial Sequence
  Description of Artificial Sequence: Synthetic oligonucleotide
  Antisense strand to SEQ ID NO: 2527044
aucuggcacaaagauccag

SEQ ID NO: 2527046 - RNA, 19 nt, Artificial Sequence
  Description of Artificial Sequence: Synthetic oligonucleotide
  Sense strand starting at position 2440 of SEQ ID NO: 1888320
gagggagcgugauugguua

SEQ ID NO: 2527047 - RNA, 19 nt, Artificial Sequence
  Description of Artificial Sequence: Synthetic oligonucleotide
  Antisense strand to SEQ ID NO: 2527046
uaaccaaucacgcucccuc

SEQ ID NO: 2527048 - RNA, 19 nt, Artificial Sequence
  Description of Artificial Sequence: Synthetic oligonucleotide
  Sense strand starting at position 3631 of SEQ ID NO: 1888320
agggcuucgucuucucaca

SEQ ID NO: 2527049 - RNA, 19 nt, Artificial Sequence
  Description of Artificial Sequence: Synthetic oligonucleotide
  Antisense strand to SEQ ID NO: 2527048
ugugagaagacgaagcccu

SEQ ID NO: 2527050 - RNA, 19 nt, Artificial Sequence
  Description of Artificial Sequence: Synthetic oligonucleotide
  Sense strand starting at position 1244 of SEQ ID NO: 1888320
gcagaauccugggaaacua

SEQ ID NO: 2527051 - RNA, 19 nt, Artificial Sequence
  Description of Artificial Sequence: Synthetic oligonucleotide
  Antisense strand to SEQ ID NO: 2527050
uaguuucccaggauucugc

SEQ ID NO: 2527052 - RNA, 19 nt, Artificial Sequence
  Description of Artificial Sequence: Synthetic oligonucleotide
  Sense strand starting at position 3541 of SEQ ID NO: 1888320
ugcccuuaucgcugacaca

SEQ ID NO: 2527053 - RNA, 19 nt, Artificial Sequence
  Description of Artificial Sequence: Synthetic oligonucleotide
  Antisense strand to SEQ ID NO: 2527052
ugugucagcgauaagggca

SEQ ID NO: 2527054 - RNA, 19 nt, Artificial Sequence
  Description of Artificial Sequence: Synthetic oligonucleotide
  Sense strand starting at position 3922 of SEQ ID NO: 1888320
cgucguguuucucugggaa

SEQ ID NO: 2527055 - RNA, 19 nt, Artificial Sequence
  Description of Artificial Sequence: Synthetic oligonucleotide
  Antisense strand to SEQ ID NO: 2527054
uucccagagaaacacgacg

SEQ ID NO: 2527056 - RNA, 19 nt, Artificial Sequence
  Description of Artificial Sequence: Synthetic oligonucleotide
  Sense strand starting at position 2148 of SEQ ID NO: 1888320
ggcauuucaugguggcaga

SEQ ID NO: 2527057 - RNA, 19 nt, Artificial Sequence
  Description of Artificial Sequence: Synthetic oligonucleotide
  Antisense strand to SEQ ID NO: 2527056
ucugccaccaugaaaugcc

SEQ ID NO: 2527058 - RNA, 19 nt, Artificial Sequence
  Description of Artificial Sequence: Synthetic oligonucleotide
  Sense strand starting at position 3925 of SEQ ID NO: 1888320
cguguuucucugggaacgu

SEQ ID NO: 2527059 - RNA, 19 nt, Artificial Sequence
  Description of Artificial Sequence: Synthetic oligonucleotide
  Antisense strand to SEQ ID NO: 2527058
acguucccagagaaacacg

SEQ ID NO: 2527060 - RNA, 19 nt, Artificial Sequence
  Description of Artificial Sequence: Synthetic oligonucleotide
  Sense strand starting at position 2444 of SEQ ID NO: 1888320
gagcgugauugguuacggu

SEQ ID NO: 2527061 - RNA, 19 nt, Artificial Sequence
  Description of Artificial Sequence: Synthetic oligonucleotide
  Antisense strand to SEQ ID NO: 2527060
accguaaccaaucacgcuc

SEQ ID NO: 2527062 - RNA, 19 nt, Artificial Sequence
  Description of Artificial Sequence: Synthetic oligonucleotide
  Sense strand starting at position 3384 of SEQ ID NO: 1888320
gcaccuucugugugcgaga

SEQ ID NO: 2527063 - RNA, 19 nt, Artificial Sequence
  Description of Artificial Sequence: Synthetic oligonucleotide
  Antisense strand to SEQ ID NO: 2527062
ucucgcacacagaaggugc

SEQ ID NO: 2527064 - RNA, 19 nt, Artificial Sequence
  Description of Artificial Sequence: Synthetic oligonucleotide
  Sense strand starting at position 1281 of SEQ ID NO: 1888320
cuuauacgaugaugauauu

SEQ ID NO: 2527065 - RNA, 19 nt, Artificial Sequence
  Description of Artificial Sequence: Synthetic oligonucleotide
  Antisense strand to SEQ ID NO: 2527064
aauaucaucaucguauaag

SEQ ID NO: 2527066 - RNA, 19 nt, Artificial Sequence
  Description of Artificial Sequence: Synthetic oligonucleotide
  Sense strand starting at position 1110 of SEQ ID NO: 1888320
gggugccugucagagaaca

SEQ ID NO: 2527067 - RNA, 19 nt, Artificial Sequence
  Description of Artificial Sequence: Synthetic oligonucleotide
  Antisense strand to SEQ ID NO: 2527066
uguucucugacaggcaccc

SEQ ID NO: 2527068 - RNA, 19 nt, Artificial Sequence
  Description of Artificial Sequence: Synthetic oligonucleotide
  Sense strand starting at position 1728 of SEQ ID NO: 1888320
gccgcuggcaauuguguaa

SEQ ID NO: 2527069 - RNA, 19 nt, Artificial Sequence
  Description of Artificial Sequence: Synthetic oligonucleotide
  Antisense strand to SEQ ID NO: 2527068
uuacacaauugccagcggc

SEQ ID NO: 2527070 - RNA, 19 nt, Artificial Sequence
  Description of Artificial Sequence: Synthetic oligonucleotide
  Sense strand starting at position 1383 of SEQ ID NO: 1888320
gggugcuccucuuauccaa

SEQ ID NO: 2527071 - RNA, 19 nt, Artificial Sequence
  Description of Artificial Sequence: Synthetic oligonucleotide
  Antisense strand to SEQ ID NO: 2527070
uuggauaagaggagcaccc

SEQ ID NO: 2527072 - RNA, 19 nt, Artificial Sequence
  Description of Artificial Sequence: Synthetic oligonucleotide
  Sense strand starting at position 321 of SEQ ID NO: 1888320
gugugauucucacagucau

SEQ ID NO: 2527073 - RNA, 19 nt, Artificial Sequence
  Description of Artificial Sequence: Synthetic oligonucleotide
  Antisense strand to SEQ ID NO: 2527072
augacugugagaaucacac

SEQ ID NO: 2527074 - RNA, 19 nt, Artificial Sequence
  Description of Artificial Sequence: Synthetic oligonucleotide
  Sense strand starting at position 1961 of SEQ ID NO: 1888320
ugcgcugagucagaugaaa

SEQ ID NO: 2527075 - RNA, 19 nt, Artificial Sequence
  Description of Artificial Sequence: Synthetic oligonucleotide
  Antisense strand to SEQ ID NO: 2527074
uuucaucugacucagcgca

SEQ ID NO: 2527076 - RNA, 19 nt, Artificial Sequence
  Description of Artificial Sequence: Synthetic oligonucleotide
  Sense strand starting at position 1210 of SEQ ID NO: 1888320
gauauucccucguauggug

SEQ ID NO: 2527077 - RNA, 19 nt, Artificial Sequence
  Description of Artificial Sequence: Synthetic oligonucleotide
  Antisense strand to SEQ ID NO: 2527076
caccauacgagggaauauc

SEQ ID NO: 2527078 - RNA, 19 nt, Artificial Sequence
  Description of Artificial Sequence: Synthetic oligonucleotide
  Sense strand starting at position 1763 of SEQ ID NO: 1888320
acuggaucuuugugccaga

SEQ ID NO: 2527079 - RNA, 19 nt, Artificial Sequence
  Description of Artificial Sequence: Synthetic oligonucleotide
  Antisense strand to SEQ ID NO: 2527078
ucuggcacaaagauccagu

SEQ ID NO: 2527080 - RNA, 19 nt, Artificial Sequence
  Description of Artificial Sequence: Synthetic oligonucleotide
  Sense strand starting at position 1108 of SEQ ID NO: 1888320
gcgggugccugucagagaa

SEQ ID NO: 2527081 - RNA, 19 nt, Artificial Sequence
  Description of Artificial Sequence: Synthetic oligonucleotide
  Antisense strand to SEQ ID NO: 2527080
uucucugacaggcacccgc

SEQ ID NO: 2527082 - RNA, 19 nt, Artificial Sequence
  Description of Artificial Sequence: Synthetic oligonucleotide
  Sense strand starting at position 691 of SEQ ID NO: 1888321
gcugguacucaugaagaug

SEQ ID NO: 2527083 - RNA, 19 nt, Artificial Sequence
  Description of Artificial Sequence: Synthetic oligonucleotide
  Antisense strand to SEQ ID NO: 2527082
caucuucaugaguaccagc

SEQ ID NO: 2527084 - RNA, 19 nt, Artificial Sequence
  Description of Artificial Sequence: Synthetic oligonucleotide
  Sense strand starting at position 212 of SEQ ID NO: 1888321
guccacagagccuauaaau

SEQ ID NO: 2527085 - RNA, 19 nt, Artificial Sequence
  Description of Artificial Sequence: Synthetic oligonucleotide
  Antisense strand to SEQ ID NO: 2527084
auuuauaggcucuguggac

SEQ ID NO: 2527086 - RNA, 19 nt, Artificial Sequence
  Description of Artificial Sequence: Synthetic oligonucleotide
  Sense strand starting at position 173 of SEQ ID NO: 1888321
aagcuagugggugauagau

SEQ ID NO: 2527087 - RNA, 19 nt, Artificial Sequence
  Description of Artificial Sequence: Synthetic oligonucleotide
  Antisense strand to SEQ ID NO: 2527086
aucuaucacccacuagcuu

SEQ ID NO: 2527088 - RNA, 19 nt, Artificial Sequence
  Description of Artificial Sequence: Synthetic oligonucleotide
  Sense strand starting at position 2606 of SEQ ID NO: 1888321
gcagauaccggucauggaa

SEQ ID NO: 2527089 - RNA, 19 nt, Artificial Sequence
  Description of Artificial Sequence: Synthetic oligonucleotide
  Antisense strand to SEQ ID NO: 2527088
uuccaugaccgguaucugc

SEQ ID NO: 2527090 - RNA, 19 nt, Artificial Sequence
  Description of Artificial Sequence: Synthetic oligonucleotide
  Sense strand starting at position 202 of SEQ ID NO: 1888321
agaucuuucuguccacaga

SEQ ID NO: 2527091 - RNA, 19 nt, Artificial Sequence
  Description of Artificial Sequence: Synthetic oligonucleotide
  Antisense strand to SEQ ID NO: 2527090
ucuguggacagaaagaucu

SEQ ID NO: 2527092 - RNA, 19 nt, Artificial Sequence
  Description of Artificial Sequence: Synthetic oligonucleotide
  Sense strand starting at position 1094 of SEQ ID NO: 1888321
gcacaagugcaucacugaa

SEQ ID NO: 2527093 - RNA, 19 nt, Artificial Sequence
  Description of Artificial Sequence: Synthetic oligonucleotide
  Antisense strand to SEQ ID NO: 2527092
uucagugaugcacuugugc

SEQ ID NO: 2527094 - RNA, 19 nt, Artificial Sequence
  Description of Artificial Sequence: Synthetic oligonucleotide
  Sense strand starting at position 172 of SEQ ID NO: 1888321
caagcuagugggugauaga

SEQ ID NO: 2527095 - RNA, 19 nt, Artificial Sequence
  Description of Artificial Sequence: Synthetic oligonucleotide
  Antisense strand to SEQ ID NO: 2527094
ucuaucacccacuagcuug

SEQ ID NO: 2527096 - RNA, 19 nt, Artificial Sequence
  Description of Artificial Sequence: Synthetic oligonucleotide
  Sense strand starting at position 1569 of SEQ ID NO: 1888321
uugacugcucccugggaca

SEQ ID NO: 2527097 - RNA, 19 nt, Artificial Sequence
  Description of Artificial Sequence: Synthetic oligonucleotide
  Antisense strand to SEQ ID NO: 2527096
ugucccagggagcagucaa

SEQ ID NO: 2527098 - RNA, 19 nt, Artificial Sequence
  Description of Artificial Sequence: Synthetic oligonucleotide
  Sense strand starting at position 295 of SEQ ID NO: 1888321
gcaaucguggcagaauuga

SEQ ID NO: 2527099 - RNA, 19 nt, Artificial Sequence
  Description of Artificial Sequence: Synthetic oligonucleotide
  Antisense strand to SEQ ID NO: 2527098
ucaauucugccacgauugc

SEQ ID NO: 2527100 - RNA, 19 nt, Artificial Sequence
  Description of Artificial Sequence: Synthetic oligonucleotide
  Sense strand starting at position 1178 of SEQ ID NO: 1888321
agggcugcuccaggaugau

SEQ ID NO: 2527101 - RNA, 19 nt, Artificial Sequence
  Description of Artificial Sequence: Synthetic oligonucleotide
  Antisense strand to SEQ ID NO: 2527100
aucauccuggagcagcccu

SEQ ID NO: 2527102 - RNA, 19 nt, Artificial Sequence
  Description of Artificial Sequence: Synthetic oligonucleotide
  Sense strand starting at position 407 of SEQ ID NO: 1888321
ucaggauuguggucccuca

SEQ ID NO: 2527103 - RNA, 19 nt, Artificial Sequence
  Description of Artificial Sequence: Synthetic oligonucleotide
  Antisense strand to SEQ ID NO: 2527102
ugagggaccacaauccuga

SEQ ID NO: 2527104 - RNA, 19 nt, Artificial Sequence
  Description of Artificial Sequence: Synthetic oligonucleotide
  Sense strand starting at position 2667 of SEQ ID NO: 1888321
cuucuagacuucuucuagu

SEQ ID NO: 2527105 - RNA, 19 nt, Artificial Sequence
  Description of Artificial Sequence: Synthetic oligonucleotide
  Antisense strand to SEQ ID NO: 2527104
acuagaagaagucuagaag

SEQ ID NO: 2527106 - RNA, 19 nt, Artificial Sequence
  Description of Artificial Sequence: Synthetic oligonucleotide
  Sense strand starting at position 1457 of SEQ ID NO: 1888321
gugcccucugagcacaauu

SEQ ID NO: 2527107 - RNA, 19 nt, Artificial Sequence
  Description of Artificial Sequence: Synthetic oligonucleotide
  Antisense strand to SEQ ID NO: 2527106
aauugugcucagagggcac

SEQ ID NO: 2527108 - RNA, 19 nt, Artificial Sequence
  Description of Artificial Sequence: Synthetic oligonucleotide
  Sense strand starting at position 3903 of SEQ ID NO: 1888321
guagccagagccugacaau

SEQ ID NO: 2527109 - RNA, 19 nt, Artificial Sequence
  Description of Artificial Sequence: Synthetic oligonucleotide
  Antisense strand to SEQ ID NO: 2527108
auugucaggcucuggcuac

SEQ ID NO: 2527110 - RNA, 19 nt, Artificial Sequence
  Description of Artificial Sequence: Synthetic oligonucleotide
  Sense strand starting at position 3287 of SEQ ID NO: 1888321
gguacacccucagugcaau

SEQ ID NO: 2527111 - RNA, 19 nt, Artificial Sequence
  Description of Artificial Sequence: Synthetic oligonucleotide
  Antisense strand to SEQ ID NO: 2527110
auugcacugaggguguacc

SEQ ID NO: 2527112 - RNA, 19 nt, Artificial Sequence
  Description of Artificial Sequence: Synthetic oligonucleotide
  Sense strand starting at position 291 of SEQ ID NO: 1888321
cuaggcaaucguggcagaa

SEQ ID NO: 2527113 - RNA, 19 nt, Artificial Sequence
  Description of Artificial Sequence: Synthetic oligonucleotide
  Antisense strand to SEQ ID NO: 2527112
uucugccacgauugccuag

SEQ ID NO: 2527114 - RNA, 19 nt, Artificial Sequence
  Description of Artificial Sequence: Synthetic oligonucleotide
  Sense strand starting at position 2370 of SEQ ID NO: 1888321
gaacuaugaucuggagaua

SEQ ID NO: 2527115 - RNA, 19 nt, Artificial Sequence
  Description of Artificial Sequence: Synthetic oligonucleotide
  Antisense strand to SEQ ID NO: 2527114
uaucuccagaucauaguuc

SEQ ID NO: 2527116 - RNA, 19 nt, Artificial Sequence
  Description of Artificial Sequence: Synthetic oligonucleotide
  Sense strand starting at position 2670 of SEQ ID NO: 1888321
cuagacuucuucuagucau

SEQ ID NO: 2527117 - RNA, 19 nt, Artificial Sequence
  Description of Artificial Sequence: Synthetic oligonucleotide
  Antisense strand to SEQ ID NO: 2527116
augacuagaagaagucuag

SEQ ID NO: 2527118 - RNA, 19 nt, Artificial Sequence
  Description of Artificial Sequence: Synthetic oligonucleotide
  Sense strand starting at position 15 of SEQ ID NO: 1888321
agaggaguguucuggacac

SEQ ID NO: 2527119 - RNA, 19 nt, Artificial Sequence
  Description of Artificial Sequence: Synthetic oligonucleotide
  Antisense strand to SEQ ID NO: 2527118
guguccagaacacuccucu

SEQ ID NO: 2527120 - RNA, 19 nt, Artificial Sequence
  Description of Artificial Sequence: Synthetic oligonucleotide
  Sense strand starting at position 175 of SEQ ID NO: 1888321
gcuagugggugauagauau

SEQ ID NO: 2527121 - RNA, 19 nt, Artificial Sequence
  Description of Artificial Sequence: Synthetic oligonucleotide
  Antisense strand to SEQ ID NO: 2527120
auaucuaucacccacuagc

SEQ ID NO: 2527122 - RNA, 19 nt, Artificial Sequence
  Description of Artificial Sequence: Synthetic oligonucleotide
  Sense strand starting at position 2358 of SEQ ID NO: 1888321
ugggcucugugggaacuau

SEQ ID NO: 2527123 - RNA, 19 nt, Artificial Sequence
  Description of Artificial Sequence: Synthetic oligonucleotide
  Antisense strand to SEQ ID NO: 2527122
auaguucccacagagccca

SEQ ID NO: 2527124 - RNA, 19 nt, Artificial Sequence
  Description of Artificial Sequence: Synthetic oligonucleotide
  Sense strand starting at position 2938 of SEQ ID NO: 1888321
gggcuuuggucagauccca

SEQ ID NO: 2527125 - RNA, 19 nt, Artificial Sequence
  Description of Artificial Sequence: Synthetic oligonucleotide
  Antisense strand to SEQ ID NO: 2527124
ugggaucugaccaaagccc

SEQ ID NO: 2527126 - RNA, 19 nt, Artificial Sequence
  Description of Artificial Sequence: Synthetic oligonucleotide
  Sense strand starting at position 3906 of SEQ ID NO: 1888321
gccagagccugacaauagu

SEQ ID NO: 2527127 - RNA, 19 nt, Artificial Sequence
  Description of Artificial Sequence: Synthetic oligonucleotide
  Antisense strand to SEQ ID NO: 2527126
acuauugucaggcucuggc

SEQ ID NO: 2527128 - RNA, 19 nt, Artificial Sequence
  Description of Artificial Sequence: Synthetic oligonucleotide
  Sense strand starting at position 1718 of SEQ ID NO: 1888321
agacuuacuugaugccuua

SEQ ID NO: 2527129 - RNA, 19 nt, Artificial Sequence
  Description of Artificial Sequence: Synthetic oligonucleotide
  Antisense strand to SEQ ID NO: 2527128
uaaggcaucaaguaagucu

SEQ ID NO: 2527130 - RNA, 19 nt, Artificial Sequence
  Description of Artificial Sequence: Synthetic oligonucleotide
  Sense strand starting at position 293 of SEQ ID NO: 1888321
aggcaaucguggcagaauu

SEQ ID NO: 2527131 - RNA, 19 nt, Artificial Sequence
  Description of Artificial Sequence: Synthetic oligonucleotide
  Antisense strand to SEQ ID NO: 2527130
aauucugccacgauugccu

SEQ ID NO: 2527132 - RNA, 19 nt, Artificial Sequence
  Description of Artificial Sequence: Synthetic oligonucleotide
  Sense strand starting at position 1130 of SEQ ID NO: 1888321
uggccuuggucuugaggaa

SEQ ID NO: 2527133 - RNA, 19 nt, Artificial Sequence
  Description of Artificial Sequence: Synthetic oligonucleotide
  Antisense strand to SEQ ID NO: 2527132
uuccucaagaccaaggcca

SEQ ID NO: 2527134 - RNA, 19 nt, Artificial Sequence
  Description of Artificial Sequence: Synthetic oligonucleotide
  Sense strand starting at position 1199 of SEQ ID NO: 1888321
ugucuaaaguugugcacaa

SEQ ID NO: 2527135 - RNA, 19 nt, Artificial Sequence
  Description of Artificial Sequence: Synthetic oligonucleotide
  Antisense strand to SEQ ID NO: 2527134
uugugcacaacuuuagaca

SEQ ID NO: 2527136 - RNA, 19 nt, Artificial Sequence
  Description of Artificial Sequence: Synthetic oligonucleotide
  Sense strand starting at position 2318 of SEQ ID NO: 1888322
acacuuaauguguaaugau

SEQ ID NO: 2527137 - RNA, 19 nt, Artificial Sequence
  Description of Artificial Sequence: Synthetic oligonucleotide
  Antisense strand to SEQ ID NO: 2527136
aucauuacacauuaagugu

SEQ ID NO: 2527138 - RNA, 19 nt, Artificial Sequence
  Description of Artificial Sequence: Synthetic oligonucleotide
  Sense strand starting at position 2989 of SEQ ID NO: 1888322
ggacgacuccuuuaaucau

SEQ ID NO: 2527139 - RNA, 19 nt, Artificial Sequence
  Description of Artificial Sequence: Synthetic oligonucleotide
  Antisense strand to SEQ ID NO: 2527138
augauuaaaggagucgucc

SEQ ID NO: 2527140 - RNA, 19 nt, Artificial Sequence
  Description of Artificial Sequence: Synthetic oligonucleotide
  Sense strand starting at position 414 of SEQ ID NO: 1888322
cagcuauaggaguaccaau

SEQ ID NO: 2527141 - RNA, 19 nt, Artificial Sequence
  Description of Artificial Sequence: Synthetic oligonucleotide
  Antisense strand to SEQ ID NO: 2527140
auugguacuccuauagcug

SEQ ID NO: 2527142 - RNA, 19 nt, Artificial Sequence
  Description of Artificial Sequence: Synthetic oligonucleotide
  Sense strand starting at position 989 of SEQ ID NO: 1888322
agaauugacuacuuuguaa

SEQ ID NO: 2527143 - RNA, 19 nt, Artificial Sequence
  Description of Artificial Sequence: Synthetic oligonucleotide
  Antisense strand to SEQ ID NO: 2527142
uuacaaaguagucaauucu

SEQ ID NO: 2527144 - RNA, 19 nt, Artificial Sequence
  Description of Artificial Sequence: Synthetic oligonucleotide
  Sense strand starting at position 3615 of SEQ ID NO: 1888322
gaguuugccagaggaagaa

SEQ ID NO: 2527145 - RNA, 19 nt, Artificial Sequence
  Description of Artificial Sequence: Synthetic oligonucleotide
  Antisense strand to SEQ ID NO: 2527144
uucuuccucuggcaaacuc

SEQ ID NO: 2527146 - RNA, 19 nt, Artificial Sequence
  Description of Artificial Sequence: Synthetic oligonucleotide
  Sense strand starting at position 3082 of SEQ ID NO: 1888322
ccaaguaacuccuuaggga

SEQ ID NO: 2527147 - RNA, 19 nt, Artificial Sequence
  Description of Artificial Sequence: Synthetic oligonucleotide
  Antisense strand to SEQ ID NO: 2527146
ucccuaaggaguuacuugg

SEQ ID NO: 2527148 - RNA, 19 nt, Artificial Sequence
  Description of Artificial Sequence: Synthetic oligonucleotide
  Sense strand starting at position 241 of SEQ ID NO: 1888322
auuaucgacacguaauaga

SEQ ID NO: 2527149 - RNA, 19 nt, Artificial Sequence
  Description of Artificial Sequence: Synthetic oligonucleotide
  Antisense strand to SEQ ID NO: 2527148
ucuauuacgugucgauaau

SEQ ID NO: 2527150 - RNA, 19 nt, Artificial Sequence
  Description of Artificial Sequence: Synthetic oligonucleotide
  Sense strand starting at position 2728 of SEQ ID NO: 1888322
uuaaucccagguuaguaua

SEQ ID NO: 2527151 - RNA, 19 nt, Artificial Sequence
  Description of Artificial Sequence: Synthetic oligonucleotide
  Antisense strand to SEQ ID NO: 2527150
uauacuaaccugggauuaa

SEQ ID NO: 2527152 - RNA, 19 nt, Artificial Sequence
  Description of Artificial Sequence: Synthetic oligonucleotide
  Sense strand starting at position 3288 of SEQ ID NO: 1888322
agcuucgugaaucaggaaa

SEQ ID NO: 2527153 - RNA, 19 nt, Artificial Sequence
  Description of Artificial Sequence: Synthetic oligonucleotide
  Antisense strand to SEQ ID NO: 2527152
uuuccugauucacgaagcu

SEQ ID NO: 2527154 - RNA, 19 nt, Artificial Sequence
  Description of Artificial Sequence: Synthetic oligonucleotide
  Sense strand starting at position 237 of SEQ ID NO: 1888322
auauauuaucgacacguaa

SEQ ID NO: 2527155 - RNA, 19 nt, Artificial Sequence
  Description of Artificial Sequence: Synthetic oligonucleotide
  Antisense strand to SEQ ID NO: 2527154
uuacgugucgauaauauau

SEQ ID NO: 2527156 - RNA, 19 nt, Artificial Sequence
  Description of Artificial Sequence: Synthetic oligonucleotide
  Sense strand starting at position 3442 of SEQ ID NO: 1888322
aucucuggaucugcaagaa

SEQ ID NO: 2527157 - RNA, 19 nt, Artificial Sequence
  Description of Artificial Sequence: Synthetic oligonucleotide
  Antisense strand to SEQ ID NO: 2527156
uucuugcagauccagagau

SEQ ID NO: 2527158 - RNA, 19 nt, Artificial Sequence
  Description of Artificial Sequence: Synthetic oligonucleotide
  Sense strand starting at position 3628 of SEQ ID NO: 1888322
gaagaaacauguuuggucu

SEQ ID NO: 2527159 - RNA, 19 nt, Artificial Sequence
  Description of Artificial Sequence: Synthetic oligonucleotide
  Antisense strand to SEQ ID NO: 2527158
agaccaaacauguuucuuc

SEQ ID NO: 2527160 - RNA, 19 nt, Artificial Sequence
  Description of Artificial Sequence: Synthetic oligonucleotide
  Sense strand starting at position 596 of SEQ ID NO: 1888322
aauaaaggauaggagaaau

SEQ ID NO: 2527161 - RNA, 19 nt, Artificial Sequence
  Description of Artificial Sequence: Synthetic oligonucleotide
  Antisense strand to SEQ ID NO: 2527160
auuucuccuauccuuuauu

SEQ ID NO: 2527162 - RNA, 19 nt, Artificial Sequence
  Description of Artificial Sequence: Synthetic oligonucleotide
  Sense strand starting at position 3517 of SEQ ID NO: 1888322
uguugaugccuuuagaaau

SEQ ID NO: 2527163 - RNA, 19 nt, Artificial Sequence
  Description of Artificial Sequence: Synthetic oligonucleotide
  Antisense strand to SEQ ID NO: 2527162
auuucuaaaggcaucaaca

SEQ ID NO: 2527164 - RNA, 19 nt, Artificial Sequence
  Description of Artificial Sequence: Synthetic oligonucleotide
  Sense strand starting at position 3175 of SEQ ID NO: 1888322
augagaacaucuguccuuu

SEQ ID NO: 2527165 - RNA, 19 nt, Artificial Sequence
  Description of Artificial Sequence: Synthetic oligonucleotide
  Antisense strand to SEQ ID NO: 2527164
aaaggacagauguucucau

SEQ ID NO: 2527166 - RNA, 19 nt, Artificial Sequence
  Description of Artificial Sequence: Synthetic oligonucleotide
  Sense strand starting at position 1179 of SEQ ID NO: 1888322
cuaagaaugcaauguuaau

SEQ ID NO: 2527167 - RNA, 19 nt, Artificial Sequence
  Description of Artificial Sequence: Synthetic oligonucleotide
  Antisense strand to SEQ ID NO: 2527166
auuaacauugcauucuuag

SEQ ID NO: 2527168 - RNA, 19 nt, Artificial Sequence
  Description of Artificial Sequence: Synthetic oligonucleotide
  Sense strand starting at position 3023 of SEQ ID NO: 1888322
cuucucuaucagugagaua

SEQ ID NO: 2527169 - RNA, 19 nt, Artificial Sequence
  Description of Artificial Sequence: Synthetic oligonucleotide
  Antisense strand to SEQ ID NO: 2527168
uaucucacugauagagaag

SEQ ID NO: 2527170 - RNA, 19 nt, Artificial Sequence
  Description of Artificial Sequence: Synthetic oligonucleotide
  Sense strand starting at position 1218 of SEQ ID NO: 1888322
aguguaauaccuuauguua

SEQ ID NO: 2527171 - RNA, 19 nt, Artificial Sequence
  Description of Artificial Sequence: Synthetic oligonucleotide
  Antisense strand to SEQ ID NO: 2527170
uaacauaagguauuacacu

SEQ ID NO: 2527172 - RNA, 19 nt, Artificial Sequence
  Description of Artificial Sequence: Synthetic oligonucleotide
  Sense strand starting at position 3983 of SEQ ID NO: 1888322
ucugauggcugauuagacu

SEQ ID NO: 2527173 - RNA, 19 nt, Artificial Sequence
  Description of Artificial Sequence: Synthetic oligonucleotide
  Antisense strand to SEQ ID NO: 2527172
agucuaaucagccaucaga

SEQ ID NO: 2527174 - RNA, 19 nt, Artificial Sequence
  Description of Artificial Sequence: Synthetic oligonucleotide
  Sense strand starting at position 3218 of SEQ ID NO: 1888322
cauguaguagcauaaagua

SEQ ID NO: 2527175 - RNA, 19 nt, Artificial Sequence
  Description of Artificial Sequence: Synthetic oligonucleotide
  Antisense strand to SEQ ID NO: 2527174
uacuuuaugcuacuacaug

SEQ ID NO: 2527176 - RNA, 19 nt, Artificial Sequence
  Description of Artificial Sequence: Synthetic oligonucleotide
  Sense strand starting at position 2568 of SEQ ID NO: 1888322
uguuuacaucuuuaguuag

SEQ ID NO: 2527177 - RNA, 19 nt, Artificial Sequence
  Description of Artificial Sequence: Synthetic oligonucleotide
  Antisense strand to SEQ ID NO: 2527176
cuaacuaaagauguaaaca

SEQ ID NO: 2527178 - RNA, 19 nt, Artificial Sequence
  Description of Artificial Sequence: Synthetic oligonucleotide
  Sense strand starting at position 3050 of SEQ ID NO: 1888322
ucaaauaguuguucuggga

SEQ ID NO: 2527179 - RNA, 19 nt, Artificial Sequence
  Description of Artificial Sequence: Synthetic oligonucleotide
  Antisense strand to SEQ ID NO: 2527178
ucccagaacaacuauuuga

SEQ ID NO: 2527180 - RNA, 19 nt, Artificial Sequence
  Description of Artificial Sequence: Synthetic oligonucleotide
  Sense strand starting at position 1258 of SEQ ID NO: 1888322
auaugaucaucucuguauu

SEQ ID NO: 2527181 - RNA, 19 nt, Artificial Sequence
  Description of Artificial Sequence: Synthetic oligonucleotide
  Antisense strand to SEQ ID NO: 2527180
aauacagagaugaucauau

SEQ ID NO: 2527182 - RNA, 19 nt, Artificial Sequence
  Description of Artificial Sequence: Synthetic oligonucleotide
  Sense strand starting at position 1794 of SEQ ID NO: 1888322
gggacagaauaggaaauau

SEQ ID NO: 2527183 - RNA, 19 nt, Artificial Sequence
  Description of Artificial Sequence: Synthetic oligonucleotide
  Antisense strand to SEQ ID NO: 2527182
auauuuccuauucuguccc

SEQ ID NO: 2527184 - RNA, 19 nt, Artificial Sequence
  Description of Artificial Sequence: Synthetic oligonucleotide
  Sense strand starting at position 3022 of SEQ ID NO: 1888322
ccuucucuaucagugagau

SEQ ID NO: 2527185 - RNA, 19 nt, Artificial Sequence
  Description of Artificial Sequence: Synthetic oligonucleotide
  Antisense strand to SEQ ID NO: 2527184
aucucacugauagagaagg

SEQ ID NO: 2527186 - RNA, 19 nt, Artificial Sequence
  Description of Artificial Sequence: Synthetic oligonucleotide
  Sense strand starting at position 1569 of SEQ ID NO: 1888322
ggguguaagacuuguaaac

SEQ ID NO: 2527187 - RNA, 19 nt, Artificial Sequence
  Description of Artificial Sequence: Synthetic oligonucleotide
  Antisense strand to SEQ ID NO: 2527186
guuuacaagucuuacaccc

SEQ ID NO: 2527188 - RNA, 19 nt, Artificial Sequence
  Description of Artificial Sequence: Synthetic oligonucleotide
  Sense strand starting at position 3463 of SEQ ID NO: 1888322
gaacuuuaguguuugaauu

SEQ ID NO: 2527189 - RNA, 19 nt, Artificial Sequence
  Description of Artificial Sequence: Synthetic oligonucleotide
  Antisense strand to SEQ ID NO: 2527188
aauucaaacacuaaaguuc

SEQ ID NO: 2527190 - RNA, 19 nt, Artificial Sequence
  Description of Artificial Sequence: Synthetic oligonucleotide
  Sense strand starting at position 3979 of SEQ ID NO: 1888322
caagucugauggcugauua

SEQ ID NO: 2527191 - RNA, 19 nt, Artificial Sequence
  Description of Artificial Sequence: Synthetic oligonucleotide
  Antisense strand to SEQ ID NO: 2527190
uaaucagccaucagacuug

SEQ ID NO: 2527192 - RNA, 19 nt, Artificial Sequence
  Description of Artificial Sequence: Synthetic oligonucleotide
  Sense strand starting at position 1156 of SEQ ID NO: 1888322
gugcccugugaccacaaau

SEQ ID NO: 2527193 - RNA, 19 nt, Artificial Sequence
  Description of Artificial Sequence: Synthetic oligonucleotide
  Antisense strand to SEQ ID NO: 2527192
auuuguggucacagggcac

SEQ ID NO: 2527194 - RNA, 19 nt, Artificial Sequence
  Description of Artificial Sequence: Synthetic oligonucleotide
  Sense strand starting at position 2955 of SEQ ID NO: 1888322
gaauauggauugucuuguu

SEQ ID NO: 2527195 - RNA, 19 nt, Artificial Sequence
  Description of Artificial Sequence: Synthetic oligonucleotide
  Antisense strand to SEQ ID NO: 2527194
aacaagacaauccauauuc

SEQ ID NO: 2527196 - RNA, 19 nt, Artificial Sequence
  Description of Artificial Sequence: Synthetic oligonucleotide
  Sense strand starting at position 3852 of SEQ ID NO: 1888322
aggaaauuauuggaaauga

SEQ ID NO: 2527197 - RNA, 19 nt, Artificial Sequence
  Description of Artificial Sequence: Synthetic oligonucleotide
  Antisense strand to SEQ ID NO: 2527196
ucauuuccaauaauuuccu

SEQ ID NO: 2527198 - RNA, 19 nt, Artificial Sequence
  Description of Artificial Sequence: Synthetic oligonucleotide
  Sense strand starting at position 1353 of SEQ ID NO: 1888322
guagccacaugaucuauau

SEQ ID NO: 2527199 - RNA, 19 nt, Artificial Sequence
  Description of Artificial Sequence: Synthetic oligonucleotide
  Antisense strand to SEQ ID NO: 2527198
auauagaucauguggcuac

SEQ ID NO: 2527200 - RNA, 19 nt, Artificial Sequence
  Description of Artificial Sequence: Synthetic oligonucleotide
  Sense strand starting at position 3872 of SEQ ID NO: 1888322
uugaucuauugcuucuaga

SEQ ID NO: 2527201 - RNA, 19 nt, Artificial Sequence
  Description of Artificial Sequence: Synthetic oligonucleotide
  Antisense strand to SEQ ID NO: 2527200
ucuagaagcaauagaucaa

SEQ ID NO: 2527202 - RNA, 19 nt, Artificial Sequence
  Description of Artificial Sequence: Synthetic oligonucleotide
  Sense strand starting at position 356 of SEQ ID NO: 1888322
aagggagauuaucagauga

SEQ ID NO: 2527203 - RNA, 19 nt, Artificial Sequence
  Description of Artificial Sequence: Synthetic oligonucleotide
  Antisense strand to SEQ ID NO: 2527202
ucaucugauaaucucccuu

SEQ ID NO: 2527204 - RNA, 19 nt, Artificial Sequence
  Description of Artificial Sequence: Synthetic oligonucleotide
  Sense strand starting at position 3803 of SEQ ID NO: 1888322
uuuguucccuuacuggaau

SEQ ID NO: 2527205 - RNA, 19 nt, Artificial Sequence
  Description of Artificial Sequence: Synthetic oligonucleotide
  Antisense strand to SEQ ID NO: 2527204
auuccaguaagggaacaaa

SEQ ID NO: 2527206 - RNA, 19 nt, Artificial Sequence
  Description of Artificial Sequence: Synthetic oligonucleotide
  Sense strand starting at position 2586 of SEQ ID NO: 1888322
ggcaauugcuacuuagaug

SEQ ID NO: 2527207 - RNA, 19 nt, Artificial Sequence
  Description of Artificial Sequence: Synthetic oligonucleotide
  Antisense strand to SEQ ID NO: 2527206
caucuaaguagcaauugcc

SEQ ID NO: 2527208 - RNA, 19 nt, Artificial Sequence
  Description of Artificial Sequence: Synthetic oligonucleotide
  Sense strand starting at position 3632 of SEQ ID NO: 1888322
aaacauguuuggucucgga

SEQ ID NO: 2527209 - RNA, 19 nt, Artificial Sequence
  Description of Artificial Sequence: Synthetic oligonucleotide
  Antisense strand to SEQ ID NO: 2527208
uccgagaccaaacauguuu

SEQ ID NO: 2527210 - RNA, 19 nt, Artificial Sequence
  Description of Artificial Sequence: Synthetic oligonucleotide
  Sense strand starting at position 108 of SEQ ID NO: 1888322
uggaauguacugugcaaca

SEQ ID NO: 2527211 - RNA, 19 nt, Artificial Sequence
  Description of Artificial Sequence: Synthetic oligonucleotide
  Antisense strand to SEQ ID NO: 2527210
uguugcacaguacauucca

SEQ ID NO: 2527212 - RNA, 19 nt, Artificial Sequence
  Description of Artificial Sequence: Synthetic oligonucleotide
  Sense strand starting at position 2571 of SEQ ID NO: 1888322
uuacaucuuuaguuaggca

SEQ ID NO: 2527213 - RNA, 19 nt, Artificial Sequence
  Description of Artificial Sequence: Synthetic oligonucleotide
  Antisense strand to SEQ ID NO: 2527212
ugccuaacuaaagauguaa

SEQ ID NO: 2527214 - RNA, 19 nt, Artificial Sequence
  Description of Artificial Sequence: Synthetic oligonucleotide
  Sense strand starting at position 358 of SEQ ID NO: 1888322
gggagauuaucagaugaau

SEQ ID NO: 2527215 - RNA, 19 nt, Artificial Sequence
  Description of Artificial Sequence: Synthetic oligonucleotide
  Antisense strand to SEQ ID NO: 2527214
auucaucugauaaucuccc

SEQ ID NO: 2527216 - RNA, 19 nt, Artificial Sequence
  Description of Artificial Sequence: Synthetic oligonucleotide
  Sense strand starting at position 2061 of SEQ ID NO: 1888323
gagacauuguaauccacag

SEQ ID NO: 2527217 - RNA, 19 nt, Artificial Sequence
  Description of Artificial Sequence: Synthetic oligonucleotide
  Antisense strand to SEQ ID NO: 2527216
cuguggauuacaaugucuc

SEQ ID NO: 2527218 - RNA, 19 nt, Artificial Sequence
  Description of Artificial Sequence: Synthetic oligonucleotide
  Sense strand starting at position 2866 of SEQ ID NO: 1888323
uuguguucugucgcacaaa

SEQ ID NO: 2527219 - RNA, 19 nt, Artificial Sequence
  Description of Artificial Sequence: Synthetic oligonucleotide
  Antisense strand to SEQ ID NO: 2527218
uuugugcgacagaacacaa

SEQ ID NO: 2527220 - RNA, 19 nt, Artificial Sequence
  Description of Artificial Sequence: Synthetic oligonucleotide
  Sense strand starting at position 2002 of SEQ ID NO: 1888323
cuggaaugucaauaaagcu

SEQ ID NO: 2527221 - RNA, 19 nt, Artificial Sequence
  Description of Artificial Sequence: Synthetic oligonucleotide
  Antisense strand to SEQ ID NO: 2527220
agcuuuauugacauuccag

SEQ ID NO: 2527222 - RNA, 19 nt, Artificial Sequence
  Description of Artificial Sequence: Synthetic oligonucleotide
  Sense strand starting at position 3015 of SEQ ID NO: 1888323
guuugaaaugcacagaauc

SEQ ID NO: 2527223 - RNA, 19 nt, Artificial Sequence
  Description of Artificial Sequence: Synthetic oligonucleotide
  Antisense strand to SEQ ID NO: 2527222
gauucugugcauuucaaac

SEQ ID NO: 2527224 - RNA, 19 nt, Artificial Sequence
  Description of Artificial Sequence: Synthetic oligonucleotide
  Sense strand starting at position 3132 of SEQ ID NO: 1888323
aggagcaucuaaucaccaa

SEQ ID NO: 2527225 - RNA, 19 nt, Artificial Sequence
  Description of Artificial Sequence: Synthetic oligonucleotide
  Antisense strand to SEQ ID NO: 2527224
uuggugauuagaugcuccu

SEQ ID NO: 2527226 - RNA, 19 nt, Artificial Sequence
  Description of Artificial Sequence: Synthetic oligonucleotide
  Sense strand starting at position 1613 of SEQ ID NO: 1888323
ccaggugugagguaugaag

SEQ ID NO: 2527227 - RNA, 19 nt, Artificial Sequence
  Description of Artificial Sequence: Synthetic oligonucleotide
  Antisense strand to SEQ ID NO: 2527226
cuucauaccucacaccugg

SEQ ID NO: 2527228 - RNA, 19 nt, Artificial Sequence
  Description of Artificial Sequence: Synthetic oligonucleotide
  Sense strand starting at position 1017 of SEQ ID NO: 1888323
gccuauuguguaggaauuu

SEQ ID NO: 2527229 - RNA, 19 nt, Artificial Sequence
  Description of Artificial Sequence: Synthetic oligonucleotide
  Antisense strand to SEQ ID NO: 2527228
aaauuccuacacaauaggc

SEQ ID NO: 2527230 - RNA, 19 nt, Artificial Sequence
  Description of Artificial Sequence: Synthetic oligonucleotide
  Sense strand starting at position 1580 of SEQ ID NO: 1888323
augagaaugcagugaggau

SEQ ID NO: 2527231 - RNA, 19 nt, Artificial Sequence
  Description of Artificial Sequence: Synthetic oligonucleotide
  Antisense strand to SEQ ID NO: 2527230
auccucacugcauucucau

SEQ ID NO: 2527232 - RNA, 19 nt, Artificial Sequence
  Description of Artificial Sequence: Synthetic oligonucleotide
  Sense strand starting at position 2885 of SEQ ID NO: 1888323
uuauaaaguucuuugagga

SEQ ID NO: 2527233 - RNA, 19 nt, Artificial Sequence
  Description of Artificial Sequence: Synthetic oligonucleotide
  Antisense strand to SEQ ID NO: 2527232
uccucaaagaacuuuauaa

SEQ ID NO: 2527234 - RNA, 19 nt, Artificial Sequence
  Description of Artificial Sequence: Synthetic oligonucleotide
  Sense strand starting at position 1562 of SEQ ID NO: 1888323
caaucacuaugguugauga

SEQ ID NO: 2527235 - RNA, 19 nt, Artificial Sequence
  Description of Artificial Sequence: Synthetic oligonucleotide
  Antisense strand to SEQ ID NO: 2527234
ucaucaaccauagugauug

SEQ ID NO: 2527236 - RNA, 19 nt, Artificial Sequence
  Description of Artificial Sequence: Synthetic oligonucleotide
  Sense strand starting at position 2854 of SEQ ID NO: 1888323
ucauuuaaguacuuguguu

SEQ ID NO: 2527237 - RNA, 19 nt, Artificial Sequence
  Description of Artificial Sequence: Synthetic oligonucleotide
  Antisense strand to SEQ ID NO: 2527236
aacacaaguacuuaaauga

SEQ ID NO: 2527238 - RNA, 19 nt, Artificial Sequence
  Description of Artificial Sequence: Synthetic oligonucleotide
  Sense strand starting at position 2864 of SEQ ID NO: 1888323
acuuguguucugucgcaca

SEQ ID NO: 2527239 - RNA, 19 nt, Artificial Sequence
  Description of Artificial Sequence: Synthetic oligonucleotide
  Antisense strand to SEQ ID NO: 2527238
ugugcgacagaacacaagu

SEQ ID NO: 2527240 - RNA, 19 nt, Artificial Sequence
  Description of Artificial Sequence: Synthetic oligonucleotide
  Sense strand starting at position 1563 of SEQ ID NO: 1888323
aaucacuaugguugaugau

SEQ ID NO: 2527241 - RNA, 19 nt, Artificial Sequence
  Description of Artificial Sequence: Synthetic oligonucleotide
  Antisense strand to SEQ ID NO: 2527240
aucaucaaccauagugauu

SEQ ID NO: 2527242 - RNA, 19 nt, Artificial Sequence
  Description of Artificial Sequence: Synthetic oligonucleotide
  Sense strand starting at position 1615 of SEQ ID NO: 1888323
aggugugagguaugaagaa

SEQ ID NO: 2527243 - RNA, 19 nt, Artificial Sequence
  Description of Artificial Sequence: Synthetic oligonucleotide
  Antisense strand to SEQ ID NO: 2527242
uucuucauaccucacaccu

SEQ ID NO: 2527244 - RNA, 19 nt, Artificial Sequence
  Description of Artificial Sequence: Synthetic oligonucleotide
  Sense strand starting at position 3881 of SEQ ID NO: 1888323
uaagguuggcaaggauuaa

SEQ ID NO: 2527245 - RNA, 19 nt, Artificial Sequence
  Description of Artificial Sequence: Synthetic oligonucleotide
  Antisense strand to SEQ ID NO: 2527244
uuaauccuugccaaccuua

SEQ ID NO: 2527246 - RNA, 19 nt, Artificial Sequence
  Description of Artificial Sequence: Synthetic oligonucleotide
  Sense strand starting at position 1196 of SEQ ID NO: 1888323
agcacaaagguuugggaau

SEQ ID NO: 2527247 - RNA, 19 nt, Artificial Sequence
  Description of Artificial Sequence: Synthetic oligonucleotide
  Antisense strand to SEQ ID NO: 2527246
auucccaaaccuuugugcu

SEQ ID NO: 2527248 - RNA, 19 nt, Artificial Sequence
  Description of Artificial Sequence: Synthetic oligonucleotide
  Sense strand starting at position 1045 of SEQ ID NO: 1888323
cccacuguagucuauuaaa

SEQ ID NO: 2527249 - RNA, 19 nt, Artificial Sequence
  Description of Artificial Sequence: Synthetic oligonucleotide
  Antisense strand to SEQ ID NO: 2527248
uuuaauagacuacaguggg

SEQ ID NO: 2527250 - RNA, 19 nt, Artificial Sequence
  Description of Artificial Sequence: Synthetic oligonucleotide
  Sense strand starting at position 27 of SEQ ID NO: 1888323
uggccuuugacagaugagu

SEQ ID NO: 2527251 - RNA, 19 nt, Artificial Sequence
  Description of Artificial Sequence: Synthetic oligonucleotide
  Antisense strand to SEQ ID NO: 2527250
acucaucugucaaaggcca

SEQ ID NO: 2527252 - RNA, 19 nt, Artificial Sequence
  Description of Artificial Sequence: Synthetic oligonucleotide
  Sense strand starting at position 1809 of SEQ ID NO: 1888323
gauaaaugugaaugcuaua

SEQ ID NO: 2527253 - RNA, 19 nt, Artificial Sequence
  Description of Artificial Sequence: Synthetic oligonucleotide
  Antisense strand to SEQ ID NO: 2527252
uauagcauucacauuuauc

SEQ ID NO: 2527254 - RNA, 19 nt, Artificial Sequence
  Description of Artificial Sequence: Synthetic oligonucleotide
  Sense strand starting at position 1499 of SEQ ID NO: 1888323
gcaaacuugcccuauggaa

SEQ ID NO: 2527255 - RNA, 19 nt, Artificial Sequence
  Description of Artificial Sequence: Synthetic oligonucleotide
  Antisense strand to SEQ ID NO: 2527254
uuccauagggcaaguuugc

SEQ ID NO: 2527256 - RNA, 19 nt, Artificial Sequence
  Description of Artificial Sequence: Synthetic oligonucleotide
  Sense strand starting at position 1694 of SEQ ID NO: 1888323
gguaucacucauuaccagu

SEQ ID NO: 2527257 - RNA, 19 nt, Artificial Sequence
  Description of Artificial Sequence: Synthetic oligonucleotide
  Antisense strand to SEQ ID NO: 2527256
acugguaaugagugauacc

SEQ ID NO: 2527258 - RNA, 19 nt, Artificial Sequence
  Description of Artificial Sequence: Synthetic oligonucleotide
  Sense strand starting at position 3781 of SEQ ID NO: 1888323
augucacaacauuguuaaa

SEQ ID NO: 2527259 - RNA, 19 nt, Artificial Sequence
  Description of Artificial Sequence: Synthetic oligonucleotide
  Antisense strand to SEQ ID NO: 2527258
uuuaacaauguugugacau

SEQ ID NO: 2527260 - RNA, 19 nt, Artificial Sequence
  Description of Artificial Sequence: Synthetic oligonucleotide
  Sense strand starting at position 1399 of SEQ ID NO: 1888323
gcagacuccuaagucaaga

SEQ ID NO: 2527261 - RNA, 19 nt, Artificial Sequence
  Description of Artificial Sequence: Synthetic oligonucleotide
  Antisense strand to SEQ ID NO: 2527260
ucuugacuuaggagucugc

SEQ ID NO: 2527262 - RNA, 19 nt, Artificial Sequence
  Description of Artificial Sequence: Synthetic oligonucleotide
  Sense strand starting at position 838 of SEQ ID NO: 1888323
agcuuugugagagaagucu

SEQ ID NO: 2527263 - RNA, 19 nt, Artificial Sequence
  Description of Artificial Sequence: Synthetic oligonucleotide
  Antisense strand to SEQ ID NO: 2527262
agacuucucucacaaagcu

SEQ ID NO: 2527264 - RNA, 19 nt, Artificial Sequence
  Description of Artificial Sequence: Synthetic oligonucleotide
  Sense strand starting at position 1604 of SEQ ID NO: 1888323
agaauaaggccagguguga

SEQ ID NO: 2527265 - RNA, 19 nt, Artificial Sequence
  Description of Artificial Sequence: Synthetic oligonucleotide
  Antisense strand to SEQ ID NO: 2527264
ucacaccuggccuuauucu

SEQ ID NO: 2527266 - RNA, 19 nt, Artificial Sequence
  Description of Artificial Sequence: Synthetic oligonucleotide
  Sense strand starting at position 2742 of SEQ ID NO: 1888323
gagguuccucuccauguua

SEQ ID NO: 2527267 - RNA, 19 nt, Artificial Sequence
  Description of Artificial Sequence: Synthetic oligonucleotide
  Antisense strand to SEQ ID NO: 2527266
uaacauggagaggaaccuc

SEQ ID NO: 2527268 - RNA, 19 nt, Artificial Sequence
  Description of Artificial Sequence: Synthetic oligonucleotide
  Sense strand starting at position 1015 of SEQ ID NO: 1888323
uagccuauuguguaggaau

SEQ ID NO: 2527269 - RNA, 19 nt, Artificial Sequence
  Description of Artificial Sequence: Synthetic oligonucleotide
  Antisense strand to SEQ ID NO: 2527268
auuccuacacaauaggcua

SEQ ID NO: 2527270 - RNA, 19 nt, Artificial Sequence
  Description of Artificial Sequence: Synthetic oligonucleotide
  Sense strand starting at position 29 of SEQ ID NO: 1888323
gccuuugacagaugaguag

SEQ ID NO: 2527271 - RNA, 19 nt, Artificial Sequence
  Description of Artificial Sequence: Synthetic oligonucleotide
  Antisense strand to SEQ ID NO: 2527270
cuacucaucugucaaaggc

SEQ ID NO: 2527272 - RNA, 19 nt, Artificial Sequence
  Description of Artificial Sequence: Synthetic oligonucleotide
  Sense strand starting at position 2147 of SEQ ID NO: 1888323
aguccuuaccaguaagcau

SEQ ID NO: 2527273 - RNA, 19 nt, Artificial Sequence
  Description of Artificial Sequence: Synthetic oligonucleotide
  Antisense strand to SEQ ID NO: 2527272
augcuuacugguaaggacu

SEQ ID NO: 2527274 - RNA, 19 nt, Artificial Sequence
  Description of Artificial Sequence: Synthetic oligonucleotide
  Sense strand starting at position 847 of SEQ ID NO: 1888323
agagaagucucuuccugua

SEQ ID NO: 2527275 - RNA, 19 nt, Artificial Sequence
  Description of Artificial Sequence: Synthetic oligonucleotide
  Antisense strand to SEQ ID NO: 2527274
uacaggaagagacuucucu

SEQ ID NO: 2527276 - RNA, 19 nt, Artificial Sequence
  Description of Artificial Sequence: Synthetic oligonucleotide
  Sense strand starting at position 849 of SEQ ID NO: 1888323
agaagucucuuccuguaua

SEQ ID NO: 2527277 - RNA, 19 nt, Artificial Sequence
  Description of Artificial Sequence: Synthetic oligonucleotide
  Antisense strand to SEQ ID NO: 2527276
uauacaggaagagacuucu

SEQ ID NO: 2527278 - RNA, 19 nt, Artificial Sequence
  Description of Artificial Sequence: Synthetic oligonucleotide
  Sense strand starting at position 1705 of SEQ ID NO: 1888323
uuaccaguuucuguugaag

SEQ ID NO: 2527279 - RNA, 19 nt, Artificial Sequence
  Description of Artificial Sequence: Synthetic oligonucleotide
  Antisense strand to SEQ ID NO: 2527278
cuucaacagaaacugguaa

SEQ ID NO: 2527280 - RNA, 19 nt, Artificial Sequence
  Description of Artificial Sequence: Synthetic oligonucleotide
  Sense strand starting at position 1477 of SEQ ID NO: 1888323
gggaaucuauaacagaaau

SEQ ID NO: 2527281 - RNA, 19 nt, Artificial Sequence
  Description of Artificial Sequence: Synthetic oligonucleotide
  Antisense strand to SEQ ID NO: 2527280
auuucuguuauagauuccc

SEQ ID NO: 2527282 - RNA, 19 nt, Artificial Sequence
  Description of Artificial Sequence: Synthetic oligonucleotide
  Sense strand starting at position 908 of SEQ ID NO: 1888323
cuagaaguccugcauuguu

SEQ ID NO: 2527283 - RNA, 19 nt, Artificial Sequence
  Description of Artificial Sequence: Synthetic oligonucleotide
  Antisense strand to SEQ ID NO: 2527282
aacaaugcaggacuucuag

SEQ ID NO: 2527284 - RNA, 19 nt, Artificial Sequence
  Description of Artificial Sequence: Synthetic oligonucleotide
  Sense strand starting at position 2265 of SEQ ID NO: 1888323
ugugacugugccuaaguaa

SEQ ID NO: 2527285 - RNA, 19 nt, Artificial Sequence
  Description of Artificial Sequence: Synthetic oligonucleotide
  Antisense strand to SEQ ID NO: 2527284
uuacuuaggcacagucaca

SEQ ID NO: 2527286 - RNA, 19 nt, Artificial Sequence
  Description of Artificial Sequence: Synthetic oligonucleotide
  Sense strand starting at position 1156 of SEQ ID NO: 1888323
gugagguguguccaaggua

SEQ ID NO: 2527287 - RNA, 19 nt, Artificial Sequence
  Description of Artificial Sequence: Synthetic oligonucleotide
  Antisense strand to SEQ ID NO: 2527286
uaccuuggacacaccucac

SEQ ID NO: 2527288 - RNA, 19 nt, Artificial Sequence
  Description of Artificial Sequence: Synthetic oligonucleotide
  Sense strand starting at position 3029 of SEQ ID NO: 1888323
gaaucuaaacugcguauau

SEQ ID NO: 2527289 - RNA, 19 nt, Artificial Sequence
  Description of Artificial Sequence: Synthetic oligonucleotide
  Antisense strand to SEQ ID NO: 2527288
auauacgcaguuuagauuc

SEQ ID NO: 2527290 - RNA, 19 nt, Artificial Sequence
  Description of Artificial Sequence: Synthetic oligonucleotide
  Sense strand starting at position 2268 of SEQ ID NO: 1888323
gacugugccuaaguaauca

SEQ ID NO: 2527291 - RNA, 19 nt, Artificial Sequence
  Description of Artificial Sequence: Synthetic oligonucleotide
  Antisense strand to SEQ ID NO: 2527290
ugauuacuuaggcacaguc

SEQ ID NO: 2527292 - RNA, 19 nt, Artificial Sequence
  Description of Artificial Sequence: Synthetic oligonucleotide
  Sense strand starting at position 2272 of SEQ ID NO: 1888323
gugccuaaguaaucacuga

SEQ ID NO: 2527293 - RNA, 19 nt, Artificial Sequence
  Description of Artificial Sequence: Synthetic oligonucleotide
  Antisense strand to SEQ ID NO: 2527292
ucagugauuacuuaggcac

SEQ ID NO: 2527294 - RNA, 19 nt, Artificial Sequence
  Description of Artificial Sequence: Synthetic oligonucleotide
  Sense strand starting at position 3031 of SEQ ID NO: 1888323
aucuaaacugcguauaugu

SEQ ID NO: 2527295 - RNA, 19 nt, Artificial Sequence
  Description of Artificial Sequence: Synthetic oligonucleotide
  Antisense strand to SEQ ID NO: 2527294
acauauacgcaguuuagau

SEQ ID NO: 2527296 - RNA, 19 nt, Artificial Sequence
  Description of Artificial Sequence: Synthetic oligonucleotide
  Sense strand starting at position 2483 of SEQ ID NO: 1888324
ucuugaauacaugguagaa

SEQ ID NO: 2527297 - RNA, 19 nt, Artificial Sequence
  Description of Artificial Sequence: Synthetic oligonucleotide
  Antisense strand to SEQ ID NO: 2527296
uucuaccauguauucaaga

SEQ ID NO: 2527298 - RNA, 19 nt, Artificial Sequence
  Description of Artificial Sequence: Synthetic oligonucleotide
  Sense strand starting at position 927 of SEQ ID NO: 1888324
ugcuuaucagugcauauuu

SEQ ID NO: 2527299 - RNA, 19 nt, Artificial Sequence
  Description of Artificial Sequence: Synthetic oligonucleotide
  Antisense strand to SEQ ID NO: 2527298
aaauaugcacugauaagca

SEQ ID NO: 2527300 - RNA, 19 nt, Artificial Sequence
  Description of Artificial Sequence: Synthetic oligonucleotide
  Sense strand starting at position 755 of SEQ ID NO: 1888324
ugacucagucaagagcaau

SEQ ID NO: 2527301 - RNA, 19 nt, Artificial Sequence
  Description of Artificial Sequence: Synthetic oligonucleotide
  Antisense strand to SEQ ID NO: 2527300
auugcucuugacugaguca

SEQ ID NO: 2527302 - RNA, 19 nt, Artificial Sequence
  Description of Artificial Sequence: Synthetic oligonucleotide
  Sense strand starting at position 1036 of SEQ ID NO: 1888324
uuguacuagcaugaaauua

SEQ ID NO: 2527303 - RNA, 19 nt, Artificial Sequence
  Description of Artificial Sequence: Synthetic oligonucleotide
  Antisense strand to SEQ ID NO: 2527302
uaauuucaugcuaguacaa

SEQ ID NO: 2527304 - RNA, 19 nt, Artificial Sequence
  Description of Artificial Sequence: Synthetic oligonucleotide
  Sense strand starting at position 3400 of SEQ ID NO: 1888324
ucauaugcagacuggaaau

SEQ ID NO: 2527305 - RNA, 19 nt, Artificial Sequence
  Description of Artificial Sequence: Synthetic oligonucleotide
  Antisense strand to SEQ ID NO: 2527304
auuuccagucugcauauga

SEQ ID NO: 2527306 - RNA, 19 nt, Artificial Sequence
  Description of Artificial Sequence: Synthetic oligonucleotide
  Sense strand starting at position 2099 of SEQ ID NO: 1888324
gcgcucugcagucuuaaag

SEQ ID NO: 2527307 - RNA, 19 nt, Artificial Sequence
  Description of Artificial Sequence: Synthetic oligonucleotide
  Antisense strand to SEQ ID NO: 2527306
cuuuaagacugcagagcgc

SEQ ID NO: 2527308 - RNA, 19 nt, Artificial Sequence
  Description of Artificial Sequence: Synthetic oligonucleotide
  Sense strand starting at position 2098 of SEQ ID NO: 1888324
ggcgcucugcagucuuaaa

SEQ ID NO: 2527309 - RNA, 19 nt, Artificial Sequence
  Description of Artificial Sequence: Synthetic oligonucleotide
  Antisense strand to SEQ ID NO: 2527308
uuuaagacugcagagcgcc

SEQ ID NO: 2527310 - RNA, 19 nt, Artificial Sequence
  Description of Artificial Sequence: Synthetic oligonucleotide
  Sense strand starting at position 2361 of SEQ ID NO: 1888324
gauuccgauuccguauuua

SEQ ID NO: 2527311 - RNA, 19 nt, Artificial Sequence
  Description of Artificial Sequence: Synthetic oligonucleotide
  Antisense strand to SEQ ID NO: 2527310
uaaauacggaaucggaauc

SEQ ID NO: 2527312 - RNA, 19 nt, Artificial Sequence
  Description of Artificial Sequence: Synthetic oligonucleotide
  Sense strand starting at position 2097 of SEQ ID NO: 1888324
gggcgcucugcagucuuaa

SEQ ID NO: 2527313 - RNA, 19 nt, Artificial Sequence
  Description of Artificial Sequence: Synthetic oligonucleotide
  Antisense strand to SEQ ID NO: 2527312
uuaagacugcagagcgccc

SEQ ID NO: 2527314 - RNA, 19 nt, Artificial Sequence
  Description of Artificial Sequence: Synthetic oligonucleotide
  Sense strand starting at position 1409 of SEQ ID NO: 1888324
agaagacuuuacccaugca

SEQ ID NO: 2527315 - RNA, 19 nt, Artificial Sequence
  Description of Artificial Sequence: Synthetic oligonucleotide
  Antisense strand to SEQ ID NO: 2527314
ugcauggguaaagucuucu

SEQ ID NO: 2527316 - RNA, 19 nt, Artificial Sequence
  Description of Artificial Sequence: Synthetic oligonucleotide
  Sense strand starting at position 1091 of SEQ ID NO: 1888324
gggagauguuccucauuga

SEQ ID NO: 2527317 - RNA, 19 nt, Artificial Sequence
  Description of Artificial Sequence: Synthetic oligonucleotide
  Antisense strand to SEQ ID NO: 2527316
ucaaugaggaacaucuccc

SEQ ID NO: 2527318 - RNA, 19 nt, Artificial Sequence
  Description of Artificial Sequence: Synthetic oligonucleotide
  Sense strand starting at position 2442 of SEQ ID NO: 1888324
cuguaaagaucucuaugau

SEQ ID NO: 2527319 - RNA, 19 nt, Artificial Sequence
  Description of Artificial Sequence: Synthetic oligonucleotide
  Antisense strand to SEQ ID NO: 2527318
aucauagagaucuuuacag

SEQ ID NO: 2527320 - RNA, 19 nt, Artificial Sequence
  Description of Artificial Sequence: Synthetic oligonucleotide
  Sense strand starting at position 35 of SEQ ID NO: 1888324
gggaaagaugggugucuug

SEQ ID NO: 2527321 - RNA, 19 nt, Artificial Sequence
  Description of Artificial Sequence: Synthetic oligonucleotide
  Antisense strand to SEQ ID NO: 2527320
caagacacccaucuuuccc

SEQ ID NO: 2527322 - RNA, 19 nt, Artificial Sequence
  Description of Artificial Sequence: Synthetic oligonucleotide
  Sense strand starting at position 2411 of SEQ ID NO: 1888324
gggaaaugcuccuuccaaa

SEQ ID NO: 2527323 - RNA, 19 nt, Artificial Sequence
  Description of Artificial Sequence: Synthetic oligonucleotide
  Antisense strand to SEQ ID NO: 2527322
uuuggaaggagcauuuccc

SEQ ID NO: 2527324 - RNA, 19 nt, Artificial Sequence
  Description of Artificial Sequence: Synthetic oligonucleotide
  Sense strand starting at position 748 of SEQ ID NO: 1888324
uugggucugacucagucaa

SEQ ID NO: 2527325 - RNA, 19 nt, Artificial Sequence
  Description of Artificial Sequence: Synthetic oligonucleotide
  Antisense strand to SEQ ID NO: 2527324
uugacugagucagacccaa

SEQ ID NO: 2527326 - RNA, 19 nt, Artificial Sequence
  Description of Artificial Sequence: Synthetic oligonucleotide
  Sense strand starting at position 3434 of SEQ ID NO: 1888324
cucacagaggugugaagau

SEQ ID NO: 2527327 - RNA, 19 nt, Artificial Sequence
  Description of Artificial Sequence: Synthetic oligonucleotide
  Antisense strand to SEQ ID NO: 2527326
aucuucacaccucugugag

SEQ ID NO: 2527328 - RNA, 19 nt, Artificial Sequence
  Description of Artificial Sequence: Synthetic oligonucleotide
  Sense strand starting at position 606 of SEQ ID NO: 1888324
gggaauuuaagccguagcu

SEQ ID NO: 2527329 - RNA, 19 nt, Artificial Sequence
  Description of Artificial Sequence: Synthetic oligonucleotide
  Antisense strand to SEQ ID NO: 2527328
agcuacggcuuaaauuccc

SEQ ID NO: 2527330 - RNA, 19 nt, Artificial Sequence
  Description of Artificial Sequence: Synthetic oligonucleotide
  Sense strand starting at position 1018 of SEQ ID NO: 1888324
cuuggugcuggagauacau

SEQ ID NO: 2527331 - RNA, 19 nt, Artificial Sequence
  Description of Artificial Sequence: Synthetic oligonucleotide
  Antisense strand to SEQ ID NO: 2527330
auguaucuccagcaccaag

SEQ ID NO: 2527332 - RNA, 19 nt, Artificial Sequence
  Description of Artificial Sequence: Synthetic oligonucleotide
  Sense strand starting at position 743 of SEQ ID NO: 1888324
acuaauugggucugacuca

SEQ ID NO: 2527333 - RNA, 19 nt, Artificial Sequence
  Description of Artificial Sequence: Synthetic oligonucleotide
  Antisense strand to SEQ ID NO: 2527332
ugagucagacccaauuagu

SEQ ID NO: 2527334 - RNA, 19 nt, Artificial Sequence
  Description of Artificial Sequence: Synthetic oligonucleotide
  Sense strand starting at position 697 of SEQ ID NO: 1888324
guucauauuuaugcgguga

SEQ ID NO: 2527335 - RNA, 19 nt, Artificial Sequence
  Description of Artificial Sequence: Synthetic oligonucleotide
  Antisense strand to SEQ ID NO: 2527334
ucaccgcauaaauaugaac

SEQ ID NO: 2527336 - RNA, 19 nt, Artificial Sequence
  Description of Artificial Sequence: Synthetic oligonucleotide
  Sense strand starting at position 1276 of SEQ ID NO: 1888324
gccuuccaaugauuacaga

SEQ ID NO: 2527337 - RNA, 19 nt, Artificial Sequence
  Description of Artificial Sequence: Synthetic oligonucleotide
  Antisense strand to SEQ ID NO: 2527336
ucuguaaucauuggaaggc

SEQ ID NO: 2527338 - RNA, 19 nt, Artificial Sequence
  Description of Artificial Sequence: Synthetic oligonucleotide
  Sense strand starting at position 2637 of SEQ ID NO: 1888324
cugaauguucuguaugauu

SEQ ID NO: 2527339 - RNA, 19 nt, Artificial Sequence
  Description of Artificial Sequence: Synthetic oligonucleotide
  Antisense strand to SEQ ID NO: 2527338
aaucauacagaacauucag

SEQ ID NO: 2527340 - RNA, 19 nt, Artificial Sequence
  Description of Artificial Sequence: Synthetic oligonucleotide
  Sense strand starting at position 750 of SEQ ID NO: 1888324
gggucugacucagucaaga

SEQ ID NO: 2527341 - RNA, 19 nt, Artificial Sequence
  Description of Artificial Sequence: Synthetic oligonucleotide
  Antisense strand to SEQ ID NO: 2527340
ucuugacugagucagaccc

SEQ ID NO: 2527342 - RNA, 19 nt, Artificial Sequence
  Description of Artificial Sequence: Synthetic oligonucleotide
  Sense strand starting at position 214 of SEQ ID NO: 1888324
auugacaaugcucaugcau

SEQ ID NO: 2527343 - RNA, 19 nt, Artificial Sequence
  Description of Artificial Sequence: Synthetic oligonucleotide
  Antisense strand to SEQ ID NO: 2527342
augcaugagcauugucaau

SEQ ID NO: 2527344 - RNA, 19 nt, Artificial Sequence
  Description of Artificial Sequence: Synthetic oligonucleotide
  Sense strand starting at position 761 of SEQ ID NO: 1888324
agucaagagcaauagcuuu

SEQ ID NO: 2527345 - RNA, 19 nt, Artificial Sequence
  Description of Artificial Sequence: Synthetic oligonucleotide
  Antisense strand to SEQ ID NO: 2527344
aaagcuauugcucuugacu

SEQ ID NO: 2527346 - RNA, 19 nt, Artificial Sequence
  Description of Artificial Sequence: Synthetic oligonucleotide
  Sense strand starting at position 2195 of SEQ ID NO: 1888324
ggaggaauuucuuagaggc

SEQ ID NO: 2527347 - RNA, 19 nt, Artificial Sequence
  Description of Artificial Sequence: Synthetic oligonucleotide
  Antisense strand to SEQ ID NO: 2527346
gccucuaagaaauuccucc

SEQ ID NO: 2527348 - RNA, 19 nt, Artificial Sequence
  Description of Artificial Sequence: Synthetic oligonucleotide
  Sense strand starting at position 555 of SEQ ID NO: 1888324
cugucaguagguuauacau

SEQ ID NO: 2527349 - RNA, 19 nt, Artificial Sequence
  Description of Artificial Sequence: Synthetic oligonucleotide
  Antisense strand to SEQ ID NO: 2527348
auguauaaccuacugacag

SEQ ID NO: 2527350 - RNA, 19 nt, Artificial Sequence
  Description of Artificial Sequence: Synthetic oligonucleotide
  Sense strand starting at position 1035 of SEQ ID NO: 1888324
auuguacuagcaugaaauu

SEQ ID NO: 2527351 - RNA, 19 nt, Artificial Sequence
  Description of Artificial Sequence: Synthetic oligonucleotide
  Antisense strand to SEQ ID NO: 2527350
aauuucaugcuaguacaau

SEQ ID NO: 2527352 - RNA, 19 nt, Artificial Sequence
  Description of Artificial Sequence: Synthetic oligonucleotide
  Sense strand starting at position 919 of SEQ ID NO: 1888324
ugauguaaugcuuaucagu

SEQ ID NO: 2527353 - RNA, 19 nt, Artificial Sequence
  Description of Artificial Sequence: Synthetic oligonucleotide
  Antisense strand to SEQ ID NO: 2527352
acugauaagcauuacauca

SEQ ID NO: 2527354 - RNA, 19 nt, Artificial Sequence
  Description of Artificial Sequence: Synthetic oligonucleotide
  Sense strand starting at position 2557 of SEQ ID NO: 1888324
ugaaauugcugauaauuug

SEQ ID NO: 2527355 - RNA, 19 nt, Artificial Sequence
  Description of Artificial Sequence: Synthetic oligonucleotide
  Antisense strand to SEQ ID NO: 2527354
caaauuaucagcaauuuca

SEQ ID NO: 2527356 - RNA, 19 nt, Artificial Sequence
  Description of Artificial Sequence: Synthetic oligonucleotide
  Sense strand starting at position 1207 of SEQ ID NO: 1888324
guuuauucugaaugaggca

SEQ ID NO: 2527357 - RNA, 19 nt, Artificial Sequence
  Description of Artificial Sequence: Synthetic oligonucleotide
  Antisense strand to SEQ ID NO: 2527356
ugccucauucagaauaaac

SEQ ID NO: 2527358 - RNA, 19 nt, Artificial Sequence
  Description of Artificial Sequence: Synthetic oligonucleotide
  Sense strand starting at position 38 of SEQ ID NO: 1888324
aaagaugggugucuuguca

SEQ ID NO: 2527359 - RNA, 19 nt, Artificial Sequence
  Description of Artificial Sequence: Synthetic oligonucleotide
  Antisense strand to SEQ ID NO: 2527358
ugacaagacacccaucuuu

SEQ ID NO: 2527360 - RNA, 19 nt, Artificial Sequence
  Description of Artificial Sequence: Synthetic oligonucleotide
  Sense strand starting at position 1255 of SEQ ID NO: 1888324
cugucacuuggcuagguaa

SEQ ID NO: 2527361 - RNA, 19 nt, Artificial Sequence
  Description of Artificial Sequence: Synthetic oligonucleotide
  Antisense strand to SEQ ID NO: 2527360
uuaccuagccaagugacag

SEQ ID NO: 2527362 - RNA, 19 nt, Artificial Sequence
  Description of Artificial Sequence: Synthetic oligonucleotide
  Sense strand starting at position 632 of SEQ ID NO: 1888324
ggcgaugucaaaugaugac

SEQ ID NO: 2527363 - RNA, 19 nt, Artificial Sequence
  Description of Artificial Sequence: Synthetic oligonucleotide
  Antisense strand to SEQ ID NO: 2527362
gucaucauuugacaucgcc

SEQ ID NO: 2527364 - RNA, 19 nt, Artificial Sequence
  Description of Artificial Sequence: Synthetic oligonucleotide
  Sense strand starting at position 2197 of SEQ ID NO: 1888324
aggaauuucuuagaggcuu

SEQ ID NO: 2527365 - RNA, 19 nt, Artificial Sequence
  Description of Artificial Sequence: Synthetic oligonucleotide
  Antisense strand to SEQ ID NO: 2527364
aagccucuaagaaauuccu

SEQ ID NO: 2527366 - RNA, 19 nt, Artificial Sequence
  Description of Artificial Sequence: Synthetic oligonucleotide
  Sense strand starting at position 22 of SEQ ID NO: 1888324
uauggugcccucugggaaa

SEQ ID NO: 2527367 - RNA, 19 nt, Artificial Sequence
  Description of Artificial Sequence: Synthetic oligonucleotide
  Antisense strand to SEQ ID NO: 2527366
uuucccagagggcaccaua

SEQ ID NO: 2527368 - RNA, 19 nt, Artificial Sequence
  Description of Artificial Sequence: Synthetic oligonucleotide
  Sense strand starting at position 2867 of SEQ ID NO: 1888324
ggcacuagguauccuaacu

SEQ ID NO: 2527369 - RNA, 19 nt, Artificial Sequence
  Description of Artificial Sequence: Synthetic oligonucleotide
  Antisense strand to SEQ ID NO: 2527368
aguuaggauaccuagugcc

SEQ ID NO: 2527370 - RNA, 19 nt, Artificial Sequence
  Description of Artificial Sequence: Synthetic oligonucleotide
  Sense strand starting at position 2636 of SEQ ID NO: 1888324
ccugaauguucuguaugau

SEQ ID NO: 2527371 - RNA, 19 nt, Artificial Sequence
  Description of Artificial Sequence: Synthetic oligonucleotide
  Antisense strand to SEQ ID NO: 2527370
aucauacagaacauucagg

SEQ ID NO: 2527372 - RNA, 19 nt, Artificial Sequence
  Description of Artificial Sequence: Synthetic oligonucleotide
  Sense strand starting at position 2645 of SEQ ID NO: 1888324
ucuguaugauucuugaagu

SEQ ID NO: 2527373 - RNA, 19 nt, Artificial Sequence
  Description of Artificial Sequence: Synthetic oligonucleotide
  Antisense strand to SEQ ID NO: 2527372
acuucaagaaucauacaga

SEQ ID NO: 2527374 - RNA, 19 nt, Artificial Sequence
  Description of Artificial Sequence: Synthetic oligonucleotide
  Sense strand starting at position 2551 of SEQ ID NO: 1888324
gcugauugaaauugcugau

SEQ ID NO: 2527375 - RNA, 19 nt, Artificial Sequence
  Description of Artificial Sequence: Synthetic oligonucleotide
  Antisense strand to SEQ ID NO: 2527374
aucagcaauuucaaucagc

SEQ ID NO: 2527376 - RNA, 19 nt, Artificial Sequence
  Description of Artificial Sequence: Synthetic oligonucleotide
  Sense strand starting at position 2749 of SEQ ID NO: 1888325
gacauagaauuggccugaa

SEQ ID NO: 2527377 - RNA, 19 nt, Artificial Sequence
  Description of Artificial Sequence: Synthetic oligonucleotide
  Antisense strand to SEQ ID NO: 2527376
uucaggccaauucuauguc

SEQ ID NO: 2527378 - RNA, 19 nt, Artificial Sequence
  Description of Artificial Sequence: Synthetic oligonucleotide
  Sense strand starting at position 3435 of SEQ ID NO: 1888325
guagacaaacuuuacaguu

SEQ ID NO: 2527379 - RNA, 19 nt, Artificial Sequence
  Description of Artificial Sequence: Synthetic oligonucleotide
  Antisense strand to SEQ ID NO: 2527378
aacuguaaaguuugucuac

SEQ ID NO: 2527380 - RNA, 19 nt, Artificial Sequence
  Description of Artificial Sequence: Synthetic oligonucleotide
  Sense strand starting at position 2061 of SEQ ID NO: 1888325
uuacaucagcgcuuacgua

SEQ ID NO: 2527381 - RNA, 19 nt, Artificial Sequence
  Description of Artificial Sequence: Synthetic oligonucleotide
  Antisense strand to SEQ ID NO: 2527380
uacguaagcgcugauguaa

SEQ ID NO: 2527382 - RNA, 19 nt, Artificial Sequence
  Description of Artificial Sequence: Synthetic oligonucleotide
  Sense strand starting at position 3097 of SEQ ID NO: 1888325
cuuagaacucaguaaugca

SEQ ID NO: 2527383 - RNA, 19 nt, Artificial Sequence
  Description of Artificial Sequence: Synthetic oligonucleotide
  Antisense strand to SEQ ID NO: 2527382
ugcauuacugaguucuaag

SEQ ID NO: 2527384 - RNA, 19 nt, Artificial Sequence
  Description of Artificial Sequence: Synthetic oligonucleotide
  Sense strand starting at position 2493 of SEQ ID NO: 1888325
uggauagcucaguaaacuc

SEQ ID NO: 2527385 - RNA, 19 nt, Artificial Sequence
  Description of Artificial Sequence: Synthetic oligonucleotide
  Antisense strand to SEQ ID NO: 2527384
gaguuuacugagcuaucca

SEQ ID NO: 2527386 - RNA, 19 nt, Artificial Sequence
  Description of Artificial Sequence: Synthetic oligonucleotide
  Sense strand starting at position 2753 of SEQ ID NO: 1888325
uagaauuggccugaauguc

SEQ ID NO: 2527387 - RNA, 19 nt, Artificial Sequence
  Description of Artificial Sequence: Synthetic oligonucleotide
  Antisense strand to SEQ ID NO: 2527386
gacauucaggccaauucua

SEQ ID NO: 2527388 - RNA, 19 nt, Artificial Sequence
  Description of Artificial Sequence: Synthetic oligonucleotide
  Sense strand starting at position 2694 of SEQ ID NO: 1888325
augugucauguccaaggaa

SEQ ID NO: 2527389 - RNA, 19 nt, Artificial Sequence
  Description of Artificial Sequence: Synthetic oligonucleotide
  Antisense strand to SEQ ID NO: 2527388
uuccuuggacaugacacau

SEQ ID NO: 2527390 - RNA, 19 nt, Artificial Sequence
  Description of Artificial Sequence: Synthetic oligonucleotide
  Sense strand starting at position 3683 of SEQ ID NO: 1888325
agaaaucuugugggacagu

SEQ ID NO: 2527391 - RNA, 19 nt, Artificial Sequence
  Description of Artificial Sequence: Synthetic oligonucleotide
  Antisense strand to SEQ ID NO: 2527390
acugucccacaagauuucu

SEQ ID NO: 2527392 - RNA, 19 nt, Artificial Sequence
  Description of Artificial Sequence: Synthetic oligonucleotide
  Sense strand starting at position 3267 of SEQ ID NO: 1888325
gcugcaauccaugaaacug

SEQ ID NO: 2527393 - RNA, 19 nt, Artificial Sequence
  Description of Artificial Sequence: Synthetic oligonucleotide
  Antisense strand to SEQ ID NO: 2527392
caguuucauggauugcagc

SEQ ID NO: 2527394 - RNA, 19 nt, Artificial Sequence
  Description of Artificial Sequence: Synthetic oligonucleotide
  Sense strand starting at position 2191 of SEQ ID NO: 1888325
uuacuaggucugcauauga

SEQ ID NO: 2527395 - RNA, 19 nt, Artificial Sequence
  Description of Artificial Sequence: Synthetic oligonucleotide
  Antisense strand to SEQ ID NO: 2527394
ucauaugcagaccuaguaa

SEQ ID NO: 2527396 - RNA, 19 nt, Artificial Sequence
  Description of Artificial Sequence: Synthetic oligonucleotide
  Sense strand starting at position 2450 of SEQ ID NO: 1888325
uugcguguucuuguaagua

SEQ ID NO: 2527397 - RNA, 19 nt, Artificial Sequence
  Description of Artificial Sequence: Synthetic oligonucleotide
  Antisense strand to SEQ ID NO: 2527396
uacuuacaagaacacgcaa

SEQ ID NO: 2527398 - RNA, 19 nt, Artificial Sequence
  Description of Artificial Sequence: Synthetic oligonucleotide
  Sense strand starting at position 2697 of SEQ ID NO: 1888325
ugucauguccaaggaaaug

SEQ ID NO: 2527399 - RNA, 19 nt, Artificial Sequence
  Description of Artificial Sequence: Synthetic oligonucleotide
  Antisense strand to SEQ ID NO: 2527398
cauuuccuuggacaugaca

SEQ ID NO: 2527400 - RNA, 19 nt, Artificial Sequence
  Description of Artificial Sequence: Synthetic oligonucleotide
  Sense strand starting at position 2335 of SEQ ID NO: 1888325
ggcucugugacaugaaaga

SEQ ID NO: 2527401 - RNA, 19 nt, Artificial Sequence
  Description of Artificial Sequence: Synthetic oligonucleotide
  Antisense strand to SEQ ID NO: 2527400
ucuuucaugucacagagcc

SEQ ID NO: 2527402 - RNA, 19 nt, Artificial Sequence
  Description of Artificial Sequence: Synthetic oligonucleotide
  Sense strand starting at position 2492 of SEQ ID NO: 1888325
auggauagcucaguaaacu

SEQ ID NO: 2527403 - RNA, 19 nt, Artificial Sequence
  Description of Artificial Sequence: Synthetic oligonucleotide
  Antisense strand to SEQ ID NO: 2527402
aguuuacugagcuauccau

SEQ ID NO: 2527404 - RNA, 19 nt, Artificial Sequence
  Description of Artificial Sequence: Synthetic oligonucleotide
  Sense strand starting at position 1471 of SEQ ID NO: 1888325
guguuagagcaauagugaa

SEQ ID NO: 2527405 - RNA, 19 nt, Artificial Sequence
  Description of Artificial Sequence: Synthetic oligonucleotide
  Antisense strand to SEQ ID NO: 2527404
uucacuauugcucuaacac

SEQ ID NO: 2527406 - RNA, 19 nt, Artificial Sequence
  Description of Artificial Sequence: Synthetic oligonucleotide
  Sense strand starting at position 2983 of SEQ ID NO: 1888325
acggaagccuagucagaaa

SEQ ID NO: 2527407 - RNA, 19 nt, Artificial Sequence
  Description of Artificial Sequence: Synthetic oligonucleotide
  Antisense strand to SEQ ID NO: 2527406
uuucugacuaggcuuccgu

SEQ ID NO: 2527408 - RNA, 19 nt, Artificial Sequence
  Description of Artificial Sequence: Synthetic oligonucleotide
  Sense strand starting at position 2638 of SEQ ID NO: 1888325
agccuauggccuuauagac

SEQ ID NO: 2527409 - RNA, 19 nt, Artificial Sequence
  Description of Artificial Sequence: Synthetic oligonucleotide
  Antisense strand to SEQ ID NO: 2527408
gucuauaaggccauaggcu

SEQ ID NO: 2527410 - RNA, 19 nt, Artificial Sequence
  Description of Artificial Sequence: Synthetic oligonucleotide
  Sense strand starting at position 2376 of SEQ ID NO: 1888325
gucagacuauuugaaacca

SEQ ID NO: 2527411 - RNA, 19 nt, Artificial Sequence
  Description of Artificial Sequence: Synthetic oligonucleotide
  Antisense strand to SEQ ID NO: 2527410
ugguuucaaauagucugac

SEQ ID NO: 2527412 - RNA, 19 nt, Artificial Sequence
  Description of Artificial Sequence: Synthetic oligonucleotide
  Sense strand starting at position 3730 of SEQ ID NO: 1888325
augaguccgccugauacaa

SEQ ID NO: 2527413 - RNA, 19 nt, Artificial Sequence
  Description of Artificial Sequence: Synthetic oligonucleotide
  Antisense strand to SEQ ID NO: 2527412
uuguaucaggcggacucau

SEQ ID NO: 2527414 - RNA, 19 nt, Artificial Sequence
  Description of Artificial Sequence: Synthetic oligonucleotide
  Sense strand starting at position 2501 of SEQ ID NO: 1888325
ucaguaaacucauuauagu

SEQ ID NO: 2527415 - RNA, 19 nt, Artificial Sequence
  Description of Artificial Sequence: Synthetic oligonucleotide
  Antisense strand to SEQ ID NO: 2527414
acuauaaugaguuuacuga

SEQ ID NO: 2527416 - RNA, 19 nt, Artificial Sequence
  Description of Artificial Sequence: Synthetic oligonucleotide
  Sense strand starting at position 2752 of SEQ ID NO: 1888325
auagaauuggccugaaugu

SEQ ID NO: 2527417 - RNA, 19 nt, Artificial Sequence
  Description of Artificial Sequence: Synthetic oligonucleotide
  Antisense strand to SEQ ID NO: 2527416
acauucaggccaauucuau

SEQ ID NO: 2527418 - RNA, 19 nt, Artificial Sequence
  Description of Artificial Sequence: Synthetic oligonucleotide
  Sense strand starting at position 2512 of SEQ ID NO: 1888325
auuauaguuuccuuugaca

SEQ ID NO: 2527419 - RNA, 19 nt, Artificial Sequence
  Description of Artificial Sequence: Synthetic oligonucleotide
  Antisense strand to SEQ ID NO: 2527418
ugucaaaggaaacuauaau

SEQ ID NO: 2527420 - RNA, 19 nt, Artificial Sequence
  Description of Artificial Sequence: Synthetic oligonucleotide
  Sense strand starting at position 2673 of SEQ ID NO: 1888325
auguguuugaggugggaaa

SEQ ID NO: 2527421 - RNA, 19 nt, Artificial Sequence
  Description of Artificial Sequence: Synthetic oligonucleotide
  Antisense strand to SEQ ID NO: 2527420
uuucccaccucaaacacau

SEQ ID NO: 2527422 - RNA, 19 nt, Artificial Sequence
  Description of Artificial Sequence: Synthetic oligonucleotide
  Sense strand starting at position 2510 of SEQ ID NO: 1888325
ucauuauaguuuccuuuga

SEQ ID NO: 2527423 - RNA, 19 nt, Artificial Sequence
  Description of Artificial Sequence: Synthetic oligonucleotide
  Antisense strand to SEQ ID NO: 2527422
ucaaaggaaacuauaauga

SEQ ID NO: 2527424 - RNA, 19 nt, Artificial Sequence
  Description of Artificial Sequence: Synthetic oligonucleotide
  Sense strand starting at position 3266 of SEQ ID NO: 1888325
agcugcaauccaugaaacu

SEQ ID NO: 2527425 - RNA, 19 nt, Artificial Sequence
  Description of Artificial Sequence: Synthetic oligonucleotide
  Antisense strand to SEQ ID NO: 2527424
aguuucauggauugcagcu

SEQ ID NO: 2527426 - RNA, 19 nt, Artificial Sequence
  Description of Artificial Sequence: Synthetic oligonucleotide
  Sense strand starting at position 2652 of SEQ ID NO: 1888325
uagacuugcuggucucaaa

SEQ ID NO: 2527427 - RNA, 19 nt, Artificial Sequence
  Description of Artificial Sequence: Synthetic oligonucleotide
  Antisense strand to SEQ ID NO: 2527426
uuugagaccagcaagucua

SEQ ID NO: 2527428 - RNA, 19 nt, Artificial Sequence
  Description of Artificial Sequence: Synthetic oligonucleotide
  Sense strand starting at position 2296 of SEQ ID NO: 1888325
ggaagucauuuagggaauu

SEQ ID NO: 2527429 - RNA, 19 nt, Artificial Sequence
  Description of Artificial Sequence: Synthetic oligonucleotide
  Antisense strand to SEQ ID NO: 2527428
aauucccuaaaugacuucc

SEQ ID NO: 2527430 - RNA, 19 nt, Artificial Sequence
  Description of Artificial Sequence: Synthetic oligonucleotide
  Sense strand starting at position 868 of SEQ ID NO: 1888325
ugucucacagucugacaau

SEQ ID NO: 2527431 - RNA, 19 nt, Artificial Sequence
  Description of Artificial Sequence: Synthetic oligonucleotide
  Antisense strand to SEQ ID NO: 2527430
auugucagacugugagaca

SEQ ID NO: 2527432 - RNA, 19 nt, Artificial Sequence
  Description of Artificial Sequence: Synthetic oligonucleotide
  Sense strand starting at position 2265 of SEQ ID NO: 1888325
ggcaauggaguuugugaua

SEQ ID NO: 2527433 - RNA, 19 nt, Artificial Sequence
  Description of Artificial Sequence: Synthetic oligonucleotide
  Antisense strand to SEQ ID NO: 2527432
uaucacaaacuccauugcc

SEQ ID NO: 2527434 - RNA, 19 nt, Artificial Sequence
  Description of Artificial Sequence: Synthetic oligonucleotide
  Sense strand starting at position 2532 of SEQ ID NO: 1888325
caucacgugucauugggaa

SEQ ID NO: 2527435 - RNA, 19 nt, Artificial Sequence
  Description of Artificial Sequence: Synthetic oligonucleotide
  Antisense strand to SEQ ID NO: 2527434
uucccaaugacacgugaug

SEQ ID NO: 2527436 - RNA, 19 nt, Artificial Sequence
  Description of Artificial Sequence: Synthetic oligonucleotide
  Sense strand starting at position 2534 of SEQ ID NO: 1888325
ucacgugucauugggaaac

SEQ ID NO: 2527437 - RNA, 19 nt, Artificial Sequence
  Description of Artificial Sequence: Synthetic oligonucleotide
  Antisense strand to SEQ ID NO: 2527436
guuucccaaugacacguga

SEQ ID NO: 2527438 - RNA, 19 nt, Artificial Sequence
  Description of Artificial Sequence: Synthetic oligonucleotide
  Sense strand starting at position 2920 of SEQ ID NO: 1888325
agagaacuuuaagaaucca

SEQ ID NO: 2527439 - RNA, 19 nt, Artificial Sequence
  Description of Artificial Sequence: Synthetic oligonucleotide
  Antisense strand to SEQ ID NO: 2527438
uggauucuuaaaguucucu

SEQ ID NO: 2527440 - RNA, 19 nt, Artificial Sequence
  Description of Artificial Sequence: Synthetic oligonucleotide
  Sense strand starting at position 3726 of SEQ ID NO: 1888325
aaacaugaguccgccugau

SEQ ID NO: 2527441 - RNA, 19 nt, Artificial Sequence
  Description of Artificial Sequence: Synthetic oligonucleotide
  Antisense strand to SEQ ID NO: 2527440
aucaggcggacucauguuu

SEQ ID NO: 2527442 - RNA, 19 nt, Artificial Sequence
  Description of Artificial Sequence: Synthetic oligonucleotide
  Sense strand starting at position 3866 of SEQ ID NO: 1888325
guucuuauuccuggcagga

SEQ ID NO: 2527443 - RNA, 19 nt, Artificial Sequence
  Description of Artificial Sequence: Synthetic oligonucleotide
  Antisense strand to SEQ ID NO: 2527442
uccugccaggaauaagaac

SEQ ID NO: 2527444 - RNA, 19 nt, Artificial Sequence
  Description of Artificial Sequence: Synthetic oligonucleotide
  Sense strand starting at position 2479 of SEQ ID NO: 1888325
cauguacauuuguauggau

SEQ ID NO: 2527445 - RNA, 19 nt, Artificial Sequence
  Description of Artificial Sequence: Synthetic oligonucleotide
  Antisense strand to SEQ ID NO: 2527444
auccauacaaauguacaug

SEQ ID NO: 2527446 - RNA, 19 nt, Artificial Sequence
  Description of Artificial Sequence: Synthetic oligonucleotide
  Sense strand starting at position 2348 of SEQ ID NO: 1888325
gaaagacagucucaaagau

SEQ ID NO: 2527447 - RNA, 19 nt, Artificial Sequence
  Description of Artificial Sequence: Synthetic oligonucleotide
  Antisense strand to SEQ ID NO: 2527446
aucuuugagacugucuuuc

SEQ ID NO: 2527448 - RNA, 19 nt, Artificial Sequence
  Description of Artificial Sequence: Synthetic oligonucleotide
  Sense strand starting at position 3374 of SEQ ID NO: 1888325
ucuuuauggugguuccuau

SEQ ID NO: 2527449 - RNA, 19 nt, Artificial Sequence
  Description of Artificial Sequence: Synthetic oligonucleotide
  Antisense strand to SEQ ID NO: 2527448
auaggaaccaccauaaaga

SEQ ID NO: 2527450 - RNA, 19 nt, Artificial Sequence
  Description of Artificial Sequence: Synthetic oligonucleotide
  Sense strand starting at position 3970 of SEQ ID NO: 1888325
cgaguucuauguccuauca

SEQ ID NO: 2527451 - RNA, 19 nt, Artificial Sequence
  Description of Artificial Sequence: Synthetic oligonucleotide
  Antisense strand to SEQ ID NO: 2527450
ugauaggacauagaacucg

SEQ ID NO: 2527452 - RNA, 19 nt, Artificial Sequence
  Description of Artificial Sequence: Synthetic oligonucleotide
  Sense strand starting at position 2454 of SEQ ID NO: 1888325
guguucuuguaaguauaca

SEQ ID NO: 2527453 - RNA, 19 nt, Artificial Sequence
  Description of Artificial Sequence: Synthetic oligonucleotide
  Antisense strand to SEQ ID NO: 2527452
uguauacuuacaagaacac

SEQ ID NO: 2527454 - RNA, 19 nt, Artificial Sequence
  Description of Artificial Sequence: Synthetic oligonucleotide
  Sense strand starting at position 2328 of SEQ ID NO: 1888325
agugcaaggcucugugaca

SEQ ID NO: 2527455 - RNA, 19 nt, Artificial Sequence
  Description of Artificial Sequence: Synthetic oligonucleotide
  Antisense strand to SEQ ID NO: 2527454
ugucacagagccuugcacu

SEQ ID NO: 2527456 - RNA, 19 nt, Artificial Sequence
  Description of Artificial Sequence: Synthetic oligonucleotide
  Sense strand starting at position 2750 of SEQ ID NO: 1888326
gacauagaauuggccugaa

SEQ ID NO: 2527457 - RNA, 19 nt, Artificial Sequence
  Description of Artificial Sequence: Synthetic oligonucleotide
  Antisense strand to SEQ ID NO: 2527456
uucaggccaauucuauguc

SEQ ID NO: 2527458 - RNA, 19 nt, Artificial Sequence
  Description of Artificial Sequence: Synthetic oligonucleotide
  Sense strand starting at position 3436 of SEQ ID NO: 1888326
guagacaaacuuuacaguu

SEQ ID NO: 2527459 - RNA, 19 nt, Artificial Sequence
  Description of Artificial Sequence: Synthetic oligonucleotide
  Antisense strand to SEQ ID NO: 2527458
aacuguaaaguuugucuac

SEQ ID NO: 2527460 - RNA, 19 nt, Artificial Sequence
  Description of Artificial Sequence: Synthetic oligonucleotide
  Sense strand starting at position 2062 of SEQ ID NO: 1888326
uuacaucagcgcuuacgua

SEQ ID NO: 2527461 - RNA, 19 nt, Artificial Sequence
  Description of Artificial Sequence: Synthetic oligonucleotide
  Antisense strand to SEQ ID NO: 2527460
uacguaagcgcugauguaa

SEQ ID NO: 2527462 - RNA, 19 nt, Artificial Sequence
  Description of Artificial Sequence: Synthetic oligonucleotide
  Sense strand starting at position 3098 of SEQ ID NO: 1888326
cuuagaacucaguaaugca

SEQ ID NO: 2527463 - RNA, 19 nt, Artificial Sequence
  Description of Artificial Sequence: Synthetic oligonucleotide
  Antisense strand to SEQ ID NO: 2527462
ugcauuacugaguucuaag

SEQ ID NO: 2527464 - RNA, 19 nt, Artificial Sequence
  Description of Artificial Sequence: Synthetic oligonucleotide
  Sense strand starting at position 2494 of SEQ ID NO: 1888326
uggauagcucaguaaacuc

SEQ ID NO: 2527465 - RNA, 19 nt, Artificial Sequence
  Description of Artificial Sequence: Synthetic oligonucleotide
  Antisense strand to SEQ ID NO: 2527464
gaguuuacugagcuaucca

SEQ ID NO: 2527466 - RNA, 19 nt, Artificial Sequence
  Description of Artificial Sequence: Synthetic oligonucleotide
  Sense strand starting at position 2754 of SEQ ID NO: 1888326
uagaauuggccugaauguc

SEQ ID NO: 2527467 - RNA, 19 nt, Artificial Sequence
  Description of Artificial Sequence: Synthetic oligonucleotide
  Antisense strand to SEQ ID NO: 2527466
gacauucaggccaauucua

SEQ ID NO: 2527468 - RNA, 19 nt, Artificial Sequence
  Description of Artificial Sequence: Synthetic oligonucleotide
  Sense strand starting at position 2695 of SEQ ID NO: 1888326
augugucauguccaaggaa

SEQ ID NO: 2527469 - RNA, 19 nt, Artificial Sequence
  Description of Artificial Sequence: Synthetic oligonucleotide
  Antisense strand to SEQ ID NO: 2527468
uuccuuggacaugacacau

SEQ ID NO: 2527470 - RNA, 19 nt, Artificial Sequence
  Description of Artificial Sequence: Synthetic oligonucleotide
  Sense strand starting at position 3684 of SEQ ID NO: 1888326
agaaaucuugugggacagu

SEQ ID NO: 2527471 - RNA, 19 nt, Artificial Sequence
  Description of Artificial Sequence: Synthetic oligonucleotide
  Antisense strand to SEQ ID NO: 2527470
acugucccacaagauuucu

SEQ ID NO: 2527472 - RNA, 19 nt, Artificial Sequence
  Description of Artificial Sequence: Synthetic oligonucleotide
  Sense strand starting at position 3268 of SEQ ID NO: 1888326
gcugcaauccaugaaacug

SEQ ID NO: 2527473 - RNA, 19 nt, Artificial Sequence
  Description of Artificial Sequence: Synthetic oligonucleotide
  Antisense strand to SEQ ID NO: 2527472
caguuucauggauugcagc

SEQ ID NO: 2527474 - RNA, 19 nt, Artificial Sequence
  Description of Artificial Sequence: Synthetic oligonucleotide
  Sense strand starting at position 2192 of SEQ ID NO: 1888326
uuacuaggucugcauauga

SEQ ID NO: 2527475 - RNA, 19 nt, Artificial Sequence
  Description of Artificial Sequence: Synthetic oligonucleotide
  Antisense strand to SEQ ID NO: 2527474
ucauaugcagaccuaguaa

SEQ ID NO: 2527476 - RNA, 19 nt, Artificial Sequence
  Description of Artificial Sequence: Synthetic oligonucleotide
  Sense strand starting at position 2451 of SEQ ID NO: 1888326
uugcguguucuuguaagua

SEQ ID NO: 2527477 - RNA, 19 nt, Artificial Sequence
  Description of Artificial Sequence: Synthetic oligonucleotide
  Antisense strand to SEQ ID NO: 2527476
uacuuacaagaacacgcaa

SEQ ID NO: 2527478 - RNA, 19 nt, Artificial Sequence
  Description of Artificial Sequence: Synthetic oligonucleotide
  Sense strand starting at position 2698 of SEQ ID NO: 1888326
ugucauguccaaggaaaug

SEQ ID NO: 2527479 - RNA, 19 nt, Artificial Sequence
  Description of Artificial Sequence: Synthetic oligonucleotide
  Antisense strand to SEQ ID NO: 2527478
cauuuccuuggacaugaca

SEQ ID NO: 2527480 - RNA, 19 nt, Artificial Sequence
  Description of Artificial Sequence: Synthetic oligonucleotide
  Sense strand starting at position 2336 of SEQ ID NO: 1888326
ggcucugugacaugaaaga

SEQ ID NO: 2527481 - RNA, 19 nt, Artificial Sequence
  Description of Artificial Sequence: Synthetic oligonucleotide
  Antisense strand to SEQ ID NO: 2527480
ucuuucaugucacagagcc

SEQ ID NO: 2527482 - RNA, 19 nt, Artificial Sequence
  Description of Artificial Sequence: Synthetic oligonucleotide
  Sense strand starting at position 2493 of SEQ ID NO: 1888326
auggauagcucaguaaacu

SEQ ID NO: 2527483 - RNA, 19 nt, Artificial Sequence
  Description of Artificial Sequence: Synthetic oligonucleotide
  Antisense strand to SEQ ID NO: 2527482
aguuuacugagcuauccau

SEQ ID NO: 2527484 - RNA, 19 nt, Artificial Sequence
  Description of Artificial Sequence: Synthetic oligonucleotide
  Sense strand starting at position 1472 of SEQ ID NO: 1888326
guguuagagcaauagugaa

SEQ ID NO: 2527485 - RNA, 19 nt, Artificial Sequence
  Description of Artificial Sequence: Synthetic oligonucleotide
  Antisense strand to SEQ ID NO: 2527484
uucacuauugcucuaacac

SEQ ID NO: 2527486 - RNA, 19 nt, Artificial Sequence
  Description of Artificial Sequence: Synthetic oligonucleotide
  Sense strand starting at position 2984 of SEQ ID NO: 1888326
acggaagccuagucagaaa

SEQ ID NO: 2527487 - RNA, 19 nt, Artificial Sequence
  Description of Artificial Sequence: Synthetic oligonucleotide
  Antisense strand to SEQ ID NO: 2527486
uuucugacuaggcuuccgu

SEQ ID NO: 2527488 - RNA, 19 nt, Artificial Sequence
  Description of Artificial Sequence: Synthetic oligonucleotide
  Sense strand starting at position 2639 of SEQ ID NO: 1888326
agccuauggccuuauagac

SEQ ID NO: 2527489 - RNA, 19 nt, Artificial Sequence
  Description of Artificial Sequence: Synthetic oligonucleotide
  Antisense strand to SEQ ID NO: 2527488
gucuauaaggccauaggcu

SEQ ID NO: 2527490 - RNA, 19 nt, Artificial Sequence
  Description of Artificial Sequence: Synthetic oligonucleotide
  Sense strand starting at position 2377 of SEQ ID NO: 1888326
gucagacuauuugaaacca

SEQ ID NO: 2527491 - RNA, 19 nt, Artificial Sequence
  Description of Artificial Sequence: Synthetic oligonucleotide
  Antisense strand to SEQ ID NO: 2527490
ugguuucaaauagucugac

SEQ ID NO: 2527492 - RNA, 19 nt, Artificial Sequence
  Description of Artificial Sequence: Synthetic oligonucleotide
  Sense strand starting at position 3731 of SEQ ID NO: 1888326
augaguccgccugauacaa

SEQ ID NO: 2527493 - RNA, 19 nt, Artificial Sequence
  Description of Artificial Sequence: Synthetic oligonucleotide
  Antisense strand to SEQ ID NO: 2527492
uuguaucaggcggacucau

SEQ ID NO: 2527494 - RNA, 19 nt, Artificial Sequence
  Description of Artificial Sequence: Synthetic oligonucleotide
  Sense strand starting at position 2502 of SEQ ID NO: 1888326
ucaguaaacucauuauagu

SEQ ID NO: 2527495 - RNA, 19 nt, Artificial Sequence
  Description of Artificial Sequence: Synthetic oligonucleotide
  Antisense strand to SEQ ID NO: 2527494
acuauaaugaguuuacuga

SEQ ID NO: 2527496 - RNA, 19 nt, Artificial Sequence
  Description of Artificial Sequence: Synthetic oligonucleotide
  Sense strand starting at position 2753 of SEQ ID NO: 1888326
auagaauuggccugaaugu

SEQ ID NO: 2527497 - RNA, 19 nt, Artificial Sequence
  Description of Artificial Sequence: Synthetic oligonucleotide
  Antisense strand to SEQ ID NO: 2527496
acauucaggccaauucuau

SEQ ID NO: 2527498 - RNA, 19 nt, Artificial Sequence
  Description of Artificial Sequence: Synthetic oligonucleotide
  Sense strand starting at position 2513 of SEQ ID NO: 1888326
auuauaguuuccuuugaca

SEQ ID NO: 2527499 - RNA, 19 nt, Artificial Sequence
  Description of Artificial Sequence: Synthetic oligonucleotide
  Antisense strand to SEQ ID NO: 2527498
ugucaaaggaaacuauaau

SEQ ID NO: 2527500 - RNA, 19 nt, Artificial Sequence
  Description of Artificial Sequence: Synthetic oligonucleotide
  Sense strand starting at position 2674 of SEQ ID NO: 1888326
auguguuugaggugggaaa

SEQ ID NO: 2527501 - RNA, 19 nt, Artificial Sequence
  Description of Artificial Sequence: Synthetic oligonucleotide
  Antisense strand to SEQ ID NO: 2527500
uuucccaccucaaacacau

SEQ ID NO: 2527502 - RNA, 19 nt, Artificial Sequence
  Description of Artificial Sequence: Synthetic oligonucleotide
  Sense strand starting at position 2511 of SEQ ID NO: 1888326
ucauuauaguuuccuuuga

SEQ ID NO: 2527503 - RNA, 19 nt, Artificial Sequence
  Description of Artificial Sequence: Synthetic oligonucleotide
  Antisense strand to SEQ ID NO: 2527502
ucaaaggaaacuauaauga

SEQ ID NO: 2527504 - RNA, 19 nt, Artificial Sequence
  Description of Artificial Sequence: Synthetic oligonucleotide
  Sense strand starting at position 3267 of SEQ ID NO: 1888326
agcugcaauccaugaaacu

SEQ ID NO: 2527505 - RNA, 19 nt, Artificial Sequence
  Description of Artificial Sequence: Synthetic oligonucleotide
  Antisense strand to SEQ ID NO: 2527504
aguuucauggauugcagcu

SEQ ID NO: 2527506 - RNA, 19 nt, Artificial Sequence
  Description of Artificial Sequence: Synthetic oligonucleotide
  Sense strand starting at position 2653 of SEQ ID NO: 1888326
uagacuugcuggucucaaa

SEQ ID NO: 2527507 - RNA, 19 nt, Artificial Sequence
  Description of Artificial Sequence: Synthetic oligonucleotide
  Antisense strand to SEQ ID NO: 2527506
uuugagaccagcaagucua

SEQ ID NO: 2527508 - RNA, 19 nt, Artificial Sequence
  Description of Artificial Sequence: Synthetic oligonucleotide
  Sense strand starting at position 2297 of SEQ ID NO: 1888326
ggaagucauuuagggaauu

SEQ ID NO: 2527509 - RNA, 19 nt, Artificial Sequence
  Description of Artificial Sequence: Synthetic oligonucleotide
  Antisense strand to SEQ ID NO: 2527508
aauucccuaaaugacuucc

SEQ ID NO: 2527510 - RNA, 19 nt, Artificial Sequence
  Description of Artificial Sequence: Synthetic oligonucleotide
  Sense strand starting at position 869 of SEQ ID NO: 1888326
ugucucacagucugacaau

SEQ ID NO: 2527511 - RNA, 19 nt, Artificial Sequence
  Description of Artificial Sequence: Synthetic oligonucleotide
  Antisense strand to SEQ ID NO: 2527510
auugucagacugugagaca

SEQ ID NO: 2527512 - RNA, 19 nt, Artificial Sequence
  Description of Artificial Sequence: Synthetic oligonucleotide
  Sense strand starting at position 2266 of SEQ ID NO: 1888326
ggcaauggaguuugugaua

SEQ ID NO: 2527513 - RNA, 19 nt, Artificial Sequence
  Description of Artificial Sequence: Synthetic oligonucleotide
  Antisense strand to SEQ ID NO: 2527512
uaucacaaacuccauugcc

SEQ ID NO: 2527514 - RNA, 19 nt, Artificial Sequence
  Description of Artificial Sequence: Synthetic oligonucleotide
  Sense strand starting at position 2533 of SEQ ID NO: 1888326
caucacgugucauugggaa

SEQ ID NO: 2527515 - RNA, 19 nt, Artificial Sequence
  Description of Artificial Sequence: Synthetic oligonucleotide
  Antisense strand to SEQ ID NO: 2527514
uucccaaugacacgugaug

SEQ ID NO: 2527516 - RNA, 19 nt, Artificial Sequence
  Description of Artificial Sequence: Synthetic oligonucleotide
  Sense strand starting at position 2535 of SEQ ID NO: 1888326
ucacgugucauugggaaac

SEQ ID NO: 2527517 - RNA, 19 nt, Artificial Sequence
  Description of Artificial Sequence: Synthetic oligonucleotide
  Antisense strand to SEQ ID NO: 2527516
guuucccaaugacacguga

SEQ ID NO: 2527518 - RNA, 19 nt, Artificial Sequence
  Description of Artificial Sequence: Synthetic oligonucleotide
  Sense strand starting at position 2921 of SEQ ID NO: 1888326
agagaacuuuaagaaucca

SEQ ID NO: 2527519 - RNA, 19 nt, Artificial Sequence
  Description of Artificial Sequence: Synthetic oligonucleotide
  Antisense strand to SEQ ID NO: 2527518
uggauucuuaaaguucucu

SEQ ID NO: 2527520 - RNA, 19 nt, Artificial Sequence
  Description of Artificial Sequence: Synthetic oligonucleotide
  Sense strand starting at position 3727 of SEQ ID NO: 1888326
aaacaugaguccgccugau

SEQ ID NO: 2527521 - RNA, 19 nt, Artificial Sequence
  Description of Artificial Sequence: Synthetic oligonucleotide
  Antisense strand to SEQ ID NO: 2527520
aucaggcggacucauguuu

SEQ ID NO: 2527522 - RNA, 19 nt, Artificial Sequence
  Description of Artificial Sequence: Synthetic oligonucleotide
  Sense strand starting at position 3867 of SEQ ID NO: 1888326
guucuuauuccuggcagga

SEQ ID NO: 2527523 - RNA, 19 nt, Artificial Sequence
  Description of Artificial Sequence: Synthetic oligonucleotide
  Antisense strand to SEQ ID NO: 2527522
uccugccaggaauaagaac

SEQ ID NO: 2527524 - RNA, 19 nt, Artificial Sequence
  Description of Artificial Sequence: Synthetic oligonucleotide
  Sense strand starting at position 2480 of SEQ ID NO: 1888326
cauguacauuuguauggau

SEQ ID NO: 2527525 - RNA, 19 nt, Artificial Sequence
  Description of Artificial Sequence: Synthetic oligonucleotide
  Antisense strand to SEQ ID NO: 2527524
auccauacaaauguacaug

SEQ ID NO: 2527526 - RNA, 19 nt, Artificial Sequence
  Description of Artificial Sequence: Synthetic oligonucleotide
  Sense strand starting at position 2349 of SEQ ID NO: 1888326
gaaagacagucucaaagau

SEQ ID NO: 2527527 - RNA, 19 nt, Artificial Sequence
  Description of Artificial Sequence: Synthetic oligonucleotide
  Antisense strand to SEQ ID NO: 2527526
aucuuugagacugucuuuc

SEQ ID NO: 2527528 - RNA, 19 nt, Artificial Sequence
  Description of Artificial Sequence: Synthetic oligonucleotide
  Sense strand starting at position 3375 of SEQ ID NO: 1888326
ucuuuauggugguuccuau

SEQ ID NO: 2527529 - RNA, 19 nt, Artificial Sequence
  Description of Artificial Sequence: Synthetic oligonucleotide
  Antisense strand to SEQ ID NO: 2527528
auaggaaccaccauaaaga

SEQ ID NO: 2527530 - RNA, 19 nt, Artificial Sequence
  Description of Artificial Sequence: Synthetic oligonucleotide
  Sense strand starting at position 3971 of SEQ ID NO: 1888326
cgaguucuauguccuauca

SEQ ID NO: 2527531 - RNA, 19 nt, Artificial Sequence
  Description of Artificial Sequence: Synthetic oligonucleotide
  Antisense strand to SEQ ID NO: 2527530
ugauaggacauagaacucg

SEQ ID NO: 2527532 - RNA, 19 nt, Artificial Sequence
  Description of Artificial Sequence: Synthetic oligonucleotide
  Sense strand starting at position 2455 of SEQ ID NO: 1888326
guguucuuguaaguauaca

SEQ ID NO: 2527533 - RNA, 19 nt, Artificial Sequence
  Description of Artificial Sequence: Synthetic oligonucleotide
  Antisense strand to SEQ ID NO: 2527532
uguauacuuacaagaacac

SEQ ID NO: 2527534 - RNA, 19 nt, Artificial Sequence
  Description of Artificial Sequence: Synthetic oligonucleotide
  Sense strand starting at position 2329 of SEQ ID NO: 1888326
agugcaaggcucugugaca

SEQ ID NO: 2527535 - RNA, 19 nt, Artificial Sequence
  Description of Artificial Sequence: Synthetic oligonucleotide
  Antisense strand to SEQ ID NO: 2527534
ugucacagagccuugcacu

SEQ ID NO: 2527536 - RNA, 19 nt, Artificial Sequence
  Description of Artificial Sequence: Synthetic oligonucleotide
  Sense strand starting at position 2063 of SEQ ID NO: 1888327
guggacagaucauuacaau

SEQ ID NO: 2527537 - RNA, 19 nt, Artificial Sequence
  Description of Artificial Sequence: Synthetic oligonucleotide
  Antisense strand to SEQ ID NO: 2527536
auuguaaugaucuguccac

SEQ ID NO: 2527538 - RNA, 19 nt, Artificial Sequence
  Description of Artificial Sequence: Synthetic oligonucleotide
  Sense strand starting at position 2120 of SEQ ID NO: 1888327
gggcucagaggcuaugaaa

SEQ ID NO: 2527539 - RNA, 19 nt, Artificial Sequence
  Description of Artificial Sequence: Synthetic oligonucleotide
  Antisense strand to SEQ ID NO: 2527538
uuucauagccucugagccc

SEQ ID NO: 2527540 - RNA, 19 nt, Artificial Sequence
  Description of Artificial Sequence: Synthetic oligonucleotide
  Sense strand starting at position 3561 of SEQ ID NO: 1888327
agucguuuacaagaauaaa

SEQ ID NO: 2527541 - RNA, 19 nt, Artificial Sequence
  Description of Artificial Sequence: Synthetic oligonucleotide
  Antisense strand to SEQ ID NO: 2527540
uuuauucuuguaaacgacu

SEQ ID NO: 2527542 - RNA, 19 nt, Artificial Sequence
  Description of Artificial Sequence: Synthetic oligonucleotide
  Sense strand starting at position 2816 of SEQ ID NO: 1888327
agucauggaauuggugaga

SEQ ID NO: 2527543 - RNA, 19 nt, Artificial Sequence
  Description of Artificial Sequence: Synthetic oligonucleotide
  Antisense strand to SEQ ID NO: 2527542
ucucaccaauuccaugacu

SEQ ID NO: 2527544 - RNA, 19 nt, Artificial Sequence
  Description of Artificial Sequence: Synthetic oligonucleotide
  Sense strand starting at position 1535 of SEQ ID NO: 1888327
uuaaaugguguauagucaa

SEQ ID NO: 2527545 - RNA, 19 nt, Artificial Sequence
  Description of Artificial Sequence: Synthetic oligonucleotide
  Antisense strand to SEQ ID NO: 2527544
uugacuauacaccauuuaa

SEQ ID NO: 2527546 - RNA, 19 nt, Artificial Sequence
  Description of Artificial Sequence: Synthetic oligonucleotide
  Sense strand starting at position 448 of SEQ ID NO: 1888327
uugagagucaugggucaaa

SEQ ID NO: 2527547 - RNA, 19 nt, Artificial Sequence
  Description of Artificial Sequence: Synthetic oligonucleotide
  Antisense strand to SEQ ID NO: 2527546
uuugacccaugacucucaa

SEQ ID NO: 2527548 - RNA, 19 nt, Artificial Sequence
  Description of Artificial Sequence: Synthetic oligonucleotide
  Sense strand starting at position 2478 of SEQ ID NO: 1888327
ccaugucauuugucuucuu

SEQ ID NO: 2527549 - RNA, 19 nt, Artificial Sequence
  Description of Artificial Sequence: Synthetic oligonucleotide
  Antisense strand to SEQ ID NO: 2527548
aagaagacaaaugacaugg

SEQ ID NO: 2527550 - RNA, 19 nt, Artificial Sequence
  Description of Artificial Sequence: Synthetic oligonucleotide
  Sense strand starting at position 3522 of SEQ ID NO: 1888327
cuugucauucuguaaauaa

SEQ ID NO: 2527551 - RNA, 19 nt, Artificial Sequence
  Description of Artificial Sequence: Synthetic oligonucleotide
  Antisense strand to SEQ ID NO: 2527550
uuauuuacagaaugacaag

SEQ ID NO: 2527552 - RNA, 19 nt, Artificial Sequence
  Description of Artificial Sequence: Synthetic oligonucleotide
  Sense strand starting at position 3147 of SEQ ID NO: 1888327
gggcaaguucuucagacug

SEQ ID NO: 2527553 - RNA, 19 nt, Artificial Sequence
  Description of Artificial Sequence: Synthetic oligonucleotide
  Antisense strand to SEQ ID NO: 2527552
cagucugaagaacuugccc

SEQ ID NO: 2527554 - RNA, 19 nt, Artificial Sequence
  Description of Artificial Sequence: Synthetic oligonucleotide
  Sense strand starting at position 1542 of SEQ ID NO: 1888327
guguauagucaacacuuaa

SEQ ID NO: 2527555 - RNA, 19 nt, Artificial Sequence
  Description of Artificial Sequence: Synthetic oligonucleotide
  Antisense strand to SEQ ID NO: 2527554
uuaaguguugacuauacac

SEQ ID NO: 2527556 - RNA, 19 nt, Artificial Sequence
  Description of Artificial Sequence: Synthetic oligonucleotide
  Sense strand starting at position 598 of SEQ ID NO: 1888327
aauugugcauuuguaugua

SEQ ID NO: 2527557 - RNA, 19 nt, Artificial Sequence
  Description of Artificial Sequence: Synthetic oligonucleotide
  Antisense strand to SEQ ID NO: 2527556
uacauacaaaugcacaauu

SEQ ID NO: 2527558 - RNA, 19 nt, Artificial Sequence
  Description of Artificial Sequence: Synthetic oligonucleotide
  Sense strand starting at position 381 of SEQ ID NO: 1888327
ggauguuuacucuacuucu

SEQ ID NO: 2527559 - RNA, 19 nt, Artificial Sequence
  Description of Artificial Sequence: Synthetic oligonucleotide
  Antisense strand to SEQ ID NO: 2527558
agaaguagaguaaacaucc

SEQ ID NO: 2527560 - RNA, 19 nt, Artificial Sequence
  Description of Artificial Sequence: Synthetic oligonucleotide
  Sense strand starting at position 2908 of SEQ ID NO: 1888327
uguuuacuggaaugaaucu

SEQ ID NO: 2527561 - RNA, 19 nt, Artificial Sequence
  Description of Artificial Sequence: Synthetic oligonucleotide
  Antisense strand to SEQ ID NO: 2527560
agauucauuccaguaaaca

SEQ ID NO: 2527562 - RNA, 19 nt, Artificial Sequence
  Description of Artificial Sequence: Synthetic oligonucleotide
  Sense strand starting at position 3487 of SEQ ID NO: 1888327
cugauagaaucugccuaua

SEQ ID NO: 2527563 - RNA, 19 nt, Artificial Sequence
  Description of Artificial Sequence: Synthetic oligonucleotide
  Antisense strand to SEQ ID NO: 2527562
uauaggcagauucuaucag

SEQ ID NO: 2527564 - RNA, 19 nt, Artificial Sequence
  Description of Artificial Sequence: Synthetic oligonucleotide
  Sense strand starting at position 2307 of SEQ ID NO: 1888327
uguuauguagcagaaauug

SEQ ID NO: 2527565 - RNA, 19 nt, Artificial Sequence
  Description of Artificial Sequence: Synthetic oligonucleotide
  Antisense strand to SEQ ID NO: 2527564
caauuucugcuacauaaca

SEQ ID NO: 2527566 - RNA, 19 nt, Artificial Sequence
  Description of Artificial Sequence: Synthetic oligonucleotide
  Sense strand starting at position 3878 of SEQ ID NO: 1888327
acacgacagcacugaaauu

SEQ ID NO: 2527567 - RNA, 19 nt, Artificial Sequence
  Description of Artificial Sequence: Synthetic oligonucleotide
  Antisense strand to SEQ ID NO: 2527566
aauuucagugcugucgugu

SEQ ID NO: 2527568 - RNA, 19 nt, Artificial Sequence
  Description of Artificial Sequence: Synthetic oligonucleotide
  Sense strand starting at position 1252 of SEQ ID NO: 1888327
cuagauucccugggaggca

SEQ ID NO: 2527569 - RNA, 19 nt, Artificial Sequence
  Description of Artificial Sequence: Synthetic oligonucleotide
  Antisense strand to SEQ ID NO: 2527568
ugccucccagggaaucuag

SEQ ID NO: 2527570 - RNA, 19 nt, Artificial Sequence
  Description of Artificial Sequence: Synthetic oligonucleotide
  Sense strand starting at position 601 of SEQ ID NO: 1888327
ugugcauuuguauguauag

SEQ ID NO: 2527571 - RNA, 19 nt, Artificial Sequence
  Description of Artificial Sequence: Synthetic oligonucleotide
  Antisense strand to SEQ ID NO: 2527570
cuauacauacaaaugcaca

SEQ ID NO: 2527572 - RNA, 19 nt, Artificial Sequence
  Description of Artificial Sequence: Synthetic oligonucleotide
  Sense strand starting at position 1316 of SEQ ID NO: 1888327
aggugugguggccaggaaa

SEQ ID NO: 2527573 - RNA, 19 nt, Artificial Sequence
  Description of Artificial Sequence: Synthetic oligonucleotide
  Antisense strand to SEQ ID NO: 2527572
uuuccuggccaccacaccu

SEQ ID NO: 2527574 - RNA, 19 nt, Artificial Sequence
  Description of Artificial Sequence: Synthetic oligonucleotide
  Sense strand starting at position 3554 of SEQ ID NO: 1888327
uagagaaagucguuuacaa

SEQ ID NO: 2527575 - RNA, 19 nt, Artificial Sequence
  Description of Artificial Sequence: Synthetic oligonucleotide
  Antisense strand to SEQ ID NO: 2527574
uuguaaacgacuuucucua

SEQ ID NO: 2527576 - RNA, 19 nt, Artificial Sequence
  Description of Artificial Sequence: Synthetic oligonucleotide
  Sense strand starting at position 2670 of SEQ ID NO: 1888327
cugaauucugggcaugguu

SEQ ID NO: 2527577 - RNA, 19 nt, Artificial Sequence
  Description of Artificial Sequence: Synthetic oligonucleotide
  Antisense strand to SEQ ID NO: 2527576
aaccaugcccagaauucag

SEQ ID NO: 2527578 - RNA, 19 nt, Artificial Sequence
  Description of Artificial Sequence: Synthetic oligonucleotide
  Sense strand starting at position 838 of SEQ ID NO: 1888327
guggaagguccaugaguaa

SEQ ID NO: 2527579 - RNA, 19 nt, Artificial Sequence
  Description of Artificial Sequence: Synthetic oligonucleotide
  Antisense strand to SEQ ID NO: 2527578
uuacucauggaccuuccac

SEQ ID NO: 2527580 - RNA, 19 nt, Artificial Sequence
  Description of Artificial Sequence: Synthetic oligonucleotide
  Sense strand starting at position 901 of SEQ ID NO: 1888327
gcaagaaauuaaucagccu

SEQ ID NO: 2527581 - RNA, 19 nt, Artificial Sequence
  Description of Artificial Sequence: Synthetic oligonucleotide
  Antisense strand to SEQ ID NO: 2527580
aggcugauuaauuucuugc

SEQ ID NO: 2527582 - RNA, 19 nt, Artificial Sequence
  Description of Artificial Sequence: Synthetic oligonucleotide
  Sense strand starting at position 1481 of SEQ ID NO: 1888327
aggaaaugcaugcauuguu

SEQ ID NO: 2527583 - RNA, 19 nt, Artificial Sequence
  Description of Artificial Sequence: Synthetic oligonucleotide
  Antisense strand to SEQ ID NO: 2527582
aacaaugcaugcauuuccu

SEQ ID NO: 2527584 - RNA, 19 nt, Artificial Sequence
  Description of Artificial Sequence: Synthetic oligonucleotide
  Sense strand starting at position 2281 of SEQ ID NO: 1888327
agcaguuauggccauuaag

SEQ ID NO: 2527585 - RNA, 19 nt, Artificial Sequence
  Description of Artificial Sequence: Synthetic oligonucleotide
  Antisense strand to SEQ ID NO: 2527584
cuuaauggccauaacugcu

SEQ ID NO: 2527586 - RNA, 19 nt, Artificial Sequence
  Description of Artificial Sequence: Synthetic oligonucleotide
  Sense strand starting at position 1147 of SEQ ID NO: 1888327
guagcaugugaauaguuaa

SEQ ID NO: 2527587 - RNA, 19 nt, Artificial Sequence
  Description of Artificial Sequence: Synthetic oligonucleotide
  Antisense strand to SEQ ID NO: 2527586
uuaacuauucacaugcuac

SEQ ID NO: 2527588 - RNA, 19 nt, Artificial Sequence
  Description of Artificial Sequence: Synthetic oligonucleotide
  Sense strand starting at position 2044 of SEQ ID NO: 1888327
gguagagugucacccaaag

SEQ ID NO: 2527589 - RNA, 19 nt, Artificial Sequence
  Description of Artificial Sequence: Synthetic oligonucleotide
  Antisense strand to SEQ ID NO: 2527588
cuuugggugacacucuacc

SEQ ID NO: 2527590 - RNA, 19 nt, Artificial Sequence
  Description of Artificial Sequence: Synthetic oligonucleotide
  Sense strand starting at position 3956 of SEQ ID NO: 1888327
auuccacguugauugacaa

SEQ ID NO: 2527591 - RNA, 19 nt, Artificial Sequence
  Description of Artificial Sequence: Synthetic oligonucleotide
  Antisense strand to SEQ ID NO: 2527590
uugucaaucaacguggaau

SEQ ID NO: 2527592 - RNA, 19 nt, Artificial Sequence
  Description of Artificial Sequence: Synthetic oligonucleotide
  Sense strand starting at position 2523 of SEQ ID NO: 1888327
aucucaccgcuugauaauu

SEQ ID NO: 2527593 - RNA, 19 nt, Artificial Sequence
  Description of Artificial Sequence: Synthetic oligonucleotide
  Antisense strand to SEQ ID NO: 2527592
aauuaucaagcggugagau

SEQ ID NO: 2527594 - RNA, 19 nt, Artificial Sequence
  Description of Artificial Sequence: Synthetic oligonucleotide
  Sense strand starting at position 378 of SEQ ID NO: 1888327
uuaggauguuuacucuacu

SEQ ID NO: 2527595 - RNA, 19 nt, Artificial Sequence
  Description of Artificial Sequence: Synthetic oligonucleotide
  Antisense strand to SEQ ID NO: 2527594
aguagaguaaacauccuaa

SEQ ID NO: 2527596 - RNA, 19 nt, Artificial Sequence
  Description of Artificial Sequence: Synthetic oligonucleotide
  Sense strand starting at position 1150 of SEQ ID NO: 1888327
gcaugugaauaguuaauag

SEQ ID NO: 2527597 - RNA, 19 nt, Artificial Sequence
  Description of Artificial Sequence: Synthetic oligonucleotide
  Antisense strand to SEQ ID NO: 2527596
cuauuaacuauucacaugc

SEQ ID NO: 2527598 - RNA, 19 nt, Artificial Sequence
  Description of Artificial Sequence: Synthetic oligonucleotide
  Sense strand starting at position 3891 of SEQ ID NO: 1888327
gaaauugcuuagucggaaa

SEQ ID NO: 2527599 - RNA, 19 nt, Artificial Sequence
  Description of Artificial Sequence: Synthetic oligonucleotide
  Antisense strand to SEQ ID NO: 2527598
uuuccgacuaagcaauuuc

SEQ ID NO: 2527600 - RNA, 19 nt, Artificial Sequence
  Description of Artificial Sequence: Synthetic oligonucleotide
  Sense strand starting at position 2481 of SEQ ID NO: 1888327
ugucauuugucuucuuguu

SEQ ID NO: 2527601 - RNA, 19 nt, Artificial Sequence
  Description of Artificial Sequence: Synthetic oligonucleotide
  Antisense strand to SEQ ID NO: 2527600
aacaagaagacaaaugaca

SEQ ID NO: 2527602 - RNA, 19 nt, Artificial Sequence
  Description of Artificial Sequence: Synthetic oligonucleotide
  Sense strand starting at position 3788 of SEQ ID NO: 1888327
guaaaugcugguuauuauc

SEQ ID NO: 2527603 - RNA, 19 nt, Artificial Sequence
  Description of Artificial Sequence: Synthetic oligonucleotide
  Antisense strand to SEQ ID NO: 2527602
gauaauaaccagcauuuac

SEQ ID NO: 2527604 - RNA, 19 nt, Artificial Sequence
  Description of Artificial Sequence: Synthetic oligonucleotide
  Sense strand starting at position 3073 of SEQ ID NO: 1888327
gcuuguggugcagaaggaa

SEQ ID NO: 2527605 - RNA, 19 nt, Artificial Sequence
  Description of Artificial Sequence: Synthetic oligonucleotide
  Antisense strand to SEQ ID NO: 2527604
uuccuucugcaccacaagc

SEQ ID NO: 2527606 - RNA, 19 nt, Artificial Sequence
  Description of Artificial Sequence: Synthetic oligonucleotide
  Sense strand starting at position 3521 of SEQ ID NO: 1888327
acuugucauucuguaaaua

SEQ ID NO: 2527607 - RNA, 19 nt, Artificial Sequence
  Description of Artificial Sequence: Synthetic oligonucleotide
  Antisense strand to SEQ ID NO: 2527606
uauuuacagaaugacaagu

SEQ ID NO: 2527608 - RNA, 19 nt, Artificial Sequence
  Description of Artificial Sequence: Synthetic oligonucleotide
  Sense strand starting at position 1388 of SEQ ID NO: 1888327
agcacaaaguaugucuaau

SEQ ID NO: 2527609 - RNA, 19 nt, Artificial Sequence
  Description of Artificial Sequence: Synthetic oligonucleotide
  Antisense strand to SEQ ID NO: 2527608
auuagacauacuuugugcu

SEQ ID NO: 2527610 - RNA, 19 nt, Artificial Sequence
  Description of Artificial Sequence: Synthetic oligonucleotide
  Sense strand starting at position 1239 of SEQ ID NO: 1888327
ugcccuuuaugaccuagau

SEQ ID NO: 2527611 - RNA, 19 nt, Artificial Sequence
  Description of Artificial Sequence: Synthetic oligonucleotide
  Antisense strand to SEQ ID NO: 2527610
aucuaggucauaaagggca

SEQ ID NO: 2527612 - RNA, 19 nt, Artificial Sequence
  Description of Artificial Sequence: Synthetic oligonucleotide
  Sense strand starting at position 1980 of SEQ ID NO: 1888327
cccaucagcuuuccuggaa

SEQ ID NO: 2527613 - RNA, 19 nt, Artificial Sequence
  Description of Artificial Sequence: Synthetic oligonucleotide
  Antisense strand to SEQ ID NO: 2527612
uuccaggaaagcugauggg

SEQ ID NO: 2527614 - RNA, 19 nt, Artificial Sequence
  Description of Artificial Sequence: Synthetic oligonucleotide
  Sense strand starting at position 2342 of SEQ ID NO: 1888327
accuucugugcuuacacau

SEQ ID NO: 2527615 - RNA, 19 nt, Artificial Sequence
  Description of Artificial Sequence: Synthetic oligonucleotide
  Antisense strand to SEQ ID NO: 2527614
auguguaagcacagaaggu

SEQ ID NO: 2527616 - RNA, 19 nt, Artificial Sequence
  Description of Artificial Sequence: Synthetic oligonucleotide
  Sense strand starting at position 2783 of SEQ ID NO: 1888328
ugacgaggacucgaaagua

SEQ ID NO: 2527617 - RNA, 19 nt, Artificial Sequence
  Description of Artificial Sequence: Synthetic oligonucleotide
  Antisense strand to SEQ ID NO: 2527616
uacuuucgaguccucguca

SEQ ID NO: 2527618 - RNA, 19 nt, Artificial Sequence
  Description of Artificial Sequence: Synthetic oligonucleotide
  Sense strand starting at position 1251 of SEQ ID NO: 1888328
ggaagagguuuaguggaau

SEQ ID NO: 2527619 - RNA, 19 nt, Artificial Sequence
  Description of Artificial Sequence: Synthetic oligonucleotide
  Antisense strand to SEQ ID NO: 2527618
auuccacuaaaccucuucc

SEQ ID NO: 2527620 - RNA, 19 nt, Artificial Sequence
  Description of Artificial Sequence: Synthetic oligonucleotide
  Sense strand starting at position 962 of SEQ ID NO: 1888328
ggcauuacugucguuucuu

SEQ ID NO: 2527621 - RNA, 19 nt, Artificial Sequence
  Description of Artificial Sequence: Synthetic oligonucleotide
  Antisense strand to SEQ ID NO: 2527620
aagaaacgacaguaaugcc

SEQ ID NO: 2527622 - RNA, 19 nt, Artificial Sequence
  Description of Artificial Sequence: Synthetic oligonucleotide
  Sense strand starting at position 3018 of SEQ ID NO: 1888328
agcgucuuugcaguuugaa

SEQ ID NO: 2527623 - RNA, 19 nt, Artificial Sequence
  Description of Artificial Sequence: Synthetic oligonucleotide
  Antisense strand to SEQ ID NO: 2527622
uucaaacugcaaagacgcu

SEQ ID NO: 2527624 - RNA, 19 nt, Artificial Sequence
  Description of Artificial Sequence: Synthetic oligonucleotide
  Sense strand starting at position 3019 of SEQ ID NO: 1888328
gcgucuuugcaguuugaaa

SEQ ID NO: 2527625 - RNA, 19 nt, Artificial Sequence
  Description of Artificial Sequence: Synthetic oligonucleotide
  Antisense strand to SEQ ID NO: 2527624
uuucaaacugcaaagacgc

SEQ ID NO: 2527626 - RNA, 19 nt, Artificial Sequence
  Description of Artificial Sequence: Synthetic oligonucleotide
  Sense strand starting at position 3369 of SEQ ID NO: 1888328
aaagaagaugauugcagua

SEQ ID NO: 2527627 - RNA, 19 nt, Artificial Sequence
  Description of Artificial Sequence: Synthetic oligonucleotide
  Antisense strand to SEQ ID NO: 2527626
uacugcaaucaucuucuuu

SEQ ID NO: 2527628 - RNA, 19 nt, Artificial Sequence
  Description of Artificial Sequence: Synthetic oligonucleotide
  Sense strand starting at position 2889 of SEQ ID NO: 1888328
cugggugauggugacuuaa

SEQ ID NO: 2527629 - RNA, 19 nt, Artificial Sequence
  Description of Artificial Sequence: Synthetic oligonucleotide
  Antisense strand to SEQ ID NO: 2527628
uuaagucaccaucacccag

SEQ ID NO: 2527630 - RNA, 19 nt, Artificial Sequence
  Description of Artificial Sequence: Synthetic oligonucleotide
  Sense strand starting at position 1520 of SEQ ID NO: 1888328
uuauuucuccuggguucuu

SEQ ID NO: 2527631 - RNA, 19 nt, Artificial Sequence
  Description of Artificial Sequence: Synthetic oligonucleotide
  Antisense strand to SEQ ID NO: 2527630
aagaacccaggagaaauaa

SEQ ID NO: 2527632 - RNA, 19 nt, Artificial Sequence
  Description of Artificial Sequence: Synthetic oligonucleotide
  Sense strand starting at position 2006 of SEQ ID NO: 1888328
acuugugagcauuagagac

SEQ ID NO: 2527633 - RNA, 19 nt, Artificial Sequence
  Description of Artificial Sequence: Synthetic oligonucleotide
  Antisense strand to SEQ ID NO: 2527632
gucucuaaugcucacaagu

SEQ ID NO: 2527634 - RNA, 19 nt, Artificial Sequence
  Description of Artificial Sequence: Synthetic oligonucleotide
  Sense strand starting at position 1466 of SEQ ID NO: 1888328
ggacaaaccugcuuuacag

SEQ ID NO: 2527635 - RNA, 19 nt, Artificial Sequence
  Description of Artificial Sequence: Synthetic oligonucleotide
  Antisense strand to SEQ ID NO: 2527634
cuguaaagcagguuugucc

SEQ ID NO: 2527636 - RNA, 19 nt, Artificial Sequence
  Description of Artificial Sequence: Synthetic oligonucleotide
  Sense strand starting at position 2291 of SEQ ID NO: 1888328
ucaggagguccauguagaa

SEQ ID NO: 2527637 - RNA, 19 nt, Artificial Sequence
  Description of Artificial Sequence: Synthetic oligonucleotide
  Antisense strand to SEQ ID NO: 2527636
uucuacauggaccuccuga

SEQ ID NO: 2527638 - RNA, 19 nt, Artificial Sequence
  Description of Artificial Sequence: Synthetic oligonucleotide
  Sense strand starting at position 2891 of SEQ ID NO: 1888328
gggugauggugacuuaaau

SEQ ID NO: 2527639 - RNA, 19 nt, Artificial Sequence
  Description of Artificial Sequence: Synthetic oligonucleotide
  Antisense strand to SEQ ID NO: 2527638
auuuaagucaccaucaccc

SEQ ID NO: 2527640 - RNA, 19 nt, Artificial Sequence
  Description of Artificial Sequence: Synthetic oligonucleotide
  Sense strand starting at position 838 of SEQ ID NO: 1888328
uggauuccucucuacaugu

SEQ ID NO: 2527641 - RNA, 19 nt, Artificial Sequence
  Description of Artificial Sequence: Synthetic oligonucleotide
  Antisense strand to SEQ ID NO: 2527640
acauguagagaggaaucca

SEQ ID NO: 2527642 - RNA, 19 nt, Artificial Sequence
  Description of Artificial Sequence: Synthetic oligonucleotide
  Sense strand starting at position 2314 of SEQ ID NO: 1888328
ggcagaacacugggcuaaa

SEQ ID NO: 2527643 - RNA, 19 nt, Artificial Sequence
  Description of Artificial Sequence: Synthetic oligonucleotide
  Antisense strand to SEQ ID NO: 2527642
uuuagcccaguguucugcc

SEQ ID NO: 2527644 - RNA, 19 nt, Artificial Sequence
  Description of Artificial Sequence: Synthetic oligonucleotide
  Sense strand starting at position 2592 of SEQ ID NO: 1888328
ccagaagugcucgaccaag

SEQ ID NO: 2527645 - RNA, 19 nt, Artificial Sequence
  Description of Artificial Sequence: Synthetic oligonucleotide
  Antisense strand to SEQ ID NO: 2527644
cuuggucgagcacuucugg

SEQ ID NO: 2527646 - RNA, 19 nt, Artificial Sequence
  Description of Artificial Sequence: Synthetic oligonucleotide
  Sense strand starting at position 2419 of SEQ ID NO: 1888328
aggucuucccugcaggaca

SEQ ID NO: 2527647 - RNA, 19 nt, Artificial Sequence
  Description of Artificial Sequence: Synthetic oligonucleotide
  Antisense strand to SEQ ID NO: 2527646
uguccugcagggaagaccu

SEQ ID NO: 2527648 - RNA, 19 nt, Artificial Sequence
  Description of Artificial Sequence: Synthetic oligonucleotide
  Sense strand starting at position 2572 of SEQ ID NO: 1888328
acacucauuuagcagaaag

SEQ ID NO: 2527649 - RNA, 19 nt, Artificial Sequence
  Description of Artificial Sequence: Synthetic oligonucleotide
  Antisense strand to SEQ ID NO: 2527648
cuuucugcuaaaugagugu

SEQ ID NO: 2527650 - RNA, 19 nt, Artificial Sequence
  Description of Artificial Sequence: Synthetic oligonucleotide
  Sense strand starting at position 3629 of SEQ ID NO: 1888328
gggcuaucucuuuaaaguu

SEQ ID NO: 2527651 - RNA, 19 nt, Artificial Sequence
  Description of Artificial Sequence: Synthetic oligonucleotide
  Antisense strand to SEQ ID NO: 2527650
aacuuuaaagagauagccc

SEQ ID NO: 2527652 - RNA, 19 nt, Artificial Sequence
  Description of Artificial Sequence: Synthetic oligonucleotide
  Sense strand starting at position 2852 of SEQ ID NO: 1888328
gcccaacuaucagucagaa

SEQ ID NO: 2527653 - RNA, 19 nt, Artificial Sequence
  Description of Artificial Sequence: Synthetic oligonucleotide
  Antisense strand to SEQ ID NO: 2527652
uucugacugauaguugggc

SEQ ID NO: 2527654 - RNA, 19 nt, Artificial Sequence
  Description of Artificial Sequence: Synthetic oligonucleotide
  Sense strand starting at position 3185 of SEQ ID NO: 1888328
uguguagaaaugugaauac

SEQ ID NO: 2527655 - RNA, 19 nt, Artificial Sequence
  Description of Artificial Sequence: Synthetic oligonucleotide
  Antisense strand to SEQ ID NO: 2527654
guauucacauuucuacaca

SEQ ID NO: 2527656 - RNA, 19 nt, Artificial Sequence
  Description of Artificial Sequence: Synthetic oligonucleotide
  Sense strand starting at position 2003 of SEQ ID NO: 1888328
ggcacuugugagcauuaga

SEQ ID NO: 2527657 - RNA, 19 nt, Artificial Sequence
  Description of Artificial Sequence: Synthetic oligonucleotide
  Antisense strand to SEQ ID NO: 2527656
ucuaaugcucacaagugcc

SEQ ID NO: 2527658 - RNA, 19 nt, Artificial Sequence
  Description of Artificial Sequence: Synthetic oligonucleotide
  Sense strand starting at position 2198 of SEQ ID NO: 1888328
gggagauccugguuuguac

SEQ ID NO: 2527659 - RNA, 19 nt, Artificial Sequence
  Description of Artificial Sequence: Synthetic oligonucleotide
  Antisense strand to SEQ ID NO: 2527658
guacaaaccaggaucuccc

SEQ ID NO: 2527660 - RNA, 19 nt, Artificial Sequence
  Description of Artificial Sequence: Synthetic oligonucleotide
  Sense strand starting at position 837 of SEQ ID NO: 1888328
guggauuccucucuacaug

SEQ ID NO: 2527661 - RNA, 19 nt, Artificial Sequence
  Description of Artificial Sequence: Synthetic oligonucleotide
  Antisense strand to SEQ ID NO: 2527660
cauguagagaggaauccac

SEQ ID NO: 2527662 - RNA, 19 nt, Artificial Sequence
  Description of Artificial Sequence: Synthetic oligonucleotide
  Sense strand starting at position 3531 of SEQ ID NO: 1888328
ugcugugaggcuuagggau

SEQ ID NO: 2527663 - RNA, 19 nt, Artificial Sequence
  Description of Artificial Sequence: Synthetic oligonucleotide
  Antisense strand to SEQ ID NO: 2527662
aucccuaagccucacagca

SEQ ID NO: 2527664 - RNA, 19 nt, Artificial Sequence
  Description of Artificial Sequence: Synthetic oligonucleotide
  Sense strand starting at position 2475 of SEQ ID NO: 1888328
uccuaaauguucucaagug

SEQ ID NO: 2527665 - RNA, 19 nt, Artificial Sequence
  Description of Artificial Sequence: Synthetic oligonucleotide
  Antisense strand to SEQ ID NO: 2527664
cacuugagaacauuuagga

SEQ ID NO: 2527666 - RNA, 19 nt, Artificial Sequence
  Description of Artificial Sequence: Synthetic oligonucleotide
  Sense strand starting at position 3347 of SEQ ID NO: 1888328
gagaaagcuccgggagcua

SEQ ID NO: 2527667 - RNA, 19 nt, Artificial Sequence
  Description of Artificial Sequence: Synthetic oligonucleotide
  Antisense strand to SEQ ID NO: 2527666
uagcucccggagcuuucuc

SEQ ID NO: 2527668 - RNA, 19 nt, Artificial Sequence
  Description of Artificial Sequence: Synthetic oligonucleotide
  Sense strand starting at position 3964 of SEQ ID NO: 1888328
ugaagaaauuucgacuggu

SEQ ID NO: 2527669 - RNA, 19 nt, Artificial Sequence
  Description of Artificial Sequence: Synthetic oligonucleotide
  Antisense strand to SEQ ID NO: 2527668
accagucgaaauuucuuca

SEQ ID NO: 2527670 - RNA, 19 nt, Artificial Sequence
  Description of Artificial Sequence: Synthetic oligonucleotide
  Sense strand starting at position 1481 of SEQ ID NO: 1888328
acagaauagccgugacauu

SEQ ID NO: 2527671 - RNA, 19 nt, Artificial Sequence
  Description of Artificial Sequence: Synthetic oligonucleotide
  Antisense strand to SEQ ID NO: 2527670
aaugucacggcuauucugu

SEQ ID NO: 2527672 - RNA, 19 nt, Artificial Sequence
  Description of Artificial Sequence: Synthetic oligonucleotide
  Sense strand starting at position 1531 of SEQ ID NO: 1888328
ggguucuuacauugcaaau

SEQ ID NO: 2527673 - RNA, 19 nt, Artificial Sequence
  Description of Artificial Sequence: Synthetic oligonucleotide
  Antisense strand to SEQ ID NO: 2527672
auuugcaauguaagaaccc

SEQ ID NO: 2527674 - RNA, 19 nt, Artificial Sequence
  Description of Artificial Sequence: Synthetic oligonucleotide
  Sense strand starting at position 3249 of SEQ ID NO: 1888328
agcaaagaauuggaaagaa

SEQ ID NO: 2527675 - RNA, 19 nt, Artificial Sequence
  Description of Artificial Sequence: Synthetic oligonucleotide
  Antisense strand to SEQ ID NO: 2527674
uucuuuccaauucuuugcu

SEQ ID NO: 2527676 - RNA, 19 nt, Artificial Sequence
  Description of Artificial Sequence: Synthetic oligonucleotide
  Sense strand starting at position 2196 of SEQ ID NO: 1888328
cugggagauccugguuugu

SEQ ID NO: 2527677 - RNA, 19 nt, Artificial Sequence
  Description of Artificial Sequence: Synthetic oligonucleotide
  Antisense strand to SEQ ID NO: 2527676
acaaaccaggaucucccag

SEQ ID NO: 2527678 - RNA, 19 nt, Artificial Sequence
  Description of Artificial Sequence: Synthetic oligonucleotide
  Sense strand starting at position 3388 of SEQ ID NO: 1888328
ggcagauccuggcugacau

SEQ ID NO: 2527679 - RNA, 19 nt, Artificial Sequence
  Description of Artificial Sequence: Synthetic oligonucleotide
  Antisense strand to SEQ ID NO: 2527678
augucagccaggaucugcc

SEQ ID NO: 2527680 - RNA, 19 nt, Artificial Sequence
  Description of Artificial Sequence: Synthetic oligonucleotide
  Sense strand starting at position 952 of SEQ ID NO: 1888328
ugguguucuaggcauuacu

SEQ ID NO: 2527681 - RNA, 19 nt, Artificial Sequence
  Description of Artificial Sequence: Synthetic oligonucleotide
  Antisense strand to SEQ ID NO: 2527680
aguaaugccuagaacacca

SEQ ID NO: 2527682 - RNA, 19 nt, Artificial Sequence
  Description of Artificial Sequence: Synthetic oligonucleotide
  Sense strand starting at position 1525 of SEQ ID NO: 1888328
ucuccuggguucuuacauu

SEQ ID NO: 2527683 - RNA, 19 nt, Artificial Sequence
  Description of Artificial Sequence: Synthetic oligonucleotide
  Antisense strand to SEQ ID NO: 2527682
aauguaagaacccaggaga

SEQ ID NO: 2527684 - RNA, 19 nt, Artificial Sequence
  Description of Artificial Sequence: Synthetic oligonucleotide
  Sense strand starting at position 3628 of SEQ ID NO: 1888328
ugggcuaucucuuuaaagu

SEQ ID NO: 2527685 - RNA, 19 nt, Artificial Sequence
  Description of Artificial Sequence: Synthetic oligonucleotide
  Antisense strand to SEQ ID NO: 2527684
acuuuaaagagauagccca

SEQ ID NO: 2527686 - RNA, 19 nt, Artificial Sequence
  Description of Artificial Sequence: Synthetic oligonucleotide
  Sense strand starting at position 2902 of SEQ ID NO: 1888328
acuuaaauguguucuguga

SEQ ID NO: 2527687 - RNA, 19 nt, Artificial Sequence
  Description of Artificial Sequence: Synthetic oligonucleotide
  Antisense strand to SEQ ID NO: 2527686
ucacagaacacauuuaagu

SEQ ID NO: 2527688 - RNA, 19 nt, Artificial Sequence
  Description of Artificial Sequence: Synthetic oligonucleotide
  Sense strand starting at position 2591 of SEQ ID NO: 1888328
uccagaagugcucgaccaa

SEQ ID NO: 2527689 - RNA, 19 nt, Artificial Sequence
  Description of Artificial Sequence: Synthetic oligonucleotide
  Antisense strand to SEQ ID NO: 2527688
uuggucgagcacuucugga

SEQ ID NO: 2527690 - RNA, 19 nt, Artificial Sequence
  Description of Artificial Sequence: Synthetic oligonucleotide
  Sense strand starting at position 2166 of SEQ ID NO: 1888328
cugagaucaugagauaaac

SEQ ID NO: 2527691 - RNA, 19 nt, Artificial Sequence
  Description of Artificial Sequence: Synthetic oligonucleotide
  Antisense strand to SEQ ID NO: 2527690
guuuaucucaugaucucag

SEQ ID NO: 2527692 - RNA, 19 nt, Artificial Sequence
  Description of Artificial Sequence: Synthetic oligonucleotide
  Sense strand starting at position 2906 of SEQ ID NO: 1888328
aaauguguucugugaaagu

SEQ ID NO: 2527693 - RNA, 19 nt, Artificial Sequence
  Description of Artificial Sequence: Synthetic oligonucleotide
  Antisense strand to SEQ ID NO: 2527692
acuuucacagaacacauuu

SEQ ID NO: 2527694 - RNA, 19 nt, Artificial Sequence
  Description of Artificial Sequence: Synthetic oligonucleotide
  Sense strand starting at position 2749 of SEQ ID NO: 1888328
ccaugcaguugggagauuu

SEQ ID NO: 2527695 - RNA, 19 nt, Artificial Sequence
  Description of Artificial Sequence: Synthetic oligonucleotide
  Antisense strand to SEQ ID NO: 2527694
aaaucucccaacugcaugg

SEQ ID NO: 2527696 - RNA, 19 nt, Artificial Sequence
  Description of Artificial Sequence: Synthetic oligonucleotide
  Sense strand starting at position 3074 of SEQ ID NO: 1888329
caucguuuccugccugagu

SEQ ID NO: 2527697 - RNA, 19 nt, Artificial Sequence
  Description of Artificial Sequence: Synthetic oligonucleotide
  Antisense strand to SEQ ID NO: 2527696
acucaggcaggaaacgaug

SEQ ID NO: 2527698 - RNA, 19 nt, Artificial Sequence
  Description of Artificial Sequence: Synthetic oligonucleotide
  Sense strand starting at position 1339 of SEQ ID NO: 1888329
auuggcaauccauaaaggu

SEQ ID NO: 2527699 - RNA, 19 nt, Artificial Sequence
  Description of Artificial Sequence: Synthetic oligonucleotide
  Antisense strand to SEQ ID NO: 2527698
accuuuauggauugccaau

SEQ ID NO: 2527700 - RNA, 19 nt, Artificial Sequence
  Description of Artificial Sequence: Synthetic oligonucleotide
  Sense strand starting at position 2202 of SEQ ID NO: 1888329
guuaaucaucuugacgaga

SEQ ID NO: 2527701 - RNA, 19 nt, Artificial Sequence
  Description of Artificial Sequence: Synthetic oligonucleotide
  Antisense strand to SEQ ID NO: 2527700
ucucgucaagaugauuaac

SEQ ID NO: 2527702 - RNA, 19 nt, Artificial Sequence
  Description of Artificial Sequence: Synthetic oligonucleotide
  Sense strand starting at position 2989 of SEQ ID NO: 1888329
gugaaugggccuuauacaa

SEQ ID NO: 2527703 - RNA, 19 nt, Artificial Sequence
  Description of Artificial Sequence: Synthetic oligonucleotide
  Antisense strand to SEQ ID NO: 2527702
uuguauaaggcccauucac

SEQ ID NO: 2527704 - RNA, 19 nt, Artificial Sequence
  Description of Artificial Sequence: Synthetic oligonucleotide
  Sense strand starting at position 2502 of SEQ ID NO: 1888329
uggauaaagucuccaugac

SEQ ID NO: 2527705 - RNA, 19 nt, Artificial Sequence
  Description of Artificial Sequence: Synthetic oligonucleotide
  Antisense strand to SEQ ID NO: 2527704
gucauggagacuuuaucca

SEQ ID NO: 2527706 - RNA, 19 nt, Artificial Sequence
  Description of Artificial Sequence: Synthetic oligonucleotide
  Sense strand starting at position 171 of SEQ ID NO: 1888329
auguuauuucuggguguau

SEQ ID NO: 2527707 - RNA, 19 nt, Artificial Sequence
  Description of Artificial Sequence: Synthetic oligonucleotide
  Antisense strand to SEQ ID NO: 2527706
auacacccagaaauaacau

SEQ ID NO: 2527708 - RNA, 19 nt, Artificial Sequence
  Description of Artificial Sequence: Synthetic oligonucleotide
  Sense strand starting at position 3770 of SEQ ID NO: 1888329
acuguaaauguguauacaa

SEQ ID NO: 2527709 - RNA, 19 nt, Artificial Sequence
  Description of Artificial Sequence: Synthetic oligonucleotide
  Antisense strand to SEQ ID NO: 2527708
uuguauacacauuuacagu

SEQ ID NO: 2527710 - RNA, 19 nt, Artificial Sequence
  Description of Artificial Sequence: Synthetic oligonucleotide
  Sense strand starting at position 3218 of SEQ ID NO: 1888329
ggagaaaucuggcuuauac

SEQ ID NO: 2527711 - RNA, 19 nt, Artificial Sequence
  Description of Artificial Sequence: Synthetic oligonucleotide
  Antisense strand to SEQ ID NO: 2527710
guauaagccagauuucucc

SEQ ID NO: 2527712 - RNA, 19 nt, Artificial Sequence
  Description of Artificial Sequence: Synthetic oligonucleotide
  Sense strand starting at position 2506 of SEQ ID NO: 1888329
uaaagucuccaugacgauu

SEQ ID NO: 2527713 - RNA, 19 nt, Artificial Sequence
  Description of Artificial Sequence: Synthetic oligonucleotide
  Antisense strand to SEQ ID NO: 2527712
aaucgucauggagacuuua

SEQ ID NO: 2527714 - RNA, 19 nt, Artificial Sequence
  Description of Artificial Sequence: Synthetic oligonucleotide
  Sense strand starting at position 3325 of SEQ ID NO: 1888329
accugaaacguugauuauu

SEQ ID NO: 2527715 - RNA, 19 nt, Artificial Sequence
  Description of Artificial Sequence: Synthetic oligonucleotide
  Antisense strand to SEQ ID NO: 2527714
aauaaucaacguuucaggu

SEQ ID NO: 2527716 - RNA, 19 nt, Artificial Sequence
  Description of Artificial Sequence: Synthetic oligonucleotide
  Sense strand starting at position 2187 of SEQ ID NO: 1888329
auguguguccaugucguua

SEQ ID NO: 2527717 - RNA, 19 nt, Artificial Sequence
  Description of Artificial Sequence: Synthetic oligonucleotide
  Antisense strand to SEQ ID NO: 2527716
uaacgacauggacacacau

SEQ ID NO: 2527718 - RNA, 19 nt, Artificial Sequence
  Description of Artificial Sequence: Synthetic oligonucleotide
  Sense strand starting at position 1438 of SEQ ID NO: 1888329
ugcugacccagugauauag

SEQ ID NO: 2527719 - RNA, 19 nt, Artificial Sequence
  Description of Artificial Sequence: Synthetic oligonucleotide
  Antisense strand to SEQ ID NO: 2527718
cuauaucacugggucagca

SEQ ID NO: 2527720 - RNA, 19 nt, Artificial Sequence
  Description of Artificial Sequence: Synthetic oligonucleotide
  Sense strand starting at position 137 of SEQ ID NO: 1888329
uugacugagccaugggaua

SEQ ID NO: 2527721 - RNA, 19 nt, Artificial Sequence
  Description of Artificial Sequence: Synthetic oligonucleotide
  Antisense strand to SEQ ID NO: 2527720
uaucccauggcucagucaa

SEQ ID NO: 2527722 - RNA, 19 nt, Artificial Sequence
  Description of Artificial Sequence: Synthetic oligonucleotide
  Sense strand starting at position 172 of SEQ ID NO: 1888329
uguuauuucuggguguauc

SEQ ID NO: 2527723 - RNA, 19 nt, Artificial Sequence
  Description of Artificial Sequence: Synthetic oligonucleotide
  Antisense strand to SEQ ID NO: 2527722
gauacacccagaaauaaca

SEQ ID NO: 2527724 - RNA, 19 nt, Artificial Sequence
  Description of Artificial Sequence: Synthetic oligonucleotide
  Sense strand starting at position 2870 of SEQ ID NO: 1888329
ggccuuuacugcccauuua

SEQ ID NO: 2527725 - RNA, 19 nt, Artificial Sequence
  Description of Artificial Sequence: Synthetic oligonucleotide
  Antisense strand to SEQ ID NO: 2527724
uaaaugggcaguaaaggcc

SEQ ID NO: 2527726 - RNA, 19 nt, Artificial Sequence
  Description of Artificial Sequence: Synthetic oligonucleotide
  Sense strand starting at position 1496 of SEQ ID NO: 1888329
gggaguccucaguaagguc

SEQ ID NO: 2527727 - RNA, 19 nt, Artificial Sequence
  Description of Artificial Sequence: Synthetic oligonucleotide
  Antisense strand to SEQ ID NO: 2527726
gaccuuacugaggacuccc

SEQ ID NO: 2527728 - RNA, 19 nt, Artificial Sequence
  Description of Artificial Sequence: Synthetic oligonucleotide
  Sense strand starting at position 339 of SEQ ID NO: 1888329
ccugauugagcuggaauau

SEQ ID NO: 2527729 - RNA, 19 nt, Artificial Sequence
  Description of Artificial Sequence: Synthetic oligonucleotide
  Antisense strand to SEQ ID NO: 2527728
auauuccagcucaaucagg

SEQ ID NO: 2527730 - RNA, 19 nt, Artificial Sequence
  Description of Artificial Sequence: Synthetic oligonucleotide
  Sense strand starting at position 3215 of SEQ ID NO: 1888329
ucuggagaaaucuggcuua

SEQ ID NO: 2527731 - RNA, 19 nt, Artificial Sequence
  Description of Artificial Sequence: Synthetic oligonucleotide
  Antisense strand to SEQ ID NO: 2527730
uaagccagauuucuccaga

SEQ ID NO: 2527732 - RNA, 19 nt, Artificial Sequence
  Description of Artificial Sequence: Synthetic oligonucleotide
  Sense strand starting at position 3331 of SEQ ID NO: 1888329
aacguugauuauucugaaa

SEQ ID NO: 2527733 - RNA, 19 nt, Artificial Sequence
  Description of Artificial Sequence: Synthetic oligonucleotide
  Antisense strand to SEQ ID NO: 2527732
uuucagaauaaucaacguu

SEQ ID NO: 2527734 - RNA, 19 nt, Artificial Sequence
  Description of Artificial Sequence: Synthetic oligonucleotide
  Sense strand starting at position 3330 of SEQ ID NO: 1888329
aaacguugauuauucugaa

SEQ ID NO: 2527735 - RNA, 19 nt, Artificial Sequence
  Description of Artificial Sequence: Synthetic oligonucleotide
  Antisense strand to SEQ ID NO: 2527734
uucagaauaaucaacguuu

SEQ ID NO: 2527736 - RNA, 19 nt, Artificial Sequence
  Description of Artificial Sequence: Synthetic oligonucleotide
  Sense strand starting at position 659 of SEQ ID NO: 1888329
acuauaguugcccaucaua

SEQ ID NO: 2527737 - RNA, 19 nt, Artificial Sequence
  Description of Artificial Sequence: Synthetic oligonucleotide
  Antisense strand to SEQ ID NO: 2527736
uaugaugggcaacuauagu

SEQ ID NO: 2527738 - RNA, 19 nt, Artificial Sequence
  Description of Artificial Sequence: Synthetic oligonucleotide
  Sense strand starting at position 662 of SEQ ID NO: 1888329
auaguugcccaucauauau

SEQ ID NO: 2527739 - RNA, 19 nt, Artificial Sequence
  Description of Artificial Sequence: Synthetic oligonucleotide
  Antisense strand to SEQ ID NO: 2527738
auauaugaugggcaacuau

SEQ ID NO: 2527740 - RNA, 19 nt, Artificial Sequence
  Description of Artificial Sequence: Synthetic oligonucleotide
  Sense strand starting at position 1376 of SEQ ID NO: 1888329
ucagcauaccucugacaga

SEQ ID NO: 2527741 - RNA, 19 nt, Artificial Sequence
  Description of Artificial Sequence: Synthetic oligonucleotide
  Antisense strand to SEQ ID NO: 2527740
ucugucagagguaugcuga

SEQ ID NO: 2527742 - RNA, 19 nt, Artificial Sequence
  Description of Artificial Sequence: Synthetic oligonucleotide
  Sense strand starting at position 1328 of SEQ ID NO: 1888329
augagucacugauuggcaa

SEQ ID NO: 2527743 - RNA, 19 nt, Artificial Sequence
  Description of Artificial Sequence: Synthetic oligonucleotide
  Antisense strand to SEQ ID NO: 2527742
uugccaaucagugacucau

SEQ ID NO: 2527744 - RNA, 19 nt, Artificial Sequence
  Description of Artificial Sequence: Synthetic oligonucleotide
  Sense strand starting at position 3238 of SEQ ID NO: 1888329
ggcucuuaacaugauuguu

SEQ ID NO: 2527745 - RNA, 19 nt, Artificial Sequence
  Description of Artificial Sequence: Synthetic oligonucleotide
  Antisense strand to SEQ ID NO: 2527744
aacaaucauguuaagagcc

SEQ ID NO: 2527746 - RNA, 19 nt, Artificial Sequence
  Description of Artificial Sequence: Synthetic oligonucleotide
  Sense strand starting at position 3772 of SEQ ID NO: 1888329
uguaaauguguauacaagu

SEQ ID NO: 2527747 - RNA, 19 nt, Artificial Sequence
  Description of Artificial Sequence: Synthetic oligonucleotide
  Antisense strand to SEQ ID NO: 2527746
acuuguauacacauuuaca

SEQ ID NO: 2527748 - RNA, 19 nt, Artificial Sequence
  Description of Artificial Sequence: Synthetic oligonucleotide
  Sense strand starting at position 3419 of SEQ ID NO: 1888329
ucaaccugucgauaucuuu

SEQ ID NO: 2527749 - RNA, 19 nt, Artificial Sequence
  Description of Artificial Sequence: Synthetic oligonucleotide
  Antisense strand to SEQ ID NO: 2527748
aaagauaucgacagguuga

SEQ ID NO: 2527750 - RNA, 19 nt, Artificial Sequence
  Description of Artificial Sequence: Synthetic oligonucleotide
  Sense strand starting at position 1329 of SEQ ID NO: 1888329
ugagucacugauuggcaau

SEQ ID NO: 2527751 - RNA, 19 nt, Artificial Sequence
  Description of Artificial Sequence: Synthetic oligonucleotide
  Antisense strand to SEQ ID NO: 2527750
auugccaaucagugacuca

SEQ ID NO: 2527752 - RNA, 19 nt, Artificial Sequence
  Description of Artificial Sequence: Synthetic oligonucleotide
  Sense strand starting at position 2950 of SEQ ID NO: 1888329
acaaucaguuggcuuuaca

SEQ ID NO: 2527753 - RNA, 19 nt, Artificial Sequence
  Description of Artificial Sequence: Synthetic oligonucleotide
  Antisense strand to SEQ ID NO: 2527752
uguaaagccaacugauugu

SEQ ID NO: 2527754 - RNA, 19 nt, Artificial Sequence
  Description of Artificial Sequence: Synthetic oligonucleotide
  Sense strand starting at position 338 of SEQ ID NO: 1888329
gccugauugagcuggaaua

SEQ ID NO: 2527755 - RNA, 19 nt, Artificial Sequence
  Description of Artificial Sequence: Synthetic oligonucleotide
  Antisense strand to SEQ ID NO: 2527754
uauuccagcucaaucaggc

SEQ ID NO: 2527756 - RNA, 19 nt, Artificial Sequence
  Description of Artificial Sequence: Synthetic oligonucleotide
  Sense strand starting at position 3976 of SEQ ID NO: 1888329
gaaauauagugagaaagag

SEQ ID NO: 2527757 - RNA, 19 nt, Artificial Sequence
  Description of Artificial Sequence: Synthetic oligonucleotide
  Antisense strand to SEQ ID NO: 2527756
cucuuucucacuauauuuc

SEQ ID NO: 2527758 - RNA, 19 nt, Artificial Sequence
  Description of Artificial Sequence: Synthetic oligonucleotide
  Sense strand starting at position 3248 of SEQ ID NO: 1888329
augauuguuuaucugucaa

SEQ ID NO: 2527759 - RNA, 19 nt, Artificial Sequence
  Description of Artificial Sequence: Synthetic oligonucleotide
  Antisense strand to SEQ ID NO: 2527758
uugacagauaaacaaucau

SEQ ID NO: 2527760 - RNA, 19 nt, Artificial Sequence
  Description of Artificial Sequence: Synthetic oligonucleotide
  Sense strand starting at position 3327 of SEQ ID NO: 1888329
cugaaacguugauuauucu

SEQ ID NO: 2527761 - RNA, 19 nt, Artificial Sequence
  Description of Artificial Sequence: Synthetic oligonucleotide
  Antisense strand to SEQ ID NO: 2527760
agaauaaucaacguuucag

SEQ ID NO: 2527762 - RNA, 19 nt, Artificial Sequence
  Description of Artificial Sequence: Synthetic oligonucleotide
  Sense strand starting at position 3860 of SEQ ID NO: 1888329
uuugcucuacuacauguua

SEQ ID NO: 2527763 - RNA, 19 nt, Artificial Sequence
  Description of Artificial Sequence: Synthetic oligonucleotide
  Antisense strand to SEQ ID NO: 2527762
uaacauguaguagagcaaa

SEQ ID NO: 2527764 - RNA, 19 nt, Artificial Sequence
  Description of Artificial Sequence: Synthetic oligonucleotide
  Sense strand starting at position 3059 of SEQ ID NO: 1888329
gccuaaagucugcaacauc

SEQ ID NO: 2527765 - RNA, 19 nt, Artificial Sequence
  Description of Artificial Sequence: Synthetic oligonucleotide
  Antisense strand to SEQ ID NO: 2527764
gauguugcagacuuuaggc

SEQ ID NO: 2527766 - RNA, 19 nt, Artificial Sequence
  Description of Artificial Sequence: Synthetic oligonucleotide
  Sense strand starting at position 3460 of SEQ ID NO: 1888329
uuagcuuugcuugauauua

SEQ ID NO: 2527767 - RNA, 19 nt, Artificial Sequence
  Description of Artificial Sequence: Synthetic oligonucleotide
  Antisense strand to SEQ ID NO: 2527766
uaauaucaagcaaagcuaa

SEQ ID NO: 2527768 - RNA, 19 nt, Artificial Sequence
  Description of Artificial Sequence: Synthetic oligonucleotide
  Sense strand starting at position 3601 of SEQ ID NO: 1888329
uuuguccuuccuuaaaguu

SEQ ID NO: 2527769 - RNA, 19 nt, Artificial Sequence
  Description of Artificial Sequence: Synthetic oligonucleotide
  Antisense strand to SEQ ID NO: 2527768
aacuuuaaggaaggacaaa

SEQ ID NO: 2527770 - RNA, 19 nt, Artificial Sequence
  Description of Artificial Sequence: Synthetic oligonucleotide
  Sense strand starting at position 336 of SEQ ID NO: 1888329
uugccugauugagcuggaa

SEQ ID NO: 2527771 - RNA, 19 nt, Artificial Sequence
  Description of Artificial Sequence: Synthetic oligonucleotide
  Antisense strand to SEQ ID NO: 2527770
uuccagcucaaucaggcaa

SEQ ID NO: 2527772 - RNA, 19 nt, Artificial Sequence
  Description of Artificial Sequence: Synthetic oligonucleotide
  Sense strand starting at position 1177 of SEQ ID NO: 1888329
aguaacaaaucguucuauu

SEQ ID NO: 2527773 - RNA, 19 nt, Artificial Sequence
  Description of Artificial Sequence: Synthetic oligonucleotide
  Antisense strand to SEQ ID NO: 2527772
aauagaacgauuuguuacu

SEQ ID NO: 2527774 - RNA, 19 nt, Artificial Sequence
  Description of Artificial Sequence: Synthetic oligonucleotide
  Sense strand starting at position 3422 of SEQ ID NO: 1888329
accugucgauaucuuuaua

SEQ ID NO: 2527775 - RNA, 19 nt, Artificial Sequence
  Description of Artificial Sequence: Synthetic oligonucleotide
  Antisense strand to SEQ ID NO: 2527774
uauaaagauaucgacaggu

SEQ ID NO: 2527776 - RNA, 19 nt, Artificial Sequence
  Description of Artificial Sequence: Synthetic oligonucleotide
  Sense strand starting at position 1222 of SEQ ID NO: 1888330
aggacugacuaggucaauu

SEQ ID NO: 2527777 - RNA, 19 nt, Artificial Sequence
  Description of Artificial Sequence: Synthetic oligonucleotide
  Antisense strand to SEQ ID NO: 2527776
aauugaccuagucaguccu

SEQ ID NO: 2527778 - RNA, 19 nt, Artificial Sequence
  Description of Artificial Sequence: Synthetic oligonucleotide
  Sense strand starting at position 3359 of SEQ ID NO: 1888330
aguugagguaaucaggagu

SEQ ID NO: 2527779 - RNA, 19 nt, Artificial Sequence
  Description of Artificial Sequence: Synthetic oligonucleotide
  Antisense strand to SEQ ID NO: 2527778
acuccugauuaccucaacu

SEQ ID NO: 2527780 - RNA, 19 nt, Artificial Sequence
  Description of Artificial Sequence: Synthetic oligonucleotide
  Sense strand starting at position 2503 of SEQ ID NO: 1888330
guauuuaugcacugaaguc

SEQ ID NO: 2527781 - RNA, 19 nt, Artificial Sequence
  Description of Artificial Sequence: Synthetic oligonucleotide
  Antisense strand to SEQ ID NO: 2527780
gacuucagugcauaaauac

SEQ ID NO: 2527782 - RNA, 19 nt, Artificial Sequence
  Description of Artificial Sequence: Synthetic oligonucleotide
  Sense strand starting at position 1221 of SEQ ID NO: 1888330
caggacugacuaggucaau

SEQ ID NO: 2527783 - RNA, 19 nt, Artificial Sequence
  Description of Artificial Sequence: Synthetic oligonucleotide
  Antisense strand to SEQ ID NO: 2527782
auugaccuagucaguccug

SEQ ID NO: 2527784 - RNA, 19 nt, Artificial Sequence
  Description of Artificial Sequence: Synthetic oligonucleotide
  Sense strand starting at position 745 of SEQ ID NO: 1888330
aauguuuguggacagguaa

SEQ ID NO: 2527785 - RNA, 19 nt, Artificial Sequence
  Description of Artificial Sequence: Synthetic oligonucleotide
  Antisense strand to SEQ ID NO: 2527784
uuaccuguccacaaacauu

SEQ ID NO: 2527786 - RNA, 19 nt, Artificial Sequence
  Description of Artificial Sequence: Synthetic oligonucleotide
  Sense strand starting at position 588 of SEQ ID NO: 1888330
agaggagagaguuggcuua

SEQ ID NO: 2527787 - RNA, 19 nt, Artificial Sequence
  Description of Artificial Sequence: Synthetic oligonucleotide
  Antisense strand to SEQ ID NO: 2527786
uaagccaacucucuccucu

SEQ ID NO: 2527788 - RNA, 19 nt, Artificial Sequence
  Description of Artificial Sequence: Synthetic oligonucleotide
  Sense strand starting at position 2612 of SEQ ID NO: 1888330
acaggagcccuguaaccau

SEQ ID NO: 2527789 - RNA, 19 nt, Artificial Sequence
  Description of Artificial Sequence: Synthetic oligonucleotide
  Antisense strand to SEQ ID NO: 2527788
augguuacagggcuccugu

SEQ ID NO: 2527790 - RNA, 19 nt, Artificial Sequence
  Description of Artificial Sequence: Synthetic oligonucleotide
  Sense strand starting at position 3207 of SEQ ID NO: 1888330
agcauuugccaaugacugu

SEQ ID NO: 2527791 - RNA, 19 nt, Artificial Sequence
  Description of Artificial Sequence: Synthetic oligonucleotide
  Antisense strand to SEQ ID NO: 2527790
acagucauuggcaaaugcu

SEQ ID NO: 2527792 - RNA, 19 nt, Artificial Sequence
  Description of Artificial Sequence: Synthetic oligonucleotide
  Sense strand starting at position 449 of SEQ ID NO: 1888330
gagggugagcaguaguaaa

SEQ ID NO: 2527793 - RNA, 19 nt, Artificial Sequence
  Description of Artificial Sequence: Synthetic oligonucleotide
  Antisense strand to SEQ ID NO: 2527792
uuuacuacugcucacccuc

SEQ ID NO: 2527794 - RNA, 19 nt, Artificial Sequence
  Description of Artificial Sequence: Synthetic oligonucleotide
  Sense strand starting at position 760 of SEQ ID NO: 1888330
guaacacaguaccugaaau

SEQ ID NO: 2527795 - RNA, 19 nt, Artificial Sequence
  Description of Artificial Sequence: Synthetic oligonucleotide
  Antisense strand to SEQ ID NO: 2527794
auuucagguacuguguuac

SEQ ID NO: 2527796 - RNA, 19 nt, Artificial Sequence
  Description of Artificial Sequence: Synthetic oligonucleotide
  Sense strand starting at position 1514 of SEQ ID NO: 1888330
uguacaauccuccaggcaa

SEQ ID NO: 2527797 - RNA, 19 nt, Artificial Sequence
  Description of Artificial Sequence: Synthetic oligonucleotide
  Antisense strand to SEQ ID NO: 2527796
uugccuggaggauuguaca

SEQ ID NO: 2527798 - RNA, 19 nt, Artificial Sequence
  Description of Artificial Sequence: Synthetic oligonucleotide
  Sense strand starting at position 2909 of SEQ ID NO: 1888330
aggcuaaugcaaugacaga

SEQ ID NO: 2527799 - RNA, 19 nt, Artificial Sequence
  Description of Artificial Sequence: Synthetic oligonucleotide
  Antisense strand to SEQ ID NO: 2527798
ucugucauugcauuagccu

SEQ ID NO: 2527800 - RNA, 19 nt, Artificial Sequence
  Description of Artificial Sequence: Synthetic oligonucleotide
  Sense strand starting at position 1295 of SEQ ID NO: 1888330
ggcccugacggauagagua

SEQ ID NO: 2527801 - RNA, 19 nt, Artificial Sequence
  Description of Artificial Sequence: Synthetic oligonucleotide
  Antisense strand to SEQ ID NO: 2527800
uacucuauccgucagggcc

SEQ ID NO: 2527802 - RNA, 19 nt, Artificial Sequence
  Description of Artificial Sequence: Synthetic oligonucleotide
  Sense strand starting at position 2460 of SEQ ID NO: 1888330
gcagaaugccuuuauacac

SEQ ID NO: 2527803 - RNA, 19 nt, Artificial Sequence
  Description of Artificial Sequence: Synthetic oligonucleotide
  Antisense strand to SEQ ID NO: 2527802
guguauaaaggcauucugc

SEQ ID NO: 2527804 - RNA, 19 nt, Artificial Sequence
  Description of Artificial Sequence: Synthetic oligonucleotide
  Sense strand starting at position 3055 of SEQ ID NO: 1888330
gcucucucagcagaaauca

SEQ ID NO: 2527805 - RNA, 19 nt, Artificial Sequence
  Description of Artificial Sequence: Synthetic oligonucleotide
  Antisense strand to SEQ ID NO: 2527804
ugauuucugcugagagagc

SEQ ID NO: 2527806 - RNA, 19 nt, Artificial Sequence
  Description of Artificial Sequence: Synthetic oligonucleotide
  Sense strand starting at position 26 of SEQ ID NO: 1888330
ucgugugccaugucaguuu

SEQ ID NO: 2527807 - RNA, 19 nt, Artificial Sequence
  Description of Artificial Sequence: Synthetic oligonucleotide
  Antisense strand to SEQ ID NO: 2527806
aaacugacauggcacacga

SEQ ID NO: 2527808 - RNA, 19 nt, Artificial Sequence
  Description of Artificial Sequence: Synthetic oligonucleotide
  Sense strand starting at position 2541 of SEQ ID NO: 1888330
caaugacaggucuguuuga

SEQ ID NO: 2527809 - RNA, 19 nt, Artificial Sequence
  Description of Artificial Sequence: Synthetic oligonucleotide
  Antisense strand to SEQ ID NO: 2527808
ucaaacagaccugucauug

SEQ ID NO: 2527810 - RNA, 19 nt, Artificial Sequence
  Description of Artificial Sequence: Synthetic oligonucleotide
  Sense strand starting at position 1674 of SEQ ID NO: 1888330
ugucuaaaccugggucaag

SEQ ID NO: 2527811 - RNA, 19 nt, Artificial Sequence
  Description of Artificial Sequence: Synthetic oligonucleotide
  Antisense strand to SEQ ID NO: 2527810
cuugacccagguuuagaca

SEQ ID NO: 2527812 - RNA, 19 nt, Artificial Sequence
  Description of Artificial Sequence: Synthetic oligonucleotide
  Sense strand starting at position 1905 of SEQ ID NO: 1888330
ggugaauguguggaguuca

SEQ ID NO: 2527813 - RNA, 19 nt, Artificial Sequence
  Description of Artificial Sequence: Synthetic oligonucleotide
  Antisense strand to SEQ ID NO: 2527812
ugaacuccacacauucacc

SEQ ID NO: 2527814 - RNA, 19 nt, Artificial Sequence
  Description of Artificial Sequence: Synthetic oligonucleotide
  Sense strand starting at position 668 of SEQ ID NO: 1888330
gguuuauuuccuugucugu

SEQ ID NO: 2527815 - RNA, 19 nt, Artificial Sequence
  Description of Artificial Sequence: Synthetic oligonucleotide
  Antisense strand to SEQ ID NO: 2527814
acagacaaggaaauaaacc

SEQ ID NO: 2527816 - RNA, 19 nt, Artificial Sequence
  Description of Artificial Sequence: Synthetic oligonucleotide
  Sense strand starting at position 3052 of SEQ ID NO: 1888330
ggagcucucucagcagaaa

SEQ ID NO: 2527817 - RNA, 19 nt, Artificial Sequence
  Description of Artificial Sequence: Synthetic oligonucleotide
  Antisense strand to SEQ ID NO: 2527816
uuucugcugagagagcucc

SEQ ID NO: 2527818 - RNA, 19 nt, Artificial Sequence
  Description of Artificial Sequence: Synthetic oligonucleotide
  Sense strand starting at position 1673 of SEQ ID NO: 1888330
cugucuaaaccugggucaa

SEQ ID NO: 2527819 - RNA, 19 nt, Artificial Sequence
  Description of Artificial Sequence: Synthetic oligonucleotide
  Antisense strand to SEQ ID NO: 2527818
uugacccagguuuagacag

SEQ ID NO: 2527820 - RNA, 19 nt, Artificial Sequence
  Description of Artificial Sequence: Synthetic oligonucleotide
  Sense strand starting at position 3655 of SEQ ID NO: 1888330
cggcuaauuuaugaagaaa

SEQ ID NO: 2527821 - RNA, 19 nt, Artificial Sequence
  Description of Artificial Sequence: Synthetic oligonucleotide
  Antisense strand to SEQ ID NO: 2527820
uuucuucauaaauuagccg

SEQ ID NO: 2527822 - RNA, 19 nt, Artificial Sequence
  Description of Artificial Sequence: Synthetic oligonucleotide
  Sense strand starting at position 2090 of SEQ ID NO: 1888330
gcuggacagucuucugaag

SEQ ID NO: 2527823 - RNA, 19 nt, Artificial Sequence
  Description of Artificial Sequence: Synthetic oligonucleotide
  Antisense strand to SEQ ID NO: 2527822
cuucagaagacuguccagc

SEQ ID NO: 2527824 - RNA, 19 nt, Artificial Sequence
  Description of Artificial Sequence: Synthetic oligonucleotide
  Sense strand starting at position 2585 of SEQ ID NO: 1888330
aagcuugucucuuugaaag

SEQ ID NO: 2527825 - RNA, 19 nt, Artificial Sequence
  Description of Artificial Sequence: Synthetic oligonucleotide
  Antisense strand to SEQ ID NO: 2527824
cuuucaaagagacaagcuu

SEQ ID NO: 2527826 - RNA, 19 nt, Artificial Sequence
  Description of Artificial Sequence: Synthetic oligonucleotide
  Sense strand starting at position 3164 of SEQ ID NO: 1888330
agcagaacuccaggcuuua

SEQ ID NO: 2527827 - RNA, 19 nt, Artificial Sequence
  Description of Artificial Sequence: Synthetic oligonucleotide
  Antisense strand to SEQ ID NO: 2527826
uaaagccuggaguucugcu

SEQ ID NO: 2527828 - RNA, 19 nt, Artificial Sequence
  Description of Artificial Sequence: Synthetic oligonucleotide
  Sense strand starting at position 1675 of SEQ ID NO: 1888330
gucuaaaccugggucaagu

SEQ ID NO: 2527829 - RNA, 19 nt, Artificial Sequence
  Description of Artificial Sequence: Synthetic oligonucleotide
  Antisense strand to SEQ ID NO: 2527828
acuugacccagguuuagac

SEQ ID NO: 2527830 - RNA, 19 nt, Artificial Sequence
  Description of Artificial Sequence: Synthetic oligonucleotide
  Sense strand starting at position 3227 of SEQ ID NO: 1888330
guguuaguacuccaacgau

SEQ ID NO: 2527831 - RNA, 19 nt, Artificial Sequence
  Description of Artificial Sequence: Synthetic oligonucleotide
  Antisense strand to SEQ ID NO: 2527830
aucguuggaguacuaacac

SEQ ID NO: 2527832 - RNA, 19 nt, Artificial Sequence
  Description of Artificial Sequence: Synthetic oligonucleotide
  Sense strand starting at position 2683 of SEQ ID NO: 1888330
guccuuccucugggaggua

SEQ ID NO: 2527833 - RNA, 19 nt, Artificial Sequence
  Description of Artificial Sequence: Synthetic oligonucleotide
  Antisense strand to SEQ ID NO: 2527832
uaccucccagaggaaggac

SEQ ID NO: 2527834 - RNA, 19 nt, Artificial Sequence
  Description of Artificial Sequence: Synthetic oligonucleotide
  Sense strand starting at position 3920 of SEQ ID NO: 1888330
ccuccuauucgacgugaga

SEQ ID NO: 2527835 - RNA, 19 nt, Artificial Sequence
  Description of Artificial Sequence: Synthetic oligonucleotide
  Antisense strand to SEQ ID NO: 2527834
ucucacgucgaauaggagg

SEQ ID NO: 2527836 - RNA, 19 nt, Artificial Sequence
  Description of Artificial Sequence: Synthetic oligonucleotide
  Sense strand starting at position 3922 of SEQ ID NO: 1888330
uccuauucgacgugagauu

SEQ ID NO: 2527837 - RNA, 19 nt, Artificial Sequence
  Description of Artificial Sequence: Synthetic oligonucleotide
  Antisense strand to SEQ ID NO: 2527836
aaucucacgucgaauagga

SEQ ID NO: 2527838 - RNA, 19 nt, Artificial Sequence
  Description of Artificial Sequence: Synthetic oligonucleotide
  Sense strand starting at position 3654 of SEQ ID NO: 1888330
ccggcuaauuuaugaagaa

SEQ ID NO: 2527839 - RNA, 19 nt, Artificial Sequence
  Description of Artificial Sequence: Synthetic oligonucleotide
  Antisense strand to SEQ ID NO: 2527838
uucuucauaaauuagccgg

SEQ ID NO: 2527840 - RNA, 19 nt, Artificial Sequence
  Description of Artificial Sequence: Synthetic oligonucleotide
  Sense strand starting at position 2580 of SEQ ID NO: 1888330
agagcaagcuugucucuuu

SEQ ID NO: 2527841 - RNA, 19 nt, Artificial Sequence
  Description of Artificial Sequence: Synthetic oligonucleotide
  Antisense strand to SEQ ID NO: 2527840
aaagagacaagcuugcucu

SEQ ID NO: 2527842 - RNA, 19 nt, Artificial Sequence
  Description of Artificial Sequence: Synthetic oligonucleotide
  Sense strand starting at position 2583 of SEQ ID NO: 1888330
gcaagcuugucucuuugaa

SEQ ID NO: 2527843 - RNA, 19 nt, Artificial Sequence
  Description of Artificial Sequence: Synthetic oligonucleotide
  Antisense strand to SEQ ID NO: 2527842
uucaaagagacaagcuugc

SEQ ID NO: 2527844 - RNA, 19 nt, Artificial Sequence
  Description of Artificial Sequence: Synthetic oligonucleotide
  Sense strand starting at position 600 of SEQ ID NO: 1888330
uggcuuagcaagugcaaau

SEQ ID NO: 2527845 - RNA, 19 nt, Artificial Sequence
  Description of Artificial Sequence: Synthetic oligonucleotide
  Antisense strand to SEQ ID NO: 2527844
auuugcacuugcuaagcca

SEQ ID NO: 2527846 - RNA, 19 nt, Artificial Sequence
  Description of Artificial Sequence: Synthetic oligonucleotide
  Sense strand starting at position 3296 of SEQ ID NO: 1888330
aguugcauuauacgguauu

SEQ ID NO: 2527847 - RNA, 19 nt, Artificial Sequence
  Description of Artificial Sequence: Synthetic oligonucleotide
  Antisense strand to SEQ ID NO: 2527846
aauaccguauaaugcaacu

SEQ ID NO: 2527848 - RNA, 19 nt, Artificial Sequence
  Description of Artificial Sequence: Synthetic oligonucleotide
  Sense strand starting at position 740 of SEQ ID NO: 1888330
gcugcaauguuuguggaca

SEQ ID NO: 2527849 - RNA, 19 nt, Artificial Sequence
  Description of Artificial Sequence: Synthetic oligonucleotide
  Antisense strand to SEQ ID NO: 2527848
uguccacaaacauugcagc

SEQ ID NO: 2527850 - RNA, 19 nt, Artificial Sequence
  Description of Artificial Sequence: Synthetic oligonucleotide
  Sense strand starting at position 1685 of SEQ ID NO: 1888330
gggucaaguuuagacaaag

SEQ ID NO: 2527851 - RNA, 19 nt, Artificial Sequence
  Description of Artificial Sequence: Synthetic oligonucleotide
  Antisense strand to SEQ ID NO: 2527850
cuuugucuaaacuugaccc

SEQ ID NO: 2527852 - RNA, 19 nt, Artificial Sequence
  Description of Artificial Sequence: Synthetic oligonucleotide
  Sense strand starting at position 788 of SEQ ID NO: 1888330
uaaauaucauguugggaga

SEQ ID NO: 2527853 - RNA, 19 nt, Artificial Sequence
  Description of Artificial Sequence: Synthetic oligonucleotide
  Antisense strand to SEQ ID NO: 2527852
ucucccaacaugauauuua

SEQ ID NO: 2527854 - RNA, 19 nt, Artificial Sequence
  Description of Artificial Sequence: Synthetic oligonucleotide
  Sense strand starting at position 3289 of SEQ ID NO: 1888330
ugggaagaguugcauuaua

SEQ ID NO: 2527855 - RNA, 19 nt, Artificial Sequence
  Description of Artificial Sequence: Synthetic oligonucleotide
  Antisense strand to SEQ ID NO: 2527854
uauaaugcaacucuuccca

SEQ ID NO: 2527856 - RNA, 19 nt, Artificial Sequence
  Description of Artificial Sequence: Synthetic oligonucleotide
  Sense strand starting at position 2987 of SEQ ID NO: 1888331
gcauuuccuuuaguauuga

SEQ ID NO: 2527857 - RNA, 19 nt, Artificial Sequence
  Description of Artificial Sequence: Synthetic oligonucleotide
  Antisense strand to SEQ ID NO: 2527856
ucaauacuaaaggaaaugc

SEQ ID NO: 2527858 - RNA, 19 nt, Artificial Sequence
  Description of Artificial Sequence: Synthetic oligonucleotide
  Sense strand starting at position 733 of SEQ ID NO: 1888331
uggacuuaccgagagguua

SEQ ID NO: 2527859 - RNA, 19 nt, Artificial Sequence
  Description of Artificial Sequence: Synthetic oligonucleotide
  Antisense strand to SEQ ID NO: 2527858
uaaccucucgguaagucca

SEQ ID NO: 2527860 - RNA, 19 nt, Artificial Sequence
  Description of Artificial Sequence: Synthetic oligonucleotide
  Sense strand starting at position 3646 of SEQ ID NO: 1888331
ggucauuaaccuugaagaa

SEQ ID NO: 2527861 - RNA, 19 nt, Artificial Sequence
  Description of Artificial Sequence: Synthetic oligonucleotide
  Antisense strand to SEQ ID NO: 2527860
uucuucaagguuaaugacc

SEQ ID NO: 2527862 - RNA, 19 nt, Artificial Sequence
  Description of Artificial Sequence: Synthetic oligonucleotide
  Sense strand starting at position 3905 of SEQ ID NO: 1888331
uguauugcaggacaaacau

SEQ ID NO: 2527863 - RNA, 19 nt, Artificial Sequence
  Description of Artificial Sequence: Synthetic oligonucleotide
  Antisense strand to SEQ ID NO: 2527862
auguuuguccugcaauaca

SEQ ID NO: 2527864 - RNA, 19 nt, Artificial Sequence
  Description of Artificial Sequence: Synthetic oligonucleotide
  Sense strand starting at position 2276 of SEQ ID NO: 1888331
gcugcagacguguuuacau

SEQ ID NO: 2527865 - RNA, 19 nt, Artificial Sequence
  Description of Artificial Sequence: Synthetic oligonucleotide
  Antisense strand to SEQ ID NO: 2527864
auguaaacacgucugcagc

SEQ ID NO: 2527866 - RNA, 19 nt, Artificial Sequence
  Description of Artificial Sequence: Synthetic oligonucleotide
  Sense strand starting at position 2288 of SEQ ID NO: 1888331
uuuacauuucugugguuua

SEQ ID NO: 2527867 - RNA, 19 nt, Artificial Sequence
  Description of Artificial Sequence: Synthetic oligonucleotide
  Antisense strand to SEQ ID NO: 2527866
uaaaccacagaaauguaaa

SEQ ID NO: 2527868 - RNA, 19 nt, Artificial Sequence
  Description of Artificial Sequence: Synthetic oligonucleotide
  Sense strand starting at position 2727 of SEQ ID NO: 1888331
acaaaugcauuccuaggaa

SEQ ID NO: 2527869 - RNA, 19 nt, Artificial Sequence
  Description of Artificial Sequence: Synthetic oligonucleotide
  Antisense strand to SEQ ID NO: 2527868
uuccuaggaaugcauuugu

SEQ ID NO: 2527870 - RNA, 19 nt, Artificial Sequence
  Description of Artificial Sequence: Synthetic oligonucleotide
  Sense strand starting at position 3348 of SEQ ID NO: 1888331
ucaguauauggugaauauu

SEQ ID NO: 2527871 - RNA, 19 nt, Artificial Sequence
  Description of Artificial Sequence: Synthetic oligonucleotide
  Antisense strand to SEQ ID NO: 2527870
aauauucaccauauacuga

SEQ ID NO: 2527872 - RNA, 19 nt, Artificial Sequence
  Description of Artificial Sequence: Synthetic oligonucleotide
  Sense strand starting at position 3351 of SEQ ID NO: 1888331
guauauggugaauauuauc

SEQ ID NO: 2527873 - RNA, 19 nt, Artificial Sequence
  Description of Artificial Sequence: Synthetic oligonucleotide
  Antisense strand to SEQ ID NO: 2527872
gauaauauucaccauauac

SEQ ID NO: 2527874 - RNA, 19 nt, Artificial Sequence
  Description of Artificial Sequence: Synthetic oligonucleotide
  Sense strand starting at position 3356 of SEQ ID NO: 1888331
uggugaauauuaucacaau

SEQ ID NO: 2527875 - RNA, 19 nt, Artificial Sequence
  Description of Artificial Sequence: Synthetic oligonucleotide
  Antisense strand to SEQ ID NO: 2527874
auugugauaauauucacca

SEQ ID NO: 2527876 - RNA, 19 nt, Artificial Sequence
  Description of Artificial Sequence: Synthetic oligonucleotide
  Sense strand starting at position 2278 of SEQ ID NO: 1888331
ugcagacguguuuacauuu

SEQ ID NO: 2527877 - RNA, 19 nt, Artificial Sequence
  Description of Artificial Sequence: Synthetic oligonucleotide
  Antisense strand to SEQ ID NO: 2527876
aaauguaaacacgucugca

SEQ ID NO: 2527878 - RNA, 19 nt, Artificial Sequence
  Description of Artificial Sequence: Synthetic oligonucleotide
  Sense strand starting at position 1848 of SEQ ID NO: 1888331
cgcgaauuccgaccgcaaa

SEQ ID NO: 2527879 - RNA, 19 nt, Artificial Sequence
  Description of Artificial Sequence: Synthetic oligonucleotide
  Antisense strand to SEQ ID NO: 2527878
uuugcggucggaauucgcg

SEQ ID NO: 2527880 - RNA, 19 nt, Artificial Sequence
  Description of Artificial Sequence: Synthetic oligonucleotide
  Sense strand starting at position 3001 of SEQ ID NO: 1888331
auugaaugugcucacaaau

SEQ ID NO: 2527881 - RNA, 19 nt, Artificial Sequence
  Description of Artificial Sequence: Synthetic oligonucleotide
  Antisense strand to SEQ ID NO: 2527880
auuugugagcacauucaau

SEQ ID NO: 2527882 - RNA, 19 nt, Artificial Sequence
  Description of Artificial Sequence: Synthetic oligonucleotide
  Sense strand starting at position 3903 of SEQ ID NO: 1888331
ucuguauugcaggacaaac

SEQ ID NO: 2527883 - RNA, 19 nt, Artificial Sequence
  Description of Artificial Sequence: Synthetic oligonucleotide
  Antisense strand to SEQ ID NO: 2527882
guuuguccugcaauacaga

SEQ ID NO: 2527884 - RNA, 19 nt, Artificial Sequence
  Description of Artificial Sequence: Synthetic oligonucleotide
  Sense strand starting at position 2962 of SEQ ID NO: 1888331
cgaaucgucauuugcaaag

SEQ ID NO: 2527885 - RNA, 19 nt, Artificial Sequence
  Description of Artificial Sequence: Synthetic oligonucleotide
  Antisense strand to SEQ ID NO: 2527884
cuuugcaaaugacgauucg

SEQ ID NO: 2527886 - RNA, 19 nt, Artificial Sequence
  Description of Artificial Sequence: Synthetic oligonucleotide
  Sense strand starting at position 2222 of SEQ ID NO: 1888331
acagaagucugauugugag

SEQ ID NO: 2527887 - RNA, 19 nt, Artificial Sequence
  Description of Artificial Sequence: Synthetic oligonucleotide
  Antisense strand to SEQ ID NO: 2527886
cucacaaucagacuucugu

SEQ ID NO: 2527888 - RNA, 19 nt, Artificial Sequence
  Description of Artificial Sequence: Synthetic oligonucleotide
  Sense strand starting at position 1955 of SEQ ID NO: 1888331
cgcagcgaucucuugcaca

SEQ ID NO: 2527889 - RNA, 19 nt, Artificial Sequence
  Description of Artificial Sequence: Synthetic oligonucleotide
  Antisense strand to SEQ ID NO: 2527888
ugugcaagagaucgcugcg

SEQ ID NO: 2527890 - RNA, 19 nt, Artificial Sequence
  Description of Artificial Sequence: Synthetic oligonucleotide
  Sense strand starting at position 3441 of SEQ ID NO: 1888331
ugaacugcacuuuaauagu

SEQ ID NO: 2527891 - RNA, 19 nt, Artificial Sequence
  Description of Artificial Sequence: Synthetic oligonucleotide
  Antisense strand to SEQ ID NO: 2527890
acuauuaaagugcaguuca

SEQ ID NO: 2527892 - RNA, 19 nt, Artificial Sequence
  Description of Artificial Sequence: Synthetic oligonucleotide
  Sense strand starting at position 3727 of SEQ ID NO: 1888331
uguaguuauaguuaggaug

SEQ ID NO: 2527893 - RNA, 19 nt, Artificial Sequence
  Description of Artificial Sequence: Synthetic oligonucleotide
  Antisense strand to SEQ ID NO: 2527892
cauccuaacuauaacuaca

SEQ ID NO: 2527894 - RNA, 19 nt, Artificial Sequence
  Description of Artificial Sequence: Synthetic oligonucleotide
  Sense strand starting at position 2766 of SEQ ID NO: 1888331
caccaugguaguugggaua

SEQ ID NO: 2527895 - RNA, 19 nt, Artificial Sequence
  Description of Artificial Sequence: Synthetic oligonucleotide
  Antisense strand to SEQ ID NO: 2527894
uaucccaacuaccauggug

SEQ ID NO: 2527896 - RNA, 19 nt, Artificial Sequence
  Description of Artificial Sequence: Synthetic oligonucleotide
  Sense strand starting at position 2960 of SEQ ID NO: 1888331
cucgaaucgucauuugcaa

SEQ ID NO: 2527897 - RNA, 19 nt, Artificial Sequence
  Description of Artificial Sequence: Synthetic oligonucleotide
  Antisense strand to SEQ ID NO: 2527896
uugcaaaugacgauucgag

SEQ ID NO: 2527898 - RNA, 19 nt, Artificial Sequence
  Description of Artificial Sequence: Synthetic oligonucleotide
  Sense strand starting at position 3639 of SEQ ID NO: 1888331
aaaugugggucauuaaccu

SEQ ID NO: 2527899 - RNA, 19 nt, Artificial Sequence
  Description of Artificial Sequence: Synthetic oligonucleotide
  Antisense strand to SEQ ID NO: 2527898
agguuaaugacccacauuu

SEQ ID NO: 2527900 - RNA, 19 nt, Artificial Sequence
  Description of Artificial Sequence: Synthetic oligonucleotide
  Sense strand starting at position 2845 of SEQ ID NO: 1888331
agauuaaauuucugacaag

SEQ ID NO: 2527901 - RNA, 19 nt, Artificial Sequence
  Description of Artificial Sequence: Synthetic oligonucleotide
  Antisense strand to SEQ ID NO: 2527900
cuugucagaaauuuaaucu

SEQ ID NO: 2527902 - RNA, 19 nt, Artificial Sequence
  Description of Artificial Sequence: Synthetic oligonucleotide
  Sense strand starting at position 2300 of SEQ ID NO: 1888331
ugguuuagucuauaacuuu

SEQ ID NO: 2527903 - RNA, 19 nt, Artificial Sequence
  Description of Artificial Sequence: Synthetic oligonucleotide
  Antisense strand to SEQ ID NO: 2527902
aaaguuauagacuaaacca

SEQ ID NO: 2527904 - RNA, 19 nt, Artificial Sequence
  Description of Artificial Sequence: Synthetic oligonucleotide
  Sense strand starting at position 731 of SEQ ID NO: 1888331
gcuggacuuaccgagaggu

SEQ ID NO: 2527905 - RNA, 19 nt, Artificial Sequence
  Description of Artificial Sequence: Synthetic oligonucleotide
  Antisense strand to SEQ ID NO: 2527904
accucucgguaaguccagc

SEQ ID NO: 2527906 - RNA, 19 nt, Artificial Sequence
  Description of Artificial Sequence: Synthetic oligonucleotide
  Sense strand starting at position 2219 of SEQ ID NO: 1888331
cacacagaagucugauugu

SEQ ID NO: 2527907 - RNA, 19 nt, Artificial Sequence
  Description of Artificial Sequence: Synthetic oligonucleotide
  Antisense strand to SEQ ID NO: 2527906
acaaucagacuucugugug

SEQ ID NO: 2527908 - RNA, 19 nt, Artificial Sequence
  Description of Artificial Sequence: Synthetic oligonucleotide
  Sense strand starting at position 2709 of SEQ ID NO: 1888331
gacagccuucgugaaacua

SEQ ID NO: 2527909 - RNA, 19 nt, Artificial Sequence
  Description of Artificial Sequence: Synthetic oligonucleotide
  Antisense strand to SEQ ID NO: 2527908
uaguuucacgaaggcuguc

SEQ ID NO: 2527910 - RNA, 19 nt, Artificial Sequence
  Description of Artificial Sequence: Synthetic oligonucleotide
  Sense strand starting at position 2974 of SEQ ID NO: 1888331
ugcaaagucgauugcauuu

SEQ ID NO: 2527911 - RNA, 19 nt, Artificial Sequence
  Description of Artificial Sequence: Synthetic oligonucleotide
  Antisense strand to SEQ ID NO: 2527910
aaaugcaaucgacuuugca

SEQ ID NO: 2527912 - RNA, 19 nt, Artificial Sequence
  Description of Artificial Sequence: Synthetic oligonucleotide
  Sense strand starting at position 3643 of SEQ ID NO: 1888331
gugggucauuaaccuugaa

SEQ ID NO: 2527913 - RNA, 19 nt, Artificial Sequence
  Description of Artificial Sequence: Synthetic oligonucleotide
  Antisense strand to SEQ ID NO: 2527912
uucaagguuaaugacccac

SEQ ID NO: 2527914 - RNA, 19 nt, Artificial Sequence
  Description of Artificial Sequence: Synthetic oligonucleotide
  Sense strand starting at position 2333 of SEQ ID NO: 1888331
ucagaauucugcuccauga

SEQ ID NO: 2527915 - RNA, 19 nt, Artificial Sequence
  Description of Artificial Sequence: Synthetic oligonucleotide
  Antisense strand to SEQ ID NO: 2527914
ucauggagcagaauucuga

SEQ ID NO: 2527916 - RNA, 19 nt, Artificial Sequence
  Description of Artificial Sequence: Synthetic oligonucleotide
  Sense strand starting at position 3902 of SEQ ID NO: 1888331
uucuguauugcaggacaaa

SEQ ID NO: 2527917 - RNA, 19 nt, Artificial Sequence
  Description of Artificial Sequence: Synthetic oligonucleotide
  Antisense strand to SEQ ID NO: 2527916
uuuguccugcaauacagaa

SEQ ID NO: 2527918 - RNA, 19 nt, Artificial Sequence
  Description of Artificial Sequence: Synthetic oligonucleotide
  Sense strand starting at position 110 of SEQ ID NO: 1888331
agguaaggcuagcugauaa

SEQ ID NO: 2527919 - RNA, 19 nt, Artificial Sequence
  Description of Artificial Sequence: Synthetic oligonucleotide
  Antisense strand to SEQ ID NO: 2527918
uuaucagcuagccuuaccu

SEQ ID NO: 2527920 - RNA, 19 nt, Artificial Sequence
  Description of Artificial Sequence: Synthetic oligonucleotide
  Sense strand starting at position 3506 of SEQ ID NO: 1888331
gaaacaauguuguuuguga

SEQ ID NO: 2527921 - RNA, 19 nt, Artificial Sequence
  Description of Artificial Sequence: Synthetic oligonucleotide
  Antisense strand to SEQ ID NO: 2527920
ucacaaacaacauuguuuc

SEQ ID NO: 2527922 - RNA, 19 nt, Artificial Sequence
  Description of Artificial Sequence: Synthetic oligonucleotide
  Sense strand starting at position 3397 of SEQ ID NO: 1888331
augcgugcugaugaacaaa

SEQ ID NO: 2527923 - RNA, 19 nt, Artificial Sequence
  Description of Artificial Sequence: Synthetic oligonucleotide
  Antisense strand to SEQ ID NO: 2527922
uuuguucaucagcacgcau

SEQ ID NO: 2527924 - RNA, 19 nt, Artificial Sequence
  Description of Artificial Sequence: Synthetic oligonucleotide
  Sense strand starting at position 1932 of SEQ ID NO: 1888331
gagcgaucucuaggaaccu

SEQ ID NO: 2527925 - RNA, 19 nt, Artificial Sequence
  Description of Artificial Sequence: Synthetic oligonucleotide
  Antisense strand to SEQ ID NO: 2527924
agguuccuagagaucgcuc

SEQ ID NO: 2527926 - RNA, 19 nt, Artificial Sequence
  Description of Artificial Sequence: Synthetic oligonucleotide
  Sense strand starting at position 2298 of SEQ ID NO: 1888331
ugugguuuagucuauaacu

SEQ ID NO: 2527927 - RNA, 19 nt, Artificial Sequence
  Description of Artificial Sequence: Synthetic oligonucleotide
  Antisense strand to SEQ ID NO: 2527926
aguuauagacuaaaccaca

SEQ ID NO: 2527928 - RNA, 19 nt, Artificial Sequence
  Description of Artificial Sequence: Synthetic oligonucleotide
  Sense strand starting at position 163 of SEQ ID NO: 1888331
uugcaauuagggugguaaa

SEQ ID NO: 2527929 - RNA, 19 nt, Artificial Sequence
  Description of Artificial Sequence: Synthetic oligonucleotide
  Antisense strand to SEQ ID NO: 2527928
uuuaccacccuaauugcaa

SEQ ID NO: 2527930 - RNA, 19 nt, Artificial Sequence
  Description of Artificial Sequence: Synthetic oligonucleotide
  Sense strand starting at position 2179 of SEQ ID NO: 1888331
uuaauuggucgcuauuaac

SEQ ID NO: 2527931 - RNA, 19 nt, Artificial Sequence
  Description of Artificial Sequence: Synthetic oligonucleotide
  Antisense strand to SEQ ID NO: 2527930
guuaauagcgaccaauuaa

SEQ ID NO: 2527932 - RNA, 19 nt, Artificial Sequence
  Description of Artificial Sequence: Synthetic oligonucleotide
  Sense strand starting at position 2731 of SEQ ID NO: 1888331
augcauuccuaggaaauuu

SEQ ID NO: 2527933 - RNA, 19 nt, Artificial Sequence
  Description of Artificial Sequence: Synthetic oligonucleotide
  Antisense strand to SEQ ID NO: 2527932
aaauuuccuaggaaugcau

SEQ ID NO: 2527934 - RNA, 19 nt, Artificial Sequence
  Description of Artificial Sequence: Synthetic oligonucleotide
  Sense strand starting at position 76 of SEQ ID NO: 1888331
gcaauaaacggacgaugua

SEQ ID NO: 2527935 - RNA, 19 nt, Artificial Sequence
  Description of Artificial Sequence: Synthetic oligonucleotide
  Antisense strand to SEQ ID NO: 2527934
uacaucguccguuuauugc

SEQ ID NO: 2527936 - RNA, 19 nt, Artificial Sequence
  Description of Artificial Sequence: Synthetic oligonucleotide
  Sense strand starting at position 317 of SEQ ID NO: 1888332
agggcucuccacuaacaau

SEQ ID NO: 2527937 - RNA, 19 nt, Artificial Sequence
  Description of Artificial Sequence: Synthetic oligonucleotide
  Antisense strand to SEQ ID NO: 2527936
auuguuaguggagagcccu

SEQ ID NO: 2527938 - RNA, 19 nt, Artificial Sequence
  Description of Artificial Sequence: Synthetic oligonucleotide
  Sense strand starting at position 2924 of SEQ ID NO: 1888332
gguggauggcauuagauac

SEQ ID NO: 2527939 - RNA, 19 nt, Artificial Sequence
  Description of Artificial Sequence: Synthetic oligonucleotide
  Antisense strand to SEQ ID NO: 2527938
guaucuaaugccauccacc

SEQ ID NO: 2527940 - RNA, 19 nt, Artificial Sequence
  Description of Artificial Sequence: Synthetic oligonucleotide
  Sense strand starting at position 3176 of SEQ ID NO: 1888332
ugggaguguggguaaggau

SEQ ID NO: 2527941 - RNA, 19 nt, Artificial Sequence
  Description of Artificial Sequence: Synthetic oligonucleotide
  Antisense strand to SEQ ID NO: 2527940
auccuuacccacacuccca

SEQ ID NO: 2527942 - RNA, 19 nt, Artificial Sequence
  Description of Artificial Sequence: Synthetic oligonucleotide
  Sense strand starting at position 3548 of SEQ ID NO: 1888332
gcaacuccaguggaugaau

SEQ ID NO: 2527943 - RNA, 19 nt, Artificial Sequence
  Description of Artificial Sequence: Synthetic oligonucleotide
  Antisense strand to SEQ ID NO: 2527942
auucauccacuggaguugc

SEQ ID NO: 2527944 - RNA, 19 nt, Artificial Sequence
  Description of Artificial Sequence: Synthetic oligonucleotide
  Sense strand starting at position 3313 of SEQ ID NO: 1888332
ccagguucugcgcuaguga

SEQ ID NO: 2527945 - RNA, 19 nt, Artificial Sequence
  Description of Artificial Sequence: Synthetic oligonucleotide
  Antisense strand to SEQ ID NO: 2527944
ucacuagcgcagaaccugg

SEQ ID NO: 2527946 - RNA, 19 nt, Artificial Sequence
  Description of Artificial Sequence: Synthetic oligonucleotide
  Sense strand starting at position 3948 of SEQ ID NO: 1888332
uggugagaauuuccgucuu

SEQ ID NO: 2527947 - RNA, 19 nt, Artificial Sequence
  Description of Artificial Sequence: Synthetic oligonucleotide
  Antisense strand to SEQ ID NO: 2527946
aagacggaaauucucacca

SEQ ID NO: 2527948 - RNA, 19 nt, Artificial Sequence
  Description of Artificial Sequence: Synthetic oligonucleotide
  Sense strand starting at position 1167 of SEQ ID NO: 1888332
ggaaauugacgaggucaac

SEQ ID NO: 2527949 - RNA, 19 nt, Artificial Sequence
  Description of Artificial Sequence: Synthetic oligonucleotide
  Antisense strand to SEQ ID NO: 2527948
guugaccucgucaauuucc

SEQ ID NO: 2527950 - RNA, 19 nt, Artificial Sequence
  Description of Artificial Sequence: Synthetic oligonucleotide
  Sense strand starting at position 335 of SEQ ID NO: 1888332
ugacauucucuguaaguaa

SEQ ID NO: 2527951 - RNA, 19 nt, Artificial Sequence
  Description of Artificial Sequence: Synthetic oligonucleotide
  Antisense strand to SEQ ID NO: 2527950
uuacuuacagagaauguca

SEQ ID NO: 2527952 - RNA, 19 nt, Artificial Sequence
  Description of Artificial Sequence: Synthetic oligonucleotide
  Sense strand starting at position 3839 of SEQ ID NO: 1888332
cauggcugucuugaaggau

SEQ ID NO: 2527953 - RNA, 19 nt, Artificial Sequence
  Description of Artificial Sequence: Synthetic oligonucleotide
  Antisense strand to SEQ ID NO: 2527952
auccuucaagacagccaug

SEQ ID NO: 2527954 - RNA, 19 nt, Artificial Sequence
  Description of Artificial Sequence: Synthetic oligonucleotide
  Sense strand starting at position 801 of SEQ ID NO: 1888332
uaguuuauucgagaguagg

SEQ ID NO: 2527955 - RNA, 19 nt, Artificial Sequence
  Description of Artificial Sequence: Synthetic oligonucleotide
  Antisense strand to SEQ ID NO: 2527954
ccuacucucgaauaaacua

SEQ ID NO: 2527956 - RNA, 19 nt, Artificial Sequence
  Description of Artificial Sequence: Synthetic oligonucleotide
  Sense strand starting at position 2897 of SEQ ID NO: 1888332
agaggugggccguaaagau

SEQ ID NO: 2527957 - RNA, 19 nt, Artificial Sequence
  Description of Artificial Sequence: Synthetic oligonucleotide
  Antisense strand to SEQ ID NO: 2527956
aucuuuacggcccaccucu

SEQ ID NO: 2527958 - RNA, 19 nt, Artificial Sequence
  Description of Artificial Sequence: Synthetic oligonucleotide
  Sense strand starting at position 254 of SEQ ID NO: 1888332
uccuuugcuagguaggaau

SEQ ID NO: 2527959 - RNA, 19 nt, Artificial Sequence
  Description of Artificial Sequence: Synthetic oligonucleotide
  Antisense strand to SEQ ID NO: 2527958
auuccuaccuagcaaagga

SEQ ID NO: 2527960 - RNA, 19 nt, Artificial Sequence
  Description of Artificial Sequence: Synthetic oligonucleotide
  Sense strand starting at position 1155 of SEQ ID NO: 1888332
ucccuaaugcuaggaaauu

SEQ ID NO: 2527961 - RNA, 19 nt, Artificial Sequence
  Description of Artificial Sequence: Synthetic oligonucleotide
  Antisense strand to SEQ ID NO: 2527960
aauuuccuagcauuaggga

SEQ ID NO: 2527962 - RNA, 19 nt, Artificial Sequence
  Description of Artificial Sequence: Synthetic oligonucleotide
  Sense strand starting at position 268 of SEQ ID NO: 1888332
ggaauacugccuugauauu

SEQ ID NO: 2527963 - RNA, 19 nt, Artificial Sequence
  Description of Artificial Sequence: Synthetic oligonucleotide
  Antisense strand to SEQ ID NO: 2527962
aauaucaaggcaguauucc

SEQ ID NO: 2527964 - RNA, 19 nt, Artificial Sequence
  Description of Artificial Sequence: Synthetic oligonucleotide
  Sense strand starting at position 633 of SEQ ID NO: 1888332
ggacauguguuaccuuaag

SEQ ID NO: 2527965 - RNA, 19 nt, Artificial Sequence
  Description of Artificial Sequence: Synthetic oligonucleotide
  Antisense strand to SEQ ID NO: 2527964
cuuaagguaacacaugucc

SEQ ID NO: 2527966 - RNA, 19 nt, Artificial Sequence
  Description of Artificial Sequence: Synthetic oligonucleotide
  Sense strand starting at position 334 of SEQ ID NO: 1888332
augacauucucuguaagua

SEQ ID NO: 2527967 - RNA, 19 nt, Artificial Sequence
  Description of Artificial Sequence: Synthetic oligonucleotide
  Antisense strand to SEQ ID NO: 2527966
uacuuacagagaaugucau

SEQ ID NO: 2527968 - RNA, 19 nt, Artificial Sequence
  Description of Artificial Sequence: Synthetic oligonucleotide
  Sense strand starting at position 3942 of SEQ ID NO: 1888332
agacuuuggugagaauuuc

SEQ ID NO: 2527969 - RNA, 19 nt, Artificial Sequence
  Description of Artificial Sequence: Synthetic oligonucleotide
  Antisense strand to SEQ ID NO: 2527968
gaaauucucaccaaagucu

SEQ ID NO: 2527970 - RNA, 19 nt, Artificial Sequence
  Description of Artificial Sequence: Synthetic oligonucleotide
  Sense strand starting at position 3027 of SEQ ID NO: 1888332
aaacaucaguguuuaucga

SEQ ID NO: 2527971 - RNA, 19 nt, Artificial Sequence
  Description of Artificial Sequence: Synthetic oligonucleotide
  Antisense strand to SEQ ID NO: 2527970
ucgauaaacacugauguuu

SEQ ID NO: 2527972 - RNA, 19 nt, Artificial Sequence
  Description of Artificial Sequence: Synthetic oligonucleotide
  Sense strand starting at position 3432 of SEQ ID NO: 1888332
acuguuacucacugugaca

SEQ ID NO: 2527973 - RNA, 19 nt, Artificial Sequence
  Description of Artificial Sequence: Synthetic oligonucleotide
  Antisense strand to SEQ ID NO: 2527972
ugucacagugaguaacagu

SEQ ID NO: 2527974 - RNA, 19 nt, Artificial Sequence
  Description of Artificial Sequence: Synthetic oligonucleotide
  Sense strand starting at position 683 of SEQ ID NO: 1888332
uauggcuaucgucaaccua

SEQ ID NO: 2527975 - RNA, 19 nt, Artificial Sequence
  Description of Artificial Sequence: Synthetic oligonucleotide
  Antisense strand to SEQ ID NO: 2527974
uagguugacgauagccaua

SEQ ID NO: 2527976 - RNA, 19 nt, Artificial Sequence
  Description of Artificial Sequence: Synthetic oligonucleotide
  Sense strand starting at position 797 of SEQ ID NO: 1888332
cuccuaguuuauucgagag

SEQ ID NO: 2527977 - RNA, 19 nt, Artificial Sequence
  Description of Artificial Sequence: Synthetic oligonucleotide
  Antisense strand to SEQ ID NO: 2527976
cucucgaauaaacuaggag

SEQ ID NO: 2527978 - RNA, 19 nt, Artificial Sequence
  Description of Artificial Sequence: Synthetic oligonucleotide
  Sense strand starting at position 253 of SEQ ID NO: 1888332
uuccuuugcuagguaggaa

SEQ ID NO: 2527979 - RNA, 19 nt, Artificial Sequence
  Description of Artificial Sequence: Synthetic oligonucleotide
  Antisense strand to SEQ ID NO: 2527978
uuccuaccuagcaaaggaa

SEQ ID NO: 2527980 - RNA, 19 nt, Artificial Sequence
  Description of Artificial Sequence: Synthetic oligonucleotide
  Sense strand starting at position 3056 of SEQ ID NO: 1888332
gccugucuggcauaaugau

SEQ ID NO: 2527981 - RNA, 19 nt, Artificial Sequence
  Description of Artificial Sequence: Synthetic oligonucleotide
  Antisense strand to SEQ ID NO: 2527980
aucauuaugccagacaggc

SEQ ID NO: 2527982 - RNA, 19 nt, Artificial Sequence
  Description of Artificial Sequence: Synthetic oligonucleotide
  Sense strand starting at position 796 of SEQ ID NO: 1888332
ccuccuaguuuauucgaga

SEQ ID NO: 2527983 - RNA, 19 nt, Artificial Sequence
  Description of Artificial Sequence: Synthetic oligonucleotide
  Antisense strand to SEQ ID NO: 2527982
ucucgaauaaacuaggagg

SEQ ID NO: 2527984 - RNA, 19 nt, Artificial Sequence
  Description of Artificial Sequence: Synthetic oligonucleotide
  Sense strand starting at position 3459 of SEQ ID NO: 1888332
aggcuuucuuaccugguaa

SEQ ID NO: 2527985 - RNA, 19 nt, Artificial Sequence
  Description of Artificial Sequence: Synthetic oligonucleotide
  Antisense strand to SEQ ID NO: 2527984
uuaccagguaagaaagccu

SEQ ID NO: 2527986 - RNA, 19 nt, Artificial Sequence
  Description of Artificial Sequence: Synthetic oligonucleotide
  Sense strand starting at position 3461 of SEQ ID NO: 1888332
gcuuucuuaccugguaaag

SEQ ID NO: 2527987 - RNA, 19 nt, Artificial Sequence
  Description of Artificial Sequence: Synthetic oligonucleotide
  Antisense strand to SEQ ID NO: 2527986
cuuuaccagguaagaaagc

SEQ ID NO: 2527988 - RNA, 19 nt, Artificial Sequence
  Description of Artificial Sequence: Synthetic oligonucleotide
  Sense strand starting at position 1004 of SEQ ID NO: 1888332
gggcuagucuccuuacaug

SEQ ID NO: 2527989 - RNA, 19 nt, Artificial Sequence
  Description of Artificial Sequence: Synthetic oligonucleotide
  Antisense strand to SEQ ID NO: 2527988
cauguaaggagacuagccc

SEQ ID NO: 2527990 - RNA, 19 nt, Artificial Sequence
  Description of Artificial Sequence: Synthetic oligonucleotide
  Sense strand starting at position 605 of SEQ ID NO: 1888332
gggagauccaggugugcuu

SEQ ID NO: 2527991 - RNA, 19 nt, Artificial Sequence
  Description of Artificial Sequence: Synthetic oligonucleotide
  Antisense strand to SEQ ID NO: 2527990
aagcacaccuggaucuccc

SEQ ID NO: 2527992 - RNA, 19 nt, Artificial Sequence
  Description of Artificial Sequence: Synthetic oligonucleotide
  Sense strand starting at position 1292 of SEQ ID NO: 1888332
agacaagugucugugagca

SEQ ID NO: 2527993 - RNA, 19 nt, Artificial Sequence
  Description of Artificial Sequence: Synthetic oligonucleotide
  Antisense strand to SEQ ID NO: 2527992
ugcucacagacacuugucu

SEQ ID NO: 2527994 - RNA, 19 nt, Artificial Sequence
  Description of Artificial Sequence: Synthetic oligonucleotide
  Sense strand starting at position 2481 of SEQ ID NO: 1888332
gccacagcaucuuucugaa

SEQ ID NO: 2527995 - RNA, 19 nt, Artificial Sequence
  Description of Artificial Sequence: Synthetic oligonucleotide
  Antisense strand to SEQ ID NO: 2527994
uucagaaagaugcuguggc

SEQ ID NO: 2527996 - RNA, 19 nt, Artificial Sequence
  Description of Artificial Sequence: Synthetic oligonucleotide
  Sense strand starting at position 1415 of SEQ ID NO: 1888332
gcgcucuuaccagagaagu

SEQ ID NO: 2527997 - RNA, 19 nt, Artificial Sequence
  Description of Artificial Sequence: Synthetic oligonucleotide
  Antisense strand to SEQ ID NO: 2527996
acuucucugguaagagcgc

SEQ ID NO: 2527998 - RNA, 19 nt, Artificial Sequence
  Description of Artificial Sequence: Synthetic oligonucleotide
  Sense strand starting at position 3836 of SEQ ID NO: 1888332
gagcauggcugucuugaag

SEQ ID NO: 2527999 - RNA, 19 nt, Artificial Sequence
  Description of Artificial Sequence: Synthetic oligonucleotide
  Antisense strand to SEQ ID NO: 2527998
cuucaagacagccaugcuc

SEQ ID NO: 2528000 - RNA, 19 nt, Artificial Sequence
  Description of Artificial Sequence: Synthetic oligonucleotide
  Sense strand starting at position 34 of SEQ ID NO: 1888332
gcuagaugguggcugaacu

SEQ ID NO: 2528001 - RNA, 19 nt, Artificial Sequence
  Description of Artificial Sequence: Synthetic oligonucleotide
  Antisense strand to SEQ ID NO: 2528000
aguucagccaccaucuagc

SEQ ID NO: 2528002 - RNA, 19 nt, Artificial Sequence
  Description of Artificial Sequence: Synthetic oligonucleotide
  Sense strand starting at position 3024 of SEQ ID NO: 1888332
gcuaaacaucaguguuuau

SEQ ID NO: 2528003 - RNA, 19 nt, Artificial Sequence
  Description of Artificial Sequence: Synthetic oligonucleotide
  Antisense strand to SEQ ID NO: 2528002
auaaacacugauguuuagc

SEQ ID NO: 2528004 - RNA, 19 nt, Artificial Sequence
  Description of Artificial Sequence: Synthetic oligonucleotide
  Sense strand starting at position 3458 of SEQ ID NO: 1888332
caggcuuucuuaccuggua

SEQ ID NO: 2528005 - RNA, 19 nt, Artificial Sequence
  Description of Artificial Sequence: Synthetic oligonucleotide
  Antisense strand to SEQ ID NO: 2528004
uaccagguaagaaagccug

SEQ ID NO: 2528006 - RNA, 19 nt, Artificial Sequence
  Description of Artificial Sequence: Synthetic oligonucleotide
  Sense strand starting at position 3218 of SEQ ID NO: 1888332
guaaguaauguuuguccaa

SEQ ID NO: 2528007 - RNA, 19 nt, Artificial Sequence
  Description of Artificial Sequence: Synthetic oligonucleotide
  Antisense strand to SEQ ID NO: 2528006
uuggacaaacauuacuuac

SEQ ID NO: 2528008 - RNA, 19 nt, Artificial Sequence
  Description of Artificial Sequence: Synthetic oligonucleotide
  Sense strand starting at position 1304 of SEQ ID NO: 1888332
gugagcacgccucaacuuu

SEQ ID NO: 2528009 - RNA, 19 nt, Artificial Sequence
  Description of Artificial Sequence: Synthetic oligonucleotide
  Antisense strand to SEQ ID NO: 2528008
aaaguugaggcgugcucac

SEQ ID NO: 2528010 - RNA, 19 nt, Artificial Sequence
  Description of Artificial Sequence: Synthetic oligonucleotide
  Sense strand starting at position 220 of SEQ ID NO: 1888332
guggguggcuugccaaaua

SEQ ID NO: 2528011 - RNA, 19 nt, Artificial Sequence
  Description of Artificial Sequence: Synthetic oligonucleotide
  Antisense strand to SEQ ID NO: 2528010
uauuuggcaagccacccac

SEQ ID NO: 2528012 - RNA, 19 nt, Artificial Sequence
  Description of Artificial Sequence: Synthetic oligonucleotide
  Sense strand starting at position 626 of SEQ ID NO: 1888332
gcggcaaggacauguguua

SEQ ID NO: 2528013 - RNA, 19 nt, Artificial Sequence
  Description of Artificial Sequence: Synthetic oligonucleotide
  Antisense strand to SEQ ID NO: 2528012
uaacacauguccuugccgc

SEQ ID NO: 2528014 - RNA, 19 nt, Artificial Sequence
  Description of Artificial Sequence: Synthetic oligonucleotide
  Sense strand starting at position 387 of SEQ ID NO: 1888332
uguucuuugcuauguacua

SEQ ID NO: 2528015 - RNA, 19 nt, Artificial Sequence
  Description of Artificial Sequence: Synthetic oligonucleotide
  Antisense strand to SEQ ID NO: 2528014
uaguacauagcaaagaaca

SEQ ID NO: 2528016 - RNA, 19 nt, Artificial Sequence
  Description of Artificial Sequence: Synthetic oligonucleotide
  Sense strand starting at position 3063 of SEQ ID NO: 1888333
auuauuuguuuggcucaua

SEQ ID NO: 2528017 - RNA, 19 nt, Artificial Sequence
  Description of Artificial Sequence: Synthetic oligonucleotide
  Antisense strand to SEQ ID NO: 2528016
uaugagccaaacaaauaau

SEQ ID NO: 2528018 - RNA, 19 nt, Artificial Sequence
  Description of Artificial Sequence: Synthetic oligonucleotide
  Sense strand starting at position 1364 of SEQ ID NO: 1888333
ggguguuaauuuguugauc

SEQ ID NO: 2528019 - RNA, 19 nt, Artificial Sequence
  Description of Artificial Sequence: Synthetic oligonucleotide
  Antisense strand to SEQ ID NO: 2528018
gaucaacaaauuaacaccc

SEQ ID NO: 2528020 - RNA, 19 nt, Artificial Sequence
  Description of Artificial Sequence: Synthetic oligonucleotide
  Sense strand starting at position 3573 of SEQ ID NO: 1888333
cuuaacucucuugagugaa

SEQ ID NO: 2528021 - RNA, 19 nt, Artificial Sequence
  Description of Artificial Sequence: Synthetic oligonucleotide
  Antisense strand to SEQ ID NO: 2528020
uucacucaagagaguuaag

SEQ ID NO: 2528022 - RNA, 19 nt, Artificial Sequence
  Description of Artificial Sequence: Synthetic oligonucleotide
  Sense strand starting at position 2744 of SEQ ID NO: 1888333
agaucacaauuggagauuu

SEQ ID NO: 2528023 - RNA, 19 nt, Artificial Sequence
  Description of Artificial Sequence: Synthetic oligonucleotide
  Antisense strand to SEQ ID NO: 2528022
aaaucuccaauugugaucu

SEQ ID NO: 2528024 - RNA, 19 nt, Artificial Sequence
  Description of Artificial Sequence: Synthetic oligonucleotide
  Sense strand starting at position 3605 of SEQ ID NO: 1888333
cugaauuagccggaaugau

SEQ ID NO: 2528025 - RNA, 19 nt, Artificial Sequence
  Description of Artificial Sequence: Synthetic oligonucleotide
  Antisense strand to SEQ ID NO: 2528024
aucauuccggcuaauucag

SEQ ID NO: 2528026 - RNA, 19 nt, Artificial Sequence
  Description of Artificial Sequence: Synthetic oligonucleotide
  Sense strand starting at position 1811 of SEQ ID NO: 1888333
ggagacuuuccugaugcca

SEQ ID NO: 2528027 - RNA, 19 nt, Artificial Sequence
  Description of Artificial Sequence: Synthetic oligonucleotide
  Antisense strand to SEQ ID NO: 2528026
uggcaucaggaaagucucc

SEQ ID NO: 2528028 - RNA, 19 nt, Artificial Sequence
  Description of Artificial Sequence: Synthetic oligonucleotide
  Sense strand starting at position 1712 of SEQ ID NO: 1888333
uggaaacuuugacucuuau

SEQ ID NO: 2528029 - RNA, 19 nt, Artificial Sequence
  Description of Artificial Sequence: Synthetic oligonucleotide
  Antisense strand to SEQ ID NO: 2528028
auaagagucaaaguuucca

SEQ ID NO: 2528030 - RNA, 19 nt, Artificial Sequence
  Description of Artificial Sequence: Synthetic oligonucleotide
  Sense strand starting at position 1367 of SEQ ID NO: 1888333
uguuaauuuguugaucguu

SEQ ID NO: 2528031 - RNA, 19 nt, Artificial Sequence
  Description of Artificial Sequence: Synthetic oligonucleotide
  Antisense strand to SEQ ID NO: 2528030
aacgaucaacaaauuaaca

SEQ ID NO: 2528032 - RNA, 19 nt, Artificial Sequence
  Description of Artificial Sequence: Synthetic oligonucleotide
  Sense strand starting at position 3061 of SEQ ID NO: 1888333
uuauuauuuguuuggcuca

SEQ ID NO: 2528033 - RNA, 19 nt, Artificial Sequence
  Description of Artificial Sequence: Synthetic oligonucleotide
  Antisense strand to SEQ ID NO: 2528032
ugagccaaacaaauaauaa

SEQ ID NO: 2528034 - RNA, 19 nt, Artificial Sequence
  Description of Artificial Sequence: Synthetic oligonucleotide
  Sense strand starting at position 2816 of SEQ ID NO: 1888333
guguaagagcuagacauau

SEQ ID NO: 2528035 - RNA, 19 nt, Artificial Sequence
  Description of Artificial Sequence: Synthetic oligonucleotide
  Antisense strand to SEQ ID NO: 2528034
auaugucuagcucuuacac

SEQ ID NO: 2528036 - RNA, 19 nt, Artificial Sequence
  Description of Artificial Sequence: Synthetic oligonucleotide
  Sense strand starting at position 2814 of SEQ ID NO: 1888333
auguguaagagcuagacau

SEQ ID NO: 2528037 - RNA, 19 nt, Artificial Sequence
  Description of Artificial Sequence: Synthetic oligonucleotide
  Antisense strand to SEQ ID NO: 2528036
augucuagcucuuacacau

SEQ ID NO: 2528038 - RNA, 19 nt, Artificial Sequence
  Description of Artificial Sequence: Synthetic oligonucleotide
  Sense strand starting at position 3938 of SEQ ID NO: 1888333
aguguagagagauguuaaa

SEQ ID NO: 2528039 - RNA, 19 nt, Artificial Sequence
  Description of Artificial Sequence: Synthetic oligonucleotide
  Antisense strand to SEQ ID NO: 2528038
uuuaacaucucucuacacu

SEQ ID NO: 2528040 - RNA, 19 nt, Artificial Sequence
  Description of Artificial Sequence: Synthetic oligonucleotide
  Sense strand starting at position 516 of SEQ ID NO: 1888333
ucaaaugcugcacaugaau

SEQ ID NO: 2528041 - RNA, 19 nt, Artificial Sequence
  Description of Artificial Sequence: Synthetic oligonucleotide
  Antisense strand to SEQ ID NO: 2528040
auucaugugcagcauuuga

SEQ ID NO: 2528042 - RNA, 19 nt, Artificial Sequence
  Description of Artificial Sequence: Synthetic oligonucleotide
  Sense strand starting at position 3220 of SEQ ID NO: 1888333
aucugauugagguguagaa

SEQ ID NO: 2528043 - RNA, 19 nt, Artificial Sequence
  Description of Artificial Sequence: Synthetic oligonucleotide
  Antisense strand to SEQ ID NO: 2528042
uucuacaccucaaucagau

SEQ ID NO: 2528044 - RNA, 19 nt, Artificial Sequence
  Description of Artificial Sequence: Synthetic oligonucleotide
  Sense strand starting at position 2788 of SEQ ID NO: 1888333
caacaaggauuugggagau

SEQ ID NO: 2528045 - RNA, 19 nt, Artificial Sequence
  Description of Artificial Sequence: Synthetic oligonucleotide
  Antisense strand to SEQ ID NO: 2528044
aucucccaaauccuuguug

SEQ ID NO: 2528046 - RNA, 19 nt, Artificial Sequence
  Description of Artificial Sequence: Synthetic oligonucleotide
  Sense strand starting at position 501 of SEQ ID NO: 1888333
agaaauaauccucggucaa

SEQ ID NO: 2528047 - RNA, 19 nt, Artificial Sequence
  Description of Artificial Sequence: Synthetic oligonucleotide
  Antisense strand to SEQ ID NO: 2528046
uugaccgaggauuauuucu

SEQ ID NO: 2528048 - RNA, 19 nt, Artificial Sequence
  Description of Artificial Sequence: Synthetic oligonucleotide
  Sense strand starting at position 3932 of SEQ ID NO: 1888333
uguucuaguguagagagau

SEQ ID NO: 2528049 - RNA, 19 nt, Artificial Sequence
  Description of Artificial Sequence: Synthetic oligonucleotide
  Antisense strand to SEQ ID NO: 2528048
aucucucuacacuagaaca

SEQ ID NO: 2528050 - RNA, 19 nt, Artificial Sequence
  Description of Artificial Sequence: Synthetic oligonucleotide
  Sense strand starting at position 3083 of SEQ ID NO: 1888333
uuuagcucucagggaacaa

SEQ ID NO: 2528051 - RNA, 19 nt, Artificial Sequence
  Description of Artificial Sequence: Synthetic oligonucleotide
  Antisense strand to SEQ ID NO: 2528050
uuguucccugagagcuaaa

SEQ ID NO: 2528052 - RNA, 19 nt, Artificial Sequence
  Description of Artificial Sequence: Synthetic oligonucleotide
  Sense strand starting at position 3421 of SEQ ID NO: 1888333
uuauauuugugugucaucu

SEQ ID NO: 2528053 - RNA, 19 nt, Artificial Sequence
  Description of Artificial Sequence: Synthetic oligonucleotide
  Antisense strand to SEQ ID NO: 2528052
agaugacacacaaauauaa

SEQ ID NO: 2528054 - RNA, 19 nt, Artificial Sequence
  Description of Artificial Sequence: Synthetic oligonucleotide
  Sense strand starting at position 3420 of SEQ ID NO: 1888333
uuuauauuugugugucauc

SEQ ID NO: 2528055 - RNA, 19 nt, Artificial Sequence
  Description of Artificial Sequence: Synthetic oligonucleotide
  Antisense strand to SEQ ID NO: 2528054
gaugacacacaaauauaaa

SEQ ID NO: 2528056 - RNA, 19 nt, Artificial Sequence
  Description of Artificial Sequence: Synthetic oligonucleotide
  Sense strand starting at position 1734 of SEQ ID NO: 1888333
cucuuaagcuacucaggaa

SEQ ID NO: 2528057 - RNA, 19 nt, Artificial Sequence
  Description of Artificial Sequence: Synthetic oligonucleotide
  Antisense strand to SEQ ID NO: 2528056
uuccugaguagcuuaagag

SEQ ID NO: 2528058 - RNA, 19 nt, Artificial Sequence
  Description of Artificial Sequence: Synthetic oligonucleotide
  Sense strand starting at position 3215 of SEQ ID NO: 1888333
cuuuaaucugauugaggug

SEQ ID NO: 2528059 - RNA, 19 nt, Artificial Sequence
  Description of Artificial Sequence: Synthetic oligonucleotide
  Antisense strand to SEQ ID NO: 2528058
caccucaaucagauuaaag

SEQ ID NO: 2528060 - RNA, 19 nt, Artificial Sequence
  Description of Artificial Sequence: Synthetic oligonucleotide
  Sense strand starting at position 3117 of SEQ ID NO: 1888333
uccuaaguucuugggagac

SEQ ID NO: 2528061 - RNA, 19 nt, Artificial Sequence
  Description of Artificial Sequence: Synthetic oligonucleotide
  Antisense strand to SEQ ID NO: 2528060
gucucccaagaacuuagga

SEQ ID NO: 2528062 - RNA, 19 nt, Artificial Sequence
  Description of Artificial Sequence: Synthetic oligonucleotide
  Sense strand starting at position 500 of SEQ ID NO: 1888333
uagaaauaauccucgguca

SEQ ID NO: 2528063 - RNA, 19 nt, Artificial Sequence
  Description of Artificial Sequence: Synthetic oligonucleotide
  Antisense strand to SEQ ID NO: 2528062
ugaccgaggauuauuucua

SEQ ID NO: 2528064 - RNA, 19 nt, Artificial Sequence
  Description of Artificial Sequence: Synthetic oligonucleotide
  Sense strand starting at position 925 of SEQ ID NO: 1888333
augcaacuugcucaucaga

SEQ ID NO: 2528065 - RNA, 19 nt, Artificial Sequence
  Description of Artificial Sequence: Synthetic oligonucleotide
  Antisense strand to SEQ ID NO: 2528064
ucugaugagcaaguugcau

SEQ ID NO: 2528066 - RNA, 19 nt, Artificial Sequence
  Description of Artificial Sequence: Synthetic oligonucleotide
  Sense strand starting at position 672 of SEQ ID NO: 1888333
augggagccuucuuaacua

SEQ ID NO: 2528067 - RNA, 19 nt, Artificial Sequence
  Description of Artificial Sequence: Synthetic oligonucleotide
  Antisense strand to SEQ ID NO: 2528066
uaguuaagaaggcucccau

SEQ ID NO: 2528068 - RNA, 19 nt, Artificial Sequence
  Description of Artificial Sequence: Synthetic oligonucleotide
  Sense strand starting at position 2309 of SEQ ID NO: 1888333
gucuguaaucacuacucau

SEQ ID NO: 2528069 - RNA, 19 nt, Artificial Sequence
  Description of Artificial Sequence: Synthetic oligonucleotide
  Antisense strand to SEQ ID NO: 2528068
augaguagugauuacagac

SEQ ID NO: 2528070 - RNA, 19 nt, Artificial Sequence
  Description of Artificial Sequence: Synthetic oligonucleotide
  Sense strand starting at position 3214 of SEQ ID NO: 1888333
ccuuuaaucugauugaggu

SEQ ID NO: 2528071 - RNA, 19 nt, Artificial Sequence
  Description of Artificial Sequence: Synthetic oligonucleotide
  Antisense strand to SEQ ID NO: 2528070
accucaaucagauuaaagg

SEQ ID NO: 2528072 - RNA, 19 nt, Artificial Sequence
  Description of Artificial Sequence: Synthetic oligonucleotide
  Sense strand starting at position 3425 of SEQ ID NO: 1888333
auuugugugucaucucuuu

SEQ ID NO: 2528073 - RNA, 19 nt, Artificial Sequence
  Description of Artificial Sequence: Synthetic oligonucleotide
  Antisense strand to SEQ ID NO: 2528072
aaagagaugacacacaaau

SEQ ID NO: 2528074 - RNA, 19 nt, Artificial Sequence
  Description of Artificial Sequence: Synthetic oligonucleotide
  Sense strand starting at position 2936 of SEQ ID NO: 1888333
gcagacaucaguugagacu

SEQ ID NO: 2528075 - RNA, 19 nt, Artificial Sequence
  Description of Artificial Sequence: Synthetic oligonucleotide
  Antisense strand to SEQ ID NO: 2528074
agucucaacugaugucugc

SEQ ID NO: 2528076 - RNA, 19 nt, Artificial Sequence
  Description of Artificial Sequence: Synthetic oligonucleotide
  Sense strand starting at position 3604 of SEQ ID NO: 1888333
ucugaauuagccggaauga

SEQ ID NO: 2528077 - RNA, 19 nt, Artificial Sequence
  Description of Artificial Sequence: Synthetic oligonucleotide
  Antisense strand to SEQ ID NO: 2528076
ucauuccggcuaauucaga

SEQ ID NO: 2528078 - RNA, 19 nt, Artificial Sequence
  Description of Artificial Sequence: Synthetic oligonucleotide
  Sense strand starting at position 3419 of SEQ ID NO: 1888333
guuuauauuugugugucau

SEQ ID NO: 2528079 - RNA, 19 nt, Artificial Sequence
  Description of Artificial Sequence: Synthetic oligonucleotide
  Antisense strand to SEQ ID NO: 2528078
augacacacaaauauaaac

SEQ ID NO: 2528080 - RNA, 19 nt, Artificial Sequence
  Description of Artificial Sequence: Synthetic oligonucleotide
  Sense strand starting at position 514 of SEQ ID NO: 1888333
ggucaaaugcugcacauga

SEQ ID NO: 2528081 - RNA, 19 nt, Artificial Sequence
  Description of Artificial Sequence: Synthetic oligonucleotide
  Antisense strand to SEQ ID NO: 2528080
ucaugugcagcauuugacc

SEQ ID NO: 2528082 - RNA, 19 nt, Artificial Sequence
  Description of Artificial Sequence: Synthetic oligonucleotide
  Sense strand starting at position 2114 of SEQ ID NO: 1888333
caguguuagcuggaacuca

SEQ ID NO: 2528083 - RNA, 19 nt, Artificial Sequence
  Description of Artificial Sequence: Synthetic oligonucleotide
  Antisense strand to SEQ ID NO: 2528082
ugaguuccagcuaacacug

SEQ ID NO: 2528084 - RNA, 19 nt, Artificial Sequence
  Description of Artificial Sequence: Synthetic oligonucleotide
  Sense strand starting at position 1472 of SEQ ID NO: 1888333
uguaauaacuaucuuggua

SEQ ID NO: 2528085 - RNA, 19 nt, Artificial Sequence
  Description of Artificial Sequence: Synthetic oligonucleotide
  Antisense strand to SEQ ID NO: 2528084
uaccaagauaguuauuaca

SEQ ID NO: 2528086 - RNA, 19 nt, Artificial Sequence
  Description of Artificial Sequence: Synthetic oligonucleotide
  Sense strand starting at position 769 of SEQ ID NO: 1888333
agacacguccacuaugcua

SEQ ID NO: 2528087 - RNA, 19 nt, Artificial Sequence
  Description of Artificial Sequence: Synthetic oligonucleotide
  Antisense strand to SEQ ID NO: 2528086
uagcauaguggacgugucu

SEQ ID NO: 2528088 - RNA, 19 nt, Artificial Sequence
  Description of Artificial Sequence: Synthetic oligonucleotide
  Sense strand starting at position 3035 of SEQ ID NO: 1888333
agguaacugugauucucua

SEQ ID NO: 2528089 - RNA, 19 nt, Artificial Sequence
  Description of Artificial Sequence: Synthetic oligonucleotide
  Antisense strand to SEQ ID NO: 2528088
uagagaaucacaguuaccu

SEQ ID NO: 2528090 - RNA, 19 nt, Artificial Sequence
  Description of Artificial Sequence: Synthetic oligonucleotide
  Sense strand starting at position 3416 of SEQ ID NO: 1888333
cugguuuauauuugugugu

SEQ ID NO: 2528091 - RNA, 19 nt, Artificial Sequence
  Description of Artificial Sequence: Synthetic oligonucleotide
  Antisense strand to SEQ ID NO: 2528090
acacacaaauauaaaccag

SEQ ID NO: 2528092 - RNA, 19 nt, Artificial Sequence
  Description of Artificial Sequence: Synthetic oligonucleotide
  Sense strand starting at position 862 of SEQ ID NO: 1888333
ugugaucagcugcauaaau

SEQ ID NO: 2528093 - RNA, 19 nt, Artificial Sequence
  Description of Artificial Sequence: Synthetic oligonucleotide
  Antisense strand to SEQ ID NO: 2528092
auuuaugcagcugaucaca

SEQ ID NO: 2528094 - RNA, 19 nt, Artificial Sequence
  Description of Artificial Sequence: Synthetic oligonucleotide
  Sense strand starting at position 1462 of SEQ ID NO: 1888333
uucucauguguguaauaac

SEQ ID NO: 2528095 - RNA, 19 nt, Artificial Sequence
  Description of Artificial Sequence: Synthetic oligonucleotide
  Antisense strand to SEQ ID NO: 2528094
guuauuacacacaugagaa

SEQ ID NO: 2528096 - RNA, 19 nt, Artificial Sequence
  Description of Artificial Sequence: Synthetic oligonucleotide
  Sense strand starting at position 2115 of SEQ ID NO: 1888334
aaaugagauuaucuuguga

SEQ ID NO: 2528097 - RNA, 19 nt, Artificial Sequence
  Description of Artificial Sequence: Synthetic oligonucleotide
  Antisense strand to SEQ ID NO: 2528096
ucacaagauaaucucauuu

SEQ ID NO: 2528098 - RNA, 19 nt, Artificial Sequence
  Description of Artificial Sequence: Synthetic oligonucleotide
  Sense strand starting at position 1220 of SEQ ID NO: 1888334
cauuucuuggugugugaaa

SEQ ID NO: 2528099 - RNA, 19 nt, Artificial Sequence
  Description of Artificial Sequence: Synthetic oligonucleotide
  Antisense strand to SEQ ID NO: 2528098
uuucacacaccaagaaaug

SEQ ID NO: 2528100 - RNA, 19 nt, Artificial Sequence
  Description of Artificial Sequence: Synthetic oligonucleotide
  Sense strand starting at position 1082 of SEQ ID NO: 1888334
guguguauugauugauuug

SEQ ID NO: 2528101 - RNA, 19 nt, Artificial Sequence
  Description of Artificial Sequence: Synthetic oligonucleotide
  Antisense strand to SEQ ID NO: 2528100
caaaucaaucaauacacac

SEQ ID NO: 2528102 - RNA, 19 nt, Artificial Sequence
  Description of Artificial Sequence: Synthetic oligonucleotide
  Sense strand starting at position 1254 of SEQ ID NO: 1888334
gagucuuaccaccagguaa

SEQ ID NO: 2528103 - RNA, 19 nt, Artificial Sequence
  Description of Artificial Sequence: Synthetic oligonucleotide
  Antisense strand to SEQ ID NO: 2528102
uuaccuggugguaagacuc

SEQ ID NO: 2528104 - RNA, 19 nt, Artificial Sequence
  Description of Artificial Sequence: Synthetic oligonucleotide
  Sense strand starting at position 3874 of SEQ ID NO: 1888334
ugauuacagguuuggaaac

SEQ ID NO: 2528105 - RNA, 19 nt, Artificial Sequence
  Description of Artificial Sequence: Synthetic oligonucleotide
  Antisense strand to SEQ ID NO: 2528104
guuuccaaaccuguaauca

SEQ ID NO: 2528106 - RNA, 19 nt, Artificial Sequence
  Description of Artificial Sequence: Synthetic oligonucleotide
  Sense strand starting at position 245 of SEQ ID NO: 1888334
uuaggcugaauguauuaga

SEQ ID NO: 2528107 - RNA, 19 nt, Artificial Sequence
  Description of Artificial Sequence: Synthetic oligonucleotide
  Antisense strand to SEQ ID NO: 2528106
ucuaauacauucagccuaa

SEQ ID NO: 2528108 - RNA, 19 nt, Artificial Sequence
  Description of Artificial Sequence: Synthetic oligonucleotide
  Sense strand starting at position 277 of SEQ ID NO: 1888334
ugugaaauauuugaggaaa

SEQ ID NO: 2528109 - RNA, 19 nt, Artificial Sequence
  Description of Artificial Sequence: Synthetic oligonucleotide
  Antisense strand to SEQ ID NO: 2528108
uuuccucaaauauuucaca

SEQ ID NO: 2528110 - RNA, 19 nt, Artificial Sequence
  Description of Artificial Sequence: Synthetic oligonucleotide
  Sense strand starting at position 3109 of SEQ ID NO: 1888334
cucguacucugacuuauuu

SEQ ID NO: 2528111 - RNA, 19 nt, Artificial Sequence
  Description of Artificial Sequence: Synthetic oligonucleotide
  Antisense strand to SEQ ID NO: 2528110
aaauaagucagaguacgag

SEQ ID NO: 2528112 - RNA, 19 nt, Artificial Sequence
  Description of Artificial Sequence: Synthetic oligonucleotide
  Sense strand starting at position 73 of SEQ ID NO: 1888334
uggcuuugggaacaaucga

SEQ ID NO: 2528113 - RNA, 19 nt, Artificial Sequence
  Description of Artificial Sequence: Synthetic oligonucleotide
  Antisense strand to SEQ ID NO: 2528112
ucgauuguucccaaagcca

SEQ ID NO: 2528114 - RNA, 19 nt, Artificial Sequence
  Description of Artificial Sequence: Synthetic oligonucleotide
  Sense strand starting at position 3170 of SEQ ID NO: 1888334
gguagcaaucuuuacaaca

SEQ ID NO: 2528115 - RNA, 19 nt, Artificial Sequence
  Description of Artificial Sequence: Synthetic oligonucleotide
  Antisense strand to SEQ ID NO: 2528114
uguuguaaagauugcuacc

SEQ ID NO: 2528116 - RNA, 19 nt, Artificial Sequence
  Description of Artificial Sequence: Synthetic oligonucleotide
  Sense strand starting at position 3788 of SEQ ID NO: 1888334
augacuacuuggguuuaaa

SEQ ID NO: 2528117 - RNA, 19 nt, Artificial Sequence
  Description of Artificial Sequence: Synthetic oligonucleotide
  Antisense strand to SEQ ID NO: 2528116
uuuaaacccaaguagucau

SEQ ID NO: 2528118 - RNA, 19 nt, Artificial Sequence
  Description of Artificial Sequence: Synthetic oligonucleotide
  Sense strand starting at position 3426 of SEQ ID NO: 1888334
ucaguuguccuagauaaca

SEQ ID NO: 2528119 - RNA, 19 nt, Artificial Sequence
  Description of Artificial Sequence: Synthetic oligonucleotide
  Antisense strand to SEQ ID NO: 2528118
uguuaucuaggacaacuga

SEQ ID NO: 2528120 - RNA, 19 nt, Artificial Sequence
  Description of Artificial Sequence: Synthetic oligonucleotide
  Sense strand starting at position 3901 of SEQ ID NO: 1888334
gaggucacucagcauauau

SEQ ID NO: 2528121 - RNA, 19 nt, Artificial Sequence
  Description of Artificial Sequence: Synthetic oligonucleotide
  Antisense strand to SEQ ID NO: 2528120
auauaugcugagugaccuc

SEQ ID NO: 2528122 - RNA, 19 nt, Artificial Sequence
  Description of Artificial Sequence: Synthetic oligonucleotide
  Sense strand starting at position 3633 of SEQ ID NO: 1888334
uucguagaacaguacugaa

SEQ ID NO: 2528123 - RNA, 19 nt, Artificial Sequence
  Description of Artificial Sequence: Synthetic oligonucleotide
  Antisense strand to SEQ ID NO: 2528122
uucaguacuguucuacgaa

SEQ ID NO: 2528124 - RNA, 19 nt, Artificial Sequence
  Description of Artificial Sequence: Synthetic oligonucleotide
  Sense strand starting at position 1091 of SEQ ID NO: 1888334
gauugauuugcugguuggu

SEQ ID NO: 2528125 - RNA, 19 nt, Artificial Sequence
  Description of Artificial Sequence: Synthetic oligonucleotide
  Antisense strand to SEQ ID NO: 2528124
accaaccagcaaaucaauc

SEQ ID NO: 2528126 - RNA, 19 nt, Artificial Sequence
  Description of Artificial Sequence: Synthetic oligonucleotide
  Sense strand starting at position 3283 of SEQ ID NO: 1888334
acuuuagauguugaguuua

SEQ ID NO: 2528127 - RNA, 19 nt, Artificial Sequence
  Description of Artificial Sequence: Synthetic oligonucleotide
  Antisense strand to SEQ ID NO: 2528126
uaaacucaacaucuaaagu

SEQ ID NO: 2528128 - RNA, 19 nt, Artificial Sequence
  Description of Artificial Sequence: Synthetic oligonucleotide
  Sense strand starting at position 2444 of SEQ ID NO: 1888334
agcuaugucacagaaagug

SEQ ID NO: 2528129 - RNA, 19 nt, Artificial Sequence
  Description of Artificial Sequence: Synthetic oligonucleotide
  Antisense strand to SEQ ID NO: 2528128
cacuuucugugacauagcu

SEQ ID NO: 2528130 - RNA, 19 nt, Artificial Sequence
  Description of Artificial Sequence: Synthetic oligonucleotide
  Sense strand starting at position 2507 of SEQ ID NO: 1888334
guaguacucagugaugaau

SEQ ID NO: 2528131 - RNA, 19 nt, Artificial Sequence
  Description of Artificial Sequence: Synthetic oligonucleotide
  Antisense strand to SEQ ID NO: 2528130
auucaucacugaguacuac

SEQ ID NO: 2528132 - RNA, 19 nt, Artificial Sequence
  Description of Artificial Sequence: Synthetic oligonucleotide
  Sense strand starting at position 633 of SEQ ID NO: 1888334
uggcuaggugaaugaugaa

SEQ ID NO: 2528133 - RNA, 19 nt, Artificial Sequence
  Description of Artificial Sequence: Synthetic oligonucleotide
  Antisense strand to SEQ ID NO: 2528132
uucaucauucaccuagcca

SEQ ID NO: 2528134 - RNA, 19 nt, Artificial Sequence
  Description of Artificial Sequence: Synthetic oligonucleotide
  Sense strand starting at position 819 of SEQ ID NO: 1888334
ugggcucaauuccugagaa

SEQ ID NO: 2528135 - RNA, 19 nt, Artificial Sequence
  Description of Artificial Sequence: Synthetic oligonucleotide
  Antisense strand to SEQ ID NO: 2528134
uucucaggaauugagccca

SEQ ID NO: 2528136 - RNA, 19 nt, Artificial Sequence
  Description of Artificial Sequence: Synthetic oligonucleotide
  Sense strand starting at position 267 of SEQ ID NO: 1888334
ugaccaccagugugaaaua

SEQ ID NO: 2528137 - RNA, 19 nt, Artificial Sequence
  Description of Artificial Sequence: Synthetic oligonucleotide
  Antisense strand to SEQ ID NO: 2528136
uauuucacacuggugguca

SEQ ID NO: 2528138 - RNA, 19 nt, Artificial Sequence
  Description of Artificial Sequence: Synthetic oligonucleotide
  Sense strand starting at position 3786 of SEQ ID NO: 1888334
acaugacuacuuggguuua

SEQ ID NO: 2528139 - RNA, 19 nt, Artificial Sequence
  Description of Artificial Sequence: Synthetic oligonucleotide
  Antisense strand to SEQ ID NO: 2528138
uaaacccaaguagucaugu

SEQ ID NO: 2528140 - RNA, 19 nt, Artificial Sequence
  Description of Artificial Sequence: Synthetic oligonucleotide
  Sense strand starting at position 3482 of SEQ ID NO: 1888334
aaaucagggccagguaauu

SEQ ID NO: 2528141 - RNA, 19 nt, Artificial Sequence
  Description of Artificial Sequence: Synthetic oligonucleotide
  Antisense strand to SEQ ID NO: 2528140
aauuaccuggcccugauuu

SEQ ID NO: 2528142 - RNA, 19 nt, Artificial Sequence
  Description of Artificial Sequence: Synthetic oligonucleotide
  Sense strand starting at position 3304 of SEQ ID NO: 1888334
ugaaucacugucuagguuu

SEQ ID NO: 2528143 - RNA, 19 nt, Artificial Sequence
  Description of Artificial Sequence: Synthetic oligonucleotide
  Antisense strand to SEQ ID NO: 2528142
aaaccuagacagugauuca

SEQ ID NO: 2528144 - RNA, 19 nt, Artificial Sequence
  Description of Artificial Sequence: Synthetic oligonucleotide
  Sense strand starting at position 103 of SEQ ID NO: 1888334
auuagauuaguuggguuga

SEQ ID NO: 2528145 - RNA, 19 nt, Artificial Sequence
  Description of Artificial Sequence: Synthetic oligonucleotide
  Antisense strand to SEQ ID NO: 2528144
ucaacccaacuaaucuaau

SEQ ID NO: 2528146 - RNA, 19 nt, Artificial Sequence
  Description of Artificial Sequence: Synthetic oligonucleotide
  Sense strand starting at position 1216 of SEQ ID NO: 1888334
aaggcauuucuuggugugu

SEQ ID NO: 2528147 - RNA, 19 nt, Artificial Sequence
  Description of Artificial Sequence: Synthetic oligonucleotide
  Antisense strand to SEQ ID NO: 2528146
acacaccaagaaaugccuu

SEQ ID NO: 2528148 - RNA, 19 nt, Artificial Sequence
  Description of Artificial Sequence: Synthetic oligonucleotide
  Sense strand starting at position 3934 of SEQ ID NO: 1888334
ccaggaauagccugaccuu

SEQ ID NO: 2528149 - RNA, 19 nt, Artificial Sequence
  Description of Artificial Sequence: Synthetic oligonucleotide
  Antisense strand to SEQ ID NO: 2528148
aaggucaggcuauuccugg

SEQ ID NO: 2528150 - RNA, 19 nt, Artificial Sequence
  Description of Artificial Sequence: Synthetic oligonucleotide
  Sense strand starting at position 3217 of SEQ ID NO: 1888334
guucguaauacaggaaaca

SEQ ID NO: 2528151 - RNA, 19 nt, Artificial Sequence
  Description of Artificial Sequence: Synthetic oligonucleotide
  Antisense strand to SEQ ID NO: 2528150
uguuuccuguauuacgaac

SEQ ID NO: 2528152 - RNA, 19 nt, Artificial Sequence
  Description of Artificial Sequence: Synthetic oligonucleotide
  Sense strand starting at position 3652 of SEQ ID NO: 1888334
augucaaauguccaggcau

SEQ ID NO: 2528153 - RNA, 19 nt, Artificial Sequence
  Description of Artificial Sequence: Synthetic oligonucleotide
  Antisense strand to SEQ ID NO: 2528152
augccuggacauuugacau

SEQ ID NO: 2528154 - RNA, 19 nt, Artificial Sequence
  Description of Artificial Sequence: Synthetic oligonucleotide
  Sense strand starting at position 101 of SEQ ID NO: 1888334
uaauuagauuaguuggguu

SEQ ID NO: 2528155 - RNA, 19 nt, Artificial Sequence
  Description of Artificial Sequence: Synthetic oligonucleotide
  Antisense strand to SEQ ID NO: 2528154
aacccaacuaaucuaauua

SEQ ID NO: 2528156 - RNA, 19 nt, Artificial Sequence
  Description of Artificial Sequence: Synthetic oligonucleotide
  Sense strand starting at position 81 of SEQ ID NO: 1888334
ggaacaaucgauugcuuga

SEQ ID NO: 2528157 - RNA, 19 nt, Artificial Sequence
  Description of Artificial Sequence: Synthetic oligonucleotide
  Antisense strand to SEQ ID NO: 2528156
ucaagcaaucgauuguucc

SEQ ID NO: 2528158 - RNA, 19 nt, Artificial Sequence
  Description of Artificial Sequence: Synthetic oligonucleotide
  Sense strand starting at position 2503 of SEQ ID NO: 1888334
cuuaguaguacucagugau

SEQ ID NO: 2528159 - RNA, 19 nt, Artificial Sequence
  Description of Artificial Sequence: Synthetic oligonucleotide
  Antisense strand to SEQ ID NO: 2528158
aucacugaguacuacuaag

SEQ ID NO: 2528160 - RNA, 19 nt, Artificial Sequence
  Description of Artificial Sequence: Synthetic oligonucleotide
  Sense strand starting at position 2506 of SEQ ID NO: 1888334
aguaguacucagugaugaa

SEQ ID NO: 2528161 - RNA, 19 nt, Artificial Sequence
  Description of Artificial Sequence: Synthetic oligonucleotide
  Antisense strand to SEQ ID NO: 2528160
uucaucacugaguacuacu

SEQ ID NO: 2528162 - RNA, 19 nt, Artificial Sequence
  Description of Artificial Sequence: Synthetic oligonucleotide
  Sense strand starting at position 3491 of SEQ ID NO: 1888334
ccagguaauuuagauauug

SEQ ID NO: 2528163 - RNA, 19 nt, Artificial Sequence
  Description of Artificial Sequence: Synthetic oligonucleotide
  Antisense strand to SEQ ID NO: 2528162
caauaucuaaauuaccugg

SEQ ID NO: 2528164 - RNA, 19 nt, Artificial Sequence
  Description of Artificial Sequence: Synthetic oligonucleotide
  Sense strand starting at position 3252 of SEQ ID NO: 1888334
ugcccuagauaccugauua

SEQ ID NO: 2528165 - RNA, 19 nt, Artificial Sequence
  Description of Artificial Sequence: Synthetic oligonucleotide
  Antisense strand to SEQ ID NO: 2528164
uaaucagguaucuagggca

SEQ ID NO: 2528166 - RNA, 19 nt, Artificial Sequence
  Description of Artificial Sequence: Synthetic oligonucleotide
  Sense strand starting at position 105 of SEQ ID NO: 1888334
uagauuaguuggguugauu

SEQ ID NO: 2528167 - RNA, 19 nt, Artificial Sequence
  Description of Artificial Sequence: Synthetic oligonucleotide
  Antisense strand to SEQ ID NO: 2528166
aaucaacccaacuaaucua

SEQ ID NO: 2528168 - RNA, 19 nt, Artificial Sequence
  Description of Artificial Sequence: Synthetic oligonucleotide
  Sense strand starting at position 2860 of SEQ ID NO: 1888334
guaacuuucugaucuugau

SEQ ID NO: 2528169 - RNA, 19 nt, Artificial Sequence
  Description of Artificial Sequence: Synthetic oligonucleotide
  Antisense strand to SEQ ID NO: 2528168
aucaagaucagaaaguuac

SEQ ID NO: 2528170 - RNA, 19 nt, Artificial Sequence
  Description of Artificial Sequence: Synthetic oligonucleotide
  Sense strand starting at position 3900 of SEQ ID NO: 1888334
ugaggucacucagcauaua

SEQ ID NO: 2528171 - RNA, 19 nt, Artificial Sequence
  Description of Artificial Sequence: Synthetic oligonucleotide
  Antisense strand to SEQ ID NO: 2528170
uauaugcugagugaccuca

SEQ ID NO: 2528172 - RNA, 19 nt, Artificial Sequence
  Description of Artificial Sequence: Synthetic oligonucleotide
  Sense strand starting at position 265 of SEQ ID NO: 1888334
ggugaccaccagugugaaa

SEQ ID NO: 2528173 - RNA, 19 nt, Artificial Sequence
  Description of Artificial Sequence: Synthetic oligonucleotide
  Antisense strand to SEQ ID NO: 2528172
uuucacacugguggucacc

SEQ ID NO: 2528174 - RNA, 19 nt, Artificial Sequence
  Description of Artificial Sequence: Synthetic oligonucleotide
  Sense strand starting at position 3285 of SEQ ID NO: 1888334
uuuagauguugaguuuaca

SEQ ID NO: 2528175 - RNA, 19 nt, Artificial Sequence
  Description of Artificial Sequence: Synthetic oligonucleotide
  Antisense strand to SEQ ID NO: 2528174
uguaaacucaacaucuaaa

SEQ ID NO: 2528176 - RNA, 19 nt, Artificial Sequence
  Description of Artificial Sequence: Synthetic oligonucleotide
  Sense strand starting at position 1270 of SEQ ID NO: 1888335
gaaagauucuggguugauc

SEQ ID NO: 2528177 - RNA, 19 nt, Artificial Sequence
  Description of Artificial Sequence: Synthetic oligonucleotide
  Antisense strand to SEQ ID NO: 2528176
gaucaacccagaaucuuuc

SEQ ID NO: 2528178 - RNA, 19 nt, Artificial Sequence
  Description of Artificial Sequence: Synthetic oligonucleotide
  Sense strand starting at position 293 of SEQ ID NO: 1888335
ucaggagaaguaugguaua

SEQ ID NO: 2528179 - RNA, 19 nt, Artificial Sequence
  Description of Artificial Sequence: Synthetic oligonucleotide
  Antisense strand to SEQ ID NO: 2528178
uauaccauacuucuccuga

SEQ ID NO: 2528180 - RNA, 19 nt, Artificial Sequence
  Description of Artificial Sequence: Synthetic oligonucleotide
  Sense strand starting at position 1355 of SEQ ID NO: 1888335
augauuggagguugguaaa

SEQ ID NO: 2528181 - RNA, 19 nt, Artificial Sequence
  Description of Artificial Sequence: Synthetic oligonucleotide
  Antisense strand to SEQ ID NO: 2528180
uuuaccaaccuccaaucau

SEQ ID NO: 2528182 - RNA, 19 nt, Artificial Sequence
  Description of Artificial Sequence: Synthetic oligonucleotide
  Sense strand starting at position 1697 of SEQ ID NO: 1888335
cuaguuauuugcguaaaga

SEQ ID NO: 2528183 - RNA, 19 nt, Artificial Sequence
  Description of Artificial Sequence: Synthetic oligonucleotide
  Antisense strand to SEQ ID NO: 2528182
ucuuuacgcaaauaacuag

SEQ ID NO: 2528184 - RNA, 19 nt, Artificial Sequence
  Description of Artificial Sequence: Synthetic oligonucleotide
  Sense strand starting at position 1693 of SEQ ID NO: 1888335
gaaacuaguuauuugcgua

SEQ ID NO: 2528185 - RNA, 19 nt, Artificial Sequence
  Description of Artificial Sequence: Synthetic oligonucleotide
  Antisense strand to SEQ ID NO: 2528184
uacgcaaauaacuaguuuc

SEQ ID NO: 2528186 - RNA, 19 nt, Artificial Sequence
  Description of Artificial Sequence: Synthetic oligonucleotide
  Sense strand starting at position 3771 of SEQ ID NO: 1888335
ggacauugaccucagcuuu

SEQ ID NO: 2528187 - RNA, 19 nt, Artificial Sequence
  Description of Artificial Sequence: Synthetic oligonucleotide
  Antisense strand to SEQ ID NO: 2528186
aaagcugaggucaaugucc

SEQ ID NO: 2528188 - RNA, 19 nt, Artificial Sequence
  Description of Artificial Sequence: Synthetic oligonucleotide
  Sense strand starting at position 2543 of SEQ ID NO: 1888335
gcuggcgggcgucuaaaua

SEQ ID NO: 2528189 - RNA, 19 nt, Artificial Sequence
  Description of Artificial Sequence: Synthetic oligonucleotide
  Antisense strand to SEQ ID NO: 2528188
uauuuagacgcccgccagc

SEQ ID NO: 2528190 - RNA, 19 nt, Artificial Sequence
  Description of Artificial Sequence: Synthetic oligonucleotide
  Sense strand starting at position 1138 of SEQ ID NO: 1888335
uuauaugauugcucauaag

SEQ ID NO: 2528191 - RNA, 19 nt, Artificial Sequence
  Description of Artificial Sequence: Synthetic oligonucleotide
  Antisense strand to SEQ ID NO: 2528190
cuuaugagcaaucauauaa

SEQ ID NO: 2528192 - RNA, 19 nt, Artificial Sequence
  Description of Artificial Sequence: Synthetic oligonucleotide
  Sense strand starting at position 1272 of SEQ ID NO: 1888335
aagauucuggguugaucuu

SEQ ID NO: 2528193 - RNA, 19 nt, Artificial Sequence
  Description of Artificial Sequence: Synthetic oligonucleotide
  Antisense strand to SEQ ID NO: 2528192
aagaucaacccagaaucuu

SEQ ID NO: 2528194 - RNA, 19 nt, Artificial Sequence
  Description of Artificial Sequence: Synthetic oligonucleotide
  Sense strand starting at position 3088 of SEQ ID NO: 1888335
gggcuauaggcccaugacu

SEQ ID NO: 2528195 - RNA, 19 nt, Artificial Sequence
  Description of Artificial Sequence: Synthetic oligonucleotide
  Antisense strand to SEQ ID NO: 2528194
agucaugggccuauagccc

SEQ ID NO: 2528196 - RNA, 19 nt, Artificial Sequence
  Description of Artificial Sequence: Synthetic oligonucleotide
  Sense strand starting at position 1349 of SEQ ID NO: 1888335
uguauaaugauuggagguu

SEQ ID NO: 2528197 - RNA, 19 nt, Artificial Sequence
  Description of Artificial Sequence: Synthetic oligonucleotide
  Antisense strand to SEQ ID NO: 2528196
aaccuccaaucauuauaca

SEQ ID NO: 2528198 - RNA, 19 nt, Artificial Sequence
  Description of Artificial Sequence: Synthetic oligonucleotide
  Sense strand starting at position 752 of SEQ ID NO: 1888335
gagguucuagaaugucaug

SEQ ID NO: 2528199 - RNA, 19 nt, Artificial Sequence
  Description of Artificial Sequence: Synthetic oligonucleotide
  Antisense strand to SEQ ID NO: 2528198
caugacauucuagaaccuc

SEQ ID NO: 2528200 - RNA, 19 nt, Artificial Sequence
  Description of Artificial Sequence: Synthetic oligonucleotide
  Sense strand starting at position 2547 of SEQ ID NO: 1888335
gcgggcgucuaaauaaagu

SEQ ID NO: 2528201 - RNA, 19 nt, Artificial Sequence
  Description of Artificial Sequence: Synthetic oligonucleotide
  Antisense strand to SEQ ID NO: 2528200
acuuuauuuagacgcccgc

SEQ ID NO: 2528202 - RNA, 19 nt, Artificial Sequence
  Description of Artificial Sequence: Synthetic oligonucleotide
  Sense strand starting at position 1676 of SEQ ID NO: 1888335
cuuaguagucucugaaaga

SEQ ID NO: 2528203 - RNA, 19 nt, Artificial Sequence
  Description of Artificial Sequence: Synthetic oligonucleotide
  Antisense strand to SEQ ID NO: 2528202
ucuuucagagacuacuaag

SEQ ID NO: 2528204 - RNA, 19 nt, Artificial Sequence
  Description of Artificial Sequence: Synthetic oligonucleotide
  Sense strand starting at position 2421 of SEQ ID NO: 1888335
gcugccgucgauucuguaa

SEQ ID NO: 2528205 - RNA, 19 nt, Artificial Sequence
  Description of Artificial Sequence: Synthetic oligonucleotide
  Antisense strand to SEQ ID NO: 2528204
uuacagaaucgacggcagc

SEQ ID NO: 2528206 - RNA, 19 nt, Artificial Sequence
  Description of Artificial Sequence: Synthetic oligonucleotide
  Sense strand starting at position 2335 of SEQ ID NO: 1888335
cccugcaagugacuuaaga

SEQ ID NO: 2528207 - RNA, 19 nt, Artificial Sequence
  Description of Artificial Sequence: Synthetic oligonucleotide
  Antisense strand to SEQ ID NO: 2528206
ucuuaagucacuugcaggg

SEQ ID NO: 2528208 - RNA, 19 nt, Artificial Sequence
  Description of Artificial Sequence: Synthetic oligonucleotide
  Sense strand starting at position 3878 of SEQ ID NO: 1888335
gcuuucugccaccagacaa

SEQ ID NO: 2528209 - RNA, 19 nt, Artificial Sequence
  Description of Artificial Sequence: Synthetic oligonucleotide
  Antisense strand to SEQ ID NO: 2528208
uugucugguggcagaaagc

SEQ ID NO: 2528210 - RNA, 19 nt, Artificial Sequence
  Description of Artificial Sequence: Synthetic oligonucleotide
  Sense strand starting at position 963 of SEQ ID NO: 1888335
guggaaaugcugcaauccu

SEQ ID NO: 2528211 - RNA, 19 nt, Artificial Sequence
  Description of Artificial Sequence: Synthetic oligonucleotide
  Antisense strand to SEQ ID NO: 2528210
aggauugcagcauuuccac

SEQ ID NO: 2528212 - RNA, 19 nt, Artificial Sequence
  Description of Artificial Sequence: Synthetic oligonucleotide
  Sense strand starting at position 3705 of SEQ ID NO: 1888335
ucaaaugggacucgugagu

SEQ ID NO: 2528213 - RNA, 19 nt, Artificial Sequence
  Description of Artificial Sequence: Synthetic oligonucleotide
  Antisense strand to SEQ ID NO: 2528212
acucacgagucccauuuga

SEQ ID NO: 2528214 - RNA, 19 nt, Artificial Sequence
  Description of Artificial Sequence: Synthetic oligonucleotide
  Sense strand starting at position 1421 of SEQ ID NO: 1888335
guugucuuccauuggagag

SEQ ID NO: 2528215 - RNA, 19 nt, Artificial Sequence
  Description of Artificial Sequence: Synthetic oligonucleotide
  Antisense strand to SEQ ID NO: 2528214
cucuccaauggaagacaac

SEQ ID NO: 2528216 - RNA, 19 nt, Artificial Sequence
  Description of Artificial Sequence: Synthetic oligonucleotide
  Sense strand starting at position 748 of SEQ ID NO: 1888335
gggagagguucuagaaugu

SEQ ID NO: 2528217 - RNA, 19 nt, Artificial Sequence
  Description of Artificial Sequence: Synthetic oligonucleotide
  Antisense strand to SEQ ID NO: 2528216
acauucuagaaccucuccc

SEQ ID NO: 2528218 - RNA, 19 nt, Artificial Sequence
  Description of Artificial Sequence: Synthetic oligonucleotide
  Sense strand starting at position 441 of SEQ ID NO: 1888335
aagucuggcccggagcaau

SEQ ID NO: 2528219 - RNA, 19 nt, Artificial Sequence
  Description of Artificial Sequence: Synthetic oligonucleotide
  Antisense strand to SEQ ID NO: 2528218
auugcuccgggccagacuu

SEQ ID NO: 2528220 - RNA, 19 nt, Artificial Sequence
  Description of Artificial Sequence: Synthetic oligonucleotide
  Sense strand starting at position 3151 of SEQ ID NO: 1888335
gguuuauuauagucuucua

SEQ ID NO: 2528221 - RNA, 19 nt, Artificial Sequence
  Description of Artificial Sequence: Synthetic oligonucleotide
  Antisense strand to SEQ ID NO: 2528220
uagaagacuauaauaaacc

SEQ ID NO: 2528222 - RNA, 19 nt, Artificial Sequence
  Description of Artificial Sequence: Synthetic oligonucleotide
  Sense strand starting at position 3077 of SEQ ID NO: 1888335
gcauuaaacacgggcuaua

SEQ ID NO: 2528223 - RNA, 19 nt, Artificial Sequence
  Description of Artificial Sequence: Synthetic oligonucleotide
  Antisense strand to SEQ ID NO: 2528222
uauagcccguguuuaaugc

SEQ ID NO: 2528224 - RNA, 19 nt, Artificial Sequence
  Description of Artificial Sequence: Synthetic oligonucleotide
  Sense strand starting at position 1292 of SEQ ID NO: 1888335
ugcgauaaccucuauggcu

SEQ ID NO: 2528225 - RNA, 19 nt, Artificial Sequence
  Description of Artificial Sequence: Synthetic oligonucleotide
  Antisense strand to SEQ ID NO: 2528224
agccauagagguuaucgca

SEQ ID NO: 2528226 - RNA, 19 nt, Artificial Sequence
  Description of Artificial Sequence: Synthetic oligonucleotide
  Sense strand starting at position 3608 of SEQ ID NO: 1888335
acaucucuucuugguguga

SEQ ID NO: 2528227 - RNA, 19 nt, Artificial Sequence
  Description of Artificial Sequence: Synthetic oligonucleotide
  Antisense strand to SEQ ID NO: 2528226
ucacaccaagaagagaugu

SEQ ID NO: 2528228 - RNA, 19 nt, Artificial Sequence
  Description of Artificial Sequence: Synthetic oligonucleotide
  Sense strand starting at position 386 of SEQ ID NO: 1888335
gauuacagugccuguggau

SEQ ID NO: 2528229 - RNA, 19 nt, Artificial Sequence
  Description of Artificial Sequence: Synthetic oligonucleotide
  Antisense strand to SEQ ID NO: 2528228
auccacaggcacuguaauc

SEQ ID NO: 2528230 - RNA, 19 nt, Artificial Sequence
  Description of Artificial Sequence: Synthetic oligonucleotide
  Sense strand starting at position 1672 of SEQ ID NO: 1888335
cuuucuuaguagucucuga

SEQ ID NO: 2528231 - RNA, 19 nt, Artificial Sequence
  Description of Artificial Sequence: Synthetic oligonucleotide
  Antisense strand to SEQ ID NO: 2528230
ucagagacuacuaagaaag

SEQ ID NO: 2528232 - RNA, 19 nt, Artificial Sequence
  Description of Artificial Sequence: Synthetic oligonucleotide
  Sense strand starting at position 2996 of SEQ ID NO: 1888335
cuauguagcuaauugugau

SEQ ID NO: 2528233 - RNA, 19 nt, Artificial Sequence
  Description of Artificial Sequence: Synthetic oligonucleotide
  Antisense strand to SEQ ID NO: 2528232
aucacaauuagcuacauag

SEQ ID NO: 2528234 - RNA, 19 nt, Artificial Sequence
  Description of Artificial Sequence: Synthetic oligonucleotide
  Sense strand starting at position 3835 of SEQ ID NO: 1888335
ggaaauauaucugaaaucc

SEQ ID NO: 2528235 - RNA, 19 nt, Artificial Sequence
  Description of Artificial Sequence: Synthetic oligonucleotide
  Antisense strand to SEQ ID NO: 2528234
ggauuucagauauauuucc

SEQ ID NO: 2528236 - RNA, 19 nt, Artificial Sequence
  Description of Artificial Sequence: Synthetic oligonucleotide
  Sense strand starting at position 1707 of SEQ ID NO: 1888335
gcguaaagaugacuugguu

SEQ ID NO: 2528237 - RNA, 19 nt, Artificial Sequence
  Description of Artificial Sequence: Synthetic oligonucleotide
  Antisense strand to SEQ ID NO: 2528236
aaccaagucaucuuuacgc

SEQ ID NO: 2528238 - RNA, 19 nt, Artificial Sequence
  Description of Artificial Sequence: Synthetic oligonucleotide
  Sense strand starting at position 2988 of SEQ ID NO: 1888335
ucagguuucuauguagcua

SEQ ID NO: 2528239 - RNA, 19 nt, Artificial Sequence
  Description of Artificial Sequence: Synthetic oligonucleotide
  Antisense strand to SEQ ID NO: 2528238
uagcuacauagaaaccuga

SEQ ID NO: 2528240 - RNA, 19 nt, Artificial Sequence
  Description of Artificial Sequence: Synthetic oligonucleotide
  Sense strand starting at position 1441 of SEQ ID NO: 1888335
guacgugugccacagauug

SEQ ID NO: 2528241 - RNA, 19 nt, Artificial Sequence
  Description of Artificial Sequence: Synthetic oligonucleotide
  Antisense strand to SEQ ID NO: 2528240
caaucuguggcacacguac

SEQ ID NO: 2528242 - RNA, 19 nt, Artificial Sequence
  Description of Artificial Sequence: Synthetic oligonucleotide
  Sense strand starting at position 3145 of SEQ ID NO: 1888335
gguggugguuuauuauagu

SEQ ID NO: 2528243 - RNA, 19 nt, Artificial Sequence
  Description of Artificial Sequence: Synthetic oligonucleotide
  Antisense strand to SEQ ID NO: 2528242
acuauaauaaaccaccacc

SEQ ID NO: 2528244 - RNA, 19 nt, Artificial Sequence
  Description of Artificial Sequence: Synthetic oligonucleotide
  Sense strand starting at position 3644 of SEQ ID NO: 1888335
cuggcugucucccugacau

SEQ ID NO: 2528245 - RNA, 19 nt, Artificial Sequence
  Description of Artificial Sequence: Synthetic oligonucleotide
  Antisense strand to SEQ ID NO: 2528244
augucagggagacagccag

SEQ ID NO: 2528246 - RNA, 19 nt, Artificial Sequence
  Description of Artificial Sequence: Synthetic oligonucleotide
  Sense strand starting at position 1886 of SEQ ID NO: 1888335
gucauuccagcaugcagau

SEQ ID NO: 2528247 - RNA, 19 nt, Artificial Sequence
  Description of Artificial Sequence: Synthetic oligonucleotide
  Antisense strand to SEQ ID NO: 2528246
aucugcaugcuggaaugac

SEQ ID NO: 2528248 - RNA, 19 nt, Artificial Sequence
  Description of Artificial Sequence: Synthetic oligonucleotide
  Sense strand starting at position 2984 of SEQ ID NO: 1888335
ucugucagguuucuaugua

SEQ ID NO: 2528249 - RNA, 19 nt, Artificial Sequence
  Description of Artificial Sequence: Synthetic oligonucleotide
  Antisense strand to SEQ ID NO: 2528248
uacauagaaaccugacaga

SEQ ID NO: 2528250 - RNA, 19 nt, Artificial Sequence
  Description of Artificial Sequence: Synthetic oligonucleotide
  Sense strand starting at position 1413 of SEQ ID NO: 1888335
ggucuugaguugucuucca

SEQ ID NO: 2528251 - RNA, 19 nt, Artificial Sequence
  Description of Artificial Sequence: Synthetic oligonucleotide
  Antisense strand to SEQ ID NO: 2528250
uggaagacaacucaagacc

SEQ ID NO: 2528252 - RNA, 19 nt, Artificial Sequence
  Description of Artificial Sequence: Synthetic oligonucleotide
  Sense strand starting at position 1248 of SEQ ID NO: 1888335
cucagugcaucugucauau

SEQ ID NO: 2528253 - RNA, 19 nt, Artificial Sequence
  Description of Artificial Sequence: Synthetic oligonucleotide
  Antisense strand to SEQ ID NO: 2528252
auaugacagaugcacugag

SEQ ID NO: 2528254 - RNA, 19 nt, Artificial Sequence
  Description of Artificial Sequence: Synthetic oligonucleotide
  Sense strand starting at position 1565 of SEQ ID NO: 1888335
guguucuagcgucagacau

SEQ ID NO: 2528255 - RNA, 19 nt, Artificial Sequence
  Description of Artificial Sequence: Synthetic oligonucleotide
  Antisense strand to SEQ ID NO: 2528254
augucugacgcuagaacac

SEQ ID NO: 2528256 - RNA, 19 nt, Artificial Sequence
  Description of Artificial Sequence: Synthetic oligonucleotide
  Sense strand starting at position 1338 of SEQ ID NO: 1888336
cagaguuuaggguaguaau

SEQ ID NO: 2528257 - RNA, 19 nt, Artificial Sequence
  Description of Artificial Sequence: Synthetic oligonucleotide
  Antisense strand to SEQ ID NO: 2528256
auuacuacccuaaacucug

SEQ ID NO: 2528258 - RNA, 19 nt, Artificial Sequence
  Description of Artificial Sequence: Synthetic oligonucleotide
  Sense strand starting at position 469 of SEQ ID NO: 1888336
ccaaguagccuggaccaua

SEQ ID NO: 2528259 - RNA, 19 nt, Artificial Sequence
  Description of Artificial Sequence: Synthetic oligonucleotide
  Antisense strand to SEQ ID NO: 2528258
uaugguccaggcuacuugg

SEQ ID NO: 2528260 - RNA, 19 nt, Artificial Sequence
  Description of Artificial Sequence: Synthetic oligonucleotide
  Sense strand starting at position 1548 of SEQ ID NO: 1888336
uguucaguggccucgcaau

SEQ ID NO: 2528261 - RNA, 19 nt, Artificial Sequence
  Description of Artificial Sequence: Synthetic oligonucleotide
  Antisense strand to SEQ ID NO: 2528260
auugcgaggccacugaaca

SEQ ID NO: 2528262 - RNA, 19 nt, Artificial Sequence
  Description of Artificial Sequence: Synthetic oligonucleotide
  Sense strand starting at position 252 of SEQ ID NO: 1888336
gauuccugauggguuugaa

SEQ ID NO: 2528263 - RNA, 19 nt, Artificial Sequence
  Description of Artificial Sequence: Synthetic oligonucleotide
  Antisense strand to SEQ ID NO: 2528262
uucaaacccaucaggaauc

SEQ ID NO: 2528264 - RNA, 19 nt, Artificial Sequence
  Description of Artificial Sequence: Synthetic oligonucleotide
  Sense strand starting at position 115 of SEQ ID NO: 1888336
aggcuaagucuguaaugag

SEQ ID NO: 2528265 - RNA, 19 nt, Artificial Sequence
  Description of Artificial Sequence: Synthetic oligonucleotide
  Antisense strand to SEQ ID NO: 2528264
cucauuacagacuuagccu

SEQ ID NO: 2528266 - RNA, 19 nt, Artificial Sequence
  Description of Artificial Sequence: Synthetic oligonucleotide
  Sense strand starting at position 3467 of SEQ ID NO: 1888336
acagaaaugagcugcuaga

SEQ ID NO: 2528267 - RNA, 19 nt, Artificial Sequence
  Description of Artificial Sequence: Synthetic oligonucleotide
  Antisense strand to SEQ ID NO: 2528266
ucuagcagcucauuucugu

SEQ ID NO: 2528268 - RNA, 19 nt, Artificial Sequence
  Description of Artificial Sequence: Synthetic oligonucleotide
  Sense strand starting at position 255 of SEQ ID NO: 1888336
uccugauggguuugaaauu

SEQ ID NO: 2528269 - RNA, 19 nt, Artificial Sequence
  Description of Artificial Sequence: Synthetic oligonucleotide
  Antisense strand to SEQ ID NO: 2528268
aauuucaaacccaucagga

SEQ ID NO: 2528270 - RNA, 19 nt, Artificial Sequence
  Description of Artificial Sequence: Synthetic oligonucleotide
  Sense strand starting at position 1502 of SEQ ID NO: 1888336
uccuaaugucccuaguuaa

SEQ ID NO: 2528271 - RNA, 19 nt, Artificial Sequence
  Description of Artificial Sequence: Synthetic oligonucleotide
  Antisense strand to SEQ ID NO: 2528270
uuaacuagggacauuagga

SEQ ID NO: 2528272 - RNA, 19 nt, Artificial Sequence
  Description of Artificial Sequence: Synthetic oligonucleotide
  Sense strand starting at position 38 of SEQ ID NO: 1888336
agggucauugcuuacuuua

SEQ ID NO: 2528273 - RNA, 19 nt, Artificial Sequence
  Description of Artificial Sequence: Synthetic oligonucleotide
  Antisense strand to SEQ ID NO: 2528272
uaaaguaagcaaugacccu

SEQ ID NO: 2528274 - RNA, 19 nt, Artificial Sequence
  Description of Artificial Sequence: Synthetic oligonucleotide
  Sense strand starting at position 950 of SEQ ID NO: 1888336
uuguauuucucauggauuu

SEQ ID NO: 2528275 - RNA, 19 nt, Artificial Sequence
  Description of Artificial Sequence: Synthetic oligonucleotide
  Antisense strand to SEQ ID NO: 2528274
aaauccaugagaaauacaa

SEQ ID NO: 2528276 - RNA, 19 nt, Artificial Sequence
  Description of Artificial Sequence: Synthetic oligonucleotide
  Sense strand starting at position 503 of SEQ ID NO: 1888336
ccuggcgaauucuuagaaa

SEQ ID NO: 2528277 - RNA, 19 nt, Artificial Sequence
  Description of Artificial Sequence: Synthetic oligonucleotide
  Antisense strand to SEQ ID NO: 2528276
uuucuaagaauucgccagg

SEQ ID NO: 2528278 - RNA, 19 nt, Artificial Sequence
  Description of Artificial Sequence: Synthetic oligonucleotide
  Sense strand starting at position 716 of SEQ ID NO: 1888336
cuugaauuguuagcauaua

SEQ ID NO: 2528279 - RNA, 19 nt, Artificial Sequence
  Description of Artificial Sequence: Synthetic oligonucleotide
  Antisense strand to SEQ ID NO: 2528278
uauaugcuaacaauucaag

SEQ ID NO: 2528280 - RNA, 19 nt, Artificial Sequence
  Description of Artificial Sequence: Synthetic oligonucleotide
  Sense strand starting at position 2701 of SEQ ID NO: 1888336
gugugguucguggugugua

SEQ ID NO: 2528281 - RNA, 19 nt, Artificial Sequence
  Description of Artificial Sequence: Synthetic oligonucleotide
  Antisense strand to SEQ ID NO: 2528280
uacacaccacgaaccacac

SEQ ID NO: 2528282 - RNA, 19 nt, Artificial Sequence
  Description of Artificial Sequence: Synthetic oligonucleotide
  Sense strand starting at position 114 of SEQ ID NO: 1888336
uaggcuaagucuguaauga

SEQ ID NO: 2528283 - RNA, 19 nt, Artificial Sequence
  Description of Artificial Sequence: Synthetic oligonucleotide
  Antisense strand to SEQ ID NO: 2528282
ucauuacagacuuagccua

SEQ ID NO: 2528284 - RNA, 19 nt, Artificial Sequence
  Description of Artificial Sequence: Synthetic oligonucleotide
  Sense strand starting at position 1369 of SEQ ID NO: 1888336
uugcucugaagaugucuga

SEQ ID NO: 2528285 - RNA, 19 nt, Artificial Sequence
  Description of Artificial Sequence: Synthetic oligonucleotide
  Antisense strand to SEQ ID NO: 2528284
ucagacaucuucagagcaa

SEQ ID NO: 2528286 - RNA, 19 nt, Artificial Sequence
  Description of Artificial Sequence: Synthetic oligonucleotide
  Sense strand starting at position 1363 of SEQ ID NO: 1888336
gaguccuugcucugaagau

SEQ ID NO: 2528287 - RNA, 19 nt, Artificial Sequence
  Description of Artificial Sequence: Synthetic oligonucleotide
  Antisense strand to SEQ ID NO: 2528286
aucuucagagcaaggacuc

SEQ ID NO: 2528288 - RNA, 19 nt, Artificial Sequence
  Description of Artificial Sequence: Synthetic oligonucleotide
  Sense strand starting at position 713 of SEQ ID NO: 1888336
acucuugaauuguuagcau

SEQ ID NO: 2528289 - RNA, 19 nt, Artificial Sequence
  Description of Artificial Sequence: Synthetic oligonucleotide
  Antisense strand to SEQ ID NO: 2528288
augcuaacaauucaagagu

SEQ ID NO: 2528290 - RNA, 19 nt, Artificial Sequence
  Description of Artificial Sequence: Synthetic oligonucleotide
  Sense strand starting at position 3513 of SEQ ID NO: 1888336
gcguuucaccaugagugaa

SEQ ID NO: 2528291 - RNA, 19 nt, Artificial Sequence
  Description of Artificial Sequence: Synthetic oligonucleotide
  Antisense strand to SEQ ID NO: 2528290
uucacucauggugaaacgc

SEQ ID NO: 2528292 - RNA, 19 nt, Artificial Sequence
  Description of Artificial Sequence: Synthetic oligonucleotide
  Sense strand starting at position 40 of SEQ ID NO: 1888336
ggucauugcuuacuuuaag

SEQ ID NO: 2528293 - RNA, 19 nt, Artificial Sequence
  Description of Artificial Sequence: Synthetic oligonucleotide
  Antisense strand to SEQ ID NO: 2528292
cuuaaaguaagcaaugacc

SEQ ID NO: 2528294 - RNA, 19 nt, Artificial Sequence
  Description of Artificial Sequence: Synthetic oligonucleotide
  Sense strand starting at position 196 of SEQ ID NO: 1888336
aacgcaagaccuuguugau

SEQ ID NO: 2528295 - RNA, 19 nt, Artificial Sequence
  Description of Artificial Sequence: Synthetic oligonucleotide
  Antisense strand to SEQ ID NO: 2528294
aucaacaaggucuugcguu

SEQ ID NO: 2528296 - RNA, 19 nt, Artificial Sequence
  Description of Artificial Sequence: Synthetic oligonucleotide
  Sense strand starting at position 1346 of SEQ ID NO: 1888336
aggguaguaaugugucuga

SEQ ID NO: 2528297 - RNA, 19 nt, Artificial Sequence
  Description of Artificial Sequence: Synthetic oligonucleotide
  Antisense strand to SEQ ID NO: 2528296
ucagacacauuacuacccu

SEQ ID NO: 2528298 - RNA, 19 nt, Artificial Sequence
  Description of Artificial Sequence: Synthetic oligonucleotide
  Sense strand starting at position 37 of SEQ ID NO: 1888336
gagggucauugcuuacuuu

SEQ ID NO: 2528299 - RNA, 19 nt, Artificial Sequence
  Description of Artificial Sequence: Synthetic oligonucleotide
  Antisense strand to SEQ ID NO: 2528298
aaaguaagcaaugacccuc

SEQ ID NO: 2528300 - RNA, 19 nt, Artificial Sequence
  Description of Artificial Sequence: Synthetic oligonucleotide
  Sense strand starting at position 1361 of SEQ ID NO: 1888336
cugaguccuugcucugaag

SEQ ID NO: 2528301 - RNA, 19 nt, Artificial Sequence
  Description of Artificial Sequence: Synthetic oligonucleotide
  Antisense strand to SEQ ID NO: 2528300
cuucagagcaaggacucag

SEQ ID NO: 2528302 - RNA, 19 nt, Artificial Sequence
  Description of Artificial Sequence: Synthetic oligonucleotide
  Sense strand starting at position 1501 of SEQ ID NO: 1888336
cuccuaaugucccuaguua

SEQ ID NO: 2528303 - RNA, 19 nt, Artificial Sequence
  Description of Artificial Sequence: Synthetic oligonucleotide
  Antisense strand to SEQ ID NO: 2528302
uaacuagggacauuaggag

SEQ ID NO: 2528304 - RNA, 19 nt, Artificial Sequence
  Description of Artificial Sequence: Synthetic oligonucleotide
  Sense strand starting at position 2650 of SEQ ID NO: 1888336
gcgauuccaucuccagauc

SEQ ID NO: 2528305 - RNA, 19 nt, Artificial Sequence
  Description of Artificial Sequence: Synthetic oligonucleotide
  Antisense strand to SEQ ID NO: 2528304
gaucuggagauggaaucgc

SEQ ID NO: 2528306 - RNA, 19 nt, Artificial Sequence
  Description of Artificial Sequence: Synthetic oligonucleotide
  Sense strand starting at position 2130 of SEQ ID NO: 1888336
gguuucuagacgugaccca

SEQ ID NO: 2528307 - RNA, 19 nt, Artificial Sequence
  Description of Artificial Sequence: Synthetic oligonucleotide
  Antisense strand to SEQ ID NO: 2528306
ugggucacgucuagaaacc

SEQ ID NO: 2528308 - RNA, 19 nt, Artificial Sequence
  Description of Artificial Sequence: Synthetic oligonucleotide
  Sense strand starting at position 2857 of SEQ ID NO: 1888336
ggugcacauguguaaugua

SEQ ID NO: 2528309 - RNA, 19 nt, Artificial Sequence
  Description of Artificial Sequence: Synthetic oligonucleotide
  Antisense strand to SEQ ID NO: 2528308
uacauuacacaugugcacc

SEQ ID NO: 2528310 - RNA, 19 nt, Artificial Sequence
  Description of Artificial Sequence: Synthetic oligonucleotide
  Sense strand starting at position 1997 of SEQ ID NO: 1888336
ugacaucagagcugcugua

SEQ ID NO: 2528311 - RNA, 19 nt, Artificial Sequence
  Description of Artificial Sequence: Synthetic oligonucleotide
  Antisense strand to SEQ ID NO: 2528310
uacagcagcucugauguca

SEQ ID NO: 2528312 - RNA, 19 nt, Artificial Sequence
  Description of Artificial Sequence: Synthetic oligonucleotide
  Sense strand starting at position 407 of SEQ ID NO: 1888336
guaagcaugguucaccgua

SEQ ID NO: 2528313 - RNA, 19 nt, Artificial Sequence
  Description of Artificial Sequence: Synthetic oligonucleotide
  Antisense strand to SEQ ID NO: 2528312
uacggugaaccaugcuuac

SEQ ID NO: 2528314 - RNA, 19 nt, Artificial Sequence
  Description of Artificial Sequence: Synthetic oligonucleotide
  Sense strand starting at position 858 of SEQ ID NO: 1888336
gcguuaauauucuuaccac

SEQ ID NO: 2528315 - RNA, 19 nt, Artificial Sequence
  Description of Artificial Sequence: Synthetic oligonucleotide
  Antisense strand to SEQ ID NO: 2528314
gugguaagaauauuaacgc

SEQ ID NO: 2528316 - RNA, 19 nt, Artificial Sequence
  Description of Artificial Sequence: Synthetic oligonucleotide
  Sense strand starting at position 3512 of SEQ ID NO: 1888336
agcguuucaccaugaguga

SEQ ID NO: 2528317 - RNA, 19 nt, Artificial Sequence
  Description of Artificial Sequence: Synthetic oligonucleotide
  Antisense strand to SEQ ID NO: 2528316
ucacucauggugaaacgcu

SEQ ID NO: 2528318 - RNA, 19 nt, Artificial Sequence
  Description of Artificial Sequence: Synthetic oligonucleotide
  Sense strand starting at position 41 of SEQ ID NO: 1888336
gucauugcuuacuuuaagu

SEQ ID NO: 2528319 - RNA, 19 nt, Artificial Sequence
  Description of Artificial Sequence: Synthetic oligonucleotide
  Antisense strand to SEQ ID NO: 2528318
acuuaaaguaagcaaugac

SEQ ID NO: 2528320 - RNA, 19 nt, Artificial Sequence
  Description of Artificial Sequence: Synthetic oligonucleotide
  Sense strand starting at position 2834 of SEQ ID NO: 1888336
gagucuguuguauguacau

SEQ ID NO: 2528321 - RNA, 19 nt, Artificial Sequence
  Description of Artificial Sequence: Synthetic oligonucleotide
  Antisense strand to SEQ ID NO: 2528320
auguacauacaacagacuc

SEQ ID NO: 2528322 - RNA, 19 nt, Artificial Sequence
  Description of Artificial Sequence: Synthetic oligonucleotide
  Sense strand starting at position 1456 of SEQ ID NO: 1888336
ucucucugagccuguagua

SEQ ID NO: 2528323 - RNA, 19 nt, Artificial Sequence
  Description of Artificial Sequence: Synthetic oligonucleotide
  Antisense strand to SEQ ID NO: 2528322
uacuacaggcucagagaga

SEQ ID NO: 2528324 - RNA, 19 nt, Artificial Sequence
  Description of Artificial Sequence: Synthetic oligonucleotide
  Sense strand starting at position 33 of SEQ ID NO: 1888336
cagcgagggucauugcuua

SEQ ID NO: 2528325 - RNA, 19 nt, Artificial Sequence
  Description of Artificial Sequence: Synthetic oligonucleotide
  Antisense strand to SEQ ID NO: 2528324
uaagcaaugacccucgcug

SEQ ID NO: 2528326 - RNA, 19 nt, Artificial Sequence
  Description of Artificial Sequence: Synthetic oligonucleotide
  Sense strand starting at position 1349 of SEQ ID NO: 1888336
guaguaaugugucugaguc

SEQ ID NO: 2528327 - RNA, 19 nt, Artificial Sequence
  Description of Artificial Sequence: Synthetic oligonucleotide
  Antisense strand to SEQ ID NO: 2528326
gacucagacacauuacuac

SEQ ID NO: 2528328 - RNA, 19 nt, Artificial Sequence
  Description of Artificial Sequence: Synthetic oligonucleotide
  Sense strand starting at position 936 of SEQ ID NO: 1888336
uguaucaucugcucuugua

SEQ ID NO: 2528329 - RNA, 19 nt, Artificial Sequence
  Description of Artificial Sequence: Synthetic oligonucleotide
  Antisense strand to SEQ ID NO: 2528328
uacaagagcagaugauaca

SEQ ID NO: 2528330 - RNA, 19 nt, Artificial Sequence
  Description of Artificial Sequence: Synthetic oligonucleotide
  Sense strand starting at position 199 of SEQ ID NO: 1888336
gcaagaccuuguugauuua

SEQ ID NO: 2528331 - RNA, 19 nt, Artificial Sequence
  Description of Artificial Sequence: Synthetic oligonucleotide
  Antisense strand to SEQ ID NO: 2528330
uaaaucaacaaggucuugc

SEQ ID NO: 2528332 - RNA, 19 nt, Artificial Sequence
  Description of Artificial Sequence: Synthetic oligonucleotide
  Sense strand starting at position 706 of SEQ ID NO: 1888336
uaaggagacucuugaauug

SEQ ID NO: 2528333 - RNA, 19 nt, Artificial Sequence
  Description of Artificial Sequence: Synthetic oligonucleotide
  Antisense strand to SEQ ID NO: 2528332
caauucaagagucuccuua

SEQ ID NO: 2528334 - RNA, 19 nt, Artificial Sequence
  Description of Artificial Sequence: Synthetic oligonucleotide
  Sense strand starting at position 256 of SEQ ID NO: 1888336
ccugauggguuugaaauua

SEQ ID NO: 2528335 - RNA, 19 nt, Artificial Sequence
  Description of Artificial Sequence: Synthetic oligonucleotide
  Antisense strand to SEQ ID NO: 2528334
uaauuucaaacccaucagg

SEQ ID NO: 2528336 - RNA, 19 nt, Artificial Sequence
  Description of Artificial Sequence: Synthetic oligonucleotide
  Sense strand starting at position 2238 of SEQ ID NO: 1888337
ggugcauuugucucgcguu

SEQ ID NO: 2528337 - RNA, 19 nt, Artificial Sequence
  Description of Artificial Sequence: Synthetic oligonucleotide
  Antisense strand to SEQ ID NO: 2528336
aacgcgagacaaaugcacc

SEQ ID NO: 2528338 - RNA, 19 nt, Artificial Sequence
  Description of Artificial Sequence: Synthetic oligonucleotide
  Sense strand starting at position 196 of SEQ ID NO: 1888337
cugguuugacuuuauauaa

SEQ ID NO: 2528339 - RNA, 19 nt, Artificial Sequence
  Description of Artificial Sequence: Synthetic oligonucleotide
  Antisense strand to SEQ ID NO: 2528338
uuauauaaagucaaaccag

SEQ ID NO: 2528340 - RNA, 19 nt, Artificial Sequence
  Description of Artificial Sequence: Synthetic oligonucleotide
  Sense strand starting at position 3101 of SEQ ID NO: 1888337
auccuaugugaguaacuga

SEQ ID NO: 2528341 - RNA, 19 nt, Artificial Sequence
  Description of Artificial Sequence: Synthetic oligonucleotide
  Antisense strand to SEQ ID NO: 2528340
ucaguuacucacauaggau

SEQ ID NO: 2528342 - RNA, 19 nt, Artificial Sequence
  Description of Artificial Sequence: Synthetic oligonucleotide
  Sense strand starting at position 3592 of SEQ ID NO: 1888337
gauccagagcuaggagauu

SEQ ID NO: 2528343 - RNA, 19 nt, Artificial Sequence
  Description of Artificial Sequence: Synthetic oligonucleotide
  Antisense strand to SEQ ID NO: 2528342
aaucuccuagcucuggauc

SEQ ID NO: 2528344 - RNA, 19 nt, Artificial Sequence
  Description of Artificial Sequence: Synthetic oligonucleotide
  Sense strand starting at position 2572 of SEQ ID NO: 1888337
aggccauucccaggagaag

SEQ ID NO: 2528345 - RNA, 19 nt, Artificial Sequence
  Description of Artificial Sequence: Synthetic oligonucleotide
  Antisense strand to SEQ ID NO: 2528344
cuucuccugggaauggccu

SEQ ID NO: 2528346 - RNA, 19 nt, Artificial Sequence
  Description of Artificial Sequence: Synthetic oligonucleotide
  Sense strand starting at position 3339 of SEQ ID NO: 1888337
agugauggagucugaauaa

SEQ ID NO: 2528347 - RNA, 19 nt, Artificial Sequence
  Description of Artificial Sequence: Synthetic oligonucleotide
  Antisense strand to SEQ ID NO: 2528346
uuauucagacuccaucacu

SEQ ID NO: 2528348 - RNA, 19 nt, Artificial Sequence
  Description of Artificial Sequence: Synthetic oligonucleotide
  Sense strand starting at position 3269 of SEQ ID NO: 1888337
cugauaccacaugguaaau

SEQ ID NO: 2528349 - RNA, 19 nt, Artificial Sequence
  Description of Artificial Sequence: Synthetic oligonucleotide
  Antisense strand to SEQ ID NO: 2528348
auuuaccaugugguaucag

SEQ ID NO: 2528350 - RNA, 19 nt, Artificial Sequence
  Description of Artificial Sequence: Synthetic oligonucleotide
  Sense strand starting at position 817 of SEQ ID NO: 1888337
agacuucucuaagugaaug

SEQ ID NO: 2528351 - RNA, 19 nt, Artificial Sequence
  Description of Artificial Sequence: Synthetic oligonucleotide
  Antisense strand to SEQ ID NO: 2528350
cauucacuuagagaagucu

SEQ ID NO: 2528352 - RNA, 19 nt, Artificial Sequence
  Description of Artificial Sequence: Synthetic oligonucleotide
  Sense strand starting at position 3391 of SEQ ID NO: 1888337
gaggaaauguuaucauucc

SEQ ID NO: 2528353 - RNA, 19 nt, Artificial Sequence
  Description of Artificial Sequence: Synthetic oligonucleotide
  Antisense strand to SEQ ID NO: 2528352
ggaaugauaacauuuccuc

SEQ ID NO: 2528354 - RNA, 19 nt, Artificial Sequence
  Description of Artificial Sequence: Synthetic oligonucleotide
  Sense strand starting at position 3844 of SEQ ID NO: 1888337
gaucuaaguggcuauauac

SEQ ID NO: 2528355 - RNA, 19 nt, Artificial Sequence
  Description of Artificial Sequence: Synthetic oligonucleotide
  Antisense strand to SEQ ID NO: 2528354
guauauagccacuuagauc

SEQ ID NO: 2528356 - RNA, 19 nt, Artificial Sequence
  Description of Artificial Sequence: Synthetic oligonucleotide
  Sense strand starting at position 3453 of SEQ ID NO: 1888337
uuguccaagguccaugaua

SEQ ID NO: 2528357 - RNA, 19 nt, Artificial Sequence
  Description of Artificial Sequence: Synthetic oligonucleotide
  Antisense strand to SEQ ID NO: 2528356
uaucauggaccuuggacaa

SEQ ID NO: 2528358 - RNA, 19 nt, Artificial Sequence
  Description of Artificial Sequence: Synthetic oligonucleotide
  Sense strand starting at position 812 of SEQ ID NO: 1888337
agaccagacuucucuaagu

SEQ ID NO: 2528359 - RNA, 19 nt, Artificial Sequence
  Description of Artificial Sequence: Synthetic oligonucleotide
  Antisense strand to SEQ ID NO: 2528358
acuuagagaagucuggucu

SEQ ID NO: 2528360 - RNA, 19 nt, Artificial Sequence
  Description of Artificial Sequence: Synthetic oligonucleotide
  Sense strand starting at position 3744 of SEQ ID NO: 1888337
cugucuagaccucauccua

SEQ ID NO: 2528361 - RNA, 19 nt, Artificial Sequence
  Description of Artificial Sequence: Synthetic oligonucleotide
  Antisense strand to SEQ ID NO: 2528360
uaggaugaggucuagacag

SEQ ID NO: 2528362 - RNA, 19 nt, Artificial Sequence
  Description of Artificial Sequence: Synthetic oligonucleotide
  Sense strand starting at position 2447 of SEQ ID NO: 1888337
cucuguugcgugcuuuaaa

SEQ ID NO: 2528363 - RNA, 19 nt, Artificial Sequence
  Description of Artificial Sequence: Synthetic oligonucleotide
  Antisense strand to SEQ ID NO: 2528362
uuuaaagcacgcaacagag

SEQ ID NO: 2528364 - RNA, 19 nt, Artificial Sequence
  Description of Artificial Sequence: Synthetic oligonucleotide
  Sense strand starting at position 2297 of SEQ ID NO: 1888337
caucuaauggugugaaaua

SEQ ID NO: 2528365 - RNA, 19 nt, Artificial Sequence
  Description of Artificial Sequence: Synthetic oligonucleotide
  Antisense strand to SEQ ID NO: 2528364
uauuucacaccauuagaug

SEQ ID NO: 2528366 - RNA, 19 nt, Artificial Sequence
  Description of Artificial Sequence: Synthetic oligonucleotide
  Sense strand starting at position 3830 of SEQ ID NO: 1888337
uaugguagccuauagaucu

SEQ ID NO: 2528367 - RNA, 19 nt, Artificial Sequence
  Description of Artificial Sequence: Synthetic oligonucleotide
  Antisense strand to SEQ ID NO: 2528366
agaucuauaggcuaccaua

SEQ ID NO: 2528368 - RNA, 19 nt, Artificial Sequence
  Description of Artificial Sequence: Synthetic oligonucleotide
  Sense strand starting at position 2798 of SEQ ID NO: 1888337
cguggugacagugaugaaa

SEQ ID NO: 2528369 - RNA, 19 nt, Artificial Sequence
  Description of Artificial Sequence: Synthetic oligonucleotide
  Antisense strand to SEQ ID NO: 2528368
uuucaucacugucaccacg

SEQ ID NO: 2528370 - RNA, 19 nt, Artificial Sequence
  Description of Artificial Sequence: Synthetic oligonucleotide
  Sense strand starting at position 213 of SEQ ID NO: 1888337
aauauuggucaguacaugu

SEQ ID NO: 2528371 - RNA, 19 nt, Artificial Sequence
  Description of Artificial Sequence: Synthetic oligonucleotide
  Antisense strand to SEQ ID NO: 2528370
acauguacugaccaauauu

SEQ ID NO: 2528372 - RNA, 19 nt, Artificial Sequence
  Description of Artificial Sequence: Synthetic oligonucleotide
  Sense strand starting at position 3455 of SEQ ID NO: 1888337
guccaagguccaugauaag

SEQ ID NO: 2528373 - RNA, 19 nt, Artificial Sequence
  Description of Artificial Sequence: Synthetic oligonucleotide
  Antisense strand to SEQ ID NO: 2528372
cuuaucauggaccuuggac

SEQ ID NO: 2528374 - RNA, 19 nt, Artificial Sequence
  Description of Artificial Sequence: Synthetic oligonucleotide
  Sense strand starting at position 2669 of SEQ ID NO: 1888337
gaugaaguucuguacagca

SEQ ID NO: 2528375 - RNA, 19 nt, Artificial Sequence
  Description of Artificial Sequence: Synthetic oligonucleotide
  Antisense strand to SEQ ID NO: 2528374
ugcuguacagaacuucauc

SEQ ID NO: 2528376 - RNA, 19 nt, Artificial Sequence
  Description of Artificial Sequence: Synthetic oligonucleotide
  Sense strand starting at position 2671 of SEQ ID NO: 1888337
ugaaguucuguacagcaga

SEQ ID NO: 2528377 - RNA, 19 nt, Artificial Sequence
  Description of Artificial Sequence: Synthetic oligonucleotide
  Antisense strand to SEQ ID NO: 2528376
ucugcuguacagaacuuca

SEQ ID NO: 2528378 - RNA, 19 nt, Artificial Sequence
  Description of Artificial Sequence: Synthetic oligonucleotide
  Sense strand starting at position 209 of SEQ ID NO: 1888337
auauaauauuggucaguac

SEQ ID NO: 2528379 - RNA, 19 nt, Artificial Sequence
  Description of Artificial Sequence: Synthetic oligonucleotide
  Antisense strand to SEQ ID NO: 2528378
guacugaccaauauuauau

SEQ ID NO: 2528380 - RNA, 19 nt, Artificial Sequence
  Description of Artificial Sequence: Synthetic oligonucleotide
  Sense strand starting at position 3843 of SEQ ID NO: 1888337
agaucuaaguggcuauaua

SEQ ID NO: 2528381 - RNA, 19 nt, Artificial Sequence
  Description of Artificial Sequence: Synthetic oligonucleotide
  Antisense strand to SEQ ID NO: 2528380
uauauagccacuuagaucu

SEQ ID NO: 2528382 - RNA, 19 nt, Artificial Sequence
  Description of Artificial Sequence: Synthetic oligonucleotide
  Sense strand starting at position 390 of SEQ ID NO: 1888337
acuuuaccagaacgugaau

SEQ ID NO: 2528383 - RNA, 19 nt, Artificial Sequence
  Description of Artificial Sequence: Synthetic oligonucleotide
  Antisense strand to SEQ ID NO: 2528382
auucacguucugguaaagu

SEQ ID NO: 2528384 - RNA, 19 nt, Artificial Sequence
  Description of Artificial Sequence: Synthetic oligonucleotide
  Sense strand starting at position 212 of SEQ ID NO: 1888337
uaauauuggucaguacaug

SEQ ID NO: 2528385 - RNA, 19 nt, Artificial Sequence
  Description of Artificial Sequence: Synthetic oligonucleotide
  Antisense strand to SEQ ID NO: 2528384
cauguacugaccaauauua

SEQ ID NO: 2528386 - RNA, 19 nt, Artificial Sequence
  Description of Artificial Sequence: Synthetic oligonucleotide
  Sense strand starting at position 3104 of SEQ ID NO: 1888337
cuaugugaguaacugacua

SEQ ID NO: 2528387 - RNA, 19 nt, Artificial Sequence
  Description of Artificial Sequence: Synthetic oligonucleotide
  Antisense strand to SEQ ID NO: 2528386
uagucaguuacucacauag

SEQ ID NO: 2528388 - RNA, 19 nt, Artificial Sequence
  Description of Artificial Sequence: Synthetic oligonucleotide
  Sense strand starting at position 3330 of SEQ ID NO: 1888337
ugcuuucucagugauggag

SEQ ID NO: 2528389 - RNA, 19 nt, Artificial Sequence
  Description of Artificial Sequence: Synthetic oligonucleotide
  Antisense strand to SEQ ID NO: 2528388
cuccaucacugagaaagca

SEQ ID NO: 2528390 - RNA, 19 nt, Artificial Sequence
  Description of Artificial Sequence: Synthetic oligonucleotide
  Sense strand starting at position 822 of SEQ ID NO: 1888337
ucucuaagugaauguagau

SEQ ID NO: 2528391 - RNA, 19 nt, Artificial Sequence
  Description of Artificial Sequence: Synthetic oligonucleotide
  Antisense strand to SEQ ID NO: 2528390
aucuacauucacuuagaga

SEQ ID NO: 2528392 - RNA, 19 nt, Artificial Sequence
  Description of Artificial Sequence: Synthetic oligonucleotide
  Sense strand starting at position 229 of SEQ ID NO: 1888337
ugucccuugccugagacaa

SEQ ID NO: 2528393 - RNA, 19 nt, Artificial Sequence
  Description of Artificial Sequence: Synthetic oligonucleotide
  Antisense strand to SEQ ID NO: 2528392
uugucucaggcaagggaca

SEQ ID NO: 2528394 - RNA, 19 nt, Artificial Sequence
  Description of Artificial Sequence: Synthetic oligonucleotide
  Sense strand starting at position 3652 of SEQ ID NO: 1888337
acuaaaguguaugugggau

SEQ ID NO: 2528395 - RNA, 19 nt, Artificial Sequence
  Description of Artificial Sequence: Synthetic oligonucleotide
  Antisense strand to SEQ ID NO: 2528394
aucccacauacacuuuagu

SEQ ID NO: 2528396 - RNA, 19 nt, Artificial Sequence
  Description of Artificial Sequence: Synthetic oligonucleotide
  Sense strand starting at position 384 of SEQ ID NO: 1888337
aguguuacuuuaccagaac

SEQ ID NO: 2528397 - RNA, 19 nt, Artificial Sequence
  Description of Artificial Sequence: Synthetic oligonucleotide
  Antisense strand to SEQ ID NO: 2528396
guucugguaaaguaacacu

SEQ ID NO: 2528398 - RNA, 19 nt, Artificial Sequence
  Description of Artificial Sequence: Synthetic oligonucleotide
  Sense strand starting at position 2759 of SEQ ID NO: 1888337
ugugcagaacugugaggaa

SEQ ID NO: 2528399 - RNA, 19 nt, Artificial Sequence
  Description of Artificial Sequence: Synthetic oligonucleotide
  Antisense strand to SEQ ID NO: 2528398
uuccucacaguucugcaca

SEQ ID NO: 2528400 - RNA, 19 nt, Artificial Sequence
  Description of Artificial Sequence: Synthetic oligonucleotide
  Sense strand starting at position 2969 of SEQ ID NO: 1888337
ugagaaggauuugaugcuu

SEQ ID NO: 2528401 - RNA, 19 nt, Artificial Sequence
  Description of Artificial Sequence: Synthetic oligonucleotide
  Antisense strand to SEQ ID NO: 2528400
aagcaucaaauccuucuca

SEQ ID NO: 2528402 - RNA, 19 nt, Artificial Sequence
  Description of Artificial Sequence: Synthetic oligonucleotide
  Sense strand starting at position 3108 of SEQ ID NO: 1888337
gugaguaacugacuaaguu

SEQ ID NO: 2528403 - RNA, 19 nt, Artificial Sequence
  Description of Artificial Sequence: Synthetic oligonucleotide
  Antisense strand to SEQ ID NO: 2528402
aacuuagucaguuacucac

SEQ ID NO: 2528404 - RNA, 19 nt, Artificial Sequence
  Description of Artificial Sequence: Synthetic oligonucleotide
  Sense strand starting at position 3659 of SEQ ID NO: 1888337
uguaugugggaucgggaua

SEQ ID NO: 2528405 - RNA, 19 nt, Artificial Sequence
  Description of Artificial Sequence: Synthetic oligonucleotide
  Antisense strand to SEQ ID NO: 2528404
uaucccgaucccacauaca

SEQ ID NO: 2528406 - RNA, 19 nt, Artificial Sequence
  Description of Artificial Sequence: Synthetic oligonucleotide
  Sense strand starting at position 125 of SEQ ID NO: 1888337
cuguguguuccauaugaua

SEQ ID NO: 2528407 - RNA, 19 nt, Artificial Sequence
  Description of Artificial Sequence: Synthetic oligonucleotide
  Antisense strand to SEQ ID NO: 2528406
uaucauauggaacacacag

SEQ ID NO: 2528408 - RNA, 19 nt, Artificial Sequence
  Description of Artificial Sequence: Synthetic oligonucleotide
  Sense strand starting at position 3504 of SEQ ID NO: 1888337
gggcuuucuuuauuaaacc

SEQ ID NO: 2528409 - RNA, 19 nt, Artificial Sequence
  Description of Artificial Sequence: Synthetic oligonucleotide
  Antisense strand to SEQ ID NO: 2528408
gguuuaauaaagaaagccc

SEQ ID NO: 2528410 - RNA, 19 nt, Artificial Sequence
  Description of Artificial Sequence: Synthetic oligonucleotide
  Sense strand starting at position 3329 of SEQ ID NO: 1888337
augcuuucucagugaugga

SEQ ID NO: 2528411 - RNA, 19 nt, Artificial Sequence
  Description of Artificial Sequence: Synthetic oligonucleotide
  Antisense strand to SEQ ID NO: 2528410
uccaucacugagaaagcau

SEQ ID NO: 2528412 - RNA, 19 nt, Artificial Sequence
  Description of Artificial Sequence: Synthetic oligonucleotide
  Sense strand starting at position 2509 of SEQ ID NO: 1888337
uauauuuguuccuagggac

SEQ ID NO: 2528413 - RNA, 19 nt, Artificial Sequence
  Description of Artificial Sequence: Synthetic oligonucleotide
  Antisense strand to SEQ ID NO: 2528412
gucccuaggaacaaauaua

SEQ ID NO: 2528414 - RNA, 19 nt, Artificial Sequence
  Description of Artificial Sequence: Synthetic oligonucleotide
  Sense strand starting at position 3096 of SEQ ID NO: 1888337
augcaauccuaugugagua

SEQ ID NO: 2528415 - RNA, 19 nt, Artificial Sequence
  Description of Artificial Sequence: Synthetic oligonucleotide
  Antisense strand to SEQ ID NO: 2528414
uacucacauaggauugcau

SEQ ID NO: 2528416 - RNA, 19 nt, Artificial Sequence
  Description of Artificial Sequence: Synthetic oligonucleotide
  Sense strand starting at position 1585 of SEQ ID NO: 1888338
uugguagcacaauauuaaa

SEQ ID NO: 2528417 - RNA, 19 nt, Artificial Sequence
  Description of Artificial Sequence: Synthetic oligonucleotide
  Antisense strand to SEQ ID NO: 2528416
uuuaauauugugcuaccaa

SEQ ID NO: 2528418 - RNA, 19 nt, Artificial Sequence
  Description of Artificial Sequence: Synthetic oligonucleotide
  Sense strand starting at position 323 of SEQ ID NO: 1888338
auccuuuaucaaugauagg

SEQ ID NO: 2528419 - RNA, 19 nt, Artificial Sequence
  Description of Artificial Sequence: Synthetic oligonucleotide
  Antisense strand to SEQ ID NO: 2528418
ccuaucauugauaaaggau

SEQ ID NO: 2528420 - RNA, 19 nt, Artificial Sequence
  Description of Artificial Sequence: Synthetic oligonucleotide
  Sense strand starting at position 2400 of SEQ ID NO: 1888338
gugauacaaguggaaaguu

SEQ ID NO: 2528421 - RNA, 19 nt, Artificial Sequence
  Description of Artificial Sequence: Synthetic oligonucleotide
  Antisense strand to SEQ ID NO: 2528420
aacuuuccacuuguaucac

SEQ ID NO: 2528422 - RNA, 19 nt, Artificial Sequence
  Description of Artificial Sequence: Synthetic oligonucleotide
  Sense strand starting at position 2070 of SEQ ID NO: 1888338
guaugaggccguuugguuu

SEQ ID NO: 2528423 - RNA, 19 nt, Artificial Sequence
  Description of Artificial Sequence: Synthetic oligonucleotide
  Antisense strand to SEQ ID NO: 2528422
aaaccaaacggccucauac

SEQ ID NO: 2528424 - RNA, 19 nt, Artificial Sequence
  Description of Artificial Sequence: Synthetic oligonucleotide
  Sense strand starting at position 333 of SEQ ID NO: 1888338
aaugauaggguguggaaua

SEQ ID NO: 2528425 - RNA, 19 nt, Artificial Sequence
  Description of Artificial Sequence: Synthetic oligonucleotide
  Antisense strand to SEQ ID NO: 2528424
uauuccacacccuaucauu

SEQ ID NO: 2528426 - RNA, 19 nt, Artificial Sequence
  Description of Artificial Sequence: Synthetic oligonucleotide
  Sense strand starting at position 2613 of SEQ ID NO: 1888338
gucagaucacuguaaacau

SEQ ID NO: 2528427 - RNA, 19 nt, Artificial Sequence
  Description of Artificial Sequence: Synthetic oligonucleotide
  Antisense strand to SEQ ID NO: 2528426
auguuuacagugaucugac

SEQ ID NO: 2528428 - RNA, 19 nt, Artificial Sequence
  Description of Artificial Sequence: Synthetic oligonucleotide
  Sense strand starting at position 2501 of SEQ ID NO: 1888338
gauuauuaacagugaacug

SEQ ID NO: 2528429 - RNA, 19 nt, Artificial Sequence
  Description of Artificial Sequence: Synthetic oligonucleotide
  Antisense strand to SEQ ID NO: 2528428
caguucacuguuaauaauc

SEQ ID NO: 2528430 - RNA, 19 nt, Artificial Sequence
  Description of Artificial Sequence: Synthetic oligonucleotide
  Sense strand starting at position 3787 of SEQ ID NO: 1888338
aauauaucccugggaacga

SEQ ID NO: 2528431 - RNA, 19 nt, Artificial Sequence
  Description of Artificial Sequence: Synthetic oligonucleotide
  Antisense strand to SEQ ID NO: 2528430
ucguucccagggauauauu

SEQ ID NO: 2528432 - RNA, 19 nt, Artificial Sequence
  Description of Artificial Sequence: Synthetic oligonucleotide
  Sense strand starting at position 3382 of SEQ ID NO: 1888338
ugaaguucugaacaaugca

SEQ ID NO: 2528433 - RNA, 19 nt, Artificial Sequence
  Description of Artificial Sequence: Synthetic oligonucleotide
  Antisense strand to SEQ ID NO: 2528432
ugcauuguucagaacuuca

SEQ ID NO: 2528434 - RNA, 19 nt, Artificial Sequence
  Description of Artificial Sequence: Synthetic oligonucleotide
  Sense strand starting at position 3629 of SEQ ID NO: 1888338
gacuuugauuaugugaaag

SEQ ID NO: 2528435 - RNA, 19 nt, Artificial Sequence
  Description of Artificial Sequence: Synthetic oligonucleotide
  Antisense strand to SEQ ID NO: 2528434
cuuucacauaaucaaaguc

SEQ ID NO: 2528436 - RNA, 19 nt, Artificial Sequence
  Description of Artificial Sequence: Synthetic oligonucleotide
  Sense strand starting at position 29 of SEQ ID NO: 1888338
agucauaauauagacgagu

SEQ ID NO: 2528437 - RNA, 19 nt, Artificial Sequence
  Description of Artificial Sequence: Synthetic oligonucleotide
  Antisense strand to SEQ ID NO: 2528436
acucgucuauauuaugacu

SEQ ID NO: 2528438 - RNA, 19 nt, Artificial Sequence
  Description of Artificial Sequence: Synthetic oligonucleotide
  Sense strand starting at position 2408 of SEQ ID NO: 1888338
aguggaaaguuaucugaag

SEQ ID NO: 2528439 - RNA, 19 nt, Artificial Sequence
  Description of Artificial Sequence: Synthetic oligonucleotide
  Antisense strand to SEQ ID NO: 2528438
cuucagauaacuuuccacu

SEQ ID NO: 2528440 - RNA, 19 nt, Artificial Sequence
  Description of Artificial Sequence: Synthetic oligonucleotide
  Sense strand starting at position 387 of SEQ ID NO: 1888338
ucaguuaggcaagagacuu

SEQ ID NO: 2528441 - RNA, 19 nt, Artificial Sequence
  Description of Artificial Sequence: Synthetic oligonucleotide
  Antisense strand to SEQ ID NO: 2528440
aagucucuugccuaacuga

SEQ ID NO: 2528442 - RNA, 19 nt, Artificial Sequence
  Description of Artificial Sequence: Synthetic oligonucleotide
  Sense strand starting at position 1074 of SEQ ID NO: 1888338
agguuaauauaucccaaug

SEQ ID NO: 2528443 - RNA, 19 nt, Artificial Sequence
  Description of Artificial Sequence: Synthetic oligonucleotide
  Antisense strand to SEQ ID NO: 2528442
cauugggauauauuaaccu

SEQ ID NO: 2528444 - RNA, 19 nt, Artificial Sequence
  Description of Artificial Sequence: Synthetic oligonucleotide
  Sense strand starting at position 7 of SEQ ID NO: 1888338
auuuguuucucagucuauu

SEQ ID NO: 2528445 - RNA, 19 nt, Artificial Sequence
  Description of Artificial Sequence: Synthetic oligonucleotide
  Antisense strand to SEQ ID NO: 2528444
aauagacugagaaacaaau

SEQ ID NO: 2528446 - RNA, 19 nt, Artificial Sequence
  Description of Artificial Sequence: Synthetic oligonucleotide
  Sense strand starting at position 2254 of SEQ ID NO: 1888338
guuauuaaagucuagacuc

SEQ ID NO: 2528447 - RNA, 19 nt, Artificial Sequence
  Description of Artificial Sequence: Synthetic oligonucleotide
  Antisense strand to SEQ ID NO: 2528446
gagucuagacuuuaauaac

SEQ ID NO: 2528448 - RNA, 19 nt, Artificial Sequence
  Description of Artificial Sequence: Synthetic oligonucleotide
  Sense strand starting at position 31 of SEQ ID NO: 1888338
ucauaauauagacgaguga

SEQ ID NO: 2528449 - RNA, 19 nt, Artificial Sequence
  Description of Artificial Sequence: Synthetic oligonucleotide
  Antisense strand to SEQ ID NO: 2528448
ucacucgucuauauuauga

SEQ ID NO: 2528450 - RNA, 19 nt, Artificial Sequence
  Description of Artificial Sequence: Synthetic oligonucleotide
  Sense strand starting at position 284 of SEQ ID NO: 1888338
uauuuauuaggcggcaacu

SEQ ID NO: 2528451 - RNA, 19 nt, Artificial Sequence
  Description of Artificial Sequence: Synthetic oligonucleotide
  Antisense strand to SEQ ID NO: 2528450
aguugccgccuaauaaaua

SEQ ID NO: 2528452 - RNA, 19 nt, Artificial Sequence
  Description of Artificial Sequence: Synthetic oligonucleotide
  Sense strand starting at position 3800 of SEQ ID NO: 1888338
gaacgauggcagcaaauau

SEQ ID NO: 2528453 - RNA, 19 nt, Artificial Sequence
  Description of Artificial Sequence: Synthetic oligonucleotide
  Antisense strand to SEQ ID NO: 2528452
auauuugcugccaucguuc

SEQ ID NO: 2528454 - RNA, 19 nt, Artificial Sequence
  Description of Artificial Sequence: Synthetic oligonucleotide
  Sense strand starting at position 2410 of SEQ ID NO: 1888338
uggaaaguuaucugaagua

SEQ ID NO: 2528455 - RNA, 19 nt, Artificial Sequence
  Description of Artificial Sequence: Synthetic oligonucleotide
  Antisense strand to SEQ ID NO: 2528454
uacuucagauaacuuucca

SEQ ID NO: 2528456 - RNA, 19 nt, Artificial Sequence
  Description of Artificial Sequence: Synthetic oligonucleotide
  Sense strand starting at position 2346 of SEQ ID NO: 1888338
uggugagucaaauaugcaa

SEQ ID NO: 2528457 - RNA, 19 nt, Artificial Sequence
  Description of Artificial Sequence: Synthetic oligonucleotide
  Antisense strand to SEQ ID NO: 2528456
uugcauauuugacucacca

SEQ ID NO: 2528458 - RNA, 19 nt, Artificial Sequence
  Description of Artificial Sequence: Synthetic oligonucleotide
  Sense strand starting at position 3490 of SEQ ID NO: 1888338
gguccucuucccuaggaca

SEQ ID NO: 2528459 - RNA, 19 nt, Artificial Sequence
  Description of Artificial Sequence: Synthetic oligonucleotide
  Antisense strand to SEQ ID NO: 2528458
uguccuagggaagaggacc

SEQ ID NO: 2528460 - RNA, 19 nt, Artificial Sequence
  Description of Artificial Sequence: Synthetic oligonucleotide
  Sense strand starting at position 933 of SEQ ID NO: 1888338
uggagaauacagugagcua

SEQ ID NO: 2528461 - RNA, 19 nt, Artificial Sequence
  Description of Artificial Sequence: Synthetic oligonucleotide
  Antisense strand to SEQ ID NO: 2528460
uagcucacuguauucucca

SEQ ID NO: 2528462 - RNA, 19 nt, Artificial Sequence
  Description of Artificial Sequence: Synthetic oligonucleotide
  Sense strand starting at position 2399 of SEQ ID NO: 1888338
agugauacaaguggaaagu

SEQ ID NO: 2528463 - RNA, 19 nt, Artificial Sequence
  Description of Artificial Sequence: Synthetic oligonucleotide
  Antisense strand to SEQ ID NO: 2528462
acuuuccacuuguaucacu

SEQ ID NO: 2528464 - RNA, 19 nt, Artificial Sequence
  Description of Artificial Sequence: Synthetic oligonucleotide
  Sense strand starting at position 665 of SEQ ID NO: 1888338
ggagauuccuauuccuuau

SEQ ID NO: 2528465 - RNA, 19 nt, Artificial Sequence
  Description of Artificial Sequence: Synthetic oligonucleotide
  Antisense strand to SEQ ID NO: 2528464
auaaggaauaggaaucucc

SEQ ID NO: 2528466 - RNA, 19 nt, Artificial Sequence
  Description of Artificial Sequence: Synthetic oligonucleotide
  Sense strand starting at position 3430 of SEQ ID NO: 1888338
cuggauccuuccuuaagau

SEQ ID NO: 2528467 - RNA, 19 nt, Artificial Sequence
  Description of Artificial Sequence: Synthetic oligonucleotide
  Antisense strand to SEQ ID NO: 2528466
aucuuaaggaaggauccag

SEQ ID NO: 2528468 - RNA, 19 nt, Artificial Sequence
  Description of Artificial Sequence: Synthetic oligonucleotide
  Sense strand starting at position 1154 of SEQ ID NO: 1888338
gcaagaaguguggaaagca

SEQ ID NO: 2528469 - RNA, 19 nt, Artificial Sequence
  Description of Artificial Sequence: Synthetic oligonucleotide
  Antisense strand to SEQ ID NO: 2528468
ugcuuuccacacuucuugc

SEQ ID NO: 2528470 - RNA, 19 nt, Artificial Sequence
  Description of Artificial Sequence: Synthetic oligonucleotide
  Sense strand starting at position 597 of SEQ ID NO: 1888338
uaagaauauugugugaauc

SEQ ID NO: 2528471 - RNA, 19 nt, Artificial Sequence
  Description of Artificial Sequence: Synthetic oligonucleotide
  Antisense strand to SEQ ID NO: 2528470
gauucacacaauauucuua

SEQ ID NO: 2528472 - RNA, 19 nt, Artificial Sequence
  Description of Artificial Sequence: Synthetic oligonucleotide
  Sense strand starting at position 1405 of SEQ ID NO: 1888338
gaaacagugucaucucaga

SEQ ID NO: 2528473 - RNA, 19 nt, Artificial Sequence
  Description of Artificial Sequence: Synthetic oligonucleotide
  Antisense strand to SEQ ID NO: 2528472
ucugagaugacacuguuuc

SEQ ID NO: 2528474 - RNA, 19 nt, Artificial Sequence
  Description of Artificial Sequence: Synthetic oligonucleotide
  Sense strand starting at position 1302 of SEQ ID NO: 1888338
cuuccuuauguauagguaa

SEQ ID NO: 2528475 - RNA, 19 nt, Artificial Sequence
  Description of Artificial Sequence: Synthetic oligonucleotide
  Antisense strand to SEQ ID NO: 2528474
uuaccuauacauaaggaag

SEQ ID NO: 2528476 - RNA, 19 nt, Artificial Sequence
  Description of Artificial Sequence: Synthetic oligonucleotide
  Sense strand starting at position 629 of SEQ ID NO: 1888338
ugagaaacauugcuccuca

SEQ ID NO: 2528477 - RNA, 19 nt, Artificial Sequence
  Description of Artificial Sequence: Synthetic oligonucleotide
  Antisense strand to SEQ ID NO: 2528476
ugaggagcaauguuucuca

SEQ ID NO: 2528478 - RNA, 19 nt, Artificial Sequence
  Description of Artificial Sequence: Synthetic oligonucleotide
  Sense strand starting at position 3223 of SEQ ID NO: 1888338
auggacucuagugguaaua

SEQ ID NO: 2528479 - RNA, 19 nt, Artificial Sequence
  Description of Artificial Sequence: Synthetic oligonucleotide
  Antisense strand to SEQ ID NO: 2528478
uauuaccacuagaguccau

SEQ ID NO: 2528480 - RNA, 19 nt, Artificial Sequence
  Description of Artificial Sequence: Synthetic oligonucleotide
  Sense strand starting at position 2778 of SEQ ID NO: 1888338
aguggauccauauagcagu

SEQ ID NO: 2528481 - RNA, 19 nt, Artificial Sequence
  Description of Artificial Sequence: Synthetic oligonucleotide
  Antisense strand to SEQ ID NO: 2528480
acugcuauauggauccacu

SEQ ID NO: 2528482 - RNA, 19 nt, Artificial Sequence
  Description of Artificial Sequence: Synthetic oligonucleotide
  Sense strand starting at position 1305 of SEQ ID NO: 1888338
ccuuauguauagguaauaa

SEQ ID NO: 2528483 - RNA, 19 nt, Artificial Sequence
  Description of Artificial Sequence: Synthetic oligonucleotide
  Antisense strand to SEQ ID NO: 2528482
uuauuaccuauacauaagg

SEQ ID NO: 2528484 - RNA, 19 nt, Artificial Sequence
  Description of Artificial Sequence: Synthetic oligonucleotide
  Sense strand starting at position 319 of SEQ ID NO: 1888338
ugugauccuuuaucaauga

SEQ ID NO: 2528485 - RNA, 19 nt, Artificial Sequence
  Description of Artificial Sequence: Synthetic oligonucleotide
  Antisense strand to SEQ ID NO: 2528484
ucauugauaaaggaucaca

SEQ ID NO: 2528486 - RNA, 19 nt, Artificial Sequence
  Description of Artificial Sequence: Synthetic oligonucleotide
  Sense strand starting at position 3946 of SEQ ID NO: 1888338
auugaagacuuugucacuu

SEQ ID NO: 2528487 - RNA, 19 nt, Artificial Sequence
  Description of Artificial Sequence: Synthetic oligonucleotide
  Antisense strand to SEQ ID NO: 2528486
aagugacaaagucuucaau

SEQ ID NO: 2528488 - RNA, 19 nt, Artificial Sequence
  Description of Artificial Sequence: Synthetic oligonucleotide
  Sense strand starting at position 3385 of SEQ ID NO: 1888338
aguucugaacaaugcauaa

SEQ ID NO: 2528489 - RNA, 19 nt, Artificial Sequence
  Description of Artificial Sequence: Synthetic oligonucleotide
  Antisense strand to SEQ ID NO: 2528488
uuaugcauuguucagaacu

SEQ ID NO: 2528490 - RNA, 19 nt, Artificial Sequence
  Description of Artificial Sequence: Synthetic oligonucleotide
  Sense strand starting at position 3572 of SEQ ID NO: 1888338
uuagaaugagucuggguca

SEQ ID NO: 2528491 - RNA, 19 nt, Artificial Sequence
  Description of Artificial Sequence: Synthetic oligonucleotide
  Antisense strand to SEQ ID NO: 2528490
ugacccagacucauucuaa

SEQ ID NO: 2528492 - RNA, 19 nt, Artificial Sequence
  Description of Artificial Sequence: Synthetic oligonucleotide
  Sense strand starting at position 2611 of SEQ ID NO: 1888338
augucagaucacuguaaac

SEQ ID NO: 2528493 - RNA, 19 nt, Artificial Sequence
  Description of Artificial Sequence: Synthetic oligonucleotide
  Antisense strand to SEQ ID NO: 2528492
guuuacagugaucugacau

SEQ ID NO: 2528494 - RNA, 19 nt, Artificial Sequence
  Description of Artificial Sequence: Synthetic oligonucleotide
  Sense strand starting at position 3575 of SEQ ID NO: 1888338
gaaugagucugggucacug

SEQ ID NO: 2528495 - RNA, 19 nt, Artificial Sequence
  Description of Artificial Sequence: Synthetic oligonucleotide
  Antisense strand to SEQ ID NO: 2528494
cagugacccagacucauuc

SEQ ID NO: 2528496 - RNA, 19 nt, Artificial Sequence
  Description of Artificial Sequence: Synthetic oligonucleotide
  Sense strand starting at position 3858 of SEQ ID NO: 1888339
auagauaaagauugcuuga

SEQ ID NO: 2528497 - RNA, 19 nt, Artificial Sequence
  Description of Artificial Sequence: Synthetic oligonucleotide
  Antisense strand to SEQ ID NO: 2528496
ucaagcaaucuuuaucuau

SEQ ID NO: 2528498 - RNA, 19 nt, Artificial Sequence
  Description of Artificial Sequence: Synthetic oligonucleotide
  Sense strand starting at position 3120 of SEQ ID NO: 1888339
cagagauggccuugacaaa

SEQ ID NO: 2528499 - RNA, 19 nt, Artificial Sequence
  Description of Artificial Sequence: Synthetic oligonucleotide
  Antisense strand to SEQ ID NO: 2528498
uuugucaaggccaucucug

SEQ ID NO: 2528500 - RNA, 19 nt, Artificial Sequence
  Description of Artificial Sequence: Synthetic oligonucleotide
  Sense strand starting at position 3374 of SEQ ID NO: 1888339
caagcauuuggccaguguu

SEQ ID NO: 2528501 - RNA, 19 nt, Artificial Sequence
  Description of Artificial Sequence: Synthetic oligonucleotide
  Antisense strand to SEQ ID NO: 2528500
aacacuggccaaaugcuug

SEQ ID NO: 2528502 - RNA, 19 nt, Artificial Sequence
  Description of Artificial Sequence: Synthetic oligonucleotide
  Sense strand starting at position 1531 of SEQ ID NO: 1888339
gagggaucgcuugaaucca

SEQ ID NO: 2528503 - RNA, 19 nt, Artificial Sequence
  Description of Artificial Sequence: Synthetic oligonucleotide
  Antisense strand to SEQ ID NO: 2528502
uggauucaagcgaucccuc

SEQ ID NO: 2528504 - RNA, 19 nt, Artificial Sequence
  Description of Artificial Sequence: Synthetic oligonucleotide
  Sense strand starting at position 392 of SEQ ID NO: 1888339
ggagcucuccuggagauuc

SEQ ID NO: 2528505 - RNA, 19 nt, Artificial Sequence
  Description of Artificial Sequence: Synthetic oligonucleotide
  Antisense strand to SEQ ID NO: 2528504
gaaucuccaggagagcucc

SEQ ID NO: 2528506 - RNA, 19 nt, Artificial Sequence
  Description of Artificial Sequence: Synthetic oligonucleotide
  Sense strand starting at position 3214 of SEQ ID NO: 1888339
cuucuugugaugggagaag

SEQ ID NO: 2528507 - RNA, 19 nt, Artificial Sequence
  Description of Artificial Sequence: Synthetic oligonucleotide
  Antisense strand to SEQ ID NO: 2528506
cuucucccaucacaagaag

SEQ ID NO: 2528508 - RNA, 19 nt, Artificial Sequence
  Description of Artificial Sequence: Synthetic oligonucleotide
  Sense strand starting at position 3306 of SEQ ID NO: 1888339
gacagaaaucgccaaaguu

SEQ ID NO: 2528509 - RNA, 19 nt, Artificial Sequence
  Description of Artificial Sequence: Synthetic oligonucleotide
  Antisense strand to SEQ ID NO: 2528508
aacuuuggcgauuucuguc

SEQ ID NO: 2528510 - RNA, 19 nt, Artificial Sequence
  Description of Artificial Sequence: Synthetic oligonucleotide
  Sense strand starting at position 832 of SEQ ID NO: 1888339
ugcuuuauucccgugguuu

SEQ ID NO: 2528511 - RNA, 19 nt, Artificial Sequence
  Description of Artificial Sequence: Synthetic oligonucleotide
  Antisense strand to SEQ ID NO: 2528510
aaaccacgggaauaaagca

SEQ ID NO: 2528512 - RNA, 19 nt, Artificial Sequence
  Description of Artificial Sequence: Synthetic oligonucleotide
  Sense strand starting at position 3258 of SEQ ID NO: 1888339
gguggaugaguuuauucug

SEQ ID NO: 2528513 - RNA, 19 nt, Artificial Sequence
  Description of Artificial Sequence: Synthetic oligonucleotide
  Antisense strand to SEQ ID NO: 2528512
cagaauaaacucauccacc

SEQ ID NO: 2528514 - RNA, 19 nt, Artificial Sequence
  Description of Artificial Sequence: Synthetic oligonucleotide
  Sense strand starting at position 3213 of SEQ ID NO: 1888339
ucuucuugugaugggagaa

SEQ ID NO: 2528515 - RNA, 19 nt, Artificial Sequence
  Description of Artificial Sequence: Synthetic oligonucleotide
  Antisense strand to SEQ ID NO: 2528514
uucucccaucacaagaaga

SEQ ID NO: 2528516 - RNA, 19 nt, Artificial Sequence
  Description of Artificial Sequence: Synthetic oligonucleotide
  Sense strand starting at position 2412 of SEQ ID NO: 1888339
aggaauugccagggcauaa

SEQ ID NO: 2528517 - RNA, 19 nt, Artificial Sequence
  Description of Artificial Sequence: Synthetic oligonucleotide
  Antisense strand to SEQ ID NO: 2528516
uuaugcccuggcaauuccu

SEQ ID NO: 2528518 - RNA, 19 nt, Artificial Sequence
  Description of Artificial Sequence: Synthetic oligonucleotide
  Sense strand starting at position 763 of SEQ ID NO: 1888339
gggacagacauggguguuu

SEQ ID NO: 2528519 - RNA, 19 nt, Artificial Sequence
  Description of Artificial Sequence: Synthetic oligonucleotide
  Antisense strand to SEQ ID NO: 2528518
aaacacccaugucuguccc

SEQ ID NO: 2528520 - RNA, 19 nt, Artificial Sequence
  Description of Artificial Sequence: Synthetic oligonucleotide
  Sense strand starting at position 3198 of SEQ ID NO: 1888339
gagacauggcucuagucuu

SEQ ID NO: 2528521 - RNA, 19 nt, Artificial Sequence
  Description of Artificial Sequence: Synthetic oligonucleotide
  Antisense strand to SEQ ID NO: 2528520
aagacuagagccaugucuc

SEQ ID NO: 2528522 - RNA, 19 nt, Artificial Sequence
  Description of Artificial Sequence: Synthetic oligonucleotide
  Sense strand starting at position 391 of SEQ ID NO: 1888339
gggagcucuccuggagauu

SEQ ID NO: 2528523 - RNA, 19 nt, Artificial Sequence
  Description of Artificial Sequence: Synthetic oligonucleotide
  Antisense strand to SEQ ID NO: 2528522
aaucuccaggagagcuccc

SEQ ID NO: 2528524 - RNA, 19 nt, Artificial Sequence
  Description of Artificial Sequence: Synthetic oligonucleotide
  Sense strand starting at position 2411 of SEQ ID NO: 1888339
caggaauugccagggcaua

SEQ ID NO: 2528525 - RNA, 19 nt, Artificial Sequence
  Description of Artificial Sequence: Synthetic oligonucleotide
  Antisense strand to SEQ ID NO: 2528524
uaugcccuggcaauuccug

SEQ ID NO: 2528526 - RNA, 19 nt, Artificial Sequence
  Description of Artificial Sequence: Synthetic oligonucleotide
  Sense strand starting at position 3639 of SEQ ID NO: 1888339
gauucuagacgugagccau

SEQ ID NO: 2528527 - RNA, 19 nt, Artificial Sequence
  Description of Artificial Sequence: Synthetic oligonucleotide
  Antisense strand to SEQ ID NO: 2528526
auggcucacgucuagaauc

SEQ ID NO: 2528528 - RNA, 19 nt, Artificial Sequence
  Description of Artificial Sequence: Synthetic oligonucleotide
  Sense strand starting at position 3261 of SEQ ID NO: 1888339
ggaugaguuuauucuguga

SEQ ID NO: 2528529 - RNA, 19 nt, Artificial Sequence
  Description of Artificial Sequence: Synthetic oligonucleotide
  Antisense strand to SEQ ID NO: 2528528
ucacagaauaaacucaucc

SEQ ID NO: 2528530 - RNA, 19 nt, Artificial Sequence
  Description of Artificial Sequence: Synthetic oligonucleotide
  Sense strand starting at position 2856 of SEQ ID NO: 1888339
caagaaugcggugagcaau

SEQ ID NO: 2528531 - RNA, 19 nt, Artificial Sequence
  Description of Artificial Sequence: Synthetic oligonucleotide
  Antisense strand to SEQ ID NO: 2528530
auugcucaccgcauucuug

SEQ ID NO: 2528532 - RNA, 19 nt, Artificial Sequence
  Description of Artificial Sequence: Synthetic oligonucleotide
  Sense strand starting at position 3377 of SEQ ID NO: 1888339
gcauuuggccaguguucca

SEQ ID NO: 2528533 - RNA, 19 nt, Artificial Sequence
  Description of Artificial Sequence: Synthetic oligonucleotide
  Antisense strand to SEQ ID NO: 2528532
uggaacacuggccaaaugc

SEQ ID NO: 2528534 - RNA, 19 nt, Artificial Sequence
  Description of Artificial Sequence: Synthetic oligonucleotide
  Sense strand starting at position 484 of SEQ ID NO: 1888339
cgagauugugcuggaaaca

SEQ ID NO: 2528535 - RNA, 19 nt, Artificial Sequence
  Description of Artificial Sequence: Synthetic oligonucleotide
  Antisense strand to SEQ ID NO: 2528534
uguuuccagcacaaucucg

SEQ ID NO: 2528536 - RNA, 19 nt, Artificial Sequence
  Description of Artificial Sequence: Synthetic oligonucleotide
  Sense strand starting at position 481 of SEQ ID NO: 1888339
ugacgagauugugcuggaa

SEQ ID NO: 2528537 - RNA, 19 nt, Artificial Sequence
  Description of Artificial Sequence: Synthetic oligonucleotide
  Antisense strand to SEQ ID NO: 2528536
uuccagcacaaucucguca

SEQ ID NO: 2528538 - RNA, 19 nt, Artificial Sequence
  Description of Artificial Sequence: Synthetic oligonucleotide
  Sense strand starting at position 748 of SEQ ID NO: 1888339
gaggcuaaauccguuggga

SEQ ID NO: 2528539 - RNA, 19 nt, Artificial Sequence
  Description of Artificial Sequence: Synthetic oligonucleotide
  Antisense strand to SEQ ID NO: 2528538
ucccaacggauuuagccuc

SEQ ID NO: 2528540 - RNA, 19 nt, Artificial Sequence
  Description of Artificial Sequence: Synthetic oligonucleotide
  Sense strand starting at position 879 of SEQ ID NO: 1888339
uuuaaagacuaauaggaga

SEQ ID NO: 2528541 - RNA, 19 nt, Artificial Sequence
  Description of Artificial Sequence: Synthetic oligonucleotide
  Antisense strand to SEQ ID NO: 2528540
ucuccuauuagucuuuaaa

SEQ ID NO: 2528542 - RNA, 19 nt, Artificial Sequence
  Description of Artificial Sequence: Synthetic oligonucleotide
  Sense strand starting at position 2855 of SEQ ID NO: 1888339
acaagaaugcggugagcaa

SEQ ID NO: 2528543 - RNA, 19 nt, Artificial Sequence
  Description of Artificial Sequence: Synthetic oligonucleotide
  Antisense strand to SEQ ID NO: 2528542
uugcucaccgcauucuugu

SEQ ID NO: 2528544 - RNA, 19 nt, Artificial Sequence
  Description of Artificial Sequence: Synthetic oligonucleotide
  Sense strand starting at position 3587 of SEQ ID NO: 1888339
ugguauucuugggcucaag

SEQ ID NO: 2528545 - RNA, 19 nt, Artificial Sequence
  Description of Artificial Sequence: Synthetic oligonucleotide
  Antisense strand to SEQ ID NO: 2528544
cuugagcccaagaauacca

SEQ ID NO: 2528546 - RNA, 19 nt, Artificial Sequence
  Description of Artificial Sequence: Synthetic oligonucleotide
  Sense strand starting at position 2871 of SEQ ID NO: 1888339
caaugcugccgauggagaa

SEQ ID NO: 2528547 - RNA, 19 nt, Artificial Sequence
  Description of Artificial Sequence: Synthetic oligonucleotide
  Antisense strand to SEQ ID NO: 2528546
uucuccaucggcagcauug

SEQ ID NO: 2528548 - RNA, 19 nt, Artificial Sequence
  Description of Artificial Sequence: Synthetic oligonucleotide
  Sense strand starting at position 3265 of SEQ ID NO: 1888339
gaguuuauucugugacuug

SEQ ID NO: 2528549 - RNA, 19 nt, Artificial Sequence
  Description of Artificial Sequence: Synthetic oligonucleotide
  Antisense strand to SEQ ID NO: 2528548
caagucacagaauaaacuc

SEQ ID NO: 2528550 - RNA, 19 nt, Artificial Sequence
  Description of Artificial Sequence: Synthetic oligonucleotide
  Sense strand starting at position 750 of SEQ ID NO: 1888339
ggcuaaauccguugggaca

SEQ ID NO: 2528551 - RNA, 19 nt, Artificial Sequence
  Description of Artificial Sequence: Synthetic oligonucleotide
  Antisense strand to SEQ ID NO: 2528550
ugucccaacggauuuagcc

SEQ ID NO: 2528552 - RNA, 19 nt, Artificial Sequence
  Description of Artificial Sequence: Synthetic oligonucleotide
  Sense strand starting at position 728 of SEQ ID NO: 1888339
ccgggaggcccugguuaaa

SEQ ID NO: 2528553 - RNA, 19 nt, Artificial Sequence
  Description of Artificial Sequence: Synthetic oligonucleotide
  Antisense strand to SEQ ID NO: 2528552
uuuaaccagggccucccgg

SEQ ID NO: 2528554 - RNA, 19 nt, Artificial Sequence
  Description of Artificial Sequence: Synthetic oligonucleotide
  Sense strand starting at position 3264 of SEQ ID NO: 1888339
ugaguuuauucugugacuu

SEQ ID NO: 2528555 - RNA, 19 nt, Artificial Sequence
  Description of Artificial Sequence: Synthetic oligonucleotide
  Antisense strand to SEQ ID NO: 2528554
aagucacagaauaaacuca

SEQ ID NO: 2528556 - RNA, 19 nt, Artificial Sequence
  Description of Artificial Sequence: Synthetic oligonucleotide
  Sense strand starting at position 3752 of SEQ ID NO: 1888339
ugaagagguucuucugcuu

SEQ ID NO: 2528557 - RNA, 19 nt, Artificial Sequence
  Description of Artificial Sequence: Synthetic oligonucleotide
  Antisense strand to SEQ ID NO: 2528556
aagcagaagaaccucuuca

SEQ ID NO: 2528558 - RNA, 19 nt, Artificial Sequence
  Description of Artificial Sequence: Synthetic oligonucleotide
  Sense strand starting at position 789 of SEQ ID NO: 1888339
ggaucucauggcugagugu

SEQ ID NO: 2528559 - RNA, 19 nt, Artificial Sequence
  Description of Artificial Sequence: Synthetic oligonucleotide
  Antisense strand to SEQ ID NO: 2528558
acacucagccaugagaucc

SEQ ID NO: 2528560 - RNA, 19 nt, Artificial Sequence
  Description of Artificial Sequence: Synthetic oligonucleotide
  Sense strand starting at position 131 of SEQ ID NO: 1888339
ggcggcgugugcauuauaa

SEQ ID NO: 2528561 - RNA, 19 nt, Artificial Sequence
  Description of Artificial Sequence: Synthetic oligonucleotide
  Antisense strand to SEQ ID NO: 2528560
uuauaaugcacacgccgcc

SEQ ID NO: 2528562 - RNA, 19 nt, Artificial Sequence
  Description of Artificial Sequence: Synthetic oligonucleotide
  Sense strand starting at position 3238 of SEQ ID NO: 1888339
ucccuacguguuuaaguca

SEQ ID NO: 2528563 - RNA, 19 nt, Artificial Sequence
  Description of Artificial Sequence: Synthetic oligonucleotide
  Antisense strand to SEQ ID NO: 2528562
ugacuuaaacacguaggga

SEQ ID NO: 2528564 - RNA, 19 nt, Artificial Sequence
  Description of Artificial Sequence: Synthetic oligonucleotide
  Sense strand starting at position 3427 of SEQ ID NO: 1888339
cgguuuccuguuuacuuua

SEQ ID NO: 2528565 - RNA, 19 nt, Artificial Sequence
  Description of Artificial Sequence: Synthetic oligonucleotide
  Antisense strand to SEQ ID NO: 2528564
uaaaguaaacaggaaaccg

SEQ ID NO: 2528566 - RNA, 19 nt, Artificial Sequence
  Description of Artificial Sequence: Synthetic oligonucleotide
  Sense strand starting at position 2759 of SEQ ID NO: 1888339
gccaucaguguguaccuua

SEQ ID NO: 2528567 - RNA, 19 nt, Artificial Sequence
  Description of Artificial Sequence: Synthetic oligonucleotide
  Antisense strand to SEQ ID NO: 2528566
uaagguacacacugauggc

SEQ ID NO: 2528568 - RNA, 19 nt, Artificial Sequence
  Description of Artificial Sequence: Synthetic oligonucleotide
  Sense strand starting at position 3246 of SEQ ID NO: 1888339
uguuuaagucacgguggau

SEQ ID NO: 2528569 - RNA, 19 nt, Artificial Sequence
  Description of Artificial Sequence: Synthetic oligonucleotide
  Antisense strand to SEQ ID NO: 2528568
auccaccgugacuuaaaca

SEQ ID NO: 2528570 - RNA, 19 nt, Artificial Sequence
  Description of Artificial Sequence: Synthetic oligonucleotide
  Sense strand starting at position 3234 of SEQ ID NO: 1888339
acagucccuacguguuuaa

SEQ ID NO: 2528571 - RNA, 19 nt, Artificial Sequence
  Description of Artificial Sequence: Synthetic oligonucleotide
  Antisense strand to SEQ ID NO: 2528570
uuaaacacguagggacugu

SEQ ID NO: 2528572 - RNA, 19 nt, Artificial Sequence
  Description of Artificial Sequence: Synthetic oligonucleotide
  Sense strand starting at position 3233 of SEQ ID NO: 1888339
gacagucccuacguguuua

SEQ ID NO: 2528573 - RNA, 19 nt, Artificial Sequence
  Description of Artificial Sequence: Synthetic oligonucleotide
  Antisense strand to SEQ ID NO: 2528572
uaaacacguagggacuguc

SEQ ID NO: 2528574 - RNA, 19 nt, Artificial Sequence
  Description of Artificial Sequence: Synthetic oligonucleotide
  Sense strand starting at position 3296 of SEQ ID NO: 1888339
uccugauagugacagaaau

SEQ ID NO: 2528575 - RNA, 19 nt, Artificial Sequence
  Description of Artificial Sequence: Synthetic oligonucleotide
  Antisense strand to SEQ ID NO: 2528574
auuucugucacuaucagga

SEQ ID NO: 2528576 - RNA, 19 nt, Artificial Sequence
  Description of Artificial Sequence: Synthetic oligonucleotide
  Sense strand starting at position 1438 of SEQ ID NO: 1888340
ugugaaucggcagagaaga

SEQ ID NO: 2528577 - RNA, 19 nt, Artificial Sequence
  Description of Artificial Sequence: Synthetic oligonucleotide
  Antisense strand to SEQ ID NO: 2528576
ucuucucugccgauucaca

SEQ ID NO: 2528578 - RNA, 19 nt, Artificial Sequence
  Description of Artificial Sequence: Synthetic oligonucleotide
  Sense strand starting at position 1884 of SEQ ID NO: 1888340
ccgacugacccaggagaau

SEQ ID NO: 2528579 - RNA, 19 nt, Artificial Sequence
  Description of Artificial Sequence: Synthetic oligonucleotide
  Antisense strand to SEQ ID NO: 2528578
auucuccugggucagucgg

SEQ ID NO: 2528580 - RNA, 19 nt, Artificial Sequence
  Description of Artificial Sequence: Synthetic oligonucleotide
  Sense strand starting at position 496 of SEQ ID NO: 1888340
cagaguuaugaaggcaaag

SEQ ID NO: 2528581 - RNA, 19 nt, Artificial Sequence
  Description of Artificial Sequence: Synthetic oligonucleotide
  Antisense strand to SEQ ID NO: 2528580
cuuugccuucauaacucug

SEQ ID NO: 2528582 - RNA, 19 nt, Artificial Sequence
  Description of Artificial Sequence: Synthetic oligonucleotide
  Sense strand starting at position 166 of SEQ ID NO: 1888340
ucaugagauuagccagaca

SEQ ID NO: 2528583 - RNA, 19 nt, Artificial Sequence
  Description of Artificial Sequence: Synthetic oligonucleotide
  Antisense strand to SEQ ID NO: 2528582
ugucuggcuaaucucauga

SEQ ID NO: 2528584 - RNA, 19 nt, Artificial Sequence
  Description of Artificial Sequence: Synthetic oligonucleotide
  Sense strand starting at position 3723 of SEQ ID NO: 1888340
gggcuucgggcguuaucau

SEQ ID NO: 2528585 - RNA, 19 nt, Artificial Sequence
  Description of Artificial Sequence: Synthetic oligonucleotide
  Antisense strand to SEQ ID NO: 2528584
augauaacgcccgaagccc

SEQ ID NO: 2528586 - RNA, 19 nt, Artificial Sequence
  Description of Artificial Sequence: Synthetic oligonucleotide
  Sense strand starting at position 2670 of SEQ ID NO: 1888340
gauuguggaucccugggaa

SEQ ID NO: 2528587 - RNA, 19 nt, Artificial Sequence
  Description of Artificial Sequence: Synthetic oligonucleotide
  Antisense strand to SEQ ID NO: 2528586
uucccagggauccacaauc

SEQ ID NO: 2528588 - RNA, 19 nt, Artificial Sequence
  Description of Artificial Sequence: Synthetic oligonucleotide
  Sense strand starting at position 2083 of SEQ ID NO: 1888340
cauagaagaugcucggaaa

SEQ ID NO: 2528589 - RNA, 19 nt, Artificial Sequence
  Description of Artificial Sequence: Synthetic oligonucleotide
  Antisense strand to SEQ ID NO: 2528588
uuuccgagcaucuucuaug

SEQ ID NO: 2528590 - RNA, 19 nt, Artificial Sequence
  Description of Artificial Sequence: Synthetic oligonucleotide
  Sense strand starting at position 158 of SEQ ID NO: 1888340
ugguguccucaugagauua

SEQ ID NO: 2528591 - RNA, 19 nt, Artificial Sequence
  Description of Artificial Sequence: Synthetic oligonucleotide
  Antisense strand to SEQ ID NO: 2528590
uaaucucaugaggacacca

SEQ ID NO: 2528592 - RNA, 19 nt, Artificial Sequence
  Description of Artificial Sequence: Synthetic oligonucleotide
  Sense strand starting at position 2098 of SEQ ID NO: 1888340
gaaacacguguugagugaa

SEQ ID NO: 2528593 - RNA, 19 nt, Artificial Sequence
  Description of Artificial Sequence: Synthetic oligonucleotide
  Antisense strand to SEQ ID NO: 2528592
uucacucaacacguguuuc

SEQ ID NO: 2528594 - RNA, 19 nt, Artificial Sequence
  Description of Artificial Sequence: Synthetic oligonucleotide
  Sense strand starting at position 3230 of SEQ ID NO: 1888340
aaaguaucugagugaccca

SEQ ID NO: 2528595 - RNA, 19 nt, Artificial Sequence
  Description of Artificial Sequence: Synthetic oligonucleotide
  Antisense strand to SEQ ID NO: 2528594
ugggucacucagauacuuu

SEQ ID NO: 2528596 - RNA, 19 nt, Artificial Sequence
  Description of Artificial Sequence: Synthetic oligonucleotide
  Sense strand starting at position 454 of SEQ ID NO: 1888340
gcuguaaaugcugauuaaa

SEQ ID NO: 2528597 - RNA, 19 nt, Artificial Sequence
  Description of Artificial Sequence: Synthetic oligonucleotide
  Antisense strand to SEQ ID NO: 2528596
uuuaaucagcauuuacagc

SEQ ID NO: 2528598 - RNA, 19 nt, Artificial Sequence
  Description of Artificial Sequence: Synthetic oligonucleotide
  Sense strand starting at position 3909 of SEQ ID NO: 1888340
aagcaaggcuaggugaaua

SEQ ID NO: 2528599 - RNA, 19 nt, Artificial Sequence
  Description of Artificial Sequence: Synthetic oligonucleotide
  Antisense strand to SEQ ID NO: 2528598
uauucaccuagccuugcuu

SEQ ID NO: 2528600 - RNA, 19 nt, Artificial Sequence
  Description of Artificial Sequence: Synthetic oligonucleotide
  Sense strand starting at position 2503 of SEQ ID NO: 1888340
guagacuauuguguaagaa

SEQ ID NO: 2528601 - RNA, 19 nt, Artificial Sequence
  Description of Artificial Sequence: Synthetic oligonucleotide
  Antisense strand to SEQ ID NO: 2528600
uucuuacacaauagucuac

SEQ ID NO: 2528602 - RNA, 19 nt, Artificial Sequence
  Description of Artificial Sequence: Synthetic oligonucleotide
  Sense strand starting at position 152 of SEQ ID NO: 1888340
aaugaaugguguccucaug

SEQ ID NO: 2528603 - RNA, 19 nt, Artificial Sequence
  Description of Artificial Sequence: Synthetic oligonucleotide
  Antisense strand to SEQ ID NO: 2528602
caugaggacaccauucauu

SEQ ID NO: 2528604 - RNA, 19 nt, Artificial Sequence
  Description of Artificial Sequence: Synthetic oligonucleotide
  Sense strand starting at position 848 of SEQ ID NO: 1888340
cuuugacuccauggugaac

SEQ ID NO: 2528605 - RNA, 19 nt, Artificial Sequence
  Description of Artificial Sequence: Synthetic oligonucleotide
  Antisense strand to SEQ ID NO: 2528604
guucaccauggagucaaag

SEQ ID NO: 2528606 - RNA, 19 nt, Artificial Sequence
  Description of Artificial Sequence: Synthetic oligonucleotide
  Sense strand starting at position 3489 of SEQ ID NO: 1888340
uuaggaguccucuauuagc

SEQ ID NO: 2528607 - RNA, 19 nt, Artificial Sequence
  Description of Artificial Sequence: Synthetic oligonucleotide
  Antisense strand to SEQ ID NO: 2528606
gcuaauagaggacuccuaa

SEQ ID NO: 2528608 - RNA, 19 nt, Artificial Sequence
  Description of Artificial Sequence: Synthetic oligonucleotide
  Sense strand starting at position 2766 of SEQ ID NO: 1888340
agccaaauucuaugcagaa

SEQ ID NO: 2528609 - RNA, 19 nt, Artificial Sequence
  Description of Artificial Sequence: Synthetic oligonucleotide
  Antisense strand to SEQ ID NO: 2528608
uucugcauagaauuuggcu

SEQ ID NO: 2528610 - RNA, 19 nt, Artificial Sequence
  Description of Artificial Sequence: Synthetic oligonucleotide
  Sense strand starting at position 3908 of SEQ ID NO: 1888340
gaagcaaggcuaggugaau

SEQ ID NO: 2528611 - RNA, 19 nt, Artificial Sequence
  Description of Artificial Sequence: Synthetic oligonucleotide
  Antisense strand to SEQ ID NO: 2528610
auucaccuagccuugcuuc

SEQ ID NO: 2528612 - RNA, 19 nt, Artificial Sequence
  Description of Artificial Sequence: Synthetic oligonucleotide
  Sense strand starting at position 3226 of SEQ ID NO: 1888340
gggcaaaguaucugaguga

SEQ ID NO: 2528613 - RNA, 19 nt, Artificial Sequence
  Description of Artificial Sequence: Synthetic oligonucleotide
  Antisense strand to SEQ ID NO: 2528612
ucacucagauacuuugccc

SEQ ID NO: 2528614 - RNA, 19 nt, Artificial Sequence
  Description of Artificial Sequence: Synthetic oligonucleotide
  Sense strand starting at position 30 of SEQ ID NO: 1888340
gagauuguguuacuauacu

SEQ ID NO: 2528615 - RNA, 19 nt, Artificial Sequence
  Description of Artificial Sequence: Synthetic oligonucleotide
  Antisense strand to SEQ ID NO: 2528614
aguauaguaacacaaucuc

SEQ ID NO: 2528616 - RNA, 19 nt, Artificial Sequence
  Description of Artificial Sequence: Synthetic oligonucleotide
  Sense strand starting at position 2767 of SEQ ID NO: 1888340
gccaaauucuaugcagaau

SEQ ID NO: 2528617 - RNA, 19 nt, Artificial Sequence
  Description of Artificial Sequence: Synthetic oligonucleotide
  Antisense strand to SEQ ID NO: 2528616
auucugcauagaauuuggc

SEQ ID NO: 2528618 - RNA, 19 nt, Artificial Sequence
  Description of Artificial Sequence: Synthetic oligonucleotide
  Sense strand starting at position 1425 of SEQ ID NO: 1888340
gagugugaaucccugugaa

SEQ ID NO: 2528619 - RNA, 19 nt, Artificial Sequence
  Description of Artificial Sequence: Synthetic oligonucleotide
  Antisense strand to SEQ ID NO: 2528618
uucacagggauucacacuc

SEQ ID NO: 2528620 - RNA, 19 nt, Artificial Sequence
  Description of Artificial Sequence: Synthetic oligonucleotide
  Sense strand starting at position 2101 of SEQ ID NO: 1888340
acacguguugagugaaaga

SEQ ID NO: 2528621 - RNA, 19 nt, Artificial Sequence
  Description of Artificial Sequence: Synthetic oligonucleotide
  Antisense strand to SEQ ID NO: 2528620
ucuuucacucaacacgugu

SEQ ID NO: 2528622 - RNA, 19 nt, Artificial Sequence
  Description of Artificial Sequence: Synthetic oligonucleotide
  Sense strand starting at position 2956 of SEQ ID NO: 1888340
cauuaagucggugagguuu

SEQ ID NO: 2528623 - RNA, 19 nt, Artificial Sequence
  Description of Artificial Sequence: Synthetic oligonucleotide
  Antisense strand to SEQ ID NO: 2528622
aaaccucaccgacuuaaug

SEQ ID NO: 2528624 - RNA, 19 nt, Artificial Sequence
  Description of Artificial Sequence: Synthetic oligonucleotide
  Sense strand starting at position 1435 of SEQ ID NO: 1888340
cccugugaaucggcagaga

SEQ ID NO: 2528625 - RNA, 19 nt, Artificial Sequence
  Description of Artificial Sequence: Synthetic oligonucleotide
  Antisense strand to SEQ ID NO: 2528624
ucucugccgauucacaggg

SEQ ID NO: 2528626 - RNA, 19 nt, Artificial Sequence
  Description of Artificial Sequence: Synthetic oligonucleotide
  Sense strand starting at position 2813 of SEQ ID NO: 1888340
ggcuauguuccugacccuu

SEQ ID NO: 2528627 - RNA, 19 nt, Artificial Sequence
  Description of Artificial Sequence: Synthetic oligonucleotide
  Antisense strand to SEQ ID NO: 2528626
aagggucaggaacauagcc

SEQ ID NO: 2528628 - RNA, 19 nt, Artificial Sequence
  Description of Artificial Sequence: Synthetic oligonucleotide
  Sense strand starting at position 825 of SEQ ID NO: 1888340
ggcucuucccaaugugaag

SEQ ID NO: 2528629 - RNA, 19 nt, Artificial Sequence
  Description of Artificial Sequence: Synthetic oligonucleotide
  Antisense strand to SEQ ID NO: 2528628
cuucacauugggaagagcc

SEQ ID NO: 2528630 - RNA, 19 nt, Artificial Sequence
  Description of Artificial Sequence: Synthetic oligonucleotide
  Sense strand starting at position 1574 of SEQ ID NO: 1888340
acugucuuaugguucucaa

SEQ ID NO: 2528631 - RNA, 19 nt, Artificial Sequence
  Description of Artificial Sequence: Synthetic oligonucleotide
  Antisense strand to SEQ ID NO: 2528630
uugagaaccauaagacagu

SEQ ID NO: 2528632 - RNA, 19 nt, Artificial Sequence
  Description of Artificial Sequence: Synthetic oligonucleotide
  Sense strand starting at position 2881 of SEQ ID NO: 1888340
ugcucugggccuuaaguga

SEQ ID NO: 2528633 - RNA, 19 nt, Artificial Sequence
  Description of Artificial Sequence: Synthetic oligonucleotide
  Antisense strand to SEQ ID NO: 2528632
ucacuuaaggcccagagca

SEQ ID NO: 2528634 - RNA, 19 nt, Artificial Sequence
  Description of Artificial Sequence: Synthetic oligonucleotide
  Sense strand starting at position 26 of SEQ ID NO: 1888340
agcugagauuguguuacua

SEQ ID NO: 2528635 - RNA, 19 nt, Artificial Sequence
  Description of Artificial Sequence: Synthetic oligonucleotide
  Antisense strand to SEQ ID NO: 2528634
uaguaacacaaucucagcu

SEQ ID NO: 2528636 - RNA, 19 nt, Artificial Sequence
  Description of Artificial Sequence: Synthetic oligonucleotide
  Sense strand starting at position 3170 of SEQ ID NO: 1888340
gaaggaaucucccagggau

SEQ ID NO: 2528637 - RNA, 19 nt, Artificial Sequence
  Description of Artificial Sequence: Synthetic oligonucleotide
  Antisense strand to SEQ ID NO: 2528636
aucccugggagauuccuuc

SEQ ID NO: 2528638 - RNA, 19 nt, Artificial Sequence
  Description of Artificial Sequence: Synthetic oligonucleotide
  Sense strand starting at position 2004 of SEQ ID NO: 1888340
gggauaagauuuggcaucu

SEQ ID NO: 2528639 - RNA, 19 nt, Artificial Sequence
  Description of Artificial Sequence: Synthetic oligonucleotide
  Antisense strand to SEQ ID NO: 2528638
agaugccaaaucuuauccc

SEQ ID NO: 2528640 - RNA, 19 nt, Artificial Sequence
  Description of Artificial Sequence: Synthetic oligonucleotide
  Sense strand starting at position 463 of SEQ ID NO: 1888340
gcugauuaaagcuacguuu

SEQ ID NO: 2528641 - RNA, 19 nt, Artificial Sequence
  Description of Artificial Sequence: Synthetic oligonucleotide
  Antisense strand to SEQ ID NO: 2528640
aaacguagcuuuaaucagc

SEQ ID NO: 2528642 - RNA, 19 nt, Artificial Sequence
  Description of Artificial Sequence: Synthetic oligonucleotide
  Sense strand starting at position 2058 of SEQ ID NO: 1888340
cccaucugaugauagagaa

SEQ ID NO: 2528643 - RNA, 19 nt, Artificial Sequence
  Description of Artificial Sequence: Synthetic oligonucleotide
  Antisense strand to SEQ ID NO: 2528642
uucucuaucaucagauggg

SEQ ID NO: 2528644 - RNA, 19 nt, Artificial Sequence
  Description of Artificial Sequence: Synthetic oligonucleotide
  Sense strand starting at position 3305 of SEQ ID NO: 1888340
gcauguaccaaaugugagu

SEQ ID NO: 2528645 - RNA, 19 nt, Artificial Sequence
  Description of Artificial Sequence: Synthetic oligonucleotide
  Antisense strand to SEQ ID NO: 2528644
acucacauuugguacaugc

SEQ ID NO: 2528646 - RNA, 19 nt, Artificial Sequence
  Description of Artificial Sequence: Synthetic oligonucleotide
  Sense strand starting at position 3375 of SEQ ID NO: 1888340
aaagcagauguuuguaugu

SEQ ID NO: 2528647 - RNA, 19 nt, Artificial Sequence
  Description of Artificial Sequence: Synthetic oligonucleotide
  Antisense strand to SEQ ID NO: 2528646
acauacaaacaucugcuuu

SEQ ID NO: 2528648 - RNA, 19 nt, Artificial Sequence
  Description of Artificial Sequence: Synthetic oligonucleotide
  Sense strand starting at position 3371 of SEQ ID NO: 1888340
ugugaaagcagauguuugu

SEQ ID NO: 2528649 - RNA, 19 nt, Artificial Sequence
  Description of Artificial Sequence: Synthetic oligonucleotide
  Antisense strand to SEQ ID NO: 2528648
acaaacaucugcuuucaca

SEQ ID NO: 2528650 - RNA, 19 nt, Artificial Sequence
  Description of Artificial Sequence: Synthetic oligonucleotide
  Sense strand starting at position 2955 of SEQ ID NO: 1888340
ccauuaagucggugagguu

SEQ ID NO: 2528651 - RNA, 19 nt, Artificial Sequence
  Description of Artificial Sequence: Synthetic oligonucleotide
  Antisense strand to SEQ ID NO: 2528650
aaccucaccgacuuaaugg

SEQ ID NO: 2528652 - RNA, 19 nt, Artificial Sequence
  Description of Artificial Sequence: Synthetic oligonucleotide
  Sense strand starting at position 3441 of SEQ ID NO: 1888340
ggauguuguaccugagcga

SEQ ID NO: 2528653 - RNA, 19 nt, Artificial Sequence
  Description of Artificial Sequence: Synthetic oligonucleotide
  Antisense strand to SEQ ID NO: 2528652
ucgcucagguacaacaucc

SEQ ID NO: 2528654 - RNA, 19 nt, Artificial Sequence
  Description of Artificial Sequence: Synthetic oligonucleotide
  Sense strand starting at position 3731 of SEQ ID NO: 1888340
ggcguuaucauucggacaa

SEQ ID NO: 2528655 - RNA, 19 nt, Artificial Sequence
  Description of Artificial Sequence: Synthetic oligonucleotide
  Antisense strand to SEQ ID NO: 2528654
uuguccgaaugauaacgcc

SEQ ID NO: 2528656 - RNA, 19 nt, Artificial Sequence
  Description of Artificial Sequence: Synthetic oligonucleotide
  Sense strand starting at position 3350 of SEQ ID NO: 1888341
uuauguauuggagacaggu

SEQ ID NO: 2528657 - RNA, 19 nt, Artificial Sequence
  Description of Artificial Sequence: Synthetic oligonucleotide
  Antisense strand to SEQ ID NO: 2528656
accugucuccaauacauaa

SEQ ID NO: 2528658 - RNA, 19 nt, Artificial Sequence
  Description of Artificial Sequence: Synthetic oligonucleotide
  Sense strand starting at position 3352 of SEQ ID NO: 1888341
auguauuggagacagguuu

SEQ ID NO: 2528659 - RNA, 19 nt, Artificial Sequence
  Description of Artificial Sequence: Synthetic oligonucleotide
  Antisense strand to SEQ ID NO: 2528658
aaaccugucuccaauacau

SEQ ID NO: 2528660 - RNA, 19 nt, Artificial Sequence
  Description of Artificial Sequence: Synthetic oligonucleotide
  Sense strand starting at position 1680 of SEQ ID NO: 1888341
ccugauuugucuucucuug

SEQ ID NO: 2528661 - RNA, 19 nt, Artificial Sequence
  Description of Artificial Sequence: Synthetic oligonucleotide
  Antisense strand to SEQ ID NO: 2528660
caagagaagacaaaucagg

SEQ ID NO: 2528662 - RNA, 19 nt, Artificial Sequence
  Description of Artificial Sequence: Synthetic oligonucleotide
  Sense strand starting at position 1363 of SEQ ID NO: 1888341
uuugaagaacuaugguaca

SEQ ID NO: 2528663 - RNA, 19 nt, Artificial Sequence
  Description of Artificial Sequence: Synthetic oligonucleotide
  Antisense strand to SEQ ID NO: 2528662
uguaccauaguucuucaaa

SEQ ID NO: 2528664 - RNA, 19 nt, Artificial Sequence
  Description of Artificial Sequence: Synthetic oligonucleotide
  Sense strand starting at position 2075 of SEQ ID NO: 1888341
aggaaugucaggcauccau

SEQ ID NO: 2528665 - RNA, 19 nt, Artificial Sequence
  Description of Artificial Sequence: Synthetic oligonucleotide
  Antisense strand to SEQ ID NO: 2528664
auggaugccugacauuccu

SEQ ID NO: 2528666 - RNA, 19 nt, Artificial Sequence
  Description of Artificial Sequence: Synthetic oligonucleotide
  Sense strand starting at position 354 of SEQ ID NO: 1888341
guuugacaucaauagcaca

SEQ ID NO: 2528667 - RNA, 19 nt, Artificial Sequence
  Description of Artificial Sequence: Synthetic oligonucleotide
  Antisense strand to SEQ ID NO: 2528666
ugugcuauugaugucaaac

SEQ ID NO: 2528668 - RNA, 19 nt, Artificial Sequence
  Description of Artificial Sequence: Synthetic oligonucleotide
  Sense strand starting at position 3414 of SEQ ID NO: 1888341
ucuaauggauagucugaua

SEQ ID NO: 2528669 - RNA, 19 nt, Artificial Sequence
  Description of Artificial Sequence: Synthetic oligonucleotide
  Antisense strand to SEQ ID NO: 2528668
uaucagacuauccauuaga

SEQ ID NO: 2528670 - RNA, 19 nt, Artificial Sequence
  Description of Artificial Sequence: Synthetic oligonucleotide
  Sense strand starting at position 1714 of SEQ ID NO: 1888341
gcucuagaugaucauuauu

SEQ ID NO: 2528671 - RNA, 19 nt, Artificial Sequence
  Description of Artificial Sequence: Synthetic oligonucleotide
  Antisense strand to SEQ ID NO: 2528670
aauaaugaucaucuagagc

SEQ ID NO: 2528672 - RNA, 19 nt, Artificial Sequence
  Description of Artificial Sequence: Synthetic oligonucleotide
  Sense strand starting at position 3263 of SEQ ID NO: 1888341
auuugugucuagucuccaa

SEQ ID NO: 2528673 - RNA, 19 nt, Artificial Sequence
  Description of Artificial Sequence: Synthetic oligonucleotide
  Antisense strand to SEQ ID NO: 2528672
uuggagacuagacacaaau

SEQ ID NO: 2528674 - RNA, 19 nt, Artificial Sequence
  Description of Artificial Sequence: Synthetic oligonucleotide
  Sense strand starting at position 704 of SEQ ID NO: 1888341
aagauugugucauuagaga

SEQ ID NO: 2528675 - RNA, 19 nt, Artificial Sequence
  Description of Artificial Sequence: Synthetic oligonucleotide
  Antisense strand to SEQ ID NO: 2528674
ucucuaaugacacaaucuu

SEQ ID NO: 2528676 - RNA, 19 nt, Artificial Sequence
  Description of Artificial Sequence: Synthetic oligonucleotide
  Sense strand starting at position 654 of SEQ ID NO: 1888341
gcuguaauacucuaacagg

SEQ ID NO: 2528677 - RNA, 19 nt, Artificial Sequence
  Description of Artificial Sequence: Synthetic oligonucleotide
  Antisense strand to SEQ ID NO: 2528676
ccuguuagaguauuacagc

SEQ ID NO: 2528678 - RNA, 19 nt, Artificial Sequence
  Description of Artificial Sequence: Synthetic oligonucleotide
  Sense strand starting at position 129 of SEQ ID NO: 1888341
aaagaaauugugugaguga

SEQ ID NO: 2528679 - RNA, 19 nt, Artificial Sequence
  Description of Artificial Sequence: Synthetic oligonucleotide
  Antisense strand to SEQ ID NO: 2528678
ucacucacacaauuucuuu

SEQ ID NO: 2528680 - RNA, 19 nt, Artificial Sequence
  Description of Artificial Sequence: Synthetic oligonucleotide
  Sense strand starting at position 2632 of SEQ ID NO: 1888341
cugccucuuuggucaauuu

SEQ ID NO: 2528681 - RNA, 19 nt, Artificial Sequence
  Description of Artificial Sequence: Synthetic oligonucleotide
  Antisense strand to SEQ ID NO: 2528680
aaauugaccaaagaggcag

SEQ ID NO: 2528682 - RNA, 19 nt, Artificial Sequence
  Description of Artificial Sequence: Synthetic oligonucleotide
  Sense strand starting at position 296 of SEQ ID NO: 1888341
uuaugaucaggcugauuaa

SEQ ID NO: 2528683 - RNA, 19 nt, Artificial Sequence
  Description of Artificial Sequence: Synthetic oligonucleotide
  Antisense strand to SEQ ID NO: 2528682
uuaaucagccugaucauaa

SEQ ID NO: 2528684 - RNA, 19 nt, Artificial Sequence
  Description of Artificial Sequence: Synthetic oligonucleotide
  Sense strand starting at position 1706 of SEQ ID NO: 1888341
gccaucaagcucuagauga

SEQ ID NO: 2528685 - RNA, 19 nt, Artificial Sequence
  Description of Artificial Sequence: Synthetic oligonucleotide
  Antisense strand to SEQ ID NO: 2528684
ucaucuagagcuugauggc

SEQ ID NO: 2528686 - RNA, 19 nt, Artificial Sequence
  Description of Artificial Sequence: Synthetic oligonucleotide
  Sense strand starting at position 132 of SEQ ID NO: 1888341
gaaauugugugagugaaca

SEQ ID NO: 2528687 - RNA, 19 nt, Artificial Sequence
  Description of Artificial Sequence: Synthetic oligonucleotide
  Antisense strand to SEQ ID NO: 2528686
uguucacucacacaauuuc

SEQ ID NO: 2528688 - RNA, 19 nt, Artificial Sequence
  Description of Artificial Sequence: Synthetic oligonucleotide
  Sense strand starting at position 1713 of SEQ ID NO: 1888341
agcucuagaugaucauuau

SEQ ID NO: 2528689 - RNA, 19 nt, Artificial Sequence
  Description of Artificial Sequence: Synthetic oligonucleotide
  Antisense strand to SEQ ID NO: 2528688
auaaugaucaucuagagcu

SEQ ID NO: 2528690 - RNA, 19 nt, Artificial Sequence
  Description of Artificial Sequence: Synthetic oligonucleotide
  Sense strand starting at position 591 of SEQ ID NO: 1888341
uuugucauccacgaacauu

SEQ ID NO: 2528691 - RNA, 19 nt, Artificial Sequence
  Description of Artificial Sequence: Synthetic oligonucleotide
  Antisense strand to SEQ ID NO: 2528690
aauguucguggaugacaaa

SEQ ID NO: 2528692 - RNA, 19 nt, Artificial Sequence
  Description of Artificial Sequence: Synthetic oligonucleotide
  Sense strand starting at position 90 of SEQ ID NO: 1888341
aaguaaguuguggaauguu

SEQ ID NO: 2528693 - RNA, 19 nt, Artificial Sequence
  Description of Artificial Sequence: Synthetic oligonucleotide
  Antisense strand to SEQ ID NO: 2528692
aacauuccacaacuuacuu

SEQ ID NO: 2528694 - RNA, 19 nt, Artificial Sequence
  Description of Artificial Sequence: Synthetic oligonucleotide
  Sense strand starting at position 1374 of SEQ ID NO: 1888341
augguacaccugugauuaa

SEQ ID NO: 2528695 - RNA, 19 nt, Artificial Sequence
  Description of Artificial Sequence: Synthetic oligonucleotide
  Antisense strand to SEQ ID NO: 2528694
uuaaucacagguguaccau

SEQ ID NO: 2528696 - RNA, 19 nt, Artificial Sequence
  Description of Artificial Sequence: Synthetic oligonucleotide
  Sense strand starting at position 2101 of SEQ ID NO: 1888341
uggucaggugguuaguaaa

SEQ ID NO: 2528697 - RNA, 19 nt, Artificial Sequence
  Description of Artificial Sequence: Synthetic oligonucleotide
  Antisense strand to SEQ ID NO: 2528696
uuuacuaaccaccugacca

SEQ ID NO: 2528698 - RNA, 19 nt, Artificial Sequence
  Description of Artificial Sequence: Synthetic oligonucleotide
  Sense strand starting at position 3483 of SEQ ID NO: 1888341
uugcaauuauauucggaaa

SEQ ID NO: 2528699 - RNA, 19 nt, Artificial Sequence
  Description of Artificial Sequence: Synthetic oligonucleotide
  Antisense strand to SEQ ID NO: 2528698
uuuccgaauauaauugcaa

SEQ ID NO: 2528700 - RNA, 19 nt, Artificial Sequence
  Description of Artificial Sequence: Synthetic oligonucleotide
  Sense strand starting at position 2344 of SEQ ID NO: 1888341
uguguacagguccaguaaa

SEQ ID NO: 2528701 - RNA, 19 nt, Artificial Sequence
  Description of Artificial Sequence: Synthetic oligonucleotide
  Antisense strand to SEQ ID NO: 2528700
uuuacuggaccuguacaca

SEQ ID NO: 2528702 - RNA, 19 nt, Artificial Sequence
  Description of Artificial Sequence: Synthetic oligonucleotide
  Sense strand starting at position 3378 of SEQ ID NO: 1888341
gcugucagugcuggaauuu

SEQ ID NO: 2528703 - RNA, 19 nt, Artificial Sequence
  Description of Artificial Sequence: Synthetic oligonucleotide
  Antisense strand to SEQ ID NO: 2528702
aaauuccagcacugacagc

SEQ ID NO: 2528704 - RNA, 19 nt, Artificial Sequence
  Description of Artificial Sequence: Synthetic oligonucleotide
  Sense strand starting at position 2449 of SEQ ID NO: 1888341
augcgagauccuggaagua

SEQ ID NO: 2528705 - RNA, 19 nt, Artificial Sequence
  Description of Artificial Sequence: Synthetic oligonucleotide
  Antisense strand to SEQ ID NO: 2528704
uacuuccaggaucucgcau

SEQ ID NO: 2528706 - RNA, 19 nt, Artificial Sequence
  Description of Artificial Sequence: Synthetic oligonucleotide
  Sense strand starting at position 48 of SEQ ID NO: 1888341
uaagguguuguuuaaaguu

SEQ ID NO: 2528707 - RNA, 19 nt, Artificial Sequence
  Description of Artificial Sequence: Synthetic oligonucleotide
  Antisense strand to SEQ ID NO: 2528706
aacuuuaaacaacaccuua

SEQ ID NO: 2528708 - RNA, 19 nt, Artificial Sequence
  Description of Artificial Sequence: Synthetic oligonucleotide
  Sense strand starting at position 345 of SEQ ID NO: 1888341
uugaguuggguuugacauc

SEQ ID NO: 2528709 - RNA, 19 nt, Artificial Sequence
  Description of Artificial Sequence: Synthetic oligonucleotide
  Antisense strand to SEQ ID NO: 2528708
gaugucaaacccaacucaa

SEQ ID NO: 2528710 - RNA, 19 nt, Artificial Sequence
  Description of Artificial Sequence: Synthetic oligonucleotide
  Sense strand starting at position 2852 of SEQ ID NO: 1888341
ugucacugucuauagucau

SEQ ID NO: 2528711 - RNA, 19 nt, Artificial Sequence
  Description of Artificial Sequence: Synthetic oligonucleotide
  Antisense strand to SEQ ID NO: 2528710
augacuauagacagugaca

SEQ ID NO: 2528712 - RNA, 19 nt, Artificial Sequence
  Description of Artificial Sequence: Synthetic oligonucleotide
  Sense strand starting at position 3259 of SEQ ID NO: 1888341
gcucauuugugucuagucu

SEQ ID NO: 2528713 - RNA, 19 nt, Artificial Sequence
  Description of Artificial Sequence: Synthetic oligonucleotide
  Antisense strand to SEQ ID NO: 2528712
agacuagacacaaaugagc

SEQ ID NO: 2528714 - RNA, 19 nt, Artificial Sequence
  Description of Artificial Sequence: Synthetic oligonucleotide
  Sense strand starting at position 2451 of SEQ ID NO: 1888341
gcgagauccuggaaguaug

SEQ ID NO: 2528715 - RNA, 19 nt, Artificial Sequence
  Description of Artificial Sequence: Synthetic oligonucleotide
  Antisense strand to SEQ ID NO: 2528714
cauacuuccaggaucucgc

SEQ ID NO: 2528716 - RNA, 19 nt, Artificial Sequence
  Description of Artificial Sequence: Synthetic oligonucleotide
  Sense strand starting at position 1377 of SEQ ID NO: 1888341
guacaccugugauuaaguu

SEQ ID NO: 2528717 - RNA, 19 nt, Artificial Sequence
  Description of Artificial Sequence: Synthetic oligonucleotide
  Antisense strand to SEQ ID NO: 2528716
aacuuaaucacagguguac

SEQ ID NO: 2528718 - RNA, 19 nt, Artificial Sequence
  Description of Artificial Sequence: Synthetic oligonucleotide
  Sense strand starting at position 3569 of SEQ ID NO: 1888341
guaacuagauuagucuguu

SEQ ID NO: 2528719 - RNA, 19 nt, Artificial Sequence
  Description of Artificial Sequence: Synthetic oligonucleotide
  Antisense strand to SEQ ID NO: 2528718
aacagacuaaucuaguuac

SEQ ID NO: 2528720 - RNA, 19 nt, Artificial Sequence
  Description of Artificial Sequence: Synthetic oligonucleotide
  Sense strand starting at position 2496 of SEQ ID NO: 1888341
ggucaaaccgugcacuuua

SEQ ID NO: 2528721 - RNA, 19 nt, Artificial Sequence
  Description of Artificial Sequence: Synthetic oligonucleotide
  Antisense strand to SEQ ID NO: 2528720
uaaagugcacgguuugacc

SEQ ID NO: 2528722 - RNA, 19 nt, Artificial Sequence
  Description of Artificial Sequence: Synthetic oligonucleotide
  Sense strand starting at position 1536 of SEQ ID NO: 1888341
uugcaauucuuggcacaua

SEQ ID NO: 2528723 - RNA, 19 nt, Artificial Sequence
  Description of Artificial Sequence: Synthetic oligonucleotide
  Antisense strand to SEQ ID NO: 2528722
uaugugccaagaauugcaa

SEQ ID NO: 2528724 - RNA, 19 nt, Artificial Sequence
  Description of Artificial Sequence: Synthetic oligonucleotide
  Sense strand starting at position 1535 of SEQ ID NO: 1888341
auugcaauucuuggcacau

SEQ ID NO: 2528725 - RNA, 19 nt, Artificial Sequence
  Description of Artificial Sequence: Synthetic oligonucleotide
  Antisense strand to SEQ ID NO: 2528724
augugccaagaauugcaau

SEQ ID NO: 2528726 - RNA, 19 nt, Artificial Sequence
  Description of Artificial Sequence: Synthetic oligonucleotide
  Sense strand starting at position 2086 of SEQ ID NO: 1888341
gcauccaucaggugauggu

SEQ ID NO: 2528727 - RNA, 19 nt, Artificial Sequence
  Description of Artificial Sequence: Synthetic oligonucleotide
  Antisense strand to SEQ ID NO: 2528726
accaucaccugauggaugc

SEQ ID NO: 2528728 - RNA, 19 nt, Artificial Sequence
  Description of Artificial Sequence: Synthetic oligonucleotide
  Sense strand starting at position 1231 of SEQ ID NO: 1888341
ugauuauucuugcugugau

SEQ ID NO: 2528729 - RNA, 19 nt, Artificial Sequence
  Description of Artificial Sequence: Synthetic oligonucleotide
  Antisense strand to SEQ ID NO: 2528728
aucacagcaagaauaauca

SEQ ID NO: 2528730 - RNA, 19 nt, Artificial Sequence
  Description of Artificial Sequence: Synthetic oligonucleotide
  Sense strand starting at position 603 of SEQ ID NO: 1888341
gaacauuaguugucuuguu

SEQ ID NO: 2528731 - RNA, 19 nt, Artificial Sequence
  Description of Artificial Sequence: Synthetic oligonucleotide
  Antisense strand to SEQ ID NO: 2528730
aacaagacaacuaauguuc

SEQ ID NO: 2528732 - RNA, 19 nt, Artificial Sequence
  Description of Artificial Sequence: Synthetic oligonucleotide
  Sense strand starting at position 323 of SEQ ID NO: 1888341
agauuugccuauuaagguu

SEQ ID NO: 2528733 - RNA, 19 nt, Artificial Sequence
  Description of Artificial Sequence: Synthetic oligonucleotide
  Antisense strand to SEQ ID NO: 2528732
aaccuuaauaggcaaaucu

SEQ ID NO: 2528734 - RNA, 19 nt, Artificial Sequence
  Description of Artificial Sequence: Synthetic oligonucleotide
  Sense strand starting at position 2530 of SEQ ID NO: 1888341
acuuguuccucuuccaagu

SEQ ID NO: 2528735 - RNA, 19 nt, Artificial Sequence
  Description of Artificial Sequence: Synthetic oligonucleotide
  Antisense strand to SEQ ID NO: 2528734
acuuggaagaggaacaagu

SEQ ID NO: 2528736 - RNA, 19 nt, Artificial Sequence
  Description of Artificial Sequence: Synthetic oligonucleotide
  Sense strand starting at position 1477 of SEQ ID NO: 1888344
ggauaaacaucugucagau

SEQ ID NO: 2528737 - RNA, 19 nt, Artificial Sequence
  Description of Artificial Sequence: Synthetic oligonucleotide
  Antisense strand to SEQ ID NO: 2528736
aucugacagauguuuaucc

SEQ ID NO: 2528738 - RNA, 19 nt, Artificial Sequence
  Description of Artificial Sequence: Synthetic oligonucleotide
  Sense strand starting at position 3750 of SEQ ID NO: 1888344
agauguaguguagauagau

SEQ ID NO: 2528739 - RNA, 19 nt, Artificial Sequence
  Description of Artificial Sequence: Synthetic oligonucleotide
  Antisense strand to SEQ ID NO: 2528738
aucuaucuacacuacaucu

SEQ ID NO: 2528740 - RNA, 19 nt, Artificial Sequence
  Description of Artificial Sequence: Synthetic oligonucleotide
  Sense strand starting at position 19 of SEQ ID NO: 1888344
guugacuuggaugaaaugu

SEQ ID NO: 2528741 - RNA, 19 nt, Artificial Sequence
  Description of Artificial Sequence: Synthetic oligonucleotide
  Antisense strand to SEQ ID NO: 2528740
acauuucauccaagucaac

SEQ ID NO: 2528742 - RNA, 19 nt, Artificial Sequence
  Description of Artificial Sequence: Synthetic oligonucleotide
  Sense strand starting at position 812 of SEQ ID NO: 1888344
gauauaagguucccugaag

SEQ ID NO: 2528743 - RNA, 19 nt, Artificial Sequence
  Description of Artificial Sequence: Synthetic oligonucleotide
  Antisense strand to SEQ ID NO: 2528742
cuucagggaaccuuauauc

SEQ ID NO: 2528744 - RNA, 19 nt, Artificial Sequence
  Description of Artificial Sequence: Synthetic oligonucleotide
  Sense strand starting at position 846 of SEQ ID NO: 1888344
gaggaacuaccaugauugu

SEQ ID NO: 2528745 - RNA, 19 nt, Artificial Sequence
  Description of Artificial Sequence: Synthetic oligonucleotide
  Antisense strand to SEQ ID NO: 2528744
acaaucaugguaguuccuc

SEQ ID NO: 2528746 - RNA, 19 nt, Artificial Sequence
  Description of Artificial Sequence: Synthetic oligonucleotide
  Sense strand starting at position 1360 of SEQ ID NO: 1888344
uuugaagacagaggucuau

SEQ ID NO: 2528747 - RNA, 19 nt, Artificial Sequence
  Description of Artificial Sequence: Synthetic oligonucleotide
  Antisense strand to SEQ ID NO: 2528746
auagaccucugucuucaaa

SEQ ID NO: 2528748 - RNA, 19 nt, Artificial Sequence
  Description of Artificial Sequence: Synthetic oligonucleotide
  Sense strand starting at position 3880 of SEQ ID NO: 1888344
uguagacuuggccauaaag

SEQ ID NO: 2528749 - RNA, 19 nt, Artificial Sequence
  Description of Artificial Sequence: Synthetic oligonucleotide
  Antisense strand to SEQ ID NO: 2528748
cuuuauggccaagucuaca

SEQ ID NO: 2528750 - RNA, 19 nt, Artificial Sequence
  Description of Artificial Sequence: Synthetic oligonucleotide
  Sense strand starting at position 3441 of SEQ ID NO: 1888344
uuucucaaauggucagaaa

SEQ ID NO: 2528751 - RNA, 19 nt, Artificial Sequence
  Description of Artificial Sequence: Synthetic oligonucleotide
  Antisense strand to SEQ ID NO: 2528750
uuucugaccauuugagaaa

SEQ ID NO: 2528752 - RNA, 19 nt, Artificial Sequence
  Description of Artificial Sequence: Synthetic oligonucleotide
  Sense strand starting at position 233 of SEQ ID NO: 1888344
uggguaguguugaucuugu

SEQ ID NO: 2528753 - RNA, 19 nt, Artificial Sequence
  Description of Artificial Sequence: Synthetic oligonucleotide
  Antisense strand to SEQ ID NO: 2528752
acaagaucaacacuaccca

SEQ ID NO: 2528754 - RNA, 19 nt, Artificial Sequence
  Description of Artificial Sequence: Synthetic oligonucleotide
  Sense strand starting at position 3870 of SEQ ID NO: 1888344
augggaguccuguagacuu

SEQ ID NO: 2528755 - RNA, 19 nt, Artificial Sequence
  Description of Artificial Sequence: Synthetic oligonucleotide
  Antisense strand to SEQ ID NO: 2528754
aagucuacaggacucccau

SEQ ID NO: 2528756 - RNA, 19 nt, Artificial Sequence
  Description of Artificial Sequence: Synthetic oligonucleotide
  Sense strand starting at position 3741 of SEQ ID NO: 1888344
ggcauuuguagauguagug

SEQ ID NO: 2528757 - RNA, 19 nt, Artificial Sequence
  Description of Artificial Sequence: Synthetic oligonucleotide
  Antisense strand to SEQ ID NO: 2528756
cacuacaucuacaaaugcc

SEQ ID NO: 2528758 - RNA, 19 nt, Artificial Sequence
  Description of Artificial Sequence: Synthetic oligonucleotide
  Sense strand starting at position 2824 of SEQ ID NO: 1888344
ugagcuuaucaggaaagcu

SEQ ID NO: 2528759 - RNA, 19 nt, Artificial Sequence
  Description of Artificial Sequence: Synthetic oligonucleotide
  Antisense strand to SEQ ID NO: 2528758
agcuuuccugauaagcuca

SEQ ID NO: 2528760 - RNA, 19 nt, Artificial Sequence
  Description of Artificial Sequence: Synthetic oligonucleotide
  Sense strand starting at position 2397 of SEQ ID NO: 1888344
aagagagaacacuguguuu

SEQ ID NO: 2528761 - RNA, 19 nt, Artificial Sequence
  Description of Artificial Sequence: Synthetic oligonucleotide
  Antisense strand to SEQ ID NO: 2528760
aaacacaguguucucucuu

SEQ ID NO: 2528762 - RNA, 19 nt, Artificial Sequence
  Description of Artificial Sequence: Synthetic oligonucleotide
  Sense strand starting at position 2964 of SEQ ID NO: 1888344
aaaguuucgcaggaauuag

SEQ ID NO: 2528763 - RNA, 19 nt, Artificial Sequence
  Description of Artificial Sequence: Synthetic oligonucleotide
  Antisense strand to SEQ ID NO: 2528762
cuaauuccugcgaaacuuu

SEQ ID NO: 2528764 - RNA, 19 nt, Artificial Sequence
  Description of Artificial Sequence: Synthetic oligonucleotide
  Sense strand starting at position 15 of SEQ ID NO: 1888344
cccaguugacuuggaugaa

SEQ ID NO: 2528765 - RNA, 19 nt, Artificial Sequence
  Description of Artificial Sequence: Synthetic oligonucleotide
  Antisense strand to SEQ ID NO: 2528764
uucauccaagucaacuggg

SEQ ID NO: 2528766 - RNA, 19 nt, Artificial Sequence
  Description of Artificial Sequence: Synthetic oligonucleotide
  Sense strand starting at position 3627 of SEQ ID NO: 1888344
accagaaucagucagcgau

SEQ ID NO: 2528767 - RNA, 19 nt, Artificial Sequence
  Description of Artificial Sequence: Synthetic oligonucleotide
  Antisense strand to SEQ ID NO: 2528766
aucgcugacugauucuggu

SEQ ID NO: 2528768 - RNA, 19 nt, Artificial Sequence
  Description of Artificial Sequence: Synthetic oligonucleotide
  Sense strand starting at position 3671 of SEQ ID NO: 1888344
agacaucugugaguauuag

SEQ ID NO: 2528769 - RNA, 19 nt, Artificial Sequence
  Description of Artificial Sequence: Synthetic oligonucleotide
  Antisense strand to SEQ ID NO: 2528768
cuaauacucacagaugucu

SEQ ID NO: 2528770 - RNA, 19 nt, Artificial Sequence
  Description of Artificial Sequence: Synthetic oligonucleotide
  Sense strand starting at position 1936 of SEQ ID NO: 1888344
acuggucuccauugaauga

SEQ ID NO: 2528771 - RNA, 19 nt, Artificial Sequence
  Description of Artificial Sequence: Synthetic oligonucleotide
  Antisense strand to SEQ ID NO: 2528770
ucauucaauggagaccagu

SEQ ID NO: 2528772 - RNA, 19 nt, Artificial Sequence
  Description of Artificial Sequence: Synthetic oligonucleotide
  Sense strand starting at position 3903 of SEQ ID NO: 1888344
cugagugaucuuugacaca

SEQ ID NO: 2528773 - RNA, 19 nt, Artificial Sequence
  Description of Artificial Sequence: Synthetic oligonucleotide
  Antisense strand to SEQ ID NO: 2528772
ugugucaaagaucacucag

SEQ ID NO: 2528774 - RNA, 19 nt, Artificial Sequence
  Description of Artificial Sequence: Synthetic oligonucleotide
  Sense strand starting at position 3748 of SEQ ID NO: 1888344
guagauguaguguagauag

SEQ ID NO: 2528775 - RNA, 19 nt, Artificial Sequence
  Description of Artificial Sequence: Synthetic oligonucleotide
  Antisense strand to SEQ ID NO: 2528774
cuaucuacacuacaucuac

SEQ ID NO: 2528776 - RNA, 19 nt, Artificial Sequence
  Description of Artificial Sequence: Synthetic oligonucleotide
  Sense strand starting at position 3177 of SEQ ID NO: 1888344
gugccaaugcuagaagaua

SEQ ID NO: 2528777 - RNA, 19 nt, Artificial Sequence
  Description of Artificial Sequence: Synthetic oligonucleotide
  Antisense strand to SEQ ID NO: 2528776
uaucuucuagcauuggcac

SEQ ID NO: 2528778 - RNA, 19 nt, Artificial Sequence
  Description of Artificial Sequence: Synthetic oligonucleotide
  Sense strand starting at position 241 of SEQ ID NO: 1888344
guugaucuuguagauauuc

SEQ ID NO: 2528779 - RNA, 19 nt, Artificial Sequence
  Description of Artificial Sequence: Synthetic oligonucleotide
  Antisense strand to SEQ ID NO: 2528778
gaauaucuacaagaucaac

SEQ ID NO: 2528780 - RNA, 19 nt, Artificial Sequence
  Description of Artificial Sequence: Synthetic oligonucleotide
  Sense strand starting at position 1366 of SEQ ID NO: 1888344
gacagaggucuauguauau

SEQ ID NO: 2528781 - RNA, 19 nt, Artificial Sequence
  Description of Artificial Sequence: Synthetic oligonucleotide
  Antisense strand to SEQ ID NO: 2528780
auauacauagaccucuguc

SEQ ID NO: 2528782 - RNA, 19 nt, Artificial Sequence
  Description of Artificial Sequence: Synthetic oligonucleotide
  Sense strand starting at position 2713 of SEQ ID NO: 1888344
ggacaaugguccucaguag

SEQ ID NO: 2528783 - RNA, 19 nt, Artificial Sequence
  Description of Artificial Sequence: Synthetic oligonucleotide
  Antisense strand to SEQ ID NO: 2528782
cuacugaggaccauugucc

SEQ ID NO: 2528784 - RNA, 19 nt, Artificial Sequence
  Description of Artificial Sequence: Synthetic oligonucleotide
  Sense strand starting at position 580 of SEQ ID NO: 1888344
uuaugauagcaguggauag

SEQ ID NO: 2528785 - RNA, 19 nt, Artificial Sequence
  Description of Artificial Sequence: Synthetic oligonucleotide
  Antisense strand to SEQ ID NO: 2528784
cuauccacugcuaucauaa

SEQ ID NO: 2528786 - RNA, 19 nt, Artificial Sequence
  Description of Artificial Sequence: Synthetic oligonucleotide
  Sense strand starting at position 2613 of SEQ ID NO: 1888344
uacuaagugggaggcauua

SEQ ID NO: 2528787 - RNA, 19 nt, Artificial Sequence
  Description of Artificial Sequence: Synthetic oligonucleotide
  Antisense strand to SEQ ID NO: 2528786
uaaugccucccacuuagua

SEQ ID NO: 2528788 - RNA, 19 nt, Artificial Sequence
  Description of Artificial Sequence: Synthetic oligonucleotide
  Sense strand starting at position 1953 of SEQ ID NO: 1888344
gaguaaucgcauuaccaac

SEQ ID NO: 2528789 - RNA, 19 nt, Artificial Sequence
  Description of Artificial Sequence: Synthetic oligonucleotide
  Antisense strand to SEQ ID NO: 2528788
guugguaaugcgauuacuc

SEQ ID NO: 2528790 - RNA, 19 nt, Artificial Sequence
  Description of Artificial Sequence: Synthetic oligonucleotide
  Sense strand starting at position 813 of SEQ ID NO: 1888344
auauaagguucccugaagu

SEQ ID NO: 2528791 - RNA, 19 nt, Artificial Sequence
  Description of Artificial Sequence: Synthetic oligonucleotide
  Antisense strand to SEQ ID NO: 2528790
acuucagggaaccuuauau

SEQ ID NO: 2528792 - RNA, 19 nt, Artificial Sequence
  Description of Artificial Sequence: Synthetic oligonucleotide
  Sense strand starting at position 2219 of SEQ ID NO: 1888344
uuaagucagucuccaagga

SEQ ID NO: 2528793 - RNA, 19 nt, Artificial Sequence
  Description of Artificial Sequence: Synthetic oligonucleotide
  Antisense strand to SEQ ID NO: 2528792
uccuuggagacugacuuaa

SEQ ID NO: 2528794 - RNA, 19 nt, Artificial Sequence
  Description of Artificial Sequence: Synthetic oligonucleotide
  Sense strand starting at position 3899 of SEQ ID NO: 1888344
cacucugagugaucuuuga

SEQ ID NO: 2528795 - RNA, 19 nt, Artificial Sequence
  Description of Artificial Sequence: Synthetic oligonucleotide
  Antisense strand to SEQ ID NO: 2528794
ucaaagaucacucagagug

SEQ ID NO: 2528796 - RNA, 19 nt, Artificial Sequence
  Description of Artificial Sequence: Synthetic oligonucleotide
  Sense strand starting at position 3892 of SEQ ID NO: 1888344
cauaaagcacucugaguga

SEQ ID NO: 2528797 - RNA, 19 nt, Artificial Sequence
  Description of Artificial Sequence: Synthetic oligonucleotide
  Antisense strand to SEQ ID NO: 2528796
ucacucagagugcuuuaug

SEQ ID NO: 2528798 - RNA, 19 nt, Artificial Sequence
  Description of Artificial Sequence: Synthetic oligonucleotide
  Sense strand starting at position 1652 of SEQ ID NO: 1888344
ggcuuuccuccugaaucca

SEQ ID NO: 2528799 - RNA, 19 nt, Artificial Sequence
  Description of Artificial Sequence: Synthetic oligonucleotide
  Antisense strand to SEQ ID NO: 2528798
uggauucaggaggaaagcc

SEQ ID NO: 2528800 - RNA, 19 nt, Artificial Sequence
  Description of Artificial Sequence: Synthetic oligonucleotide
  Sense strand starting at position 1940 of SEQ ID NO: 1888344
gucuccauugaaugaguaa

SEQ ID NO: 2528801 - RNA, 19 nt, Artificial Sequence
  Description of Artificial Sequence: Synthetic oligonucleotide
  Antisense strand to SEQ ID NO: 2528800
uuacucauucaauggagac

SEQ ID NO: 2528802 - RNA, 19 nt, Artificial Sequence
  Description of Artificial Sequence: Synthetic oligonucleotide
  Sense strand starting at position 1715 of SEQ ID NO: 1888344
aaugucauugccuaaguga

SEQ ID NO: 2528803 - RNA, 19 nt, Artificial Sequence
  Description of Artificial Sequence: Synthetic oligonucleotide
  Antisense strand to SEQ ID NO: 2528802
ucacuuaggcaaugacauu

SEQ ID NO: 2528804 - RNA, 19 nt, Artificial Sequence
  Description of Artificial Sequence: Synthetic oligonucleotide
  Sense strand starting at position 3735 of SEQ ID NO: 1888344
acgcuuggcauuuguagau

SEQ ID NO: 2528805 - RNA, 19 nt, Artificial Sequence
  Description of Artificial Sequence: Synthetic oligonucleotide
  Antisense strand to SEQ ID NO: 2528804
aucuacaaaugccaagcgu

SEQ ID NO: 2528806 - RNA, 19 nt, Artificial Sequence
  Description of Artificial Sequence: Synthetic oligonucleotide
  Sense strand starting at position 3525 of SEQ ID NO: 1888344
ugagcacuauuagugauua

SEQ ID NO: 2528807 - RNA, 19 nt, Artificial Sequence
  Description of Artificial Sequence: Synthetic oligonucleotide
  Antisense strand to SEQ ID NO: 2528806
uaaucacuaauagugcuca

SEQ ID NO: 2528808 - RNA, 19 nt, Artificial Sequence
  Description of Artificial Sequence: Synthetic oligonucleotide
  Sense strand starting at position 3895 of SEQ ID NO: 1888344
aaagcacucugagugaucu

SEQ ID NO: 2528809 - RNA, 19 nt, Artificial Sequence
  Description of Artificial Sequence: Synthetic oligonucleotide
  Antisense strand to SEQ ID NO: 2528808
agaucacucagagugcuuu

SEQ ID NO: 2528810 - RNA, 19 nt, Artificial Sequence
  Description of Artificial Sequence: Synthetic oligonucleotide
  Sense strand starting at position 1509 of SEQ ID NO: 1888344
cugugugccacugaggaau

SEQ ID NO: 2528811 - RNA, 19 nt, Artificial Sequence
  Description of Artificial Sequence: Synthetic oligonucleotide
  Antisense strand to SEQ ID NO: 2528810
auuccucaguggcacacag

SEQ ID NO: 2528812 - RNA, 19 nt, Artificial Sequence
  Description of Artificial Sequence: Synthetic oligonucleotide
  Sense strand starting at position 2921 of SEQ ID NO: 1888344
gacaaauucccucguugaa

SEQ ID NO: 2528813 - RNA, 19 nt, Artificial Sequence
  Description of Artificial Sequence: Synthetic oligonucleotide
  Antisense strand to SEQ ID NO: 2528812
uucaacgagggaauuuguc

SEQ ID NO: 2528814 - RNA, 19 nt, Artificial Sequence
  Description of Artificial Sequence: Synthetic oligonucleotide
  Sense strand starting at position 3429 of SEQ ID NO: 1888344
ggaacuugguucuuucuca

SEQ ID NO: 2528815 - RNA, 19 nt, Artificial Sequence
  Description of Artificial Sequence: Synthetic oligonucleotide
  Antisense strand to SEQ ID NO: 2528814
ugagaaagaaccaaguucc

SEQ ID NO: 2528816 - RNA, 19 nt, Artificial Sequence
  Description of Artificial Sequence: Synthetic oligonucleotide
  Sense strand starting at position 691 of SEQ ID NO: 1888343
gcucuaacaucauuugguu

SEQ ID NO: 2528817 - RNA, 19 nt, Artificial Sequence
  Description of Artificial Sequence: Synthetic oligonucleotide
  Antisense strand to SEQ ID NO: 2528816
aaccaaaugauguuagagc

SEQ ID NO: 2528818 - RNA, 19 nt, Artificial Sequence
  Description of Artificial Sequence: Synthetic oligonucleotide
  Sense strand starting at position 1680 of SEQ ID NO: 1888343
gagaaacucuaugugauac

SEQ ID NO: 2528819 - RNA, 19 nt, Artificial Sequence
  Description of Artificial Sequence: Synthetic oligonucleotide
  Antisense strand to SEQ ID NO: 2528818
guaucacauagaguuucuc

SEQ ID NO: 2528820 - RNA, 19 nt, Artificial Sequence
  Description of Artificial Sequence: Synthetic oligonucleotide
  Sense strand starting at position 1517 of SEQ ID NO: 1888343
cuggaaacaucuuugauug

SEQ ID NO: 2528821 - RNA, 19 nt, Artificial Sequence
  Description of Artificial Sequence: Synthetic oligonucleotide
  Antisense strand to SEQ ID NO: 2528820
caaucaaagauguuuccag

SEQ ID NO: 2528822 - RNA, 19 nt, Artificial Sequence
  Description of Artificial Sequence: Synthetic oligonucleotide
  Sense strand starting at position 3220 of SEQ ID NO: 1888343
gaugauggugucuaucaag

SEQ ID NO: 2528823 - RNA, 19 nt, Artificial Sequence
  Description of Artificial Sequence: Synthetic oligonucleotide
  Antisense strand to SEQ ID NO: 2528822
cuugauagacaccaucauc

SEQ ID NO: 2528824 - RNA, 19 nt, Artificial Sequence
  Description of Artificial Sequence: Synthetic oligonucleotide
  Sense strand starting at position 849 of SEQ ID NO: 1888343
gggauacaugggugauuau

SEQ ID NO: 2528825 - RNA, 19 nt, Artificial Sequence
  Description of Artificial Sequence: Synthetic oligonucleotide
  Antisense strand to SEQ ID NO: 2528824
auaaucacccauguauccc

SEQ ID NO: 2528826 - RNA, 19 nt, Artificial Sequence
  Description of Artificial Sequence: Synthetic oligonucleotide
  Sense strand starting at position 914 of SEQ ID NO: 1888343
cgcaauuugcaguacauua

SEQ ID NO: 2528827 - RNA, 19 nt, Artificial Sequence
  Description of Artificial Sequence: Synthetic oligonucleotide
  Antisense strand to SEQ ID NO: 2528826
uaauguacugcaaauugcg

SEQ ID NO: 2528828 - RNA, 19 nt, Artificial Sequence
  Description of Artificial Sequence: Synthetic oligonucleotide
  Sense strand starting at position 3002 of SEQ ID NO: 1888343
agccuaauuuguguuuaag

SEQ ID NO: 2528829 - RNA, 19 nt, Artificial Sequence
  Description of Artificial Sequence: Synthetic oligonucleotide
  Antisense strand to SEQ ID NO: 2528828
cuuaaacacaaauuaggcu

SEQ ID NO: 2528830 - RNA, 19 nt, Artificial Sequence
  Description of Artificial Sequence: Synthetic oligonucleotide
  Sense strand starting at position 838 of SEQ ID NO: 1888343
aauaacucugugggauaca

SEQ ID NO: 2528831 - RNA, 19 nt, Artificial Sequence
  Description of Artificial Sequence: Synthetic oligonucleotide
  Antisense strand to SEQ ID NO: 2528830
uguaucccacagaguuauu

SEQ ID NO: 2528832 - RNA, 19 nt, Artificial Sequence
  Description of Artificial Sequence: Synthetic oligonucleotide
  Sense strand starting at position 835 of SEQ ID NO: 1888343
cagaauaacucugugggau

SEQ ID NO: 2528833 - RNA, 19 nt, Artificial Sequence
  Description of Artificial Sequence: Synthetic oligonucleotide
  Antisense strand to SEQ ID NO: 2528832
aucccacagaguuauucug

SEQ ID NO: 2528834 - RNA, 19 nt, Artificial Sequence
  Description of Artificial Sequence: Synthetic oligonucleotide
  Sense strand starting at position 30 of SEQ ID NO: 1888343
aguguuugugugcuaacuu

SEQ ID NO: 2528835 - RNA, 19 nt, Artificial Sequence
  Description of Artificial Sequence: Synthetic oligonucleotide
  Antisense strand to SEQ ID NO: 2528834
aaguuagcacacaaacacu

SEQ ID NO: 2528836 - RNA, 19 nt, Artificial Sequence
  Description of Artificial Sequence: Synthetic oligonucleotide
  Sense strand starting at position 1175 of SEQ ID NO: 1888343
uugagucaaguaggaaaua

SEQ ID NO: 2528837 - RNA, 19 nt, Artificial Sequence
  Description of Artificial Sequence: Synthetic oligonucleotide
  Antisense strand to SEQ ID NO: 2528836
uauuuccuacuugacucaa

SEQ ID NO: 2528838 - RNA, 19 nt, Artificial Sequence
  Description of Artificial Sequence: Synthetic oligonucleotide
  Sense strand starting at position 834 of SEQ ID NO: 1888343
ucagaauaacucuguggga

SEQ ID NO: 2528839 - RNA, 19 nt, Artificial Sequence
  Description of Artificial Sequence: Synthetic oligonucleotide
  Antisense strand to SEQ ID NO: 2528838
ucccacagaguuauucuga

SEQ ID NO: 2528840 - RNA, 19 nt, Artificial Sequence
  Description of Artificial Sequence: Synthetic oligonucleotide
  Sense strand starting at position 1070 of SEQ ID NO: 1888343
gugauuauuagagaagccu

SEQ ID NO: 2528841 - RNA, 19 nt, Artificial Sequence
  Description of Artificial Sequence: Synthetic oligonucleotide
  Antisense strand to SEQ ID NO: 2528840
aggcuucucuaauaaucac

SEQ ID NO: 2528842 - RNA, 19 nt, Artificial Sequence
  Description of Artificial Sequence: Synthetic oligonucleotide
  Sense strand starting at position 2100 of SEQ ID NO: 1888343
gccucuuacgugcuuaauc

SEQ ID NO: 2528843 - RNA, 19 nt, Artificial Sequence
  Description of Artificial Sequence: Synthetic oligonucleotide
  Antisense strand to SEQ ID NO: 2528842
gauuaagcacguaagaggc

SEQ ID NO: 2528844 - RNA, 19 nt, Artificial Sequence
  Description of Artificial Sequence: Synthetic oligonucleotide
  Sense strand starting at position 3742 of SEQ ID NO: 1888343
cagagcugggcuuaagaau

SEQ ID NO: 2528845 - RNA, 19 nt, Artificial Sequence
  Description of Artificial Sequence: Synthetic oligonucleotide
  Antisense strand to SEQ ID NO: 2528844
auucuuaagcccagcucug

SEQ ID NO: 2528846 - RNA, 19 nt, Artificial Sequence
  Description of Artificial Sequence: Synthetic oligonucleotide
  Sense strand starting at position 3008 of SEQ ID NO: 1888343
auuuguguuuaagccauca

SEQ ID NO: 2528847 - RNA, 19 nt, Artificial Sequence
  Description of Artificial Sequence: Synthetic oligonucleotide
  Antisense strand to SEQ ID NO: 2528846
ugauggcuuaaacacaaau

SEQ ID NO: 2528848 - RNA, 19 nt, Artificial Sequence
  Description of Artificial Sequence: Synthetic oligonucleotide
  Sense strand starting at position 3705 of SEQ ID NO: 1888343
cugaaagguuaucugauca

SEQ ID NO: 2528849 - RNA, 19 nt, Artificial Sequence
  Description of Artificial Sequence: Synthetic oligonucleotide
  Antisense strand to SEQ ID NO: 2528848
ugaucagauaaccuuucag

SEQ ID NO: 2528850 - RNA, 19 nt, Artificial Sequence
  Description of Artificial Sequence: Synthetic oligonucleotide
  Sense strand starting at position 326 of SEQ ID NO: 1888343
ugaaacuauugacugguau

SEQ ID NO: 2528851 - RNA, 19 nt, Artificial Sequence
  Description of Artificial Sequence: Synthetic oligonucleotide
  Antisense strand to SEQ ID NO: 2528850
auaccagucaauaguuuca

SEQ ID NO: 2528852 - RNA, 19 nt, Artificial Sequence
  Description of Artificial Sequence: Synthetic oligonucleotide
  Sense strand starting at position 3173 of SEQ ID NO: 1888343
auuaauagagcuuggaauc

SEQ ID NO: 2528853 - RNA, 19 nt, Artificial Sequence
  Description of Artificial Sequence: Synthetic oligonucleotide
  Antisense strand to SEQ ID NO: 2528852
gauuccaagcucuauuaau

SEQ ID NO: 2528854 - RNA, 19 nt, Artificial Sequence
  Description of Artificial Sequence: Synthetic oligonucleotide
  Sense strand starting at position 3000 of SEQ ID NO: 1888343
ugagccuaauuuguguuua

SEQ ID NO: 2528855 - RNA, 19 nt, Artificial Sequence
  Description of Artificial Sequence: Synthetic oligonucleotide
  Antisense strand to SEQ ID NO: 2528854
uaaacacaaauuaggcuca

SEQ ID NO: 2528856 - RNA, 19 nt, Artificial Sequence
  Description of Artificial Sequence: Synthetic oligonucleotide
  Sense strand starting at position 327 of SEQ ID NO: 1888343
gaaacuauugacugguauc

SEQ ID NO: 2528857 - RNA, 19 nt, Artificial Sequence
  Description of Artificial Sequence: Synthetic oligonucleotide
  Antisense strand to SEQ ID NO: 2528856
gauaccagucaauaguuuc

SEQ ID NO: 2528858 - RNA, 19 nt, Artificial Sequence
  Description of Artificial Sequence: Synthetic oligonucleotide
  Sense strand starting at position 960 of SEQ ID NO: 1888343
uuaucaauagauuggguca

SEQ ID NO: 2528859 - RNA, 19 nt, Artificial Sequence
  Description of Artificial Sequence: Synthetic oligonucleotide
  Antisense strand to SEQ ID NO: 2528858
ugacccaaucuauugauaa

SEQ ID NO: 2528860 - RNA, 19 nt, Artificial Sequence
  Description of Artificial Sequence: Synthetic oligonucleotide
  Sense strand starting at position 1564 of SEQ ID NO: 1888343
ugugcugcuagucuuagua

SEQ ID NO: 2528861 - RNA, 19 nt, Artificial Sequence
  Description of Artificial Sequence: Synthetic oligonucleotide
  Antisense strand to SEQ ID NO: 2528860
uacuaagacuagcagcaca

SEQ ID NO: 2528862 - RNA, 19 nt, Artificial Sequence
  Description of Artificial Sequence: Synthetic oligonucleotide
  Sense strand starting at position 927 of SEQ ID NO: 1888343
acauuaauucggcacacca

SEQ ID NO: 2528863 - RNA, 19 nt, Artificial Sequence
  Description of Artificial Sequence: Synthetic oligonucleotide
  Antisense strand to SEQ ID NO: 2528862
uggugugccgaauuaaugu

SEQ ID NO: 2528864 - RNA, 19 nt, Artificial Sequence
  Description of Artificial Sequence: Synthetic oligonucleotide
  Sense strand starting at position 1690 of SEQ ID NO: 1888343
augugauacuuuccuaaag

SEQ ID NO: 2528865 - RNA, 19 nt, Artificial Sequence
  Description of Artificial Sequence: Synthetic oligonucleotide
  Antisense strand to SEQ ID NO: 2528864
cuuuaggaaaguaucacau

SEQ ID NO: 2528866 - RNA, 19 nt, Artificial Sequence
  Description of Artificial Sequence: Synthetic oligonucleotide
  Sense strand starting at position 3300 of SEQ ID NO: 1888343
agagucauuuaggauuaga

SEQ ID NO: 2528867 - RNA, 19 nt, Artificial Sequence
  Description of Artificial Sequence: Synthetic oligonucleotide
  Antisense strand to SEQ ID NO: 2528866
ucuaauccuaaaugacucu

SEQ ID NO: 2528868 - RNA, 19 nt, Artificial Sequence
  Description of Artificial Sequence: Synthetic oligonucleotide
  Sense strand starting at position 3756 of SEQ ID NO: 1888343
agaaucaccugcuugagau

SEQ ID NO: 2528869 - RNA, 19 nt, Artificial Sequence
  Description of Artificial Sequence: Synthetic oligonucleotide
  Antisense strand to SEQ ID NO: 2528868
aucucaagcaggugauucu

SEQ ID NO: 2528870 - RNA, 19 nt, Artificial Sequence
  Description of Artificial Sequence: Synthetic oligonucleotide
  Sense strand starting at position 1896 of SEQ ID NO: 1888343
acaguaaugcccgaaacau

SEQ ID NO: 2528871 - RNA, 19 nt, Artificial Sequence
  Description of Artificial Sequence: Synthetic oligonucleotide
  Antisense strand to SEQ ID NO: 2528870
auguuucgggcauuacugu

SEQ ID NO: 2528872 - RNA, 19 nt, Artificial Sequence
  Description of Artificial Sequence: Synthetic oligonucleotide
  Sense strand starting at position 3384 of SEQ ID NO: 1888343
uuaaauuagcucuaaguug

SEQ ID NO: 2528873 - RNA, 19 nt, Artificial Sequence
  Description of Artificial Sequence: Synthetic oligonucleotide
  Antisense strand to SEQ ID NO: 2528872
caacuuagagcuaauuuaa

SEQ ID NO: 2528874 - RNA, 19 nt, Artificial Sequence
  Description of Artificial Sequence: Synthetic oligonucleotide
  Sense strand starting at position 3704 of SEQ ID NO: 1888343
ucugaaagguuaucugauc

SEQ ID NO: 2528875 - RNA, 19 nt, Artificial Sequence
  Description of Artificial Sequence: Synthetic oligonucleotide
  Antisense strand to SEQ ID NO: 2528874
gaucagauaaccuuucaga

SEQ ID NO: 2528876 - RNA, 19 nt, Artificial Sequence
  Description of Artificial Sequence: Synthetic oligonucleotide
  Sense strand starting at position 8 of SEQ ID NO: 1888343
aacccaaagcuaggugaua

SEQ ID NO: 2528877 - RNA, 19 nt, Artificial Sequence
  Description of Artificial Sequence: Synthetic oligonucleotide
  Antisense strand to SEQ ID NO: 2528876
uaucaccuagcuuuggguu

SEQ ID NO: 2528878 - RNA, 19 nt, Artificial Sequence
  Description of Artificial Sequence: Synthetic oligonucleotide
  Sense strand starting at position 3427 of SEQ ID NO: 1888343
uuuauauucccagaggccu

SEQ ID NO: 2528879 - RNA, 19 nt, Artificial Sequence
  Description of Artificial Sequence: Synthetic oligonucleotide
  Antisense strand to SEQ ID NO: 2528878
aggccucugggaauauaaa

SEQ ID NO: 2528880 - RNA, 19 nt, Artificial Sequence
  Description of Artificial Sequence: Synthetic oligonucleotide
  Sense strand starting at position 3174 of SEQ ID NO: 1888343
uuaauagagcuuggaaucu

SEQ ID NO: 2528881 - RNA, 19 nt, Artificial Sequence
  Description of Artificial Sequence: Synthetic oligonucleotide
  Antisense strand to SEQ ID NO: 2528880
agauuccaagcucuauuaa

SEQ ID NO: 2528882 - RNA, 19 nt, Artificial Sequence
  Description of Artificial Sequence: Synthetic oligonucleotide
  Sense strand starting at position 1679 of SEQ ID NO: 1888343
cgagaaacucuaugugaua

SEQ ID NO: 2528883 - RNA, 19 nt, Artificial Sequence
  Description of Artificial Sequence: Synthetic oligonucleotide
  Antisense strand to SEQ ID NO: 2528882
uaucacauagaguuucucg

SEQ ID NO: 2528884 - RNA, 19 nt, Artificial Sequence
  Description of Artificial Sequence: Synthetic oligonucleotide
  Sense strand starting at position 1854 of SEQ ID NO: 1888343
guaugagagugacucacau

SEQ ID NO: 2528885 - RNA, 19 nt, Artificial Sequence
  Description of Artificial Sequence: Synthetic oligonucleotide
  Antisense strand to SEQ ID NO: 2528884
augugagucacucucauac

SEQ ID NO: 2528886 - RNA, 19 nt, Artificial Sequence
  Description of Artificial Sequence: Synthetic oligonucleotide
  Sense strand starting at position 3286 of SEQ ID NO: 1888343
gagaauuguuuauuagagu

SEQ ID NO: 2528887 - RNA, 19 nt, Artificial Sequence
  Description of Artificial Sequence: Synthetic oligonucleotide
  Antisense strand to SEQ ID NO: 2528886
acucuaauaaacaauucuc

SEQ ID NO: 2528888 - RNA, 19 nt, Artificial Sequence
  Description of Artificial Sequence: Synthetic oligonucleotide
  Sense strand starting at position 1518 of SEQ ID NO: 1888343
uggaaacaucuuugauugu

SEQ ID NO: 2528889 - RNA, 19 nt, Artificial Sequence
  Description of Artificial Sequence: Synthetic oligonucleotide
  Antisense strand to SEQ ID NO: 2528888
acaaucaaagauguuucca

SEQ ID NO: 2528890 - RNA, 19 nt, Artificial Sequence
  Description of Artificial Sequence: Synthetic oligonucleotide
  Sense strand starting at position 766 of SEQ ID NO: 1888343
guauauuaugggcaacuuu

SEQ ID NO: 2528891 - RNA, 19 nt, Artificial Sequence
  Description of Artificial Sequence: Synthetic oligonucleotide
  Antisense strand to SEQ ID NO: 2528890
aaaguugcccauaauauac

SEQ ID NO: 2528892 - RNA, 19 nt, Artificial Sequence
  Description of Artificial Sequence: Synthetic oligonucleotide
  Sense strand starting at position 2914 of SEQ ID NO: 1888343
uggccauucccagaguaua

SEQ ID NO: 2528893 - RNA, 19 nt, Artificial Sequence
  Description of Artificial Sequence: Synthetic oligonucleotide
  Antisense strand to SEQ ID NO: 2528892
uauacucugggaauggcca

SEQ ID NO: 2528894 - RNA, 19 nt, Artificial Sequence
  Description of Artificial Sequence: Synthetic oligonucleotide
  Sense strand starting at position 2217 of SEQ ID NO: 1888343
agcucaagucuaugggaaa

SEQ ID NO: 2528895 - RNA, 19 nt, Artificial Sequence
  Description of Artificial Sequence: Synthetic oligonucleotide
  Antisense strand to SEQ ID NO: 2528894
uuucccauagacuugagcu

SEQ ID NO: 2528896 - RNA, 19 nt, Artificial Sequence
  Description of Artificial Sequence: Synthetic oligonucleotide
  Sense strand starting at position 2896 of SEQ ID NO: 1888342
gcaauucugcuguuuguau

SEQ ID NO: 2528897 - RNA, 19 nt, Artificial Sequence
  Description of Artificial Sequence: Synthetic oligonucleotide
  Antisense strand to SEQ ID NO: 2528896
auacaaacagcagaauugc

SEQ ID NO: 2528898 - RNA, 19 nt, Artificial Sequence
  Description of Artificial Sequence: Synthetic oligonucleotide
  Sense strand starting at position 2806 of SEQ ID NO: 1888342
guggguacgcuuucucgga

SEQ ID NO: 2528899 - RNA, 19 nt, Artificial Sequence
  Description of Artificial Sequence: Synthetic oligonucleotide
  Antisense strand to SEQ ID NO: 2528898
uccgagaaagcguacccac

SEQ ID NO: 2528900 - RNA, 19 nt, Artificial Sequence
  Description of Artificial Sequence: Synthetic oligonucleotide
  Sense strand starting at position 684 of SEQ ID NO: 1888342
ggugaugagagcugaggaa

SEQ ID NO: 2528901 - RNA, 19 nt, Artificial Sequence
  Description of Artificial Sequence: Synthetic oligonucleotide
  Antisense strand to SEQ ID NO: 2528900
uuccucagcucucaucacc

SEQ ID NO: 2528902 - RNA, 19 nt, Artificial Sequence
  Description of Artificial Sequence: Synthetic oligonucleotide
  Sense strand starting at position 1839 of SEQ ID NO: 1888342
gacagccaggguuaauauu

SEQ ID NO: 2528903 - RNA, 19 nt, Artificial Sequence
  Description of Artificial Sequence: Synthetic oligonucleotide
  Antisense strand to SEQ ID NO: 2528902
aauauuaacccuggcuguc

SEQ ID NO: 2528904 - RNA, 19 nt, Artificial Sequence
  Description of Artificial Sequence: Synthetic oligonucleotide
  Sense strand starting at position 2152 of SEQ ID NO: 1888342
ugagaacgauucuugggau

SEQ ID NO: 2528905 - RNA, 19 nt, Artificial Sequence
  Description of Artificial Sequence: Synthetic oligonucleotide
  Antisense strand to SEQ ID NO: 2528904
aucccaagaaucguucuca

SEQ ID NO: 2528906 - RNA, 19 nt, Artificial Sequence
  Description of Artificial Sequence: Synthetic oligonucleotide
  Sense strand starting at position 3661 of SEQ ID NO: 1888342
augggaaaccgucagaguu

SEQ ID NO: 2528907 - RNA, 19 nt, Artificial Sequence
  Description of Artificial Sequence: Synthetic oligonucleotide
  Antisense strand to SEQ ID NO: 2528906
aacucugacgguuucccau

SEQ ID NO: 2528908 - RNA, 19 nt, Artificial Sequence
  Description of Artificial Sequence: Synthetic oligonucleotide
  Sense strand starting at position 892 of SEQ ID NO: 1888342
gagaucugaugcuuuaaga

SEQ ID NO: 2528909 - RNA, 19 nt, Artificial Sequence
  Description of Artificial Sequence: Synthetic oligonucleotide
  Antisense strand to SEQ ID NO: 2528908
ucuuaaagcaucagaucuc

SEQ ID NO: 2528910 - RNA, 19 nt, Artificial Sequence
  Description of Artificial Sequence: Synthetic oligonucleotide
  Sense strand starting at position 185 of SEQ ID NO: 1888342
gaguaugaccuguacauuc

SEQ ID NO: 2528911 - RNA, 19 nt, Artificial Sequence
  Description of Artificial Sequence: Synthetic oligonucleotide
  Antisense strand to SEQ ID NO: 2528910
gaauguacaggucauacuc

SEQ ID NO: 2528912 - RNA, 19 nt, Artificial Sequence
  Description of Artificial Sequence: Synthetic oligonucleotide
  Sense strand starting at position 3645 of SEQ ID NO: 1888342
ccguauaaucauuaucaug

SEQ ID NO: 2528913 - RNA, 19 nt, Artificial Sequence
  Description of Artificial Sequence: Synthetic oligonucleotide
  Antisense strand to SEQ ID NO: 2528912
caugauaaugauuauacgg

SEQ ID NO: 2528914 - RNA, 19 nt, Artificial Sequence
  Description of Artificial Sequence: Synthetic oligonucleotide
  Sense strand starting at position 754 of SEQ ID NO: 1888342
ggguauaugagugacagcu

SEQ ID NO: 2528915 - RNA, 19 nt, Artificial Sequence
  Description of Artificial Sequence: Synthetic oligonucleotide
  Antisense strand to SEQ ID NO: 2528914
agcugucacucauauaccc

SEQ ID NO: 2528916 - RNA, 19 nt, Artificial Sequence
  Description of Artificial Sequence: Synthetic oligonucleotide
  Sense strand starting at position 1584 of SEQ ID NO: 1888342
gaggaacaaugugugaguu

SEQ ID NO: 2528917 - RNA, 19 nt, Artificial Sequence
  Description of Artificial Sequence: Synthetic oligonucleotide
  Antisense strand to SEQ ID NO: 2528916
aacucacacauuguuccuc

SEQ ID NO: 2528918 - RNA, 19 nt, Artificial Sequence
  Description of Artificial Sequence: Synthetic oligonucleotide
  Sense strand starting at position 584 of SEQ ID NO: 1888342
uguucuggacccugggaua

SEQ ID NO: 2528919 - RNA, 19 nt, Artificial Sequence
  Description of Artificial Sequence: Synthetic oligonucleotide
  Antisense strand to SEQ ID NO: 2528918
uaucccaggguccagaaca

SEQ ID NO: 2528920 - RNA, 19 nt, Artificial Sequence
  Description of Artificial Sequence: Synthetic oligonucleotide
  Sense strand starting at position 2140 of SEQ ID NO: 1888342
aguucucaucuuugagaac

SEQ ID NO: 2528921 - RNA, 19 nt, Artificial Sequence
  Description of Artificial Sequence: Synthetic oligonucleotide
  Antisense strand to SEQ ID NO: 2528920
guucucaaagaugagaacu

SEQ ID NO: 2528922 - RNA, 19 nt, Artificial Sequence
  Description of Artificial Sequence: Synthetic oligonucleotide
  Sense strand starting at position 15 of SEQ ID NO: 1888342
uggcaauagcaauaguuua

SEQ ID NO: 2528923 - RNA, 19 nt, Artificial Sequence
  Description of Artificial Sequence: Synthetic oligonucleotide
  Antisense strand to SEQ ID NO: 2528922
uaaacuauugcuauugcca

SEQ ID NO: 2528924 - RNA, 19 nt, Artificial Sequence
  Description of Artificial Sequence: Synthetic oligonucleotide
  Sense strand starting at position 1583 of SEQ ID NO: 1888342
ugaggaacaaugugugagu

SEQ ID NO: 2528925 - RNA, 19 nt, Artificial Sequence
  Description of Artificial Sequence: Synthetic oligonucleotide
  Antisense strand to SEQ ID NO: 2528924
acucacacauuguuccuca

SEQ ID NO: 2528926 - RNA, 19 nt, Artificial Sequence
  Description of Artificial Sequence: Synthetic oligonucleotide
  Sense strand starting at position 255 of SEQ ID NO: 1888342
augcgugucaucccguacu

SEQ ID NO: 2528927 - RNA, 19 nt, Artificial Sequence
  Description of Artificial Sequence: Synthetic oligonucleotide
  Antisense strand to SEQ ID NO: 2528926
aguacgggaugacacgcau

SEQ ID NO: 2528928 - RNA, 19 nt, Artificial Sequence
  Description of Artificial Sequence: Synthetic oligonucleotide
  Sense strand starting at position 3450 of SEQ ID NO: 1888342
guaugaggccuccauuauu

SEQ ID NO: 2528929 - RNA, 19 nt, Artificial Sequence
  Description of Artificial Sequence: Synthetic oligonucleotide
  Antisense strand to SEQ ID NO: 2528928
aauaauggaggccucauac

SEQ ID NO: 2528930 - RNA, 19 nt, Artificial Sequence
  Description of Artificial Sequence: Synthetic oligonucleotide
  Sense strand starting at position 2179 of SEQ ID NO: 1888342
cgacguuggauaugaacaa

SEQ ID NO: 2528931 - RNA, 19 nt, Artificial Sequence
  Description of Artificial Sequence: Synthetic oligonucleotide
  Antisense strand to SEQ ID NO: 2528930
uuguucauauccaacgucg

SEQ ID NO: 2528932 - RNA, 19 nt, Artificial Sequence
  Description of Artificial Sequence: Synthetic oligonucleotide
  Sense strand starting at position 183 of SEQ ID NO: 1888342
uggaguaugaccuguacau

SEQ ID NO: 2528933 - RNA, 19 nt, Artificial Sequence
  Description of Artificial Sequence: Synthetic oligonucleotide
  Antisense strand to SEQ ID NO: 2528932
auguacaggucauacucca

SEQ ID NO: 2528934 - RNA, 19 nt, Artificial Sequence
  Description of Artificial Sequence: Synthetic oligonucleotide
  Sense strand starting at position 127 of SEQ ID NO: 1888342
cguuccucacaugaaaguu

SEQ ID NO: 2528935 - RNA, 19 nt, Artificial Sequence
  Description of Artificial Sequence: Synthetic oligonucleotide
  Antisense strand to SEQ ID NO: 2528934
aacuuucaugugaggaacg

SEQ ID NO: 2528936 - RNA, 19 nt, Artificial Sequence
  Description of Artificial Sequence: Synthetic oligonucleotide
  Sense strand starting at position 1836 of SEQ ID NO: 1888342
ccugacagccaggguuaau

SEQ ID NO: 2528937 - RNA, 19 nt, Artificial Sequence
  Description of Artificial Sequence: Synthetic oligonucleotide
  Antisense strand to SEQ ID NO: 2528936
auuaacccuggcugucagg

SEQ ID NO: 2528938 - RNA, 19 nt, Artificial Sequence
  Description of Artificial Sequence: Synthetic oligonucleotide
  Sense strand starting at position 67 of SEQ ID NO: 1888342
ggagaaugguugcuaucuc

SEQ ID NO: 2528939 - RNA, 19 nt, Artificial Sequence
  Description of Artificial Sequence: Synthetic oligonucleotide
  Antisense strand to SEQ ID NO: 2528938
gagauagcaaccauucucc

SEQ ID NO: 2528940 - RNA, 19 nt, Artificial Sequence
  Description of Artificial Sequence: Synthetic oligonucleotide
  Sense strand starting at position 2451 of SEQ ID NO: 1888342
gguauuaguggcuaggagu

SEQ ID NO: 2528941 - RNA, 19 nt, Artificial Sequence
  Description of Artificial Sequence: Synthetic oligonucleotide
  Antisense strand to SEQ ID NO: 2528940
acuccuagccacuaauacc

SEQ ID NO: 2528942 - RNA, 19 nt, Artificial Sequence
  Description of Artificial Sequence: Synthetic oligonucleotide
  Sense strand starting at position 1526 of SEQ ID NO: 1888342
agacgugagccaggauauc

SEQ ID NO: 2528943 - RNA, 19 nt, Artificial Sequence
  Description of Artificial Sequence: Synthetic oligonucleotide
  Antisense strand to SEQ ID NO: 2528942
gauauccuggcucacgucu

SEQ ID NO: 2528944 - RNA, 19 nt, Artificial Sequence
  Description of Artificial Sequence: Synthetic oligonucleotide
  Sense strand starting at position 64 of SEQ ID NO: 1888342
aguggagaaugguugcuau

SEQ ID NO: 2528945 - RNA, 19 nt, Artificial Sequence
  Description of Artificial Sequence: Synthetic oligonucleotide
  Antisense strand to SEQ ID NO: 2528944
auagcaaccauucuccacu

SEQ ID NO: 2528946 - RNA, 19 nt, Artificial Sequence
  Description of Artificial Sequence: Synthetic oligonucleotide
  Sense strand starting at position 3328 of SEQ ID NO: 1888342
aguacauaguguuuccaag

SEQ ID NO: 2528947 - RNA, 19 nt, Artificial Sequence
  Description of Artificial Sequence: Synthetic oligonucleotide
  Antisense strand to SEQ ID NO: 2528946
cuuggaaacacuauguacu

SEQ ID NO: 2528948 - RNA, 19 nt, Artificial Sequence
  Description of Artificial Sequence: Synthetic oligonucleotide
  Sense strand starting at position 2204 of SEQ ID NO: 1888342
ugccaaguuguuugcauuu

SEQ ID NO: 2528949 - RNA, 19 nt, Artificial Sequence
  Description of Artificial Sequence: Synthetic oligonucleotide
  Antisense strand to SEQ ID NO: 2528948
aaaugcaaacaacuuggca

SEQ ID NO: 2528950 - RNA, 19 nt, Artificial Sequence
  Description of Artificial Sequence: Synthetic oligonucleotide
  Sense strand starting at position 3391 of SEQ ID NO: 1888342
gugcuuuacguuuagaaga

SEQ ID NO: 2528951 - RNA, 19 nt, Artificial Sequence
  Description of Artificial Sequence: Synthetic oligonucleotide
  Antisense strand to SEQ ID NO: 2528950
ucuucuaaacguaaagcac

SEQ ID NO: 2528952 - RNA, 19 nt, Artificial Sequence
  Description of Artificial Sequence: Synthetic oligonucleotide
  Sense strand starting at position 3636 of SEQ ID NO: 1888342
gggugucacccguauaauc

SEQ ID NO: 2528953 - RNA, 19 nt, Artificial Sequence
  Description of Artificial Sequence: Synthetic oligonucleotide
  Antisense strand to SEQ ID NO: 2528952
gauuauacgggugacaccc

SEQ ID NO: 2528954 - RNA, 19 nt, Artificial Sequence
  Description of Artificial Sequence: Synthetic oligonucleotide
  Sense strand starting at position 3638 of SEQ ID NO: 1888342
gugucacccguauaaucau

SEQ ID NO: 2528955 - RNA, 19 nt, Artificial Sequence
  Description of Artificial Sequence: Synthetic oligonucleotide
  Antisense strand to SEQ ID NO: 2528954
augauuauacgggugacac

SEQ ID NO: 2528956 - RNA, 19 nt, Artificial Sequence
  Description of Artificial Sequence: Synthetic oligonucleotide
  Sense strand starting at position 3671 of SEQ ID NO: 1888342
gucagaguuccuugggcaa

SEQ ID NO: 2528957 - RNA, 19 nt, Artificial Sequence
  Description of Artificial Sequence: Synthetic oligonucleotide
  Antisense strand to SEQ ID NO: 2528956
uugcccaaggaacucugac

SEQ ID NO: 2528958 - RNA, 19 nt, Artificial Sequence
  Description of Artificial Sequence: Synthetic oligonucleotide
  Sense strand starting at position 665 of SEQ ID NO: 1888342
ggagauguaacgugcucag

SEQ ID NO: 2528959 - RNA, 19 nt, Artificial Sequence
  Description of Artificial Sequence: Synthetic oligonucleotide
  Antisense strand to SEQ ID NO: 2528958
cugagcacguuacaucucc

SEQ ID NO: 2528960 - RNA, 19 nt, Artificial Sequence
  Description of Artificial Sequence: Synthetic oligonucleotide
  Sense strand starting at position 2490 of SEQ ID NO: 1888342
agguauagucuccgcagga

SEQ ID NO: 2528961 - RNA, 19 nt, Artificial Sequence
  Description of Artificial Sequence: Synthetic oligonucleotide
  Antisense strand to SEQ ID NO: 2528960
uccugcggagacuauaccu

SEQ ID NO: 2528962 - RNA, 19 nt, Artificial Sequence
  Description of Artificial Sequence: Synthetic oligonucleotide
  Sense strand starting at position 2561 of SEQ ID NO: 1888342
guggccuccuaucuaaagu

SEQ ID NO: 2528963 - RNA, 19 nt, Artificial Sequence
  Description of Artificial Sequence: Synthetic oligonucleotide
  Antisense strand to SEQ ID NO: 2528962
acuuuagauaggaggccac

SEQ ID NO: 2528964 - RNA, 19 nt, Artificial Sequence
  Description of Artificial Sequence: Synthetic oligonucleotide
  Sense strand starting at position 3 of SEQ ID NO: 1888342
uacagcuaucuguggcaau

SEQ ID NO: 2528965 - RNA, 19 nt, Artificial Sequence
  Description of Artificial Sequence: Synthetic oligonucleotide
  Antisense strand to SEQ ID NO: 2528964
auugccacagauagcugua

SEQ ID NO: 2528966 - RNA, 19 nt, Artificial Sequence
  Description of Artificial Sequence: Synthetic oligonucleotide
  Sense strand starting at position 3385 of SEQ ID NO: 1888342
cugaaugugcuuuacguuu

SEQ ID NO: 2528967 - RNA, 19 nt, Artificial Sequence
  Description of Artificial Sequence: Synthetic oligonucleotide
  Antisense strand to SEQ ID NO: 2528966
aaacguaaagcacauucag

SEQ ID NO: 2528968 - RNA, 19 nt, Artificial Sequence
  Description of Artificial Sequence: Synthetic oligonucleotide
  Sense strand starting at position 2491 of SEQ ID NO: 1888342
gguauagucuccgcaggau

SEQ ID NO: 2528969 - RNA, 19 nt, Artificial Sequence
  Description of Artificial Sequence: Synthetic oligonucleotide
  Antisense strand to SEQ ID NO: 2528968
auccugcggagacuauacc

SEQ ID NO: 2528970 - RNA, 19 nt, Artificial Sequence
  Description of Artificial Sequence: Synthetic oligonucleotide
  Sense strand starting at position 2156 of SEQ ID NO: 1888342
aacgauucuugggaugaaa

SEQ ID NO: 2528971 - RNA, 19 nt, Artificial Sequence
  Description of Artificial Sequence: Synthetic oligonucleotide
  Antisense strand to SEQ ID NO: 2528970
uuucaucccaagaaucguu

SEQ ID NO: 2528972 - RNA, 19 nt, Artificial Sequence
  Description of Artificial Sequence: Synthetic oligonucleotide
  Sense strand starting at position 1536 of SEQ ID NO: 1888342
caggauaucugaggaacag

SEQ ID NO: 2528973 - RNA, 19 nt, Artificial Sequence
  Description of Artificial Sequence: Synthetic oligonucleotide
  Antisense strand to SEQ ID NO: 2528972
cuguuccucagauauccug

SEQ ID NO: 2528974 - RNA, 19 nt, Artificial Sequence
  Description of Artificial Sequence: Synthetic oligonucleotide
  Sense strand starting at position 3634 of SEQ ID NO: 1888342
uugggugucacccguauaa

SEQ ID NO: 2528975 - RNA, 19 nt, Artificial Sequence
  Description of Artificial Sequence: Synthetic oligonucleotide
  Antisense strand to SEQ ID NO: 2528974
uuauacgggugacacccaa

SEQ ID NO: 2528976 - RNA, 19 nt, Artificial Sequence
  Description of Artificial Sequence: Synthetic oligonucleotide
  Sense strand starting at position 3769 of SEQ ID NO: 1888345
augguaaauucucugaaag

SEQ ID NO: 2528977 - RNA, 19 nt, Artificial Sequence
  Description of Artificial Sequence: Synthetic oligonucleotide
  Antisense strand to SEQ ID NO: 2528976
cuuucagagaauuuaccau

SEQ ID NO: 2528978 - RNA, 19 nt, Artificial Sequence
  Description of Artificial Sequence: Synthetic oligonucleotide
  Sense strand starting at position 3626 of SEQ ID NO: 1888345
uguuaugugccagcacuuu

SEQ ID NO: 2528979 - RNA, 19 nt, Artificial Sequence
  Description of Artificial Sequence: Synthetic oligonucleotide
  Antisense strand to SEQ ID NO: 2528978
aaagugcuggcacauaaca

SEQ ID NO: 2528980 - RNA, 19 nt, Artificial Sequence
  Description of Artificial Sequence: Synthetic oligonucleotide
  Sense strand starting at position 2728 of SEQ ID NO: 1888345
gcagauuaccucuaacuag

SEQ ID NO: 2528981 - RNA, 19 nt, Artificial Sequence
  Description of Artificial Sequence: Synthetic oligonucleotide
  Antisense strand to SEQ ID NO: 2528980
cuaguuagagguaaucugc

SEQ ID NO: 2528982 - RNA, 19 nt, Artificial Sequence
  Description of Artificial Sequence: Synthetic oligonucleotide
  Sense strand starting at position 1978 of SEQ ID NO: 1888345
acagcagaagcuuagauua

SEQ ID NO: 2528983 - RNA, 19 nt, Artificial Sequence
  Description of Artificial Sequence: Synthetic oligonucleotide
  Antisense strand to SEQ ID NO: 2528982
uaaucuaagcuucugcugu

SEQ ID NO: 2528984 - RNA, 19 nt, Artificial Sequence
  Description of Artificial Sequence: Synthetic oligonucleotide
  Sense strand starting at position 2664 of SEQ ID NO: 1888345
agagacuuguaaguacaga

SEQ ID NO: 2528985 - RNA, 19 nt, Artificial Sequence
  Description of Artificial Sequence: Synthetic oligonucleotide
  Antisense strand to SEQ ID NO: 2528984
ucuguacuuacaagucucu

SEQ ID NO: 2528986 - RNA, 19 nt, Artificial Sequence
  Description of Artificial Sequence: Synthetic oligonucleotide
  Sense strand starting at position 1440 of SEQ ID NO: 1888345
ucuuuaugggucuaaauca

SEQ ID NO: 2528987 - RNA, 19 nt, Artificial Sequence
  Description of Artificial Sequence: Synthetic oligonucleotide
  Antisense strand to SEQ ID NO: 2528986
ugauuuagacccauaaaga

SEQ ID NO: 2528988 - RNA, 19 nt, Artificial Sequence
  Description of Artificial Sequence: Synthetic oligonucleotide
  Sense strand starting at position 3770 of SEQ ID NO: 1888345
ugguaaauucucugaaaga

SEQ ID NO: 2528989 - RNA, 19 nt, Artificial Sequence
  Description of Artificial Sequence: Synthetic oligonucleotide
  Antisense strand to SEQ ID NO: 2528988
ucuuucagagaauuuacca

SEQ ID NO: 2528990 - RNA, 19 nt, Artificial Sequence
  Description of Artificial Sequence: Synthetic oligonucleotide
  Sense strand starting at position 984 of SEQ ID NO: 1888345
gacauaguacuugaagcau

SEQ ID NO: 2528991 - RNA, 19 nt, Artificial Sequence
  Description of Artificial Sequence: Synthetic oligonucleotide
  Antisense strand to SEQ ID NO: 2528990
augcuucaaguacuauguc

SEQ ID NO: 2528992 - RNA, 19 nt, Artificial Sequence
  Description of Artificial Sequence: Synthetic oligonucleotide
  Sense strand starting at position 3786 of SEQ ID NO: 1888345
agagaauaguguccugaga

SEQ ID NO: 2528993 - RNA, 19 nt, Artificial Sequence
  Description of Artificial Sequence: Synthetic oligonucleotide
  Antisense strand to SEQ ID NO: 2528992
ucucaggacacuauucucu

SEQ ID NO: 2528994 - RNA, 19 nt, Artificial Sequence
  Description of Artificial Sequence: Synthetic oligonucleotide
  Sense strand starting at position 781 of SEQ ID NO: 1888345
gaagcagauuuggaacaaa

SEQ ID NO: 2528995 - RNA, 19 nt, Artificial Sequence
  Description of Artificial Sequence: Synthetic oligonucleotide
  Antisense strand to SEQ ID NO: 2528994
uuuguuccaaaucugcuuc

SEQ ID NO: 2528996 - RNA, 19 nt, Artificial Sequence
  Description of Artificial Sequence: Synthetic oligonucleotide
  Sense strand starting at position 1115 of SEQ ID NO: 1888345
gccugaugaagucauaaug

SEQ ID NO: 2528997 - RNA, 19 nt, Artificial Sequence
  Description of Artificial Sequence: Synthetic oligonucleotide
  Antisense strand to SEQ ID NO: 2528996
cauuaugacuucaucaggc

SEQ ID NO: 2528998 - RNA, 19 nt, Artificial Sequence
  Description of Artificial Sequence: Synthetic oligonucleotide
  Sense strand starting at position 1665 of SEQ ID NO: 1888345
aaaugcaaguuauuagaga

SEQ ID NO: 2528999 - RNA, 19 nt, Artificial Sequence
  Description of Artificial Sequence: Synthetic oligonucleotide
  Antisense strand to SEQ ID NO: 2528998
ucucuaauaacuugcauuu

SEQ ID NO: 2529000 - RNA, 19 nt, Artificial Sequence
  Description of Artificial Sequence: Synthetic oligonucleotide
  Sense strand starting at position 3364 of SEQ ID NO: 1888345
ggaguaggauagucacaug

SEQ ID NO: 2529001 - RNA, 19 nt, Artificial Sequence
  Description of Artificial Sequence: Synthetic oligonucleotide
  Antisense strand to SEQ ID NO: 2529000
caugugacuauccuacucc

SEQ ID NO: 2529002 - RNA, 19 nt, Artificial Sequence
  Description of Artificial Sequence: Synthetic oligonucleotide
  Sense strand starting at position 2186 of SEQ ID NO: 1888345
aguccaauuggccaauaua

SEQ ID NO: 2529003 - RNA, 19 nt, Artificial Sequence
  Description of Artificial Sequence: Synthetic oligonucleotide
  Antisense strand to SEQ ID NO: 2529002
uauauuggccaauuggacu

SEQ ID NO: 2529004 - RNA, 19 nt, Artificial Sequence
  Description of Artificial Sequence: Synthetic oligonucleotide
  Sense strand starting at position 1545 of SEQ ID NO: 1888345
ugacaucuguuacuaagga

SEQ ID NO: 2529005 - RNA, 19 nt, Artificial Sequence
  Description of Artificial Sequence: Synthetic oligonucleotide
  Antisense strand to SEQ ID NO: 2529004
uccuuaguaacagauguca

SEQ ID NO: 2529006 - RNA, 19 nt, Artificial Sequence
  Description of Artificial Sequence: Synthetic oligonucleotide
  Sense strand starting at position 1577 of SEQ ID NO: 1888345
agaugaagauaucuguucu

SEQ ID NO: 2529007 - RNA, 19 nt, Artificial Sequence
  Description of Artificial Sequence: Synthetic oligonucleotide
  Antisense strand to SEQ ID NO: 2529006
agaacagauaucuucaucu

SEQ ID NO: 2529008 - RNA, 19 nt, Artificial Sequence
  Description of Artificial Sequence: Synthetic oligonucleotide
  Sense strand starting at position 3563 of SEQ ID NO: 1888345
auacuucugagguaggguu

SEQ ID NO: 2529009 - RNA, 19 nt, Artificial Sequence
  Description of Artificial Sequence: Synthetic oligonucleotide
  Antisense strand to SEQ ID NO: 2529008
aacccuaccucagaaguau

SEQ ID NO: 2529010 - RNA, 19 nt, Artificial Sequence
  Description of Artificial Sequence: Synthetic oligonucleotide
  Sense strand starting at position 3429 of SEQ ID NO: 1888345
uguaguguggaagaguaaa

SEQ ID NO: 2529011 - RNA, 19 nt, Artificial Sequence
  Description of Artificial Sequence: Synthetic oligonucleotide
  Antisense strand to SEQ ID NO: 2529010
uuuacucuuccacacuaca

SEQ ID NO: 2529012 - RNA, 19 nt, Artificial Sequence
  Description of Artificial Sequence: Synthetic oligonucleotide
  Sense strand starting at position 3426 of SEQ ID NO: 1888345
aaauguaguguggaagagu

SEQ ID NO: 2529013 - RNA, 19 nt, Artificial Sequence
  Description of Artificial Sequence: Synthetic oligonucleotide
  Antisense strand to SEQ ID NO: 2529012
acucuuccacacuacauuu

SEQ ID NO: 2529014 - RNA, 19 nt, Artificial Sequence
  Description of Artificial Sequence: Synthetic oligonucleotide
  Sense strand starting at position 2597 of SEQ ID NO: 1888345
acucaaugugaguaaaugu

SEQ ID NO: 2529015 - RNA, 19 nt, Artificial Sequence
  Description of Artificial Sequence: Synthetic oligonucleotide
  Antisense strand to SEQ ID NO: 2529014
acauuuacucacauugagu

SEQ ID NO: 2529016 - RNA, 19 nt, Artificial Sequence
  Description of Artificial Sequence: Synthetic oligonucleotide
  Sense strand starting at position 1125 of SEQ ID NO: 1888345
gucauaaugcaauggagag

SEQ ID NO: 2529017 - RNA, 19 nt, Artificial Sequence
  Description of Artificial Sequence: Synthetic oligonucleotide
  Antisense strand to SEQ ID NO: 2529016
cucuccauugcauuaugac

SEQ ID NO: 2529018 - RNA, 19 nt, Artificial Sequence
  Description of Artificial Sequence: Synthetic oligonucleotide
  Sense strand starting at position 520 of SEQ ID NO: 1888345
cugcccaaugacugaaaua

SEQ ID NO: 2529019 - RNA, 19 nt, Artificial Sequence
  Description of Artificial Sequence: Synthetic oligonucleotide
  Antisense strand to SEQ ID NO: 2529018
uauuucagucauugggcag

SEQ ID NO: 2529020 - RNA, 19 nt, Artificial Sequence
  Description of Artificial Sequence: Synthetic oligonucleotide
  Sense strand starting at position 2596 of SEQ ID NO: 1888345
cacucaaugugaguaaaug

SEQ ID NO: 2529021 - RNA, 19 nt, Artificial Sequence
  Description of Artificial Sequence: Synthetic oligonucleotide
  Antisense strand to SEQ ID NO: 2529020
cauuuacucacauugagug

SEQ ID NO: 2529022 - RNA, 19 nt, Artificial Sequence
  Description of Artificial Sequence: Synthetic oligonucleotide
  Sense strand starting at position 647 of SEQ ID NO: 1888345
ccucuuagagucuauacuu

SEQ ID NO: 2529023 - RNA, 19 nt, Artificial Sequence
  Description of Artificial Sequence: Synthetic oligonucleotide
  Antisense strand to SEQ ID NO: 2529022
aaguauagacucuaagagg

SEQ ID NO: 2529024 - RNA, 19 nt, Artificial Sequence
  Description of Artificial Sequence: Synthetic oligonucleotide
  Sense strand starting at position 3204 of SEQ ID NO: 1888345
ugguuaugggcccaucaga

SEQ ID NO: 2529025 - RNA, 19 nt, Artificial Sequence
  Description of Artificial Sequence: Synthetic oligonucleotide
  Antisense strand to SEQ ID NO: 2529024
ucugaugggcccauaacca

SEQ ID NO: 2529026 - RNA, 19 nt, Artificial Sequence
  Description of Artificial Sequence: Synthetic oligonucleotide
  Sense strand starting at position 1429 of SEQ ID NO: 1888345
augagauacugucuuuaug

SEQ ID NO: 2529027 - RNA, 19 nt, Artificial Sequence
  Description of Artificial Sequence: Synthetic oligonucleotide
  Antisense strand to SEQ ID NO: 2529026
cauaaagacaguaucucau

SEQ ID NO: 2529028 - RNA, 19 nt, Artificial Sequence
  Description of Artificial Sequence: Synthetic oligonucleotide
  Sense strand starting at position 3841 of SEQ ID NO: 1888345
cagauuguauggccagaaa

SEQ ID NO: 2529029 - RNA, 19 nt, Artificial Sequence
  Description of Artificial Sequence: Synthetic oligonucleotide
  Antisense strand to SEQ ID NO: 2529028
uuucuggccauacaaucug

SEQ ID NO: 2529030 - RNA, 19 nt, Artificial Sequence
  Description of Artificial Sequence: Synthetic oligonucleotide
  Sense strand starting at position 3844 of SEQ ID NO: 1888345
auuguauggccagaaagca

SEQ ID NO: 2529031 - RNA, 19 nt, Artificial Sequence
  Description of Artificial Sequence: Synthetic oligonucleotide
  Antisense strand to SEQ ID NO: 2529030
ugcuuucuggccauacaau

SEQ ID NO: 2529032 - RNA, 19 nt, Artificial Sequence
  Description of Artificial Sequence: Synthetic oligonucleotide
  Sense strand starting at position 2677 of SEQ ID NO: 1888345
uacagaggucauugaaguu

SEQ ID NO: 2529033 - RNA, 19 nt, Artificial Sequence
  Description of Artificial Sequence: Synthetic oligonucleotide
  Antisense strand to SEQ ID NO: 2529032
aacuucaaugaccucugua

SEQ ID NO: 2529034 - RNA, 19 nt, Artificial Sequence
  Description of Artificial Sequence: Synthetic oligonucleotide
  Sense strand starting at position 2068 of SEQ ID NO: 1888345
auguuugggugugcauuua

SEQ ID NO: 2529035 - RNA, 19 nt, Artificial Sequence
  Description of Artificial Sequence: Synthetic oligonucleotide
  Antisense strand to SEQ ID NO: 2529034
uaaaugcacacccaaacau

SEQ ID NO: 2529036 - RNA, 19 nt, Artificial Sequence
  Description of Artificial Sequence: Synthetic oligonucleotide
  Sense strand starting at position 1502 of SEQ ID NO: 1888345
uccuuaauccuugguaaag

SEQ ID NO: 2529037 - RNA, 19 nt, Artificial Sequence
  Description of Artificial Sequence: Synthetic oligonucleotide
  Antisense strand to SEQ ID NO: 2529036
cuuuaccaaggauuaagga

SEQ ID NO: 2529038 - RNA, 19 nt, Artificial Sequence
  Description of Artificial Sequence: Synthetic oligonucleotide
  Sense strand starting at position 2067 of SEQ ID NO: 1888345
gauguuugggugugcauuu

SEQ ID NO: 2529039 - RNA, 19 nt, Artificial Sequence
  Description of Artificial Sequence: Synthetic oligonucleotide
  Antisense strand to SEQ ID NO: 2529038
aaaugcacacccaaacauc

SEQ ID NO: 2529040 - RNA, 19 nt, Artificial Sequence
  Description of Artificial Sequence: Synthetic oligonucleotide
  Sense strand starting at position 1178 of SEQ ID NO: 1888345
gcacuuuacugauucuaga

SEQ ID NO: 2529041 - RNA, 19 nt, Artificial Sequence
  Description of Artificial Sequence: Synthetic oligonucleotide
  Antisense strand to SEQ ID NO: 2529040
ucuagaaucaguaaagugc

SEQ ID NO: 2529042 - RNA, 19 nt, Artificial Sequence
  Description of Artificial Sequence: Synthetic oligonucleotide
  Sense strand starting at position 1369 of SEQ ID NO: 1888345
ugcaacaucuugucaggaa

SEQ ID NO: 2529043 - RNA, 19 nt, Artificial Sequence
  Description of Artificial Sequence: Synthetic oligonucleotide
  Antisense strand to SEQ ID NO: 2529042
uuccugacaagauguugca

SEQ ID NO: 2529044 - RNA, 19 nt, Artificial Sequence
  Description of Artificial Sequence: Synthetic oligonucleotide
  Sense strand starting at position 124 of SEQ ID NO: 1888345
ucaguaaauucuguucuaa

SEQ ID NO: 2529045 - RNA, 19 nt, Artificial Sequence
  Description of Artificial Sequence: Synthetic oligonucleotide
  Antisense strand to SEQ ID NO: 2529044
uuagaacagaauuuacuga

SEQ ID NO: 2529046 - RNA, 19 nt, Artificial Sequence
  Description of Artificial Sequence: Synthetic oligonucleotide
  Sense strand starting at position 17 of SEQ ID NO: 1888345
ccauucguuugaucaaaca

SEQ ID NO: 2529047 - RNA, 19 nt, Artificial Sequence
  Description of Artificial Sequence: Synthetic oligonucleotide
  Antisense strand to SEQ ID NO: 2529046
uguuugaucaaacgaaugg

SEQ ID NO: 2529048 - RNA, 19 nt, Artificial Sequence
  Description of Artificial Sequence: Synthetic oligonucleotide
  Sense strand starting at position 917 of SEQ ID NO: 1888345
aucauaccuucuucugagu

SEQ ID NO: 2529049 - RNA, 19 nt, Artificial Sequence
  Description of Artificial Sequence: Synthetic oligonucleotide
  Antisense strand to SEQ ID NO: 2529048
acucagaagaagguaugau

SEQ ID NO: 2529050 - RNA, 19 nt, Artificial Sequence
  Description of Artificial Sequence: Synthetic oligonucleotide
  Sense strand starting at position 3690 of SEQ ID NO: 1888345
cuuuaagacuucuuggcau

SEQ ID NO: 2529051 - RNA, 19 nt, Artificial Sequence
  Description of Artificial Sequence: Synthetic oligonucleotide
  Antisense strand to SEQ ID NO: 2529050
augccaagaagucuuaaag

SEQ ID NO: 2529052 - RNA, 19 nt, Artificial Sequence
  Description of Artificial Sequence: Synthetic oligonucleotide
  Sense strand starting at position 56 of SEQ ID NO: 1888345
aguuauuaccuuugagggu

SEQ ID NO: 2529053 - RNA, 19 nt, Artificial Sequence
  Description of Artificial Sequence: Synthetic oligonucleotide
  Antisense strand to SEQ ID NO: 2529052
acccucaaagguaauaacu

SEQ ID NO: 2529054 - RNA, 19 nt, Artificial Sequence
  Description of Artificial Sequence: Synthetic oligonucleotide
  Sense strand starting at position 1503 of SEQ ID NO: 1888345
ccuuaauccuugguaaagu

SEQ ID NO: 2529055 - RNA, 19 nt, Artificial Sequence
  Description of Artificial Sequence: Synthetic oligonucleotide
  Antisense strand to SEQ ID NO: 2529054
acuuuaccaaggauuaagg

SEQ ID NO: 2529056 - RNA, 19 nt, Artificial Sequence
  Description of Artificial Sequence: Synthetic oligonucleotide
  Sense strand starting at position 2942 of SEQ ID NO: 1888346
acuugauuagaaugaguug

SEQ ID NO: 2529057 - RNA, 19 nt, Artificial Sequence
  Description of Artificial Sequence: Synthetic oligonucleotide
  Antisense strand to SEQ ID NO: 2529056
caacucauucuaaucaagu

SEQ ID NO: 2529058 - RNA, 19 nt, Artificial Sequence
  Description of Artificial Sequence: Synthetic oligonucleotide
  Sense strand starting at position 2558 of SEQ ID NO: 1888346
uuuggaucaauugguaaag

SEQ ID NO: 2529059 - RNA, 19 nt, Artificial Sequence
  Description of Artificial Sequence: Synthetic oligonucleotide
  Antisense strand to SEQ ID NO: 2529058
cuuuaccaauugauccaaa

SEQ ID NO: 2529060 - RNA, 19 nt, Artificial Sequence
  Description of Artificial Sequence: Synthetic oligonucleotide
  Sense strand starting at position 130 of SEQ ID NO: 1888346
cuagaaggauucuccaucu

SEQ ID NO: 2529061 - RNA, 19 nt, Artificial Sequence
  Description of Artificial Sequence: Synthetic oligonucleotide
  Antisense strand to SEQ ID NO: 2529060
agauggagaauccuucuag

SEQ ID NO: 2529062 - RNA, 19 nt, Artificial Sequence
  Description of Artificial Sequence: Synthetic oligonucleotide
  Sense strand starting at position 1618 of SEQ ID NO: 1888346
guagaaucccagcaucaac

SEQ ID NO: 2529063 - RNA, 19 nt, Artificial Sequence
  Description of Artificial Sequence: Synthetic oligonucleotide
  Antisense strand to SEQ ID NO: 2529062
guugaugcugggauucuac

SEQ ID NO: 2529064 - RNA, 19 nt, Artificial Sequence
  Description of Artificial Sequence: Synthetic oligonucleotide
  Sense strand starting at position 3493 of SEQ ID NO: 1888346
ugccauugggucuagagga

SEQ ID NO: 2529065 - RNA, 19 nt, Artificial Sequence
  Description of Artificial Sequence: Synthetic oligonucleotide
  Antisense strand to SEQ ID NO: 2529064
uccucuagacccaauggca

SEQ ID NO: 2529066 - RNA, 19 nt, Artificial Sequence
  Description of Artificial Sequence: Synthetic oligonucleotide
  Sense strand starting at position 1247 of SEQ ID NO: 1888346
ccagcagauggucaaucau

SEQ ID NO: 2529067 - RNA, 19 nt, Artificial Sequence
  Description of Artificial Sequence: Synthetic oligonucleotide
  Antisense strand to SEQ ID NO: 2529066
augauugaccaucugcugg

SEQ ID NO: 2529068 - RNA, 19 nt, Artificial Sequence
  Description of Artificial Sequence: Synthetic oligonucleotide
  Sense strand starting at position 1559 of SEQ ID NO: 1888346
guuguuggugucagaagug

SEQ ID NO: 2529069 - RNA, 19 nt, Artificial Sequence
  Description of Artificial Sequence: Synthetic oligonucleotide
  Antisense strand to SEQ ID NO: 2529068
cacuucugacaccaacaac

SEQ ID NO: 2529070 - RNA, 19 nt, Artificial Sequence
  Description of Artificial Sequence: Synthetic oligonucleotide
  Sense strand starting at position 1753 of SEQ ID NO: 1888346
agaacagucugaccuccua

SEQ ID NO: 2529071 - RNA, 19 nt, Artificial Sequence
  Description of Artificial Sequence: Synthetic oligonucleotide
  Antisense strand to SEQ ID NO: 2529070
uaggaggucagacuguucu

SEQ ID NO: 2529072 - RNA, 19 nt, Artificial Sequence
  Description of Artificial Sequence: Synthetic oligonucleotide
  Sense strand starting at position 3454 of SEQ ID NO: 1888346
ggcagaauauaguccaaca

SEQ ID NO: 2529073 - RNA, 19 nt, Artificial Sequence
  Description of Artificial Sequence: Synthetic oligonucleotide
  Antisense strand to SEQ ID NO: 2529072
uguuggacuauauucugcc

SEQ ID NO: 2529074 - RNA, 19 nt, Artificial Sequence
  Description of Artificial Sequence: Synthetic oligonucleotide
  Sense strand starting at position 2835 of SEQ ID NO: 1888346
ugagauuguguuuaguaaa

SEQ ID NO: 2529075 - RNA, 19 nt, Artificial Sequence
  Description of Artificial Sequence: Synthetic oligonucleotide
  Antisense strand to SEQ ID NO: 2529074
uuuacuaaacacaaucuca

SEQ ID NO: 2529076 - RNA, 19 nt, Artificial Sequence
  Description of Artificial Sequence: Synthetic oligonucleotide
  Sense strand starting at position 2508 of SEQ ID NO: 1888346
caaccugaccucuggaagu

SEQ ID NO: 2529077 - RNA, 19 nt, Artificial Sequence
  Description of Artificial Sequence: Synthetic oligonucleotide
  Antisense strand to SEQ ID NO: 2529076
acuuccagaggucagguug

SEQ ID NO: 2529078 - RNA, 19 nt, Artificial Sequence
  Description of Artificial Sequence: Synthetic oligonucleotide
  Sense strand starting at position 2947 of SEQ ID NO: 1888346
auuagaaugaguuggcaua

SEQ ID NO: 2529079 - RNA, 19 nt, Artificial Sequence
  Description of Artificial Sequence: Synthetic oligonucleotide
  Antisense strand to SEQ ID NO: 2529078
uaugccaacucauucuaau

SEQ ID NO: 2529080 - RNA, 19 nt, Artificial Sequence
  Description of Artificial Sequence: Synthetic oligonucleotide
  Sense strand starting at position 1262 of SEQ ID NO: 1888346
ucaugucuacgugaacaag

SEQ ID NO: 2529081 - RNA, 19 nt, Artificial Sequence
  Description of Artificial Sequence: Synthetic oligonucleotide
  Antisense strand to SEQ ID NO: 2529080
cuuguucacguagacauga

SEQ ID NO: 2529082 - RNA, 19 nt, Artificial Sequence
  Description of Artificial Sequence: Synthetic oligonucleotide
  Sense strand starting at position 2577 of SEQ ID NO: 1888346
agcucaauaugaguuaaug

SEQ ID NO: 2529083 - RNA, 19 nt, Artificial Sequence
  Description of Artificial Sequence: Synthetic oligonucleotide
  Antisense strand to SEQ ID NO: 2529082
cauuaacucauauugagcu

SEQ ID NO: 2529084 - RNA, 19 nt, Artificial Sequence
  Description of Artificial Sequence: Synthetic oligonucleotide
  Sense strand starting at position 2700 of SEQ ID NO: 1888346
cgauuauaguaaguagaca

SEQ ID NO: 2529085 - RNA, 19 nt, Artificial Sequence
  Description of Artificial Sequence: Synthetic oligonucleotide
  Antisense strand to SEQ ID NO: 2529084
ugucuacuuacuauaaucg

SEQ ID NO: 2529086 - RNA, 19 nt, Artificial Sequence
  Description of Artificial Sequence: Synthetic oligonucleotide
  Sense strand starting at position 902 of SEQ ID NO: 1888346
acuccugugcaguaaauaa

SEQ ID NO: 2529087 - RNA, 19 nt, Artificial Sequence
  Description of Artificial Sequence: Synthetic oligonucleotide
  Antisense strand to SEQ ID NO: 2529086
uuauuuacugcacaggagu

SEQ ID NO: 2529088 - RNA, 19 nt, Artificial Sequence
  Description of Artificial Sequence: Synthetic oligonucleotide
  Sense strand starting at position 1553 of SEQ ID NO: 1888346
caauuuguuguugguguca

SEQ ID NO: 2529089 - RNA, 19 nt, Artificial Sequence
  Description of Artificial Sequence: Synthetic oligonucleotide
  Antisense strand to SEQ ID NO: 2529088
ugacaccaacaacaaauug

SEQ ID NO: 2529090 - RNA, 19 nt, Artificial Sequence
  Description of Artificial Sequence: Synthetic oligonucleotide
  Sense strand starting at position 2276 of SEQ ID NO: 1888346
uucuaagcccuugaaaugu

SEQ ID NO: 2529091 - RNA, 19 nt, Artificial Sequence
  Description of Artificial Sequence: Synthetic oligonucleotide
  Antisense strand to SEQ ID NO: 2529090
acauuucaagggcuuagaa

SEQ ID NO: 2529092 - RNA, 19 nt, Artificial Sequence
  Description of Artificial Sequence: Synthetic oligonucleotide
  Sense strand starting at position 2086 of SEQ ID NO: 1888346
aguagaggucuugacguaa

SEQ ID NO: 2529093 - RNA, 19 nt, Artificial Sequence
  Description of Artificial Sequence: Synthetic oligonucleotide
  Antisense strand to SEQ ID NO: 2529092
uuacgucaagaccucuacu

SEQ ID NO: 2529094 - RNA, 19 nt, Artificial Sequence
  Description of Artificial Sequence: Synthetic oligonucleotide
  Sense strand starting at position 222 of SEQ ID NO: 1888346
ggaagagcuugguucugga

SEQ ID NO: 2529095 - RNA, 19 nt, Artificial Sequence
  Description of Artificial Sequence: Synthetic oligonucleotide
  Antisense strand to SEQ ID NO: 2529094
uccagaaccaagcucuucc

SEQ ID NO: 2529096 - RNA, 19 nt, Artificial Sequence
  Description of Artificial Sequence: Synthetic oligonucleotide
  Sense strand starting at position 2949 of SEQ ID NO: 1888346
uagaaugaguuggcauauu

SEQ ID NO: 2529097 - RNA, 19 nt, Artificial Sequence
  Description of Artificial Sequence: Synthetic oligonucleotide
  Antisense strand to SEQ ID NO: 2529096
aauaugccaacucauucua

SEQ ID NO: 2529098 - RNA, 19 nt, Artificial Sequence
  Description of Artificial Sequence: Synthetic oligonucleotide
  Sense strand starting at position 3364 of SEQ ID NO: 1888346
guggcauguagacagaagu

SEQ ID NO: 2529099 - RNA, 19 nt, Artificial Sequence
  Description of Artificial Sequence: Synthetic oligonucleotide
  Antisense strand to SEQ ID NO: 2529098
acuucugucuacaugccac

SEQ ID NO: 2529100 - RNA, 19 nt, Artificial Sequence
  Description of Artificial Sequence: Synthetic oligonucleotide
  Sense strand starting at position 288 of SEQ ID NO: 1888346
cgaguuuacgaauaaucuu

SEQ ID NO: 2529101 - RNA, 19 nt, Artificial Sequence
  Description of Artificial Sequence: Synthetic oligonucleotide
  Antisense strand to SEQ ID NO: 2529100
aagauuauucguaaacucg

SEQ ID NO: 2529102 - RNA, 19 nt, Artificial Sequence
  Description of Artificial Sequence: Synthetic oligonucleotide
  Sense strand starting at position 3025 of SEQ ID NO: 1888346
acaaaugugugguccaaga

SEQ ID NO: 2529103 - RNA, 19 nt, Artificial Sequence
  Description of Artificial Sequence: Synthetic oligonucleotide
  Antisense strand to SEQ ID NO: 2529102
ucuuggaccacacauuugu

SEQ ID NO: 2529104 - RNA, 19 nt, Artificial Sequence
  Description of Artificial Sequence: Synthetic oligonucleotide
  Sense strand starting at position 124 of SEQ ID NO: 1888346
gucuuucuagaaggauucu

SEQ ID NO: 2529105 - RNA, 19 nt, Artificial Sequence
  Description of Artificial Sequence: Synthetic oligonucleotide
  Antisense strand to SEQ ID NO: 2529104
agaauccuucuagaaagac

SEQ ID NO: 2529106 - RNA, 19 nt, Artificial Sequence
  Description of Artificial Sequence: Synthetic oligonucleotide
  Sense strand starting at position 219 of SEQ ID NO: 1888346
ggaggaagagcuugguucu

SEQ ID NO: 2529107 - RNA, 19 nt, Artificial Sequence
  Description of Artificial Sequence: Synthetic oligonucleotide
  Antisense strand to SEQ ID NO: 2529106
agaaccaagcucuuccucc

SEQ ID NO: 2529108 - RNA, 19 nt, Artificial Sequence
  Description of Artificial Sequence: Synthetic oligonucleotide
  Sense strand starting at position 562 of SEQ ID NO: 1888346
cucgauuaguaaucacaac

SEQ ID NO: 2529109 - RNA, 19 nt, Artificial Sequence
  Description of Artificial Sequence: Synthetic oligonucleotide
  Antisense strand to SEQ ID NO: 2529108
guugugauuacuaaucgag

SEQ ID NO: 2529110 - RNA, 19 nt, Artificial Sequence
  Description of Artificial Sequence: Synthetic oligonucleotide
  Sense strand starting at position 2948 of SEQ ID NO: 1888346
uuagaaugaguuggcauau

SEQ ID NO: 2529111 - RNA, 19 nt, Artificial Sequence
  Description of Artificial Sequence: Synthetic oligonucleotide
  Antisense strand to SEQ ID NO: 2529110
auaugccaacucauucuaa

SEQ ID NO: 2529112 - RNA, 19 nt, Artificial Sequence
  Description of Artificial Sequence: Synthetic oligonucleotide
  Sense strand starting at position 863 of SEQ ID NO: 1888346
cugaucugcccugggaaua

SEQ ID NO: 2529113 - RNA, 19 nt, Artificial Sequence
  Description of Artificial Sequence: Synthetic oligonucleotide
  Antisense strand to SEQ ID NO: 2529112
uauucccagggcagaucag

SEQ ID NO: 2529114 - RNA, 19 nt, Artificial Sequence
  Description of Artificial Sequence: Synthetic oligonucleotide
  Sense strand starting at position 725 of SEQ ID NO: 1888346
augagaagcuccuuucuca

SEQ ID NO: 2529115 - RNA, 19 nt, Artificial Sequence
  Description of Artificial Sequence: Synthetic oligonucleotide
  Antisense strand to SEQ ID NO: 2529114
ugagaaaggagcuucucau

SEQ ID NO: 2529116 - RNA, 19 nt, Artificial Sequence
  Description of Artificial Sequence: Synthetic oligonucleotide
  Sense strand starting at position 2449 of SEQ ID NO: 1888346
gcccaaagggucuauguua

SEQ ID NO: 2529117 - RNA, 19 nt, Artificial Sequence
  Description of Artificial Sequence: Synthetic oligonucleotide
  Antisense strand to SEQ ID NO: 2529116
uaacauagacccuuugggc

SEQ ID NO: 2529118 - RNA, 19 nt, Artificial Sequence
  Description of Artificial Sequence: Synthetic oligonucleotide
  Sense strand starting at position 3332 of SEQ ID NO: 1888346
guuacauguggccacauga

SEQ ID NO: 2529119 - RNA, 19 nt, Artificial Sequence
  Description of Artificial Sequence: Synthetic oligonucleotide
  Antisense strand to SEQ ID NO: 2529118
ucauguggccacauguaac

SEQ ID NO: 2529120 - RNA, 19 nt, Artificial Sequence
  Description of Artificial Sequence: Synthetic oligonucleotide
  Sense strand starting at position 1381 of SEQ ID NO: 1888346
cacgacucauguuuaauga

SEQ ID NO: 2529121 - RNA, 19 nt, Artificial Sequence
  Description of Artificial Sequence: Synthetic oligonucleotide
  Antisense strand to SEQ ID NO: 2529120
ucauuaaacaugagucgug

SEQ ID NO: 2529122 - RNA, 19 nt, Artificial Sequence
  Description of Artificial Sequence: Synthetic oligonucleotide
  Sense strand starting at position 1991 of SEQ ID NO: 1888346
ugauaucagucugcugaaa

SEQ ID NO: 2529123 - RNA, 19 nt, Artificial Sequence
  Description of Artificial Sequence: Synthetic oligonucleotide
  Antisense strand to SEQ ID NO: 2529122
uuucagcagacugauauca

SEQ ID NO: 2529124 - RNA, 19 nt, Artificial Sequence
  Description of Artificial Sequence: Synthetic oligonucleotide
  Sense strand starting at position 2689 of SEQ ID NO: 1888346
gucuuaugggucgauuaua

SEQ ID NO: 2529125 - RNA, 19 nt, Artificial Sequence
  Description of Artificial Sequence: Synthetic oligonucleotide
  Antisense strand to SEQ ID NO: 2529124
uauaaucgacccauaagac

SEQ ID NO: 2529126 - RNA, 19 nt, Artificial Sequence
  Description of Artificial Sequence: Synthetic oligonucleotide
  Sense strand starting at position 2275 of SEQ ID NO: 1888346
cuucuaagcccuugaaaug

SEQ ID NO: 2529127 - RNA, 19 nt, Artificial Sequence
  Description of Artificial Sequence: Synthetic oligonucleotide
  Antisense strand to SEQ ID NO: 2529126
cauuucaagggcuuagaag

SEQ ID NO: 2529128 - RNA, 19 nt, Artificial Sequence
  Description of Artificial Sequence: Synthetic oligonucleotide
  Sense strand starting at position 3246 of SEQ ID NO: 1888346
ccugguggguucucagaga

SEQ ID NO: 2529129 - RNA, 19 nt, Artificial Sequence
  Description of Artificial Sequence: Synthetic oligonucleotide
  Antisense strand to SEQ ID NO: 2529128
ucucugagaacccaccagg

SEQ ID NO: 2529130 - RNA, 19 nt, Artificial Sequence
  Description of Artificial Sequence: Synthetic oligonucleotide
  Sense strand starting at position 490 of SEQ ID NO: 1888346
ucagucauucuagguauaa

SEQ ID NO: 2529131 - RNA, 19 nt, Artificial Sequence
  Description of Artificial Sequence: Synthetic oligonucleotide
  Antisense strand to SEQ ID NO: 2529130
uuauaccuagaaugacuga

SEQ ID NO: 2529132 - RNA, 19 nt, Artificial Sequence
  Description of Artificial Sequence: Synthetic oligonucleotide
  Sense strand starting at position 710 of SEQ ID NO: 1888346
ccugguaucucaguaauga

SEQ ID NO: 2529133 - RNA, 19 nt, Artificial Sequence
  Description of Artificial Sequence: Synthetic oligonucleotide
  Antisense strand to SEQ ID NO: 2529132
ucauuacugagauaccagg

SEQ ID NO: 2529134 - RNA, 19 nt, Artificial Sequence
  Description of Artificial Sequence: Synthetic oligonucleotide
  Sense strand starting at position 1990 of SEQ ID NO: 1888346
augauaucagucugcugaa

SEQ ID NO: 2529135 - RNA, 19 nt, Artificial Sequence
  Description of Artificial Sequence: Synthetic oligonucleotide
  Antisense strand to SEQ ID NO: 2529134
uucagcagacugauaucau

SEQ ID NO: 2529136 - RNA, 19 nt, Artificial Sequence
  Description of Artificial Sequence: Synthetic oligonucleotide
  Sense strand starting at position 203 of SEQ ID NO: 1888347
cccagcuagcauugauuua

SEQ ID NO: 2529137 - RNA, 19 nt, Artificial Sequence
  Description of Artificial Sequence: Synthetic oligonucleotide
  Antisense strand to SEQ ID NO: 2529136
uaaaucaaugcuagcuggg

SEQ ID NO: 2529138 - RNA, 19 nt, Artificial Sequence
  Description of Artificial Sequence: Synthetic oligonucleotide
  Sense strand starting at position 441 of SEQ ID NO: 1888347
gguggaagauggaauagua

SEQ ID NO: 2529139 - RNA, 19 nt, Artificial Sequence
  Description of Artificial Sequence: Synthetic oligonucleotide
  Antisense strand to SEQ ID NO: 2529138
uacuauuccaucuuccacc

SEQ ID NO: 2529140 - RNA, 19 nt, Artificial Sequence
  Description of Artificial Sequence: Synthetic oligonucleotide
  Sense strand starting at position 3708 of SEQ ID NO: 1888347
uugggagccaguuauagag

SEQ ID NO: 2529141 - RNA, 19 nt, Artificial Sequence
  Description of Artificial Sequence: Synthetic oligonucleotide
  Antisense strand to SEQ ID NO: 2529140
cucuauaacuggcucccaa

SEQ ID NO: 2529142 - RNA, 19 nt, Artificial Sequence
  Description of Artificial Sequence: Synthetic oligonucleotide
  Sense strand starting at position 322 of SEQ ID NO: 1888347
aggugaguaaacugaauca

SEQ ID NO: 2529143 - RNA, 19 nt, Artificial Sequence
  Description of Artificial Sequence: Synthetic oligonucleotide
  Antisense strand to SEQ ID NO: 2529142
ugauucaguuuacucaccu

SEQ ID NO: 2529144 - RNA, 19 nt, Artificial Sequence
  Description of Artificial Sequence: Synthetic oligonucleotide
  Sense strand starting at position 1329 of SEQ ID NO: 1888347
guuugcuuuagagacagaa

SEQ ID NO: 2529145 - RNA, 19 nt, Artificial Sequence
  Description of Artificial Sequence: Synthetic oligonucleotide
  Antisense strand to SEQ ID NO: 2529144
uucugucucuaaagcaaac

SEQ ID NO: 2529146 - RNA, 19 nt, Artificial Sequence
  Description of Artificial Sequence: Synthetic oligonucleotide
  Sense strand starting at position 288 of SEQ ID NO: 1888347
cuacgaaggaggcauuauu

SEQ ID NO: 2529147 - RNA, 19 nt, Artificial Sequence
  Description of Artificial Sequence: Synthetic oligonucleotide
  Antisense strand to SEQ ID NO: 2529146
aauaaugccuccuucguag

SEQ ID NO: 2529148 - RNA, 19 nt, Artificial Sequence
  Description of Artificial Sequence: Synthetic oligonucleotide
  Sense strand starting at position 1358 of SEQ ID NO: 1888347
uugaauuaacaaugaagcu

SEQ ID NO: 2529149 - RNA, 19 nt, Artificial Sequence
  Description of Artificial Sequence: Synthetic oligonucleotide
  Antisense strand to SEQ ID NO: 2529148
agcuucauuguuaauucaa

SEQ ID NO: 2529150 - RNA, 19 nt, Artificial Sequence
  Description of Artificial Sequence: Synthetic oligonucleotide
  Sense strand starting at position 1837 of SEQ ID NO: 1888347
uguguaucccaauacaaac

SEQ ID NO: 2529151 - RNA, 19 nt, Artificial Sequence
  Description of Artificial Sequence: Synthetic oligonucleotide
  Antisense strand to SEQ ID NO: 2529150
guuuguauugggauacaca

SEQ ID NO: 2529152 - RNA, 19 nt, Artificial Sequence
  Description of Artificial Sequence: Synthetic oligonucleotide
  Sense strand starting at position 741 of SEQ ID NO: 1888347
cucgaauggguugauuaug

SEQ ID NO: 2529153 - RNA, 19 nt, Artificial Sequence
  Description of Artificial Sequence: Synthetic oligonucleotide
  Antisense strand to SEQ ID NO: 2529152
cauaaucaacccauucgag

SEQ ID NO: 2529154 - RNA, 19 nt, Artificial Sequence
  Description of Artificial Sequence: Synthetic oligonucleotide
  Sense strand starting at position 448 of SEQ ID NO: 1888347
gauggaauaguauguugga

SEQ ID NO: 2529155 - RNA, 19 nt, Artificial Sequence
  Description of Artificial Sequence: Synthetic oligonucleotide
  Antisense strand to SEQ ID NO: 2529154
uccaacauacuauuccauc

SEQ ID NO: 2529156 - RNA, 19 nt, Artificial Sequence
  Description of Artificial Sequence: Synthetic oligonucleotide
  Sense strand starting at position 1829 of SEQ ID NO: 1888347
cuagaauauguguauccca

SEQ ID NO: 2529157 - RNA, 19 nt, Artificial Sequence
  Description of Artificial Sequence: Synthetic oligonucleotide
  Antisense strand to SEQ ID NO: 2529156
ugggauacacauauucuag

SEQ ID NO: 2529158 - RNA, 19 nt, Artificial Sequence
  Description of Artificial Sequence: Synthetic oligonucleotide
  Sense strand starting at position 1662 of SEQ ID NO: 1888347
ucaucuaaggcagaucagu

SEQ ID NO: 2529159 - RNA, 19 nt, Artificial Sequence
  Description of Artificial Sequence: Synthetic oligonucleotide
  Antisense strand to SEQ ID NO: 2529158
acugaucugccuuagauga

SEQ ID NO: 2529160 - RNA, 19 nt, Artificial Sequence
  Description of Artificial Sequence: Synthetic oligonucleotide
  Sense strand starting at position 1259 of SEQ ID NO: 1888347
gcuuucugaaaugagcaga

SEQ ID NO: 2529161 - RNA, 19 nt, Artificial Sequence
  Description of Artificial Sequence: Synthetic oligonucleotide
  Antisense strand to SEQ ID NO: 2529160
ucugcucauuucagaaagc

SEQ ID NO: 2529162 - RNA, 19 nt, Artificial Sequence
  Description of Artificial Sequence: Synthetic oligonucleotide
  Sense strand starting at position 3714 of SEQ ID NO: 1888347
gccaguuauagagaguuaa

SEQ ID NO: 2529163 - RNA, 19 nt, Artificial Sequence
  Description of Artificial Sequence: Synthetic oligonucleotide
  Antisense strand to SEQ ID NO: 2529162
uuaacucucuauaacuggc

SEQ ID NO: 2529164 - RNA, 19 nt, Artificial Sequence
  Description of Artificial Sequence: Synthetic oligonucleotide
  Sense strand starting at position 3712 of SEQ ID NO: 1888347
gagccaguuauagagaguu

SEQ ID NO: 2529165 - RNA, 19 nt, Artificial Sequence
  Description of Artificial Sequence: Synthetic oligonucleotide
  Antisense strand to SEQ ID NO: 2529164
aacucucuauaacuggcuc

SEQ ID NO: 2529166 - RNA, 19 nt, Artificial Sequence
  Description of Artificial Sequence: Synthetic oligonucleotide
  Sense strand starting at position 2797 of SEQ ID NO: 1888347
uucccaucucauuagaguu

SEQ ID NO: 2529167 - RNA, 19 nt, Artificial Sequence
  Description of Artificial Sequence: Synthetic oligonucleotide
  Antisense strand to SEQ ID NO: 2529166
aacucuaaugagaugggaa

SEQ ID NO: 2529168 - RNA, 19 nt, Artificial Sequence
  Description of Artificial Sequence: Synthetic oligonucleotide
  Sense strand starting at position 3849 of SEQ ID NO: 1888347
ggagacauuuaggaagucu

SEQ ID NO: 2529169 - RNA, 19 nt, Artificial Sequence
  Description of Artificial Sequence: Synthetic oligonucleotide
  Antisense strand to SEQ ID NO: 2529168
agacuuccuaaaugucucc

SEQ ID NO: 2529170 - RNA, 19 nt, Artificial Sequence
  Description of Artificial Sequence: Synthetic oligonucleotide
  Sense strand starting at position 1270 of SEQ ID NO: 1888347
ugagcagaacuucggaaau

SEQ ID NO: 2529171 - RNA, 19 nt, Artificial Sequence
  Description of Artificial Sequence: Synthetic oligonucleotide
  Antisense strand to SEQ ID NO: 2529170
auuuccgaaguucugcuca

SEQ ID NO: 2529172 - RNA, 19 nt, Artificial Sequence
  Description of Artificial Sequence: Synthetic oligonucleotide
  Sense strand starting at position 781 of SEQ ID NO: 1888347
guugaugauacguaaucau

SEQ ID NO: 2529173 - RNA, 19 nt, Artificial Sequence
  Description of Artificial Sequence: Synthetic oligonucleotide
  Antisense strand to SEQ ID NO: 2529172
augauuacguaucaucaac

SEQ ID NO: 2529174 - RNA, 19 nt, Artificial Sequence
  Description of Artificial Sequence: Synthetic oligonucleotide
  Sense strand starting at position 1816 of SEQ ID NO: 1888347
aggcauauguauucuagaa

SEQ ID NO: 2529175 - RNA, 19 nt, Artificial Sequence
  Description of Artificial Sequence: Synthetic oligonucleotide
  Antisense strand to SEQ ID NO: 2529174
uucuagaauacauaugccu

SEQ ID NO: 2529176 - RNA, 19 nt, Artificial Sequence
  Description of Artificial Sequence: Synthetic oligonucleotide
  Sense strand starting at position 2195 of SEQ ID NO: 1888347
gcauguggauuuguaguuu

SEQ ID NO: 2529177 - RNA, 19 nt, Artificial Sequence
  Description of Artificial Sequence: Synthetic oligonucleotide
  Antisense strand to SEQ ID NO: 2529176
aaacuacaaauccacaugc

SEQ ID NO: 2529178 - RNA, 19 nt, Artificial Sequence
  Description of Artificial Sequence: Synthetic oligonucleotide
  Sense strand starting at position 2481 of SEQ ID NO: 1888347
ugcaguaauuucccguaau

SEQ ID NO: 2529179 - RNA, 19 nt, Artificial Sequence
  Description of Artificial Sequence: Synthetic oligonucleotide
  Antisense strand to SEQ ID NO: 2529178
auuacgggaaauuacugca

SEQ ID NO: 2529180 - RNA, 19 nt, Artificial Sequence
  Description of Artificial Sequence: Synthetic oligonucleotide
  Sense strand starting at position 2715 of SEQ ID NO: 1888347
ugacgagcccucuaauuau

SEQ ID NO: 2529181 - RNA, 19 nt, Artificial Sequence
  Description of Artificial Sequence: Synthetic oligonucleotide
  Antisense strand to SEQ ID NO: 2529180
auaauuagagggcucguca

SEQ ID NO: 2529182 - RNA, 19 nt, Artificial Sequence
  Description of Artificial Sequence: Synthetic oligonucleotide
  Sense strand starting at position 375 of SEQ ID NO: 1888347
gcaaauaagcgaugaagac

SEQ ID NO: 2529183 - RNA, 19 nt, Artificial Sequence
  Description of Artificial Sequence: Synthetic oligonucleotide
  Antisense strand to SEQ ID NO: 2529182
gucuucaucgcuuauuugc

SEQ ID NO: 2529184 - RNA, 19 nt, Artificial Sequence
  Description of Artificial Sequence: Synthetic oligonucleotide
  Sense strand starting at position 2334 of SEQ ID NO: 1888347
ccaaucucaguguaaucga

SEQ ID NO: 2529185 - RNA, 19 nt, Artificial Sequence
  Description of Artificial Sequence: Synthetic oligonucleotide
  Antisense strand to SEQ ID NO: 2529184
ucgauuacacugagauugg

SEQ ID NO: 2529186 - RNA, 19 nt, Artificial Sequence
  Description of Artificial Sequence: Synthetic oligonucleotide
  Sense strand starting at position 597 of SEQ ID NO: 1888347
aggaaugaaugagauaaua

SEQ ID NO: 2529187 - RNA, 19 nt, Artificial Sequence
  Description of Artificial Sequence: Synthetic oligonucleotide
  Antisense strand to SEQ ID NO: 2529186
uauuaucucauucauuccu

SEQ ID NO: 2529188 - RNA, 19 nt, Artificial Sequence
  Description of Artificial Sequence: Synthetic oligonucleotide
  Sense strand starting at position 835 of SEQ ID NO: 1888347
agcaguuugacauggaacu

SEQ ID NO: 2529189 - RNA, 19 nt, Artificial Sequence
  Description of Artificial Sequence: Synthetic oligonucleotide
  Antisense strand to SEQ ID NO: 2529188
aguuccaugucaaacugcu

SEQ ID NO: 2529190 - RNA, 19 nt, Artificial Sequence
  Description of Artificial Sequence: Synthetic oligonucleotide
  Sense strand starting at position 1823 of SEQ ID NO: 1888347
uguauucuagaauaugugu

SEQ ID NO: 2529191 - RNA, 19 nt, Artificial Sequence
  Description of Artificial Sequence: Synthetic oligonucleotide
  Antisense strand to SEQ ID NO: 2529190
acacauauucuagaauaca

SEQ ID NO: 2529192 - RNA, 19 nt, Artificial Sequence
  Description of Artificial Sequence: Synthetic oligonucleotide
  Sense strand starting at position 740 of SEQ ID NO: 1888347
acucgaauggguugauuau

SEQ ID NO: 2529193 - RNA, 19 nt, Artificial Sequence
  Description of Artificial Sequence: Synthetic oligonucleotide
  Antisense strand to SEQ ID NO: 2529192
auaaucaacccauucgagu

SEQ ID NO: 2529194 - RNA, 19 nt, Artificial Sequence
  Description of Artificial Sequence: Synthetic oligonucleotide
  Sense strand starting at position 76 of SEQ ID NO: 1888347
gcacuugugauauauguga

SEQ ID NO: 2529195 - RNA, 19 nt, Artificial Sequence
  Description of Artificial Sequence: Synthetic oligonucleotide
  Antisense strand to SEQ ID NO: 2529194
ucacauauaucacaagugc

SEQ ID NO: 2529196 - RNA, 19 nt, Artificial Sequence
  Description of Artificial Sequence: Synthetic oligonucleotide
  Sense strand starting at position 772 of SEQ ID NO: 1888347
uagugcuuaguugaugaua

SEQ ID NO: 2529197 - RNA, 19 nt, Artificial Sequence
  Description of Artificial Sequence: Synthetic oligonucleotide
  Antisense strand to SEQ ID NO: 2529196
uaucaucaacuaagcacua

SEQ ID NO: 2529198 - RNA, 19 nt, Artificial Sequence
  Description of Artificial Sequence: Synthetic oligonucleotide
  Sense strand starting at position 812 of SEQ ID NO: 1888347
guaaccugguaacucaauu

SEQ ID NO: 2529199 - RNA, 19 nt, Artificial Sequence
  Description of Artificial Sequence: Synthetic oligonucleotide
  Antisense strand to SEQ ID NO: 2529198
aauugaguuaccagguuac

SEQ ID NO: 2529200 - RNA, 19 nt, Artificial Sequence
  Description of Artificial Sequence: Synthetic oligonucleotide
  Sense strand starting at position 1793 of SEQ ID NO: 1888347
acagaugacuucuuuguuu

SEQ ID NO: 2529201 - RNA, 19 nt, Artificial Sequence
  Description of Artificial Sequence: Synthetic oligonucleotide
  Antisense strand to SEQ ID NO: 2529200
aaacaaagaagucaucugu

SEQ ID NO: 2529202 - RNA, 19 nt, Artificial Sequence
  Description of Artificial Sequence: Synthetic oligonucleotide
  Sense strand starting at position 780 of SEQ ID NO: 1888347
aguugaugauacguaauca

SEQ ID NO: 2529203 - RNA, 19 nt, Artificial Sequence
  Description of Artificial Sequence: Synthetic oligonucleotide
  Antisense strand to SEQ ID NO: 2529202
ugauuacguaucaucaacu

SEQ ID NO: 2529204 - RNA, 19 nt, Artificial Sequence
  Description of Artificial Sequence: Synthetic oligonucleotide
  Sense strand starting at position 2435 of SEQ ID NO: 1888347
cuggaaccuccauguuacu

SEQ ID NO: 2529205 - RNA, 19 nt, Artificial Sequence
  Description of Artificial Sequence: Synthetic oligonucleotide
  Antisense strand to SEQ ID NO: 2529204
aguaacauggagguuccag

SEQ ID NO: 2529206 - RNA, 19 nt, Artificial Sequence
  Description of Artificial Sequence: Synthetic oligonucleotide
  Sense strand starting at position 540 of SEQ ID NO: 1888347
uagaauauugguugccuaa

SEQ ID NO: 2529207 - RNA, 19 nt, Artificial Sequence
  Description of Artificial Sequence: Synthetic oligonucleotide
  Antisense strand to SEQ ID NO: 2529206
uuaggcaaccaauauucua

SEQ ID NO: 2529208 - RNA, 19 nt, Artificial Sequence
  Description of Artificial Sequence: Synthetic oligonucleotide
  Sense strand starting at position 1296 of SEQ ID NO: 1888347
aguggauccugucugaacu

SEQ ID NO: 2529209 - RNA, 19 nt, Artificial Sequence
  Description of Artificial Sequence: Synthetic oligonucleotide
  Antisense strand to SEQ ID NO: 2529208
aguucagacaggauccacu

SEQ ID NO: 2529210 - RNA, 19 nt, Artificial Sequence
  Description of Artificial Sequence: Synthetic oligonucleotide
  Sense strand starting at position 1225 of SEQ ID NO: 1888347
auaguuuaugccuggaaug

SEQ ID NO: 2529211 - RNA, 19 nt, Artificial Sequence
  Description of Artificial Sequence: Synthetic oligonucleotide
  Antisense strand to SEQ ID NO: 2529210
cauuccaggcauaaacuau

SEQ ID NO: 2529212 - RNA, 19 nt, Artificial Sequence
  Description of Artificial Sequence: Synthetic oligonucleotide
  Sense strand starting at position 836 of SEQ ID NO: 1888347
gcaguuugacauggaacuu

SEQ ID NO: 2529213 - RNA, 19 nt, Artificial Sequence
  Description of Artificial Sequence: Synthetic oligonucleotide
  Antisense strand to SEQ ID NO: 2529212
aaguuccaugucaaacugc

SEQ ID NO: 2529214 - RNA, 19 nt, Artificial Sequence
  Description of Artificial Sequence: Synthetic oligonucleotide
  Sense strand starting at position 1227 of SEQ ID NO: 1888347
aguuuaugccuggaaugca

SEQ ID NO: 2529215 - RNA, 19 nt, Artificial Sequence
  Description of Artificial Sequence: Synthetic oligonucleotide
  Antisense strand to SEQ ID NO: 2529214
ugcauuccaggcauaaacu

SEQ ID NO: 2529216 - RNA, 19 nt, Artificial Sequence
  Description of Artificial Sequence: Synthetic oligonucleotide
  Sense strand starting at position 305 of SEQ ID NO: 1888348
augggaaauuguccuacag

SEQ ID NO: 2529217 - RNA, 19 nt, Artificial Sequence
  Description of Artificial Sequence: Synthetic oligonucleotide
  Antisense strand to SEQ ID NO: 2529216
cuguaggacaauuucccau

SEQ ID NO: 2529218 - RNA, 19 nt, Artificial Sequence
  Description of Artificial Sequence: Synthetic oligonucleotide
  Sense strand starting at position 5 of SEQ ID NO: 1888348
gcacaacagcaauaguaaa

SEQ ID NO: 2529219 - RNA, 19 nt, Artificial Sequence
  Description of Artificial Sequence: Synthetic oligonucleotide
  Antisense strand to SEQ ID NO: 2529218
uuuacuauugcuguugugc

SEQ ID NO: 2529220 - RNA, 19 nt, Artificial Sequence
  Description of Artificial Sequence: Synthetic oligonucleotide
  Sense strand starting at position 789 of SEQ ID NO: 1888348
auuggaugauacucuuuau

SEQ ID NO: 2529221 - RNA, 19 nt, Artificial Sequence
  Description of Artificial Sequence: Synthetic oligonucleotide
  Antisense strand to SEQ ID NO: 2529220
auaaagaguaucauccaau

SEQ ID NO: 2529222 - RNA, 19 nt, Artificial Sequence
  Description of Artificial Sequence: Synthetic oligonucleotide
  Sense strand starting at position 792 of SEQ ID NO: 1888348
ggaugauacucuuuauauu

SEQ ID NO: 2529223 - RNA, 19 nt, Artificial Sequence
  Description of Artificial Sequence: Synthetic oligonucleotide
  Antisense strand to SEQ ID NO: 2529222
aauauaaagaguaucaucc

SEQ ID NO: 2529224 - RNA, 19 nt, Artificial Sequence
  Description of Artificial Sequence: Synthetic oligonucleotide
  Sense strand starting at position 142 of SEQ ID NO: 1888348
gcaggaagcauaugggaaa

SEQ ID NO: 2529225 - RNA, 19 nt, Artificial Sequence
  Description of Artificial Sequence: Synthetic oligonucleotide
  Antisense strand to SEQ ID NO: 2529224
uuucccauaugcuuccugc

SEQ ID NO: 2529226 - RNA, 19 nt, Artificial Sequence
  Description of Artificial Sequence: Synthetic oligonucleotide
  Sense strand starting at position 65 of SEQ ID NO: 1888348
gauauagguuuaucaauug

SEQ ID NO: 2529227 - RNA, 19 nt, Artificial Sequence
  Description of Artificial Sequence: Synthetic oligonucleotide
  Antisense strand to SEQ ID NO: 2529226
caauugauaaaccuauauc

SEQ ID NO: 2529228 - RNA, 19 nt, Artificial Sequence
  Description of Artificial Sequence: Synthetic oligonucleotide
  Sense strand starting at position 3923 of SEQ ID NO: 1888348
uuugaaguaggugaguaua

SEQ ID NO: 2529229 - RNA, 19 nt, Artificial Sequence
  Description of Artificial Sequence: Synthetic oligonucleotide
  Antisense strand to SEQ ID NO: 2529228
uauacucaccuacuucaaa

SEQ ID NO: 2529230 - RNA, 19 nt, Artificial Sequence
  Description of Artificial Sequence: Synthetic oligonucleotide
  Sense strand starting at position 522 of SEQ ID NO: 1888348
uaaugacaguguuuggaaa

SEQ ID NO: 2529231 - RNA, 19 nt, Artificial Sequence
  Description of Artificial Sequence: Synthetic oligonucleotide
  Antisense strand to SEQ ID NO: 2529230
uuuccaaacacugucauua

SEQ ID NO: 2529232 - RNA, 19 nt, Artificial Sequence
  Description of Artificial Sequence: Synthetic oligonucleotide
  Sense strand starting at position 2600 of SEQ ID NO: 1888348
uaugguauugagcauacau

SEQ ID NO: 2529233 - RNA, 19 nt, Artificial Sequence
  Description of Artificial Sequence: Synthetic oligonucleotide
  Antisense strand to SEQ ID NO: 2529232
auguaugcucaauaccaua

SEQ ID NO: 2529234 - RNA, 19 nt, Artificial Sequence
  Description of Artificial Sequence: Synthetic oligonucleotide
  Sense strand starting at position 2115 of SEQ ID NO: 1888348
gauguuuagccacaucaga

SEQ ID NO: 2529235 - RNA, 19 nt, Artificial Sequence
  Description of Artificial Sequence: Synthetic oligonucleotide
  Antisense strand to SEQ ID NO: 2529234
ucugauguggcuaaacauc

SEQ ID NO: 2529236 - RNA, 19 nt, Artificial Sequence
  Description of Artificial Sequence: Synthetic oligonucleotide
  Sense strand starting at position 1262 of SEQ ID NO: 1888348
ucuuccugugaagauguaa

SEQ ID NO: 2529237 - RNA, 19 nt, Artificial Sequence
  Description of Artificial Sequence: Synthetic oligonucleotide
  Antisense strand to SEQ ID NO: 2529236
uuacaucuucacaggaaga

SEQ ID NO: 2529238 - RNA, 19 nt, Artificial Sequence
  Description of Artificial Sequence: Synthetic oligonucleotide
  Sense strand starting at position 1367 of SEQ ID NO: 1888348
gaaccagauuuagggacaa

SEQ ID NO: 2529239 - RNA, 19 nt, Artificial Sequence
  Description of Artificial Sequence: Synthetic oligonucleotide
  Antisense strand to SEQ ID NO: 2529238
uugucccuaaaucugguuc

SEQ ID NO: 2529240 - RNA, 19 nt, Artificial Sequence
  Description of Artificial Sequence: Synthetic oligonucleotide
  Sense strand starting at position 41 of SEQ ID NO: 1888348
gacuuuggaugauugugau

SEQ ID NO: 2529241 - RNA, 19 nt, Artificial Sequence
  Description of Artificial Sequence: Synthetic oligonucleotide
  Antisense strand to SEQ ID NO: 2529240
aucacaaucauccaaaguc

SEQ ID NO: 2529242 - RNA, 19 nt, Artificial Sequence
  Description of Artificial Sequence: Synthetic oligonucleotide
  Sense strand starting at position 3647 of SEQ ID NO: 1888348
uugaaacuuuagucaauug

SEQ ID NO: 2529243 - RNA, 19 nt, Artificial Sequence
  Description of Artificial Sequence: Synthetic oligonucleotide
  Antisense strand to SEQ ID NO: 2529242
caauugacuaaaguuucaa

SEQ ID NO: 2529244 - RNA, 19 nt, Artificial Sequence
  Description of Artificial Sequence: Synthetic oligonucleotide
  Sense strand starting at position 1287 of SEQ ID NO: 1888348
gagacuauccugggugacu

SEQ ID NO: 2529245 - RNA, 19 nt, Artificial Sequence
  Description of Artificial Sequence: Synthetic oligonucleotide
  Antisense strand to SEQ ID NO: 2529244
agucacccaggauagucuc

SEQ ID NO: 2529246 - RNA, 19 nt, Artificial Sequence
  Description of Artificial Sequence: Synthetic oligonucleotide
  Sense strand starting at position 865 of SEQ ID NO: 1888348
ggcuuauauguauaacuau

SEQ ID NO: 2529247 - RNA, 19 nt, Artificial Sequence
  Description of Artificial Sequence: Synthetic oligonucleotide
  Antisense strand to SEQ ID NO: 2529246
auaguuauacauauaagcc

SEQ ID NO: 2529248 - RNA, 19 nt, Artificial Sequence
  Description of Artificial Sequence: Synthetic oligonucleotide
  Sense strand starting at position 2397 of SEQ ID NO: 1888348
gcauauguacccuaugaau

SEQ ID NO: 2529249 - RNA, 19 nt, Artificial Sequence
  Description of Artificial Sequence: Synthetic oligonucleotide
  Antisense strand to SEQ ID NO: 2529248
auucauaggguacauaugc

SEQ ID NO: 2529250 - RNA, 19 nt, Artificial Sequence
  Description of Artificial Sequence: Synthetic oligonucleotide
  Sense strand starting at position 3818 of SEQ ID NO: 1888348
acuuuauuugcuggcuauu

SEQ ID NO: 2529251 - RNA, 19 nt, Artificial Sequence
  Description of Artificial Sequence: Synthetic oligonucleotide
  Antisense strand to SEQ ID NO: 2529250
aauagccagcaaauaaagu

SEQ ID NO: 2529252 - RNA, 19 nt, Artificial Sequence
  Description of Artificial Sequence: Synthetic oligonucleotide
  Sense strand starting at position 2045 of SEQ ID NO: 1888348
agcuguuucgcucauuuaa

SEQ ID NO: 2529253 - RNA, 19 nt, Artificial Sequence
  Description of Artificial Sequence: Synthetic oligonucleotide
  Antisense strand to SEQ ID NO: 2529252
uuaaaugagcgaaacagcu

SEQ ID NO: 2529254 - RNA, 19 nt, Artificial Sequence
  Description of Artificial Sequence: Synthetic oligonucleotide
  Sense strand starting at position 1288 of SEQ ID NO: 1888348
agacuauccugggugacuu

SEQ ID NO: 2529255 - RNA, 19 nt, Artificial Sequence
  Description of Artificial Sequence: Synthetic oligonucleotide
  Antisense strand to SEQ ID NO: 2529254
aagucacccaggauagucu

SEQ ID NO: 2529256 - RNA, 19 nt, Artificial Sequence
  Description of Artificial Sequence: Synthetic oligonucleotide
  Sense strand starting at position 1401 of SEQ ID NO: 1888348
agccauugcauagaaguga

SEQ ID NO: 2529257 - RNA, 19 nt, Artificial Sequence
  Description of Artificial Sequence: Synthetic oligonucleotide
  Antisense strand to SEQ ID NO: 2529256
ucacuucuaugcaauggcu

SEQ ID NO: 2529258 - RNA, 19 nt, Artificial Sequence
  Description of Artificial Sequence: Synthetic oligonucleotide
  Sense strand starting at position 3902 of SEQ ID NO: 1888348
ugaagcucagaguauaguu

SEQ ID NO: 2529259 - RNA, 19 nt, Artificial Sequence
  Description of Artificial Sequence: Synthetic oligonucleotide
  Antisense strand to SEQ ID NO: 2529258
aacuauacucugagcuuca

SEQ ID NO: 2529260 - RNA, 19 nt, Artificial Sequence
  Description of Artificial Sequence: Synthetic oligonucleotide
  Sense strand starting at position 1289 of SEQ ID NO: 1888348
gacuauccugggugacuua

SEQ ID NO: 2529261 - RNA, 19 nt, Artificial Sequence
  Description of Artificial Sequence: Synthetic oligonucleotide
  Antisense strand to SEQ ID NO: 2529260
uaagucacccaggauaguc

SEQ ID NO: 2529262 - RNA, 19 nt, Artificial Sequence
  Description of Artificial Sequence: Synthetic oligonucleotide
  Sense strand starting at position 3352 of SEQ ID NO: 1888348
ggucuuuaaggaugaccuu

SEQ ID NO: 2529263 - RNA, 19 nt, Artificial Sequence
  Description of Artificial Sequence: Synthetic oligonucleotide
  Antisense strand to SEQ ID NO: 2529262
aaggucauccuuaaagacc

SEQ ID NO: 2529264 - RNA, 19 nt, Artificial Sequence
  Description of Artificial Sequence: Synthetic oligonucleotide
  Sense strand starting at position 2340 of SEQ ID NO: 1888348
auggguucucuagaagccu

SEQ ID NO: 2529265 - RNA, 19 nt, Artificial Sequence
  Description of Artificial Sequence: Synthetic oligonucleotide
  Antisense strand to SEQ ID NO: 2529264
aggcuucuagagaacccau

SEQ ID NO: 2529266 - RNA, 19 nt, Artificial Sequence
  Description of Artificial Sequence: Synthetic oligonucleotide
  Sense strand starting at position 112 of SEQ ID NO: 1888348
guugauaaugcaggagacu

SEQ ID NO: 2529267 - RNA, 19 nt, Artificial Sequence
  Description of Artificial Sequence: Synthetic oligonucleotide
  Antisense strand to SEQ ID NO: 2529266
agucuccugcauuaucaac

SEQ ID NO: 2529268 - RNA, 19 nt, Artificial Sequence
  Description of Artificial Sequence: Synthetic oligonucleotide
  Sense strand starting at position 3346 of SEQ ID NO: 1888348
acacguggucuuuaaggau

SEQ ID NO: 2529269 - RNA, 19 nt, Artificial Sequence
  Description of Artificial Sequence: Synthetic oligonucleotide
  Antisense strand to SEQ ID NO: 2529268
auccuuaaagaccacgugu

SEQ ID NO: 2529270 - RNA, 19 nt, Artificial Sequence
  Description of Artificial Sequence: Synthetic oligonucleotide
  Sense strand starting at position 2850 of SEQ ID NO: 1888348
cagaauuugucagaggauc

SEQ ID NO: 2529271 - RNA, 19 nt, Artificial Sequence
  Description of Artificial Sequence: Synthetic oligonucleotide
  Antisense strand to SEQ ID NO: 2529270
gauccucugacaaauucug

SEQ ID NO: 2529272 - RNA, 19 nt, Artificial Sequence
  Description of Artificial Sequence: Synthetic oligonucleotide
  Sense strand starting at position 2355 of SEQ ID NO: 1888348
gccuaaacccagcauuaug

SEQ ID NO: 2529273 - RNA, 19 nt, Artificial Sequence
  Description of Artificial Sequence: Synthetic oligonucleotide
  Antisense strand to SEQ ID NO: 2529272
cauaaugcuggguuuaggc

SEQ ID NO: 2529274 - RNA, 19 nt, Artificial Sequence
  Description of Artificial Sequence: Synthetic oligonucleotide
  Sense strand starting at position 2760 of SEQ ID NO: 1888348
acucccugugucuacaaua

SEQ ID NO: 2529275 - RNA, 19 nt, Artificial Sequence
  Description of Artificial Sequence: Synthetic oligonucleotide
  Antisense strand to SEQ ID NO: 2529274
uauuguagacacagggagu

SEQ ID NO: 2529276 - RNA, 19 nt, Artificial Sequence
  Description of Artificial Sequence: Synthetic oligonucleotide
  Sense strand starting at position 2336 of SEQ ID NO: 1888348
ggugauggguucucuagaa

SEQ ID NO: 2529277 - RNA, 19 nt, Artificial Sequence
  Description of Artificial Sequence: Synthetic oligonucleotide
  Antisense strand to SEQ ID NO: 2529276
uucuagagaacccaucacc

SEQ ID NO: 2529278 - RNA, 19 nt, Artificial Sequence
  Description of Artificial Sequence: Synthetic oligonucleotide
  Sense strand starting at position 1399 of SEQ ID NO: 1888348
caagccauugcauagaagu

SEQ ID NO: 2529279 - RNA, 19 nt, Artificial Sequence
  Description of Artificial Sequence: Synthetic oligonucleotide
  Antisense strand to SEQ ID NO: 2529278
acuucuaugcaauggcuug

SEQ ID NO: 2529280 - RNA, 19 nt, Artificial Sequence
  Description of Artificial Sequence: Synthetic oligonucleotide
  Sense strand starting at position 2837 of SEQ ID NO: 1888348
uuggaacuguuagcagaau

SEQ ID NO: 2529281 - RNA, 19 nt, Artificial Sequence
  Description of Artificial Sequence: Synthetic oligonucleotide
  Antisense strand to SEQ ID NO: 2529280
auucugcuaacaguuccaa

SEQ ID NO: 2529282 - RNA, 19 nt, Artificial Sequence
  Description of Artificial Sequence: Synthetic oligonucleotide
  Sense strand starting at position 53 of SEQ ID NO: 1888348
uugugauguguugauauag

SEQ ID NO: 2529283 - RNA, 19 nt, Artificial Sequence
  Description of Artificial Sequence: Synthetic oligonucleotide
  Antisense strand to SEQ ID NO: 2529282
cuauaucaacacaucacaa

SEQ ID NO: 2529284 - RNA, 19 nt, Artificial Sequence
  Description of Artificial Sequence: Synthetic oligonucleotide
  Sense strand starting at position 692 of SEQ ID NO: 1888348
acaguuugauacuuaucuu

SEQ ID NO: 2529285 - RNA, 19 nt, Artificial Sequence
  Description of Artificial Sequence: Synthetic oligonucleotide
  Antisense strand to SEQ ID NO: 2529284
aagauaaguaucaaacugu

SEQ ID NO: 2529286 - RNA, 19 nt, Artificial Sequence
  Description of Artificial Sequence: Synthetic oligonucleotide
  Sense strand starting at position 3925 of SEQ ID NO: 1888348
ugaaguaggugaguauauu

SEQ ID NO: 2529287 - RNA, 19 nt, Artificial Sequence
  Description of Artificial Sequence: Synthetic oligonucleotide
  Antisense strand to SEQ ID NO: 2529286
aauauacucaccuacuuca

SEQ ID NO: 2529288 - RNA, 19 nt, Artificial Sequence
  Description of Artificial Sequence: Synthetic oligonucleotide
  Sense strand starting at position 3461 of SEQ ID NO: 1888348
gugacucagaugcauuagu

SEQ ID NO: 2529289 - RNA, 19 nt, Artificial Sequence
  Description of Artificial Sequence: Synthetic oligonucleotide
  Antisense strand to SEQ ID NO: 2529288
acuaaugcaucugagucac

SEQ ID NO: 2529290 - RNA, 19 nt, Artificial Sequence
  Description of Artificial Sequence: Synthetic oligonucleotide
  Sense strand starting at position 3288 of SEQ ID NO: 1888348
ggacaugaguuccuuguga

SEQ ID NO: 2529291 - RNA, 19 nt, Artificial Sequence
  Description of Artificial Sequence: Synthetic oligonucleotide
  Antisense strand to SEQ ID NO: 2529290
ucacaaggaacucaugucc

SEQ ID NO: 2529292 - RNA, 19 nt, Artificial Sequence
  Description of Artificial Sequence: Synthetic oligonucleotide
  Sense strand starting at position 2047 of SEQ ID NO: 1888348
cuguuucgcucauuuaauc

SEQ ID NO: 2529293 - RNA, 19 nt, Artificial Sequence
  Description of Artificial Sequence: Synthetic oligonucleotide
  Antisense strand to SEQ ID NO: 2529292
gauuaaaugagcgaaacag

SEQ ID NO: 2529294 - RNA, 19 nt, Artificial Sequence
  Description of Artificial Sequence: Synthetic oligonucleotide
  Sense strand starting at position 3372 of SEQ ID NO: 1888348
cuaagauguucuguuaaac

SEQ ID NO: 2529295 - RNA, 19 nt, Artificial Sequence
  Description of Artificial Sequence: Synthetic oligonucleotide
  Antisense strand to SEQ ID NO: 2529294
guuuaacagaacaucuuag

SEQ ID NO: 2529296 - RNA, 19 nt, Artificial Sequence
  Description of Artificial Sequence: Synthetic oligonucleotide
  Sense strand starting at position 3730 of SEQ ID NO: 1888349
ggcuuucucagggacagau

SEQ ID NO: 2529297 - RNA, 19 nt, Artificial Sequence
  Description of Artificial Sequence: Synthetic oligonucleotide
  Antisense strand to SEQ ID NO: 2529296
aucugucccugagaaagcc

SEQ ID NO: 2529298 - RNA, 19 nt, Artificial Sequence
  Description of Artificial Sequence: Synthetic oligonucleotide
  Sense strand starting at position 3849 of SEQ ID NO: 1888349
guuguaauucuagaaauca

SEQ ID NO: 2529299 - RNA, 19 nt, Artificial Sequence
  Description of Artificial Sequence: Synthetic oligonucleotide
  Antisense strand to SEQ ID NO: 2529298
ugauuucuagaauuacaac

SEQ ID NO: 2529300 - RNA, 19 nt, Artificial Sequence
  Description of Artificial Sequence: Synthetic oligonucleotide
  Sense strand starting at position 3937 of SEQ ID NO: 1888349
acaaauucugucgaaucua

SEQ ID NO: 2529301 - RNA, 19 nt, Artificial Sequence
  Description of Artificial Sequence: Synthetic oligonucleotide
  Antisense strand to SEQ ID NO: 2529300
uagauucgacagaauuugu

SEQ ID NO: 2529302 - RNA, 19 nt, Artificial Sequence
  Description of Artificial Sequence: Synthetic oligonucleotide
  Sense strand starting at position 2717 of SEQ ID NO: 1888349
gugugaguggcugucuagu

SEQ ID NO: 2529303 - RNA, 19 nt, Artificial Sequence
  Description of Artificial Sequence: Synthetic oligonucleotide
  Antisense strand to SEQ ID NO: 2529302
acuagacagccacucacac

SEQ ID NO: 2529304 - RNA, 19 nt, Artificial Sequence
  Description of Artificial Sequence: Synthetic oligonucleotide
  Sense strand starting at position 2312 of SEQ ID NO: 1888349
caggaauggcuugagccau

SEQ ID NO: 2529305 - RNA, 19 nt, Artificial Sequence
  Description of Artificial Sequence: Synthetic oligonucleotide
  Antisense strand to SEQ ID NO: 2529304
auggcucaagccauuccug

SEQ ID NO: 2529306 - RNA, 19 nt, Artificial Sequence
  Description of Artificial Sequence: Synthetic oligonucleotide
  Sense strand starting at position 2465 of SEQ ID NO: 1888349
gaguaagaguuuccugagg

SEQ ID NO: 2529307 - RNA, 19 nt, Artificial Sequence
  Description of Artificial Sequence: Synthetic oligonucleotide
  Antisense strand to SEQ ID NO: 2529306
ccucaggaaacucuuacuc

SEQ ID NO: 2529308 - RNA, 19 nt, Artificial Sequence
  Description of Artificial Sequence: Synthetic oligonucleotide
  Sense strand starting at position 3114 of SEQ ID NO: 1888349
ggauuccuuguaugagaug

SEQ ID NO: 2529309 - RNA, 19 nt, Artificial Sequence
  Description of Artificial Sequence: Synthetic oligonucleotide
  Antisense strand to SEQ ID NO: 2529308
caucucauacaaggaaucc

SEQ ID NO: 2529310 - RNA, 19 nt, Artificial Sequence
  Description of Artificial Sequence: Synthetic oligonucleotide
  Sense strand starting at position 3729 of SEQ ID NO: 1888349
gggcuuucucagggacaga

SEQ ID NO: 2529311 - RNA, 19 nt, Artificial Sequence
  Description of Artificial Sequence: Synthetic oligonucleotide
  Antisense strand to SEQ ID NO: 2529310
ucugucccugagaaagccc

SEQ ID NO: 2529312 - RNA, 19 nt, Artificial Sequence
  Description of Artificial Sequence: Synthetic oligonucleotide
  Sense strand starting at position 2620 of SEQ ID NO: 1888349
ugugucuaagcauacaaga

SEQ ID NO: 2529313 - RNA, 19 nt, Artificial Sequence
  Description of Artificial Sequence: Synthetic oligonucleotide
  Antisense strand to SEQ ID NO: 2529312
ucuuguaugcuuagacaca

SEQ ID NO: 2529314 - RNA, 19 nt, Artificial Sequence
  Description of Artificial Sequence: Synthetic oligonucleotide
  Sense strand starting at position 2494 of SEQ ID NO: 1888349
ggaagaagcccuuaugcuc

SEQ ID NO: 2529315 - RNA, 19 nt, Artificial Sequence
  Description of Artificial Sequence: Synthetic oligonucleotide
  Antisense strand to SEQ ID NO: 2529314
gagcauaagggcuucuucc

SEQ ID NO: 2529316 - RNA, 19 nt, Artificial Sequence
  Description of Artificial Sequence: Synthetic oligonucleotide
  Sense strand starting at position 778 of SEQ ID NO: 1888349
ggagguguccauggacaug

SEQ ID NO: 2529317 - RNA, 19 nt, Artificial Sequence
  Description of Artificial Sequence: Synthetic oligonucleotide
  Antisense strand to SEQ ID NO: 2529316
cauguccauggacaccucc

SEQ ID NO: 2529318 - RNA, 19 nt, Artificial Sequence
  Description of Artificial Sequence: Synthetic oligonucleotide
  Sense strand starting at position 586 of SEQ ID NO: 1888349
ggguuugucaggcagagau

SEQ ID NO: 2529319 - RNA, 19 nt, Artificial Sequence
  Description of Artificial Sequence: Synthetic oligonucleotide
  Antisense strand to SEQ ID NO: 2529318
aucucugccugacaaaccc

SEQ ID NO: 2529320 - RNA, 19 nt, Artificial Sequence
  Description of Artificial Sequence: Synthetic oligonucleotide
  Sense strand starting at position 1672 of SEQ ID NO: 1888349
ugggcucucacagaauguu

SEQ ID NO: 2529321 - RNA, 19 nt, Artificial Sequence
  Description of Artificial Sequence: Synthetic oligonucleotide
  Antisense strand to SEQ ID NO: 2529320
aacauucugugagagccca

SEQ ID NO: 2529322 - RNA, 19 nt, Artificial Sequence
  Description of Artificial Sequence: Synthetic oligonucleotide
  Sense strand starting at position 3934 of SEQ ID NO: 1888349
uggacaaauucugucgaau

SEQ ID NO: 2529323 - RNA, 19 nt, Artificial Sequence
  Description of Artificial Sequence: Synthetic oligonucleotide
  Antisense strand to SEQ ID NO: 2529322
auucgacagaauuugucca

SEQ ID NO: 2529324 - RNA, 19 nt, Artificial Sequence
  Description of Artificial Sequence: Synthetic oligonucleotide
  Sense strand starting at position 181 of SEQ ID NO: 1888349
cccauaaagccucgaagga

SEQ ID NO: 2529325 - RNA, 19 nt, Artificial Sequence
  Description of Artificial Sequence: Synthetic oligonucleotide
  Antisense strand to SEQ ID NO: 2529324
uccuucgaggcuuuauggg

SEQ ID NO: 2529326 - RNA, 19 nt, Artificial Sequence
  Description of Artificial Sequence: Synthetic oligonucleotide
  Sense strand starting at position 1248 of SEQ ID NO: 1888349
ucagguuauccagguggga

SEQ ID NO: 2529327 - RNA, 19 nt, Artificial Sequence
  Description of Artificial Sequence: Synthetic oligonucleotide
  Antisense strand to SEQ ID NO: 2529326
ucccaccuggauaaccuga

SEQ ID NO: 2529328 - RNA, 19 nt, Artificial Sequence
  Description of Artificial Sequence: Synthetic oligonucleotide
  Sense strand starting at position 588 of SEQ ID NO: 1888349
guuugucaggcagagauug

SEQ ID NO: 2529329 - RNA, 19 nt, Artificial Sequence
  Description of Artificial Sequence: Synthetic oligonucleotide
  Antisense strand to SEQ ID NO: 2529328
caaucucugccugacaaac

SEQ ID NO: 2529330 - RNA, 19 nt, Artificial Sequence
  Description of Artificial Sequence: Synthetic oligonucleotide
  Sense strand starting at position 3344 of SEQ ID NO: 1888349
gugggacuucaugaugugu

SEQ ID NO: 2529331 - RNA, 19 nt, Artificial Sequence
  Description of Artificial Sequence: Synthetic oligonucleotide
  Antisense strand to SEQ ID NO: 2529330
acacaucaugaagucccac

SEQ ID NO: 2529332 - RNA, 19 nt, Artificial Sequence
  Description of Artificial Sequence: Synthetic oligonucleotide
  Sense strand starting at position 2775 of SEQ ID NO: 1888349
uggucugcuagugaugaau

SEQ ID NO: 2529333 - RNA, 19 nt, Artificial Sequence
  Description of Artificial Sequence: Synthetic oligonucleotide
  Antisense strand to SEQ ID NO: 2529332
auucaucacuagcagacca

SEQ ID NO: 2529334 - RNA, 19 nt, Artificial Sequence
  Description of Artificial Sequence: Synthetic oligonucleotide
  Sense strand starting at position 3126 of SEQ ID NO: 1888349
ugagaugagucccuucucu

SEQ ID NO: 2529335 - RNA, 19 nt, Artificial Sequence
  Description of Artificial Sequence: Synthetic oligonucleotide
  Antisense strand to SEQ ID NO: 2529334
agagaagggacucaucuca

SEQ ID NO: 2529336 - RNA, 19 nt, Artificial Sequence
  Description of Artificial Sequence: Synthetic oligonucleotide
  Sense strand starting at position 3085 of SEQ ID NO: 1888349
ucuaauaagucaucuguua

SEQ ID NO: 2529337 - RNA, 19 nt, Artificial Sequence
  Description of Artificial Sequence: Synthetic oligonucleotide
  Antisense strand to SEQ ID NO: 2529336
uaacagaugacuuauuaga

SEQ ID NO: 2529338 - RNA, 19 nt, Artificial Sequence
  Description of Artificial Sequence: Synthetic oligonucleotide
  Sense strand starting at position 2311 of SEQ ID NO: 1888349
ucaggaauggcuugagcca

SEQ ID NO: 2529339 - RNA, 19 nt, Artificial Sequence
  Description of Artificial Sequence: Synthetic oligonucleotide
  Antisense strand to SEQ ID NO: 2529338
uggcucaagccauuccuga

SEQ ID NO: 2529340 - RNA, 19 nt, Artificial Sequence
  Description of Artificial Sequence: Synthetic oligonucleotide
  Sense strand starting at position 2300 of SEQ ID NO: 1888349
gcgugacucccucaggaau

SEQ ID NO: 2529341 - RNA, 19 nt, Artificial Sequence
  Description of Artificial Sequence: Synthetic oligonucleotide
  Antisense strand to SEQ ID NO: 2529340
auuccugagggagucacgc

SEQ ID NO: 2529342 - RNA, 19 nt, Artificial Sequence
  Description of Artificial Sequence: Synthetic oligonucleotide
  Sense strand starting at position 3617 of SEQ ID NO: 1888349
gugauacacuguucucaua

SEQ ID NO: 2529343 - RNA, 19 nt, Artificial Sequence
  Description of Artificial Sequence: Synthetic oligonucleotide
  Antisense strand to SEQ ID NO: 2529342
uaugagaacaguguaucac

SEQ ID NO: 2529344 - RNA, 19 nt, Artificial Sequence
  Description of Artificial Sequence: Synthetic oligonucleotide
  Sense strand starting at position 2371 of SEQ ID NO: 1888349
agaucugguguuuaaacgu

SEQ ID NO: 2529345 - RNA, 19 nt, Artificial Sequence
  Description of Artificial Sequence: Synthetic oligonucleotide
  Antisense strand to SEQ ID NO: 2529344
acguuuaaacaccagaucu

SEQ ID NO: 2529346 - RNA, 19 nt, Artificial Sequence
  Description of Artificial Sequence: Synthetic oligonucleotide
  Sense strand starting at position 1709 of SEQ ID NO: 1888349
ucacauaccucggaauuua

SEQ ID NO: 2529347 - RNA, 19 nt, Artificial Sequence
  Description of Artificial Sequence: Synthetic oligonucleotide
  Antisense strand to SEQ ID NO: 2529346
uaaauuccgagguauguga

SEQ ID NO: 2529348 - RNA, 19 nt, Artificial Sequence
  Description of Artificial Sequence: Synthetic oligonucleotide
  Sense strand starting at position 2182 of SEQ ID NO: 1888349
cuagacuucccggguuaua

SEQ ID NO: 2529349 - RNA, 19 nt, Artificial Sequence
  Description of Artificial Sequence: Synthetic oligonucleotide
  Antisense strand to SEQ ID NO: 2529348
uauaacccgggaagucuag

SEQ ID NO: 2529350 - RNA, 19 nt, Artificial Sequence
  Description of Artificial Sequence: Synthetic oligonucleotide
  Sense strand starting at position 2111 of SEQ ID NO: 1888349
cgcggugaucaacauugau

SEQ ID NO: 2529351 - RNA, 19 nt, Artificial Sequence
  Description of Artificial Sequence: Synthetic oligonucleotide
  Antisense strand to SEQ ID NO: 2529350
aucaauguugaucaccgcg

SEQ ID NO: 2529352 - RNA, 19 nt, Artificial Sequence
  Description of Artificial Sequence: Synthetic oligonucleotide
  Sense strand starting at position 2680 of SEQ ID NO: 1888349
ugguuaccuuuacuaaugu

SEQ ID NO: 2529353 - RNA, 19 nt, Artificial Sequence
  Description of Artificial Sequence: Synthetic oligonucleotide
  Antisense strand to SEQ ID NO: 2529352
acauuaguaaagguaacca

SEQ ID NO: 2529354 - RNA, 19 nt, Artificial Sequence
  Description of Artificial Sequence: Synthetic oligonucleotide
  Sense strand starting at position 2610 of SEQ ID NO: 1888349
augguaacucugugucuaa

SEQ ID NO: 2529355 - RNA, 19 nt, Artificial Sequence
  Description of Artificial Sequence: Synthetic oligonucleotide
  Antisense strand to SEQ ID NO: 2529354
uuagacacagaguuaccau

SEQ ID NO: 2529356 - RNA, 19 nt, Artificial Sequence
  Description of Artificial Sequence: Synthetic oligonucleotide
  Sense strand starting at position 2611 of SEQ ID NO: 1888349
ugguaacucugugucuaag

SEQ ID NO: 2529357 - RNA, 19 nt, Artificial Sequence
  Description of Artificial Sequence: Synthetic oligonucleotide
  Antisense strand to SEQ ID NO: 2529356
cuuagacacagaguuacca

SEQ ID NO: 2529358 - RNA, 19 nt, Artificial Sequence
  Description of Artificial Sequence: Synthetic oligonucleotide
  Sense strand starting at position 2104 of SEQ ID NO: 1888349
ugaauaacgcggugaucaa

SEQ ID NO: 2529359 - RNA, 19 nt, Artificial Sequence
  Description of Artificial Sequence: Synthetic oligonucleotide
  Antisense strand to SEQ ID NO: 2529358
uugaucaccgcguuauuca

SEQ ID NO: 2529360 - RNA, 19 nt, Artificial Sequence
  Description of Artificial Sequence: Synthetic oligonucleotide
  Sense strand starting at position 2181 of SEQ ID NO: 1888349
ccuagacuucccggguuau

SEQ ID NO: 2529361 - RNA, 19 nt, Artificial Sequence
  Description of Artificial Sequence: Synthetic oligonucleotide
  Antisense strand to SEQ ID NO: 2529360
auaacccgggaagucuagg

SEQ ID NO: 2529362 - RNA, 19 nt, Artificial Sequence
  Description of Artificial Sequence: Synthetic oligonucleotide
  Sense strand starting at position 3211 of SEQ ID NO: 1888349
gggucucucugaguuuauu

SEQ ID NO: 2529363 - RNA, 19 nt, Artificial Sequence
  Description of Artificial Sequence: Synthetic oligonucleotide
  Antisense strand to SEQ ID NO: 2529362
aauaaacucagagagaccc

SEQ ID NO: 2529364 - RNA, 19 nt, Artificial Sequence
  Description of Artificial Sequence: Synthetic oligonucleotide
  Sense strand starting at position 3093 of SEQ ID NO: 1888349
gucaucuguuaaucuuauu

SEQ ID NO: 2529365 - RNA, 19 nt, Artificial Sequence
  Description of Artificial Sequence: Synthetic oligonucleotide
  Antisense strand to SEQ ID NO: 2529364
aauaagauuaacagaugac

SEQ ID NO: 2529366 - RNA, 19 nt, Artificial Sequence
  Description of Artificial Sequence: Synthetic oligonucleotide
  Sense strand starting at position 1017 of SEQ ID NO: 1888349
cugccagaauccucuugua

SEQ ID NO: 2529367 - RNA, 19 nt, Artificial Sequence
  Description of Artificial Sequence: Synthetic oligonucleotide
  Antisense strand to SEQ ID NO: 2529366
uacaagaggauucuggcag

SEQ ID NO: 2529368 - RNA, 19 nt, Artificial Sequence
  Description of Artificial Sequence: Synthetic oligonucleotide
  Sense strand starting at position 2101 of SEQ ID NO: 1888349
ugaugaauaacgcggugau

SEQ ID NO: 2529369 - RNA, 19 nt, Artificial Sequence
  Description of Artificial Sequence: Synthetic oligonucleotide
  Antisense strand to SEQ ID NO: 2529368
aucaccgcguuauucauca

SEQ ID NO: 2529370 - RNA, 19 nt, Artificial Sequence
  Description of Artificial Sequence: Synthetic oligonucleotide
  Sense strand starting at position 2102 of SEQ ID NO: 1888349
gaugaauaacgcggugauc

SEQ ID NO: 2529371 - RNA, 19 nt, Artificial Sequence
  Description of Artificial Sequence: Synthetic oligonucleotide
  Antisense strand to SEQ ID NO: 2529370
gaucaccgcguuauucauc

SEQ ID NO: 2529372 - RNA, 19 nt, Artificial Sequence
  Description of Artificial Sequence: Synthetic oligonucleotide
  Sense strand starting at position 3009 of SEQ ID NO: 1888349
auacaauucucgguuggca

SEQ ID NO: 2529373 - RNA, 19 nt, Artificial Sequence
  Description of Artificial Sequence: Synthetic oligonucleotide
  Antisense strand to SEQ ID NO: 2529372
ugccaaccgagaauuguau

SEQ ID NO: 2529374 - RNA, 19 nt, Artificial Sequence
  Description of Artificial Sequence: Synthetic oligonucleotide
  Sense strand starting at position 2609 of SEQ ID NO: 1888349
uaugguaacucugugucua

SEQ ID NO: 2529375 - RNA, 19 nt, Artificial Sequence
  Description of Artificial Sequence: Synthetic oligonucleotide
  Antisense strand to SEQ ID NO: 2529374
uagacacagaguuaccaua

SEQ ID NO: 2529376 - RNA, 19 nt, Artificial Sequence
  Description of Artificial Sequence: Synthetic oligonucleotide
  Sense strand starting at position 2247 of SEQ ID NO: 1888350
ggauguuccaaauggaacu

SEQ ID NO: 2529377 - RNA, 19 nt, Artificial Sequence
  Description of Artificial Sequence: Synthetic oligonucleotide
  Antisense strand to SEQ ID NO: 2529376
aguuccauuuggaacaucc

SEQ ID NO: 2529378 - RNA, 19 nt, Artificial Sequence
  Description of Artificial Sequence: Synthetic oligonucleotide
  Sense strand starting at position 2539 of SEQ ID NO: 1888350
gaggaacgaugaucugcaa

SEQ ID NO: 2529379 - RNA, 19 nt, Artificial Sequence
  Description of Artificial Sequence: Synthetic oligonucleotide
  Antisense strand to SEQ ID NO: 2529378
uugcagaucaucguuccuc

SEQ ID NO: 2529380 - RNA, 19 nt, Artificial Sequence
  Description of Artificial Sequence: Synthetic oligonucleotide
  Sense strand starting at position 2603 of SEQ ID NO: 1888350
auuugcucuuagggaauuu

SEQ ID NO: 2529381 - RNA, 19 nt, Artificial Sequence
  Description of Artificial Sequence: Synthetic oligonucleotide
  Antisense strand to SEQ ID NO: 2529380
aaauucccuaagagcaaau

SEQ ID NO: 2529382 - RNA, 19 nt, Artificial Sequence
  Description of Artificial Sequence: Synthetic oligonucleotide
  Sense strand starting at position 3400 of SEQ ID NO: 1888350
ucgcguacgacauugugua

SEQ ID NO: 2529383 - RNA, 19 nt, Artificial Sequence
  Description of Artificial Sequence: Synthetic oligonucleotide
  Antisense strand to SEQ ID NO: 2529382
uacacaaugucguacgcga

SEQ ID NO: 2529384 - RNA, 19 nt, Artificial Sequence
  Description of Artificial Sequence: Synthetic oligonucleotide
  Sense strand starting at position 3441 of SEQ ID NO: 1888350
gccugcugcagagaugaaa

SEQ ID NO: 2529385 - RNA, 19 nt, Artificial Sequence
  Description of Artificial Sequence: Synthetic oligonucleotide
  Antisense strand to SEQ ID NO: 2529384
uuucaucucugcagcaggc

SEQ ID NO: 2529386 - RNA, 19 nt, Artificial Sequence
  Description of Artificial Sequence: Synthetic oligonucleotide
  Sense strand starting at position 2771 of SEQ ID NO: 1888350
ugguguuuccaggagccaa

SEQ ID NO: 2529387 - RNA, 19 nt, Artificial Sequence
  Description of Artificial Sequence: Synthetic oligonucleotide
  Antisense strand to SEQ ID NO: 2529386
uuggcuccuggaaacacca

SEQ ID NO: 2529388 - RNA, 19 nt, Artificial Sequence
  Description of Artificial Sequence: Synthetic oligonucleotide
  Sense strand starting at position 1132 of SEQ ID NO: 1888350
ggcuauagaugucugauac

SEQ ID NO: 2529389 - RNA, 19 nt, Artificial Sequence
  Description of Artificial Sequence: Synthetic oligonucleotide
  Antisense strand to SEQ ID NO: 2529388
guaucagacaucuauagcc

SEQ ID NO: 2529390 - RNA, 19 nt, Artificial Sequence
  Description of Artificial Sequence: Synthetic oligonucleotide
  Sense strand starting at position 2323 of SEQ ID NO: 1888350
uuauuagguguuuagccaa

SEQ ID NO: 2529391 - RNA, 19 nt, Artificial Sequence
  Description of Artificial Sequence: Synthetic oligonucleotide
  Antisense strand to SEQ ID NO: 2529390
uuggcuaaacaccuaauaa

SEQ ID NO: 2529392 - RNA, 19 nt, Artificial Sequence
  Description of Artificial Sequence: Synthetic oligonucleotide
  Sense strand starting at position 2527 of SEQ ID NO: 1888350
guccgaaugcucgaggaac

SEQ ID NO: 2529393 - RNA, 19 nt, Artificial Sequence
  Description of Artificial Sequence: Synthetic oligonucleotide
  Antisense strand to SEQ ID NO: 2529392
guuccucgagcauucggac

SEQ ID NO: 2529394 - RNA, 19 nt, Artificial Sequence
  Description of Artificial Sequence: Synthetic oligonucleotide
  Sense strand starting at position 1123 of SEQ ID NO: 1888350
uugcuacacggcuauagau

SEQ ID NO: 2529395 - RNA, 19 nt, Artificial Sequence
  Description of Artificial Sequence: Synthetic oligonucleotide
  Antisense strand to SEQ ID NO: 2529394
aucuauagccguguagcaa

SEQ ID NO: 2529396 - RNA, 19 nt, Artificial Sequence
  Description of Artificial Sequence: Synthetic oligonucleotide
  Sense strand starting at position 3404 of SEQ ID NO: 1888350
guacgacauuguguagaaa

SEQ ID NO: 2529397 - RNA, 19 nt, Artificial Sequence
  Description of Artificial Sequence: Synthetic oligonucleotide
  Antisense strand to SEQ ID NO: 2529396
uuucuacacaaugucguac

SEQ ID NO: 2529398 - RNA, 19 nt, Artificial Sequence
  Description of Artificial Sequence: Synthetic oligonucleotide
  Sense strand starting at position 2600 of SEQ ID NO: 1888350
ucaauuugcucuuagggaa

SEQ ID NO: 2529399 - RNA, 19 nt, Artificial Sequence
  Description of Artificial Sequence: Synthetic oligonucleotide
  Antisense strand to SEQ ID NO: 2529398
uucccuaagagcaaauuga

SEQ ID NO: 2529400 - RNA, 19 nt, Artificial Sequence
  Description of Artificial Sequence: Synthetic oligonucleotide
  Sense strand starting at position 2586 of SEQ ID NO: 1888350
gcggaagcugagcaucaau

SEQ ID NO: 2529401 - RNA, 19 nt, Artificial Sequence
  Description of Artificial Sequence: Synthetic oligonucleotide
  Antisense strand to SEQ ID NO: 2529400
auugaugcucagcuuccgc

SEQ ID NO: 2529402 - RNA, 19 nt, Artificial Sequence
  Description of Artificial Sequence: Synthetic oligonucleotide
  Sense strand starting at position 1834 of SEQ ID NO: 1888350
gagccugucaggugacaca

SEQ ID NO: 2529403 - RNA, 19 nt, Artificial Sequence
  Description of Artificial Sequence: Synthetic oligonucleotide
  Antisense strand to SEQ ID NO: 2529402
ugugucaccugacaggcuc

SEQ ID NO: 2529404 - RNA, 19 nt, Artificial Sequence
  Description of Artificial Sequence: Synthetic oligonucleotide
  Sense strand starting at position 1133 of SEQ ID NO: 1888350
gcuauagaugucugauacg

SEQ ID NO: 2529405 - RNA, 19 nt, Artificial Sequence
  Description of Artificial Sequence: Synthetic oligonucleotide
  Antisense strand to SEQ ID NO: 2529404
cguaucagacaucuauagc

SEQ ID NO: 2529406 - RNA, 19 nt, Artificial Sequence
  Description of Artificial Sequence: Synthetic oligonucleotide
  Sense strand starting at position 130 of SEQ ID NO: 1888350
ccuggcaguucuuuccaaa

SEQ ID NO: 2529407 - RNA, 19 nt, Artificial Sequence
  Description of Artificial Sequence: Synthetic oligonucleotide
  Antisense strand to SEQ ID NO: 2529406
uuuggaaagaacugccagg

SEQ ID NO: 2529408 - RNA, 19 nt, Artificial Sequence
  Description of Artificial Sequence: Synthetic oligonucleotide
  Sense strand starting at position 2529 of SEQ ID NO: 1888350
ccgaaugcucgaggaacga

SEQ ID NO: 2529409 - RNA, 19 nt, Artificial Sequence
  Description of Artificial Sequence: Synthetic oligonucleotide
  Antisense strand to SEQ ID NO: 2529408
ucguuccucgagcauucgg

SEQ ID NO: 2529410 - RNA, 19 nt, Artificial Sequence
  Description of Artificial Sequence: Synthetic oligonucleotide
  Sense strand starting at position 2326 of SEQ ID NO: 1888350
uuagguguuuagccaauau

SEQ ID NO: 2529411 - RNA, 19 nt, Artificial Sequence
  Description of Artificial Sequence: Synthetic oligonucleotide
  Antisense strand to SEQ ID NO: 2529410
auauuggcuaaacaccuaa

SEQ ID NO: 2529412 - RNA, 19 nt, Artificial Sequence
  Description of Artificial Sequence: Synthetic oligonucleotide
  Sense strand starting at position 2491 of SEQ ID NO: 1888350
gagcuuucuuguucuugaa

SEQ ID NO: 2529413 - RNA, 19 nt, Artificial Sequence
  Description of Artificial Sequence: Synthetic oligonucleotide
  Antisense strand to SEQ ID NO: 2529412
uucaagaacaagaaagcuc

SEQ ID NO: 2529414 - RNA, 19 nt, Artificial Sequence
  Description of Artificial Sequence: Synthetic oligonucleotide
  Sense strand starting at position 2490 of SEQ ID NO: 1888350
agagcuuucuuguucuuga

SEQ ID NO: 2529415 - RNA, 19 nt, Artificial Sequence
  Description of Artificial Sequence: Synthetic oligonucleotide
  Antisense strand to SEQ ID NO: 2529414
ucaagaacaagaaagcucu

SEQ ID NO: 2529416 - RNA, 19 nt, Artificial Sequence
  Description of Artificial Sequence: Synthetic oligonucleotide
  Sense strand starting at position 2232 of SEQ ID NO: 1888350
ugcagcuguguucauggau

SEQ ID NO: 2529417 - RNA, 19 nt, Artificial Sequence
  Description of Artificial Sequence: Synthetic oligonucleotide
  Antisense strand to SEQ ID NO: 2529416
auccaugaacacagcugca

SEQ ID NO: 2529418 - RNA, 19 nt, Artificial Sequence
  Description of Artificial Sequence: Synthetic oligonucleotide
  Sense strand starting at position 2300 of SEQ ID NO: 1888350
agauuacauuucuguuuag

SEQ ID NO: 2529419 - RNA, 19 nt, Artificial Sequence
  Description of Artificial Sequence: Synthetic oligonucleotide
  Antisense strand to SEQ ID NO: 2529418
cuaaacagaaauguaaucu

SEQ ID NO: 2529420 - RNA, 19 nt, Artificial Sequence
  Description of Artificial Sequence: Synthetic oligonucleotide
  Sense strand starting at position 398 of SEQ ID NO: 1888350
gagucauguucccugggcu

SEQ ID NO: 2529421 - RNA, 19 nt, Artificial Sequence
  Description of Artificial Sequence: Synthetic oligonucleotide
  Antisense strand to SEQ ID NO: 2529420
agcccagggaacaugacuc

SEQ ID NO: 2529422 - RNA, 19 nt, Artificial Sequence
  Description of Artificial Sequence: Synthetic oligonucleotide
  Sense strand starting at position 2493 of SEQ ID NO: 1888350
gcuuucuuguucuugaacu

SEQ ID NO: 2529423 - RNA, 19 nt, Artificial Sequence
  Description of Artificial Sequence: Synthetic oligonucleotide
  Antisense strand to SEQ ID NO: 2529422
aguucaagaacaagaaagc

SEQ ID NO: 2529424 - RNA, 19 nt, Artificial Sequence
  Description of Artificial Sequence: Synthetic oligonucleotide
  Sense strand starting at position 2235 of SEQ ID NO: 1888350
agcuguguucauggauguu

SEQ ID NO: 2529425 - RNA, 19 nt, Artificial Sequence
  Description of Artificial Sequence: Synthetic oligonucleotide
  Antisense strand to SEQ ID NO: 2529424
aacauccaugaacacagcu

SEQ ID NO: 2529426 - RNA, 19 nt, Artificial Sequence
  Description of Artificial Sequence: Synthetic oligonucleotide
  Sense strand starting at position 3631 of SEQ ID NO: 1888350
ggacccauguugggaaaga

SEQ ID NO: 2529427 - RNA, 19 nt, Artificial Sequence
  Description of Artificial Sequence: Synthetic oligonucleotide
  Antisense strand to SEQ ID NO: 2529426
ucuuucccaacaugggucc

SEQ ID NO: 2529428 - RNA, 19 nt, Artificial Sequence
  Description of Artificial Sequence: Synthetic oligonucleotide
  Sense strand starting at position 2436 of SEQ ID NO: 1888350
cguauaagugcauguguga

SEQ ID NO: 2529429 - RNA, 19 nt, Artificial Sequence
  Description of Artificial Sequence: Synthetic oligonucleotide
  Antisense strand to SEQ ID NO: 2529428
ucacacaugcacuuauacg

SEQ ID NO: 2529430 - RNA, 19 nt, Artificial Sequence
  Description of Artificial Sequence: Synthetic oligonucleotide
  Sense strand starting at position 2277 of SEQ ID NO: 1888350
uuugguuuaugagacuuua

SEQ ID NO: 2529431 - RNA, 19 nt, Artificial Sequence
  Description of Artificial Sequence: Synthetic oligonucleotide
  Antisense strand to SEQ ID NO: 2529430
uaaagucucauaaaccaaa

SEQ ID NO: 2529432 - RNA, 19 nt, Artificial Sequence
  Description of Artificial Sequence: Synthetic oligonucleotide
  Sense strand starting at position 2355 of SEQ ID NO: 1888350
aggacaugaugcugagacu

SEQ ID NO: 2529433 - RNA, 19 nt, Artificial Sequence
  Description of Artificial Sequence: Synthetic oligonucleotide
  Antisense strand to SEQ ID NO: 2529432
agucucagcaucauguccu

SEQ ID NO: 2529434 - RNA, 19 nt, Artificial Sequence
  Description of Artificial Sequence: Synthetic oligonucleotide
  Sense strand starting at position 2469 of SEQ ID NO: 1888350
gugagcgugucugcaugaa

SEQ ID NO: 2529435 - RNA, 19 nt, Artificial Sequence
  Description of Artificial Sequence: Synthetic oligonucleotide
  Antisense strand to SEQ ID NO: 2529434
uucaugcagacacgcucac

SEQ ID NO: 2529436 - RNA, 19 nt, Artificial Sequence
  Description of Artificial Sequence: Synthetic oligonucleotide
  Sense strand starting at position 1669 of SEQ ID NO: 1888350
agguccuguucccagcaua

SEQ ID NO: 2529437 - RNA, 19 nt, Artificial Sequence
  Description of Artificial Sequence: Synthetic oligonucleotide
  Antisense strand to SEQ ID NO: 2529436
uaugcugggaacaggaccu

SEQ ID NO: 2529438 - RNA, 19 nt, Artificial Sequence
  Description of Artificial Sequence: Synthetic oligonucleotide
  Sense strand starting at position 3523 of SEQ ID NO: 1888350
cagugauucuggcaagcuu

SEQ ID NO: 2529439 - RNA, 19 nt, Artificial Sequence
  Description of Artificial Sequence: Synthetic oligonucleotide
  Antisense strand to SEQ ID NO: 2529438
aagcuugccagaaucacug

SEQ ID NO: 2529440 - RNA, 19 nt, Artificial Sequence
  Description of Artificial Sequence: Synthetic oligonucleotide
  Sense strand starting at position 2694 of SEQ ID NO: 1888350
ccugcuucguggugagacu

SEQ ID NO: 2529441 - RNA, 19 nt, Artificial Sequence
  Description of Artificial Sequence: Synthetic oligonucleotide
  Antisense strand to SEQ ID NO: 2529440
agucucaccacgaagcagg

SEQ ID NO: 2529442 - RNA, 19 nt, Artificial Sequence
  Description of Artificial Sequence: Synthetic oligonucleotide
  Sense strand starting at position 2383 of SEQ ID NO: 1888350
uggccaugguugugugagu

SEQ ID NO: 2529443 - RNA, 19 nt, Artificial Sequence
  Description of Artificial Sequence: Synthetic oligonucleotide
  Antisense strand to SEQ ID NO: 2529442
acucacacaaccauggcca

SEQ ID NO: 2529444 - RNA, 19 nt, Artificial Sequence
  Description of Artificial Sequence: Synthetic oligonucleotide
  Sense strand starting at position 2482 of SEQ ID NO: 1888351
auaaguugccaacagauca

SEQ ID NO: 2529445 - RNA, 19 nt, Artificial Sequence
  Description of Artificial Sequence: Synthetic oligonucleotide
  Antisense strand to SEQ ID NO: 2529444
ugaucuguuggcaacuuau

SEQ ID NO: 2529446 - RNA, 19 nt, Artificial Sequence
  Description of Artificial Sequence: Synthetic oligonucleotide
  Sense strand starting at position 3530 of SEQ ID NO: 1888351
agcuuauuaggaugaaaua

SEQ ID NO: 2529447 - RNA, 19 nt, Artificial Sequence
  Description of Artificial Sequence: Synthetic oligonucleotide
  Antisense strand to SEQ ID NO: 2529446
uauuucauccuaauaagcu

SEQ ID NO: 2529448 - RNA, 19 nt, Artificial Sequence
  Description of Artificial Sequence: Synthetic oligonucleotide
  Sense strand starting at position 26 of SEQ ID NO: 1888351
cugguaguuggauaacuga

SEQ ID NO: 2529449 - RNA, 19 nt, Artificial Sequence
  Description of Artificial Sequence: Synthetic oligonucleotide
  Antisense strand to SEQ ID NO: 2529448
ucaguuauccaacuaccag

SEQ ID NO: 2529450 - RNA, 19 nt, Artificial Sequence
  Description of Artificial Sequence: Synthetic oligonucleotide
  Sense strand starting at position 206 of SEQ ID NO: 1888351
cuugaaugugaauaucuuu

SEQ ID NO: 2529451 - RNA, 19 nt, Artificial Sequence
  Description of Artificial Sequence: Synthetic oligonucleotide
  Antisense strand to SEQ ID NO: 2529450
aaagauauucacauucaag

SEQ ID NO: 2529452 - RNA, 19 nt, Artificial Sequence
  Description of Artificial Sequence: Synthetic oligonucleotide
  Sense strand starting at position 2552 of SEQ ID NO: 1888351
agagaagauuugcaaacaa

SEQ ID NO: 2529453 - RNA, 19 nt, Artificial Sequence
  Description of Artificial Sequence: Synthetic oligonucleotide
  Antisense strand to SEQ ID NO: 2529452
uuguuugcaaaucuucucu

SEQ ID NO: 2529454 - RNA, 19 nt, Artificial Sequence
  Description of Artificial Sequence: Synthetic oligonucleotide
  Sense strand starting at position 3462 of SEQ ID NO: 1888351
gaauuuguguuugucauca

SEQ ID NO: 2529455 - RNA, 19 nt, Artificial Sequence
  Description of Artificial Sequence: Synthetic oligonucleotide
  Antisense strand to SEQ ID NO: 2529454
ugaugacaaacacaaauuc

SEQ ID NO: 2529456 - RNA, 19 nt, Artificial Sequence
  Description of Artificial Sequence: Synthetic oligonucleotide
  Sense strand starting at position 764 of SEQ ID NO: 1888351
auuucuggaucuugauuua

SEQ ID NO: 2529457 - RNA, 19 nt, Artificial Sequence
  Description of Artificial Sequence: Synthetic oligonucleotide
  Antisense strand to SEQ ID NO: 2529456
uaaaucaagauccagaaau

SEQ ID NO: 2529458 - RNA, 19 nt, Artificial Sequence
  Description of Artificial Sequence: Synthetic oligonucleotide
  Sense strand starting at position 3629 of SEQ ID NO: 1888351
augagaucauugucaucaa

SEQ ID NO: 2529459 - RNA, 19 nt, Artificial Sequence
  Description of Artificial Sequence: Synthetic oligonucleotide
  Antisense strand to SEQ ID NO: 2529458
uugaugacaaugaucucau

SEQ ID NO: 2529460 - RNA, 19 nt, Artificial Sequence
  Description of Artificial Sequence: Synthetic oligonucleotide
  Sense strand starting at position 3879 of SEQ ID NO: 1888351
gcaaauaaacauugugaaa

SEQ ID NO: 2529461 - RNA, 19 nt, Artificial Sequence
  Description of Artificial Sequence: Synthetic oligonucleotide
  Antisense strand to SEQ ID NO: 2529460
uuucacaauguuuauuugc

SEQ ID NO: 2529462 - RNA, 19 nt, Artificial Sequence
  Description of Artificial Sequence: Synthetic oligonucleotide
  Sense strand starting at position 3461 of SEQ ID NO: 1888351
agaauuuguguuugucauc

SEQ ID NO: 2529463 - RNA, 19 nt, Artificial Sequence
  Description of Artificial Sequence: Synthetic oligonucleotide
  Antisense strand to SEQ ID NO: 2529462
gaugacaaacacaaauucu

SEQ ID NO: 2529464 - RNA, 19 nt, Artificial Sequence
  Description of Artificial Sequence: Synthetic oligonucleotide
  Sense strand starting at position 343 of SEQ ID NO: 1888351
aaauguauaucuguaaagg

SEQ ID NO: 2529465 - RNA, 19 nt, Artificial Sequence
  Description of Artificial Sequence: Synthetic oligonucleotide
  Antisense strand to SEQ ID NO: 2529464
ccuuuacagauauacauuu

SEQ ID NO: 2529466 - RNA, 19 nt, Artificial Sequence
  Description of Artificial Sequence: Synthetic oligonucleotide
  Sense strand starting at position 2487 of SEQ ID NO: 1888351
uugccaacagaucauaagu

SEQ ID NO: 2529467 - RNA, 19 nt, Artificial Sequence
  Description of Artificial Sequence: Synthetic oligonucleotide
  Antisense strand to SEQ ID NO: 2529466
acuuaugaucuguuggcaa

SEQ ID NO: 2529468 - RNA, 19 nt, Artificial Sequence
  Description of Artificial Sequence: Synthetic oligonucleotide
  Sense strand starting at position 883 of SEQ ID NO: 1888351
guuaucugugccuuuguuu

SEQ ID NO: 2529469 - RNA, 19 nt, Artificial Sequence
  Description of Artificial Sequence: Synthetic oligonucleotide
  Antisense strand to SEQ ID NO: 2529468
aaacaaaggcacagauaac

SEQ ID NO: 2529470 - RNA, 19 nt, Artificial Sequence
  Description of Artificial Sequence: Synthetic oligonucleotide
  Sense strand starting at position 3864 of SEQ ID NO: 1888351
agugaucauagaugagcaa

SEQ ID NO: 2529471 - RNA, 19 nt, Artificial Sequence
  Description of Artificial Sequence: Synthetic oligonucleotide
  Antisense strand to SEQ ID NO: 2529470
uugcucaucuaugaucacu

SEQ ID NO: 2529472 - RNA, 19 nt, Artificial Sequence
  Description of Artificial Sequence: Synthetic oligonucleotide
  Sense strand starting at position 902 of SEQ ID NO: 1888351
gccucugauugggcuauuu

SEQ ID NO: 2529473 - RNA, 19 nt, Artificial Sequence
  Description of Artificial Sequence: Synthetic oligonucleotide
  Antisense strand to SEQ ID NO: 2529472
aaauagcccaaucagaggc

SEQ ID NO: 2529474 - RNA, 19 nt, Artificial Sequence
  Description of Artificial Sequence: Synthetic oligonucleotide
  Sense strand starting at position 796 of SEQ ID NO: 1888351
aggugucagaugcaccaaa

SEQ ID NO: 2529475 - RNA, 19 nt, Artificial Sequence
  Description of Artificial Sequence: Synthetic oligonucleotide
  Antisense strand to SEQ ID NO: 2529474
uuuggugcaucugacaccu

SEQ ID NO: 2529476 - RNA, 19 nt, Artificial Sequence
  Description of Artificial Sequence: Synthetic oligonucleotide
  Sense strand starting at position 3029 of SEQ ID NO: 1888351
auauaaguagcugaagguu

SEQ ID NO: 2529477 - RNA, 19 nt, Artificial Sequence
  Description of Artificial Sequence: Synthetic oligonucleotide
  Antisense strand to SEQ ID NO: 2529476
aaccuucagcuacuuauau

SEQ ID NO: 2529478 - RNA, 19 nt, Artificial Sequence
  Description of Artificial Sequence: Synthetic oligonucleotide
  Sense strand starting at position 3483 of SEQ ID NO: 1888351
gugaucaguguggaacauu

SEQ ID NO: 2529479 - RNA, 19 nt, Artificial Sequence
  Description of Artificial Sequence: Synthetic oligonucleotide
  Antisense strand to SEQ ID NO: 2529478
aauguuccacacugaucac

SEQ ID NO: 2529480 - RNA, 19 nt, Artificial Sequence
  Description of Artificial Sequence: Synthetic oligonucleotide
  Sense strand starting at position 3857 of SEQ ID NO: 1888351
cuaguugagugaucauaga

SEQ ID NO: 2529481 - RNA, 19 nt, Artificial Sequence
  Description of Artificial Sequence: Synthetic oligonucleotide
  Antisense strand to SEQ ID NO: 2529480
ucuaugaucacucaacuag

SEQ ID NO: 2529482 - RNA, 19 nt, Artificial Sequence
  Description of Artificial Sequence: Synthetic oligonucleotide
  Sense strand starting at position 2125 of SEQ ID NO: 1888351
uccuuacuucugggaauug

SEQ ID NO: 2529483 - RNA, 19 nt, Artificial Sequence
  Description of Artificial Sequence: Synthetic oligonucleotide
  Antisense strand to SEQ ID NO: 2529482
caauucccagaaguaagga

SEQ ID NO: 2529484 - RNA, 19 nt, Artificial Sequence
  Description of Artificial Sequence: Synthetic oligonucleotide
  Sense strand starting at position 3539 of SEQ ID NO: 1888351
ggaugaaauacauguguuu

SEQ ID NO: 2529485 - RNA, 19 nt, Artificial Sequence
  Description of Artificial Sequence: Synthetic oligonucleotide
  Antisense strand to SEQ ID NO: 2529484
aaacacauguauuucaucc

SEQ ID NO: 2529486 - RNA, 19 nt, Artificial Sequence
  Description of Artificial Sequence: Synthetic oligonucleotide
  Sense strand starting at position 2357 of SEQ ID NO: 1888351
cugaauuaucauugcuaga

SEQ ID NO: 2529487 - RNA, 19 nt, Artificial Sequence
  Description of Artificial Sequence: Synthetic oligonucleotide
  Antisense strand to SEQ ID NO: 2529486
ucuagcaaugauaauucag

SEQ ID NO: 2529488 - RNA, 19 nt, Artificial Sequence
  Description of Artificial Sequence: Synthetic oligonucleotide
  Sense strand starting at position 3127 of SEQ ID NO: 1888351
ugugguagcaaguauaaga

SEQ ID NO: 2529489 - RNA, 19 nt, Artificial Sequence
  Description of Artificial Sequence: Synthetic oligonucleotide
  Antisense strand to SEQ ID NO: 2529488
ucuuauacuugcuaccaca

SEQ ID NO: 2529490 - RNA, 19 nt, Artificial Sequence
  Description of Artificial Sequence: Synthetic oligonucleotide
  Sense strand starting at position 3578 of SEQ ID NO: 1888351
cuuacuugugaauauguuu

SEQ ID NO: 2529491 - RNA, 19 nt, Artificial Sequence
  Description of Artificial Sequence: Synthetic oligonucleotide
  Antisense strand to SEQ ID NO: 2529490
aaacauauucacaaguaag

SEQ ID NO: 2529492 - RNA, 19 nt, Artificial Sequence
  Description of Artificial Sequence: Synthetic oligonucleotide
  Sense strand starting at position 3765 of SEQ ID NO: 1888351
uuuaucugugaguaccuau

SEQ ID NO: 2529493 - RNA, 19 nt, Artificial Sequence
  Description of Artificial Sequence: Synthetic oligonucleotide
  Antisense strand to SEQ ID NO: 2529492
auagguacucacagauaaa

SEQ ID NO: 2529494 - RNA, 19 nt, Artificial Sequence
  Description of Artificial Sequence: Synthetic oligonucleotide
  Sense strand starting at position 1231 of SEQ ID NO: 1888351
uuacgugauucauugagga

SEQ ID NO: 2529495 - RNA, 19 nt, Artificial Sequence
  Description of Artificial Sequence: Synthetic oligonucleotide
  Antisense strand to SEQ ID NO: 2529494
uccucaaugaaucacguaa

SEQ ID NO: 2529496 - RNA, 19 nt, Artificial Sequence
  Description of Artificial Sequence: Synthetic oligonucleotide
  Sense strand starting at position 212 of SEQ ID NO: 1888351
ugugaauaucuuugaccug

SEQ ID NO: 2529497 - RNA, 19 nt, Artificial Sequence
  Description of Artificial Sequence: Synthetic oligonucleotide
  Antisense strand to SEQ ID NO: 2529496
caggucaaagauauucaca

SEQ ID NO: 2529498 - RNA, 19 nt, Artificial Sequence
  Description of Artificial Sequence: Synthetic oligonucleotide
  Sense strand starting at position 572 of SEQ ID NO: 1888351
aaagccaugucuuugagau

SEQ ID NO: 2529499 - RNA, 19 nt, Artificial Sequence
  Description of Artificial Sequence: Synthetic oligonucleotide
  Antisense strand to SEQ ID NO: 2529498
aucucaaagacauggcuuu

SEQ ID NO: 2529500 - RNA, 19 nt, Artificial Sequence
  Description of Artificial Sequence: Synthetic oligonucleotide
  Sense strand starting at position 3481 of SEQ ID NO: 1888351
augugaucaguguggaaca

SEQ ID NO: 2529501 - RNA, 19 nt, Artificial Sequence
  Description of Artificial Sequence: Synthetic oligonucleotide
  Antisense strand to SEQ ID NO: 2529500
uguuccacacugaucacau

SEQ ID NO: 2529502 - RNA, 19 nt, Artificial Sequence
  Description of Artificial Sequence: Synthetic oligonucleotide
  Sense strand starting at position 3479 of SEQ ID NO: 1888351
caaugugaucaguguggaa

SEQ ID NO: 2529503 - RNA, 19 nt, Artificial Sequence
  Description of Artificial Sequence: Synthetic oligonucleotide
  Antisense strand to SEQ ID NO: 2529502
uuccacacugaucacauug

SEQ ID NO: 2529504 - RNA, 19 nt, Artificial Sequence
  Description of Artificial Sequence: Synthetic oligonucleotide
  Sense strand starting at position 3781 of SEQ ID NO: 1888351
uaucuauaggugugguaaa

SEQ ID NO: 2529505 - RNA, 19 nt, Artificial Sequence
  Description of Artificial Sequence: Synthetic oligonucleotide
  Antisense strand to SEQ ID NO: 2529504
uuuaccacaccuauagaua

SEQ ID NO: 2529506 - RNA, 19 nt, Artificial Sequence
  Description of Artificial Sequence: Synthetic oligonucleotide
  Sense strand starting at position 2862 of SEQ ID NO: 1888351
ccaguuauguaaguaauau

SEQ ID NO: 2529507 - RNA, 19 nt, Artificial Sequence
  Description of Artificial Sequence: Synthetic oligonucleotide
  Antisense strand to SEQ ID NO: 2529506
auauuacuuacauaacugg

SEQ ID NO: 2529508 - RNA, 19 nt, Artificial Sequence
  Description of Artificial Sequence: Synthetic oligonucleotide
  Sense strand starting at position 3768 of SEQ ID NO: 1888351
aucugugaguaccuaucua

SEQ ID NO: 2529509 - RNA, 19 nt, Artificial Sequence
  Description of Artificial Sequence: Synthetic oligonucleotide
  Antisense strand to SEQ ID NO: 2529508
uagauagguacucacagau

SEQ ID NO: 2529510 - RNA, 19 nt, Artificial Sequence
  Description of Artificial Sequence: Synthetic oligonucleotide
  Sense strand starting at position 247 of SEQ ID NO: 1888351
gccuguuuggcauaaggau

SEQ ID NO: 2529511 - RNA, 19 nt, Artificial Sequence
  Description of Artificial Sequence: Synthetic oligonucleotide
  Antisense strand to SEQ ID NO: 2529510
auccuuaugccaaacaggc

SEQ ID NO: 2529512 - RNA, 19 nt, Artificial Sequence
  Description of Artificial Sequence: Synthetic oligonucleotide
  Sense strand starting at position 573 of SEQ ID NO: 1888351
aagccaugucuuugagauu

SEQ ID NO: 2529513 - RNA, 19 nt, Artificial Sequence
  Description of Artificial Sequence: Synthetic oligonucleotide
  Antisense strand to SEQ ID NO: 2529512
aaucucaaagacauggcuu

SEQ ID NO: 2529514 - RNA, 19 nt, Artificial Sequence
  Description of Artificial Sequence: Synthetic oligonucleotide
  Sense strand starting at position 3115 of SEQ ID NO: 1888351
acuaaugauguuuguggua

SEQ ID NO: 2529515 - RNA, 19 nt, Artificial Sequence
  Description of Artificial Sequence: Synthetic oligonucleotide
  Antisense strand to SEQ ID NO: 2529514
uaccacaaacaucauuagu

SEQ ID NO: 2529516 - RNA, 19 nt, Artificial Sequence
  Description of Artificial Sequence: Synthetic oligonucleotide
  Sense strand starting at position 2356 of SEQ ID NO: 1888351
gcugaauuaucauugcuag

SEQ ID NO: 2529517 - RNA, 19 nt, Artificial Sequence
  Description of Artificial Sequence: Synthetic oligonucleotide
  Antisense strand to SEQ ID NO: 2529516
cuagcaaugauaauucagc

SEQ ID NO: 2529518 - RNA, 19 nt, Artificial Sequence
  Description of Artificial Sequence: Synthetic oligonucleotide
  Sense strand starting at position 22 of SEQ ID NO: 1888351
auugcugguaguuggauaa

SEQ ID NO: 2529519 - RNA, 19 nt, Artificial Sequence
  Description of Artificial Sequence: Synthetic oligonucleotide
  Antisense strand to SEQ ID NO: 2529518
uuauccaacuaccagcaau

SEQ ID NO: 2529520 - RNA, 19 nt, Artificial Sequence
  Description of Artificial Sequence: Synthetic oligonucleotide
  Sense strand starting at position 21 of SEQ ID NO: 1888351
gauugcugguaguuggaua

SEQ ID NO: 2529521 - RNA, 19 nt, Artificial Sequence
  Description of Artificial Sequence: Synthetic oligonucleotide
  Antisense strand to SEQ ID NO: 2529520
uauccaacuaccagcaauc

SEQ ID NO: 2529522 - RNA, 19 nt, Artificial Sequence
  Description of Artificial Sequence: Synthetic oligonucleotide
  Sense strand starting at position 3475 of SEQ ID NO: 1888351
ucaucaaugugaucagugu

SEQ ID NO: 2529523 - RNA, 19 nt, Artificial Sequence
  Description of Artificial Sequence: Synthetic oligonucleotide
  Antisense strand to SEQ ID NO: 2529522
acacugaucacauugauga

SEQ ID NO: 2529524 - RNA, 19 nt, Artificial Sequence
  Description of Artificial Sequence: Synthetic oligonucleotide
  Sense strand starting at position 3712 of SEQ ID NO: 1888352
uugaguaaucaaugaauug

SEQ ID NO: 2529525 - RNA, 19 nt, Artificial Sequence
  Description of Artificial Sequence: Synthetic oligonucleotide
  Antisense strand to SEQ ID NO: 2529524
caauucauugauuacucaa

SEQ ID NO: 2529526 - RNA, 19 nt, Artificial Sequence
  Description of Artificial Sequence: Synthetic oligonucleotide
  Sense strand starting at position 1986 of SEQ ID NO: 1888352
agggcuauauaauuaauca

SEQ ID NO: 2529527 - RNA, 19 nt, Artificial Sequence
  Description of Artificial Sequence: Synthetic oligonucleotide
  Antisense strand to SEQ ID NO: 2529526
ugauuaauuauauagcccu

SEQ ID NO: 2529528 - RNA, 19 nt, Artificial Sequence
  Description of Artificial Sequence: Synthetic oligonucleotide
  Sense strand starting at position 3610 of SEQ ID NO: 1888352
guguuuaaacuagacauug

SEQ ID NO: 2529529 - RNA, 19 nt, Artificial Sequence
  Description of Artificial Sequence: Synthetic oligonucleotide
  Antisense strand to SEQ ID NO: 2529528
caaugucuaguuuaaacac

SEQ ID NO: 2529530 - RNA, 19 nt, Artificial Sequence
  Description of Artificial Sequence: Synthetic oligonucleotide
  Sense strand starting at position 1708 of SEQ ID NO: 1888352
ugagcagucaacgagauaa

SEQ ID NO: 2529531 - RNA, 19 nt, Artificial Sequence
  Description of Artificial Sequence: Synthetic oligonucleotide
  Antisense strand to SEQ ID NO: 2529530
uuaucucguugacugcuca

SEQ ID NO: 2529532 - RNA, 19 nt, Artificial Sequence
  Description of Artificial Sequence: Synthetic oligonucleotide
  Sense strand starting at position 1503 of SEQ ID NO: 1888352
ucuggaugaaaugguauua

SEQ ID NO: 2529533 - RNA, 19 nt, Artificial Sequence
  Description of Artificial Sequence: Synthetic oligonucleotide
  Antisense strand to SEQ ID NO: 2529532
uaauaccauuucauccaga

SEQ ID NO: 2529534 - RNA, 19 nt, Artificial Sequence
  Description of Artificial Sequence: Synthetic oligonucleotide
  Sense strand starting at position 3708 of SEQ ID NO: 1888352
ucuauugaguaaucaauga

SEQ ID NO: 2529535 - RNA, 19 nt, Artificial Sequence
  Description of Artificial Sequence: Synthetic oligonucleotide
  Antisense strand to SEQ ID NO: 2529534
ucauugauuacucaauaga

SEQ ID NO: 2529536 - RNA, 19 nt, Artificial Sequence
  Description of Artificial Sequence: Synthetic oligonucleotide
  Sense strand starting at position 1981 of SEQ ID NO: 1888352
uucccagggcuauauaauu

SEQ ID NO: 2529537 - RNA, 19 nt, Artificial Sequence
  Description of Artificial Sequence: Synthetic oligonucleotide
  Antisense strand to SEQ ID NO: 2529536
aauuauauagcccugggaa

SEQ ID NO: 2529538 - RNA, 19 nt, Artificial Sequence
  Description of Artificial Sequence: Synthetic oligonucleotide
  Sense strand starting at position 3047 of SEQ ID NO: 1888352
gauaguaaagguggaaagu

SEQ ID NO: 2529539 - RNA, 19 nt, Artificial Sequence
  Description of Artificial Sequence: Synthetic oligonucleotide
  Antisense strand to SEQ ID NO: 2529538
acuuuccaccuuuacuauc

SEQ ID NO: 2529540 - RNA, 19 nt, Artificial Sequence
  Description of Artificial Sequence: Synthetic oligonucleotide
  Sense strand starting at position 2007 of SEQ ID NO: 1888352
aaauaaccuguugguaaga

SEQ ID NO: 2529541 - RNA, 19 nt, Artificial Sequence
  Description of Artificial Sequence: Synthetic oligonucleotide
  Antisense strand to SEQ ID NO: 2529540
ucuuaccaacagguuauuu

SEQ ID NO: 2529542 - RNA, 19 nt, Artificial Sequence
  Description of Artificial Sequence: Synthetic oligonucleotide
  Sense strand starting at position 328 of SEQ ID NO: 1888352
aaaugcugugaccagugaa

SEQ ID NO: 2529543 - RNA, 19 nt, Artificial Sequence
  Description of Artificial Sequence: Synthetic oligonucleotide
  Antisense strand to SEQ ID NO: 2529542
uucacuggucacagcauuu

SEQ ID NO: 2529544 - RNA, 19 nt, Artificial Sequence
  Description of Artificial Sequence: Synthetic oligonucleotide
  Sense strand starting at position 2496 of SEQ ID NO: 1888352
gugagauacauuggauucu

SEQ ID NO: 2529545 - RNA, 19 nt, Artificial Sequence
  Description of Artificial Sequence: Synthetic oligonucleotide
  Antisense strand to SEQ ID NO: 2529544
agaauccaauguaucucac

SEQ ID NO: 2529546 - RNA, 19 nt, Artificial Sequence
  Description of Artificial Sequence: Synthetic oligonucleotide
  Sense strand starting at position 3203 of SEQ ID NO: 1888352
uugauuagagacugguauu

SEQ ID NO: 2529547 - RNA, 19 nt, Artificial Sequence
  Description of Artificial Sequence: Synthetic oligonucleotide
  Antisense strand to SEQ ID NO: 2529546
aauaccagucucuaaucaa

SEQ ID NO: 2529548 - RNA, 19 nt, Artificial Sequence
  Description of Artificial Sequence: Synthetic oligonucleotide
  Sense strand starting at position 1289 of SEQ ID NO: 1888352
ugcuaaggacuugauguau

SEQ ID NO: 2529549 - RNA, 19 nt, Artificial Sequence
  Description of Artificial Sequence: Synthetic oligonucleotide
  Antisense strand to SEQ ID NO: 2529548
auacaucaaguccuuagca

SEQ ID NO: 2529550 - RNA, 19 nt, Artificial Sequence
  Description of Artificial Sequence: Synthetic oligonucleotide
  Sense strand starting at position 3704 of SEQ ID NO: 1888352
ugauucuauugaguaauca

SEQ ID NO: 2529551 - RNA, 19 nt, Artificial Sequence
  Description of Artificial Sequence: Synthetic oligonucleotide
  Antisense strand to SEQ ID NO: 2529550
ugauuacucaauagaauca

SEQ ID NO: 2529552 - RNA, 19 nt, Artificial Sequence
  Description of Artificial Sequence: Synthetic oligonucleotide
  Sense strand starting at position 233 of SEQ ID NO: 1888352
agcaguaaaucaucuagag

SEQ ID NO: 2529553 - RNA, 19 nt, Artificial Sequence
  Description of Artificial Sequence: Synthetic oligonucleotide
  Antisense strand to SEQ ID NO: 2529552
cucuagaugauuuacugcu

SEQ ID NO: 2529554 - RNA, 19 nt, Artificial Sequence
  Description of Artificial Sequence: Synthetic oligonucleotide
  Sense strand starting at position 309 of SEQ ID NO: 1888352
uuuaguguucagggagaaa

SEQ ID NO: 2529555 - RNA, 19 nt, Artificial Sequence
  Description of Artificial Sequence: Synthetic oligonucleotide
  Antisense strand to SEQ ID NO: 2529554
uuucucccugaacacuaaa

SEQ ID NO: 2529556 - RNA, 19 nt, Artificial Sequence
  Description of Artificial Sequence: Synthetic oligonucleotide
  Sense strand starting at position 3044 of SEQ ID NO: 1888352
gcagauaguaaagguggaa

SEQ ID NO: 2529557 - RNA, 19 nt, Artificial Sequence
  Description of Artificial Sequence: Synthetic oligonucleotide
  Antisense strand to SEQ ID NO: 2529556
uuccaccuuuacuaucugc

SEQ ID NO: 2529558 - RNA, 19 nt, Artificial Sequence
  Description of Artificial Sequence: Synthetic oligonucleotide
  Sense strand starting at position 2008 of SEQ ID NO: 1888352
aauaaccuguugguaagau

SEQ ID NO: 2529559 - RNA, 19 nt, Artificial Sequence
  Description of Artificial Sequence: Synthetic oligonucleotide
  Antisense strand to SEQ ID NO: 2529558
aucuuaccaacagguuauu

SEQ ID NO: 2529560 - RNA, 19 nt, Artificial Sequence
  Description of Artificial Sequence: Synthetic oligonucleotide
  Sense strand starting at position 2586 of SEQ ID NO: 1888352
uguccuuuccaucacauga

SEQ ID NO: 2529561 - RNA, 19 nt, Artificial Sequence
  Description of Artificial Sequence: Synthetic oligonucleotide
  Antisense strand to SEQ ID NO: 2529560
ucaugugauggaaaggaca

SEQ ID NO: 2529562 - RNA, 19 nt, Artificial Sequence
  Description of Artificial Sequence: Synthetic oligonucleotide
  Sense strand starting at position 139 of SEQ ID NO: 1888352
aggccuggugaauggaaau

SEQ ID NO: 2529563 - RNA, 19 nt, Artificial Sequence
  Description of Artificial Sequence: Synthetic oligonucleotide
  Antisense strand to SEQ ID NO: 2529562
auuuccauucaccaggccu

SEQ ID NO: 2529564 - RNA, 19 nt, Artificial Sequence
  Description of Artificial Sequence: Synthetic oligonucleotide
  Sense strand starting at position 3733 of SEQ ID NO: 1888352
cugagauagccucaucuuu

SEQ ID NO: 2529565 - RNA, 19 nt, Artificial Sequence
  Description of Artificial Sequence: Synthetic oligonucleotide
  Antisense strand to SEQ ID NO: 2529564
aaagaugaggcuaucucag

SEQ ID NO: 2529566 - RNA, 19 nt, Artificial Sequence
  Description of Artificial Sequence: Synthetic oligonucleotide
  Sense strand starting at position 1710 of SEQ ID NO: 1888352
agcagucaacgagauaagu

SEQ ID NO: 2529567 - RNA, 19 nt, Artificial Sequence
  Description of Artificial Sequence: Synthetic oligonucleotide
  Antisense strand to SEQ ID NO: 2529566
acuuaucucguugacugcu

SEQ ID NO: 2529568 - RNA, 19 nt, Artificial Sequence
  Description of Artificial Sequence: Synthetic oligonucleotide
  Sense strand starting at position 1798 of SEQ ID NO: 1888352
gugauuaaaguuuggacca

SEQ ID NO: 2529569 - RNA, 19 nt, Artificial Sequence
  Description of Artificial Sequence: Synthetic oligonucleotide
  Antisense strand to SEQ ID NO: 2529568
ugguccaaacuuuaaucac

SEQ ID NO: 2529570 - RNA, 19 nt, Artificial Sequence
  Description of Artificial Sequence: Synthetic oligonucleotide
  Sense strand starting at position 2782 of SEQ ID NO: 1888352
auguuaaacugucugauaa

SEQ ID NO: 2529571 - RNA, 19 nt, Artificial Sequence
  Description of Artificial Sequence: Synthetic oligonucleotide
  Antisense strand to SEQ ID NO: 2529570
uuaucagacaguuuaacau

SEQ ID NO: 2529572 - RNA, 19 nt, Artificial Sequence
  Description of Artificial Sequence: Synthetic oligonucleotide
  Sense strand starting at position 3327 of SEQ ID NO: 1888352
gaaugagcacuuggguaua

SEQ ID NO: 2529573 - RNA, 19 nt, Artificial Sequence
  Description of Artificial Sequence: Synthetic oligonucleotide
  Antisense strand to SEQ ID NO: 2529572
uauacccaagugcucauuc

SEQ ID NO: 2529574 - RNA, 19 nt, Artificial Sequence
  Description of Artificial Sequence: Synthetic oligonucleotide
  Sense strand starting at position 3206 of SEQ ID NO: 1888352
auuagagacugguauuuag

SEQ ID NO: 2529575 - RNA, 19 nt, Artificial Sequence
  Description of Artificial Sequence: Synthetic oligonucleotide
  Antisense strand to SEQ ID NO: 2529574
cuaaauaccagucucuaau

SEQ ID NO: 2529576 - RNA, 19 nt, Artificial Sequence
  Description of Artificial Sequence: Synthetic oligonucleotide
  Sense strand starting at position 3735 of SEQ ID NO: 1888352
gagauagccucaucuuuga

SEQ ID NO: 2529577 - RNA, 19 nt, Artificial Sequence
  Description of Artificial Sequence: Synthetic oligonucleotide
  Antisense strand to SEQ ID NO: 2529576
ucaaagaugaggcuaucuc

SEQ ID NO: 2529578 - RNA, 19 nt, Artificial Sequence
  Description of Artificial Sequence: Synthetic oligonucleotide
  Sense strand starting at position 2783 of SEQ ID NO: 1888352
uguuaaacugucugauaaa

SEQ ID NO: 2529579 - RNA, 19 nt, Artificial Sequence
  Description of Artificial Sequence: Synthetic oligonucleotide
  Antisense strand to SEQ ID NO: 2529578
uuuaucagacaguuuaaca

SEQ ID NO: 2529580 - RNA, 19 nt, Artificial Sequence
  Description of Artificial Sequence: Synthetic oligonucleotide
  Sense strand starting at position 1095 of SEQ ID NO: 1888352
aguacuguagcuuaauaac

SEQ ID NO: 2529581 - RNA, 19 nt, Artificial Sequence
  Description of Artificial Sequence: Synthetic oligonucleotide
  Antisense strand to SEQ ID NO: 2529580
guuauuaagcuacaguacu

SEQ ID NO: 2529582 - RNA, 19 nt, Artificial Sequence
  Description of Artificial Sequence: Synthetic oligonucleotide
  Sense strand starting at position 1572 of SEQ ID NO: 1888352
uguaauggguacuuaacua

SEQ ID NO: 2529583 - RNA, 19 nt, Artificial Sequence
  Description of Artificial Sequence: Synthetic oligonucleotide
  Antisense strand to SEQ ID NO: 2529582
uaguuaaguacccauuaca

SEQ ID NO: 2529584 - RNA, 19 nt, Artificial Sequence
  Description of Artificial Sequence: Synthetic oligonucleotide
  Sense strand starting at position 1514 of SEQ ID NO: 1888352
ugguauuaugcuuauccaa

SEQ ID NO: 2529585 - RNA, 19 nt, Artificial Sequence
  Description of Artificial Sequence: Synthetic oligonucleotide
  Antisense strand to SEQ ID NO: 2529584
uuggauaagcauaauacca

SEQ ID NO: 2529586 - RNA, 19 nt, Artificial Sequence
  Description of Artificial Sequence: Synthetic oligonucleotide
  Sense strand starting at position 1038 of SEQ ID NO: 1888352
uguaaaugccuugaaagca

SEQ ID NO: 2529587 - RNA, 19 nt, Artificial Sequence
  Description of Artificial Sequence: Synthetic oligonucleotide
  Antisense strand to SEQ ID NO: 2529586
ugcuuucaaggcauuuaca

SEQ ID NO: 2529588 - RNA, 19 nt, Artificial Sequence
  Description of Artificial Sequence: Synthetic oligonucleotide
  Sense strand starting at position 3575 of SEQ ID NO: 1888352
guaguuaagugugucauuu

SEQ ID NO: 2529589 - RNA, 19 nt, Artificial Sequence
  Description of Artificial Sequence: Synthetic oligonucleotide
  Antisense strand to SEQ ID NO: 2529588
aaaugacacacuuaacuac

SEQ ID NO: 2529590 - RNA, 19 nt, Artificial Sequence
  Description of Artificial Sequence: Synthetic oligonucleotide
  Sense strand starting at position 1707 of SEQ ID NO: 1888352
uugagcagucaacgagaua

SEQ ID NO: 2529591 - RNA, 19 nt, Artificial Sequence
  Description of Artificial Sequence: Synthetic oligonucleotide
  Antisense strand to SEQ ID NO: 2529590
uaucucguugacugcucaa

SEQ ID NO: 2529592 - RNA, 19 nt, Artificial Sequence
  Description of Artificial Sequence: Synthetic oligonucleotide
  Sense strand starting at position 2135 of SEQ ID NO: 1888352
ggaggaauauuauacaaag

SEQ ID NO: 2529593 - RNA, 19 nt, Artificial Sequence
  Description of Artificial Sequence: Synthetic oligonucleotide
  Antisense strand to SEQ ID NO: 2529592
cuuuguauaauauuccucc

SEQ ID NO: 2529594 - RNA, 19 nt, Artificial Sequence
  Description of Artificial Sequence: Synthetic oligonucleotide
  Sense strand starting at position 2234 of SEQ ID NO: 1888352
uuauaugaaugagaagaga

SEQ ID NO: 2529595 - RNA, 19 nt, Artificial Sequence
  Description of Artificial Sequence: Synthetic oligonucleotide
  Antisense strand to SEQ ID NO: 2529594
ucucuucucauucauauaa

SEQ ID NO: 2529596 - RNA, 19 nt, Artificial Sequence
  Description of Artificial Sequence: Synthetic oligonucleotide
  Sense strand starting at position 1516 of SEQ ID NO: 1888352
guauuaugcuuauccaaga

SEQ ID NO: 2529597 - RNA, 19 nt, Artificial Sequence
  Description of Artificial Sequence: Synthetic oligonucleotide
  Antisense strand to SEQ ID NO: 2529596
ucuuggauaagcauaauac

SEQ ID NO: 2529598 - RNA, 19 nt, Artificial Sequence
  Description of Artificial Sequence: Synthetic oligonucleotide
  Sense strand starting at position 899 of SEQ ID NO: 1888352
gagacucuguguucuuaua

SEQ ID NO: 2529599 - RNA, 19 nt, Artificial Sequence
  Description of Artificial Sequence: Synthetic oligonucleotide
  Antisense strand to SEQ ID NO: 2529598
uauaagaacacagagucuc

SEQ ID NO: 2529600 - RNA, 19 nt, Artificial Sequence
  Description of Artificial Sequence: Synthetic oligonucleotide
  Sense strand starting at position 1493 of SEQ ID NO: 1888352
acauacuauuucuggauga

SEQ ID NO: 2529601 - RNA, 19 nt, Artificial Sequence
  Description of Artificial Sequence: Synthetic oligonucleotide
  Antisense strand to SEQ ID NO: 2529600
ucauccagaaauaguaugu

SEQ ID NO: 2529602 - RNA, 19 nt, Artificial Sequence
  Description of Artificial Sequence: Synthetic oligonucleotide
  Sense strand starting at position 98 of SEQ ID NO: 1888352
cagggauacugacagggaa

SEQ ID NO: 2529603 - RNA, 19 nt, Artificial Sequence
  Description of Artificial Sequence: Synthetic oligonucleotide
  Antisense strand to SEQ ID NO: 2529602
uucccugucaguaucccug

SEQ ID NO: 2529604 - RNA, 19 nt, Artificial Sequence
  Description of Artificial Sequence: Synthetic oligonucleotide
  Sense strand starting at position 911 of SEQ ID NO: 1888353
aauugaaacucuguaugga

SEQ ID NO: 2529605 - RNA, 19 nt, Artificial Sequence
  Description of Artificial Sequence: Synthetic oligonucleotide
  Antisense strand to SEQ ID NO: 2529604
uccauacagaguuucaauu

SEQ ID NO: 2529606 - RNA, 19 nt, Artificial Sequence
  Description of Artificial Sequence: Synthetic oligonucleotide
  Sense strand starting at position 3490 of SEQ ID NO: 1888353
ugacaucaggcauaccuua

SEQ ID NO: 2529607 - RNA, 19 nt, Artificial Sequence
  Description of Artificial Sequence: Synthetic oligonucleotide
  Antisense strand to SEQ ID NO: 2529606
uaagguaugccugauguca

SEQ ID NO: 2529608 - RNA, 19 nt, Artificial Sequence
  Description of Artificial Sequence: Synthetic oligonucleotide
  Sense strand starting at position 2197 of SEQ ID NO: 1888353
gcaaucauucuugagaacu

SEQ ID NO: 2529609 - RNA, 19 nt, Artificial Sequence
  Description of Artificial Sequence: Synthetic oligonucleotide
  Antisense strand to SEQ ID NO: 2529608
aguucucaagaaugauugc

SEQ ID NO: 2529610 - RNA, 19 nt, Artificial Sequence
  Description of Artificial Sequence: Synthetic oligonucleotide
  Sense strand starting at position 164 of SEQ ID NO: 1888353
uuguaucugagauggaaca

SEQ ID NO: 2529611 - RNA, 19 nt, Artificial Sequence
  Description of Artificial Sequence: Synthetic oligonucleotide
  Antisense strand to SEQ ID NO: 2529610
uguuccaucucagauacaa

SEQ ID NO: 2529612 - RNA, 19 nt, Artificial Sequence
  Description of Artificial Sequence: Synthetic oligonucleotide
  Sense strand starting at position 2914 of SEQ ID NO: 1888353
ggcauauaugaguacuuag

SEQ ID NO: 2529613 - RNA, 19 nt, Artificial Sequence
  Description of Artificial Sequence: Synthetic oligonucleotide
  Antisense strand to SEQ ID NO: 2529612
cuaaguacucauauaugcc

SEQ ID NO: 2529614 - RNA, 19 nt, Artificial Sequence
  Description of Artificial Sequence: Synthetic oligonucleotide
  Sense strand starting at position 1096 of SEQ ID NO: 1888353
ucguaugauauugguauuu

SEQ ID NO: 2529615 - RNA, 19 nt, Artificial Sequence
  Description of Artificial Sequence: Synthetic oligonucleotide
  Antisense strand to SEQ ID NO: 2529614
aaauaccaauaucauacga

SEQ ID NO: 2529616 - RNA, 19 nt, Artificial Sequence
  Description of Artificial Sequence: Synthetic oligonucleotide
  Sense strand starting at position 1065 of SEQ ID NO: 1888353
gguaaauacccagaagugu

SEQ ID NO: 2529617 - RNA, 19 nt, Artificial Sequence
  Description of Artificial Sequence: Synthetic oligonucleotide
  Antisense strand to SEQ ID NO: 2529616
acacuucuggguauuuacc

SEQ ID NO: 2529618 - RNA, 19 nt, Artificial Sequence
  Description of Artificial Sequence: Synthetic oligonucleotide
  Sense strand starting at position 1125 of SEQ ID NO: 1888353
gaaggaagucaguauuguu

SEQ ID NO: 2529619 - RNA, 19 nt, Artificial Sequence
  Description of Artificial Sequence: Synthetic oligonucleotide
  Antisense strand to SEQ ID NO: 2529618
aacaauacugacuuccuuc

SEQ ID NO: 2529620 - RNA, 19 nt, Artificial Sequence
  Description of Artificial Sequence: Synthetic oligonucleotide
  Sense strand starting at position 3495 of SEQ ID NO: 1888353
ucaggcauaccuuaugauu

SEQ ID NO: 2529621 - RNA, 19 nt, Artificial Sequence
  Description of Artificial Sequence: Synthetic oligonucleotide
  Antisense strand to SEQ ID NO: 2529620
aaucauaagguaugccuga

SEQ ID NO: 2529622 - RNA, 19 nt, Artificial Sequence
  Description of Artificial Sequence: Synthetic oligonucleotide
  Sense strand starting at position 1135 of SEQ ID NO: 1888353
aguauuguucuccauaaag

SEQ ID NO: 2529623 - RNA, 19 nt, Artificial Sequence
  Description of Artificial Sequence: Synthetic oligonucleotide
  Antisense strand to SEQ ID NO: 2529622
cuuuauggagaacaauacu

SEQ ID NO: 2529624 - RNA, 19 nt, Artificial Sequence
  Description of Artificial Sequence: Synthetic oligonucleotide
  Sense strand starting at position 2066 of SEQ ID NO: 1888353
cacagaguuccauggauca

SEQ ID NO: 2529625 - RNA, 19 nt, Artificial Sequence
  Description of Artificial Sequence: Synthetic oligonucleotide
  Antisense strand to SEQ ID NO: 2529624
ugauccauggaacucugug

SEQ ID NO: 2529626 - RNA, 19 nt, Artificial Sequence
  Description of Artificial Sequence: Synthetic oligonucleotide
  Sense strand starting at position 914 of SEQ ID NO: 1888353
ugaaacucuguauggauua

SEQ ID NO: 2529627 - RNA, 19 nt, Artificial Sequence
  Description of Artificial Sequence: Synthetic oligonucleotide
  Antisense strand to SEQ ID NO: 2529626
uaauccauacagaguuuca

SEQ ID NO: 2529628 - RNA, 19 nt, Artificial Sequence
  Description of Artificial Sequence: Synthetic oligonucleotide
  Sense strand starting at position 1715 of SEQ ID NO: 1888353
uauguaugugaucauacug

SEQ ID NO: 2529629 - RNA, 19 nt, Artificial Sequence
  Description of Artificial Sequence: Synthetic oligonucleotide
  Antisense strand to SEQ ID NO: 2529628
caguaugaucacauacaua

SEQ ID NO: 2529630 - RNA, 19 nt, Artificial Sequence
  Description of Artificial Sequence: Synthetic oligonucleotide
  Sense strand starting at position 1751 of SEQ ID NO: 1888353
gucuuaaggcuggacuaau

SEQ ID NO: 2529631 - RNA, 19 nt, Artificial Sequence
  Description of Artificial Sequence: Synthetic oligonucleotide
  Antisense strand to SEQ ID NO: 2529630
auuaguccagccuuaagac

SEQ ID NO: 2529632 - RNA, 19 nt, Artificial Sequence
  Description of Artificial Sequence: Synthetic oligonucleotide
  Sense strand starting at position 2260 of SEQ ID NO: 1888353
agagaauuauucuccaguc

SEQ ID NO: 2529633 - RNA, 19 nt, Artificial Sequence
  Description of Artificial Sequence: Synthetic oligonucleotide
  Antisense strand to SEQ ID NO: 2529632
gacuggagaauaauucucu

SEQ ID NO: 2529634 - RNA, 19 nt, Artificial Sequence
  Description of Artificial Sequence: Synthetic oligonucleotide
  Sense strand starting at position 1029 of SEQ ID NO: 1888353
augcaaagaucucuuugag

SEQ ID NO: 2529635 - RNA, 19 nt, Artificial Sequence
  Description of Artificial Sequence: Synthetic oligonucleotide
  Antisense strand to SEQ ID NO: 2529634
cucaaagagaucuuugcau

SEQ ID NO: 2529636 - RNA, 19 nt, Artificial Sequence
  Description of Artificial Sequence: Synthetic oligonucleotide
  Sense strand starting at position 3951 of SEQ ID NO: 1888353
guaguauauuugcuuccua

SEQ ID NO: 2529637 - RNA, 19 nt, Artificial Sequence
  Description of Artificial Sequence: Synthetic oligonucleotide
  Antisense strand to SEQ ID NO: 2529636
uaggaagcaaauauacuac

SEQ ID NO: 2529638 - RNA, 19 nt, Artificial Sequence
  Description of Artificial Sequence: Synthetic oligonucleotide
  Sense strand starting at position 347 of SEQ ID NO: 1888353
gcacuuacugucuauaaga

SEQ ID NO: 2529639 - RNA, 19 nt, Artificial Sequence
  Description of Artificial Sequence: Synthetic oligonucleotide
  Antisense strand to SEQ ID NO: 2529638
ucuuauagacaguaagugc

SEQ ID NO: 2529640 - RNA, 19 nt, Artificial Sequence
  Description of Artificial Sequence: Synthetic oligonucleotide
  Sense strand starting at position 3413 of SEQ ID NO: 1888353
ugaguccuucuugauauuc

SEQ ID NO: 2529641 - RNA, 19 nt, Artificial Sequence
  Description of Artificial Sequence: Synthetic oligonucleotide
  Antisense strand to SEQ ID NO: 2529640
gaauaucaagaaggacuca

SEQ ID NO: 2529642 - RNA, 19 nt, Artificial Sequence
  Description of Artificial Sequence: Synthetic oligonucleotide
  Sense strand starting at position 2104 of SEQ ID NO: 1888353
gacauucuguuucuaggga

SEQ ID NO: 2529643 - RNA, 19 nt, Artificial Sequence
  Description of Artificial Sequence: Synthetic oligonucleotide
  Antisense strand to SEQ ID NO: 2529642
ucccuagaaacagaauguc

SEQ ID NO: 2529644 - RNA, 19 nt, Artificial Sequence
  Description of Artificial Sequence: Synthetic oligonucleotide
  Sense strand starting at position 2195 of SEQ ID NO: 1888353
cugcaaucauucuugagaa

SEQ ID NO: 2529645 - RNA, 19 nt, Artificial Sequence
  Description of Artificial Sequence: Synthetic oligonucleotide
  Antisense strand to SEQ ID NO: 2529644
uucucaagaaugauugcag

SEQ ID NO: 2529646 - RNA, 19 nt, Artificial Sequence
  Description of Artificial Sequence: Synthetic oligonucleotide
  Sense strand starting at position 3746 of SEQ ID NO: 1888353
gguacugcuaaagaguauu

SEQ ID NO: 2529647 - RNA, 19 nt, Artificial Sequence
  Description of Artificial Sequence: Synthetic oligonucleotide
  Antisense strand to SEQ ID NO: 2529646
aauacucuuuagcaguacc

SEQ ID NO: 2529648 - RNA, 19 nt, Artificial Sequence
  Description of Artificial Sequence: Synthetic oligonucleotide
  Sense strand starting at position 552 of SEQ ID NO: 1888353
guaaguguuggguaggaac

SEQ ID NO: 2529649 - RNA, 19 nt, Artificial Sequence
  Description of Artificial Sequence: Synthetic oligonucleotide
  Antisense strand to SEQ ID NO: 2529648
guuccuacccaacacuuac

SEQ ID NO: 2529650 - RNA, 19 nt, Artificial Sequence
  Description of Artificial Sequence: Synthetic oligonucleotide
  Sense strand starting at position 3910 of SEQ ID NO: 1888353
uguuacuugcuggaugaca

SEQ ID NO: 2529651 - RNA, 19 nt, Artificial Sequence
  Description of Artificial Sequence: Synthetic oligonucleotide
  Antisense strand to SEQ ID NO: 2529650
ugucauccagcaaguaaca

SEQ ID NO: 2529652 - RNA, 19 nt, Artificial Sequence
  Description of Artificial Sequence: Synthetic oligonucleotide
  Sense strand starting at position 2913 of SEQ ID NO: 1888353
aggcauauaugaguacuua

SEQ ID NO: 2529653 - RNA, 19 nt, Artificial Sequence
  Description of Artificial Sequence: Synthetic oligonucleotide
  Antisense strand to SEQ ID NO: 2529652
uaaguacucauauaugccu

SEQ ID NO: 2529654 - RNA, 19 nt, Artificial Sequence
  Description of Artificial Sequence: Synthetic oligonucleotide
  Sense strand starting at position 225 of SEQ ID NO: 1888353
aagaaucaguagucaaugu

SEQ ID NO: 2529655 - RNA, 19 nt, Artificial Sequence
  Description of Artificial Sequence: Synthetic oligonucleotide
  Antisense strand to SEQ ID NO: 2529654
acauugacuacugauucuu

SEQ ID NO: 2529656 - RNA, 19 nt, Artificial Sequence
  Description of Artificial Sequence: Synthetic oligonucleotide
  Sense strand starting at position 722 of SEQ ID NO: 1888353
ccaauauuccucuagugua

SEQ ID NO: 2529657 - RNA, 19 nt, Artificial Sequence
  Description of Artificial Sequence: Synthetic oligonucleotide
  Antisense strand to SEQ ID NO: 2529656
uacacuagaggaauauugg

SEQ ID NO: 2529658 - RNA, 19 nt, Artificial Sequence
  Description of Artificial Sequence: Synthetic oligonucleotide
  Sense strand starting at position 3533 of SEQ ID NO: 1888353
gguuuauaaggcuagaguu

SEQ ID NO: 2529659 - RNA, 19 nt, Artificial Sequence
  Description of Artificial Sequence: Synthetic oligonucleotide
  Antisense strand to SEQ ID NO: 2529658
aacucuagccuuauaaacc

SEQ ID NO: 2529660 - RNA, 19 nt, Artificial Sequence
  Description of Artificial Sequence: Synthetic oligonucleotide
  Sense strand starting at position 2521 of SEQ ID NO: 1888353
gggugcaugguucaacaau

SEQ ID NO: 2529661 - RNA, 19 nt, Artificial Sequence
  Description of Artificial Sequence: Synthetic oligonucleotide
  Antisense strand to SEQ ID NO: 2529660
auuguugaaccaugcaccc

SEQ ID NO: 2529662 - RNA, 19 nt, Artificial Sequence
  Description of Artificial Sequence: Synthetic oligonucleotide
  Sense strand starting at position 554 of SEQ ID NO: 1888353
aaguguuggguaggaacau

SEQ ID NO: 2529663 - RNA, 19 nt, Artificial Sequence
  Description of Artificial Sequence: Synthetic oligonucleotide
  Antisense strand to SEQ ID NO: 2529662
auguuccuacccaacacuu

SEQ ID NO: 2529664 - RNA, 19 nt, Artificial Sequence
  Description of Artificial Sequence: Synthetic oligonucleotide
  Sense strand starting at position 2233 of SEQ ID NO: 1888353
gagaaacggguuggucuaa

SEQ ID NO: 2529665 - RNA, 19 nt, Artificial Sequence
  Description of Artificial Sequence: Synthetic oligonucleotide
  Antisense strand to SEQ ID NO: 2529664
uuagaccaacccguuucuc

SEQ ID NO: 2529666 - RNA, 19 nt, Artificial Sequence
  Description of Artificial Sequence: Synthetic oligonucleotide
  Sense strand starting at position 798 of SEQ ID NO: 1888353
uuguucucaguauaugauu

SEQ ID NO: 2529667 - RNA, 19 nt, Artificial Sequence
  Description of Artificial Sequence: Synthetic oligonucleotide
  Antisense strand to SEQ ID NO: 2529666
aaucauauacugagaacaa

SEQ ID NO: 2529668 - RNA, 19 nt, Artificial Sequence
  Description of Artificial Sequence: Synthetic oligonucleotide
  Sense strand starting at position 1750 of SEQ ID NO: 1888353
agucuuaaggcuggacuaa

SEQ ID NO: 2529669 - RNA, 19 nt, Artificial Sequence
  Description of Artificial Sequence: Synthetic oligonucleotide
  Antisense strand to SEQ ID NO: 2529668
uuaguccagccuuaagacu

SEQ ID NO: 2529670 - RNA, 19 nt, Artificial Sequence
  Description of Artificial Sequence: Synthetic oligonucleotide
  Sense strand starting at position 1749 of SEQ ID NO: 1888353
aagucuuaaggcuggacua

SEQ ID NO: 2529671 - RNA, 19 nt, Artificial Sequence
  Description of Artificial Sequence: Synthetic oligonucleotide
  Antisense strand to SEQ ID NO: 2529670
uaguccagccuuaagacuu

SEQ ID NO: 2529672 - RNA, 19 nt, Artificial Sequence
  Description of Artificial Sequence: Synthetic oligonucleotide
  Sense strand starting at position 2232 of SEQ ID NO: 1888353
ggagaaacggguuggucua

SEQ ID NO: 2529673 - RNA, 19 nt, Artificial Sequence
  Description of Artificial Sequence: Synthetic oligonucleotide
  Antisense strand to SEQ ID NO: 2529672
uagaccaacccguuucucc

SEQ ID NO: 2529674 - RNA, 19 nt, Artificial Sequence
  Description of Artificial Sequence: Synthetic oligonucleotide
  Sense strand starting at position 2601 of SEQ ID NO: 1888353
agggccuucuauccaauau

SEQ ID NO: 2529675 - RNA, 19 nt, Artificial Sequence
  Description of Artificial Sequence: Synthetic oligonucleotide
  Antisense strand to SEQ ID NO: 2529674
auauuggauagaaggcccu

SEQ ID NO: 2529676 - RNA, 19 nt, Artificial Sequence
  Description of Artificial Sequence: Synthetic oligonucleotide
  Sense strand starting at position 1530 of SEQ ID NO: 1888353
cgugauauccuuugacaaa

SEQ ID NO: 2529677 - RNA, 19 nt, Artificial Sequence
  Description of Artificial Sequence: Synthetic oligonucleotide
  Antisense strand to SEQ ID NO: 2529676
uuugucaaaggauaucacg

SEQ ID NO: 2529678 - RNA, 19 nt, Artificial Sequence
  Description of Artificial Sequence: Synthetic oligonucleotide
  Sense strand starting at position 3892 of SEQ ID NO: 1888353
ucagaccaguguuuaugau

SEQ ID NO: 2529679 - RNA, 19 nt, Artificial Sequence
  Description of Artificial Sequence: Synthetic oligonucleotide
  Antisense strand to SEQ ID NO: 2529678
aucauaaacacuggucuga

SEQ ID NO: 2529680 - RNA, 19 nt, Artificial Sequence
  Description of Artificial Sequence: Synthetic oligonucleotide
  Sense strand starting at position 3015 of SEQ ID NO: 1888353
ugucucauuccuuggaaac

SEQ ID NO: 2529681 - RNA, 19 nt, Artificial Sequence
  Description of Artificial Sequence: Synthetic oligonucleotide
  Antisense strand to SEQ ID NO: 2529680
guuuccaaggaaugagaca

SEQ ID NO: 2529682 - RNA, 19 nt, Artificial Sequence
  Description of Artificial Sequence: Synthetic oligonucleotide
  Sense strand starting at position 1257 of SEQ ID NO: 1888353
uuucuaucccaauggaugu

SEQ ID NO: 2529683 - RNA, 19 nt, Artificial Sequence
  Description of Artificial Sequence: Synthetic oligonucleotide
  Antisense strand to SEQ ID NO: 2529682
acauccauugggauagaaa

SEQ ID NO: 2529684 - RNA, 19 nt, Artificial Sequence
  Description of Artificial Sequence: Synthetic oligonucleotide
  Sense strand starting at position 3616 of SEQ ID NO: 1888354
gaguuagaaucuccauagg

SEQ ID NO: 2529685 - RNA, 19 nt, Artificial Sequence
  Description of Artificial Sequence: Synthetic oligonucleotide
  Antisense strand to SEQ ID NO: 2529684
ccuauggagauucuaacuc

SEQ ID NO: 2529686 - RNA, 19 nt, Artificial Sequence
  Description of Artificial Sequence: Synthetic oligonucleotide
  Sense strand starting at position 2537 of SEQ ID NO: 1888354
guggucacgagauaugaga

SEQ ID NO: 2529687 - RNA, 19 nt, Artificial Sequence
  Description of Artificial Sequence: Synthetic oligonucleotide
  Antisense strand to SEQ ID NO: 2529686
ucucauaucucgugaccac

SEQ ID NO: 2529688 - RNA, 19 nt, Artificial Sequence
  Description of Artificial Sequence: Synthetic oligonucleotide
  Sense strand starting at position 3798 of SEQ ID NO: 1888354
ucagaaggcucaucacaaa

SEQ ID NO: 2529689 - RNA, 19 nt, Artificial Sequence
  Description of Artificial Sequence: Synthetic oligonucleotide
  Antisense strand to SEQ ID NO: 2529688
uuugugaugagccuucuga

SEQ ID NO: 2529690 - RNA, 19 nt, Artificial Sequence
  Description of Artificial Sequence: Synthetic oligonucleotide
  Sense strand starting at position 3036 of SEQ ID NO: 1888354
ucuaauagccaugaaagca

SEQ ID NO: 2529691 - RNA, 19 nt, Artificial Sequence
  Description of Artificial Sequence: Synthetic oligonucleotide
  Antisense strand to SEQ ID NO: 2529690
ugcuuucauggcuauuaga

SEQ ID NO: 2529692 - RNA, 19 nt, Artificial Sequence
  Description of Artificial Sequence: Synthetic oligonucleotide
  Sense strand starting at position 1646 of SEQ ID NO: 1888354
ugacaauugagugauuguu

SEQ ID NO: 2529693 - RNA, 19 nt, Artificial Sequence
  Description of Artificial Sequence: Synthetic oligonucleotide
  Antisense strand to SEQ ID NO: 2529692
aacaaucacucaauuguca

SEQ ID NO: 2529694 - RNA, 19 nt, Artificial Sequence
  Description of Artificial Sequence: Synthetic oligonucleotide
  Sense strand starting at position 2530 of SEQ ID NO: 1888354
gaauuauguggucacgaga

SEQ ID NO: 2529695 - RNA, 19 nt, Artificial Sequence
  Description of Artificial Sequence: Synthetic oligonucleotide
  Antisense strand to SEQ ID NO: 2529694
ucucgugaccacauaauuc

SEQ ID NO: 2529696 - RNA, 19 nt, Artificial Sequence
  Description of Artificial Sequence: Synthetic oligonucleotide
  Sense strand starting at position 26 of SEQ ID NO: 1888354
agaauuuccucauagaaug

SEQ ID NO: 2529697 - RNA, 19 nt, Artificial Sequence
  Description of Artificial Sequence: Synthetic oligonucleotide
  Antisense strand to SEQ ID NO: 2529696
cauucuaugaggaaauucu

SEQ ID NO: 2529698 - RNA, 19 nt, Artificial Sequence
  Description of Artificial Sequence: Synthetic oligonucleotide
  Sense strand starting at position 2437 of SEQ ID NO: 1888354
gagugaugaaguggaaagu

SEQ ID NO: 2529699 - RNA, 19 nt, Artificial Sequence
  Description of Artificial Sequence: Synthetic oligonucleotide
  Antisense strand to SEQ ID NO: 2529698
acuuuccacuucaucacuc

SEQ ID NO: 2529700 - RNA, 19 nt, Artificial Sequence
  Description of Artificial Sequence: Synthetic oligonucleotide
  Sense strand starting at position 633 of SEQ ID NO: 1888354
augaccucaugucugaaau

SEQ ID NO: 2529701 - RNA, 19 nt, Artificial Sequence
  Description of Artificial Sequence: Synthetic oligonucleotide
  Antisense strand to SEQ ID NO: 2529700
auuucagacaugaggucau

SEQ ID NO: 2529702 - RNA, 19 nt, Artificial Sequence
  Description of Artificial Sequence: Synthetic oligonucleotide
  Sense strand starting at position 3659 of SEQ ID NO: 1888354
gggucugcccauuauagga

SEQ ID NO: 2529703 - RNA, 19 nt, Artificial Sequence
  Description of Artificial Sequence: Synthetic oligonucleotide
  Antisense strand to SEQ ID NO: 2529702
uccuauaaugggcagaccc

SEQ ID NO: 2529704 - RNA, 19 nt, Artificial Sequence
  Description of Artificial Sequence: Synthetic oligonucleotide
  Sense strand starting at position 2904 of SEQ ID NO: 1888354
uguagugucacugacaaca

SEQ ID NO: 2529705 - RNA, 19 nt, Artificial Sequence
  Description of Artificial Sequence: Synthetic oligonucleotide
  Antisense strand to SEQ ID NO: 2529704
uguugucagugacacuaca

SEQ ID NO: 2529706 - RNA, 19 nt, Artificial Sequence
  Description of Artificial Sequence: Synthetic oligonucleotide
  Sense strand starting at position 2375 of SEQ ID NO: 1888354
aggaauuaaugccuccauu

SEQ ID NO: 2529707 - RNA, 19 nt, Artificial Sequence
  Description of Artificial Sequence: Synthetic oligonucleotide
  Antisense strand to SEQ ID NO: 2529706
aauggaggcauuaauuccu

SEQ ID NO: 2529708 - RNA, 19 nt, Artificial Sequence
  Description of Artificial Sequence: Synthetic oligonucleotide
  Sense strand starting at position 2799 of SEQ ID NO: 1888354
ggaauauuacagugggcac

SEQ ID NO: 2529709 - RNA, 19 nt, Artificial Sequence
  Description of Artificial Sequence: Synthetic oligonucleotide
  Antisense strand to SEQ ID NO: 2529708
gugcccacuguaauauucc

SEQ ID NO: 2529710 - RNA, 19 nt, Artificial Sequence
  Description of Artificial Sequence: Synthetic oligonucleotide
  Sense strand starting at position 2533 of SEQ ID NO: 1888354
uuauguggucacgagauau

SEQ ID NO: 2529711 - RNA, 19 nt, Artificial Sequence
  Description of Artificial Sequence: Synthetic oligonucleotide
  Antisense strand to SEQ ID NO: 2529710
auaucucgugaccacauaa

SEQ ID NO: 2529712 - RNA, 19 nt, Artificial Sequence
  Description of Artificial Sequence: Synthetic oligonucleotide
  Sense strand starting at position 1499 of SEQ ID NO: 1888354
aguguuaaaggacggaauu

SEQ ID NO: 2529713 - RNA, 19 nt, Artificial Sequence
  Description of Artificial Sequence: Synthetic oligonucleotide
  Antisense strand to SEQ ID NO: 2529712
aauuccguccuuuaacacu

SEQ ID NO: 2529714 - RNA, 19 nt, Artificial Sequence
  Description of Artificial Sequence: Synthetic oligonucleotide
  Sense strand starting at position 2078 of SEQ ID NO: 1888354
aacccuuugggugguaaga

SEQ ID NO: 2529715 - RNA, 19 nt, Artificial Sequence
  Description of Artificial Sequence: Synthetic oligonucleotide
  Antisense strand to SEQ ID NO: 2529714
ucuuaccacccaaaggguu

SEQ ID NO: 2529716 - RNA, 19 nt, Artificial Sequence
  Description of Artificial Sequence: Synthetic oligonucleotide
  Sense strand starting at position 634 of SEQ ID NO: 1888354
ugaccucaugucugaaauu

SEQ ID NO: 2529717 - RNA, 19 nt, Artificial Sequence
  Description of Artificial Sequence: Synthetic oligonucleotide
  Antisense strand to SEQ ID NO: 2529716
aauuucagacaugagguca

SEQ ID NO: 2529718 - RNA, 19 nt, Artificial Sequence
  Description of Artificial Sequence: Synthetic oligonucleotide
  Sense strand starting at position 3545 of SEQ ID NO: 1888354
guggaugguuaaguaucaa

SEQ ID NO: 2529719 - RNA, 19 nt, Artificial Sequence
  Description of Artificial Sequence: Synthetic oligonucleotide
  Antisense strand to SEQ ID NO: 2529718
uugauacuuaaccauccac

SEQ ID NO: 2529720 - RNA, 19 nt, Artificial Sequence
  Description of Artificial Sequence: Synthetic oligonucleotide
  Sense strand starting at position 3541 of SEQ ID NO: 1888354
cacaguggaugguuaagua

SEQ ID NO: 2529721 - RNA, 19 nt, Artificial Sequence
  Description of Artificial Sequence: Synthetic oligonucleotide
  Antisense strand to SEQ ID NO: 2529720
uacuuaaccauccacugug

SEQ ID NO: 2529722 - RNA, 19 nt, Artificial Sequence
  Description of Artificial Sequence: Synthetic oligonucleotide
  Sense strand starting at position 3780 of SEQ ID NO: 1888354
uguugacuuaguuggaaau

SEQ ID NO: 2529723 - RNA, 19 nt, Artificial Sequence
  Description of Artificial Sequence: Synthetic oligonucleotide
  Antisense strand to SEQ ID NO: 2529722
auuuccaacuaagucaaca

SEQ ID NO: 2529724 - RNA, 19 nt, Artificial Sequence
  Description of Artificial Sequence: Synthetic oligonucleotide
  Sense strand starting at position 1645 of SEQ ID NO: 1888354
cugacaauugagugauugu

SEQ ID NO: 2529725 - RNA, 19 nt, Artificial Sequence
  Description of Artificial Sequence: Synthetic oligonucleotide
  Antisense strand to SEQ ID NO: 2529724
acaaucacucaauugucag

SEQ ID NO: 2529726 - RNA, 19 nt, Artificial Sequence
  Description of Artificial Sequence: Synthetic oligonucleotide
  Sense strand starting at position 3781 of SEQ ID NO: 1888354
guugacuuaguuggaaauc

SEQ ID NO: 2529727 - RNA, 19 nt, Artificial Sequence
  Description of Artificial Sequence: Synthetic oligonucleotide
  Antisense strand to SEQ ID NO: 2529726
gauuuccaacuaagucaac

SEQ ID NO: 2529728 - RNA, 19 nt, Artificial Sequence
  Description of Artificial Sequence: Synthetic oligonucleotide
  Sense strand starting at position 3464 of SEQ ID NO: 1888354
auaagacuuuaguuguacu

SEQ ID NO: 2529729 - RNA, 19 nt, Artificial Sequence
  Description of Artificial Sequence: Synthetic oligonucleotide
  Antisense strand to SEQ ID NO: 2529728
aguacaacuaaagucuuau

SEQ ID NO: 2529730 - RNA, 19 nt, Artificial Sequence
  Description of Artificial Sequence: Synthetic oligonucleotide
  Sense strand starting at position 1004 of SEQ ID NO: 1888354
cucagcacacagugaaauu

SEQ ID NO: 2529731 - RNA, 19 nt, Artificial Sequence
  Description of Artificial Sequence: Synthetic oligonucleotide
  Antisense strand to SEQ ID NO: 2529730
aauuucacugugugcugag

SEQ ID NO: 2529732 - RNA, 19 nt, Artificial Sequence
  Description of Artificial Sequence: Synthetic oligonucleotide
  Sense strand starting at position 2529 of SEQ ID NO: 1888354
ggaauuauguggucacgag

SEQ ID NO: 2529733 - RNA, 19 nt, Artificial Sequence
  Description of Artificial Sequence: Synthetic oligonucleotide
  Antisense strand to SEQ ID NO: 2529732
cucgugaccacauaauucc

SEQ ID NO: 2529734 - RNA, 19 nt, Artificial Sequence
  Description of Artificial Sequence: Synthetic oligonucleotide
  Sense strand starting at position 1648 of SEQ ID NO: 1888354
acaauugagugauuguucu

SEQ ID NO: 2529735 - RNA, 19 nt, Artificial Sequence
  Description of Artificial Sequence: Synthetic oligonucleotide
  Antisense strand to SEQ ID NO: 2529734
agaacaaucacucaauugu

SEQ ID NO: 2529736 - RNA, 19 nt, Artificial Sequence
  Description of Artificial Sequence: Synthetic oligonucleotide
  Sense strand starting at position 3347 of SEQ ID NO: 1888354
ucuagcugucgauagacau

SEQ ID NO: 2529737 - RNA, 19 nt, Artificial Sequence
  Description of Artificial Sequence: Synthetic oligonucleotide
  Antisense strand to SEQ ID NO: 2529736
augucuaucgacagcuaga

SEQ ID NO: 2529738 - RNA, 19 nt, Artificial Sequence
  Description of Artificial Sequence: Synthetic oligonucleotide
  Sense strand starting at position 3199 of SEQ ID NO: 1888354
aaagccuuugguuggaauu

SEQ ID NO: 2529739 - RNA, 19 nt, Artificial Sequence
  Description of Artificial Sequence: Synthetic oligonucleotide
  Antisense strand to SEQ ID NO: 2529738
aauuccaaccaaaggcuuu

SEQ ID NO: 2529740 - RNA, 19 nt, Artificial Sequence
  Description of Artificial Sequence: Synthetic oligonucleotide
  Sense strand starting at position 3778 of SEQ ID NO: 1888354
aguguugacuuaguuggaa

SEQ ID NO: 2529741 - RNA, 19 nt, Artificial Sequence
  Description of Artificial Sequence: Synthetic oligonucleotide
  Antisense strand to SEQ ID NO: 2529740
uuccaacuaagucaacacu

SEQ ID NO: 2529742 - RNA, 19 nt, Artificial Sequence
  Description of Artificial Sequence: Synthetic oligonucleotide
  Sense strand starting at position 3035 of SEQ ID NO: 1888354
uucuaauagccaugaaagc

SEQ ID NO: 2529743 - RNA, 19 nt, Artificial Sequence
  Description of Artificial Sequence: Synthetic oligonucleotide
  Antisense strand to SEQ ID NO: 2529742
gcuuucauggcuauuagaa

SEQ ID NO: 2529744 - RNA, 19 nt, Artificial Sequence
  Description of Artificial Sequence: Synthetic oligonucleotide
  Sense strand starting at position 2106 of SEQ ID NO: 1888354
ccaagaaaggcaugugguu

SEQ ID NO: 2529745 - RNA, 19 nt, Artificial Sequence
  Description of Artificial Sequence: Synthetic oligonucleotide
  Antisense strand to SEQ ID NO: 2529744
aaccacaugccuuucuugg

SEQ ID NO: 2529746 - RNA, 19 nt, Artificial Sequence
  Description of Artificial Sequence: Synthetic oligonucleotide
  Sense strand starting at position 2208 of SEQ ID NO: 1888354
aacauuagccguuaaagca

SEQ ID NO: 2529747 - RNA, 19 nt, Artificial Sequence
  Description of Artificial Sequence: Synthetic oligonucleotide
  Antisense strand to SEQ ID NO: 2529746
ugcuuuaacggcuaauguu

SEQ ID NO: 2529748 - RNA, 19 nt, Artificial Sequence
  Description of Artificial Sequence: Synthetic oligonucleotide
  Sense strand starting at position 678 of SEQ ID NO: 1888354
gcuagcugcuauuuguaau

SEQ ID NO: 2529749 - RNA, 19 nt, Artificial Sequence
  Description of Artificial Sequence: Synthetic oligonucleotide
  Antisense strand to SEQ ID NO: 2529748
auuacaaauagcagcuagc

SEQ ID NO: 2529750 - RNA, 19 nt, Artificial Sequence
  Description of Artificial Sequence: Synthetic oligonucleotide
  Sense strand starting at position 2902 of SEQ ID NO: 1888354
auuguagugucacugacaa

SEQ ID NO: 2529751 - RNA, 19 nt, Artificial Sequence
  Description of Artificial Sequence: Synthetic oligonucleotide
  Antisense strand to SEQ ID NO: 2529750
uugucagugacacuacaau

SEQ ID NO: 2529752 - RNA, 19 nt, Artificial Sequence
  Description of Artificial Sequence: Synthetic oligonucleotide
  Sense strand starting at position 1398 of SEQ ID NO: 1888354
aagggaaugcuaugcuucu

SEQ ID NO: 2529753 - RNA, 19 nt, Artificial Sequence
  Description of Artificial Sequence: Synthetic oligonucleotide
  Antisense strand to SEQ ID NO: 2529752
agaagcauagcauucccuu

SEQ ID NO: 2529754 - RNA, 19 nt, Artificial Sequence
  Description of Artificial Sequence: Synthetic oligonucleotide
  Sense strand starting at position 242 of SEQ ID NO: 1888354
uacuauaguguguaugcaa

SEQ ID NO: 2529755 - RNA, 19 nt, Artificial Sequence
  Description of Artificial Sequence: Synthetic oligonucleotide
  Antisense strand to SEQ ID NO: 2529754
uugcauacacacuauagua

SEQ ID NO: 2529756 - RNA, 19 nt, Artificial Sequence
  Description of Artificial Sequence: Synthetic oligonucleotide
  Sense strand starting at position 3412 of SEQ ID NO: 1888354
gacuuuaaguagguguuua

SEQ ID NO: 2529757 - RNA, 19 nt, Artificial Sequence
  Description of Artificial Sequence: Synthetic oligonucleotide
  Antisense strand to SEQ ID NO: 2529756
uaaacaccuacuuaaaguc

SEQ ID NO: 2529758 - RNA, 19 nt, Artificial Sequence
  Description of Artificial Sequence: Synthetic oligonucleotide
  Sense strand starting at position 1452 of SEQ ID NO: 1888354
uuaaguggacucugucuau

SEQ ID NO: 2529759 - RNA, 19 nt, Artificial Sequence
  Description of Artificial Sequence: Synthetic oligonucleotide
  Antisense strand to SEQ ID NO: 2529758
auagacagaguccacuuaa

SEQ ID NO: 2529760 - RNA, 19 nt, Artificial Sequence
  Description of Artificial Sequence: Synthetic oligonucleotide
  Sense strand starting at position 1108 of SEQ ID NO: 1888354
aucguucugagaugaagca

SEQ ID NO: 2529761 - RNA, 19 nt, Artificial Sequence
  Description of Artificial Sequence: Synthetic oligonucleotide
  Antisense strand to SEQ ID NO: 2529760
ugcuucaucucagaacgau

SEQ ID NO: 2529762 - RNA, 19 nt, Artificial Sequence
  Description of Artificial Sequence: Synthetic oligonucleotide
  Sense strand starting at position 2051 of SEQ ID NO: 1888354
aaggaauuguugguugcua

SEQ ID NO: 2529763 - RNA, 19 nt, Artificial Sequence
  Description of Artificial Sequence: Synthetic oligonucleotide
  Antisense strand to SEQ ID NO: 2529762
uagcaaccaacaauuccuu

SEQ ID NO: 2529764 - RNA, 19 nt, Artificial Sequence
  Description of Artificial Sequence: Synthetic oligonucleotide
  Sense strand starting at position 2564 of SEQ ID NO: 1888356
agcgcugagccauuguaca

SEQ ID NO: 2529765 - RNA, 19 nt, Artificial Sequence
  Description of Artificial Sequence: Synthetic oligonucleotide
  Antisense strand to SEQ ID NO: 2529764
uguacaauggcucagcgcu

SEQ ID NO: 2529766 - RNA, 19 nt, Artificial Sequence
  Description of Artificial Sequence: Synthetic oligonucleotide
  Sense strand starting at position 2457 of SEQ ID NO: 1888356
gagacacuuggcuacuuau

SEQ ID NO: 2529767 - RNA, 19 nt, Artificial Sequence
  Description of Artificial Sequence: Synthetic oligonucleotide
  Antisense strand to SEQ ID NO: 2529766
auaaguagccaagugucuc

SEQ ID NO: 2529768 - RNA, 19 nt, Artificial Sequence
  Description of Artificial Sequence: Synthetic oligonucleotide
  Sense strand starting at position 565 of SEQ ID NO: 1888356
gagagauuccaauggcauc

SEQ ID NO: 2529769 - RNA, 19 nt, Artificial Sequence
  Description of Artificial Sequence: Synthetic oligonucleotide
  Antisense strand to SEQ ID NO: 2529768
gaugccauuggaaucucuc

SEQ ID NO: 2529770 - RNA, 19 nt, Artificial Sequence
  Description of Artificial Sequence: Synthetic oligonucleotide
  Sense strand starting at position 698 of SEQ ID NO: 1888356
accagagcaguuggagaau

SEQ ID NO: 2529771 - RNA, 19 nt, Artificial Sequence
  Description of Artificial Sequence: Synthetic oligonucleotide
  Antisense strand to SEQ ID NO: 2529770
auucuccaacugcucuggu

SEQ ID NO: 2529772 - RNA, 19 nt, Artificial Sequence
  Description of Artificial Sequence: Synthetic oligonucleotide
  Sense strand starting at position 1100 of SEQ ID NO: 1888356
uuugcagauagaugggauu

SEQ ID NO: 2529773 - RNA, 19 nt, Artificial Sequence
  Description of Artificial Sequence: Synthetic oligonucleotide
  Antisense strand to SEQ ID NO: 2529772
aaucccaucuaucugcaaa

SEQ ID NO: 2529774 - RNA, 19 nt, Artificial Sequence
  Description of Artificial Sequence: Synthetic oligonucleotide
  Sense strand starting at position 2456 of SEQ ID NO: 1888356
ggagacacuuggcuacuua

SEQ ID NO: 2529775 - RNA, 19 nt, Artificial Sequence
  Description of Artificial Sequence: Synthetic oligonucleotide
  Antisense strand to SEQ ID NO: 2529774
uaaguagccaagugucucc

SEQ ID NO: 2529776 - RNA, 19 nt, Artificial Sequence
  Description of Artificial Sequence: Synthetic oligonucleotide
  Sense strand starting at position 3972 of SEQ ID NO: 1888356
ggaauugguguuggaccaa

SEQ ID NO: 2529777 - RNA, 19 nt, Artificial Sequence
  Description of Artificial Sequence: Synthetic oligonucleotide
  Antisense strand to SEQ ID NO: 2529776
uugguccaacaccaauucc

SEQ ID NO: 2529778 - RNA, 19 nt, Artificial Sequence
  Description of Artificial Sequence: Synthetic oligonucleotide
  Sense strand starting at position 349 of SEQ ID NO: 1888356
gggagcagcaucugacaaa

SEQ ID NO: 2529779 - RNA, 19 nt, Artificial Sequence
  Description of Artificial Sequence: Synthetic oligonucleotide
  Antisense strand to SEQ ID NO: 2529778
uuugucagaugcugcuccc

SEQ ID NO: 2529780 - RNA, 19 nt, Artificial Sequence
  Description of Artificial Sequence: Synthetic oligonucleotide
  Sense strand starting at position 2230 of SEQ ID NO: 1888356
gacuuuagugaggguggau

SEQ ID NO: 2529781 - RNA, 19 nt, Artificial Sequence
  Description of Artificial Sequence: Synthetic oligonucleotide
  Antisense strand to SEQ ID NO: 2529780
auccacccucacuaaaguc

SEQ ID NO: 2529782 - RNA, 19 nt, Artificial Sequence
  Description of Artificial Sequence: Synthetic oligonucleotide
  Sense strand starting at position 835 of SEQ ID NO: 1888356
gggccugguguugagaaca

SEQ ID NO: 2529783 - RNA, 19 nt, Artificial Sequence
  Description of Artificial Sequence: Synthetic oligonucleotide
  Antisense strand to SEQ ID NO: 2529782
uguucucaacaccaggccc

SEQ ID NO: 2529784 - RNA, 19 nt, Artificial Sequence
  Description of Artificial Sequence: Synthetic oligonucleotide
  Sense strand starting at position 3011 of SEQ ID NO: 1888356
ccaggacaucagugcaaca

SEQ ID NO: 2529785 - RNA, 19 nt, Artificial Sequence
  Description of Artificial Sequence: Synthetic oligonucleotide
  Antisense strand to SEQ ID NO: 2529784
uguugcacugauguccugg

SEQ ID NO: 2529786 - RNA, 19 nt, Artificial Sequence
  Description of Artificial Sequence: Synthetic oligonucleotide
  Sense strand starting at position 905 of SEQ ID NO: 1888356
agcucugucccagacggaa

SEQ ID NO: 2529787 - RNA, 19 nt, Artificial Sequence
  Description of Artificial Sequence: Synthetic oligonucleotide
  Antisense strand to SEQ ID NO: 2529786
uuccgucugggacagagcu

SEQ ID NO: 2529788 - RNA, 19 nt, Artificial Sequence
  Description of Artificial Sequence: Synthetic oligonucleotide
  Sense strand starting at position 1007 of SEQ ID NO: 1888356
agugcaguuggaugaugaa

SEQ ID NO: 2529789 - RNA, 19 nt, Artificial Sequence
  Description of Artificial Sequence: Synthetic oligonucleotide
  Antisense strand to SEQ ID NO: 2529788
uucaucauccaacugcacu

SEQ ID NO: 2529790 - RNA, 19 nt, Artificial Sequence
  Description of Artificial Sequence: Synthetic oligonucleotide
  Sense strand starting at position 2784 of SEQ ID NO: 1888356
gcaccaugccuccaagagu

SEQ ID NO: 2529791 - RNA, 19 nt, Artificial Sequence
  Description of Artificial Sequence: Synthetic oligonucleotide
  Antisense strand to SEQ ID NO: 2529790
acucuuggaggcauggugc

SEQ ID NO: 2529792 - RNA, 19 nt, Artificial Sequence
  Description of Artificial Sequence: Synthetic oligonucleotide
  Sense strand starting at position 907 of SEQ ID NO: 1888356
cucugucccagacggaauu

SEQ ID NO: 2529793 - RNA, 19 nt, Artificial Sequence
  Description of Artificial Sequence: Synthetic oligonucleotide
  Antisense strand to SEQ ID NO: 2529792
aauuccgucugggacagag

SEQ ID NO: 2529794 - RNA, 19 nt, Artificial Sequence
  Description of Artificial Sequence: Synthetic oligonucleotide
  Sense strand starting at position 3238 of SEQ ID NO: 1888356
cucaguguggcugagguua

SEQ ID NO: 2529795 - RNA, 19 nt, Artificial Sequence
  Description of Artificial Sequence: Synthetic oligonucleotide
  Antisense strand to SEQ ID NO: 2529794
uaaccucagccacacugag

SEQ ID NO: 2529796 - RNA, 19 nt, Artificial Sequence
  Description of Artificial Sequence: Synthetic oligonucleotide
  Sense strand starting at position 3108 of SEQ ID NO: 1888356
ccuguuuguucucuggaac

SEQ ID NO: 2529797 - RNA, 19 nt, Artificial Sequence
  Description of Artificial Sequence: Synthetic oligonucleotide
  Antisense strand to SEQ ID NO: 2529796
guuccagagaacaaacagg

SEQ ID NO: 2529798 - RNA, 19 nt, Artificial Sequence
  Description of Artificial Sequence: Synthetic oligonucleotide
  Sense strand starting at position 3107 of SEQ ID NO: 1888356
cccuguuuguucucuggaa

SEQ ID NO: 2529799 - RNA, 19 nt, Artificial Sequence
  Description of Artificial Sequence: Synthetic oligonucleotide
  Antisense strand to SEQ ID NO: 2529798
uuccagagaacaaacaggg

SEQ ID NO: 2529800 - RNA, 19 nt, Artificial Sequence
  Description of Artificial Sequence: Synthetic oligonucleotide
  Sense strand starting at position 1103 of SEQ ID NO: 1888356
gcagauagaugggauuaag

SEQ ID NO: 2529801 - RNA, 19 nt, Artificial Sequence
  Description of Artificial Sequence: Synthetic oligonucleotide
  Antisense strand to SEQ ID NO: 2529800
cuuaaucccaucuaucugc

SEQ ID NO: 2529802 - RNA, 19 nt, Artificial Sequence
  Description of Artificial Sequence: Synthetic oligonucleotide
  Sense strand starting at position 2793 of SEQ ID NO: 1888356
cuccaagagucagagaagu

SEQ ID NO: 2529803 - RNA, 19 nt, Artificial Sequence
  Description of Artificial Sequence: Synthetic oligonucleotide
  Antisense strand to SEQ ID NO: 2529802
acuucucugacucuuggag

SEQ ID NO: 2529804 - RNA, 19 nt, Artificial Sequence
  Description of Artificial Sequence: Synthetic oligonucleotide
  Sense strand starting at position 3287 of SEQ ID NO: 1888356
ccaauaagcugaugagaag

SEQ ID NO: 2529805 - RNA, 19 nt, Artificial Sequence
  Description of Artificial Sequence: Synthetic oligonucleotide
  Antisense strand to SEQ ID NO: 2529804
cuucucaucagcuuauugg

SEQ ID NO: 2529806 - RNA, 19 nt, Artificial Sequence
  Description of Artificial Sequence: Synthetic oligonucleotide
  Sense strand starting at position 1136 of SEQ ID NO: 1888356
augaaagccuccuggauga

SEQ ID NO: 2529807 - RNA, 19 nt, Artificial Sequence
  Description of Artificial Sequence: Synthetic oligonucleotide
  Antisense strand to SEQ ID NO: 2529806
ucauccaggaggcuuucau

SEQ ID NO: 2529808 - RNA, 19 nt, Artificial Sequence
  Description of Artificial Sequence: Synthetic oligonucleotide
  Sense strand starting at position 2229 of SEQ ID NO: 1888356
ggacuuuagugagggugga

SEQ ID NO: 2529809 - RNA, 19 nt, Artificial Sequence
  Description of Artificial Sequence: Synthetic oligonucleotide
  Antisense strand to SEQ ID NO: 2529808
uccacccucacuaaagucc

SEQ ID NO: 2529810 - RNA, 19 nt, Artificial Sequence
  Description of Artificial Sequence: Synthetic oligonucleotide
  Sense strand starting at position 3968 of SEQ ID NO: 1888356
acguggaauugguguugga

SEQ ID NO: 2529811 - RNA, 19 nt, Artificial Sequence
  Description of Artificial Sequence: Synthetic oligonucleotide
  Antisense strand to SEQ ID NO: 2529810
uccaacaccaauuccacgu

SEQ ID NO: 2529812 - RNA, 19 nt, Artificial Sequence
  Description of Artificial Sequence: Synthetic oligonucleotide
  Sense strand starting at position 1409 of SEQ ID NO: 1888356
gcaguauccugucauggca

SEQ ID NO: 2529813 - RNA, 19 nt, Artificial Sequence
  Description of Artificial Sequence: Synthetic oligonucleotide
  Antisense strand to SEQ ID NO: 2529812
ugccaugacaggauacugc

SEQ ID NO: 2529814 - RNA, 19 nt, Artificial Sequence
  Description of Artificial Sequence: Synthetic oligonucleotide
  Sense strand starting at position 3240 of SEQ ID NO: 1888356
caguguggcugagguuaau

SEQ ID NO: 2529815 - RNA, 19 nt, Artificial Sequence
  Description of Artificial Sequence: Synthetic oligonucleotide
  Antisense strand to SEQ ID NO: 2529814
auuaaccucagccacacug

SEQ ID NO: 2529816 - RNA, 19 nt, Artificial Sequence
  Description of Artificial Sequence: Synthetic oligonucleotide
  Sense strand starting at position 1406 of SEQ ID NO: 1888356
caugcaguauccugucaug

SEQ ID NO: 2529817 - RNA, 19 nt, Artificial Sequence
  Description of Artificial Sequence: Synthetic oligonucleotide
  Antisense strand to SEQ ID NO: 2529816
caugacaggauacugcaug

SEQ ID NO: 2529818 - RNA, 19 nt, Artificial Sequence
  Description of Artificial Sequence: Synthetic oligonucleotide
  Sense strand starting at position 2563 of SEQ ID NO: 1888355
agcgcugagccauuguaca

SEQ ID NO: 2529819 - RNA, 19 nt, Artificial Sequence
  Description of Artificial Sequence: Synthetic oligonucleotide
  Antisense strand to SEQ ID NO: 2529818
uguacaauggcucagcgcu

SEQ ID NO: 2529820 - RNA, 19 nt, Artificial Sequence
  Description of Artificial Sequence: Synthetic oligonucleotide
  Sense strand starting at position 2456 of SEQ ID NO: 1888355
gagacacuuggcuacuuau

SEQ ID NO: 2529821 - RNA, 19 nt, Artificial Sequence
  Description of Artificial Sequence: Synthetic oligonucleotide
  Antisense strand to SEQ ID NO: 2529820
auaaguagccaagugucuc

SEQ ID NO: 2529822 - RNA, 19 nt, Artificial Sequence
  Description of Artificial Sequence: Synthetic oligonucleotide
  Sense strand starting at position 564 of SEQ ID NO: 1888355
gagagauuccaauggcauc

SEQ ID NO: 2529823 - RNA, 19 nt, Artificial Sequence
  Description of Artificial Sequence: Synthetic oligonucleotide
  Antisense strand to SEQ ID NO: 2529822
gaugccauuggaaucucuc

SEQ ID NO: 2529824 - RNA, 19 nt, Artificial Sequence
  Description of Artificial Sequence: Synthetic oligonucleotide
  Sense strand starting at position 1863 of SEQ ID NO: 1888355
cgagguuucccgcugcuga

SEQ ID NO: 2529825 - RNA, 19 nt, Artificial Sequence
  Description of Artificial Sequence: Synthetic oligonucleotide
  Antisense strand to SEQ ID NO: 2529824
ucagcagcgggaaaccucg

SEQ ID NO: 2529826 - RNA, 19 nt, Artificial Sequence
  Description of Artificial Sequence: Synthetic oligonucleotide
  Sense strand starting at position 697 of SEQ ID NO: 1888355
accagagcaguuggagaau

SEQ ID NO: 2529827 - RNA, 19 nt, Artificial Sequence
  Description of Artificial Sequence: Synthetic oligonucleotide
  Antisense strand to SEQ ID NO: 2529826
auucuccaacugcucuggu

SEQ ID NO: 2529828 - RNA, 19 nt, Artificial Sequence
  Description of Artificial Sequence: Synthetic oligonucleotide
  Sense strand starting at position 1099 of SEQ ID NO: 1888355
uuugcagauagaugggauu

SEQ ID NO: 2529829 - RNA, 19 nt, Artificial Sequence
  Description of Artificial Sequence: Synthetic oligonucleotide
  Antisense strand to SEQ ID NO: 2529828
aaucccaucuaucugcaaa

SEQ ID NO: 2529830 - RNA, 19 nt, Artificial Sequence
  Description of Artificial Sequence: Synthetic oligonucleotide
  Sense strand starting at position 2455 of SEQ ID NO: 1888355
ggagacacuuggcuacuua

SEQ ID NO: 2529831 - RNA, 19 nt, Artificial Sequence
  Description of Artificial Sequence: Synthetic oligonucleotide
  Antisense strand to SEQ ID NO: 2529830
uaaguagccaagugucucc

SEQ ID NO: 2529832 - RNA, 19 nt, Artificial Sequence
  Description of Artificial Sequence: Synthetic oligonucleotide
  Sense strand starting at position 3971 of SEQ ID NO: 1888355
ggaauugguguuggaccaa

SEQ ID NO: 2529833 - RNA, 19 nt, Artificial Sequence
  Description of Artificial Sequence: Synthetic oligonucleotide
  Antisense strand to SEQ ID NO: 2529832
uugguccaacaccaauucc

SEQ ID NO: 2529834 - RNA, 19 nt, Artificial Sequence
  Description of Artificial Sequence: Synthetic oligonucleotide
  Sense strand starting at position 348 of SEQ ID NO: 1888355
gggagcagcaucugacaaa

SEQ ID NO: 2529835 - RNA, 19 nt, Artificial Sequence
  Description of Artificial Sequence: Synthetic oligonucleotide
  Antisense strand to SEQ ID NO: 2529834
uuugucagaugcugcuccc

SEQ ID NO: 2529836 - RNA, 19 nt, Artificial Sequence
  Description of Artificial Sequence: Synthetic oligonucleotide
  Sense strand starting at position 2229 of SEQ ID NO: 1888355
gacuuuagugaggguggau

SEQ ID NO: 2529837 - RNA, 19 nt, Artificial Sequence
  Description of Artificial Sequence: Synthetic oligonucleotide
  Antisense strand to SEQ ID NO: 2529836
auccacccucacuaaaguc

SEQ ID NO: 2529838 - RNA, 19 nt, Artificial Sequence
  Description of Artificial Sequence: Synthetic oligonucleotide
  Sense strand starting at position 834 of SEQ ID NO: 1888355
gggccugguguugagaaca

SEQ ID NO: 2529839 - RNA, 19 nt, Artificial Sequence
  Description of Artificial Sequence: Synthetic oligonucleotide
  Antisense strand to SEQ ID NO: 2529838
uguucucaacaccaggccc

SEQ ID NO: 2529840 - RNA, 19 nt, Artificial Sequence
  Description of Artificial Sequence: Synthetic oligonucleotide
  Sense strand starting at position 3010 of SEQ ID NO: 1888355
ccaggacaucagugcaaca

SEQ ID NO: 2529841 - RNA, 19 nt, Artificial Sequence
  Description of Artificial Sequence: Synthetic oligonucleotide
  Antisense strand to SEQ ID NO: 2529840
uguugcacugauguccugg

SEQ ID NO: 2529842 - RNA, 19 nt, Artificial Sequence
  Description of Artificial Sequence: Synthetic oligonucleotide
  Sense strand starting at position 1006 of SEQ ID NO: 1888355
agugcaguuggaugaugaa

SEQ ID NO: 2529843 - RNA, 19 nt, Artificial Sequence
  Description of Artificial Sequence: Synthetic oligonucleotide
  Antisense strand to SEQ ID NO: 2529842
uucaucauccaacugcacu

SEQ ID NO: 2529844 - RNA, 19 nt, Artificial Sequence
  Description of Artificial Sequence: Synthetic oligonucleotide
  Sense strand starting at position 2783 of SEQ ID NO: 1888355
gcaccaugccuccaagagu

SEQ ID NO: 2529845 - RNA, 19 nt, Artificial Sequence
  Description of Artificial Sequence: Synthetic oligonucleotide
  Antisense strand to SEQ ID NO: 2529844
acucuuggaggcauggugc

SEQ ID NO: 2529846 - RNA, 19 nt, Artificial Sequence
  Description of Artificial Sequence: Synthetic oligonucleotide
  Sense strand starting at position 906 of SEQ ID NO: 1888355
cucugucccagacggaauu

SEQ ID NO: 2529847 - RNA, 19 nt, Artificial Sequence
  Description of Artificial Sequence: Synthetic oligonucleotide
  Antisense strand to SEQ ID NO: 2529846
aauuccgucugggacagag

SEQ ID NO: 2529848 - RNA, 19 nt, Artificial Sequence
  Description of Artificial Sequence: Synthetic oligonucleotide
  Sense strand starting at position 3237 of SEQ ID NO: 1888355
cucaguguggcugagguua

SEQ ID NO: 2529849 - RNA, 19 nt, Artificial Sequence
  Description of Artificial Sequence: Synthetic oligonucleotide
  Antisense strand to SEQ ID NO: 2529848
uaaccucagccacacugag

SEQ ID NO: 2529850 - RNA, 19 nt, Artificial Sequence
  Description of Artificial Sequence: Synthetic oligonucleotide
  Sense strand starting at position 3107 of SEQ ID NO: 1888355
ccuguuuguucucuggaac

SEQ ID NO: 2529851 - RNA, 19 nt, Artificial Sequence
  Description of Artificial Sequence: Synthetic oligonucleotide
  Antisense strand to SEQ ID NO: 2529850
guuccagagaacaaacagg

SEQ ID NO: 2529852 - RNA, 19 nt, Artificial Sequence
  Description of Artificial Sequence: Synthetic oligonucleotide
  Sense strand starting at position 3106 of SEQ ID NO: 1888355
cccuguuuguucucuggaa

SEQ ID NO: 2529853 - RNA, 19 nt, Artificial Sequence
  Description of Artificial Sequence: Synthetic oligonucleotide
  Antisense strand to SEQ ID NO: 2529852
uuccagagaacaaacaggg

SEQ ID NO: 2529854 - RNA, 19 nt, Artificial Sequence
  Description of Artificial Sequence: Synthetic oligonucleotide
  Sense strand starting at position 1102 of SEQ ID NO: 1888355
gcagauagaugggauuaag

SEQ ID NO: 2529855 - RNA, 19 nt, Artificial Sequence
  Description of Artificial Sequence: Synthetic oligonucleotide
  Antisense strand to SEQ ID NO: 2529854
cuuaaucccaucuaucugc

SEQ ID NO: 2529856 - RNA, 19 nt, Artificial Sequence
  Description of Artificial Sequence: Synthetic oligonucleotide
  Sense strand starting at position 1896 of SEQ ID NO: 1888355
ugcucagaguugucaugca

SEQ ID NO: 2529857 - RNA, 19 nt, Artificial Sequence
  Description of Artificial Sequence: Synthetic oligonucleotide
  Antisense strand to SEQ ID NO: 2529856
ugcaugacaacucugagca

SEQ ID NO: 2529858 - RNA, 19 nt, Artificial Sequence
  Description of Artificial Sequence: Synthetic oligonucleotide
  Sense strand starting at position 2792 of SEQ ID NO: 1888355
cuccaagagucagagaagu

SEQ ID NO: 2529859 - RNA, 19 nt, Artificial Sequence
  Description of Artificial Sequence: Synthetic oligonucleotide
  Antisense strand to SEQ ID NO: 2529858
acuucucugacucuuggag

SEQ ID NO: 2529860 - RNA, 19 nt, Artificial Sequence
  Description of Artificial Sequence: Synthetic oligonucleotide
  Sense strand starting at position 1850 of SEQ ID NO: 1888355
gguguuuguucaucgaggu

SEQ ID NO: 2529861 - RNA, 19 nt, Artificial Sequence
  Description of Artificial Sequence: Synthetic oligonucleotide
  Antisense strand to SEQ ID NO: 2529860
accucgaugaacaaacacc

SEQ ID NO: 2529862 - RNA, 19 nt, Artificial Sequence
  Description of Artificial Sequence: Synthetic oligonucleotide
  Sense strand starting at position 3286 of SEQ ID NO: 1888355
ccaauaagcugaugagaag

SEQ ID NO: 2529863 - RNA, 19 nt, Artificial Sequence
  Description of Artificial Sequence: Synthetic oligonucleotide
  Antisense strand to SEQ ID NO: 2529862
cuucucaucagcuuauugg

SEQ ID NO: 2529864 - RNA, 19 nt, Artificial Sequence
  Description of Artificial Sequence: Synthetic oligonucleotide
  Sense strand starting at position 1851 of SEQ ID NO: 1888355
guguuuguucaucgagguu

SEQ ID NO: 2529865 - RNA, 19 nt, Artificial Sequence
  Description of Artificial Sequence: Synthetic oligonucleotide
  Antisense strand to SEQ ID NO: 2529864
aaccucgaugaacaaacac

SEQ ID NO: 2529866 - RNA, 19 nt, Artificial Sequence
  Description of Artificial Sequence: Synthetic oligonucleotide
  Sense strand starting at position 1847 of SEQ ID NO: 1888355
cccgguguuuguucaucga

SEQ ID NO: 2529867 - RNA, 19 nt, Artificial Sequence
  Description of Artificial Sequence: Synthetic oligonucleotide
  Antisense strand to SEQ ID NO: 2529866
ucgaugaacaaacaccggg

SEQ ID NO: 2529868 - RNA, 19 nt, Artificial Sequence
  Description of Artificial Sequence: Synthetic oligonucleotide
  Sense strand starting at position 2228 of SEQ ID NO: 1888355
ggacuuuagugagggugga

SEQ ID NO: 2529869 - RNA, 19 nt, Artificial Sequence
  Description of Artificial Sequence: Synthetic oligonucleotide
  Antisense strand to SEQ ID NO: 2529868
uccacccucacuaaagucc

SEQ ID NO: 2529870 - RNA, 19 nt, Artificial Sequence
  Description of Artificial Sequence: Synthetic oligonucleotide
  Sense strand starting at position 1890 of SEQ ID NO: 1888355
uugacuugcucagaguugu

SEQ ID NO: 2529871 - RNA, 19 nt, Artificial Sequence
  Description of Artificial Sequence: Synthetic oligonucleotide
  Antisense strand to SEQ ID NO: 2529870
acaacucugagcaagucaa

SEQ ID NO: 2529872 - RNA, 19 nt, Artificial Sequence
  Description of Artificial Sequence: Synthetic oligonucleotide
  Sense strand starting at position 3967 of SEQ ID NO: 1888355
acguggaauugguguugga

SEQ ID NO: 2529873 - RNA, 19 nt, Artificial Sequence
  Description of Artificial Sequence: Synthetic oligonucleotide
  Antisense strand to SEQ ID NO: 2529872
uccaacaccaauuccacgu

SEQ ID NO: 2529874 - RNA, 19 nt, Artificial Sequence
  Description of Artificial Sequence: Synthetic oligonucleotide
  Sense strand starting at position 1408 of SEQ ID NO: 1888355
gcaguauccugucauggca

SEQ ID NO: 2529875 - RNA, 19 nt, Artificial Sequence
  Description of Artificial Sequence: Synthetic oligonucleotide
  Antisense strand to SEQ ID NO: 2529874
ugccaugacaggauacugc

SEQ ID NO: 2529876 - RNA, 19 nt, Artificial Sequence
  Description of Artificial Sequence: Synthetic oligonucleotide
  Sense strand starting at position 1405 of SEQ ID NO: 1888355
caugcaguauccugucaug

SEQ ID NO: 2529877 - RNA, 19 nt, Artificial Sequence
  Description of Artificial Sequence: Synthetic oligonucleotide
  Antisense strand to SEQ ID NO: 2529876
caugacaggauacugcaug

SEQ ID NO: 2529878 - RNA, 19 nt, Artificial Sequence
  Description of Artificial Sequence: Synthetic oligonucleotide
  Sense strand starting at position 1377 of SEQ ID NO: 1888355
guccacuucugcugcauga

SEQ ID NO: 2529879 - RNA, 19 nt, Artificial Sequence
  Description of Artificial Sequence: Synthetic oligonucleotide
  Antisense strand to SEQ ID NO: 2529878
ucaugcagcagaaguggac

SEQ ID NO: 2529880 - RNA, 19 nt, Artificial Sequence
  Description of Artificial Sequence: Synthetic oligonucleotide
  Sense strand starting at position 172 of SEQ ID NO: 1888357
gcugauuucuaaguauggu

SEQ ID NO: 2529881 - RNA, 19 nt, Artificial Sequence
  Description of Artificial Sequence: Synthetic oligonucleotide
  Antisense strand to SEQ ID NO: 2529880
accauacuuagaaaucagc

SEQ ID NO: 2529882 - RNA, 19 nt, Artificial Sequence
  Description of Artificial Sequence: Synthetic oligonucleotide
  Sense strand starting at position 1771 of SEQ ID NO: 1888357
gauuccacuggguauucua

SEQ ID NO: 2529883 - RNA, 19 nt, Artificial Sequence
  Description of Artificial Sequence: Synthetic oligonucleotide
  Antisense strand to SEQ ID NO: 2529882
uagaauacccaguggaauc

SEQ ID NO: 2529884 - RNA, 19 nt, Artificial Sequence
  Description of Artificial Sequence: Synthetic oligonucleotide
  Sense strand starting at position 1008 of SEQ ID NO: 1888357
agugauuguauggacuauu

SEQ ID NO: 2529885 - RNA, 19 nt, Artificial Sequence
  Description of Artificial Sequence: Synthetic oligonucleotide
  Antisense strand to SEQ ID NO: 2529884
aauaguccauacaaucacu

SEQ ID NO: 2529886 - RNA, 19 nt, Artificial Sequence
  Description of Artificial Sequence: Synthetic oligonucleotide
  Sense strand starting at position 1001 of SEQ ID NO: 1888357
ugaauaaagugauuguaug

SEQ ID NO: 2529887 - RNA, 19 nt, Artificial Sequence
  Description of Artificial Sequence: Synthetic oligonucleotide
  Antisense strand to SEQ ID NO: 2529886
cauacaaucacuuuauuca

SEQ ID NO: 2529888 - RNA, 19 nt, Artificial Sequence
  Description of Artificial Sequence: Synthetic oligonucleotide
  Sense strand starting at position 3437 of SEQ ID NO: 1888357
guccuucgugcugcaauga

SEQ ID NO: 2529889 - RNA, 19 nt, Artificial Sequence
  Description of Artificial Sequence: Synthetic oligonucleotide
  Antisense strand to SEQ ID NO: 2529888
ucauugcagcacgaaggac

SEQ ID NO: 2529890 - RNA, 19 nt, Artificial Sequence
  Description of Artificial Sequence: Synthetic oligonucleotide
  Sense strand starting at position 2111 of SEQ ID NO: 1888357
uguuguggucuguuugguu

SEQ ID NO: 2529891 - RNA, 19 nt, Artificial Sequence
  Description of Artificial Sequence: Synthetic oligonucleotide
  Antisense strand to SEQ ID NO: 2529890
aaccaaacagaccacaaca

SEQ ID NO: 2529892 - RNA, 19 nt, Artificial Sequence
  Description of Artificial Sequence: Synthetic oligonucleotide
  Sense strand starting at position 1767 of SEQ ID NO: 1888357
gauggauuccacuggguau

SEQ ID NO: 2529893 - RNA, 19 nt, Artificial Sequence
  Description of Artificial Sequence: Synthetic oligonucleotide
  Antisense strand to SEQ ID NO: 2529892
auacccaguggaauccauc

SEQ ID NO: 2529894 - RNA, 19 nt, Artificial Sequence
  Description of Artificial Sequence: Synthetic oligonucleotide
  Sense strand starting at position 3493 of SEQ ID NO: 1888357
gcaacuuuccaggagcaau

SEQ ID NO: 2529895 - RNA, 19 nt, Artificial Sequence
  Description of Artificial Sequence: Synthetic oligonucleotide
  Antisense strand to SEQ ID NO: 2529894
auugcuccuggaaaguugc

SEQ ID NO: 2529896 - RNA, 19 nt, Artificial Sequence
  Description of Artificial Sequence: Synthetic oligonucleotide
  Sense strand starting at position 943 of SEQ ID NO: 1888357
gucuuuccuguauacaaag

SEQ ID NO: 2529897 - RNA, 19 nt, Artificial Sequence
  Description of Artificial Sequence: Synthetic oligonucleotide
  Antisense strand to SEQ ID NO: 2529896
cuuuguauacaggaaagac

SEQ ID NO: 2529898 - RNA, 19 nt, Artificial Sequence
  Description of Artificial Sequence: Synthetic oligonucleotide
  Sense strand starting at position 1114 of SEQ ID NO: 1888357
ugagaaaguuuccuguaga

SEQ ID NO: 2529899 - RNA, 19 nt, Artificial Sequence
  Description of Artificial Sequence: Synthetic oligonucleotide
  Antisense strand to SEQ ID NO: 2529898
ucuacaggaaacuuucuca

SEQ ID NO: 2529900 - RNA, 19 nt, Artificial Sequence
  Description of Artificial Sequence: Synthetic oligonucleotide
  Sense strand starting at position 2464 of SEQ ID NO: 1888357
guaucucuuagaggguaaa

SEQ ID NO: 2529901 - RNA, 19 nt, Artificial Sequence
  Description of Artificial Sequence: Synthetic oligonucleotide
  Antisense strand to SEQ ID NO: 2529900
uuuacccucuaagagauac

SEQ ID NO: 2529902 - RNA, 19 nt, Artificial Sequence
  Description of Artificial Sequence: Synthetic oligonucleotide
  Sense strand starting at position 19 of SEQ ID NO: 1888357
gaaggauucugugugacac

SEQ ID NO: 2529903 - RNA, 19 nt, Artificial Sequence
  Description of Artificial Sequence: Synthetic oligonucleotide
  Antisense strand to SEQ ID NO: 2529902
gugucacacagaauccuuc

SEQ ID NO: 2529904 - RNA, 19 nt, Artificial Sequence
  Description of Artificial Sequence: Synthetic oligonucleotide
  Sense strand starting at position 263 of SEQ ID NO: 1888357
uguuuauugagaggauucu

SEQ ID NO: 2529905 - RNA, 19 nt, Artificial Sequence
  Description of Artificial Sequence: Synthetic oligonucleotide
  Antisense strand to SEQ ID NO: 2529904
agaauccucucaauaaaca

SEQ ID NO: 2529906 - RNA, 19 nt, Artificial Sequence
  Description of Artificial Sequence: Synthetic oligonucleotide
  Sense strand starting at position 1768 of SEQ ID NO: 1888357
auggauuccacuggguauu

SEQ ID NO: 2529907 - RNA, 19 nt, Artificial Sequence
  Description of Artificial Sequence: Synthetic oligonucleotide
  Antisense strand to SEQ ID NO: 2529906
aauacccaguggaauccau

SEQ ID NO: 2529908 - RNA, 19 nt, Artificial Sequence
  Description of Artificial Sequence: Synthetic oligonucleotide
  Sense strand starting at position 1774 of SEQ ID NO: 1888357
uccacuggguauucuaaau

SEQ ID NO: 2529909 - RNA, 19 nt, Artificial Sequence
  Description of Artificial Sequence: Synthetic oligonucleotide
  Antisense strand to SEQ ID NO: 2529908
auuuagaauacccagugga

SEQ ID NO: 2529910 - RNA, 19 nt, Artificial Sequence
  Description of Artificial Sequence: Synthetic oligonucleotide
  Sense strand starting at position 2885 of SEQ ID NO: 1888357
ggagcuaggagaugcauua

SEQ ID NO: 2529911 - RNA, 19 nt, Artificial Sequence
  Description of Artificial Sequence: Synthetic oligonucleotide
  Antisense strand to SEQ ID NO: 2529910
uaaugcaucuccuagcucc

SEQ ID NO: 2529912 - RNA, 19 nt, Artificial Sequence
  Description of Artificial Sequence: Synthetic oligonucleotide
  Sense strand starting at position 2376 of SEQ ID NO: 1888357
gugggcauucaguaugaug

SEQ ID NO: 2529913 - RNA, 19 nt, Artificial Sequence
  Description of Artificial Sequence: Synthetic oligonucleotide
  Antisense strand to SEQ ID NO: 2529912
caucauacugaaugcccac

SEQ ID NO: 2529914 - RNA, 19 nt, Artificial Sequence
  Description of Artificial Sequence: Synthetic oligonucleotide
  Sense strand starting at position 1113 of SEQ ID NO: 1888357
cugagaaaguuuccuguag

SEQ ID NO: 2529915 - RNA, 19 nt, Artificial Sequence
  Description of Artificial Sequence: Synthetic oligonucleotide
  Antisense strand to SEQ ID NO: 2529914
cuacaggaaacuuucucag

SEQ ID NO: 2529916 - RNA, 19 nt, Artificial Sequence
  Description of Artificial Sequence: Synthetic oligonucleotide
  Sense strand starting at position 2600 of SEQ ID NO: 1888357
uuucuuggccuguaugaaa

SEQ ID NO: 2529917 - RNA, 19 nt, Artificial Sequence
  Description of Artificial Sequence: Synthetic oligonucleotide
  Antisense strand to SEQ ID NO: 2529916
uuucauacaggccaagaaa

SEQ ID NO: 2529918 - RNA, 19 nt, Artificial Sequence
  Description of Artificial Sequence: Synthetic oligonucleotide
  Sense strand starting at position 20 of SEQ ID NO: 1888357
aaggauucugugugacacu

SEQ ID NO: 2529919 - RNA, 19 nt, Artificial Sequence
  Description of Artificial Sequence: Synthetic oligonucleotide
  Antisense strand to SEQ ID NO: 2529918
agugucacacagaauccuu

SEQ ID NO: 2529920 - RNA, 19 nt, Artificial Sequence
  Description of Artificial Sequence: Synthetic oligonucleotide
  Sense strand starting at position 3416 of SEQ ID NO: 1888357
aaugauacugugggucuau

SEQ ID NO: 2529921 - RNA, 19 nt, Artificial Sequence
  Description of Artificial Sequence: Synthetic oligonucleotide
  Antisense strand to SEQ ID NO: 2529920
auagacccacaguaucauu

SEQ ID NO: 2529922 - RNA, 19 nt, Artificial Sequence
  Description of Artificial Sequence: Synthetic oligonucleotide
  Sense strand starting at position 2378 of SEQ ID NO: 1888357
gggcauucaguaugaugac

SEQ ID NO: 2529923 - RNA, 19 nt, Artificial Sequence
  Description of Artificial Sequence: Synthetic oligonucleotide
  Antisense strand to SEQ ID NO: 2529922
gucaucauacugaaugccc

SEQ ID NO: 2529924 - RNA, 19 nt, Artificial Sequence
  Description of Artificial Sequence: Synthetic oligonucleotide
  Sense strand starting at position 2046 of SEQ ID NO: 1888357
gcugaagucuaucuuaaag

SEQ ID NO: 2529925 - RNA, 19 nt, Artificial Sequence
  Description of Artificial Sequence: Synthetic oligonucleotide
  Antisense strand to SEQ ID NO: 2529924
cuuuaagauagacuucagc

SEQ ID NO: 2529926 - RNA, 19 nt, Artificial Sequence
  Description of Artificial Sequence: Synthetic oligonucleotide
  Sense strand starting at position 3492 of SEQ ID NO: 1888357
ggcaacuuuccaggagcaa

SEQ ID NO: 2529927 - RNA, 19 nt, Artificial Sequence
  Description of Artificial Sequence: Synthetic oligonucleotide
  Antisense strand to SEQ ID NO: 2529926
uugcuccuggaaaguugcc

SEQ ID NO: 2529928 - RNA, 19 nt, Artificial Sequence
  Description of Artificial Sequence: Synthetic oligonucleotide
  Sense strand starting at position 3435 of SEQ ID NO: 1888357
guguccuucgugcugcaau

SEQ ID NO: 2529929 - RNA, 19 nt, Artificial Sequence
  Description of Artificial Sequence: Synthetic oligonucleotide
  Antisense strand to SEQ ID NO: 2529928
auugcagcacgaaggacac

SEQ ID NO: 2529930 - RNA, 19 nt, Artificial Sequence
  Description of Artificial Sequence: Synthetic oligonucleotide
  Sense strand starting at position 1631 of SEQ ID NO: 1888357
cuuacagcacgauagcauu

SEQ ID NO: 2529931 - RNA, 19 nt, Artificial Sequence
  Description of Artificial Sequence: Synthetic oligonucleotide
  Antisense strand to SEQ ID NO: 2529930
aaugcuaucgugcuguaag

SEQ ID NO: 2529932 - RNA, 19 nt, Artificial Sequence
  Description of Artificial Sequence: Synthetic oligonucleotide
  Sense strand starting at position 1987 of SEQ ID NO: 1888357
ugagauacaugucuguucu

SEQ ID NO: 2529933 - RNA, 19 nt, Artificial Sequence
  Description of Artificial Sequence: Synthetic oligonucleotide
  Antisense strand to SEQ ID NO: 2529932
agaacagacauguaucuca

SEQ ID NO: 2529934 - RNA, 19 nt, Artificial Sequence
  Description of Artificial Sequence: Synthetic oligonucleotide
  Sense strand starting at position 1988 of SEQ ID NO: 1888357
gagauacaugucuguucuu

SEQ ID NO: 2529935 - RNA, 19 nt, Artificial Sequence
  Description of Artificial Sequence: Synthetic oligonucleotide
  Antisense strand to SEQ ID NO: 2529934
aagaacagacauguaucuc

SEQ ID NO: 2529936 - RNA, 19 nt, Artificial Sequence
  Description of Artificial Sequence: Synthetic oligonucleotide
  Sense strand starting at position 2150 of SEQ ID NO: 1888357
aagauagaauuguaggaaa

SEQ ID NO: 2529937 - RNA, 19 nt, Artificial Sequence
  Description of Artificial Sequence: Synthetic oligonucleotide
  Antisense strand to SEQ ID NO: 2529936
uuuccuacaauucuaucuu

SEQ ID NO: 2529938 - RNA, 19 nt, Artificial Sequence
  Description of Artificial Sequence: Synthetic oligonucleotide
  Sense strand starting at position 3442 of SEQ ID NO: 1888357
ucgugcugcaaugagaaua

SEQ ID NO: 2529939 - RNA, 19 nt, Artificial Sequence
  Description of Artificial Sequence: Synthetic oligonucleotide
  Antisense strand to SEQ ID NO: 2529938
uauucucauugcagcacga

SEQ ID NO: 2529940 - RNA, 19 nt, Artificial Sequence
  Description of Artificial Sequence: Synthetic oligonucleotide
  Sense strand starting at position 1989 of SEQ ID NO: 1888357
agauacaugucuguucuuu

SEQ ID NO: 2529941 - RNA, 19 nt, Artificial Sequence
  Description of Artificial Sequence: Synthetic oligonucleotide
  Antisense strand to SEQ ID NO: 2529940
aaagaacagacauguaucu

SEQ ID NO: 2529942 - RNA, 19 nt, Artificial Sequence
  Description of Artificial Sequence: Synthetic oligonucleotide
  Sense strand starting at position 257 of SEQ ID NO: 1888357
gcagcauguuuauugagag

SEQ ID NO: 2529943 - RNA, 19 nt, Artificial Sequence
  Description of Artificial Sequence: Synthetic oligonucleotide
  Antisense strand to SEQ ID NO: 2529942
cucucaauaaacaugcugc

SEQ ID NO: 2529944 - RNA, 19 nt, Artificial Sequence
  Description of Artificial Sequence: Synthetic oligonucleotide
  Sense strand starting at position 937 of SEQ ID NO: 1888357
uuaacagucuuuccuguau

SEQ ID NO: 2529945 - RNA, 19 nt, Artificial Sequence
  Description of Artificial Sequence: Synthetic oligonucleotide
  Antisense strand to SEQ ID NO: 2529944
auacaggaaagacuguuaa

SEQ ID NO: 2529946 - RNA, 19 nt, Artificial Sequence
  Description of Artificial Sequence: Synthetic oligonucleotide
  Sense strand starting at position 169 of SEQ ID NO: 1888357
auggcugauuucuaaguau

SEQ ID NO: 2529947 - RNA, 19 nt, Artificial Sequence
  Description of Artificial Sequence: Synthetic oligonucleotide
  Antisense strand to SEQ ID NO: 2529946
auacuuagaaaucagccau

SEQ ID NO: 2529948 - RNA, 19 nt, Artificial Sequence
  Description of Artificial Sequence: Synthetic oligonucleotide
  Sense strand starting at position 2672 of SEQ ID NO: 1888357
ccagcaucuuggucaguca

SEQ ID NO: 2529949 - RNA, 19 nt, Artificial Sequence
  Description of Artificial Sequence: Synthetic oligonucleotide
  Antisense strand to SEQ ID NO: 2529948
ugacugaccaagaugcugg

SEQ ID NO: 2529950 - RNA, 19 nt, Artificial Sequence
  Description of Artificial Sequence: Synthetic oligonucleotide
  Sense strand starting at position 3362 of SEQ ID NO: 1888357
auaguugcuguaugcaaua

SEQ ID NO: 2529951 - RNA, 19 nt, Artificial Sequence
  Description of Artificial Sequence: Synthetic oligonucleotide
  Antisense strand to SEQ ID NO: 2529950
uauugcauacagcaacuau

SEQ ID NO: 2529952 - RNA, 19 nt, Artificial Sequence
  Description of Artificial Sequence: Synthetic oligonucleotide
  Sense strand starting at position 1266 of SEQ ID NO: 1888357
agucuuaugugguugguuu

SEQ ID NO: 2529953 - RNA, 19 nt, Artificial Sequence
  Description of Artificial Sequence: Synthetic oligonucleotide
  Antisense strand to SEQ ID NO: 2529952
aaaccaaccacauaagacu

SEQ ID NO: 2529954 - RNA, 19 nt, Artificial Sequence
  Description of Artificial Sequence: Synthetic oligonucleotide
  Sense strand starting at position 261 of SEQ ID NO: 1888357
cauguuuauugagaggauu

SEQ ID NO: 2529955 - RNA, 19 nt, Artificial Sequence
  Description of Artificial Sequence: Synthetic oligonucleotide
  Antisense strand to SEQ ID NO: 2529954
aauccucucaauaaacaug

SEQ ID NO: 2529956 - RNA, 19 nt, Artificial Sequence
  Description of Artificial Sequence: Synthetic oligonucleotide
  Sense strand starting at position 909 of SEQ ID NO: 1888357
agauuacaauauggguaua

SEQ ID NO: 2529957 - RNA, 19 nt, Artificial Sequence
  Description of Artificial Sequence: Synthetic oligonucleotide
  Antisense strand to SEQ ID NO: 2529956
uauacccauauuguaaucu

SEQ ID NO: 2529958 - RNA, 19 nt, Artificial Sequence
  Description of Artificial Sequence: Synthetic oligonucleotide
  Sense strand starting at position 21 of SEQ ID NO: 1888357
aggauucugugugacacua

SEQ ID NO: 2529959 - RNA, 19 nt, Artificial Sequence
  Description of Artificial Sequence: Synthetic oligonucleotide
  Antisense strand to SEQ ID NO: 2529958
uagugucacacagaauccu

SEQ ID NO: 2529960 - RNA, 19 nt, Artificial Sequence
  Description of Artificial Sequence: Synthetic oligonucleotide
  Sense strand starting at position 1815 of SEQ ID NO: 1888358
gcauuuagaucucucugua

SEQ ID NO: 2529961 - RNA, 19 nt, Artificial Sequence
  Description of Artificial Sequence: Synthetic oligonucleotide
  Antisense strand to SEQ ID NO: 2529960
uacagagagaucuaaaugc

SEQ ID NO: 2529962 - RNA, 19 nt, Artificial Sequence
  Description of Artificial Sequence: Synthetic oligonucleotide
  Sense strand starting at position 847 of SEQ ID NO: 1888358
cuaagacuggcucacacau

SEQ ID NO: 2529963 - RNA, 19 nt, Artificial Sequence
  Description of Artificial Sequence: Synthetic oligonucleotide
  Antisense strand to SEQ ID NO: 2529962
augugugagccagucuuag

SEQ ID NO: 2529964 - RNA, 19 nt, Artificial Sequence
  Description of Artificial Sequence: Synthetic oligonucleotide
  Sense strand starting at position 291 of SEQ ID NO: 1888358
gcuuauccucaauauggaa

SEQ ID NO: 2529965 - RNA, 19 nt, Artificial Sequence
  Description of Artificial Sequence: Synthetic oligonucleotide
  Antisense strand to SEQ ID NO: 2529964
uuccauauugaggauaagc

SEQ ID NO: 2529966 - RNA, 19 nt, Artificial Sequence
  Description of Artificial Sequence: Synthetic oligonucleotide
  Sense strand starting at position 139 of SEQ ID NO: 1888358
aauauuagccuuggaagga

SEQ ID NO: 2529967 - RNA, 19 nt, Artificial Sequence
  Description of Artificial Sequence: Synthetic oligonucleotide
  Antisense strand to SEQ ID NO: 2529966
uccuuccaaggcuaauauu

SEQ ID NO: 2529968 - RNA, 19 nt, Artificial Sequence
  Description of Artificial Sequence: Synthetic oligonucleotide
  Sense strand starting at position 138 of SEQ ID NO: 1888358
aaauauuagccuuggaagg

SEQ ID NO: 2529969 - RNA, 19 nt, Artificial Sequence
  Description of Artificial Sequence: Synthetic oligonucleotide
  Antisense strand to SEQ ID NO: 2529968
ccuuccaaggcuaauauuu

SEQ ID NO: 2529970 - RNA, 19 nt, Artificial Sequence
  Description of Artificial Sequence: Synthetic oligonucleotide
  Sense strand starting at position 1109 of SEQ ID NO: 1888358
acuugucuaaacgaggauu

SEQ ID NO: 2529971 - RNA, 19 nt, Artificial Sequence
  Description of Artificial Sequence: Synthetic oligonucleotide
  Antisense strand to SEQ ID NO: 2529970
aauccucguuuagacaagu

SEQ ID NO: 2529972 - RNA, 19 nt, Artificial Sequence
  Description of Artificial Sequence: Synthetic oligonucleotide
  Sense strand starting at position 3769 of SEQ ID NO: 1888358
cgggcagaucaugauauca

SEQ ID NO: 2529973 - RNA, 19 nt, Artificial Sequence
  Description of Artificial Sequence: Synthetic oligonucleotide
  Antisense strand to SEQ ID NO: 2529972
ugauaucaugaucugcccg

SEQ ID NO: 2529974 - RNA, 19 nt, Artificial Sequence
  Description of Artificial Sequence: Synthetic oligonucleotide
  Sense strand starting at position 3541 of SEQ ID NO: 1888358
ggaagugggcgcucgcaua

SEQ ID NO: 2529975 - RNA, 19 nt, Artificial Sequence
  Description of Artificial Sequence: Synthetic oligonucleotide
  Antisense strand to SEQ ID NO: 2529974
uaugcgagcgcccacuucc

SEQ ID NO: 2529976 - RNA, 19 nt, Artificial Sequence
  Description of Artificial Sequence: Synthetic oligonucleotide
  Sense strand starting at position 3217 of SEQ ID NO: 1888358
cgggacacuugauccacaa

SEQ ID NO: 2529977 - RNA, 19 nt, Artificial Sequence
  Description of Artificial Sequence: Synthetic oligonucleotide
  Antisense strand to SEQ ID NO: 2529976
uuguggaucaagugucccg

SEQ ID NO: 2529978 - RNA, 19 nt, Artificial Sequence
  Description of Artificial Sequence: Synthetic oligonucleotide
  Sense strand starting at position 2657 of SEQ ID NO: 1888358
cggagaucucaccacagca

SEQ ID NO: 2529979 - RNA, 19 nt, Artificial Sequence
  Description of Artificial Sequence: Synthetic oligonucleotide
  Antisense strand to SEQ ID NO: 2529978
ugcuguggugagaucuccg

SEQ ID NO: 2529980 - RNA, 19 nt, Artificial Sequence
  Description of Artificial Sequence: Synthetic oligonucleotide
  Sense strand starting at position 1112 of SEQ ID NO: 1888358
ugucuaaacgaggauuccu

SEQ ID NO: 2529981 - RNA, 19 nt, Artificial Sequence
  Description of Artificial Sequence: Synthetic oligonucleotide
  Antisense strand to SEQ ID NO: 2529980
aggaauccucguuuagaca

SEQ ID NO: 2529982 - RNA, 19 nt, Artificial Sequence
  Description of Artificial Sequence: Synthetic oligonucleotide
  Sense strand starting at position 1992 of SEQ ID NO: 1888358
aaauaaucucuaggugagu

SEQ ID NO: 2529983 - RNA, 19 nt, Artificial Sequence
  Description of Artificial Sequence: Synthetic oligonucleotide
  Antisense strand to SEQ ID NO: 2529982
acucaccuagagauuauuu

SEQ ID NO: 2529984 - RNA, 19 nt, Artificial Sequence
  Description of Artificial Sequence: Synthetic oligonucleotide
  Sense strand starting at position 1104 of SEQ ID NO: 1888358
ggcaaacuugucuaaacga

SEQ ID NO: 2529985 - RNA, 19 nt, Artificial Sequence
  Description of Artificial Sequence: Synthetic oligonucleotide
  Antisense strand to SEQ ID NO: 2529984
ucguuuagacaaguuugcc

SEQ ID NO: 2529986 - RNA, 19 nt, Artificial Sequence
  Description of Artificial Sequence: Synthetic oligonucleotide
  Sense strand starting at position 3805 of SEQ ID NO: 1888358
ugaccugguuuaguagaaa

SEQ ID NO: 2529987 - RNA, 19 nt, Artificial Sequence
  Description of Artificial Sequence: Synthetic oligonucleotide
  Antisense strand to SEQ ID NO: 2529986
uuucuacuaaaccagguca

SEQ ID NO: 2529988 - RNA, 19 nt, Artificial Sequence
  Description of Artificial Sequence: Synthetic oligonucleotide
  Sense strand starting at position 1120 of SEQ ID NO: 1888358
cgaggauuccuacauuguu

SEQ ID NO: 2529989 - RNA, 19 nt, Artificial Sequence
  Description of Artificial Sequence: Synthetic oligonucleotide
  Antisense strand to SEQ ID NO: 2529988
aacaauguaggaauccucg

SEQ ID NO: 2529990 - RNA, 19 nt, Artificial Sequence
  Description of Artificial Sequence: Synthetic oligonucleotide
  Sense strand starting at position 1802 of SEQ ID NO: 1888358
cgcacuauaccaugcauuu

SEQ ID NO: 2529991 - RNA, 19 nt, Artificial Sequence
  Description of Artificial Sequence: Synthetic oligonucleotide
  Antisense strand to SEQ ID NO: 2529990
aaaugcaugguauagugcg

SEQ ID NO: 2529992 - RNA, 19 nt, Artificial Sequence
  Description of Artificial Sequence: Synthetic oligonucleotide
  Sense strand starting at position 192 of SEQ ID NO: 1888358
ggcacauguccauagugag

SEQ ID NO: 2529993 - RNA, 19 nt, Artificial Sequence
  Description of Artificial Sequence: Synthetic oligonucleotide
  Antisense strand to SEQ ID NO: 2529992
cucacuauggacaugugcc

SEQ ID NO: 2529994 - RNA, 19 nt, Artificial Sequence
  Description of Artificial Sequence: Synthetic oligonucleotide
  Sense strand starting at position 1123 of SEQ ID NO: 1888358
ggauuccuacauuguuaug

SEQ ID NO: 2529995 - RNA, 19 nt, Artificial Sequence
  Description of Artificial Sequence: Synthetic oligonucleotide
  Antisense strand to SEQ ID NO: 2529994
cauaacaauguaggaaucc

SEQ ID NO: 2529996 - RNA, 19 nt, Artificial Sequence
  Description of Artificial Sequence: Synthetic oligonucleotide
  Sense strand starting at position 3608 of SEQ ID NO: 1888358
aauguugaucugcagagca

SEQ ID NO: 2529997 - RNA, 19 nt, Artificial Sequence
  Description of Artificial Sequence: Synthetic oligonucleotide
  Antisense strand to SEQ ID NO: 2529996
ugcucugcagaucaacauu

SEQ ID NO: 2529998 - RNA, 19 nt, Artificial Sequence
  Description of Artificial Sequence: Synthetic oligonucleotide
  Sense strand starting at position 3610 of SEQ ID NO: 1888358
uguugaucugcagagcaaa

SEQ ID NO: 2529999 - RNA, 19 nt, Artificial Sequence
  Description of Artificial Sequence: Synthetic oligonucleotide
  Antisense strand to SEQ ID NO: 2529998
uuugcucugcagaucaaca

SEQ ID NO: 2530000 - RNA, 19 nt, Artificial Sequence
  Description of Artificial Sequence: Synthetic oligonucleotide
  Sense strand starting at position 333 of SEQ ID NO: 1888358
gucucauaggagcauugua

SEQ ID NO: 2530001 - RNA, 19 nt, Artificial Sequence
  Description of Artificial Sequence: Synthetic oligonucleotide
  Antisense strand to SEQ ID NO: 2530000
uacaaugcuccuaugagac

SEQ ID NO: 2530002 - RNA, 19 nt, Artificial Sequence
  Description of Artificial Sequence: Synthetic oligonucleotide
  Sense strand starting at position 1663 of SEQ ID NO: 1888358
ggagcuuguacuggaauca

SEQ ID NO: 2530003 - RNA, 19 nt, Artificial Sequence
  Description of Artificial Sequence: Synthetic oligonucleotide
  Antisense strand to SEQ ID NO: 2530002
ugauuccaguacaagcucc

SEQ ID NO: 2530004 - RNA, 19 nt, Artificial Sequence
  Description of Artificial Sequence: Synthetic oligonucleotide
  Sense strand starting at position 1102 of SEQ ID NO: 1888358
ugggcaaacuugucuaaac

SEQ ID NO: 2530005 - RNA, 19 nt, Artificial Sequence
  Description of Artificial Sequence: Synthetic oligonucleotide
  Antisense strand to SEQ ID NO: 2530004
guuuagacaaguuugccca

SEQ ID NO: 2530006 - RNA, 19 nt, Artificial Sequence
  Description of Artificial Sequence: Synthetic oligonucleotide
  Sense strand starting at position 2877 of SEQ ID NO: 1888358
uaaaguuuacgugggaaug

SEQ ID NO: 2530007 - RNA, 19 nt, Artificial Sequence
  Description of Artificial Sequence: Synthetic oligonucleotide
  Antisense strand to SEQ ID NO: 2530006
cauucccacguaaacuuua

SEQ ID NO: 2530008 - RNA, 19 nt, Artificial Sequence
  Description of Artificial Sequence: Synthetic oligonucleotide
  Sense strand starting at position 2096 of SEQ ID NO: 1888358
auugauugcgaugaugguu

SEQ ID NO: 2530009 - RNA, 19 nt, Artificial Sequence
  Description of Artificial Sequence: Synthetic oligonucleotide
  Antisense strand to SEQ ID NO: 2530008
aaccaucaucgcaaucaau

SEQ ID NO: 2530010 - RNA, 19 nt, Artificial Sequence
  Description of Artificial Sequence: Synthetic oligonucleotide
  Sense strand starting at position 1227 of SEQ ID NO: 1888358
cucaguuuaccuuaggcua

SEQ ID NO: 2530011 - RNA, 19 nt, Artificial Sequence
  Description of Artificial Sequence: Synthetic oligonucleotide
  Antisense strand to SEQ ID NO: 2530010
uagccuaagguaaacugag

SEQ ID NO: 2530012 - RNA, 19 nt, Artificial Sequence
  Description of Artificial Sequence: Synthetic oligonucleotide
  Sense strand starting at position 106 of SEQ ID NO: 1888358
aguaaucaccuuuguuaua

SEQ ID NO: 2530013 - RNA, 19 nt, Artificial Sequence
  Description of Artificial Sequence: Synthetic oligonucleotide
  Antisense strand to SEQ ID NO: 2530012
uauaacaaaggugauuacu

SEQ ID NO: 2530014 - RNA, 19 nt, Artificial Sequence
  Description of Artificial Sequence: Synthetic oligonucleotide
  Sense strand starting at position 1215 of SEQ ID NO: 1888358
gggauucuuucucucaguu

SEQ ID NO: 2530015 - RNA, 19 nt, Artificial Sequence
  Description of Artificial Sequence: Synthetic oligonucleotide
  Antisense strand to SEQ ID NO: 2530014
aacugagagaaagaauccc

SEQ ID NO: 2530016 - RNA, 19 nt, Artificial Sequence
  Description of Artificial Sequence: Synthetic oligonucleotide
  Sense strand starting at position 1214 of SEQ ID NO: 1888358
ugggauucuuucucucagu

SEQ ID NO: 2530017 - RNA, 19 nt, Artificial Sequence
  Description of Artificial Sequence: Synthetic oligonucleotide
  Antisense strand to SEQ ID NO: 2530016
acugagagaaagaauccca

SEQ ID NO: 2530018 - RNA, 19 nt, Artificial Sequence
  Description of Artificial Sequence: Synthetic oligonucleotide
  Sense strand starting at position 107 of SEQ ID NO: 1888358
guaaucaccuuuguuauau

SEQ ID NO: 2530019 - RNA, 19 nt, Artificial Sequence
  Description of Artificial Sequence: Synthetic oligonucleotide
  Antisense strand to SEQ ID NO: 2530018
auauaacaaaggugauuac

SEQ ID NO: 2530020 - RNA, 19 nt, Artificial Sequence
  Description of Artificial Sequence: Synthetic oligonucleotide
  Sense strand starting at position 329 of SEQ ID NO: 1888358
uuuggucucauaggagcau

SEQ ID NO: 2530021 - RNA, 19 nt, Artificial Sequence
  Description of Artificial Sequence: Synthetic oligonucleotide
  Antisense strand to SEQ ID NO: 2530020
augcuccuaugagaccaaa

SEQ ID NO: 2530022 - RNA, 19 nt, Artificial Sequence
  Description of Artificial Sequence: Synthetic oligonucleotide
  Sense strand starting at position 1819 of SEQ ID NO: 1888358
uuagaucucucuguaccuu

SEQ ID NO: 2530023 - RNA, 19 nt, Artificial Sequence
  Description of Artificial Sequence: Synthetic oligonucleotide
  Antisense strand to SEQ ID NO: 2530022
aagguacagagagaucuaa

SEQ ID NO: 2530024 - RNA, 19 nt, Artificial Sequence
  Description of Artificial Sequence: Synthetic oligonucleotide
  Sense strand starting at position 1994 of SEQ ID NO: 1888358
auaaucucuaggugagugu

SEQ ID NO: 2530025 - RNA, 19 nt, Artificial Sequence
  Description of Artificial Sequence: Synthetic oligonucleotide
  Antisense strand to SEQ ID NO: 2530024
acacucaccuagagauuau

SEQ ID NO: 2530026 - RNA, 19 nt, Artificial Sequence
  Description of Artificial Sequence: Synthetic oligonucleotide
  Sense strand starting at position 2095 of SEQ ID NO: 1888358
aauugauugcgaugauggu

SEQ ID NO: 2530027 - RNA, 19 nt, Artificial Sequence
  Description of Artificial Sequence: Synthetic oligonucleotide
  Antisense strand to SEQ ID NO: 2530026
accaucaucgcaaucaauu

SEQ ID NO: 2530028 - RNA, 19 nt, Artificial Sequence
  Description of Artificial Sequence: Synthetic oligonucleotide
  Sense strand starting at position 1818 of SEQ ID NO: 1888358
uuuagaucucucuguaccu

SEQ ID NO: 2530029 - RNA, 19 nt, Artificial Sequence
  Description of Artificial Sequence: Synthetic oligonucleotide
  Antisense strand to SEQ ID NO: 2530028
agguacagagagaucuaaa

SEQ ID NO: 2530030 - RNA, 19 nt, Artificial Sequence
  Description of Artificial Sequence: Synthetic oligonucleotide
  Sense strand starting at position 1073 of SEQ ID NO: 1888358
auaguaguauguguaccaa

SEQ ID NO: 2530031 - RNA, 19 nt, Artificial Sequence
  Description of Artificial Sequence: Synthetic oligonucleotide
  Antisense strand to SEQ ID NO: 2530030
uugguacacauacuacuau

SEQ ID NO: 2530032 - RNA, 19 nt, Artificial Sequence
  Description of Artificial Sequence: Synthetic oligonucleotide
  Sense strand starting at position 1129 of SEQ ID NO: 1888358
cuacauuguuaugacauuu

SEQ ID NO: 2530033 - RNA, 19 nt, Artificial Sequence
  Description of Artificial Sequence: Synthetic oligonucleotide
  Antisense strand to SEQ ID NO: 2530032
aaaugucauaacaauguag

SEQ ID NO: 2530034 - RNA, 19 nt, Artificial Sequence
  Description of Artificial Sequence: Synthetic oligonucleotide
  Sense strand starting at position 3044 of SEQ ID NO: 1888358
cacaguggucagugaagug

SEQ ID NO: 2530035 - RNA, 19 nt, Artificial Sequence
  Description of Artificial Sequence: Synthetic oligonucleotide
  Antisense strand to SEQ ID NO: 2530034
cacuucacugaccacugug

SEQ ID NO: 2530036 - RNA, 19 nt, Artificial Sequence
  Description of Artificial Sequence: Synthetic oligonucleotide
  Sense strand starting at position 2875 of SEQ ID NO: 1888358
gcuaaaguuuacgugggaa

SEQ ID NO: 2530037 - RNA, 19 nt, Artificial Sequence
  Description of Artificial Sequence: Synthetic oligonucleotide
  Antisense strand to SEQ ID NO: 2530036
uucccacguaaacuuuagc

SEQ ID NO: 2530038 - RNA, 19 nt, Artificial Sequence
  Description of Artificial Sequence: Synthetic oligonucleotide
  Sense strand starting at position 3707 of SEQ ID NO: 1888358
aggucuaucuggcugggua

SEQ ID NO: 2530039 - RNA, 19 nt, Artificial Sequence
  Description of Artificial Sequence: Synthetic oligonucleotide
  Antisense strand to SEQ ID NO: 2530038
uacccagccagauagaccu

SEQ ID NO: 2530040 - RNA, 19 nt, Artificial Sequence
  Description of Artificial Sequence: Synthetic oligonucleotide
  Sense strand starting at position 3859 of SEQ ID NO: 1888359
gcuuguuauuuacuaugac

SEQ ID NO: 2530041 - RNA, 19 nt, Artificial Sequence
  Description of Artificial Sequence: Synthetic oligonucleotide
  Antisense strand to SEQ ID NO: 2530040
gucauaguaaauaacaagc

SEQ ID NO: 2530042 - RNA, 19 nt, Artificial Sequence
  Description of Artificial Sequence: Synthetic oligonucleotide
  Sense strand starting at position 2614 of SEQ ID NO: 1888359
acaaucuauuuauaggaga

SEQ ID NO: 2530043 - RNA, 19 nt, Artificial Sequence
  Description of Artificial Sequence: Synthetic oligonucleotide
  Antisense strand to SEQ ID NO: 2530042
ucuccuauaaauagauugu

SEQ ID NO: 2530044 - RNA, 19 nt, Artificial Sequence
  Description of Artificial Sequence: Synthetic oligonucleotide
  Sense strand starting at position 3819 of SEQ ID NO: 1888359
guauuugcuuucuccagag

SEQ ID NO: 2530045 - RNA, 19 nt, Artificial Sequence
  Description of Artificial Sequence: Synthetic oligonucleotide
  Antisense strand to SEQ ID NO: 2530044
cucuggagaaagcaaauac

SEQ ID NO: 2530046 - RNA, 19 nt, Artificial Sequence
  Description of Artificial Sequence: Synthetic oligonucleotide
  Sense strand starting at position 1909 of SEQ ID NO: 1888359
agugaagugguuuaaugga

SEQ ID NO: 2530047 - RNA, 19 nt, Artificial Sequence
  Description of Artificial Sequence: Synthetic oligonucleotide
  Antisense strand to SEQ ID NO: 2530046
uccauuaaaccacuucacu

SEQ ID NO: 2530048 - RNA, 19 nt, Artificial Sequence
  Description of Artificial Sequence: Synthetic oligonucleotide
  Sense strand starting at position 2145 of SEQ ID NO: 1888359
gcaugugggaauuauuaca

SEQ ID NO: 2530049 - RNA, 19 nt, Artificial Sequence
  Description of Artificial Sequence: Synthetic oligonucleotide
  Antisense strand to SEQ ID NO: 2530048
uguaauaauucccacaugc

SEQ ID NO: 2530050 - RNA, 19 nt, Artificial Sequence
  Description of Artificial Sequence: Synthetic oligonucleotide
  Sense strand starting at position 3631 of SEQ ID NO: 1888359
caugguagagauuaugcau

SEQ ID NO: 2530051 - RNA, 19 nt, Artificial Sequence
  Description of Artificial Sequence: Synthetic oligonucleotide
  Antisense strand to SEQ ID NO: 2530050
augcauaaucucuaccaug

SEQ ID NO: 2530052 - RNA, 19 nt, Artificial Sequence
  Description of Artificial Sequence: Synthetic oligonucleotide
  Sense strand starting at position 3856 of SEQ ID NO: 1888359
cuagcuuguuauuuacuau

SEQ ID NO: 2530053 - RNA, 19 nt, Artificial Sequence
  Description of Artificial Sequence: Synthetic oligonucleotide
  Antisense strand to SEQ ID NO: 2530052
auaguaaauaacaagcuag

SEQ ID NO: 2530054 - RNA, 19 nt, Artificial Sequence
  Description of Artificial Sequence: Synthetic oligonucleotide
  Sense strand starting at position 3196 of SEQ ID NO: 1888359
gcauccuaacaauggaaua

SEQ ID NO: 2530055 - RNA, 19 nt, Artificial Sequence
  Description of Artificial Sequence: Synthetic oligonucleotide
  Antisense strand to SEQ ID NO: 2530054
uauuccauuguuaggaugc

SEQ ID NO: 2530056 - RNA, 19 nt, Artificial Sequence
  Description of Artificial Sequence: Synthetic oligonucleotide
  Sense strand starting at position 2051 of SEQ ID NO: 1888359
acuagauccggugagacuu

SEQ ID NO: 2530057 - RNA, 19 nt, Artificial Sequence
  Description of Artificial Sequence: Synthetic oligonucleotide
  Antisense strand to SEQ ID NO: 2530056
aagucucaccggaucuagu

SEQ ID NO: 2530058 - RNA, 19 nt, Artificial Sequence
  Description of Artificial Sequence: Synthetic oligonucleotide
  Sense strand starting at position 3818 of SEQ ID NO: 1888359
uguauuugcuuucuccaga

SEQ ID NO: 2530059 - RNA, 19 nt, Artificial Sequence
  Description of Artificial Sequence: Synthetic oligonucleotide
  Antisense strand to SEQ ID NO: 2530058
ucuggagaaagcaaauaca

SEQ ID NO: 2530060 - RNA, 19 nt, Artificial Sequence
  Description of Artificial Sequence: Synthetic oligonucleotide
  Sense strand starting at position 3311 of SEQ ID NO: 1888359
ggcuccacacuauaugauu

SEQ ID NO: 2530061 - RNA, 19 nt, Artificial Sequence
  Description of Artificial Sequence: Synthetic oligonucleotide
  Antisense strand to SEQ ID NO: 2530060
aaucauauaguguggagcc

SEQ ID NO: 2530062 - RNA, 19 nt, Artificial Sequence
  Description of Artificial Sequence: Synthetic oligonucleotide
  Sense strand starting at position 2617 of SEQ ID NO: 1888359
aucuauuuauaggagacau

SEQ ID NO: 2530063 - RNA, 19 nt, Artificial Sequence
  Description of Artificial Sequence: Synthetic oligonucleotide
  Antisense strand to SEQ ID NO: 2530062
augucuccuauaaauagau

SEQ ID NO: 2530064 - RNA, 19 nt, Artificial Sequence
  Description of Artificial Sequence: Synthetic oligonucleotide
  Sense strand starting at position 2277 of SEQ ID NO: 1888359
aggacuuucgcacaugaac

SEQ ID NO: 2530065 - RNA, 19 nt, Artificial Sequence
  Description of Artificial Sequence: Synthetic oligonucleotide
  Antisense strand to SEQ ID NO: 2530064
guucaugugcgaaaguccu

SEQ ID NO: 2530066 - RNA, 19 nt, Artificial Sequence
  Description of Artificial Sequence: Synthetic oligonucleotide
  Sense strand starting at position 3771 of SEQ ID NO: 1888359
gaaucauauugucucugag

SEQ ID NO: 2530067 - RNA, 19 nt, Artificial Sequence
  Description of Artificial Sequence: Synthetic oligonucleotide
  Antisense strand to SEQ ID NO: 2530066
cucagagacaauaugauuc

SEQ ID NO: 2530068 - RNA, 19 nt, Artificial Sequence
  Description of Artificial Sequence: Synthetic oligonucleotide
  Sense strand starting at position 3852 of SEQ ID NO: 1888359
auggcuagcuuguuauuua

SEQ ID NO: 2530069 - RNA, 19 nt, Artificial Sequence
  Description of Artificial Sequence: Synthetic oligonucleotide
  Antisense strand to SEQ ID NO: 2530068
uaaauaacaagcuagccau

SEQ ID NO: 2530070 - RNA, 19 nt, Artificial Sequence
  Description of Artificial Sequence: Synthetic oligonucleotide
  Sense strand starting at position 2495 of SEQ ID NO: 1888359
guuugugucuaauuucuac

SEQ ID NO: 2530071 - RNA, 19 nt, Artificial Sequence
  Description of Artificial Sequence: Synthetic oligonucleotide
  Antisense strand to SEQ ID NO: 2530070
guagaaauuagacacaaac

SEQ ID NO: 2530072 - RNA, 19 nt, Artificial Sequence
  Description of Artificial Sequence: Synthetic oligonucleotide
  Sense strand starting at position 459 of SEQ ID NO: 1888359
acacucugacuguaguuau

SEQ ID NO: 2530073 - RNA, 19 nt, Artificial Sequence
  Description of Artificial Sequence: Synthetic oligonucleotide
  Antisense strand to SEQ ID NO: 2530072
auaacuacagucagagugu

SEQ ID NO: 2530074 - RNA, 19 nt, Artificial Sequence
  Description of Artificial Sequence: Synthetic oligonucleotide
  Sense strand starting at position 3047 of SEQ ID NO: 1888359
gcuauuuggucuguaccua

SEQ ID NO: 2530075 - RNA, 19 nt, Artificial Sequence
  Description of Artificial Sequence: Synthetic oligonucleotide
  Antisense strand to SEQ ID NO: 2530074
uagguacagaccaaauagc

SEQ ID NO: 2530076 - RNA, 19 nt, Artificial Sequence
  Description of Artificial Sequence: Synthetic oligonucleotide
  Sense strand starting at position 3855 of SEQ ID NO: 1888359
gcuagcuuguuauuuacua

SEQ ID NO: 2530077 - RNA, 19 nt, Artificial Sequence
  Description of Artificial Sequence: Synthetic oligonucleotide
  Antisense strand to SEQ ID NO: 2530076
uaguaaauaacaagcuagc

SEQ ID NO: 2530078 - RNA, 19 nt, Artificial Sequence
  Description of Artificial Sequence: Synthetic oligonucleotide
  Sense strand starting at position 3380 of SEQ ID NO: 1888359
aucaguagucacuaggguu

SEQ ID NO: 2530079 - RNA, 19 nt, Artificial Sequence
  Description of Artificial Sequence: Synthetic oligonucleotide
  Antisense strand to SEQ ID NO: 2530078
aacccuagugacuacugau

SEQ ID NO: 2530080 - RNA, 19 nt, Artificial Sequence
  Description of Artificial Sequence: Synthetic oligonucleotide
  Sense strand starting at position 3095 of SEQ ID NO: 1888359
agccuacaugcugauaauu

SEQ ID NO: 2530081 - RNA, 19 nt, Artificial Sequence
  Description of Artificial Sequence: Synthetic oligonucleotide
  Antisense strand to SEQ ID NO: 2530080
aauuaucagcauguaggcu

SEQ ID NO: 2530082 - RNA, 19 nt, Artificial Sequence
  Description of Artificial Sequence: Synthetic oligonucleotide
  Sense strand starting at position 1858 of SEQ ID NO: 1888359
gccguucucaugcugcuaa

SEQ ID NO: 2530083 - RNA, 19 nt, Artificial Sequence
  Description of Artificial Sequence: Synthetic oligonucleotide
  Antisense strand to SEQ ID NO: 2530082
uuagcagcaugagaacggc

SEQ ID NO: 2530084 - RNA, 19 nt, Artificial Sequence
  Description of Artificial Sequence: Synthetic oligonucleotide
  Sense strand starting at position 2821 of SEQ ID NO: 1888359
agguuucaacaggguugau

SEQ ID NO: 2530085 - RNA, 19 nt, Artificial Sequence
  Description of Artificial Sequence: Synthetic oligonucleotide
  Antisense strand to SEQ ID NO: 2530084
aucaacccuguugaaaccu

SEQ ID NO: 2530086 - RNA, 19 nt, Artificial Sequence
  Description of Artificial Sequence: Synthetic oligonucleotide
  Sense strand starting at position 3550 of SEQ ID NO: 1888359
ugcaaauucugggugacaa

SEQ ID NO: 2530087 - RNA, 19 nt, Artificial Sequence
  Description of Artificial Sequence: Synthetic oligonucleotide
  Antisense strand to SEQ ID NO: 2530086
uugucacccagaauuugca

SEQ ID NO: 2530088 - RNA, 19 nt, Artificial Sequence
  Description of Artificial Sequence: Synthetic oligonucleotide
  Sense strand starting at position 1735 of SEQ ID NO: 1888359
gugucuuuacauggaggga

SEQ ID NO: 2530089 - RNA, 19 nt, Artificial Sequence
  Description of Artificial Sequence: Synthetic oligonucleotide
  Antisense strand to SEQ ID NO: 2530088
ucccuccauguaaagacac

SEQ ID NO: 2530090 - RNA, 19 nt, Artificial Sequence
  Description of Artificial Sequence: Synthetic oligonucleotide
  Sense strand starting at position 982 of SEQ ID NO: 1888359
guuaguagguuauuaaaga

SEQ ID NO: 2530091 - RNA, 19 nt, Artificial Sequence
  Description of Artificial Sequence: Synthetic oligonucleotide
  Antisense strand to SEQ ID NO: 2530090
ucuuuaauaaccuacuaac

SEQ ID NO: 2530092 - RNA, 19 nt, Artificial Sequence
  Description of Artificial Sequence: Synthetic oligonucleotide
  Sense strand starting at position 1634 of SEQ ID NO: 1888359
ucucaaagucccggagaau

SEQ ID NO: 2530093 - RNA, 19 nt, Artificial Sequence
  Description of Artificial Sequence: Synthetic oligonucleotide
  Antisense strand to SEQ ID NO: 2530092
auucuccgggacuuugaga

SEQ ID NO: 2530094 - RNA, 19 nt, Artificial Sequence
  Description of Artificial Sequence: Synthetic oligonucleotide
  Sense strand starting at position 406 of SEQ ID NO: 1888359
acuagaaugcuguauugua

SEQ ID NO: 2530095 - RNA, 19 nt, Artificial Sequence
  Description of Artificial Sequence: Synthetic oligonucleotide
  Antisense strand to SEQ ID NO: 2530094
uacaauacagcauucuagu

SEQ ID NO: 2530096 - RNA, 19 nt, Artificial Sequence
  Description of Artificial Sequence: Synthetic oligonucleotide
  Sense strand starting at position 3549 of SEQ ID NO: 1888359
augcaaauucugggugaca

SEQ ID NO: 2530097 - RNA, 19 nt, Artificial Sequence
  Description of Artificial Sequence: Synthetic oligonucleotide
  Antisense strand to SEQ ID NO: 2530096
ugucacccagaauuugcau

SEQ ID NO: 2530098 - RNA, 19 nt, Artificial Sequence
  Description of Artificial Sequence: Synthetic oligonucleotide
  Sense strand starting at position 3551 of SEQ ID NO: 1888359
gcaaauucugggugacaau

SEQ ID NO: 2530099 - RNA, 19 nt, Artificial Sequence
  Description of Artificial Sequence: Synthetic oligonucleotide
  Antisense strand to SEQ ID NO: 2530098
auugucacccagaauuugc

SEQ ID NO: 2530100 - RNA, 19 nt, Artificial Sequence
  Description of Artificial Sequence: Synthetic oligonucleotide
  Sense strand starting at position 2830 of SEQ ID NO: 1888359
caggguugaugucucauga

SEQ ID NO: 2530101 - RNA, 19 nt, Artificial Sequence
  Description of Artificial Sequence: Synthetic oligonucleotide
  Antisense strand to SEQ ID NO: 2530100
ucaugagacaucaacccug

SEQ ID NO: 2530102 - RNA, 19 nt, Artificial Sequence
  Description of Artificial Sequence: Synthetic oligonucleotide
  Sense strand starting at position 554 of SEQ ID NO: 1888359
ugaagaaugucuuugcaau

SEQ ID NO: 2530103 - RNA, 19 nt, Artificial Sequence
  Description of Artificial Sequence: Synthetic oligonucleotide
  Antisense strand to SEQ ID NO: 2530102
auugcaaagacauucuuca

SEQ ID NO: 2530104 - RNA, 19 nt, Artificial Sequence
  Description of Artificial Sequence: Synthetic oligonucleotide
  Sense strand starting at position 552 of SEQ ID NO: 1888359
uaugaagaaugucuuugca

SEQ ID NO: 2530105 - RNA, 19 nt, Artificial Sequence
  Description of Artificial Sequence: Synthetic oligonucleotide
  Antisense strand to SEQ ID NO: 2530104
ugcaaagacauucuucaua

SEQ ID NO: 2530106 - RNA, 19 nt, Artificial Sequence
  Description of Artificial Sequence: Synthetic oligonucleotide
  Sense strand starting at position 1056 of SEQ ID NO: 1888359
guccauagaguaugaggua

SEQ ID NO: 2530107 - RNA, 19 nt, Artificial Sequence
  Description of Artificial Sequence: Synthetic oligonucleotide
  Antisense strand to SEQ ID NO: 2530106
uaccucauacucuauggac

SEQ ID NO: 2530108 - RNA, 19 nt, Artificial Sequence
  Description of Artificial Sequence: Synthetic oligonucleotide
  Sense strand starting at position 3765 of SEQ ID NO: 1888359
auuugagaaucauauuguc

SEQ ID NO: 2530109 - RNA, 19 nt, Artificial Sequence
  Description of Artificial Sequence: Synthetic oligonucleotide
  Antisense strand to SEQ ID NO: 2530108
gacaauaugauucucaaau

SEQ ID NO: 2530110 - RNA, 19 nt, Artificial Sequence
  Description of Artificial Sequence: Synthetic oligonucleotide
  Sense strand starting at position 416 of SEQ ID NO: 1888359
uguauuguacgggagguua

SEQ ID NO: 2530111 - RNA, 19 nt, Artificial Sequence
  Description of Artificial Sequence: Synthetic oligonucleotide
  Antisense strand to SEQ ID NO: 2530110
uaaccucccguacaauaca

SEQ ID NO: 2530112 - RNA, 19 nt, Artificial Sequence
  Description of Artificial Sequence: Synthetic oligonucleotide
  Sense strand starting at position 3563 of SEQ ID NO: 1888359
ugacaauggugugucaaug

SEQ ID NO: 2530113 - RNA, 19 nt, Artificial Sequence
  Description of Artificial Sequence: Synthetic oligonucleotide
  Antisense strand to SEQ ID NO: 2530112
cauugacacaccauuguca

SEQ ID NO: 2530114 - RNA, 19 nt, Artificial Sequence
  Description of Artificial Sequence: Synthetic oligonucleotide
  Sense strand starting at position 462 of SEQ ID NO: 1888359
cucugacuguaguuauaau

SEQ ID NO: 2530115 - RNA, 19 nt, Artificial Sequence
  Description of Artificial Sequence: Synthetic oligonucleotide
  Antisense strand to SEQ ID NO: 2530114
auuauaacuacagucagag

SEQ ID NO: 2530116 - RNA, 19 nt, Artificial Sequence
  Description of Artificial Sequence: Synthetic oligonucleotide
  Sense strand starting at position 3792 of SEQ ID NO: 1888359
uacgguuccuacuuagaau

SEQ ID NO: 2530117 - RNA, 19 nt, Artificial Sequence
  Description of Artificial Sequence: Synthetic oligonucleotide
  Antisense strand to SEQ ID NO: 2530116
auucuaaguaggaaccgua

SEQ ID NO: 2530118 - RNA, 19 nt, Artificial Sequence
  Description of Artificial Sequence: Synthetic oligonucleotide
  Sense strand starting at position 2138 of SEQ ID NO: 1888359
uccuuaggcaugugggaau

SEQ ID NO: 2530119 - RNA, 19 nt, Artificial Sequence
  Description of Artificial Sequence: Synthetic oligonucleotide
  Antisense strand to SEQ ID NO: 2530118
auucccacaugccuaagga

SEQ ID NO: 2530120 - RNA, 19 nt, Artificial Sequence
  Description of Artificial Sequence: Synthetic oligonucleotide
  Sense strand starting at position 2735 of SEQ ID NO: 1888361
uguccuuauacggagagga

SEQ ID NO: 2530121 - RNA, 19 nt, Artificial Sequence
  Description of Artificial Sequence: Synthetic oligonucleotide
  Antisense strand to SEQ ID NO: 2530120
uccucuccguauaaggaca

SEQ ID NO: 2530122 - RNA, 19 nt, Artificial Sequence
  Description of Artificial Sequence: Synthetic oligonucleotide
  Sense strand starting at position 2676 of SEQ ID NO: 1888361
cacagaggugguuaaggua

SEQ ID NO: 2530123 - RNA, 19 nt, Artificial Sequence
  Description of Artificial Sequence: Synthetic oligonucleotide
  Antisense strand to SEQ ID NO: 2530122
uaccuuaaccaccucugug

SEQ ID NO: 2530124 - RNA, 19 nt, Artificial Sequence
  Description of Artificial Sequence: Synthetic oligonucleotide
  Sense strand starting at position 3596 of SEQ ID NO: 1888361
acaacauccuggcuggaaa

SEQ ID NO: 2530125 - RNA, 19 nt, Artificial Sequence
  Description of Artificial Sequence: Synthetic oligonucleotide
  Antisense strand to SEQ ID NO: 2530124
uuuccagccaggauguugu

SEQ ID NO: 2530126 - RNA, 19 nt, Artificial Sequence
  Description of Artificial Sequence: Synthetic oligonucleotide
  Sense strand starting at position 3974 of SEQ ID NO: 1888361
cuguaaagaugaccuuauu

SEQ ID NO: 2530127 - RNA, 19 nt, Artificial Sequence
  Description of Artificial Sequence: Synthetic oligonucleotide
  Antisense strand to SEQ ID NO: 2530126
aauaaggucaucuuuacag

SEQ ID NO: 2530128 - RNA, 19 nt, Artificial Sequence
  Description of Artificial Sequence: Synthetic oligonucleotide
  Sense strand starting at position 129 of SEQ ID NO: 1888361
cagagauaggaguguguga

SEQ ID NO: 2530129 - RNA, 19 nt, Artificial Sequence
  Description of Artificial Sequence: Synthetic oligonucleotide
  Antisense strand to SEQ ID NO: 2530128
ucacacacuccuaucucug

SEQ ID NO: 2530130 - RNA, 19 nt, Artificial Sequence
  Description of Artificial Sequence: Synthetic oligonucleotide
  Sense strand starting at position 70 of SEQ ID NO: 1888361
cuggaaugugcuggaauaa

SEQ ID NO: 2530131 - RNA, 19 nt, Artificial Sequence
  Description of Artificial Sequence: Synthetic oligonucleotide
  Antisense strand to SEQ ID NO: 2530130
uuauuccagcacauuccag

SEQ ID NO: 2530132 - RNA, 19 nt, Artificial Sequence
  Description of Artificial Sequence: Synthetic oligonucleotide
  Sense strand starting at position 708 of SEQ ID NO: 1888361
gccagaggguuucugaaag

SEQ ID NO: 2530133 - RNA, 19 nt, Artificial Sequence
  Description of Artificial Sequence: Synthetic oligonucleotide
  Antisense strand to SEQ ID NO: 2530132
cuuucagaaacccucuggc

SEQ ID NO: 2530134 - RNA, 19 nt, Artificial Sequence
  Description of Artificial Sequence: Synthetic oligonucleotide
  Sense strand starting at position 3525 of SEQ ID NO: 1888361
gagucucugcagcaaauaa

SEQ ID NO: 2530135 - RNA, 19 nt, Artificial Sequence
  Description of Artificial Sequence: Synthetic oligonucleotide
  Antisense strand to SEQ ID NO: 2530134
uuauuugcugcagagacuc

SEQ ID NO: 2530136 - RNA, 19 nt, Artificial Sequence
  Description of Artificial Sequence: Synthetic oligonucleotide
  Sense strand starting at position 2782 of SEQ ID NO: 1888361
uggccuugugaggacagua

SEQ ID NO: 2530137 - RNA, 19 nt, Artificial Sequence
  Description of Artificial Sequence: Synthetic oligonucleotide
  Antisense strand to SEQ ID NO: 2530136
uacuguccucacaaggcca

SEQ ID NO: 2530138 - RNA, 19 nt, Artificial Sequence
  Description of Artificial Sequence: Synthetic oligonucleotide
  Sense strand starting at position 131 of SEQ ID NO: 1888361
gagauaggagugugugauc

SEQ ID NO: 2530139 - RNA, 19 nt, Artificial Sequence
  Description of Artificial Sequence: Synthetic oligonucleotide
  Antisense strand to SEQ ID NO: 2530138
gaucacacacuccuaucuc

SEQ ID NO: 2530140 - RNA, 19 nt, Artificial Sequence
  Description of Artificial Sequence: Synthetic oligonucleotide
  Sense strand starting at position 2268 of SEQ ID NO: 1888361
cuggcauggaaauguugau

SEQ ID NO: 2530141 - RNA, 19 nt, Artificial Sequence
  Description of Artificial Sequence: Synthetic oligonucleotide
  Antisense strand to SEQ ID NO: 2530140
aucaacauuuccaugccag

SEQ ID NO: 2530142 - RNA, 19 nt, Artificial Sequence
  Description of Artificial Sequence: Synthetic oligonucleotide
  Sense strand starting at position 3739 of SEQ ID NO: 1888361
ggaaaccuuuccuuccagu

SEQ ID NO: 2530143 - RNA, 19 nt, Artificial Sequence
  Description of Artificial Sequence: Synthetic oligonucleotide
  Antisense strand to SEQ ID NO: 2530142
acuggaaggaaagguuucc

SEQ ID NO: 2530144 - RNA, 19 nt, Artificial Sequence
  Description of Artificial Sequence: Synthetic oligonucleotide
  Sense strand starting at position 1608 of SEQ ID NO: 1888361
ucaaaucgauucuugucaa

SEQ ID NO: 2530145 - RNA, 19 nt, Artificial Sequence
  Description of Artificial Sequence: Synthetic oligonucleotide
  Antisense strand to SEQ ID NO: 2530144
uugacaagaaucgauuuga

SEQ ID NO: 2530146 - RNA, 19 nt, Artificial Sequence
  Description of Artificial Sequence: Synthetic oligonucleotide
  Sense strand starting at position 2943 of SEQ ID NO: 1888361
cgggaacucacacgauagu

SEQ ID NO: 2530147 - RNA, 19 nt, Artificial Sequence
  Description of Artificial Sequence: Synthetic oligonucleotide
  Antisense strand to SEQ ID NO: 2530146
acuaucgugugaguucccg

SEQ ID NO: 2530148 - RNA, 19 nt, Artificial Sequence
  Description of Artificial Sequence: Synthetic oligonucleotide
  Sense strand starting at position 1294 of SEQ ID NO: 1888361
gcaauacaucccugcaaag

SEQ ID NO: 2530149 - RNA, 19 nt, Artificial Sequence
  Description of Artificial Sequence: Synthetic oligonucleotide
  Antisense strand to SEQ ID NO: 2530148
cuuugcagggauguauugc

SEQ ID NO: 2530150 - RNA, 19 nt, Artificial Sequence
  Description of Artificial Sequence: Synthetic oligonucleotide
  Sense strand starting at position 3229 of SEQ ID NO: 1888361
gugacugugacgcaucaga

SEQ ID NO: 2530151 - RNA, 19 nt, Artificial Sequence
  Description of Artificial Sequence: Synthetic oligonucleotide
  Antisense strand to SEQ ID NO: 2530150
ucugaugcgucacagucac

SEQ ID NO: 2530152 - RNA, 19 nt, Artificial Sequence
  Description of Artificial Sequence: Synthetic oligonucleotide
  Sense strand starting at position 1203 of SEQ ID NO: 1888361
uggguccuccguggagaaa

SEQ ID NO: 2530153 - RNA, 19 nt, Artificial Sequence
  Description of Artificial Sequence: Synthetic oligonucleotide
  Antisense strand to SEQ ID NO: 2530152
uuucuccacggaggaccca

SEQ ID NO: 2530154 - RNA, 19 nt, Artificial Sequence
  Description of Artificial Sequence: Synthetic oligonucleotide
  Sense strand starting at position 1151 of SEQ ID NO: 1888361
cugaauuccuccgcaggau

SEQ ID NO: 2530155 - RNA, 19 nt, Artificial Sequence
  Description of Artificial Sequence: Synthetic oligonucleotide
  Antisense strand to SEQ ID NO: 2530154
auccugcggaggaauucag

SEQ ID NO: 2530156 - RNA, 19 nt, Artificial Sequence
  Description of Artificial Sequence: Synthetic oligonucleotide
  Sense strand starting at position 1202 of SEQ ID NO: 1888361
cuggguccuccguggagaa

SEQ ID NO: 2530157 - RNA, 19 nt, Artificial Sequence
  Description of Artificial Sequence: Synthetic oligonucleotide
  Antisense strand to SEQ ID NO: 2530156
uucuccacggaggacccag

SEQ ID NO: 2530158 - RNA, 19 nt, Artificial Sequence
  Description of Artificial Sequence: Synthetic oligonucleotide
  Sense strand starting at position 1611 of SEQ ID NO: 1888361
aaucgauucuugucaaagc

SEQ ID NO: 2530159 - RNA, 19 nt, Artificial Sequence
  Description of Artificial Sequence: Synthetic oligonucleotide
  Antisense strand to SEQ ID NO: 2530158
gcuuugacaagaaucgauu

SEQ ID NO: 2530160 - RNA, 19 nt, Artificial Sequence
  Description of Artificial Sequence: Synthetic oligonucleotide
  Sense strand starting at position 3949 of SEQ ID NO: 1888361
gaaagaucugucugugucc

SEQ ID NO: 2530161 - RNA, 19 nt, Artificial Sequence
  Description of Artificial Sequence: Synthetic oligonucleotide
  Antisense strand to SEQ ID NO: 2530160
ggacacagacagaucuuuc

SEQ ID NO: 2530162 - RNA, 19 nt, Artificial Sequence
  Description of Artificial Sequence: Synthetic oligonucleotide
  Sense strand starting at position 3776 of SEQ ID NO: 1888361
gcacuucgugucuagggau

SEQ ID NO: 2530163 - RNA, 19 nt, Artificial Sequence
  Description of Artificial Sequence: Synthetic oligonucleotide
  Antisense strand to SEQ ID NO: 2530162
aucccuagacacgaagugc

SEQ ID NO: 2530164 - RNA, 19 nt, Artificial Sequence
  Description of Artificial Sequence: Synthetic oligonucleotide
  Sense strand starting at position 3954 of SEQ ID NO: 1888361
aucugucugugucccagaa

SEQ ID NO: 2530165 - RNA, 19 nt, Artificial Sequence
  Description of Artificial Sequence: Synthetic oligonucleotide
  Antisense strand to SEQ ID NO: 2530164
uucugggacacagacagau

SEQ ID NO: 2530166 - RNA, 19 nt, Artificial Sequence
  Description of Artificial Sequence: Synthetic oligonucleotide
  Sense strand starting at position 1672 of SEQ ID NO: 1888361
gugggcuuccacugugaga

SEQ ID NO: 2530167 - RNA, 19 nt, Artificial Sequence
  Description of Artificial Sequence: Synthetic oligonucleotide
  Antisense strand to SEQ ID NO: 2530166
ucucacaguggaagcccac

SEQ ID NO: 2530168 - RNA, 19 nt, Artificial Sequence
  Description of Artificial Sequence: Synthetic oligonucleotide
  Sense strand starting at position 2918 of SEQ ID NO: 1888361
ggcugugggacuuguuaca

SEQ ID NO: 2530169 - RNA, 19 nt, Artificial Sequence
  Description of Artificial Sequence: Synthetic oligonucleotide
  Antisense strand to SEQ ID NO: 2530168
uguaacaagucccacagcc

SEQ ID NO: 2530170 - RNA, 19 nt, Artificial Sequence
  Description of Artificial Sequence: Synthetic oligonucleotide
  Sense strand starting at position 140 of SEQ ID NO: 1888361
gugugugauccugggugga

SEQ ID NO: 2530171 - RNA, 19 nt, Artificial Sequence
  Description of Artificial Sequence: Synthetic oligonucleotide
  Antisense strand to SEQ ID NO: 2530170
uccacccaggaucacacac

SEQ ID NO: 2530172 - RNA, 19 nt, Artificial Sequence
  Description of Artificial Sequence: Synthetic oligonucleotide
  Sense strand starting at position 3521 of SEQ ID NO: 1888361
aguggagucucugcagcaa

SEQ ID NO: 2530173 - RNA, 19 nt, Artificial Sequence
  Description of Artificial Sequence: Synthetic oligonucleotide
  Antisense strand to SEQ ID NO: 2530172
uugcugcagagacuccacu

SEQ ID NO: 2530174 - RNA, 19 nt, Artificial Sequence
  Description of Artificial Sequence: Synthetic oligonucleotide
  Sense strand starting at position 1150 of SEQ ID NO: 1888361
gcugaauuccuccgcagga

SEQ ID NO: 2530175 - RNA, 19 nt, Artificial Sequence
  Description of Artificial Sequence: Synthetic oligonucleotide
  Antisense strand to SEQ ID NO: 2530174
uccugcggaggaauucagc

SEQ ID NO: 2530176 - RNA, 19 nt, Artificial Sequence
  Description of Artificial Sequence: Synthetic oligonucleotide
  Sense strand starting at position 2280 of SEQ ID NO: 1888361
uguugauucuucccugucu

SEQ ID NO: 2530177 - RNA, 19 nt, Artificial Sequence
  Description of Artificial Sequence: Synthetic oligonucleotide
  Antisense strand to SEQ ID NO: 2530176
agacagggaagaaucaaca

SEQ ID NO: 2530178 - RNA, 19 nt, Artificial Sequence
  Description of Artificial Sequence: Synthetic oligonucleotide
  Sense strand starting at position 2606 of SEQ ID NO: 1888361
cccagaucuguaugcugca

SEQ ID NO: 2530179 - RNA, 19 nt, Artificial Sequence
  Description of Artificial Sequence: Synthetic oligonucleotide
  Antisense strand to SEQ ID NO: 2530178
ugcagcauacagaucuggg

SEQ ID NO: 2530180 - RNA, 19 nt, Artificial Sequence
  Description of Artificial Sequence: Synthetic oligonucleotide
  Sense strand starting at position 3013 of SEQ ID NO: 1888361
ccagcauuccggugaggug

SEQ ID NO: 2530181 - RNA, 19 nt, Artificial Sequence
  Description of Artificial Sequence: Synthetic oligonucleotide
  Antisense strand to SEQ ID NO: 2530180
caccucaccggaaugcugg

SEQ ID NO: 2530182 - RNA, 19 nt, Artificial Sequence
  Description of Artificial Sequence: Synthetic oligonucleotide
  Sense strand starting at position 1201 of SEQ ID NO: 1888361
gcuggguccuccguggaga

SEQ ID NO: 2530183 - RNA, 19 nt, Artificial Sequence
  Description of Artificial Sequence: Synthetic oligonucleotide
  Antisense strand to SEQ ID NO: 2530182
ucuccacggaggacccagc

SEQ ID NO: 2530184 - RNA, 19 nt, Artificial Sequence
  Description of Artificial Sequence: Synthetic oligonucleotide
  Sense strand starting at position 1275 of SEQ ID NO: 1888361
gaaggaacuuucuggaaau

SEQ ID NO: 2530185 - RNA, 19 nt, Artificial Sequence
  Description of Artificial Sequence: Synthetic oligonucleotide
  Antisense strand to SEQ ID NO: 2530184
auuuccagaaaguuccuuc

SEQ ID NO: 2530186 - RNA, 19 nt, Artificial Sequence
  Description of Artificial Sequence: Synthetic oligonucleotide
  Sense strand starting at position 1276 of SEQ ID NO: 1888361
aaggaacuuucuggaaaug

SEQ ID NO: 2530187 - RNA, 19 nt, Artificial Sequence
  Description of Artificial Sequence: Synthetic oligonucleotide
  Antisense strand to SEQ ID NO: 2530186
cauuuccagaaaguuccuu

SEQ ID NO: 2530188 - RNA, 19 nt, Artificial Sequence
  Description of Artificial Sequence: Synthetic oligonucleotide
  Sense strand starting at position 307 of SEQ ID NO: 1888361
guggaaguggcucgugaug

SEQ ID NO: 2530189 - RNA, 19 nt, Artificial Sequence
  Description of Artificial Sequence: Synthetic oligonucleotide
  Antisense strand to SEQ ID NO: 2530188
caucacgagccacuuccac

SEQ ID NO: 2530190 - RNA, 19 nt, Artificial Sequence
  Description of Artificial Sequence: Synthetic oligonucleotide
  Sense strand starting at position 2216 of SEQ ID NO: 1888361
ggugacguuugcucuuuga

SEQ ID NO: 2530191 - RNA, 19 nt, Artificial Sequence
  Description of Artificial Sequence: Synthetic oligonucleotide
  Antisense strand to SEQ ID NO: 2530190
ucaaagagcaaacgucacc

SEQ ID NO: 2530192 - RNA, 19 nt, Artificial Sequence
  Description of Artificial Sequence: Synthetic oligonucleotide
  Sense strand starting at position 1793 of SEQ ID NO: 1888361
guuuguucagccggaaggu

SEQ ID NO: 2530193 - RNA, 19 nt, Artificial Sequence
  Description of Artificial Sequence: Synthetic oligonucleotide
  Antisense strand to SEQ ID NO: 2530192
accuuccggcugaacaaac

SEQ ID NO: 2530194 - RNA, 19 nt, Artificial Sequence
  Description of Artificial Sequence: Synthetic oligonucleotide
  Sense strand starting at position 1621 of SEQ ID NO: 1888361
ugucaaagccgucguggaa

SEQ ID NO: 2530195 - RNA, 19 nt, Artificial Sequence
  Description of Artificial Sequence: Synthetic oligonucleotide
  Antisense strand to SEQ ID NO: 2530194
uuccacgacggcuuugaca

SEQ ID NO: 2530196 - RNA, 19 nt, Artificial Sequence
  Description of Artificial Sequence: Synthetic oligonucleotide
  Sense strand starting at position 1790 of SEQ ID NO: 1888361
cucguuuguucagccggaa

SEQ ID NO: 2530197 - RNA, 19 nt, Artificial Sequence
  Description of Artificial Sequence: Synthetic oligonucleotide
  Antisense strand to SEQ ID NO: 2530196
uuccggcugaacaaacgag

SEQ ID NO: 2530198 - RNA, 19 nt, Artificial Sequence
  Description of Artificial Sequence: Synthetic oligonucleotide
  Sense strand starting at position 2952 of SEQ ID NO: 1888361
acacgauagucacagcaca

SEQ ID NO: 2530199 - RNA, 19 nt, Artificial Sequence
  Description of Artificial Sequence: Synthetic oligonucleotide
  Antisense strand to SEQ ID NO: 2530198
ugugcugugacuaucgugu

SEQ ID NO: 2530200 - RNA, 19 nt, Artificial Sequence
  Description of Artificial Sequence: Synthetic oligonucleotide
  Sense strand starting at position 2736 of SEQ ID NO: 1888360
uguccuuauacggagagga

SEQ ID NO: 2530201 - RNA, 19 nt, Artificial Sequence
  Description of Artificial Sequence: Synthetic oligonucleotide
  Antisense strand to SEQ ID NO: 2530200
uccucuccguauaaggaca

SEQ ID NO: 2530202 - RNA, 19 nt, Artificial Sequence
  Description of Artificial Sequence: Synthetic oligonucleotide
  Sense strand starting at position 2677 of SEQ ID NO: 1888360
cacagaggugguuaaggua

SEQ ID NO: 2530203 - RNA, 19 nt, Artificial Sequence
  Description of Artificial Sequence: Synthetic oligonucleotide
  Antisense strand to SEQ ID NO: 2530202
uaccuuaaccaccucugug

SEQ ID NO: 2530204 - RNA, 19 nt, Artificial Sequence
  Description of Artificial Sequence: Synthetic oligonucleotide
  Sense strand starting at position 3597 of SEQ ID NO: 1888360
acaacauccuggcuggaaa

SEQ ID NO: 2530205 - RNA, 19 nt, Artificial Sequence
  Description of Artificial Sequence: Synthetic oligonucleotide
  Antisense strand to SEQ ID NO: 2530204
uuuccagccaggauguugu

SEQ ID NO: 2530206 - RNA, 19 nt, Artificial Sequence
  Description of Artificial Sequence: Synthetic oligonucleotide
  Sense strand starting at position 3975 of SEQ ID NO: 1888360
cuguaaagaugaccuuauu

SEQ ID NO: 2530207 - RNA, 19 nt, Artificial Sequence
  Description of Artificial Sequence: Synthetic oligonucleotide
  Antisense strand to SEQ ID NO: 2530206
aauaaggucaucuuuacag

SEQ ID NO: 2530208 - RNA, 19 nt, Artificial Sequence
  Description of Artificial Sequence: Synthetic oligonucleotide
  Sense strand starting at position 3526 of SEQ ID NO: 1888360
gagucucugcagcaaauaa

SEQ ID NO: 2530209 - RNA, 19 nt, Artificial Sequence
  Description of Artificial Sequence: Synthetic oligonucleotide
  Antisense strand to SEQ ID NO: 2530208
uuauuugcugcagagacuc

SEQ ID NO: 2530210 - RNA, 19 nt, Artificial Sequence
  Description of Artificial Sequence: Synthetic oligonucleotide
  Sense strand starting at position 2269 of SEQ ID NO: 1888360
cuggcauggaaauguugau

SEQ ID NO: 2530211 - RNA, 19 nt, Artificial Sequence
  Description of Artificial Sequence: Synthetic oligonucleotide
  Antisense strand to SEQ ID NO: 2530210
aucaacauuuccaugccag

SEQ ID NO: 2530212 - RNA, 19 nt, Artificial Sequence
  Description of Artificial Sequence: Synthetic oligonucleotide
  Sense strand starting at position 3740 of SEQ ID NO: 1888360
ggaaaccuuuccuuccagu

SEQ ID NO: 2530213 - RNA, 19 nt, Artificial Sequence
  Description of Artificial Sequence: Synthetic oligonucleotide
  Antisense strand to SEQ ID NO: 2530212
acuggaaggaaagguuucc

SEQ ID NO: 2530214 - RNA, 19 nt, Artificial Sequence
  Description of Artificial Sequence: Synthetic oligonucleotide
  Sense strand starting at position 2944 of SEQ ID NO: 1888360
cgggaacucacacgauagu

SEQ ID NO: 2530215 - RNA, 19 nt, Artificial Sequence
  Description of Artificial Sequence: Synthetic oligonucleotide
  Antisense strand to SEQ ID NO: 2530214
acuaucgugugaguucccg

SEQ ID NO: 2530216 - RNA, 19 nt, Artificial Sequence
  Description of Artificial Sequence: Synthetic oligonucleotide
  Sense strand starting at position 3230 of SEQ ID NO: 1888360
gugacugugacgcaucaga

SEQ ID NO: 2530217 - RNA, 19 nt, Artificial Sequence
  Description of Artificial Sequence: Synthetic oligonucleotide
  Antisense strand to SEQ ID NO: 2530216
ucugaugcgucacagucac

SEQ ID NO: 2530218 - RNA, 19 nt, Artificial Sequence
  Description of Artificial Sequence: Synthetic oligonucleotide
  Sense strand starting at position 2299 of SEQ ID NO: 1888360
ugccuaagacagugugauu

SEQ ID NO: 2530219 - RNA, 19 nt, Artificial Sequence
  Description of Artificial Sequence: Synthetic oligonucleotide
  Antisense strand to SEQ ID NO: 2530218
aaucacacugucuuaggca

SEQ ID NO: 2530220 - RNA, 19 nt, Artificial Sequence
  Description of Artificial Sequence: Synthetic oligonucleotide
  Sense strand starting at position 3950 of SEQ ID NO: 1888360
gaaagaucugucugugucc

SEQ ID NO: 2530221 - RNA, 19 nt, Artificial Sequence
  Description of Artificial Sequence: Synthetic oligonucleotide
  Antisense strand to SEQ ID NO: 2530220
ggacacagacagaucuuuc

SEQ ID NO: 2530222 - RNA, 19 nt, Artificial Sequence
  Description of Artificial Sequence: Synthetic oligonucleotide
  Sense strand starting at position 3777 of SEQ ID NO: 1888360
gcacuucgugucuagggau

SEQ ID NO: 2530223 - RNA, 19 nt, Artificial Sequence
  Description of Artificial Sequence: Synthetic oligonucleotide
  Antisense strand to SEQ ID NO: 2530222
aucccuagacacgaagugc

SEQ ID NO: 2530224 - RNA, 19 nt, Artificial Sequence
  Description of Artificial Sequence: Synthetic oligonucleotide
  Sense strand starting at position 3955 of SEQ ID NO: 1888360
aucugucugugucccagaa

SEQ ID NO: 2530225 - RNA, 19 nt, Artificial Sequence
  Description of Artificial Sequence: Synthetic oligonucleotide
  Antisense strand to SEQ ID NO: 2530224
uucugggacacagacagau

SEQ ID NO: 2530226 - RNA, 19 nt, Artificial Sequence
  Description of Artificial Sequence: Synthetic oligonucleotide
  Sense strand starting at position 2919 of SEQ ID NO: 1888360
ggcugugggacuuguuaca

SEQ ID NO: 2530227 - RNA, 19 nt, Artificial Sequence
  Description of Artificial Sequence: Synthetic oligonucleotide
  Antisense strand to SEQ ID NO: 2530226
uguaacaagucccacagcc

SEQ ID NO: 2530228 - RNA, 19 nt, Artificial Sequence
  Description of Artificial Sequence: Synthetic oligonucleotide
  Sense strand starting at position 3522 of SEQ ID NO: 1888360
aguggagucucugcagcaa

SEQ ID NO: 2530229 - RNA, 19 nt, Artificial Sequence
  Description of Artificial Sequence: Synthetic oligonucleotide
  Antisense strand to SEQ ID NO: 2530228
uugcugcagagacuccacu

SEQ ID NO: 2530230 - RNA, 19 nt, Artificial Sequence
  Description of Artificial Sequence: Synthetic oligonucleotide
  Sense strand starting at position 2281 of SEQ ID NO: 1888360
uguugauucuucccugucu

SEQ ID NO: 2530231 - RNA, 19 nt, Artificial Sequence
  Description of Artificial Sequence: Synthetic oligonucleotide
  Antisense strand to SEQ ID NO: 2530230
agacagggaagaaucaaca

SEQ ID NO: 2530232 - RNA, 19 nt, Artificial Sequence
  Description of Artificial Sequence: Synthetic oligonucleotide
  Sense strand starting at position 2607 of SEQ ID NO: 1888360
cccagaucuguaugcugca

SEQ ID NO: 2530233 - RNA, 19 nt, Artificial Sequence
  Description of Artificial Sequence: Synthetic oligonucleotide
  Antisense strand to SEQ ID NO: 2530232
ugcagcauacagaucuggg

SEQ ID NO: 2530234 - RNA, 19 nt, Artificial Sequence
  Description of Artificial Sequence: Synthetic oligonucleotide
  Sense strand starting at position 3014 of SEQ ID NO: 1888360
ccagcauuccggugaggug

SEQ ID NO: 2530235 - RNA, 19 nt, Artificial Sequence
  Description of Artificial Sequence: Synthetic oligonucleotide
  Antisense strand to SEQ ID NO: 2530234
caccucaccggaaugcugg

SEQ ID NO: 2530236 - RNA, 19 nt, Artificial Sequence
  Description of Artificial Sequence: Synthetic oligonucleotide
  Sense strand starting at position 2217 of SEQ ID NO: 1888360
ggugacguuugcucuuuga

SEQ ID NO: 2530237 - RNA, 19 nt, Artificial Sequence
  Description of Artificial Sequence: Synthetic oligonucleotide
  Antisense strand to SEQ ID NO: 2530236
ucaaagagcaaacgucacc

SEQ ID NO: 2530238 - RNA, 19 nt, Artificial Sequence
  Description of Artificial Sequence: Synthetic oligonucleotide
  Sense strand starting at position 2869 of SEQ ID NO: 1888360
ccuccugaauggugagaga

SEQ ID NO: 2530239 - RNA, 19 nt, Artificial Sequence
  Description of Artificial Sequence: Synthetic oligonucleotide
  Antisense strand to SEQ ID NO: 2530238
ucucucaccauucaggagg

SEQ ID NO: 2530240 - RNA, 19 nt, Artificial Sequence
  Description of Artificial Sequence: Synthetic oligonucleotide
  Sense strand starting at position 2953 of SEQ ID NO: 1888360
acacgauagucacagcaca

SEQ ID NO: 2530241 - RNA, 19 nt, Artificial Sequence
  Description of Artificial Sequence: Synthetic oligonucleotide
  Antisense strand to SEQ ID NO: 2530240
ugugcugugacuaucgugu

SEQ ID NO: 2530242 - RNA, 19 nt, Artificial Sequence
  Description of Artificial Sequence: Synthetic oligonucleotide
  Sense strand starting at position 3780 of SEQ ID NO: 1888360
cuucgugucuagggaugaa

SEQ ID NO: 2530243 - RNA, 19 nt, Artificial Sequence
  Description of Artificial Sequence: Synthetic oligonucleotide
  Antisense strand to SEQ ID NO: 2530242
uucaucccuagacacgaag

SEQ ID NO: 2530244 - RNA, 19 nt, Artificial Sequence
  Description of Artificial Sequence: Synthetic oligonucleotide
  Sense strand starting at position 85 of SEQ ID NO: 1888362
gucugugauuucccuuaua

SEQ ID NO: 2530245 - RNA, 19 nt, Artificial Sequence
  Description of Artificial Sequence: Synthetic oligonucleotide
  Antisense strand to SEQ ID NO: 2530244
uauaagggaaaucacagac

SEQ ID NO: 2530246 - RNA, 19 nt, Artificial Sequence
  Description of Artificial Sequence: Synthetic oligonucleotide
  Sense strand starting at position 10 of SEQ ID NO: 1888362
uguucuucugaagaacuua

SEQ ID NO: 2530247 - RNA, 19 nt, Artificial Sequence
  Description of Artificial Sequence: Synthetic oligonucleotide
  Antisense strand to SEQ ID NO: 2530246
uaaguucuucagaagaaca

SEQ ID NO: 2530248 - RNA, 19 nt, Artificial Sequence
  Description of Artificial Sequence: Synthetic oligonucleotide
  Sense strand starting at position 593 of SEQ ID NO: 1888362
aucuuaaauguugggaaca

SEQ ID NO: 2530249 - RNA, 19 nt, Artificial Sequence
  Description of Artificial Sequence: Synthetic oligonucleotide
  Antisense strand to SEQ ID NO: 2530248
uguucccaacauuuaagau

SEQ ID NO: 2530250 - RNA, 19 nt, Artificial Sequence
  Description of Artificial Sequence: Synthetic oligonucleotide
  Sense strand starting at position 3567 of SEQ ID NO: 1888362
gauauagcacaugaguuua

SEQ ID NO: 2530251 - RNA, 19 nt, Artificial Sequence
  Description of Artificial Sequence: Synthetic oligonucleotide
  Antisense strand to SEQ ID NO: 2530250
uaaacucaugugcuauauc

SEQ ID NO: 2530252 - RNA, 19 nt, Artificial Sequence
  Description of Artificial Sequence: Synthetic oligonucleotide
  Sense strand starting at position 3851 of SEQ ID NO: 1888362
gaaauaucuccagggagca

SEQ ID NO: 2530253 - RNA, 19 nt, Artificial Sequence
  Description of Artificial Sequence: Synthetic oligonucleotide
  Antisense strand to SEQ ID NO: 2530252
ugcucccuggagauauuuc

SEQ ID NO: 2530254 - RNA, 19 nt, Artificial Sequence
  Description of Artificial Sequence: Synthetic oligonucleotide
  Sense strand starting at position 78 of SEQ ID NO: 1888362
ccauauugucugugauuuc

SEQ ID NO: 2530255 - RNA, 19 nt, Artificial Sequence
  Description of Artificial Sequence: Synthetic oligonucleotide
  Antisense strand to SEQ ID NO: 2530254
gaaaucacagacaauaugg

SEQ ID NO: 2530256 - RNA, 19 nt, Artificial Sequence
  Description of Artificial Sequence: Synthetic oligonucleotide
  Sense strand starting at position 2599 of SEQ ID NO: 1888362
guccgauuucccugaaccu

SEQ ID NO: 2530257 - RNA, 19 nt, Artificial Sequence
  Description of Artificial Sequence: Synthetic oligonucleotide
  Antisense strand to SEQ ID NO: 2530256
agguucagggaaaucggac

SEQ ID NO: 2530258 - RNA, 19 nt, Artificial Sequence
  Description of Artificial Sequence: Synthetic oligonucleotide
  Sense strand starting at position 973 of SEQ ID NO: 1888362
ggguaauaaagccauaagu

SEQ ID NO: 2530259 - RNA, 19 nt, Artificial Sequence
  Description of Artificial Sequence: Synthetic oligonucleotide
  Antisense strand to SEQ ID NO: 2530258
acuuauggcuuuauuaccc

SEQ ID NO: 2530260 - RNA, 19 nt, Artificial Sequence
  Description of Artificial Sequence: Synthetic oligonucleotide
  Sense strand starting at position 3697 of SEQ ID NO: 1888362
gcugcaaugcagcucuuua

SEQ ID NO: 2530261 - RNA, 19 nt, Artificial Sequence
  Description of Artificial Sequence: Synthetic oligonucleotide
  Antisense strand to SEQ ID NO: 2530260
uaaagagcugcauugcagc

SEQ ID NO: 2530262 - RNA, 19 nt, Artificial Sequence
  Description of Artificial Sequence: Synthetic oligonucleotide
  Sense strand starting at position 1468 of SEQ ID NO: 1888362
cugucaaagcucuagaaua

SEQ ID NO: 2530263 - RNA, 19 nt, Artificial Sequence
  Description of Artificial Sequence: Synthetic oligonucleotide
  Antisense strand to SEQ ID NO: 2530262
uauucuagagcuuugacag

SEQ ID NO: 2530264 - RNA, 19 nt, Artificial Sequence
  Description of Artificial Sequence: Synthetic oligonucleotide
  Sense strand starting at position 1047 of SEQ ID NO: 1888362
cuagcacuucucuaagaug

SEQ ID NO: 2530265 - RNA, 19 nt, Artificial Sequence
  Description of Artificial Sequence: Synthetic oligonucleotide
  Antisense strand to SEQ ID NO: 2530264
caucuuagagaagugcuag

SEQ ID NO: 2530266 - RNA, 19 nt, Artificial Sequence
  Description of Artificial Sequence: Synthetic oligonucleotide
  Sense strand starting at position 760 of SEQ ID NO: 1888362
guguauauuucccauuuaa

SEQ ID NO: 2530267 - RNA, 19 nt, Artificial Sequence
  Description of Artificial Sequence: Synthetic oligonucleotide
  Antisense strand to SEQ ID NO: 2530266
uuaaaugggaaauauacac

SEQ ID NO: 2530268 - RNA, 19 nt, Artificial Sequence
  Description of Artificial Sequence: Synthetic oligonucleotide
  Sense strand starting at position 3388 of SEQ ID NO: 1888362
aguaucaaugaguauaugu

SEQ ID NO: 2530269 - RNA, 19 nt, Artificial Sequence
  Description of Artificial Sequence: Synthetic oligonucleotide
  Antisense strand to SEQ ID NO: 2530268
acauauacucauugauacu

SEQ ID NO: 2530270 - RNA, 19 nt, Artificial Sequence
  Description of Artificial Sequence: Synthetic oligonucleotide
  Sense strand starting at position 1618 of SEQ ID NO: 1888362
gcugcaucccgguaaauuu

SEQ ID NO: 2530271 - RNA, 19 nt, Artificial Sequence
  Description of Artificial Sequence: Synthetic oligonucleotide
  Antisense strand to SEQ ID NO: 2530270
aaauuuaccgggaugcagc

SEQ ID NO: 2530272 - RNA, 19 nt, Artificial Sequence
  Description of Artificial Sequence: Synthetic oligonucleotide
  Sense strand starting at position 268 of SEQ ID NO: 1888362
guguauugugugcugcaaa

SEQ ID NO: 2530273 - RNA, 19 nt, Artificial Sequence
  Description of Artificial Sequence: Synthetic oligonucleotide
  Antisense strand to SEQ ID NO: 2530272
uuugcagcacacaauacac

SEQ ID NO: 2530274 - RNA, 19 nt, Artificial Sequence
  Description of Artificial Sequence: Synthetic oligonucleotide
  Sense strand starting at position 2566 of SEQ ID NO: 1888362
gggaauaucuguguaauag

SEQ ID NO: 2530275 - RNA, 19 nt, Artificial Sequence
  Description of Artificial Sequence: Synthetic oligonucleotide
  Antisense strand to SEQ ID NO: 2530274
cuauuacacagauauuccc

SEQ ID NO: 2530276 - RNA, 19 nt, Artificial Sequence
  Description of Artificial Sequence: Synthetic oligonucleotide
  Sense strand starting at position 3585 of SEQ ID NO: 1888362
agauucuuuacaugagggu

SEQ ID NO: 2530277 - RNA, 19 nt, Artificial Sequence
  Description of Artificial Sequence: Synthetic oligonucleotide
  Antisense strand to SEQ ID NO: 2530276
acccucauguaaagaaucu

SEQ ID NO: 2530278 - RNA, 19 nt, Artificial Sequence
  Description of Artificial Sequence: Synthetic oligonucleotide
  Sense strand starting at position 2779 of SEQ ID NO: 1888362
uuuaaacaguagucaaaug

SEQ ID NO: 2530279 - RNA, 19 nt, Artificial Sequence
  Description of Artificial Sequence: Synthetic oligonucleotide
  Antisense strand to SEQ ID NO: 2530278
cauuugacuacuguuuaaa

SEQ ID NO: 2530280 - RNA, 19 nt, Artificial Sequence
  Description of Artificial Sequence: Synthetic oligonucleotide
  Sense strand starting at position 1070 of SEQ ID NO: 1888362
uugggauaucauugagagc

SEQ ID NO: 2530281 - RNA, 19 nt, Artificial Sequence
  Description of Artificial Sequence: Synthetic oligonucleotide
  Antisense strand to SEQ ID NO: 2530280
gcucucaaugauaucccaa

SEQ ID NO: 2530282 - RNA, 19 nt, Artificial Sequence
  Description of Artificial Sequence: Synthetic oligonucleotide
  Sense strand starting at position 2868 of SEQ ID NO: 1888362
uguagaagauaaucuguua

SEQ ID NO: 2530283 - RNA, 19 nt, Artificial Sequence
  Description of Artificial Sequence: Synthetic oligonucleotide
  Antisense strand to SEQ ID NO: 2530282
uaacagauuaucuucuaca

SEQ ID NO: 2530284 - RNA, 19 nt, Artificial Sequence
  Description of Artificial Sequence: Synthetic oligonucleotide
  Sense strand starting at position 3387 of SEQ ID NO: 1888362
caguaucaaugaguauaug

SEQ ID NO: 2530285 - RNA, 19 nt, Artificial Sequence
  Description of Artificial Sequence: Synthetic oligonucleotide
  Antisense strand to SEQ ID NO: 2530284
cauauacucauugauacug

SEQ ID NO: 2530286 - RNA, 19 nt, Artificial Sequence
  Description of Artificial Sequence: Synthetic oligonucleotide
  Sense strand starting at position 77 of SEQ ID NO: 1888362
gccauauugucugugauuu

SEQ ID NO: 2530287 - RNA, 19 nt, Artificial Sequence
  Description of Artificial Sequence: Synthetic oligonucleotide
  Antisense strand to SEQ ID NO: 2530286
aaaucacagacaauauggc

SEQ ID NO: 2530288 - RNA, 19 nt, Artificial Sequence
  Description of Artificial Sequence: Synthetic oligonucleotide
  Sense strand starting at position 3506 of SEQ ID NO: 1888362
uuuauaauuugggaaacuc

SEQ ID NO: 2530289 - RNA, 19 nt, Artificial Sequence
  Description of Artificial Sequence: Synthetic oligonucleotide
  Antisense strand to SEQ ID NO: 2530288
gaguuucccaaauuauaaa

SEQ ID NO: 2530290 - RNA, 19 nt, Artificial Sequence
  Description of Artificial Sequence: Synthetic oligonucleotide
  Sense strand starting at position 69 of SEQ ID NO: 1888362
agaugauugccauauuguc

SEQ ID NO: 2530291 - RNA, 19 nt, Artificial Sequence
  Description of Artificial Sequence: Synthetic oligonucleotide
  Antisense strand to SEQ ID NO: 2530290
gacaauauggcaaucaucu

SEQ ID NO: 2530292 - RNA, 19 nt, Artificial Sequence
  Description of Artificial Sequence: Synthetic oligonucleotide
  Sense strand starting at position 2466 of SEQ ID NO: 1888362
guagacuaauuagcaaauu

SEQ ID NO: 2530293 - RNA, 19 nt, Artificial Sequence
  Description of Artificial Sequence: Synthetic oligonucleotide
  Antisense strand to SEQ ID NO: 2530292
aauuugcuaauuagucuac

SEQ ID NO: 2530294 - RNA, 19 nt, Artificial Sequence
  Description of Artificial Sequence: Synthetic oligonucleotide
  Sense strand starting at position 3085 of SEQ ID NO: 1888362
gggccuaaauaauucuuua

SEQ ID NO: 2530295 - RNA, 19 nt, Artificial Sequence
  Description of Artificial Sequence: Synthetic oligonucleotide
  Antisense strand to SEQ ID NO: 2530294
uaaagaauuauuuaggccc

SEQ ID NO: 2530296 - RNA, 19 nt, Artificial Sequence
  Description of Artificial Sequence: Synthetic oligonucleotide
  Sense strand starting at position 2633 of SEQ ID NO: 1888362
ccugcuuuggucuaagaga

SEQ ID NO: 2530297 - RNA, 19 nt, Artificial Sequence
  Description of Artificial Sequence: Synthetic oligonucleotide
  Antisense strand to SEQ ID NO: 2530296
ucucuuagaccaaagcagg

SEQ ID NO: 2530298 - RNA, 19 nt, Artificial Sequence
  Description of Artificial Sequence: Synthetic oligonucleotide
  Sense strand starting at position 3580 of SEQ ID NO: 1888362
aguuuagauucuuuacaug

SEQ ID NO: 2530299 - RNA, 19 nt, Artificial Sequence
  Description of Artificial Sequence: Synthetic oligonucleotide
  Antisense strand to SEQ ID NO: 2530298
cauguaaagaaucuaaacu

SEQ ID NO: 2530300 - RNA, 19 nt, Artificial Sequence
  Description of Artificial Sequence: Synthetic oligonucleotide
  Sense strand starting at position 249 of SEQ ID NO: 1888362
cuuaaaguccuggaagugu

SEQ ID NO: 2530301 - RNA, 19 nt, Artificial Sequence
  Description of Artificial Sequence: Synthetic oligonucleotide
  Antisense strand to SEQ ID NO: 2530300
acacuuccaggacuuuaag

SEQ ID NO: 2530302 - RNA, 19 nt, Artificial Sequence
  Description of Artificial Sequence: Synthetic oligonucleotide
  Sense strand starting at position 548 of SEQ ID NO: 1888362
guuuauggacgguaguaaa

SEQ ID NO: 2530303 - RNA, 19 nt, Artificial Sequence
  Description of Artificial Sequence: Synthetic oligonucleotide
  Antisense strand to SEQ ID NO: 2530302
uuuacuaccguccauaaac

SEQ ID NO: 2530304 - RNA, 19 nt, Artificial Sequence
  Description of Artificial Sequence: Synthetic oligonucleotide
  Sense strand starting at position 715 of SEQ ID NO: 1888362
agaagacaguaguuguauu

SEQ ID NO: 2530305 - RNA, 19 nt, Artificial Sequence
  Description of Artificial Sequence: Synthetic oligonucleotide
  Antisense strand to SEQ ID NO: 2530304
aauacaacuacugucuucu

SEQ ID NO: 2530306 - RNA, 19 nt, Artificial Sequence
  Description of Artificial Sequence: Synthetic oligonucleotide
  Sense strand starting at position 3782 of SEQ ID NO: 1888362
ggaaaccaaguuugucauu

SEQ ID NO: 2530307 - RNA, 19 nt, Artificial Sequence
  Description of Artificial Sequence: Synthetic oligonucleotide
  Antisense strand to SEQ ID NO: 2530306
aaugacaaacuugguuucc

SEQ ID NO: 2530308 - RNA, 19 nt, Artificial Sequence
  Description of Artificial Sequence: Synthetic oligonucleotide
  Sense strand starting at position 2455 of SEQ ID NO: 1888362
aaauuuagguaguagacua

SEQ ID NO: 2530309 - RNA, 19 nt, Artificial Sequence
  Description of Artificial Sequence: Synthetic oligonucleotide
  Antisense strand to SEQ ID NO: 2530308
uagucuacuaccuaaauuu

SEQ ID NO: 2530310 - RNA, 19 nt, Artificial Sequence
  Description of Artificial Sequence: Synthetic oligonucleotide
  Sense strand starting at position 248 of SEQ ID NO: 1888362
ccuuaaaguccuggaagug

SEQ ID NO: 2530311 - RNA, 19 nt, Artificial Sequence
  Description of Artificial Sequence: Synthetic oligonucleotide
  Antisense strand to SEQ ID NO: 2530310
cacuuccaggacuuuaagg

SEQ ID NO: 2530312 - RNA, 19 nt, Artificial Sequence
  Description of Artificial Sequence: Synthetic oligonucleotide
  Sense strand starting at position 2463 of SEQ ID NO: 1888362
guaguagacuaauuagcaa

SEQ ID NO: 2530313 - RNA, 19 nt, Artificial Sequence
  Description of Artificial Sequence: Synthetic oligonucleotide
  Antisense strand to SEQ ID NO: 2530312
uugcuaauuagucuacuac

SEQ ID NO: 2530314 - RNA, 19 nt, Artificial Sequence
  Description of Artificial Sequence: Synthetic oligonucleotide
  Sense strand starting at position 1230 of SEQ ID NO: 1888362
ugguguaaauacucuuaug

SEQ ID NO: 2530315 - RNA, 19 nt, Artificial Sequence
  Description of Artificial Sequence: Synthetic oligonucleotide
  Antisense strand to SEQ ID NO: 2530314
cauaagaguauuuacacca

SEQ ID NO: 2530316 - RNA, 19 nt, Artificial Sequence
  Description of Artificial Sequence: Synthetic oligonucleotide
  Sense strand starting at position 1079 of SEQ ID NO: 1888362
cauugagagccuuguacaa

SEQ ID NO: 2530317 - RNA, 19 nt, Artificial Sequence
  Description of Artificial Sequence: Synthetic oligonucleotide
  Antisense strand to SEQ ID NO: 2530316
uuguacaaggcucucaaug

SEQ ID NO: 2530318 - RNA, 19 nt, Artificial Sequence
  Description of Artificial Sequence: Synthetic oligonucleotide
  Sense strand starting at position 3241 of SEQ ID NO: 1888362
cgaugauauuucuaacuga

SEQ ID NO: 2530319 - RNA, 19 nt, Artificial Sequence
  Description of Artificial Sequence: Synthetic oligonucleotide
  Antisense strand to SEQ ID NO: 2530318
ucaguuagaaauaucaucg

SEQ ID NO: 2530320 - RNA, 19 nt, Artificial Sequence
  Description of Artificial Sequence: Synthetic oligonucleotide
  Sense strand starting at position 2674 of SEQ ID NO: 1888362
augagaauguguguuacau

SEQ ID NO: 2530321 - RNA, 19 nt, Artificial Sequence
  Description of Artificial Sequence: Synthetic oligonucleotide
  Antisense strand to SEQ ID NO: 2530320
auguaacacacauucucau

SEQ ID NO: 2530322 - RNA, 19 nt, Artificial Sequence
  Description of Artificial Sequence: Synthetic oligonucleotide
  Sense strand starting at position 2531 of SEQ ID NO: 1888362
caaagcuugccugagaguu

SEQ ID NO: 2530323 - RNA, 19 nt, Artificial Sequence
  Description of Artificial Sequence: Synthetic oligonucleotide
  Antisense strand to SEQ ID NO: 2530322
aacucucaggcaagcuuug

SEQ ID NO: 2530324 - RNA, 19 nt, Artificial Sequence
  Description of Artificial Sequence: Synthetic oligonucleotide
  Sense strand starting at position 1116 of SEQ ID NO: 1888363
cagagaaaugcuggguaaa

SEQ ID NO: 2530325 - RNA, 19 nt, Artificial Sequence
  Description of Artificial Sequence: Synthetic oligonucleotide
  Antisense strand to SEQ ID NO: 2530324
uuuacccagcauuucucug

SEQ ID NO: 2530326 - RNA, 19 nt, Artificial Sequence
  Description of Artificial Sequence: Synthetic oligonucleotide
  Sense strand starting at position 747 of SEQ ID NO: 1888363
auguuuggcgaggaaggau

SEQ ID NO: 2530327 - RNA, 19 nt, Artificial Sequence
  Description of Artificial Sequence: Synthetic oligonucleotide
  Antisense strand to SEQ ID NO: 2530326
auccuuccucgccaaacau

SEQ ID NO: 2530328 - RNA, 19 nt, Artificial Sequence
  Description of Artificial Sequence: Synthetic oligonucleotide
  Sense strand starting at position 1369 of SEQ ID NO: 1888363
gucuauggcgcucugugau

SEQ ID NO: 2530329 - RNA, 19 nt, Artificial Sequence
  Description of Artificial Sequence: Synthetic oligonucleotide
  Antisense strand to SEQ ID NO: 2530328
aucacagagcgccauagac

SEQ ID NO: 2530330 - RNA, 19 nt, Artificial Sequence
  Description of Artificial Sequence: Synthetic oligonucleotide
  Sense strand starting at position 933 of SEQ ID NO: 1888363
acacucauuguuuggaaau

SEQ ID NO: 2530331 - RNA, 19 nt, Artificial Sequence
  Description of Artificial Sequence: Synthetic oligonucleotide
  Antisense strand to SEQ ID NO: 2530330
auuuccaaacaaugagugu

SEQ ID NO: 2530332 - RNA, 19 nt, Artificial Sequence
  Description of Artificial Sequence: Synthetic oligonucleotide
  Sense strand starting at position 203 of SEQ ID NO: 1888363
agcugagacagaugucaca

SEQ ID NO: 2530333 - RNA, 19 nt, Artificial Sequence
  Description of Artificial Sequence: Synthetic oligonucleotide
  Antisense strand to SEQ ID NO: 2530332
ugugacaucugucucagcu

SEQ ID NO: 2530334 - RNA, 19 nt, Artificial Sequence
  Description of Artificial Sequence: Synthetic oligonucleotide
  Sense strand starting at position 1702 of SEQ ID NO: 1888363
agaccauccuacuucgaua

SEQ ID NO: 2530335 - RNA, 19 nt, Artificial Sequence
  Description of Artificial Sequence: Synthetic oligonucleotide
  Antisense strand to SEQ ID NO: 2530334
uaucgaaguaggauggucu

SEQ ID NO: 2530336 - RNA, 19 nt, Artificial Sequence
  Description of Artificial Sequence: Synthetic oligonucleotide
  Sense strand starting at position 161 of SEQ ID NO: 1888363
ggcugagacagaugucaca

SEQ ID NO: 2530337 - RNA, 19 nt, Artificial Sequence
  Description of Artificial Sequence: Synthetic oligonucleotide
  Antisense strand to SEQ ID NO: 2530336
ugugacaucugucucagcc

SEQ ID NO: 2530338 - RNA, 19 nt, Artificial Sequence
  Description of Artificial Sequence: Synthetic oligonucleotide
  Sense strand starting at position 245 of SEQ ID NO: 1888363
ggcugagauagauguuaca

SEQ ID NO: 2530339 - RNA, 19 nt, Artificial Sequence
  Description of Artificial Sequence: Synthetic oligonucleotide
  Antisense strand to SEQ ID NO: 2530338
uguaacaucuaucucagcc

SEQ ID NO: 2530340 - RNA, 19 nt, Artificial Sequence
  Description of Artificial Sequence: Synthetic oligonucleotide
  Sense strand starting at position 2075 of SEQ ID NO: 1888363
cugucugugguggaggaau

SEQ ID NO: 2530341 - RNA, 19 nt, Artificial Sequence
  Description of Artificial Sequence: Synthetic oligonucleotide
  Antisense strand to SEQ ID NO: 2530340
auuccuccaccacagacag

SEQ ID NO: 2530342 - RNA, 19 nt, Artificial Sequence
  Description of Artificial Sequence: Synthetic oligonucleotide
  Sense strand starting at position 3854 of SEQ ID NO: 1888363
gaugcauuccgaugacaga

SEQ ID NO: 2530343 - RNA, 19 nt, Artificial Sequence
  Description of Artificial Sequence: Synthetic oligonucleotide
  Antisense strand to SEQ ID NO: 2530342
ucugucaucggaaugcauc

SEQ ID NO: 2530344 - RNA, 19 nt, Artificial Sequence
  Description of Artificial Sequence: Synthetic oligonucleotide
  Sense strand starting at position 1106 of SEQ ID NO: 1888363
gucacagcggcagagaaau

SEQ ID NO: 2530345 - RNA, 19 nt, Artificial Sequence
  Description of Artificial Sequence: Synthetic oligonucleotide
  Antisense strand to SEQ ID NO: 2530344
auuucucugccgcugugac

SEQ ID NO: 2530346 - RNA, 19 nt, Artificial Sequence
  Description of Artificial Sequence: Synthetic oligonucleotide
  Sense strand starting at position 1707 of SEQ ID NO: 1888363
auccuacuucgauauugca

SEQ ID NO: 2530347 - RNA, 19 nt, Artificial Sequence
  Description of Artificial Sequence: Synthetic oligonucleotide
  Antisense strand to SEQ ID NO: 2530346
ugcaauaucgaaguaggau

SEQ ID NO: 2530348 - RNA, 19 nt, Artificial Sequence
  Description of Artificial Sequence: Synthetic oligonucleotide
  Sense strand starting at position 614 of SEQ ID NO: 1888363
gcauguuucuuagccauuu

SEQ ID NO: 2530349 - RNA, 19 nt, Artificial Sequence
  Description of Artificial Sequence: Synthetic oligonucleotide
  Antisense strand to SEQ ID NO: 2530348
aaauggcuaagaaacaugc

SEQ ID NO: 2530350 - RNA, 19 nt, Artificial Sequence
  Description of Artificial Sequence: Synthetic oligonucleotide
  Sense strand starting at position 931 of SEQ ID NO: 1888363
guacacucauuguuuggaa

SEQ ID NO: 2530351 - RNA, 19 nt, Artificial Sequence
  Description of Artificial Sequence: Synthetic oligonucleotide
  Antisense strand to SEQ ID NO: 2530350
uuccaaacaaugaguguac

SEQ ID NO: 2530352 - RNA, 19 nt, Artificial Sequence
  Description of Artificial Sequence: Synthetic oligonucleotide
  Sense strand starting at position 1804 of SEQ ID NO: 1888363
cagguugacuugccuagaa

SEQ ID NO: 2530353 - RNA, 19 nt, Artificial Sequence
  Description of Artificial Sequence: Synthetic oligonucleotide
  Antisense strand to SEQ ID NO: 2530352
uucuaggcaagucaaccug

SEQ ID NO: 2530354 - RNA, 19 nt, Artificial Sequence
  Description of Artificial Sequence: Synthetic oligonucleotide
  Sense strand starting at position 686 of SEQ ID NO: 1888363
uguagugaucaccggagag

SEQ ID NO: 2530355 - RNA, 19 nt, Artificial Sequence
  Description of Artificial Sequence: Synthetic oligonucleotide
  Antisense strand to SEQ ID NO: 2530354
cucuccggugaucacuaca

SEQ ID NO: 2530356 - RNA, 19 nt, Artificial Sequence
  Description of Artificial Sequence: Synthetic oligonucleotide
  Sense strand starting at position 746 of SEQ ID NO: 1888363
cauguuuggcgaggaagga

SEQ ID NO: 2530357 - RNA, 19 nt, Artificial Sequence
  Description of Artificial Sequence: Synthetic oligonucleotide
  Antisense strand to SEQ ID NO: 2530356
uccuuccucgccaaacaug

SEQ ID NO: 2530358 - RNA, 19 nt, Artificial Sequence
  Description of Artificial Sequence: Synthetic oligonucleotide
  Sense strand starting at position 1680 of SEQ ID NO: 1888363
cggucugccacucauaaag

SEQ ID NO: 2530359 - RNA, 19 nt, Artificial Sequence
  Description of Artificial Sequence: Synthetic oligonucleotide
  Antisense strand to SEQ ID NO: 2530358
cuuuaugaguggcagaccg

SEQ ID NO: 2530360 - RNA, 19 nt, Artificial Sequence
  Description of Artificial Sequence: Synthetic oligonucleotide
  Sense strand starting at position 368 of SEQ ID NO: 1888363
ggucccaguccuuggacaa

SEQ ID NO: 2530361 - RNA, 19 nt, Artificial Sequence
  Description of Artificial Sequence: Synthetic oligonucleotide
  Antisense strand to SEQ ID NO: 2530360
uuguccaaggacugggacc

SEQ ID NO: 2530362 - RNA, 19 nt, Artificial Sequence
  Description of Artificial Sequence: Synthetic oligonucleotide
  Sense strand starting at position 915 of SEQ ID NO: 1888363
uggaauucucagggcugua

SEQ ID NO: 2530363 - RNA, 19 nt, Artificial Sequence
  Description of Artificial Sequence: Synthetic oligonucleotide
  Antisense strand to SEQ ID NO: 2530362
uacagcccugagaauucca

SEQ ID NO: 2530364 - RNA, 19 nt, Artificial Sequence
  Description of Artificial Sequence: Synthetic oligonucleotide
  Sense strand starting at position 1715 of SEQ ID NO: 1888363
ucgauauugcaacauugca

SEQ ID NO: 2530365 - RNA, 19 nt, Artificial Sequence
  Description of Artificial Sequence: Synthetic oligonucleotide
  Antisense strand to SEQ ID NO: 2530364
ugcaauguugcaauaucga

SEQ ID NO: 2530366 - RNA, 19 nt, Artificial Sequence
  Description of Artificial Sequence: Synthetic oligonucleotide
  Sense strand starting at position 2505 of SEQ ID NO: 1888363
gaggucugucuccacugua

SEQ ID NO: 2530367 - RNA, 19 nt, Artificial Sequence
  Description of Artificial Sequence: Synthetic oligonucleotide
  Antisense strand to SEQ ID NO: 2530366
uacaguggagacagaccuc

SEQ ID NO: 2530368 - RNA, 19 nt, Artificial Sequence
  Description of Artificial Sequence: Synthetic oligonucleotide
  Sense strand starting at position 2885 of SEQ ID NO: 1888363
uggaaacucugccuuguga

SEQ ID NO: 2530369 - RNA, 19 nt, Artificial Sequence
  Description of Artificial Sequence: Synthetic oligonucleotide
  Antisense strand to SEQ ID NO: 2530368
ucacaaggcagaguuucca

SEQ ID NO: 2530370 - RNA, 19 nt, Artificial Sequence
  Description of Artificial Sequence: Synthetic oligonucleotide
  Sense strand starting at position 128 of SEQ ID NO: 1888363
cugcuucugcuguaggaaa

SEQ ID NO: 2530371 - RNA, 19 nt, Artificial Sequence
  Description of Artificial Sequence: Synthetic oligonucleotide
  Antisense strand to SEQ ID NO: 2530370
uuuccuacagcagaagcag

SEQ ID NO: 2530372 - RNA, 19 nt, Artificial Sequence
  Description of Artificial Sequence: Synthetic oligonucleotide
  Sense strand starting at position 3684 of SEQ ID NO: 1888363
ggcauuugaucaggagaca

SEQ ID NO: 2530373 - RNA, 19 nt, Artificial Sequence
  Description of Artificial Sequence: Synthetic oligonucleotide
  Antisense strand to SEQ ID NO: 2530372
ugucuccugaucaaaugcc

SEQ ID NO: 2530374 - RNA, 19 nt, Artificial Sequence
  Description of Artificial Sequence: Synthetic oligonucleotide
  Sense strand starting at position 2887 of SEQ ID NO: 1888363
gaaacucugccuugugacu

SEQ ID NO: 2530375 - RNA, 19 nt, Artificial Sequence
  Description of Artificial Sequence: Synthetic oligonucleotide
  Antisense strand to SEQ ID NO: 2530374
agucacaaggcagaguuuc

SEQ ID NO: 2530376 - RNA, 19 nt, Artificial Sequence
  Description of Artificial Sequence: Synthetic oligonucleotide
  Sense strand starting at position 2351 of SEQ ID NO: 1888363
acucgaguaucuuccaucu

SEQ ID NO: 2530377 - RNA, 19 nt, Artificial Sequence
  Description of Artificial Sequence: Synthetic oligonucleotide
  Antisense strand to SEQ ID NO: 2530376
agauggaagauacucgagu

SEQ ID NO: 2530378 - RNA, 19 nt, Artificial Sequence
  Description of Artificial Sequence: Synthetic oligonucleotide
  Sense strand starting at position 1593 of SEQ ID NO: 1888363
ugagucuguagauguaucu

SEQ ID NO: 2530379 - RNA, 19 nt, Artificial Sequence
  Description of Artificial Sequence: Synthetic oligonucleotide
  Antisense strand to SEQ ID NO: 2530378
agauacaucuacagacuca

SEQ ID NO: 2530380 - RNA, 19 nt, Artificial Sequence
  Description of Artificial Sequence: Synthetic oligonucleotide
  Sense strand starting at position 1588 of SEQ ID NO: 1888363
gcaagugagucuguagaug

SEQ ID NO: 2530381 - RNA, 19 nt, Artificial Sequence
  Description of Artificial Sequence: Synthetic oligonucleotide
  Antisense strand to SEQ ID NO: 2530380
caucuacagacucacuugc

SEQ ID NO: 2530382 - RNA, 19 nt, Artificial Sequence
  Description of Artificial Sequence: Synthetic oligonucleotide
  Sense strand starting at position 3229 of SEQ ID NO: 1888363
agaugagcuguuugcgaaa

SEQ ID NO: 2530383 - RNA, 19 nt, Artificial Sequence
  Description of Artificial Sequence: Synthetic oligonucleotide
  Antisense strand to SEQ ID NO: 2530382
uuucgcaaacagcucaucu

SEQ ID NO: 2530384 - RNA, 19 nt, Artificial Sequence
  Description of Artificial Sequence: Synthetic oligonucleotide
  Sense strand starting at position 3800 of SEQ ID NO: 1888363
aggagucucgugcagucau

SEQ ID NO: 2530385 - RNA, 19 nt, Artificial Sequence
  Description of Artificial Sequence: Synthetic oligonucleotide
  Antisense strand to SEQ ID NO: 2530384
augacugcacgagacuccu

SEQ ID NO: 2530386 - RNA, 19 nt, Artificial Sequence
  Description of Artificial Sequence: Synthetic oligonucleotide
  Sense strand starting at position 248 of SEQ ID NO: 1888363
ugagauagauguuacaaau

SEQ ID NO: 2530387 - RNA, 19 nt, Artificial Sequence
  Description of Artificial Sequence: Synthetic oligonucleotide
  Antisense strand to SEQ ID NO: 2530386
auuuguaacaucuaucuca

SEQ ID NO: 2530388 - RNA, 19 nt, Artificial Sequence
  Description of Artificial Sequence: Synthetic oligonucleotide
  Sense strand starting at position 3844 of SEQ ID NO: 1888363
gcagauuccggaugcauuc

SEQ ID NO: 2530389 - RNA, 19 nt, Artificial Sequence
  Description of Artificial Sequence: Synthetic oligonucleotide
  Antisense strand to SEQ ID NO: 2530388
gaaugcauccggaaucugc

SEQ ID NO: 2530390 - RNA, 19 nt, Artificial Sequence
  Description of Artificial Sequence: Synthetic oligonucleotide
  Sense strand starting at position 968 of SEQ ID NO: 1888363
uccuuaguuuccguaauua

SEQ ID NO: 2530391 - RNA, 19 nt, Artificial Sequence
  Description of Artificial Sequence: Synthetic oligonucleotide
  Antisense strand to SEQ ID NO: 2530390
uaauuacggaaacuaagga

SEQ ID NO: 2530392 - RNA, 19 nt, Artificial Sequence
  Description of Artificial Sequence: Synthetic oligonucleotide
  Sense strand starting at position 611 of SEQ ID NO: 1888363
ugggcauguuucuuagcca

SEQ ID NO: 2530393 - RNA, 19 nt, Artificial Sequence
  Description of Artificial Sequence: Synthetic oligonucleotide
  Antisense strand to SEQ ID NO: 2530392
uggcuaagaaacaugccca

SEQ ID NO: 2530394 - RNA, 19 nt, Artificial Sequence
  Description of Artificial Sequence: Synthetic oligonucleotide
  Sense strand starting at position 966 of SEQ ID NO: 1888363
aguccuuaguuuccguaau

SEQ ID NO: 2530395 - RNA, 19 nt, Artificial Sequence
  Description of Artificial Sequence: Synthetic oligonucleotide
  Antisense strand to SEQ ID NO: 2530394
auuacggaaacuaaggacu

SEQ ID NO: 2530396 - RNA, 19 nt, Artificial Sequence
  Description of Artificial Sequence: Synthetic oligonucleotide
  Sense strand starting at position 935 of SEQ ID NO: 1888363
acucauuguuuggaaauaa

SEQ ID NO: 2530397 - RNA, 19 nt, Artificial Sequence
  Description of Artificial Sequence: Synthetic oligonucleotide
  Antisense strand to SEQ ID NO: 2530396
uuauuuccaaacaaugagu

SEQ ID NO: 2530398 - RNA, 19 nt, Artificial Sequence
  Description of Artificial Sequence: Synthetic oligonucleotide
  Sense strand starting at position 379 of SEQ ID NO: 1888363
uuggacaacucaugggaca

SEQ ID NO: 2530399 - RNA, 19 nt, Artificial Sequence
  Description of Artificial Sequence: Synthetic oligonucleotide
  Antisense strand to SEQ ID NO: 2530398
ugucccaugaguuguccaa

SEQ ID NO: 2530400 - RNA, 19 nt, Artificial Sequence
  Description of Artificial Sequence: Synthetic oligonucleotide
  Sense strand starting at position 3359 of SEQ ID NO: 1888363
uugcaaaucugcuccuguu

SEQ ID NO: 2530401 - RNA, 19 nt, Artificial Sequence
  Description of Artificial Sequence: Synthetic oligonucleotide
  Antisense strand to SEQ ID NO: 2530400
aacaggagcagauuugcaa

SEQ ID NO: 2530402 - RNA, 19 nt, Artificial Sequence
  Description of Artificial Sequence: Synthetic oligonucleotide
  Sense strand starting at position 414 of SEQ ID NO: 1888363
gguaaaucucccugccgca

SEQ ID NO: 2530403 - RNA, 19 nt, Artificial Sequence
  Description of Artificial Sequence: Synthetic oligonucleotide
  Antisense strand to SEQ ID NO: 2530402
ugcggcagggagauuuacc

SEQ ID NO: 2530404 - RNA, 19 nt, Artificial Sequence
  Description of Artificial Sequence: Synthetic oligonucleotide
  Sense strand starting at position 970 of SEQ ID NO: 1888364
ggaugauugccaugaaagg

SEQ ID NO: 2530405 - RNA, 19 nt, Artificial Sequence
  Description of Artificial Sequence: Synthetic oligonucleotide
  Antisense strand to SEQ ID NO: 2530404
ccuuucauggcaaucaucc

SEQ ID NO: 2530406 - RNA, 19 nt, Artificial Sequence
  Description of Artificial Sequence: Synthetic oligonucleotide
  Sense strand starting at position 315 of SEQ ID NO: 1888364
cggaaacuuuaaucaaacu

SEQ ID NO: 2530407 - RNA, 19 nt, Artificial Sequence
  Description of Artificial Sequence: Synthetic oligonucleotide
  Antisense strand to SEQ ID NO: 2530406
aguuugauuaaaguuuccg

SEQ ID NO: 2530408 - RNA, 19 nt, Artificial Sequence
  Description of Artificial Sequence: Synthetic oligonucleotide
  Sense strand starting at position 2413 of SEQ ID NO: 1888364
gagcauuugccaugaaagc

SEQ ID NO: 2530409 - RNA, 19 nt, Artificial Sequence
  Description of Artificial Sequence: Synthetic oligonucleotide
  Antisense strand to SEQ ID NO: 2530408
gcuuucauggcaaaugcuc

SEQ ID NO: 2530410 - RNA, 19 nt, Artificial Sequence
  Description of Artificial Sequence: Synthetic oligonucleotide
  Sense strand starting at position 1957 of SEQ ID NO: 1888364
guggaauacgcguuucuuc

SEQ ID NO: 2530411 - RNA, 19 nt, Artificial Sequence
  Description of Artificial Sequence: Synthetic oligonucleotide
  Antisense strand to SEQ ID NO: 2530410
gaagaaacgcguauuccac

SEQ ID NO: 2530412 - RNA, 19 nt, Artificial Sequence
  Description of Artificial Sequence: Synthetic oligonucleotide
  Sense strand starting at position 1956 of SEQ ID NO: 1888364
uguggaauacgcguuucuu

SEQ ID NO: 2530413 - RNA, 19 nt, Artificial Sequence
  Description of Artificial Sequence: Synthetic oligonucleotide
  Antisense strand to SEQ ID NO: 2530412
aagaaacgcguauuccaca

SEQ ID NO: 2530414 - RNA, 19 nt, Artificial Sequence
  Description of Artificial Sequence: Synthetic oligonucleotide
  Sense strand starting at position 3124 of SEQ ID NO: 1888364
uguaaacaagggugacaau

SEQ ID NO: 2530415 - RNA, 19 nt, Artificial Sequence
  Description of Artificial Sequence: Synthetic oligonucleotide
  Antisense strand to SEQ ID NO: 2530414
auugucacccuuguuuaca

SEQ ID NO: 2530416 - RNA, 19 nt, Artificial Sequence
  Description of Artificial Sequence: Synthetic oligonucleotide
  Sense strand starting at position 853 of SEQ ID NO: 1888364
ugauauuaugaugagugca

SEQ ID NO: 2530417 - RNA, 19 nt, Artificial Sequence
  Description of Artificial Sequence: Synthetic oligonucleotide
  Antisense strand to SEQ ID NO: 2530416
ugcacucaucauaauauca

SEQ ID NO: 2530418 - RNA, 19 nt, Artificial Sequence
  Description of Artificial Sequence: Synthetic oligonucleotide
  Sense strand starting at position 3415 of SEQ ID NO: 1888364
ggcugucauggagacucaa

SEQ ID NO: 2530419 - RNA, 19 nt, Artificial Sequence
  Description of Artificial Sequence: Synthetic oligonucleotide
  Antisense strand to SEQ ID NO: 2530418
uugagucuccaugacagcc

SEQ ID NO: 2530420 - RNA, 19 nt, Artificial Sequence
  Description of Artificial Sequence: Synthetic oligonucleotide
  Sense strand starting at position 2695 of SEQ ID NO: 1888364
uggucugagguugauacau

SEQ ID NO: 2530421 - RNA, 19 nt, Artificial Sequence
  Description of Artificial Sequence: Synthetic oligonucleotide
  Antisense strand to SEQ ID NO: 2530420
auguaucaaccucagacca

SEQ ID NO: 2530422 - RNA, 19 nt, Artificial Sequence
  Description of Artificial Sequence: Synthetic oligonucleotide
  Sense strand starting at position 3816 of SEQ ID NO: 1888364
cagggaguuguuugagaaa

SEQ ID NO: 2530423 - RNA, 19 nt, Artificial Sequence
  Description of Artificial Sequence: Synthetic oligonucleotide
  Antisense strand to SEQ ID NO: 2530422
uuucucaaacaacucccug

SEQ ID NO: 2530424 - RNA, 19 nt, Artificial Sequence
  Description of Artificial Sequence: Synthetic oligonucleotide
  Sense strand starting at position 284 of SEQ ID NO: 1888364
gaaagaaauugaguucugu

SEQ ID NO: 2530425 - RNA, 19 nt, Artificial Sequence
  Description of Artificial Sequence: Synthetic oligonucleotide
  Antisense strand to SEQ ID NO: 2530424
acagaacucaauuucuuuc

SEQ ID NO: 2530426 - RNA, 19 nt, Artificial Sequence
  Description of Artificial Sequence: Synthetic oligonucleotide
  Sense strand starting at position 2028 of SEQ ID NO: 1888364
uucccuugucuggaaauac

SEQ ID NO: 2530427 - RNA, 19 nt, Artificial Sequence
  Description of Artificial Sequence: Synthetic oligonucleotide
  Antisense strand to SEQ ID NO: 2530426
guauuuccagacaagggaa

SEQ ID NO: 2530428 - RNA, 19 nt, Artificial Sequence
  Description of Artificial Sequence: Synthetic oligonucleotide
  Sense strand starting at position 173 of SEQ ID NO: 1888364
gauccuuuccugcaggaca

SEQ ID NO: 2530429 - RNA, 19 nt, Artificial Sequence
  Description of Artificial Sequence: Synthetic oligonucleotide
  Antisense strand to SEQ ID NO: 2530428
uguccugcaggaaaggauc

SEQ ID NO: 2530430 - RNA, 19 nt, Artificial Sequence
  Description of Artificial Sequence: Synthetic oligonucleotide
  Sense strand starting at position 3380 of SEQ ID NO: 1888364
acuguaacggcuuagaaga

SEQ ID NO: 2530431 - RNA, 19 nt, Artificial Sequence
  Description of Artificial Sequence: Synthetic oligonucleotide
  Antisense strand to SEQ ID NO: 2530430
ucuucuaagccguuacagu

SEQ ID NO: 2530432 - RNA, 19 nt, Artificial Sequence
  Description of Artificial Sequence: Synthetic oligonucleotide
  Sense strand starting at position 475 of SEQ ID NO: 1888364
uugggaauuaaauguaggu

SEQ ID NO: 2530433 - RNA, 19 nt, Artificial Sequence
  Description of Artificial Sequence: Synthetic oligonucleotide
  Antisense strand to SEQ ID NO: 2530432
accuacauuuaauucccaa

SEQ ID NO: 2530434 - RNA, 19 nt, Artificial Sequence
  Description of Artificial Sequence: Synthetic oligonucleotide
  Sense strand starting at position 1652 of SEQ ID NO: 1888364
ucagcagaucauuagucua

SEQ ID NO: 2530435 - RNA, 19 nt, Artificial Sequence
  Description of Artificial Sequence: Synthetic oligonucleotide
  Antisense strand to SEQ ID NO: 2530434
uagacuaaugaucugcuga

SEQ ID NO: 2530436 - RNA, 19 nt, Artificial Sequence
  Description of Artificial Sequence: Synthetic oligonucleotide
  Sense strand starting at position 855 of SEQ ID NO: 1888364
auauuaugaugagugcaag

SEQ ID NO: 2530437 - RNA, 19 nt, Artificial Sequence
  Description of Artificial Sequence: Synthetic oligonucleotide
  Antisense strand to SEQ ID NO: 2530436
cuugcacucaucauaauau

SEQ ID NO: 2530438 - RNA, 19 nt, Artificial Sequence
  Description of Artificial Sequence: Synthetic oligonucleotide
  Sense strand starting at position 3225 of SEQ ID NO: 1888364
ggcuguggugaagauucaa

SEQ ID NO: 2530439 - RNA, 19 nt, Artificial Sequence
  Description of Artificial Sequence: Synthetic oligonucleotide
  Antisense strand to SEQ ID NO: 2530438
uugaaucuucaccacagcc

SEQ ID NO: 2530440 - RNA, 19 nt, Artificial Sequence
  Description of Artificial Sequence: Synthetic oligonucleotide
  Sense strand starting at position 1289 of SEQ ID NO: 1888364
cuuccuggucuuuaagauu

SEQ ID NO: 2530441 - RNA, 19 nt, Artificial Sequence
  Description of Artificial Sequence: Synthetic oligonucleotide
  Antisense strand to SEQ ID NO: 2530440
aaucuuaaagaccaggaag

SEQ ID NO: 2530442 - RNA, 19 nt, Artificial Sequence
  Description of Artificial Sequence: Synthetic oligonucleotide
  Sense strand starting at position 3098 of SEQ ID NO: 1888364
gccaguugugccucaguuu

SEQ ID NO: 2530443 - RNA, 19 nt, Artificial Sequence
  Description of Artificial Sequence: Synthetic oligonucleotide
  Antisense strand to SEQ ID NO: 2530442
aaacugaggcacaacuggc

SEQ ID NO: 2530444 - RNA, 19 nt, Artificial Sequence
  Description of Artificial Sequence: Synthetic oligonucleotide
  Sense strand starting at position 2604 of SEQ ID NO: 1888364
gugagaacugcccaacucu

SEQ ID NO: 2530445 - RNA, 19 nt, Artificial Sequence
  Description of Artificial Sequence: Synthetic oligonucleotide
  Antisense strand to SEQ ID NO: 2530444
agaguugggcaguucucac

SEQ ID NO: 2530446 - RNA, 19 nt, Artificial Sequence
  Description of Artificial Sequence: Synthetic oligonucleotide
  Sense strand starting at position 2708 of SEQ ID NO: 1888364
auacauucuuaucuagagu

SEQ ID NO: 2530447 - RNA, 19 nt, Artificial Sequence
  Description of Artificial Sequence: Synthetic oligonucleotide
  Antisense strand to SEQ ID NO: 2530446
acucuagauaagaauguau

SEQ ID NO: 2530448 - RNA, 19 nt, Artificial Sequence
  Description of Artificial Sequence: Synthetic oligonucleotide
  Sense strand starting at position 456 of SEQ ID NO: 1888364
gcuggaugagccuauuaua

SEQ ID NO: 2530449 - RNA, 19 nt, Artificial Sequence
  Description of Artificial Sequence: Synthetic oligonucleotide
  Antisense strand to SEQ ID NO: 2530448
uauaauaggcucauccagc

SEQ ID NO: 2530450 - RNA, 19 nt, Artificial Sequence
  Description of Artificial Sequence: Synthetic oligonucleotide
  Sense strand starting at position 3133 of SEQ ID NO: 1888364
gggugacaauuguuagauc

SEQ ID NO: 2530451 - RNA, 19 nt, Artificial Sequence
  Description of Artificial Sequence: Synthetic oligonucleotide
  Antisense strand to SEQ ID NO: 2530450
gaucuaacaauugucaccc

SEQ ID NO: 2530452 - RNA, 19 nt, Artificial Sequence
  Description of Artificial Sequence: Synthetic oligonucleotide
  Sense strand starting at position 2077 of SEQ ID NO: 1888364
acagaaacauaagagaaau

SEQ ID NO: 2530453 - RNA, 19 nt, Artificial Sequence
  Description of Artificial Sequence: Synthetic oligonucleotide
  Antisense strand to SEQ ID NO: 2530452
auuucucuuauguuucugu

SEQ ID NO: 2530454 - RNA, 19 nt, Artificial Sequence
  Description of Artificial Sequence: Synthetic oligonucleotide
  Sense strand starting at position 3288 of SEQ ID NO: 1888364
ggcugucacggagauucaa

SEQ ID NO: 2530455 - RNA, 19 nt, Artificial Sequence
  Description of Artificial Sequence: Synthetic oligonucleotide
  Antisense strand to SEQ ID NO: 2530454
uugaaucuccgugacagcc

SEQ ID NO: 2530456 - RNA, 19 nt, Artificial Sequence
  Description of Artificial Sequence: Synthetic oligonucleotide
  Sense strand starting at position 417 of SEQ ID NO: 1888364
uugagauaauaagucuugu

SEQ ID NO: 2530457 - RNA, 19 nt, Artificial Sequence
  Description of Artificial Sequence: Synthetic oligonucleotide
  Antisense strand to SEQ ID NO: 2530456
acaagacuuauuaucucaa

SEQ ID NO: 2530458 - RNA, 19 nt, Artificial Sequence
  Description of Artificial Sequence: Synthetic oligonucleotide
  Sense strand starting at position 967 of SEQ ID NO: 1888364
gcaggaugauugccaugaa

SEQ ID NO: 2530459 - RNA, 19 nt, Artificial Sequence
  Description of Artificial Sequence: Synthetic oligonucleotide
  Antisense strand to SEQ ID NO: 2530458
uucauggcaaucauccugc

SEQ ID NO: 2530460 - RNA, 19 nt, Artificial Sequence
  Description of Artificial Sequence: Synthetic oligonucleotide
  Sense strand starting at position 3189 of SEQ ID NO: 1888364
acuguagcugcuuagaaga

SEQ ID NO: 2530461 - RNA, 19 nt, Artificial Sequence
  Description of Artificial Sequence: Synthetic oligonucleotide
  Antisense strand to SEQ ID NO: 2530460
ucuucuaagcagcuacagu

SEQ ID NO: 2530462 - RNA, 19 nt, Artificial Sequence
  Description of Artificial Sequence: Synthetic oligonucleotide
  Sense strand starting at position 2704 of SEQ ID NO: 1888364
guugauacauucuuaucua

SEQ ID NO: 2530463 - RNA, 19 nt, Artificial Sequence
  Description of Artificial Sequence: Synthetic oligonucleotide
  Antisense strand to SEQ ID NO: 2530462
uagauaagaauguaucaac

SEQ ID NO: 2530464 - RNA, 19 nt, Artificial Sequence
  Description of Artificial Sequence: Synthetic oligonucleotide
  Sense strand starting at position 1654 of SEQ ID NO: 1888364
agcagaucauuagucuaau

SEQ ID NO: 2530465 - RNA, 19 nt, Artificial Sequence
  Description of Artificial Sequence: Synthetic oligonucleotide
  Antisense strand to SEQ ID NO: 2530464
auuagacuaaugaucugcu

SEQ ID NO: 2530466 - RNA, 19 nt, Artificial Sequence
  Description of Artificial Sequence: Synthetic oligonucleotide
  Sense strand starting at position 1916 of SEQ ID NO: 1888364
ggaggucaguguuuaggga

SEQ ID NO: 2530467 - RNA, 19 nt, Artificial Sequence
  Description of Artificial Sequence: Synthetic oligonucleotide
  Antisense strand to SEQ ID NO: 2530466
ucccuaaacacugaccucc

SEQ ID NO: 2530468 - RNA, 19 nt, Artificial Sequence
  Description of Artificial Sequence: Synthetic oligonucleotide
  Sense strand starting at position 1710 of SEQ ID NO: 1888364
ccuggaguuaaguagcuua

SEQ ID NO: 2530469 - RNA, 19 nt, Artificial Sequence
  Description of Artificial Sequence: Synthetic oligonucleotide
  Antisense strand to SEQ ID NO: 2530468
uaagcuacuuaacuccagg

SEQ ID NO: 2530470 - RNA, 19 nt, Artificial Sequence
  Description of Artificial Sequence: Synthetic oligonucleotide
  Sense strand starting at position 1288 of SEQ ID NO: 1888364
acuuccuggucuuuaagau

SEQ ID NO: 2530471 - RNA, 19 nt, Artificial Sequence
  Description of Artificial Sequence: Synthetic oligonucleotide
  Antisense strand to SEQ ID NO: 2530470
aucuuaaagaccaggaagu

SEQ ID NO: 2530472 - RNA, 19 nt, Artificial Sequence
  Description of Artificial Sequence: Synthetic oligonucleotide
  Sense strand starting at position 1366 of SEQ ID NO: 1888364
acuuuaaugcaaugacagu

SEQ ID NO: 2530473 - RNA, 19 nt, Artificial Sequence
  Description of Artificial Sequence: Synthetic oligonucleotide
  Antisense strand to SEQ ID NO: 2530472
acugucauugcauuaaagu

SEQ ID NO: 2530474 - RNA, 19 nt, Artificial Sequence
  Description of Artificial Sequence: Synthetic oligonucleotide
  Sense strand starting at position 675 of SEQ ID NO: 1888364
gucuguuugaaagacguga

SEQ ID NO: 2530475 - RNA, 19 nt, Artificial Sequence
  Description of Artificial Sequence: Synthetic oligonucleotide
  Antisense strand to SEQ ID NO: 2530474
ucacgucuuucaaacagac

SEQ ID NO: 2530476 - RNA, 19 nt, Artificial Sequence
  Description of Artificial Sequence: Synthetic oligonucleotide
  Sense strand starting at position 1655 of SEQ ID NO: 1888364
gcagaucauuagucuaauu

SEQ ID NO: 2530477 - RNA, 19 nt, Artificial Sequence
  Description of Artificial Sequence: Synthetic oligonucleotide
  Antisense strand to SEQ ID NO: 2530476
aauuagacuaaugaucugc

SEQ ID NO: 2530478 - RNA, 19 nt, Artificial Sequence
  Description of Artificial Sequence: Synthetic oligonucleotide
  Sense strand starting at position 842 of SEQ ID NO: 1888364
uuaguuguggcugauauua

SEQ ID NO: 2530479 - RNA, 19 nt, Artificial Sequence
  Description of Artificial Sequence: Synthetic oligonucleotide
  Antisense strand to SEQ ID NO: 2530478
uaauaucagccacaacuaa

SEQ ID NO: 2530480 - RNA, 19 nt, Artificial Sequence
  Description of Artificial Sequence: Synthetic oligonucleotide
  Sense strand starting at position 2641 of SEQ ID NO: 1888364
cgcuuuguccauuaaacaa

SEQ ID NO: 2530481 - RNA, 19 nt, Artificial Sequence
  Description of Artificial Sequence: Synthetic oligonucleotide
  Antisense strand to SEQ ID NO: 2530480
uuguuuaauggacaaagcg

SEQ ID NO: 2530482 - RNA, 19 nt, Artificial Sequence
  Description of Artificial Sequence: Synthetic oligonucleotide
  Sense strand starting at position 2024 of SEQ ID NO: 1888364
uuuauucccuugucuggaa

SEQ ID NO: 2530483 - RNA, 19 nt, Artificial Sequence
  Description of Artificial Sequence: Synthetic oligonucleotide
  Antisense strand to SEQ ID NO: 2530482
uuccagacaagggaauaaa

SEQ ID NO: 2530484 - RNA, 19 nt, Artificial Sequence
  Description of Artificial Sequence: Synthetic oligonucleotide
  Sense strand starting at position 3870 of SEQ ID NO: 1888365
ccguguuccacuucuguca

SEQ ID NO: 2530485 - RNA, 19 nt, Artificial Sequence
  Description of Artificial Sequence: Synthetic oligonucleotide
  Antisense strand to SEQ ID NO: 2530484
ugacagaaguggaacacgg

SEQ ID NO: 2530486 - RNA, 19 nt, Artificial Sequence
  Description of Artificial Sequence: Synthetic oligonucleotide
  Sense strand starting at position 3871 of SEQ ID NO: 1888365
cguguuccacuucugucau

SEQ ID NO: 2530487 - RNA, 19 nt, Artificial Sequence
  Description of Artificial Sequence: Synthetic oligonucleotide
  Antisense strand to SEQ ID NO: 2530486
augacagaaguggaacacg

SEQ ID NO: 2530488 - RNA, 19 nt, Artificial Sequence
  Description of Artificial Sequence: Synthetic oligonucleotide
  Sense strand starting at position 635 of SEQ ID NO: 1888365
gucugugucaugccuccau

SEQ ID NO: 2530489 - RNA, 19 nt, Artificial Sequence
  Description of Artificial Sequence: Synthetic oligonucleotide
  Antisense strand to SEQ ID NO: 2530488
auggaggcaugacacagac

SEQ ID NO: 2530490 - RNA, 19 nt, Artificial Sequence
  Description of Artificial Sequence: Synthetic oligonucleotide
  Sense strand starting at position 3826 of SEQ ID NO: 1888365
uugggaagagccugaugau

SEQ ID NO: 2530491 - RNA, 19 nt, Artificial Sequence
  Description of Artificial Sequence: Synthetic oligonucleotide
  Antisense strand to SEQ ID NO: 2530490
aucaucaggcucuucccaa

SEQ ID NO: 2530492 - RNA, 19 nt, Artificial Sequence
  Description of Artificial Sequence: Synthetic oligonucleotide
  Sense strand starting at position 1617 of SEQ ID NO: 1888365
ggauguuguccucaaugga

SEQ ID NO: 2530493 - RNA, 19 nt, Artificial Sequence
  Description of Artificial Sequence: Synthetic oligonucleotide
  Antisense strand to SEQ ID NO: 2530492
uccauugaggacaacaucc

SEQ ID NO: 2530494 - RNA, 19 nt, Artificial Sequence
  Description of Artificial Sequence: Synthetic oligonucleotide
  Sense strand starting at position 1736 of SEQ ID NO: 1888365
ucuggucucagagaguuag

SEQ ID NO: 2530495 - RNA, 19 nt, Artificial Sequence
  Description of Artificial Sequence: Synthetic oligonucleotide
  Antisense strand to SEQ ID NO: 2530494
cuaacucucugagaccaga

SEQ ID NO: 2530496 - RNA, 19 nt, Artificial Sequence
  Description of Artificial Sequence: Synthetic oligonucleotide
  Sense strand starting at position 2556 of SEQ ID NO: 1888365
acguguuuccgagcaucuu

SEQ ID NO: 2530497 - RNA, 19 nt, Artificial Sequence
  Description of Artificial Sequence: Synthetic oligonucleotide
  Antisense strand to SEQ ID NO: 2530496
aagaugcucggaaacacgu

SEQ ID NO: 2530498 - RNA, 19 nt, Artificial Sequence
  Description of Artificial Sequence: Synthetic oligonucleotide
  Sense strand starting at position 257 of SEQ ID NO: 1888365
cuuugaacucuccagguca

SEQ ID NO: 2530499 - RNA, 19 nt, Artificial Sequence
  Description of Artificial Sequence: Synthetic oligonucleotide
  Antisense strand to SEQ ID NO: 2530498
ugaccuggagaguucaaag

SEQ ID NO: 2530500 - RNA, 19 nt, Artificial Sequence
  Description of Artificial Sequence: Synthetic oligonucleotide
  Sense strand starting at position 1754 of SEQ ID NO: 1888365
ggaauucugucacuuaagg

SEQ ID NO: 2530501 - RNA, 19 nt, Artificial Sequence
  Description of Artificial Sequence: Synthetic oligonucleotide
  Antisense strand to SEQ ID NO: 2530500
ccuuaagugacagaauucc

SEQ ID NO: 2530502 - RNA, 19 nt, Artificial Sequence
  Description of Artificial Sequence: Synthetic oligonucleotide
  Sense strand starting at position 1468 of SEQ ID NO: 1888365
cugugaaucccugggagau

SEQ ID NO: 2530503 - RNA, 19 nt, Artificial Sequence
  Description of Artificial Sequence: Synthetic oligonucleotide
  Antisense strand to SEQ ID NO: 2530502
aucucccagggauucacag

SEQ ID NO: 2530504 - RNA, 19 nt, Artificial Sequence
  Description of Artificial Sequence: Synthetic oligonucleotide
  Sense strand starting at position 1469 of SEQ ID NO: 1888365
ugugaaucccugggagauu

SEQ ID NO: 2530505 - RNA, 19 nt, Artificial Sequence
  Description of Artificial Sequence: Synthetic oligonucleotide
  Antisense strand to SEQ ID NO: 2530504
aaucucccagggauucaca

SEQ ID NO: 2530506 - RNA, 19 nt, Artificial Sequence
  Description of Artificial Sequence: Synthetic oligonucleotide
  Sense strand starting at position 1871 of SEQ ID NO: 1888365
uuggucauucugcauagaa

SEQ ID NO: 2530507 - RNA, 19 nt, Artificial Sequence
  Description of Artificial Sequence: Synthetic oligonucleotide
  Antisense strand to SEQ ID NO: 2530506
uucuaugcagaaugaccaa

SEQ ID NO: 2530508 - RNA, 19 nt, Artificial Sequence
  Description of Artificial Sequence: Synthetic oligonucleotide
  Sense strand starting at position 1873 of SEQ ID NO: 1888365
ggucauucugcauagaauu

SEQ ID NO: 2530509 - RNA, 19 nt, Artificial Sequence
  Description of Artificial Sequence: Synthetic oligonucleotide
  Antisense strand to SEQ ID NO: 2530508
aauucuaugcagaaugacc

SEQ ID NO: 2530510 - RNA, 19 nt, Artificial Sequence
  Description of Artificial Sequence: Synthetic oligonucleotide
  Sense strand starting at position 1560 of SEQ ID NO: 1888365
gugauaaagagcugugaga

SEQ ID NO: 2530511 - RNA, 19 nt, Artificial Sequence
  Description of Artificial Sequence: Synthetic oligonucleotide
  Antisense strand to SEQ ID NO: 2530510
ucucacagcucuuuaucac

SEQ ID NO: 2530512 - RNA, 19 nt, Artificial Sequence
  Description of Artificial Sequence: Synthetic oligonucleotide
  Sense strand starting at position 3883 of SEQ ID NO: 1888365
cugucaugggcuggagaga

SEQ ID NO: 2530513 - RNA, 19 nt, Artificial Sequence
  Description of Artificial Sequence: Synthetic oligonucleotide
  Antisense strand to SEQ ID NO: 2530512
ucucuccagcccaugacag

SEQ ID NO: 2530514 - RNA, 19 nt, Artificial Sequence
  Description of Artificial Sequence: Synthetic oligonucleotide
  Sense strand starting at position 2375 of SEQ ID NO: 1888365
caccuucguguggaucaga

SEQ ID NO: 2530515 - RNA, 19 nt, Artificial Sequence
  Description of Artificial Sequence: Synthetic oligonucleotide
  Antisense strand to SEQ ID NO: 2530514
ucugauccacacgaaggug

SEQ ID NO: 2530516 - RNA, 19 nt, Artificial Sequence
  Description of Artificial Sequence: Synthetic oligonucleotide
  Sense strand starting at position 2378 of SEQ ID NO: 1888365
cuucguguggaucagauca

SEQ ID NO: 2530517 - RNA, 19 nt, Artificial Sequence
  Description of Artificial Sequence: Synthetic oligonucleotide
  Antisense strand to SEQ ID NO: 2530516
ugaucugauccacacgaag

SEQ ID NO: 2530518 - RNA, 19 nt, Artificial Sequence
  Description of Artificial Sequence: Synthetic oligonucleotide
  Sense strand starting at position 1376 of SEQ ID NO: 1888365
cugagcuccuucucaggaa

SEQ ID NO: 2530519 - RNA, 19 nt, Artificial Sequence
  Description of Artificial Sequence: Synthetic oligonucleotide
  Antisense strand to SEQ ID NO: 2530518
uuccugagaaggagcucag

SEQ ID NO: 2530520 - RNA, 19 nt, Artificial Sequence
  Description of Artificial Sequence: Synthetic oligonucleotide
  Sense strand starting at position 1145 of SEQ ID NO: 1888365
uugguugccagcuaauaga

SEQ ID NO: 2530521 - RNA, 19 nt, Artificial Sequence
  Description of Artificial Sequence: Synthetic oligonucleotide
  Antisense strand to SEQ ID NO: 2530520
ucuauuagcuggcaaccaa

SEQ ID NO: 2530522 - RNA, 19 nt, Artificial Sequence
  Description of Artificial Sequence: Synthetic oligonucleotide
  Sense strand starting at position 907 of SEQ ID NO: 1888365
aggaauuuguccgaaugau

SEQ ID NO: 2530523 - RNA, 19 nt, Artificial Sequence
  Description of Artificial Sequence: Synthetic oligonucleotide
  Antisense strand to SEQ ID NO: 2530522
aucauucggacaaauuccu

SEQ ID NO: 2530524 - RNA, 19 nt, Artificial Sequence
  Description of Artificial Sequence: Synthetic oligonucleotide
  Sense strand starting at position 2757 of SEQ ID NO: 1888365
gagauucuccugggucagu

SEQ ID NO: 2530525 - RNA, 19 nt, Artificial Sequence
  Description of Artificial Sequence: Synthetic oligonucleotide
  Antisense strand to SEQ ID NO: 2530524
acugacccaggagaaucuc

SEQ ID NO: 2530526 - RNA, 19 nt, Artificial Sequence
  Description of Artificial Sequence: Synthetic oligonucleotide
  Sense strand starting at position 1614 of SEQ ID NO: 1888365
auuggauguuguccucaau

SEQ ID NO: 2530527 - RNA, 19 nt, Artificial Sequence
  Description of Artificial Sequence: Synthetic oligonucleotide
  Antisense strand to SEQ ID NO: 2530526
auugaggacaacauccaau

SEQ ID NO: 2530528 - RNA, 19 nt, Artificial Sequence
  Description of Artificial Sequence: Synthetic oligonucleotide
  Sense strand starting at position 2208 of SEQ ID NO: 1888365
agucccugucuuuacaagu

SEQ ID NO: 2530529 - RNA, 19 nt, Artificial Sequence
  Description of Artificial Sequence: Synthetic oligonucleotide
  Antisense strand to SEQ ID NO: 2530528
acuuguaaagacagggacu

SEQ ID NO: 2530530 - RNA, 19 nt, Artificial Sequence
  Description of Artificial Sequence: Synthetic oligonucleotide
  Sense strand starting at position 3103 of SEQ ID NO: 1888365
ccuccaagucuguggauau

SEQ ID NO: 2530531 - RNA, 19 nt, Artificial Sequence
  Description of Artificial Sequence: Synthetic oligonucleotide
  Antisense strand to SEQ ID NO: 2530530
auauccacagacuuggagg

SEQ ID NO: 2530532 - RNA, 19 nt, Artificial Sequence
  Description of Artificial Sequence: Synthetic oligonucleotide
  Sense strand starting at position 1870 of SEQ ID NO: 1888365
cuuggucauucugcauaga

SEQ ID NO: 2530533 - RNA, 19 nt, Artificial Sequence
  Description of Artificial Sequence: Synthetic oligonucleotide
  Antisense strand to SEQ ID NO: 2530532
ucuaugcagaaugaccaag

SEQ ID NO: 2530534 - RNA, 19 nt, Artificial Sequence
  Description of Artificial Sequence: Synthetic oligonucleotide
  Sense strand starting at position 3095 of SEQ ID NO: 1888365
uguuuaagccuccaagucu

SEQ ID NO: 2530535 - RNA, 19 nt, Artificial Sequence
  Description of Artificial Sequence: Synthetic oligonucleotide
  Antisense strand to SEQ ID NO: 2530534
agacuuggaggcuuaaaca

SEQ ID NO: 2530536 - RNA, 19 nt, Artificial Sequence
  Description of Artificial Sequence: Synthetic oligonucleotide
  Sense strand starting at position 639 of SEQ ID NO: 1888365
gugucaugccuccauccau

SEQ ID NO: 2530537 - RNA, 19 nt, Artificial Sequence
  Description of Artificial Sequence: Synthetic oligonucleotide
  Antisense strand to SEQ ID NO: 2530536
auggauggaggcaugacac

SEQ ID NO: 2530538 - RNA, 19 nt, Artificial Sequence
  Description of Artificial Sequence: Synthetic oligonucleotide
  Sense strand starting at position 3102 of SEQ ID NO: 1888365
gccuccaagucuguggaua

SEQ ID NO: 2530539 - RNA, 19 nt, Artificial Sequence
  Description of Artificial Sequence: Synthetic oligonucleotide
  Antisense strand to SEQ ID NO: 2530538
uauccacagacuuggaggc

SEQ ID NO: 2530540 - RNA, 19 nt, Artificial Sequence
  Description of Artificial Sequence: Synthetic oligonucleotide
  Sense strand starting at position 627 of SEQ ID NO: 1888365
aguggacagucugugucau

SEQ ID NO: 2530541 - RNA, 19 nt, Artificial Sequence
  Description of Artificial Sequence: Synthetic oligonucleotide
  Antisense strand to SEQ ID NO: 2530540
augacacagacuguccacu

SEQ ID NO: 2530542 - RNA, 19 nt, Artificial Sequence
  Description of Artificial Sequence: Synthetic oligonucleotide
  Sense strand starting at position 2006 of SEQ ID NO: 1888365
augauucccgguugucaug

SEQ ID NO: 2530543 - RNA, 19 nt, Artificial Sequence
  Description of Artificial Sequence: Synthetic oligonucleotide
  Antisense strand to SEQ ID NO: 2530542
caugacaaccgggaaucau

SEQ ID NO: 2530544 - RNA, 19 nt, Artificial Sequence
  Description of Artificial Sequence: Synthetic oligonucleotide
  Sense strand starting at position 1547 of SEQ ID NO: 1888365
gaggcagcaguuugugaua

SEQ ID NO: 2530545 - RNA, 19 nt, Artificial Sequence
  Description of Artificial Sequence: Synthetic oligonucleotide
  Antisense strand to SEQ ID NO: 2530544
uaucacaaacugcugccuc

SEQ ID NO: 2530546 - RNA, 19 nt, Artificial Sequence
  Description of Artificial Sequence: Synthetic oligonucleotide
  Sense strand starting at position 697 of SEQ ID NO: 1888365
acuccaccuccguguaaug

SEQ ID NO: 2530547 - RNA, 19 nt, Artificial Sequence
  Description of Artificial Sequence: Synthetic oligonucleotide
  Antisense strand to SEQ ID NO: 2530546
cauuacacggagguggagu

SEQ ID NO: 2530548 - RNA, 19 nt, Artificial Sequence
  Description of Artificial Sequence: Synthetic oligonucleotide
  Sense strand starting at position 706 of SEQ ID NO: 1888365
ccguguaaugcccaaccuu

SEQ ID NO: 2530549 - RNA, 19 nt, Artificial Sequence
  Description of Artificial Sequence: Synthetic oligonucleotide
  Antisense strand to SEQ ID NO: 2530548
aagguugggcauuacacgg

SEQ ID NO: 2530550 - RNA, 19 nt, Artificial Sequence
  Description of Artificial Sequence: Synthetic oligonucleotide
  Sense strand starting at position 2114 of SEQ ID NO: 1888365
ggcccuuuaucugccugau

SEQ ID NO: 2530551 - RNA, 19 nt, Artificial Sequence
  Description of Artificial Sequence: Synthetic oligonucleotide
  Antisense strand to SEQ ID NO: 2530550
aucaggcagauaaagggcc

SEQ ID NO: 2530552 - RNA, 19 nt, Artificial Sequence
  Description of Artificial Sequence: Synthetic oligonucleotide
  Sense strand starting at position 575 of SEQ ID NO: 1888365
ggucuuugcaguggacagu

SEQ ID NO: 2530553 - RNA, 19 nt, Artificial Sequence
  Description of Artificial Sequence: Synthetic oligonucleotide
  Antisense strand to SEQ ID NO: 2530552
acuguccacugcaaagacc

SEQ ID NO: 2530554 - RNA, 19 nt, Artificial Sequence
  Description of Artificial Sequence: Synthetic oligonucleotide
  Sense strand starting at position 2202 of SEQ ID NO: 1888365
gguuacagucccugucuuu

SEQ ID NO: 2530555 - RNA, 19 nt, Artificial Sequence
  Description of Artificial Sequence: Synthetic oligonucleotide
  Antisense strand to SEQ ID NO: 2530554
aaagacagggacuguaacc

SEQ ID NO: 2530556 - RNA, 19 nt, Artificial Sequence
  Description of Artificial Sequence: Synthetic oligonucleotide
  Sense strand starting at position 2245 of SEQ ID NO: 1888365
gggcgugccugagcucaaa

SEQ ID NO: 2530557 - RNA, 19 nt, Artificial Sequence
  Description of Artificial Sequence: Synthetic oligonucleotide
  Antisense strand to SEQ ID NO: 2530556
uuugagcucaggcacgccc

SEQ ID NO: 2530558 - RNA, 19 nt, Artificial Sequence
  Description of Artificial Sequence: Synthetic oligonucleotide
  Sense strand starting at position 1413 of SEQ ID NO: 1888365
cugggucacucagauacuu

SEQ ID NO: 2530559 - RNA, 19 nt, Artificial Sequence
  Description of Artificial Sequence: Synthetic oligonucleotide
  Antisense strand to SEQ ID NO: 2530558
aaguaucugagugacccag

SEQ ID NO: 2530560 - RNA, 19 nt, Artificial Sequence
  Description of Artificial Sequence: Synthetic oligonucleotide
  Sense strand starting at position 1552 of SEQ ID NO: 1888365
agcaguuugugauaaagag

SEQ ID NO: 2530561 - RNA, 19 nt, Artificial Sequence
  Description of Artificial Sequence: Synthetic oligonucleotide
  Antisense strand to SEQ ID NO: 2530560
cucuuuaucacaaacugcu

SEQ ID NO: 2530562 - RNA, 19 nt, Artificial Sequence
  Description of Artificial Sequence: Synthetic oligonucleotide
  Sense strand starting at position 1827 of SEQ ID NO: 1888365
ggcaaagggucaggaacau

SEQ ID NO: 2530563 - RNA, 19 nt, Artificial Sequence
  Description of Artificial Sequence: Synthetic oligonucleotide
  Antisense strand to SEQ ID NO: 2530562
auguuccugacccuuugcc

SEQ ID NO: 2530564 - RNA, 19 nt, Artificial Sequence
  Description of Artificial Sequence: Synthetic oligonucleotide
  Sense strand starting at position 3452 of SEQ ID NO: 1888366
ucuagaauucuguaucuag

SEQ ID NO: 2530565 - RNA, 19 nt, Artificial Sequence
  Description of Artificial Sequence: Synthetic oligonucleotide
  Antisense strand to SEQ ID NO: 2530564
cuagauacagaauucuaga

SEQ ID NO: 2530566 - RNA, 19 nt, Artificial Sequence
  Description of Artificial Sequence: Synthetic oligonucleotide
  Sense strand starting at position 1244 of SEQ ID NO: 1888366
cucaguggucaucaauaag

SEQ ID NO: 2530567 - RNA, 19 nt, Artificial Sequence
  Description of Artificial Sequence: Synthetic oligonucleotide
  Antisense strand to SEQ ID NO: 2530566
cuuauugaugaccacugag

SEQ ID NO: 2530568 - RNA, 19 nt, Artificial Sequence
  Description of Artificial Sequence: Synthetic oligonucleotide
  Sense strand starting at position 2113 of SEQ ID NO: 1888366
ucaaacaagaguuggugaa

SEQ ID NO: 2530569 - RNA, 19 nt, Artificial Sequence
  Description of Artificial Sequence: Synthetic oligonucleotide
  Antisense strand to SEQ ID NO: 2530568
uucaccaacucuuguuuga

SEQ ID NO: 2530570 - RNA, 19 nt, Artificial Sequence
  Description of Artificial Sequence: Synthetic oligonucleotide
  Sense strand starting at position 1308 of SEQ ID NO: 1888366
agcaguugaaaugaaugua

SEQ ID NO: 2530571 - RNA, 19 nt, Artificial Sequence
  Description of Artificial Sequence: Synthetic oligonucleotide
  Antisense strand to SEQ ID NO: 2530570
uacauucauuucaacugcu

SEQ ID NO: 2530572 - RNA, 19 nt, Artificial Sequence
  Description of Artificial Sequence: Synthetic oligonucleotide
  Sense strand starting at position 3924 of SEQ ID NO: 1888366
gagcaugugagugaaacua

SEQ ID NO: 2530573 - RNA, 19 nt, Artificial Sequence
  Description of Artificial Sequence: Synthetic oligonucleotide
  Antisense strand to SEQ ID NO: 2530572
uaguuucacucacaugcuc

SEQ ID NO: 2530574 - RNA, 19 nt, Artificial Sequence
  Description of Artificial Sequence: Synthetic oligonucleotide
  Sense strand starting at position 924 of SEQ ID NO: 1888366
ugaagagaugcuuauuggu

SEQ ID NO: 2530575 - RNA, 19 nt, Artificial Sequence
  Description of Artificial Sequence: Synthetic oligonucleotide
  Antisense strand to SEQ ID NO: 2530574
accaauaagcaucucuuca

SEQ ID NO: 2530576 - RNA, 19 nt, Artificial Sequence
  Description of Artificial Sequence: Synthetic oligonucleotide
  Sense strand starting at position 1506 of SEQ ID NO: 1888366
gugguucuucuugagagga

SEQ ID NO: 2530577 - RNA, 19 nt, Artificial Sequence
  Description of Artificial Sequence: Synthetic oligonucleotide
  Antisense strand to SEQ ID NO: 2530576
uccucucaagaagaaccac

SEQ ID NO: 2530578 - RNA, 19 nt, Artificial Sequence
  Description of Artificial Sequence: Synthetic oligonucleotide
  Sense strand starting at position 1234 of SEQ ID NO: 1888366
caaugacauccucaguggu

SEQ ID NO: 2530579 - RNA, 19 nt, Artificial Sequence
  Description of Artificial Sequence: Synthetic oligonucleotide
  Antisense strand to SEQ ID NO: 2530578
accacugaggaugucauug

SEQ ID NO: 2530580 - RNA, 19 nt, Artificial Sequence
  Description of Artificial Sequence: Synthetic oligonucleotide
  Sense strand starting at position 3800 of SEQ ID NO: 1888366
gggaguaacacuuggcaaa

SEQ ID NO: 2530581 - RNA, 19 nt, Artificial Sequence
  Description of Artificial Sequence: Synthetic oligonucleotide
  Antisense strand to SEQ ID NO: 2530580
uuugccaaguguuacuccc

SEQ ID NO: 2530582 - RNA, 19 nt, Artificial Sequence
  Description of Artificial Sequence: Synthetic oligonucleotide
  Sense strand starting at position 3788 of SEQ ID NO: 1888366
uagacaguuauugggagua

SEQ ID NO: 2530583 - RNA, 19 nt, Artificial Sequence
  Description of Artificial Sequence: Synthetic oligonucleotide
  Antisense strand to SEQ ID NO: 2530582
uacucccaauaacugucua

SEQ ID NO: 2530584 - RNA, 19 nt, Artificial Sequence
  Description of Artificial Sequence: Synthetic oligonucleotide
  Sense strand starting at position 2684 of SEQ ID NO: 1888366
ccuacuuauccuuagugau

SEQ ID NO: 2530585 - RNA, 19 nt, Artificial Sequence
  Description of Artificial Sequence: Synthetic oligonucleotide
  Antisense strand to SEQ ID NO: 2530584
aucacuaaggauaaguagg

SEQ ID NO: 2530586 - RNA, 19 nt, Artificial Sequence
  Description of Artificial Sequence: Synthetic oligonucleotide
  Sense strand starting at position 944 of SEQ ID NO: 1888366
cuauaugcucaguauuaag

SEQ ID NO: 2530587 - RNA, 19 nt, Artificial Sequence
  Description of Artificial Sequence: Synthetic oligonucleotide
  Antisense strand to SEQ ID NO: 2530586
cuuaauacugagcauauag

SEQ ID NO: 2530588 - RNA, 19 nt, Artificial Sequence
  Description of Artificial Sequence: Synthetic oligonucleotide
  Sense strand starting at position 1241 of SEQ ID NO: 1888366
auccucaguggucaucaau

SEQ ID NO: 2530589 - RNA, 19 nt, Artificial Sequence
  Description of Artificial Sequence: Synthetic oligonucleotide
  Antisense strand to SEQ ID NO: 2530588
auugaugaccacugaggau

SEQ ID NO: 2530590 - RNA, 19 nt, Artificial Sequence
  Description of Artificial Sequence: Synthetic oligonucleotide
  Sense strand starting at position 1439 of SEQ ID NO: 1888366
aauacuauggauuguagua

SEQ ID NO: 2530591 - RNA, 19 nt, Artificial Sequence
  Description of Artificial Sequence: Synthetic oligonucleotide
  Antisense strand to SEQ ID NO: 2530590
uacuacaauccauaguauu

SEQ ID NO: 2530592 - RNA, 19 nt, Artificial Sequence
  Description of Artificial Sequence: Synthetic oligonucleotide
  Sense strand starting at position 2609 of SEQ ID NO: 1888366
uuuagaaaucgguagccaa

SEQ ID NO: 2530593 - RNA, 19 nt, Artificial Sequence
  Description of Artificial Sequence: Synthetic oligonucleotide
  Antisense strand to SEQ ID NO: 2530592
uuggcuaccgauuucuaaa

SEQ ID NO: 2530594 - RNA, 19 nt, Artificial Sequence
  Description of Artificial Sequence: Synthetic oligonucleotide
  Sense strand starting at position 3892 of SEQ ID NO: 1888366
uuauacgugaggcaacaua

SEQ ID NO: 2530595 - RNA, 19 nt, Artificial Sequence
  Description of Artificial Sequence: Synthetic oligonucleotide
  Antisense strand to SEQ ID NO: 2530594
uauguugccucacguauaa

SEQ ID NO: 2530596 - RNA, 19 nt, Artificial Sequence
  Description of Artificial Sequence: Synthetic oligonucleotide
  Sense strand starting at position 1611 of SEQ ID NO: 1888366
guugacagugguuacaauu

SEQ ID NO: 2530597 - RNA, 19 nt, Artificial Sequence
  Description of Artificial Sequence: Synthetic oligonucleotide
  Antisense strand to SEQ ID NO: 2530596
aauuguaaccacugucaac

SEQ ID NO: 2530598 - RNA, 19 nt, Artificial Sequence
  Description of Artificial Sequence: Synthetic oligonucleotide
  Sense strand starting at position 1148 of SEQ ID NO: 1888366
gguacaggcccuggagaua

SEQ ID NO: 2530599 - RNA, 19 nt, Artificial Sequence
  Description of Artificial Sequence: Synthetic oligonucleotide
  Antisense strand to SEQ ID NO: 2530598
uaucuccagggccuguacc

SEQ ID NO: 2530600 - RNA, 19 nt, Artificial Sequence
  Description of Artificial Sequence: Synthetic oligonucleotide
  Sense strand starting at position 926 of SEQ ID NO: 1888366
aagagaugcuuauugguac

SEQ ID NO: 2530601 - RNA, 19 nt, Artificial Sequence
  Description of Artificial Sequence: Synthetic oligonucleotide
  Antisense strand to SEQ ID NO: 2530600
guaccaauaagcaucucuu

SEQ ID NO: 2530602 - RNA, 19 nt, Artificial Sequence
  Description of Artificial Sequence: Synthetic oligonucleotide
  Sense strand starting at position 2683 of SEQ ID NO: 1888366
accuacuuauccuuaguga

SEQ ID NO: 2530603 - RNA, 19 nt, Artificial Sequence
  Description of Artificial Sequence: Synthetic oligonucleotide
  Antisense strand to SEQ ID NO: 2530602
ucacuaaggauaaguaggu

SEQ ID NO: 2530604 - RNA, 19 nt, Artificial Sequence
  Description of Artificial Sequence: Synthetic oligonucleotide
  Sense strand starting at position 89 of SEQ ID NO: 1888366
aagaaauauuuguagugac

SEQ ID NO: 2530605 - RNA, 19 nt, Artificial Sequence
  Description of Artificial Sequence: Synthetic oligonucleotide
  Antisense strand to SEQ ID NO: 2530604
gucacuacaaauauuucuu

SEQ ID NO: 2530606 - RNA, 19 nt, Artificial Sequence
  Description of Artificial Sequence: Synthetic oligonucleotide
  Sense strand starting at position 103 of SEQ ID NO: 1888366
gugacaacgguuuaacuuu

SEQ ID NO: 2530607 - RNA, 19 nt, Artificial Sequence
  Description of Artificial Sequence: Synthetic oligonucleotide
  Antisense strand to SEQ ID NO: 2530606
aaaguuaaaccguugucac

SEQ ID NO: 2530608 - RNA, 19 nt, Artificial Sequence
  Description of Artificial Sequence: Synthetic oligonucleotide
  Sense strand starting at position 3923 of SEQ ID NO: 1888366
agagcaugugagugaaacu

SEQ ID NO: 2530609 - RNA, 19 nt, Artificial Sequence
  Description of Artificial Sequence: Synthetic oligonucleotide
  Antisense strand to SEQ ID NO: 2530608
aguuucacucacaugcucu

SEQ ID NO: 2530610 - RNA, 19 nt, Artificial Sequence
  Description of Artificial Sequence: Synthetic oligonucleotide
  Sense strand starting at position 1608 of SEQ ID NO: 1888366
aagguugacagugguuaca

SEQ ID NO: 2530611 - RNA, 19 nt, Artificial Sequence
  Description of Artificial Sequence: Synthetic oligonucleotide
  Antisense strand to SEQ ID NO: 2530610
uguaaccacugucaaccuu

SEQ ID NO: 2530612 - RNA, 19 nt, Artificial Sequence
  Description of Artificial Sequence: Synthetic oligonucleotide
  Sense strand starting at position 1236 of SEQ ID NO: 1888366
augacauccucagugguca

SEQ ID NO: 2530613 - RNA, 19 nt, Artificial Sequence
  Description of Artificial Sequence: Synthetic oligonucleotide
  Antisense strand to SEQ ID NO: 2530612
ugaccacugaggaugucau

SEQ ID NO: 2530614 - RNA, 19 nt, Artificial Sequence
  Description of Artificial Sequence: Synthetic oligonucleotide
  Sense strand starting at position 3461 of SEQ ID NO: 1888366
cuguaucuagcugaauagu

SEQ ID NO: 2530615 - RNA, 19 nt, Artificial Sequence
  Description of Artificial Sequence: Synthetic oligonucleotide
  Antisense strand to SEQ ID NO: 2530614
acuauucagcuagauacag

SEQ ID NO: 2530616 - RNA, 19 nt, Artificial Sequence
  Description of Artificial Sequence: Synthetic oligonucleotide
  Sense strand starting at position 1933 of SEQ ID NO: 1888366
ucacacaguuaugucuaau

SEQ ID NO: 2530617 - RNA, 19 nt, Artificial Sequence
  Description of Artificial Sequence: Synthetic oligonucleotide
  Antisense strand to SEQ ID NO: 2530616
auuagacauaacuguguga

SEQ ID NO: 2530618 - RNA, 19 nt, Artificial Sequence
  Description of Artificial Sequence: Synthetic oligonucleotide
  Sense strand starting at position 2190 of SEQ ID NO: 1888366
ugucgaaguauguaaauuc

SEQ ID NO: 2530619 - RNA, 19 nt, Artificial Sequence
  Description of Artificial Sequence: Synthetic oligonucleotide
  Antisense strand to SEQ ID NO: 2530618
gaauuuacauacuucgaca

SEQ ID NO: 2530620 - RNA, 19 nt, Artificial Sequence
  Description of Artificial Sequence: Synthetic oligonucleotide
  Sense strand starting at position 3666 of SEQ ID NO: 1888366
agaggaagccugugcacaa

SEQ ID NO: 2530621 - RNA, 19 nt, Artificial Sequence
  Description of Artificial Sequence: Synthetic oligonucleotide
  Antisense strand to SEQ ID NO: 2530620
uugugcacaggcuuccucu

SEQ ID NO: 2530622 - RNA, 19 nt, Artificial Sequence
  Description of Artificial Sequence: Synthetic oligonucleotide
  Sense strand starting at position 1610 of SEQ ID NO: 1888366
gguugacagugguuacaau

SEQ ID NO: 2530623 - RNA, 19 nt, Artificial Sequence
  Description of Artificial Sequence: Synthetic oligonucleotide
  Antisense strand to SEQ ID NO: 2530622
auuguaaccacugucaacc

SEQ ID NO: 2530624 - RNA, 19 nt, Artificial Sequence
  Description of Artificial Sequence: Synthetic oligonucleotide
  Sense strand starting at position 3250 of SEQ ID NO: 1888366
gguacaggauugucgaauu

SEQ ID NO: 2530625 - RNA, 19 nt, Artificial Sequence
  Description of Artificial Sequence: Synthetic oligonucleotide
  Antisense strand to SEQ ID NO: 2530624
aauucgacaauccuguacc

SEQ ID NO: 2530626 - RNA, 19 nt, Artificial Sequence
  Description of Artificial Sequence: Synthetic oligonucleotide
  Sense strand starting at position 1502 of SEQ ID NO: 1888366
gauagugguucuucuugag

SEQ ID NO: 2530627 - RNA, 19 nt, Artificial Sequence
  Description of Artificial Sequence: Synthetic oligonucleotide
  Antisense strand to SEQ ID NO: 2530626
cucaagaagaaccacuauc

SEQ ID NO: 2530628 - RNA, 19 nt, Artificial Sequence
  Description of Artificial Sequence: Synthetic oligonucleotide
  Sense strand starting at position 971 of SEQ ID NO: 1888366
augagauaggaucgugcau

SEQ ID NO: 2530629 - RNA, 19 nt, Artificial Sequence
  Description of Artificial Sequence: Synthetic oligonucleotide
  Antisense strand to SEQ ID NO: 2530628
augcacgauccuaucucau

SEQ ID NO: 2530630 - RNA, 19 nt, Artificial Sequence
  Description of Artificial Sequence: Synthetic oligonucleotide
  Sense strand starting at position 929 of SEQ ID NO: 1888366
agaugcuuauugguacuau

SEQ ID NO: 2530631 - RNA, 19 nt, Artificial Sequence
  Description of Artificial Sequence: Synthetic oligonucleotide
  Antisense strand to SEQ ID NO: 2530630
auaguaccaauaagcaucu

SEQ ID NO: 2530632 - RNA, 19 nt, Artificial Sequence
  Description of Artificial Sequence: Synthetic oligonucleotide
  Sense strand starting at position 1645 of SEQ ID NO: 1888366
gucaacacucuugguuaca

SEQ ID NO: 2530633 - RNA, 19 nt, Artificial Sequence
  Description of Artificial Sequence: Synthetic oligonucleotide
  Antisense strand to SEQ ID NO: 2530632
uguaaccaagaguguugac

SEQ ID NO: 2530634 - RNA, 19 nt, Artificial Sequence
  Description of Artificial Sequence: Synthetic oligonucleotide
  Sense strand starting at position 941 of SEQ ID NO: 1888366
guacuauaugcucaguauu

SEQ ID NO: 2530635 - RNA, 19 nt, Artificial Sequence
  Description of Artificial Sequence: Synthetic oligonucleotide
  Antisense strand to SEQ ID NO: 2530634
aauacugagcauauaguac

SEQ ID NO: 2530636 - RNA, 19 nt, Artificial Sequence
  Description of Artificial Sequence: Synthetic oligonucleotide
  Sense strand starting at position 2188 of SEQ ID NO: 1888366
aaugucgaaguauguaaau

SEQ ID NO: 2530637 - RNA, 19 nt, Artificial Sequence
  Description of Artificial Sequence: Synthetic oligonucleotide
  Antisense strand to SEQ ID NO: 2530636
auuuacauacuucgacauu

SEQ ID NO: 2530638 - RNA, 19 nt, Artificial Sequence
  Description of Artificial Sequence: Synthetic oligonucleotide
  Sense strand starting at position 3883 of SEQ ID NO: 1888366
cagaauuauuuauacguga

SEQ ID NO: 2530639 - RNA, 19 nt, Artificial Sequence
  Description of Artificial Sequence: Synthetic oligonucleotide
  Antisense strand to SEQ ID NO: 2530638
ucacguauaaauaauucug

SEQ ID NO: 2530640 - RNA, 19 nt, Artificial Sequence
  Description of Artificial Sequence: Synthetic oligonucleotide
  Sense strand starting at position 1939 of SEQ ID NO: 1888366
aguuaugucuaauugguga

SEQ ID NO: 2530641 - RNA, 19 nt, Artificial Sequence
  Description of Artificial Sequence: Synthetic oligonucleotide
  Antisense strand to SEQ ID NO: 2530640
ucaccaauuagacauaacu

SEQ ID NO: 2530642 - RNA, 19 nt, Artificial Sequence
  Description of Artificial Sequence: Synthetic oligonucleotide
  Sense strand starting at position 3290 of SEQ ID NO: 1888366
gauccuaaguguccagagu

SEQ ID NO: 2530643 - RNA, 19 nt, Artificial Sequence
  Description of Artificial Sequence: Synthetic oligonucleotide
  Antisense strand to SEQ ID NO: 2530642
acucuggacacuuaggauc

SEQ ID NO: 2530644 - RNA, 19 nt, Artificial Sequence
  Description of Artificial Sequence: Synthetic oligonucleotide
  Sense strand starting at position 431 of SEQ ID NO: 1888367
ggccacucauauuuguuua

SEQ ID NO: 2530645 - RNA, 19 nt, Artificial Sequence
  Description of Artificial Sequence: Synthetic oligonucleotide
  Antisense strand to SEQ ID NO: 2530644
uaaacaaauaugaguggcc

SEQ ID NO: 2530646 - RNA, 19 nt, Artificial Sequence
  Description of Artificial Sequence: Synthetic oligonucleotide
  Sense strand starting at position 1071 of SEQ ID NO: 1888367
agaucauauucucucugga

SEQ ID NO: 2530647 - RNA, 19 nt, Artificial Sequence
  Description of Artificial Sequence: Synthetic oligonucleotide
  Antisense strand to SEQ ID NO: 2530646
uccagagagaauaugaucu

SEQ ID NO: 2530648 - RNA, 19 nt, Artificial Sequence
  Description of Artificial Sequence: Synthetic oligonucleotide
  Sense strand starting at position 1068 of SEQ ID NO: 1888367
ggaagaucauauucucucu

SEQ ID NO: 2530649 - RNA, 19 nt, Artificial Sequence
  Description of Artificial Sequence: Synthetic oligonucleotide
  Antisense strand to SEQ ID NO: 2530648
agagagaauaugaucuucc

SEQ ID NO: 2530650 - RNA, 19 nt, Artificial Sequence
  Description of Artificial Sequence: Synthetic oligonucleotide
  Sense strand starting at position 804 of SEQ ID NO: 1888367
uuuaaaccuugagcuagaa

SEQ ID NO: 2530651 - RNA, 19 nt, Artificial Sequence
  Description of Artificial Sequence: Synthetic oligonucleotide
  Antisense strand to SEQ ID NO: 2530650
uucuagcucaagguuuaaa

SEQ ID NO: 2530652 - RNA, 19 nt, Artificial Sequence
  Description of Artificial Sequence: Synthetic oligonucleotide
  Sense strand starting at position 535 of SEQ ID NO: 1888367
ucugcuguccugcagauuu

SEQ ID NO: 2530653 - RNA, 19 nt, Artificial Sequence
  Description of Artificial Sequence: Synthetic oligonucleotide
  Antisense strand to SEQ ID NO: 2530652
aaaucugcaggacagcaga

SEQ ID NO: 2530654 - RNA, 19 nt, Artificial Sequence
  Description of Artificial Sequence: Synthetic oligonucleotide
  Sense strand starting at position 654 of SEQ ID NO: 1888367
accauaagcccguagaaau

SEQ ID NO: 2530655 - RNA, 19 nt, Artificial Sequence
  Description of Artificial Sequence: Synthetic oligonucleotide
  Antisense strand to SEQ ID NO: 2530654
auuucuacgggcuuauggu

SEQ ID NO: 2530656 - RNA, 19 nt, Artificial Sequence
  Description of Artificial Sequence: Synthetic oligonucleotide
  Sense strand starting at position 1076 of SEQ ID NO: 1888367
auauucucucuggagcauu

SEQ ID NO: 2530657 - RNA, 19 nt, Artificial Sequence
  Description of Artificial Sequence: Synthetic oligonucleotide
  Antisense strand to SEQ ID NO: 2530656
aaugcuccagagagaauau

SEQ ID NO: 2530658 - RNA, 19 nt, Artificial Sequence
  Description of Artificial Sequence: Synthetic oligonucleotide
  Sense strand starting at position 652 of SEQ ID NO: 1888367
gaaccauaagcccguagaa

SEQ ID NO: 2530659 - RNA, 19 nt, Artificial Sequence
  Description of Artificial Sequence: Synthetic oligonucleotide
  Antisense strand to SEQ ID NO: 2530658
uucuacgggcuuaugguuc

SEQ ID NO: 2530660 - RNA, 19 nt, Artificial Sequence
  Description of Artificial Sequence: Synthetic oligonucleotide
  Sense strand starting at position 1394 of SEQ ID NO: 1888367
gauugcugauuguucuaaa

SEQ ID NO: 2530661 - RNA, 19 nt, Artificial Sequence
  Description of Artificial Sequence: Synthetic oligonucleotide
  Antisense strand to SEQ ID NO: 2530660
uuuagaacaaucagcaauc

SEQ ID NO: 2530662 - RNA, 19 nt, Artificial Sequence
  Description of Artificial Sequence: Synthetic oligonucleotide
  Sense strand starting at position 1074 of SEQ ID NO: 1888367
ucauauucucucuggagca

SEQ ID NO: 2530663 - RNA, 19 nt, Artificial Sequence
  Description of Artificial Sequence: Synthetic oligonucleotide
  Antisense strand to SEQ ID NO: 2530662
ugcuccagagagaauauga

SEQ ID NO: 2530664 - RNA, 19 nt, Artificial Sequence
  Description of Artificial Sequence: Synthetic oligonucleotide
  Sense strand starting at position 553 of SEQ ID NO: 1888367
uggccuugguucccaaaga

SEQ ID NO: 2530665 - RNA, 19 nt, Artificial Sequence
  Description of Artificial Sequence: Synthetic oligonucleotide
  Antisense strand to SEQ ID NO: 2530664
ucuuugggaaccaaggcca

SEQ ID NO: 2530666 - RNA, 19 nt, Artificial Sequence
  Description of Artificial Sequence: Synthetic oligonucleotide
  Sense strand starting at position 304 of SEQ ID NO: 1888367
gugaaagccuugucccaaa

SEQ ID NO: 2530667 - RNA, 19 nt, Artificial Sequence
  Description of Artificial Sequence: Synthetic oligonucleotide
  Antisense strand to SEQ ID NO: 2530666
uuugggacaaggcuuucac

SEQ ID NO: 2530668 - RNA, 19 nt, Artificial Sequence
  Description of Artificial Sequence: Synthetic oligonucleotide
  Sense strand starting at position 1143 of SEQ ID NO: 1888367
cccacaucugaauguguuu

SEQ ID NO: 2530669 - RNA, 19 nt, Artificial Sequence
  Description of Artificial Sequence: Synthetic oligonucleotide
  Antisense strand to SEQ ID NO: 2530668
aaacacauucagauguggg

SEQ ID NO: 2530670 - RNA, 19 nt, Artificial Sequence
  Description of Artificial Sequence: Synthetic oligonucleotide
  Sense strand starting at position 801 of SEQ ID NO: 1888367
gccuuuaaaccuugagcua

SEQ ID NO: 2530671 - RNA, 19 nt, Artificial Sequence
  Description of Artificial Sequence: Synthetic oligonucleotide
  Antisense strand to SEQ ID NO: 2530670
uagcucaagguuuaaaggc

SEQ ID NO: 2530672 - RNA, 19 nt, Artificial Sequence
  Description of Artificial Sequence: Synthetic oligonucleotide
  Sense strand starting at position 302 of SEQ ID NO: 1888367
gggugaaagccuuguccca

SEQ ID NO: 2530673 - RNA, 19 nt, Artificial Sequence
  Description of Artificial Sequence: Synthetic oligonucleotide
  Antisense strand to SEQ ID NO: 2530672
ugggacaaggcuuucaccc

SEQ ID NO: 2530674 - RNA, 19 nt, Artificial Sequence
  Description of Artificial Sequence: Synthetic oligonucleotide
  Sense strand starting at position 1392 of SEQ ID NO: 1888367
cugauugcugauuguucua

SEQ ID NO: 2530675 - RNA, 19 nt, Artificial Sequence
  Description of Artificial Sequence: Synthetic oligonucleotide
  Antisense strand to SEQ ID NO: 2530674
uagaacaaucagcaaucag

SEQ ID NO: 2530676 - RNA, 19 nt, Artificial Sequence
  Description of Artificial Sequence: Synthetic oligonucleotide
  Sense strand starting at position 974 of SEQ ID NO: 1888367
uguguucuuuaugcauaaa

SEQ ID NO: 2530677 - RNA, 19 nt, Artificial Sequence
  Description of Artificial Sequence: Synthetic oligonucleotide
  Antisense strand to SEQ ID NO: 2530676
uuuaugcauaaagaacaca

SEQ ID NO: 2530678 - RNA, 19 nt, Artificial Sequence
  Description of Artificial Sequence: Synthetic oligonucleotide
  Sense strand starting at position 1421 of SEQ ID NO: 1888367
ucugucuucccuuguaaac

SEQ ID NO: 2530679 - RNA, 19 nt, Artificial Sequence
  Description of Artificial Sequence: Synthetic oligonucleotide
  Antisense strand to SEQ ID NO: 2530678
guuuacaagggaagacaga

SEQ ID NO: 2530680 - RNA, 19 nt, Artificial Sequence
  Description of Artificial Sequence: Synthetic oligonucleotide
  Sense strand starting at position 791 of SEQ ID NO: 1888367
cacuguggcugccuuuaaa

SEQ ID NO: 2530681 - RNA, 19 nt, Artificial Sequence
  Description of Artificial Sequence: Synthetic oligonucleotide
  Antisense strand to SEQ ID NO: 2530680
uuuaaaggcagccacagug

SEQ ID NO: 2530682 - RNA, 19 nt, Artificial Sequence
  Description of Artificial Sequence: Synthetic oligonucleotide
  Sense strand starting at position 971 of SEQ ID NO: 1888367
cuguguguucuuuaugcau

SEQ ID NO: 2530683 - RNA, 19 nt, Artificial Sequence
  Description of Artificial Sequence: Synthetic oligonucleotide
  Antisense strand to SEQ ID NO: 2530682
augcauaaagaacacacag

SEQ ID NO: 2530684 - RNA, 19 nt, Artificial Sequence
  Description of Artificial Sequence: Synthetic oligonucleotide
  Sense strand starting at position 1379 of SEQ ID NO: 1888367
uugccaaugugcccugauu

SEQ ID NO: 2530685 - RNA, 19 nt, Artificial Sequence
  Description of Artificial Sequence: Synthetic oligonucleotide
  Antisense strand to SEQ ID NO: 2530684
aaucagggcacauuggcaa

SEQ ID NO: 2530686 - RNA, 19 nt, Artificial Sequence
  Description of Artificial Sequence: Synthetic oligonucleotide
  Sense strand starting at position 1418 of SEQ ID NO: 1888367
uagucugucuucccuugua

SEQ ID NO: 2530687 - RNA, 19 nt, Artificial Sequence
  Description of Artificial Sequence: Synthetic oligonucleotide
  Antisense strand to SEQ ID NO: 2530686
uacaagggaagacagacua

SEQ ID NO: 2530688 - RNA, 19 nt, Artificial Sequence
  Description of Artificial Sequence: Synthetic oligonucleotide
  Sense strand starting at position 967 of SEQ ID NO: 1888367
cuuucuguguguucuuuau

SEQ ID NO: 2530689 - RNA, 19 nt, Artificial Sequence
  Description of Artificial Sequence: Synthetic oligonucleotide
  Antisense strand to SEQ ID NO: 2530688
auaaagaacacacagaaag

SEQ ID NO: 2530690 - RNA, 19 nt, Artificial Sequence
  Description of Artificial Sequence: Synthetic oligonucleotide
  Sense strand starting at position 376 of SEQ ID NO: 1888367
gggucagucuugguugcuu

SEQ ID NO: 2530691 - RNA, 19 nt, Artificial Sequence
  Description of Artificial Sequence: Synthetic oligonucleotide
  Antisense strand to SEQ ID NO: 2530690
aagcaaccaagacugaccc

SEQ ID NO: 2530692 - RNA, 19 nt, Artificial Sequence
  Description of Artificial Sequence: Synthetic oligonucleotide
  Sense strand starting at position 973 of SEQ ID NO: 1888367
guguguucuuuaugcauaa

SEQ ID NO: 2530693 - RNA, 19 nt, Artificial Sequence
  Description of Artificial Sequence: Synthetic oligonucleotide
  Antisense strand to SEQ ID NO: 2530692
uuaugcauaaagaacacac

SEQ ID NO: 2530694 - RNA, 19 nt, Artificial Sequence
  Description of Artificial Sequence: Synthetic oligonucleotide
  Sense strand starting at position 3608 of SEQ ID NO: 1888368
acaaaugcccacuaagagu

SEQ ID NO: 2530695 - RNA, 19 nt, Artificial Sequence
  Description of Artificial Sequence: Synthetic oligonucleotide
  Antisense strand to SEQ ID NO: 2530694
acucuuagugggcauuugu

SEQ ID NO: 2530696 - RNA, 19 nt, Artificial Sequence
  Description of Artificial Sequence: Synthetic oligonucleotide
  Sense strand starting at position 2860 of SEQ ID NO: 1888368
guaccauugcucuugcagu

SEQ ID NO: 2530697 - RNA, 19 nt, Artificial Sequence
  Description of Artificial Sequence: Synthetic oligonucleotide
  Antisense strand to SEQ ID NO: 2530696
acugcaagagcaaugguac

SEQ ID NO: 2530698 - RNA, 19 nt, Artificial Sequence
  Description of Artificial Sequence: Synthetic oligonucleotide
  Sense strand starting at position 1069 of SEQ ID NO: 1888368
aguauuagccuggaucaaa

SEQ ID NO: 2530699 - RNA, 19 nt, Artificial Sequence
  Description of Artificial Sequence: Synthetic oligonucleotide
  Antisense strand to SEQ ID NO: 2530698
uuugauccaggcuaauacu

SEQ ID NO: 2530700 - RNA, 19 nt, Artificial Sequence
  Description of Artificial Sequence: Synthetic oligonucleotide
  Sense strand starting at position 1 of SEQ ID NO: 1888368
caguuucuagaaggauuga

SEQ ID NO: 2530701 - RNA, 19 nt, Artificial Sequence
  Description of Artificial Sequence: Synthetic oligonucleotide
  Antisense strand to SEQ ID NO: 2530700
ucaauccuucuagaaacug

SEQ ID NO: 2530702 - RNA, 19 nt, Artificial Sequence
  Description of Artificial Sequence: Synthetic oligonucleotide
  Sense strand starting at position 1268 of SEQ ID NO: 1888368
ggaugcucucgggauacaa

SEQ ID NO: 2530703 - RNA, 19 nt, Artificial Sequence
  Description of Artificial Sequence: Synthetic oligonucleotide
  Antisense strand to SEQ ID NO: 2530702
uuguaucccgagagcaucc

SEQ ID NO: 2530704 - RNA, 19 nt, Artificial Sequence
  Description of Artificial Sequence: Synthetic oligonucleotide
  Sense strand starting at position 3504 of SEQ ID NO: 1888368
gcagccagccuccauuuau

SEQ ID NO: 2530705 - RNA, 19 nt, Artificial Sequence
  Description of Artificial Sequence: Synthetic oligonucleotide
  Antisense strand to SEQ ID NO: 2530704
auaaauggaggcuggcugc

SEQ ID NO: 2530706 - RNA, 19 nt, Artificial Sequence
  Description of Artificial Sequence: Synthetic oligonucleotide
  Sense strand starting at position 2053 of SEQ ID NO: 1888368
cugauuacagacugacagu

SEQ ID NO: 2530707 - RNA, 19 nt, Artificial Sequence
  Description of Artificial Sequence: Synthetic oligonucleotide
  Antisense strand to SEQ ID NO: 2530706
acugucagucuguaaucag

SEQ ID NO: 2530708 - RNA, 19 nt, Artificial Sequence
  Description of Artificial Sequence: Synthetic oligonucleotide
  Sense strand starting at position 436 of SEQ ID NO: 1888368
gccucagugcucguacaug

SEQ ID NO: 2530709 - RNA, 19 nt, Artificial Sequence
  Description of Artificial Sequence: Synthetic oligonucleotide
  Antisense strand to SEQ ID NO: 2530708
cauguacgagcacugaggc

SEQ ID NO: 2530710 - RNA, 19 nt, Artificial Sequence
  Description of Artificial Sequence: Synthetic oligonucleotide
  Sense strand starting at position 1056 of SEQ ID NO: 1888368
aguaucagaagucaguauu

SEQ ID NO: 2530711 - RNA, 19 nt, Artificial Sequence
  Description of Artificial Sequence: Synthetic oligonucleotide
  Antisense strand to SEQ ID NO: 2530710
aauacugacuucugauacu

SEQ ID NO: 2530712 - RNA, 19 nt, Artificial Sequence
  Description of Artificial Sequence: Synthetic oligonucleotide
  Sense strand starting at position 3099 of SEQ ID NO: 1888368
aggauaaguacuuguugaa

SEQ ID NO: 2530713 - RNA, 19 nt, Artificial Sequence
  Description of Artificial Sequence: Synthetic oligonucleotide
  Antisense strand to SEQ ID NO: 2530712
uucaacaaguacuuauccu

SEQ ID NO: 2530714 - RNA, 19 nt, Artificial Sequence
  Description of Artificial Sequence: Synthetic oligonucleotide
  Sense strand starting at position 3881 of SEQ ID NO: 1888368
gauggagacugaucuguuc

SEQ ID NO: 2530715 - RNA, 19 nt, Artificial Sequence
  Description of Artificial Sequence: Synthetic oligonucleotide
  Antisense strand to SEQ ID NO: 2530714
gaacagaucagucuccauc

SEQ ID NO: 2530716 - RNA, 19 nt, Artificial Sequence
  Description of Artificial Sequence: Synthetic oligonucleotide
  Sense strand starting at position 2424 of SEQ ID NO: 1888368
auaaaugaccaguguccaa

SEQ ID NO: 2530717 - RNA, 19 nt, Artificial Sequence
  Description of Artificial Sequence: Synthetic oligonucleotide
  Antisense strand to SEQ ID NO: 2530716
uuggacacuggucauuuau

SEQ ID NO: 2530718 - RNA, 19 nt, Artificial Sequence
  Description of Artificial Sequence: Synthetic oligonucleotide
  Sense strand starting at position 519 of SEQ ID NO: 1888368
gcagaaugaugaucucuug

SEQ ID NO: 2530719 - RNA, 19 nt, Artificial Sequence
  Description of Artificial Sequence: Synthetic oligonucleotide
  Antisense strand to SEQ ID NO: 2530718
caagagaucaucauucugc

SEQ ID NO: 2530720 - RNA, 19 nt, Artificial Sequence
  Description of Artificial Sequence: Synthetic oligonucleotide
  Sense strand starting at position 1378 of SEQ ID NO: 1888368
agguuugcacuguaaacaa

SEQ ID NO: 2530721 - RNA, 19 nt, Artificial Sequence
  Description of Artificial Sequence: Synthetic oligonucleotide
  Antisense strand to SEQ ID NO: 2530720
uuguuuacagugcaaaccu

SEQ ID NO: 2530722 - RNA, 19 nt, Artificial Sequence
  Description of Artificial Sequence: Synthetic oligonucleotide
  Sense strand starting at position 3098 of SEQ ID NO: 1888368
caggauaaguacuuguuga

SEQ ID NO: 2530723 - RNA, 19 nt, Artificial Sequence
  Description of Artificial Sequence: Synthetic oligonucleotide
  Antisense strand to SEQ ID NO: 2530722
ucaacaaguacuuauccug

SEQ ID NO: 2530724 - RNA, 19 nt, Artificial Sequence
  Description of Artificial Sequence: Synthetic oligonucleotide
  Sense strand starting at position 500 of SEQ ID NO: 1888368
aagccuucccaggaaguuu

SEQ ID NO: 2530725 - RNA, 19 nt, Artificial Sequence
  Description of Artificial Sequence: Synthetic oligonucleotide
  Antisense strand to SEQ ID NO: 2530724
aaacuuccugggaaggcuu

SEQ ID NO: 2530726 - RNA, 19 nt, Artificial Sequence
  Description of Artificial Sequence: Synthetic oligonucleotide
  Sense strand starting at position 513 of SEQ ID NO: 1888368
aaguuugcagaaugaugau

SEQ ID NO: 2530727 - RNA, 19 nt, Artificial Sequence
  Description of Artificial Sequence: Synthetic oligonucleotide
  Antisense strand to SEQ ID NO: 2530726
aucaucauucugcaaacuu

SEQ ID NO: 2530728 - RNA, 19 nt, Artificial Sequence
  Description of Artificial Sequence: Synthetic oligonucleotide
  Sense strand starting at position 2619 of SEQ ID NO: 1888368
ggaagcaguggccauauua

SEQ ID NO: 2530729 - RNA, 19 nt, Artificial Sequence
  Description of Artificial Sequence: Synthetic oligonucleotide
  Antisense strand to SEQ ID NO: 2530728
uaauauggccacugcuucc

SEQ ID NO: 2530730 - RNA, 19 nt, Artificial Sequence
  Description of Artificial Sequence: Synthetic oligonucleotide
  Sense strand starting at position 3072 of SEQ ID NO: 1888368
ggacucugccugggacaua

SEQ ID NO: 2530731 - RNA, 19 nt, Artificial Sequence
  Description of Artificial Sequence: Synthetic oligonucleotide
  Antisense strand to SEQ ID NO: 2530730
uaugucccaggcagagucc

SEQ ID NO: 2530732 - RNA, 19 nt, Artificial Sequence
  Description of Artificial Sequence: Synthetic oligonucleotide
  Sense strand starting at position 3071 of SEQ ID NO: 1888368
aggacucugccugggacau

SEQ ID NO: 2530733 - RNA, 19 nt, Artificial Sequence
  Description of Artificial Sequence: Synthetic oligonucleotide
  Antisense strand to SEQ ID NO: 2530732
augucccaggcagaguccu

SEQ ID NO: 2530734 - RNA, 19 nt, Artificial Sequence
  Description of Artificial Sequence: Synthetic oligonucleotide
  Sense strand starting at position 584 of SEQ ID NO: 1888368
gugcuagaauauucuagaa

SEQ ID NO: 2530735 - RNA, 19 nt, Artificial Sequence
  Description of Artificial Sequence: Synthetic oligonucleotide
  Antisense strand to SEQ ID NO: 2530734
uucuagaauauucuagcac

SEQ ID NO: 2530736 - RNA, 19 nt, Artificial Sequence
  Description of Artificial Sequence: Synthetic oligonucleotide
  Sense strand starting at position 3691 of SEQ ID NO: 1888368
ugagcaauugcuuacauac

SEQ ID NO: 2530737 - RNA, 19 nt, Artificial Sequence
  Description of Artificial Sequence: Synthetic oligonucleotide
  Antisense strand to SEQ ID NO: 2530736
guauguaagcaauugcuca

SEQ ID NO: 2530738 - RNA, 19 nt, Artificial Sequence
  Description of Artificial Sequence: Synthetic oligonucleotide
  Sense strand starting at position 398 of SEQ ID NO: 1888368
aaagaauuguucucugagu

SEQ ID NO: 2530739 - RNA, 19 nt, Artificial Sequence
  Description of Artificial Sequence: Synthetic oligonucleotide
  Antisense strand to SEQ ID NO: 2530738
acucagagaacaauucuuu

SEQ ID NO: 2530740 - RNA, 19 nt, Artificial Sequence
  Description of Artificial Sequence: Synthetic oligonucleotide
  Sense strand starting at position 686 of SEQ ID NO: 1888368
cccacauugcauggagacu

SEQ ID NO: 2530741 - RNA, 19 nt, Artificial Sequence
  Description of Artificial Sequence: Synthetic oligonucleotide
  Antisense strand to SEQ ID NO: 2530740
agucuccaugcaauguggg

SEQ ID NO: 2530742 - RNA, 19 nt, Artificial Sequence
  Description of Artificial Sequence: Synthetic oligonucleotide
  Sense strand starting at position 2933 of SEQ ID NO: 1888368
agguuucuccuccaaaguc

SEQ ID NO: 2530743 - RNA, 19 nt, Artificial Sequence
  Description of Artificial Sequence: Synthetic oligonucleotide
  Antisense strand to SEQ ID NO: 2530742
gacuuuggaggagaaaccu

SEQ ID NO: 2530744 - RNA, 19 nt, Artificial Sequence
  Description of Artificial Sequence: Synthetic oligonucleotide
  Sense strand starting at position 3617 of SEQ ID NO: 1888368
cacuaagaguccguggaga

SEQ ID NO: 2530745 - RNA, 19 nt, Artificial Sequence
  Description of Artificial Sequence: Synthetic oligonucleotide
  Antisense strand to SEQ ID NO: 2530744
ucuccacggacucuuagug

SEQ ID NO: 2530746 - RNA, 19 nt, Artificial Sequence
  Description of Artificial Sequence: Synthetic oligonucleotide
  Sense strand starting at position 455 of SEQ ID NO: 1888368
uuaacaugugugcaggauu

SEQ ID NO: 2530747 - RNA, 19 nt, Artificial Sequence
  Description of Artificial Sequence: Synthetic oligonucleotide
  Antisense strand to SEQ ID NO: 2530746
aauccugcacacauguuaa

SEQ ID NO: 2530748 - RNA, 19 nt, Artificial Sequence
  Description of Artificial Sequence: Synthetic oligonucleotide
  Sense strand starting at position 214 of SEQ ID NO: 1888368
agagauguucccugcagag

SEQ ID NO: 2530749 - RNA, 19 nt, Artificial Sequence
  Description of Artificial Sequence: Synthetic oligonucleotide
  Antisense strand to SEQ ID NO: 2530748
cucugcagggaacaucucu

SEQ ID NO: 2530750 - RNA, 19 nt, Artificial Sequence
  Description of Artificial Sequence: Synthetic oligonucleotide
  Sense strand starting at position 2931 of SEQ ID NO: 1888368
ccagguuucuccuccaaag

SEQ ID NO: 2530751 - RNA, 19 nt, Artificial Sequence
  Description of Artificial Sequence: Synthetic oligonucleotide
  Antisense strand to SEQ ID NO: 2530750
cuuuggaggagaaaccugg

SEQ ID NO: 2530752 - RNA, 19 nt, Artificial Sequence
  Description of Artificial Sequence: Synthetic oligonucleotide
  Sense strand starting at position 482 of SEQ ID NO: 1888368
gcaguucuuugaucagaaa

SEQ ID NO: 2530753 - RNA, 19 nt, Artificial Sequence
  Description of Artificial Sequence: Synthetic oligonucleotide
  Antisense strand to SEQ ID NO: 2530752
uuucugaucaaagaacugc

SEQ ID NO: 2530754 - RNA, 19 nt, Artificial Sequence
  Description of Artificial Sequence: Synthetic oligonucleotide
  Sense strand starting at position 399 of SEQ ID NO: 1888368
aagaauuguucucugaguc

SEQ ID NO: 2530755 - RNA, 19 nt, Artificial Sequence
  Description of Artificial Sequence: Synthetic oligonucleotide
  Antisense strand to SEQ ID NO: 2530754
gacucagagaacaauucuu

SEQ ID NO: 2530756 - RNA, 19 nt, Artificial Sequence
  Description of Artificial Sequence: Synthetic oligonucleotide
  Sense strand starting at position 1596 of SEQ ID NO: 1888368
cccucuuccgaagaugcau

SEQ ID NO: 2530757 - RNA, 19 nt, Artificial Sequence
  Description of Artificial Sequence: Synthetic oligonucleotide
  Antisense strand to SEQ ID NO: 2530756
augcaucuucggaagaggg

SEQ ID NO: 2530758 - RNA, 19 nt, Artificial Sequence
  Description of Artificial Sequence: Synthetic oligonucleotide
  Sense strand starting at position 1068 of SEQ ID NO: 1888368
caguauuagccuggaucaa

SEQ ID NO: 2530759 - RNA, 19 nt, Artificial Sequence
  Description of Artificial Sequence: Synthetic oligonucleotide
  Antisense strand to SEQ ID NO: 2530758
uugauccaggcuaauacug

SEQ ID NO: 2530760 - RNA, 19 nt, Artificial Sequence
  Description of Artificial Sequence: Synthetic oligonucleotide
  Sense strand starting at position 198 of SEQ ID NO: 1888368
ucuaaccagcugugauaga

SEQ ID NO: 2530761 - RNA, 19 nt, Artificial Sequence
  Description of Artificial Sequence: Synthetic oligonucleotide
  Antisense strand to SEQ ID NO: 2530760
ucuaucacagcugguuaga

SEQ ID NO: 2530762 - RNA, 19 nt, Artificial Sequence
  Description of Artificial Sequence: Synthetic oligonucleotide
  Sense strand starting at position 499 of SEQ ID NO: 1888368
aaagccuucccaggaaguu

SEQ ID NO: 2530763 - RNA, 19 nt, Artificial Sequence
  Description of Artificial Sequence: Synthetic oligonucleotide
  Antisense strand to SEQ ID NO: 2530762
aacuuccugggaaggcuuu

SEQ ID NO: 2530764 - RNA, 19 nt, Artificial Sequence
  Description of Artificial Sequence: Synthetic oligonucleotide
  Sense strand starting at position 3595 of SEQ ID NO: 1888368
cugcuagaugugcacaaau

SEQ ID NO: 2530765 - RNA, 19 nt, Artificial Sequence
  Description of Artificial Sequence: Synthetic oligonucleotide
  Antisense strand to SEQ ID NO: 2530764
auuugugcacaucuagcag

SEQ ID NO: 2530766 - RNA, 19 nt, Artificial Sequence
  Description of Artificial Sequence: Synthetic oligonucleotide
  Sense strand starting at position 213 of SEQ ID NO: 1888368
uagagauguucccugcaga

SEQ ID NO: 2530767 - RNA, 19 nt, Artificial Sequence
  Description of Artificial Sequence: Synthetic oligonucleotide
  Antisense strand to SEQ ID NO: 2530766
ucugcagggaacaucucua

SEQ ID NO: 2530768 - RNA, 19 nt, Artificial Sequence
  Description of Artificial Sequence: Synthetic oligonucleotide
  Sense strand starting at position 3795 of SEQ ID NO: 1888368
acucucauguggcugagaa

SEQ ID NO: 2530769 - RNA, 19 nt, Artificial Sequence
  Description of Artificial Sequence: Synthetic oligonucleotide
  Antisense strand to SEQ ID NO: 2530768
uucucagccacaugagagu

SEQ ID NO: 2530770 - RNA, 19 nt, Artificial Sequence
  Description of Artificial Sequence: Synthetic oligonucleotide
  Sense strand starting at position 45 of SEQ ID NO: 1888368
gucugucaaucagucagaa

SEQ ID NO: 2530771 - RNA, 19 nt, Artificial Sequence
  Description of Artificial Sequence: Synthetic oligonucleotide
  Antisense strand to SEQ ID NO: 2530770
uucugacugauugacagac

SEQ ID NO: 2530772 - RNA, 19 nt, Artificial Sequence
  Description of Artificial Sequence: Synthetic oligonucleotide
  Sense strand starting at position 1067 of SEQ ID NO: 1888368
ucaguauuagccuggauca

SEQ ID NO: 2530773 - RNA, 19 nt, Artificial Sequence
  Description of Artificial Sequence: Synthetic oligonucleotide
  Antisense strand to SEQ ID NO: 2530772
ugauccaggcuaauacuga

SEQ ID NO: 2530774 - RNA, 19 nt, Artificial Sequence
  Description of Artificial Sequence: Synthetic oligonucleotide
  Sense strand starting at position 1027 of SEQ ID NO: 1888369
cagauugauuaauugguga

SEQ ID NO: 2530775 - RNA, 19 nt, Artificial Sequence
  Description of Artificial Sequence: Synthetic oligonucleotide
  Antisense strand to SEQ ID NO: 2530774
ucaccaauuaaucaaucug

SEQ ID NO: 2530776 - RNA, 19 nt, Artificial Sequence
  Description of Artificial Sequence: Synthetic oligonucleotide
  Sense strand starting at position 3475 of SEQ ID NO: 1888369
acgauccaucuggaauagu

SEQ ID NO: 2530777 - RNA, 19 nt, Artificial Sequence
  Description of Artificial Sequence: Synthetic oligonucleotide
  Antisense strand to SEQ ID NO: 2530776
acuauuccagauggaucgu

SEQ ID NO: 2530778 - RNA, 19 nt, Artificial Sequence
  Description of Artificial Sequence: Synthetic oligonucleotide
  Sense strand starting at position 2292 of SEQ ID NO: 1888369
aagggaaggugauugcaau

SEQ ID NO: 2530779 - RNA, 19 nt, Artificial Sequence
  Description of Artificial Sequence: Synthetic oligonucleotide
  Antisense strand to SEQ ID NO: 2530778
auugcaaucaccuucccuu

SEQ ID NO: 2530780 - RNA, 19 nt, Artificial Sequence
  Description of Artificial Sequence: Synthetic oligonucleotide
  Sense strand starting at position 1222 of SEQ ID NO: 1888369
cagagagaugccugacuag

SEQ ID NO: 2530781 - RNA, 19 nt, Artificial Sequence
  Description of Artificial Sequence: Synthetic oligonucleotide
  Antisense strand to SEQ ID NO: 2530780
cuagucaggcaucucucug

SEQ ID NO: 2530782 - RNA, 19 nt, Artificial Sequence
  Description of Artificial Sequence: Synthetic oligonucleotide
  Sense strand starting at position 1023 of SEQ ID NO: 1888369
uuuccagauugauuaauug

SEQ ID NO: 2530783 - RNA, 19 nt, Artificial Sequence
  Description of Artificial Sequence: Synthetic oligonucleotide
  Antisense strand to SEQ ID NO: 2530782
caauuaaucaaucuggaaa

SEQ ID NO: 2530784 - RNA, 19 nt, Artificial Sequence
  Description of Artificial Sequence: Synthetic oligonucleotide
  Sense strand starting at position 48 of SEQ ID NO: 1888369
ucuggucugguugaaauaa

SEQ ID NO: 2530785 - RNA, 19 nt, Artificial Sequence
  Description of Artificial Sequence: Synthetic oligonucleotide
  Antisense strand to SEQ ID NO: 2530784
uuauuucaaccagaccaga

SEQ ID NO: 2530786 - RNA, 19 nt, Artificial Sequence
  Description of Artificial Sequence: Synthetic oligonucleotide
  Sense strand starting at position 2033 of SEQ ID NO: 1888369
gcuagaagucaugggagag

SEQ ID NO: 2530787 - RNA, 19 nt, Artificial Sequence
  Description of Artificial Sequence: Synthetic oligonucleotide
  Antisense strand to SEQ ID NO: 2530786
cucucccaugacuucuagc

SEQ ID NO: 2530788 - RNA, 19 nt, Artificial Sequence
  Description of Artificial Sequence: Synthetic oligonucleotide
  Sense strand starting at position 108 of SEQ ID NO: 1888369
acagacaucucagcagauu

SEQ ID NO: 2530789 - RNA, 19 nt, Artificial Sequence
  Description of Artificial Sequence: Synthetic oligonucleotide
  Antisense strand to SEQ ID NO: 2530788
aaucugcugagaugucugu

SEQ ID NO: 2530790 - RNA, 19 nt, Artificial Sequence
  Description of Artificial Sequence: Synthetic oligonucleotide
  Sense strand starting at position 3877 of SEQ ID NO: 1888369
aguuauuaucccuagugga

SEQ ID NO: 2530791 - RNA, 19 nt, Artificial Sequence
  Description of Artificial Sequence: Synthetic oligonucleotide
  Antisense strand to SEQ ID NO: 2530790
uccacuagggauaauaacu

SEQ ID NO: 2530792 - RNA, 19 nt, Artificial Sequence
  Description of Artificial Sequence: Synthetic oligonucleotide
  Sense strand starting at position 2611 of SEQ ID NO: 1888369
ugauuuacuacgugcuuga

SEQ ID NO: 2530793 - RNA, 19 nt, Artificial Sequence
  Description of Artificial Sequence: Synthetic oligonucleotide
  Antisense strand to SEQ ID NO: 2530792
ucaagcacguaguaaauca

SEQ ID NO: 2530794 - RNA, 19 nt, Artificial Sequence
  Description of Artificial Sequence: Synthetic oligonucleotide
  Sense strand starting at position 529 of SEQ ID NO: 1888369
aacagacuugaguguugaa

SEQ ID NO: 2530795 - RNA, 19 nt, Artificial Sequence
  Description of Artificial Sequence: Synthetic oligonucleotide
  Antisense strand to SEQ ID NO: 2530794
uucaacacucaagucuguu

SEQ ID NO: 2530796 - RNA, 19 nt, Artificial Sequence
  Description of Artificial Sequence: Synthetic oligonucleotide
  Sense strand starting at position 470 of SEQ ID NO: 1888369
cacacagaaggguguuaua

SEQ ID NO: 2530797 - RNA, 19 nt, Artificial Sequence
  Description of Artificial Sequence: Synthetic oligonucleotide
  Antisense strand to SEQ ID NO: 2530796
uauaacacccuucugugug

SEQ ID NO: 2530798 - RNA, 19 nt, Artificial Sequence
  Description of Artificial Sequence: Synthetic oligonucleotide
  Sense strand starting at position 3609 of SEQ ID NO: 1888369
augcgaaaucaucacggga

SEQ ID NO: 2530799 - RNA, 19 nt, Artificial Sequence
  Description of Artificial Sequence: Synthetic oligonucleotide
  Antisense strand to SEQ ID NO: 2530798
ucccgugaugauuucgcau

SEQ ID NO: 2530800 - RNA, 19 nt, Artificial Sequence
  Description of Artificial Sequence: Synthetic oligonucleotide
  Sense strand starting at position 1601 of SEQ ID NO: 1888369
gggacacacucaucuucuu

SEQ ID NO: 2530801 - RNA, 19 nt, Artificial Sequence
  Description of Artificial Sequence: Synthetic oligonucleotide
  Antisense strand to SEQ ID NO: 2530800
aagaagaugaguguguccc

SEQ ID NO: 2530802 - RNA, 19 nt, Artificial Sequence
  Description of Artificial Sequence: Synthetic oligonucleotide
  Sense strand starting at position 3181 of SEQ ID NO: 1888369
aagcguguaggagaucaaa

SEQ ID NO: 2530803 - RNA, 19 nt, Artificial Sequence
  Description of Artificial Sequence: Synthetic oligonucleotide
  Antisense strand to SEQ ID NO: 2530802
uuugaucuccuacacgcuu

SEQ ID NO: 2530804 - RNA, 19 nt, Artificial Sequence
  Description of Artificial Sequence: Synthetic oligonucleotide
  Sense strand starting at position 143 of SEQ ID NO: 1888369
gagaguaaguggguuauga

SEQ ID NO: 2530805 - RNA, 19 nt, Artificial Sequence
  Description of Artificial Sequence: Synthetic oligonucleotide
  Antisense strand to SEQ ID NO: 2530804
ucauaacccacuuacucuc

SEQ ID NO: 2530806 - RNA, 19 nt, Artificial Sequence
  Description of Artificial Sequence: Synthetic oligonucleotide
  Sense strand starting at position 1918 of SEQ ID NO: 1888369
cagccaaagcuuggaaaga

SEQ ID NO: 2530807 - RNA, 19 nt, Artificial Sequence
  Description of Artificial Sequence: Synthetic oligonucleotide
  Antisense strand to SEQ ID NO: 2530806
ucuuuccaagcuuuggcug

SEQ ID NO: 2530808 - RNA, 19 nt, Artificial Sequence
  Description of Artificial Sequence: Synthetic oligonucleotide
  Sense strand starting at position 1683 of SEQ ID NO: 1888369
aaagaaacauguguuaggu

SEQ ID NO: 2530809 - RNA, 19 nt, Artificial Sequence
  Description of Artificial Sequence: Synthetic oligonucleotide
  Antisense strand to SEQ ID NO: 2530808
accuaacacauguuucuuu

SEQ ID NO: 2530810 - RNA, 19 nt, Artificial Sequence
  Description of Artificial Sequence: Synthetic oligonucleotide
  Sense strand starting at position 3383 of SEQ ID NO: 1888369
agaugucccggugacauau

SEQ ID NO: 2530811 - RNA, 19 nt, Artificial Sequence
  Description of Artificial Sequence: Synthetic oligonucleotide
  Antisense strand to SEQ ID NO: 2530810
auaugucaccgggacaucu

SEQ ID NO: 2530812 - RNA, 19 nt, Artificial Sequence
  Description of Artificial Sequence: Synthetic oligonucleotide
  Sense strand starting at position 235 of SEQ ID NO: 1888369
uugugaugacgaugaugau

SEQ ID NO: 2530813 - RNA, 19 nt, Artificial Sequence
  Description of Artificial Sequence: Synthetic oligonucleotide
  Antisense strand to SEQ ID NO: 2530812
aucaucaucgucaucacaa

SEQ ID NO: 2530814 - RNA, 19 nt, Artificial Sequence
  Description of Artificial Sequence: Synthetic oligonucleotide
  Sense strand starting at position 2030 of SEQ ID NO: 1888369
gcugcuagaagucauggga

SEQ ID NO: 2530815 - RNA, 19 nt, Artificial Sequence
  Description of Artificial Sequence: Synthetic oligonucleotide
  Antisense strand to SEQ ID NO: 2530814
ucccaugacuucuagcagc

SEQ ID NO: 2530816 - RNA, 19 nt, Artificial Sequence
  Description of Artificial Sequence: Synthetic oligonucleotide
  Sense strand starting at position 800 of SEQ ID NO: 1888369
uaggaaguuugcucacaag

SEQ ID NO: 2530817 - RNA, 19 nt, Artificial Sequence
  Description of Artificial Sequence: Synthetic oligonucleotide
  Antisense strand to SEQ ID NO: 2530816
cuugugagcaaacuuccua

SEQ ID NO: 2530818 - RNA, 19 nt, Artificial Sequence
  Description of Artificial Sequence: Synthetic oligonucleotide
  Sense strand starting at position 141 of SEQ ID NO: 1888369
cagagaguaaguggguuau

SEQ ID NO: 2530819 - RNA, 19 nt, Artificial Sequence
  Description of Artificial Sequence: Synthetic oligonucleotide
  Antisense strand to SEQ ID NO: 2530818
auaacccacuuacucucug

SEQ ID NO: 2530820 - RNA, 19 nt, Artificial Sequence
  Description of Artificial Sequence: Synthetic oligonucleotide
  Sense strand starting at position 3809 of SEQ ID NO: 1888369
gcugcaaugagaugauaua

SEQ ID NO: 2530821 - RNA, 19 nt, Artificial Sequence
  Description of Artificial Sequence: Synthetic oligonucleotide
  Antisense strand to SEQ ID NO: 2530820
uauaucaucucauugcagc

SEQ ID NO: 2530822 - RNA, 19 nt, Artificial Sequence
  Description of Artificial Sequence: Synthetic oligonucleotide
  Sense strand starting at position 1754 of SEQ ID NO: 1888369
uggauaagucaaugucuca

SEQ ID NO: 2530823 - RNA, 19 nt, Artificial Sequence
  Description of Artificial Sequence: Synthetic oligonucleotide
  Antisense strand to SEQ ID NO: 2530822
ugagacauugacuuaucca

SEQ ID NO: 2530824 - RNA, 19 nt, Artificial Sequence
  Description of Artificial Sequence: Synthetic oligonucleotide
  Sense strand starting at position 2198 of SEQ ID NO: 1888369
agccaaguaacaggaguua

SEQ ID NO: 2530825 - RNA, 19 nt, Artificial Sequence
  Description of Artificial Sequence: Synthetic oligonucleotide
  Antisense strand to SEQ ID NO: 2530824
uaacuccuguuacuuggcu

SEQ ID NO: 2530826 - RNA, 19 nt, Artificial Sequence
  Description of Artificial Sequence: Synthetic oligonucleotide
  Sense strand starting at position 19 of SEQ ID NO: 1888369
uuucuacuugugggaaacu

SEQ ID NO: 2530827 - RNA, 19 nt, Artificial Sequence
  Description of Artificial Sequence: Synthetic oligonucleotide
  Antisense strand to SEQ ID NO: 2530826
aguuucccacaaguagaaa

SEQ ID NO: 2530828 - RNA, 19 nt, Artificial Sequence
  Description of Artificial Sequence: Synthetic oligonucleotide
  Sense strand starting at position 97 of SEQ ID NO: 1888369
ggcacagauuuacagacau

SEQ ID NO: 2530829 - RNA, 19 nt, Artificial Sequence
  Description of Artificial Sequence: Synthetic oligonucleotide
  Antisense strand to SEQ ID NO: 2530828
augucuguaaaucugugcc

SEQ ID NO: 2530830 - RNA, 19 nt, Artificial Sequence
  Description of Artificial Sequence: Synthetic oligonucleotide
  Sense strand starting at position 1508 of SEQ ID NO: 1888369
cucagaaucugccuccaga

SEQ ID NO: 2530831 - RNA, 19 nt, Artificial Sequence
  Description of Artificial Sequence: Synthetic oligonucleotide
  Antisense strand to SEQ ID NO: 2530830
ucuggaggcagauucugag

SEQ ID NO: 2530832 - RNA, 19 nt, Artificial Sequence
  Description of Artificial Sequence: Synthetic oligonucleotide
  Sense strand starting at position 199 of SEQ ID NO: 1888369
cgucuuuccagagaggcaa

SEQ ID NO: 2530833 - RNA, 19 nt, Artificial Sequence
  Description of Artificial Sequence: Synthetic oligonucleotide
  Antisense strand to SEQ ID NO: 2530832
uugccucucuggaaagacg

SEQ ID NO: 2530834 - RNA, 19 nt, Artificial Sequence
  Description of Artificial Sequence: Synthetic oligonucleotide
  Sense strand starting at position 3393 of SEQ ID NO: 1888369
gugacauauuucguagugu

SEQ ID NO: 2530835 - RNA, 19 nt, Artificial Sequence
  Description of Artificial Sequence: Synthetic oligonucleotide
  Antisense strand to SEQ ID NO: 2530834
acacuacgaaauaugucac

SEQ ID NO: 2530836 - RNA, 19 nt, Artificial Sequence
  Description of Artificial Sequence: Synthetic oligonucleotide
  Sense strand starting at position 2300 of SEQ ID NO: 1888369
gugauugcaaucugagaug

SEQ ID NO: 2530837 - RNA, 19 nt, Artificial Sequence
  Description of Artificial Sequence: Synthetic oligonucleotide
  Antisense strand to SEQ ID NO: 2530836
caucucagauugcaaucac

SEQ ID NO: 2530838 - RNA, 19 nt, Artificial Sequence
  Description of Artificial Sequence: Synthetic oligonucleotide
  Sense strand starting at position 119 of SEQ ID NO: 1888369
agcagauuggagugcagaa

SEQ ID NO: 2530839 - RNA, 19 nt, Artificial Sequence
  Description of Artificial Sequence: Synthetic oligonucleotide
  Antisense strand to SEQ ID NO: 2530838
uucugcacuccaaucugcu

SEQ ID NO: 2530840 - RNA, 19 nt, Artificial Sequence
  Description of Artificial Sequence: Synthetic oligonucleotide
  Sense strand starting at position 3140 of SEQ ID NO: 1888369
gagugacagcaguggaauu

SEQ ID NO: 2530841 - RNA, 19 nt, Artificial Sequence
  Description of Artificial Sequence: Synthetic oligonucleotide
  Antisense strand to SEQ ID NO: 2530840
aauuccacugcugucacuc

SEQ ID NO: 2530842 - RNA, 19 nt, Artificial Sequence
  Description of Artificial Sequence: Synthetic oligonucleotide
  Sense strand starting at position 3489 of SEQ ID NO: 1888369
auagucaccuguuuaauau

SEQ ID NO: 2530843 - RNA, 19 nt, Artificial Sequence
  Description of Artificial Sequence: Synthetic oligonucleotide
  Antisense strand to SEQ ID NO: 2530842
auauuaaacaggugacuau

SEQ ID NO: 2530844 - RNA, 19 nt, Artificial Sequence
  Description of Artificial Sequence: Synthetic oligonucleotide
  Sense strand starting at position 778 of SEQ ID NO: 1888369
auuacauagucacucaguu

SEQ ID NO: 2530845 - RNA, 19 nt, Artificial Sequence
  Description of Artificial Sequence: Synthetic oligonucleotide
  Antisense strand to SEQ ID NO: 2530844
aacugagugacuauguaau

SEQ ID NO: 2530846 - RNA, 19 nt, Artificial Sequence
  Description of Artificial Sequence: Synthetic oligonucleotide
  Sense strand starting at position 2609 of SEQ ID NO: 1888369
guugauuuacuacgugcuu

SEQ ID NO: 2530847 - RNA, 19 nt, Artificial Sequence
  Description of Artificial Sequence: Synthetic oligonucleotide
  Antisense strand to SEQ ID NO: 2530846
aagcacguaguaaaucaac

SEQ ID NO: 2530848 - RNA, 19 nt, Artificial Sequence
  Description of Artificial Sequence: Synthetic oligonucleotide
  Sense strand starting at position 1259 of SEQ ID NO: 1888369
gauccaggcagguguauaa

SEQ ID NO: 2530849 - RNA, 19 nt, Artificial Sequence
  Description of Artificial Sequence: Synthetic oligonucleotide
  Antisense strand to SEQ ID NO: 2530848
uuauacaccugccuggauc

SEQ ID NO: 2530850 - RNA, 19 nt, Artificial Sequence
  Description of Artificial Sequence: Synthetic oligonucleotide
  Sense strand starting at position 3352 of SEQ ID NO: 1888369
gcaugaguccacugggacu

SEQ ID NO: 2530851 - RNA, 19 nt, Artificial Sequence
  Description of Artificial Sequence: Synthetic oligonucleotide
  Antisense strand to SEQ ID NO: 2530850
agucccaguggacucaugc

SEQ ID NO: 2530852 - RNA, 19 nt, Artificial Sequence
  Description of Artificial Sequence: Synthetic oligonucleotide
  Sense strand starting at position 152 of SEQ ID NO: 1888369
uggguuaugagccagcuua

SEQ ID NO: 2530853 - RNA, 19 nt, Artificial Sequence
  Description of Artificial Sequence: Synthetic oligonucleotide
  Antisense strand to SEQ ID NO: 2530852
uaagcuggcucauaaccca

SEQ ID NO: 2530854 - RNA, 19 nt, Artificial Sequence
  Description of Artificial Sequence: Synthetic oligonucleotide
  Sense strand starting at position 2711 of SEQ ID NO: 1888370
acgcgugaagucgugaaga

SEQ ID NO: 2530855 - RNA, 19 nt, Artificial Sequence
  Description of Artificial Sequence: Synthetic oligonucleotide
  Antisense strand to SEQ ID NO: 2530854
ucuucacgacuucacgcgu

SEQ ID NO: 2530856 - RNA, 19 nt, Artificial Sequence
  Description of Artificial Sequence: Synthetic oligonucleotide
  Sense strand starting at position 3711 of SEQ ID NO: 1888370
gcauuuaauguaugcauag

SEQ ID NO: 2530857 - RNA, 19 nt, Artificial Sequence
  Description of Artificial Sequence: Synthetic oligonucleotide
  Antisense strand to SEQ ID NO: 2530856
cuaugcauacauuaaaugc

SEQ ID NO: 2530858 - RNA, 19 nt, Artificial Sequence
  Description of Artificial Sequence: Synthetic oligonucleotide
  Sense strand starting at position 1048 of SEQ ID NO: 1888370
gcaacagauaaggguaaua

SEQ ID NO: 2530859 - RNA, 19 nt, Artificial Sequence
  Description of Artificial Sequence: Synthetic oligonucleotide
  Antisense strand to SEQ ID NO: 2530858
uauuacccuuaucuguugc

SEQ ID NO: 2530860 - RNA, 19 nt, Artificial Sequence
  Description of Artificial Sequence: Synthetic oligonucleotide
  Sense strand starting at position 3025 of SEQ ID NO: 1888370
cuagguaguguugaggaaa

SEQ ID NO: 2530861 - RNA, 19 nt, Artificial Sequence
  Description of Artificial Sequence: Synthetic oligonucleotide
  Antisense strand to SEQ ID NO: 2530860
uuuccucaacacuaccuag

SEQ ID NO: 2530862 - RNA, 19 nt, Artificial Sequence
  Description of Artificial Sequence: Synthetic oligonucleotide
  Sense strand starting at position 3423 of SEQ ID NO: 1888370
uuguaauuagauugaggau

SEQ ID NO: 2530863 - RNA, 19 nt, Artificial Sequence
  Description of Artificial Sequence: Synthetic oligonucleotide
  Antisense strand to SEQ ID NO: 2530862
auccucaaucuaauuacaa

SEQ ID NO: 2530864 - RNA, 19 nt, Artificial Sequence
  Description of Artificial Sequence: Synthetic oligonucleotide
  Sense strand starting at position 1399 of SEQ ID NO: 1888370
ugugaaugugaucagacuu

SEQ ID NO: 2530865 - RNA, 19 nt, Artificial Sequence
  Description of Artificial Sequence: Synthetic oligonucleotide
  Antisense strand to SEQ ID NO: 2530864
aagucugaucacauucaca

SEQ ID NO: 2530866 - RNA, 19 nt, Artificial Sequence
  Description of Artificial Sequence: Synthetic oligonucleotide
  Sense strand starting at position 1066 of SEQ ID NO: 1888370
acauuuauagcaugccagu

SEQ ID NO: 2530867 - RNA, 19 nt, Artificial Sequence
  Description of Artificial Sequence: Synthetic oligonucleotide
  Antisense strand to SEQ ID NO: 2530866
acuggcaugcuauaaaugu

SEQ ID NO: 2530868 - RNA, 19 nt, Artificial Sequence
  Description of Artificial Sequence: Synthetic oligonucleotide
  Sense strand starting at position 1568 of SEQ ID NO: 1888370
cugugaagucaguaaggau

SEQ ID NO: 2530869 - RNA, 19 nt, Artificial Sequence
  Description of Artificial Sequence: Synthetic oligonucleotide
  Antisense strand to SEQ ID NO: 2530868
auccuuacugacuucacag

SEQ ID NO: 2530870 - RNA, 19 nt, Artificial Sequence
  Description of Artificial Sequence: Synthetic oligonucleotide
  Sense strand starting at position 3028 of SEQ ID NO: 1888370
gguaguguugaggaaaccu

SEQ ID NO: 2530871 - RNA, 19 nt, Artificial Sequence
  Description of Artificial Sequence: Synthetic oligonucleotide
  Antisense strand to SEQ ID NO: 2530870
agguuuccucaacacuacc

SEQ ID NO: 2530872 - RNA, 19 nt, Artificial Sequence
  Description of Artificial Sequence: Synthetic oligonucleotide
  Sense strand starting at position 3188 of SEQ ID NO: 1888370
gaauaccauuguguugaaa

SEQ ID NO: 2530873 - RNA, 19 nt, Artificial Sequence
  Description of Artificial Sequence: Synthetic oligonucleotide
  Antisense strand to SEQ ID NO: 2530872
uuucaacacaaugguauuc

SEQ ID NO: 2530874 - RNA, 19 nt, Artificial Sequence
  Description of Artificial Sequence: Synthetic oligonucleotide
  Sense strand starting at position 2793 of SEQ ID NO: 1888370
gagucuuugcgggcuuguu

SEQ ID NO: 2530875 - RNA, 19 nt, Artificial Sequence
  Description of Artificial Sequence: Synthetic oligonucleotide
  Antisense strand to SEQ ID NO: 2530874
aacaagcccgcaaagacuc

SEQ ID NO: 2530876 - RNA, 19 nt, Artificial Sequence
  Description of Artificial Sequence: Synthetic oligonucleotide
  Sense strand starting at position 802 of SEQ ID NO: 1888370
cucaaaggaccaugucauu

SEQ ID NO: 2530877 - RNA, 19 nt, Artificial Sequence
  Description of Artificial Sequence: Synthetic oligonucleotide
  Antisense strand to SEQ ID NO: 2530876
aaugacaugguccuuugag

SEQ ID NO: 2530878 - RNA, 19 nt, Artificial Sequence
  Description of Artificial Sequence: Synthetic oligonucleotide
  Sense strand starting at position 2946 of SEQ ID NO: 1888370
ggagcuuugaaaggucaga

SEQ ID NO: 2530879 - RNA, 19 nt, Artificial Sequence
  Description of Artificial Sequence: Synthetic oligonucleotide
  Antisense strand to SEQ ID NO: 2530878
ucugaccuuucaaagcucc

SEQ ID NO: 2530880 - RNA, 19 nt, Artificial Sequence
  Description of Artificial Sequence: Synthetic oligonucleotide
  Sense strand starting at position 2968 of SEQ ID NO: 1888370
uggcuuucccucuaaugaa

SEQ ID NO: 2530881 - RNA, 19 nt, Artificial Sequence
  Description of Artificial Sequence: Synthetic oligonucleotide
  Antisense strand to SEQ ID NO: 2530880
uucauuagagggaaagcca

SEQ ID NO: 2530882 - RNA, 19 nt, Artificial Sequence
  Description of Artificial Sequence: Synthetic oligonucleotide
  Sense strand starting at position 3542 of SEQ ID NO: 1888370
ccaguaagaguugauguuu

SEQ ID NO: 2530883 - RNA, 19 nt, Artificial Sequence
  Description of Artificial Sequence: Synthetic oligonucleotide
  Antisense strand to SEQ ID NO: 2530882
aaacaucaacucuuacugg

SEQ ID NO: 2530884 - RNA, 19 nt, Artificial Sequence
  Description of Artificial Sequence: Synthetic oligonucleotide
  Sense strand starting at position 3881 of SEQ ID NO: 1888370
ggucgaauccauggauaug

SEQ ID NO: 2530885 - RNA, 19 nt, Artificial Sequence
  Description of Artificial Sequence: Synthetic oligonucleotide
  Antisense strand to SEQ ID NO: 2530884
cauauccauggauucgacc

SEQ ID NO: 2530886 - RNA, 19 nt, Artificial Sequence
  Description of Artificial Sequence: Synthetic oligonucleotide
  Sense strand starting at position 3056 of SEQ ID NO: 1888370
uuuccuacccgguaaauua

SEQ ID NO: 2530887 - RNA, 19 nt, Artificial Sequence
  Description of Artificial Sequence: Synthetic oligonucleotide
  Antisense strand to SEQ ID NO: 2530886
uaauuuaccggguaggaaa

SEQ ID NO: 2530888 - RNA, 19 nt, Artificial Sequence
  Description of Artificial Sequence: Synthetic oligonucleotide
  Sense strand starting at position 947 of SEQ ID NO: 1888370
guguuaagaguauacgaug

SEQ ID NO: 2530889 - RNA, 19 nt, Artificial Sequence
  Description of Artificial Sequence: Synthetic oligonucleotide
  Antisense strand to SEQ ID NO: 2530888
caucguauacucuuaacac

SEQ ID NO: 2530890 - RNA, 19 nt, Artificial Sequence
  Description of Artificial Sequence: Synthetic oligonucleotide
  Sense strand starting at position 3504 of SEQ ID NO: 1888370
cauguagcuugauuucgua

SEQ ID NO: 2530891 - RNA, 19 nt, Artificial Sequence
  Description of Artificial Sequence: Synthetic oligonucleotide
  Antisense strand to SEQ ID NO: 2530890
uacgaaaucaagcuacaug

SEQ ID NO: 2530892 - RNA, 19 nt, Artificial Sequence
  Description of Artificial Sequence: Synthetic oligonucleotide
  Sense strand starting at position 1368 of SEQ ID NO: 1888370
agcuuuacugagugaaaug

SEQ ID NO: 2530893 - RNA, 19 nt, Artificial Sequence
  Description of Artificial Sequence: Synthetic oligonucleotide
  Antisense strand to SEQ ID NO: 2530892
cauuucacucaguaaagcu

SEQ ID NO: 2530894 - RNA, 19 nt, Artificial Sequence
  Description of Artificial Sequence: Synthetic oligonucleotide
  Sense strand starting at position 3364 of SEQ ID NO: 1888370
aggugaagugcuuagcaaa

SEQ ID NO: 2530895 - RNA, 19 nt, Artificial Sequence
  Description of Artificial Sequence: Synthetic oligonucleotide
  Antisense strand to SEQ ID NO: 2530894
uuugcuaagcacuucaccu

SEQ ID NO: 2530896 - RNA, 19 nt, Artificial Sequence
  Description of Artificial Sequence: Synthetic oligonucleotide
  Sense strand starting at position 3164 of SEQ ID NO: 1888370
gaagaacugcugcgagaag

SEQ ID NO: 2530897 - RNA, 19 nt, Artificial Sequence
  Description of Artificial Sequence: Synthetic oligonucleotide
  Antisense strand to SEQ ID NO: 2530896
cuucucgcagcaguucuuc

SEQ ID NO: 2530898 - RNA, 19 nt, Artificial Sequence
  Description of Artificial Sequence: Synthetic oligonucleotide
  Sense strand starting at position 1367 of SEQ ID NO: 1888370
cagcuuuacugagugaaau

SEQ ID NO: 2530899 - RNA, 19 nt, Artificial Sequence
  Description of Artificial Sequence: Synthetic oligonucleotide
  Antisense strand to SEQ ID NO: 2530898
auuucacucaguaaagcug

SEQ ID NO: 2530900 - RNA, 19 nt, Artificial Sequence
  Description of Artificial Sequence: Synthetic oligonucleotide
  Sense strand starting at position 1576 of SEQ ID NO: 1888370
ucaguaaggauguggguua

SEQ ID NO: 2530901 - RNA, 19 nt, Artificial Sequence
  Description of Artificial Sequence: Synthetic oligonucleotide
  Antisense strand to SEQ ID NO: 2530900
uaacccacauccuuacuga

SEQ ID NO: 2530902 - RNA, 19 nt, Artificial Sequence
  Description of Artificial Sequence: Synthetic oligonucleotide
  Sense strand starting at position 1398 of SEQ ID NO: 1888370
gugugaaugugaucagacu

SEQ ID NO: 2530903 - RNA, 19 nt, Artificial Sequence
  Description of Artificial Sequence: Synthetic oligonucleotide
  Antisense strand to SEQ ID NO: 2530902
agucugaucacauucacac

SEQ ID NO: 2530904 - RNA, 19 nt, Artificial Sequence
  Description of Artificial Sequence: Synthetic oligonucleotide
  Sense strand starting at position 3185 of SEQ ID NO: 1888370
uuggaauaccauuguguug

SEQ ID NO: 2530905 - RNA, 19 nt, Artificial Sequence
  Description of Artificial Sequence: Synthetic oligonucleotide
  Antisense strand to SEQ ID NO: 2530904
caacacaaugguauuccaa

SEQ ID NO: 2530906 - RNA, 19 nt, Artificial Sequence
  Description of Artificial Sequence: Synthetic oligonucleotide
  Sense strand starting at position 2727 of SEQ ID NO: 1888370
agagaagccuucccagcau

SEQ ID NO: 2530907 - RNA, 19 nt, Artificial Sequence
  Description of Artificial Sequence: Synthetic oligonucleotide
  Antisense strand to SEQ ID NO: 2530906
augcugggaaggcuucucu

SEQ ID NO: 2530908 - RNA, 19 nt, Artificial Sequence
  Description of Artificial Sequence: Synthetic oligonucleotide
  Sense strand starting at position 3175 of SEQ ID NO: 1888370
gcgagaagucuuggaauac

SEQ ID NO: 2530909 - RNA, 19 nt, Artificial Sequence
  Description of Artificial Sequence: Synthetic oligonucleotide
  Antisense strand to SEQ ID NO: 2530908
guauuccaagacuucucgc

SEQ ID NO: 2530910 - RNA, 19 nt, Artificial Sequence
  Description of Artificial Sequence: Synthetic oligonucleotide
  Sense strand starting at position 3386 of SEQ ID NO: 1888370
ccugauguguaacccuuaa

SEQ ID NO: 2530911 - RNA, 19 nt, Artificial Sequence
  Description of Artificial Sequence: Synthetic oligonucleotide
  Antisense strand to SEQ ID NO: 2530910
uuaaggguuacacaucagg

SEQ ID NO: 2530912 - RNA, 19 nt, Artificial Sequence
  Description of Artificial Sequence: Synthetic oligonucleotide
  Sense strand starting at position 3751 of SEQ ID NO: 1888370
ucucaagguuacuuauagu

SEQ ID NO: 2530913 - RNA, 19 nt, Artificial Sequence
  Description of Artificial Sequence: Synthetic oligonucleotide
  Antisense strand to SEQ ID NO: 2530912
acuauaaguaaccuugaga

SEQ ID NO: 2530914 - RNA, 19 nt, Artificial Sequence
  Description of Artificial Sequence: Synthetic oligonucleotide
  Sense strand starting at position 3553 of SEQ ID NO: 1888370
ugauguuuggcuuaagcag

SEQ ID NO: 2530915 - RNA, 19 nt, Artificial Sequence
  Description of Artificial Sequence: Synthetic oligonucleotide
  Antisense strand to SEQ ID NO: 2530914
cugcuuaagccaaacauca

SEQ ID NO: 2530916 - RNA, 19 nt, Artificial Sequence
  Description of Artificial Sequence: Synthetic oligonucleotide
  Sense strand starting at position 523 of SEQ ID NO: 1888370
aguguucugcaguaagaug

SEQ ID NO: 2530917 - RNA, 19 nt, Artificial Sequence
  Description of Artificial Sequence: Synthetic oligonucleotide
  Antisense strand to SEQ ID NO: 2530916
caucuuacugcagaacacu

SEQ ID NO: 2530918 - RNA, 19 nt, Artificial Sequence
  Description of Artificial Sequence: Synthetic oligonucleotide
  Sense strand starting at position 3780 of SEQ ID NO: 1888370
auguaagugcugcacaaau

SEQ ID NO: 2530919 - RNA, 19 nt, Artificial Sequence
  Description of Artificial Sequence: Synthetic oligonucleotide
  Antisense strand to SEQ ID NO: 2530918
auuugugcagcacuuacau

SEQ ID NO: 2530920 - RNA, 19 nt, Artificial Sequence
  Description of Artificial Sequence: Synthetic oligonucleotide
  Sense strand starting at position 936 of SEQ ID NO: 1888370
uugacaaauccguguuaag

SEQ ID NO: 2530921 - RNA, 19 nt, Artificial Sequence
  Description of Artificial Sequence: Synthetic oligonucleotide
  Antisense strand to SEQ ID NO: 2530920
cuuaacacggauuugucaa

SEQ ID NO: 2530922 - RNA, 19 nt, Artificial Sequence
  Description of Artificial Sequence: Synthetic oligonucleotide
  Sense strand starting at position 3494 of SEQ ID NO: 1888370
ggugaauauacauguagcu

SEQ ID NO: 2530923 - RNA, 19 nt, Artificial Sequence
  Description of Artificial Sequence: Synthetic oligonucleotide
  Antisense strand to SEQ ID NO: 2530922
agcuacauguauauucacc

SEQ ID NO: 2530924 - RNA, 19 nt, Artificial Sequence
  Description of Artificial Sequence: Synthetic oligonucleotide
  Sense strand starting at position 3541 of SEQ ID NO: 1888370
cccaguaagaguugauguu

SEQ ID NO: 2530925 - RNA, 19 nt, Artificial Sequence
  Description of Artificial Sequence: Synthetic oligonucleotide
  Antisense strand to SEQ ID NO: 2530924
aacaucaacucuuacuggg

SEQ ID NO: 2530926 - RNA, 19 nt, Artificial Sequence
  Description of Artificial Sequence: Synthetic oligonucleotide
  Sense strand starting at position 520 of SEQ ID NO: 1888370
uacaguguucugcaguaag

SEQ ID NO: 2530927 - RNA, 19 nt, Artificial Sequence
  Description of Artificial Sequence: Synthetic oligonucleotide
  Antisense strand to SEQ ID NO: 2530926
cuuacugcagaacacugua

SEQ ID NO: 2530928 - RNA, 19 nt, Artificial Sequence
  Description of Artificial Sequence: Synthetic oligonucleotide
  Sense strand starting at position 935 of SEQ ID NO: 1888370
uuugacaaauccguguuaa

SEQ ID NO: 2530929 - RNA, 19 nt, Artificial Sequence
  Description of Artificial Sequence: Synthetic oligonucleotide
  Antisense strand to SEQ ID NO: 2530928
uuaacacggauuugucaaa

SEQ ID NO: 2530930 - RNA, 19 nt, Artificial Sequence
  Description of Artificial Sequence: Synthetic oligonucleotide
  Sense strand starting at position 945 of SEQ ID NO: 1888370
ccguguuaagaguauacga

SEQ ID NO: 2530931 - RNA, 19 nt, Artificial Sequence
  Description of Artificial Sequence: Synthetic oligonucleotide
  Antisense strand to SEQ ID NO: 2530930
ucguauacucuuaacacgg

SEQ ID NO: 2530932 - RNA, 19 nt, Artificial Sequence
  Description of Artificial Sequence: Synthetic oligonucleotide
  Sense strand starting at position 698 of SEQ ID NO: 1888370
ggugcugucugauuagaga

SEQ ID NO: 2530933 - RNA, 19 nt, Artificial Sequence
  Description of Artificial Sequence: Synthetic oligonucleotide
  Antisense strand to SEQ ID NO: 2530932
ucucuaaucagacagcacc

SEQ ID NO: 2530934 - RNA, 19 nt, Artificial Sequence
  Description of Artificial Sequence: Synthetic oligonucleotide
  Sense strand starting at position 1202 of SEQ ID NO: 1888371
aaggaauggagguguauua

SEQ ID NO: 2530935 - RNA, 19 nt, Artificial Sequence
  Description of Artificial Sequence: Synthetic oligonucleotide
  Antisense strand to SEQ ID NO: 2530934
uaauacaccuccauuccuu

SEQ ID NO: 2530936 - RNA, 19 nt, Artificial Sequence
  Description of Artificial Sequence: Synthetic oligonucleotide
  Sense strand starting at position 812 of SEQ ID NO: 1888371
cagugaaagcaagauaugu

SEQ ID NO: 2530937 - RNA, 19 nt, Artificial Sequence
  Description of Artificial Sequence: Synthetic oligonucleotide
  Antisense strand to SEQ ID NO: 2530936
acauaucuugcuuucacug

SEQ ID NO: 2530938 - RNA, 19 nt, Artificial Sequence
  Description of Artificial Sequence: Synthetic oligonucleotide
  Sense strand starting at position 1030 of SEQ ID NO: 1888371
auugucuucccugagacau

SEQ ID NO: 2530939 - RNA, 19 nt, Artificial Sequence
  Description of Artificial Sequence: Synthetic oligonucleotide
  Antisense strand to SEQ ID NO: 2530938
augucucagggaagacaau

SEQ ID NO: 2530940 - RNA, 19 nt, Artificial Sequence
  Description of Artificial Sequence: Synthetic oligonucleotide
  Sense strand starting at position 814 of SEQ ID NO: 1888371
gugaaagcaagauaugucu

SEQ ID NO: 2530941 - RNA, 19 nt, Artificial Sequence
  Description of Artificial Sequence: Synthetic oligonucleotide
  Antisense strand to SEQ ID NO: 2530940
agacauaucuugcuuucac

SEQ ID NO: 2530942 - RNA, 19 nt, Artificial Sequence
  Description of Artificial Sequence: Synthetic oligonucleotide
  Sense strand starting at position 1038 of SEQ ID NO: 1888371
cccugagacauaugugaug

SEQ ID NO: 2530943 - RNA, 19 nt, Artificial Sequence
  Description of Artificial Sequence: Synthetic oligonucleotide
  Antisense strand to SEQ ID NO: 2530942
caucacauaugucucaggg

SEQ ID NO: 2530944 - RNA, 19 nt, Artificial Sequence
  Description of Artificial Sequence: Synthetic oligonucleotide
  Sense strand starting at position 3278 of SEQ ID NO: 1888371
cuccaaggucauggagauu

SEQ ID NO: 2530945 - RNA, 19 nt, Artificial Sequence
  Description of Artificial Sequence: Synthetic oligonucleotide
  Antisense strand to SEQ ID NO: 2530944
aaucuccaugaccuuggag

SEQ ID NO: 2530946 - RNA, 19 nt, Artificial Sequence
  Description of Artificial Sequence: Synthetic oligonucleotide
  Sense strand starting at position 2728 of SEQ ID NO: 1888371
cauuaugggcucuggagga

SEQ ID NO: 2530947 - RNA, 19 nt, Artificial Sequence
  Description of Artificial Sequence: Synthetic oligonucleotide
  Antisense strand to SEQ ID NO: 2530946
uccuccagagcccauaaug

SEQ ID NO: 2530948 - RNA, 19 nt, Artificial Sequence
  Description of Artificial Sequence: Synthetic oligonucleotide
  Sense strand starting at position 1025 of SEQ ID NO: 1888371
aauggauugucuucccuga

SEQ ID NO: 2530949 - RNA, 19 nt, Artificial Sequence
  Description of Artificial Sequence: Synthetic oligonucleotide
  Antisense strand to SEQ ID NO: 2530948
ucagggaagacaauccauu

SEQ ID NO: 2530950 - RNA, 19 nt, Artificial Sequence
  Description of Artificial Sequence: Synthetic oligonucleotide
  Sense strand starting at position 3050 of SEQ ID NO: 1888371
acagcuauggcuggaacaa

SEQ ID NO: 2530951 - RNA, 19 nt, Artificial Sequence
  Description of Artificial Sequence: Synthetic oligonucleotide
  Antisense strand to SEQ ID NO: 2530950
uuguuccagccauagcugu

SEQ ID NO: 2530952 - RNA, 19 nt, Artificial Sequence
  Description of Artificial Sequence: Synthetic oligonucleotide
  Sense strand starting at position 1029 of SEQ ID NO: 1888371
gauugucuucccugagaca

SEQ ID NO: 2530953 - RNA, 19 nt, Artificial Sequence
  Description of Artificial Sequence: Synthetic oligonucleotide
  Antisense strand to SEQ ID NO: 2530952
ugucucagggaagacaauc

SEQ ID NO: 2530954 - RNA, 19 nt, Artificial Sequence
  Description of Artificial Sequence: Synthetic oligonucleotide
  Sense strand starting at position 1027 of SEQ ID NO: 1888371
uggauugucuucccugaga

SEQ ID NO: 2530955 - RNA, 19 nt, Artificial Sequence
  Description of Artificial Sequence: Synthetic oligonucleotide
  Antisense strand to SEQ ID NO: 2530954
ucucagggaagacaaucca

SEQ ID NO: 2530956 - RNA, 19 nt, Artificial Sequence
  Description of Artificial Sequence: Synthetic oligonucleotide
  Sense strand starting at position 1161 of SEQ ID NO: 1888371
ggacuucagcgagguagga

SEQ ID NO: 2530957 - RNA, 19 nt, Artificial Sequence
  Description of Artificial Sequence: Synthetic oligonucleotide
  Antisense strand to SEQ ID NO: 2530956
uccuaccucgcugaagucc

SEQ ID NO: 2530958 - RNA, 19 nt, Artificial Sequence
  Description of Artificial Sequence: Synthetic oligonucleotide
  Sense strand starting at position 293 of SEQ ID NO: 1888371
guagcucaccuuuauguga

SEQ ID NO: 2530959 - RNA, 19 nt, Artificial Sequence
  Description of Artificial Sequence: Synthetic oligonucleotide
  Antisense strand to SEQ ID NO: 2530958
ucacauaaaggugagcuac

SEQ ID NO: 2530960 - RNA, 19 nt, Artificial Sequence
  Description of Artificial Sequence: Synthetic oligonucleotide
  Sense strand starting at position 224 of SEQ ID NO: 1888371
aaucccaagcguuaucagu

SEQ ID NO: 2530961 - RNA, 19 nt, Artificial Sequence
  Description of Artificial Sequence: Synthetic oligonucleotide
  Antisense strand to SEQ ID NO: 2530960
acugauaacgcuugggauu

SEQ ID NO: 2530962 - RNA, 19 nt, Artificial Sequence
  Description of Artificial Sequence: Synthetic oligonucleotide
  Sense strand starting at position 3820 of SEQ ID NO: 1888371
uccaguuuacgguauuagu

SEQ ID NO: 2530963 - RNA, 19 nt, Artificial Sequence
  Description of Artificial Sequence: Synthetic oligonucleotide
  Antisense strand to SEQ ID NO: 2530962
acuaauaccguaaacugga

SEQ ID NO: 2530964 - RNA, 19 nt, Artificial Sequence
  Description of Artificial Sequence: Synthetic oligonucleotide
  Sense strand starting at position 296 of SEQ ID NO: 1888371
gcucaccuuuaugugaauu

SEQ ID NO: 2530965 - RNA, 19 nt, Artificial Sequence
  Description of Artificial Sequence: Synthetic oligonucleotide
  Antisense strand to SEQ ID NO: 2530964
aauucacauaaaggugagc

SEQ ID NO: 2530966 - RNA, 19 nt, Artificial Sequence
  Description of Artificial Sequence: Synthetic oligonucleotide
  Sense strand starting at position 3305 of SEQ ID NO: 1888371
gcuucuugcuaccuaugaa

SEQ ID NO: 2530967 - RNA, 19 nt, Artificial Sequence
  Description of Artificial Sequence: Synthetic oligonucleotide
  Antisense strand to SEQ ID NO: 2530966
uucauagguagcaagaagc

SEQ ID NO: 2530968 - RNA, 19 nt, Artificial Sequence
  Description of Artificial Sequence: Synthetic oligonucleotide
  Sense strand starting at position 1041 of SEQ ID NO: 1888371
ugagacauaugugaugaga

SEQ ID NO: 2530969 - RNA, 19 nt, Artificial Sequence
  Description of Artificial Sequence: Synthetic oligonucleotide
  Antisense strand to SEQ ID NO: 2530968
ucucaucacauaugucuca

SEQ ID NO: 2530970 - RNA, 19 nt, Artificial Sequence
  Description of Artificial Sequence: Synthetic oligonucleotide
  Sense strand starting at position 1111 of SEQ ID NO: 1888371
aagguuuauuaggaaauac

SEQ ID NO: 2530971 - RNA, 19 nt, Artificial Sequence
  Description of Artificial Sequence: Synthetic oligonucleotide
  Antisense strand to SEQ ID NO: 2530970
guauuuccuaauaaaccuu

SEQ ID NO: 2530972 - RNA, 19 nt, Artificial Sequence
  Description of Artificial Sequence: Synthetic oligonucleotide
  Sense strand starting at position 1070 of SEQ ID NO: 1888371
ccaucuugauaugagagau

SEQ ID NO: 2530973 - RNA, 19 nt, Artificial Sequence
  Description of Artificial Sequence: Synthetic oligonucleotide
  Antisense strand to SEQ ID NO: 2530972
aucucucauaucaagaugg

SEQ ID NO: 2530974 - RNA, 19 nt, Artificial Sequence
  Description of Artificial Sequence: Synthetic oligonucleotide
  Sense strand starting at position 2157 of SEQ ID NO: 1888371
ugguaauucugggagacac

SEQ ID NO: 2530975 - RNA, 19 nt, Artificial Sequence
  Description of Artificial Sequence: Synthetic oligonucleotide
  Antisense strand to SEQ ID NO: 2530974
gugucucccagaauuacca

SEQ ID NO: 2530976 - RNA, 19 nt, Artificial Sequence
  Description of Artificial Sequence: Synthetic oligonucleotide
  Sense strand starting at position 3032 of SEQ ID NO: 1888371
gcuguauguuggucccuua

SEQ ID NO: 2530977 - RNA, 19 nt, Artificial Sequence
  Description of Artificial Sequence: Synthetic oligonucleotide
  Antisense strand to SEQ ID NO: 2530976
uaagggaccaacauacagc

SEQ ID NO: 2530978 - RNA, 19 nt, Artificial Sequence
  Description of Artificial Sequence: Synthetic oligonucleotide
  Sense strand starting at position 3026 of SEQ ID NO: 1888371
gcaugagcuguauguuggu

SEQ ID NO: 2530979 - RNA, 19 nt, Artificial Sequence
  Description of Artificial Sequence: Synthetic oligonucleotide
  Antisense strand to SEQ ID NO: 2530978
accaacauacagcucaugc

SEQ ID NO: 2530980 - RNA, 19 nt, Artificial Sequence
  Description of Artificial Sequence: Synthetic oligonucleotide
  Sense strand starting at position 2155 of SEQ ID NO: 1888371
caugguaauucugggagac

SEQ ID NO: 2530981 - RNA, 19 nt, Artificial Sequence
  Description of Artificial Sequence: Synthetic oligonucleotide
  Antisense strand to SEQ ID NO: 2530980
gucucccagaauuaccaug

SEQ ID NO: 2530982 - RNA, 19 nt, Artificial Sequence
  Description of Artificial Sequence: Synthetic oligonucleotide
  Sense strand starting at position 1032 of SEQ ID NO: 1888371
ugucuucccugagacauau

SEQ ID NO: 2530983 - RNA, 19 nt, Artificial Sequence
  Description of Artificial Sequence: Synthetic oligonucleotide
  Antisense strand to SEQ ID NO: 2530982
auaugucucagggaagaca

SEQ ID NO: 2530984 - RNA, 19 nt, Artificial Sequence
  Description of Artificial Sequence: Synthetic oligonucleotide
  Sense strand starting at position 3277 of SEQ ID NO: 1888371
ucuccaaggucauggagau

SEQ ID NO: 2530985 - RNA, 19 nt, Artificial Sequence
  Description of Artificial Sequence: Synthetic oligonucleotide
  Antisense strand to SEQ ID NO: 2530984
aucuccaugaccuuggaga

SEQ ID NO: 2530986 - RNA, 19 nt, Artificial Sequence
  Description of Artificial Sequence: Synthetic oligonucleotide
  Sense strand starting at position 298 of SEQ ID NO: 1888371
ucaccuuuaugugaauugu

SEQ ID NO: 2530987 - RNA, 19 nt, Artificial Sequence
  Description of Artificial Sequence: Synthetic oligonucleotide
  Antisense strand to SEQ ID NO: 2530986
acaauucacauaaagguga

SEQ ID NO: 2530988 - RNA, 19 nt, Artificial Sequence
  Description of Artificial Sequence: Synthetic oligonucleotide
  Sense strand starting at position 2621 of SEQ ID NO: 1888371
cucuguggcuuugaaaggu

SEQ ID NO: 2530989 - RNA, 19 nt, Artificial Sequence
  Description of Artificial Sequence: Synthetic oligonucleotide
  Antisense strand to SEQ ID NO: 2530988
accuuucaaagccacagag

SEQ ID NO: 2530990 - RNA, 19 nt, Artificial Sequence
  Description of Artificial Sequence: Synthetic oligonucleotide
  Sense strand starting at position 295 of SEQ ID NO: 1888371
agcucaccuuuaugugaau

SEQ ID NO: 2530991 - RNA, 19 nt, Artificial Sequence
  Description of Artificial Sequence: Synthetic oligonucleotide
  Antisense strand to SEQ ID NO: 2530990
auucacauaaaggugagcu

SEQ ID NO: 2530992 - RNA, 19 nt, Artificial Sequence
  Description of Artificial Sequence: Synthetic oligonucleotide
  Sense strand starting at position 3818 of SEQ ID NO: 1888371
guuccaguuuacgguauua

SEQ ID NO: 2530993 - RNA, 19 nt, Artificial Sequence
  Description of Artificial Sequence: Synthetic oligonucleotide
  Antisense strand to SEQ ID NO: 2530992
uaauaccguaaacuggaac

SEQ ID NO: 2530994 - RNA, 19 nt, Artificial Sequence
  Description of Artificial Sequence: Synthetic oligonucleotide
  Sense strand starting at position 2151 of SEQ ID NO: 1888372
ugcugacuccuggaggaua

SEQ ID NO: 2530995 - RNA, 19 nt, Artificial Sequence
  Description of Artificial Sequence: Synthetic oligonucleotide
  Antisense strand to SEQ ID NO: 2530994
uauccuccaggagucagca

SEQ ID NO: 2530996 - RNA, 19 nt, Artificial Sequence
  Description of Artificial Sequence: Synthetic oligonucleotide
  Sense strand starting at position 2555 of SEQ ID NO: 1888372
gggauaaauuaucuggcaa

SEQ ID NO: 2530997 - RNA, 19 nt, Artificial Sequence
  Description of Artificial Sequence: Synthetic oligonucleotide
  Antisense strand to SEQ ID NO: 2530996
uugccagauaauuuauccc

SEQ ID NO: 2530998 - RNA, 19 nt, Artificial Sequence
  Description of Artificial Sequence: Synthetic oligonucleotide
  Sense strand starting at position 2394 of SEQ ID NO: 1888372
augagaggguucuuaaauu

SEQ ID NO: 2530999 - RNA, 19 nt, Artificial Sequence
  Description of Artificial Sequence: Synthetic oligonucleotide
  Antisense strand to SEQ ID NO: 2530998
aauuuaagaacccucucau

SEQ ID NO: 2531000 - RNA, 19 nt, Artificial Sequence
  Description of Artificial Sequence: Synthetic oligonucleotide
  Sense strand starting at position 3584 of SEQ ID NO: 1888372
augcaaauugccuaggaga

SEQ ID NO: 2531001 - RNA, 19 nt, Artificial Sequence
  Description of Artificial Sequence: Synthetic oligonucleotide
  Antisense strand to SEQ ID NO: 2531000
ucuccuaggcaauuugcau

SEQ ID NO: 2531002 - RNA, 19 nt, Artificial Sequence
  Description of Artificial Sequence: Synthetic oligonucleotide
  Sense strand starting at position 2337 of SEQ ID NO: 1888372
acagacuguguugauauua

SEQ ID NO: 2531003 - RNA, 19 nt, Artificial Sequence
  Description of Artificial Sequence: Synthetic oligonucleotide
  Antisense strand to SEQ ID NO: 2531002
uaauaucaacacagucugu

SEQ ID NO: 2531004 - RNA, 19 nt, Artificial Sequence
  Description of Artificial Sequence: Synthetic oligonucleotide
  Sense strand starting at position 2165 of SEQ ID NO: 1888372
ggauauucugaguauagca

SEQ ID NO: 2531005 - RNA, 19 nt, Artificial Sequence
  Description of Artificial Sequence: Synthetic oligonucleotide
  Antisense strand to SEQ ID NO: 2531004
ugcuauacucagaauaucc

SEQ ID NO: 2531006 - RNA, 19 nt, Artificial Sequence
  Description of Artificial Sequence: Synthetic oligonucleotide
  Sense strand starting at position 2153 of SEQ ID NO: 1888372
cugacuccuggaggauauu

SEQ ID NO: 2531007 - RNA, 19 nt, Artificial Sequence
  Description of Artificial Sequence: Synthetic oligonucleotide
  Antisense strand to SEQ ID NO: 2531006
aauauccuccaggagucag

SEQ ID NO: 2531008 - RNA, 19 nt, Artificial Sequence
  Description of Artificial Sequence: Synthetic oligonucleotide
  Sense strand starting at position 3655 of SEQ ID NO: 1888372
gugacaguucaagaaggca

SEQ ID NO: 2531009 - RNA, 19 nt, Artificial Sequence
  Description of Artificial Sequence: Synthetic oligonucleotide
  Antisense strand to SEQ ID NO: 2531008
ugccuucuugaacugucac

SEQ ID NO: 2531010 - RNA, 19 nt, Artificial Sequence
  Description of Artificial Sequence: Synthetic oligonucleotide
  Sense strand starting at position 2188 of SEQ ID NO: 1888372
agugaacucgcacaaacaa

SEQ ID NO: 2531011 - RNA, 19 nt, Artificial Sequence
  Description of Artificial Sequence: Synthetic oligonucleotide
  Antisense strand to SEQ ID NO: 2531010
uuguuugugcgaguucacu

SEQ ID NO: 2531012 - RNA, 19 nt, Artificial Sequence
  Description of Artificial Sequence: Synthetic oligonucleotide
  Sense strand starting at position 2378 of SEQ ID NO: 1888372
auaccuuccgaaugaaaug

SEQ ID NO: 2531013 - RNA, 19 nt, Artificial Sequence
  Description of Artificial Sequence: Synthetic oligonucleotide
  Antisense strand to SEQ ID NO: 2531012
cauuucauucggaagguau

SEQ ID NO: 2531014 - RNA, 19 nt, Artificial Sequence
  Description of Artificial Sequence: Synthetic oligonucleotide
  Sense strand starting at position 2554 of SEQ ID NO: 1888372
ugggauaaauuaucuggca

SEQ ID NO: 2531015 - RNA, 19 nt, Artificial Sequence
  Description of Artificial Sequence: Synthetic oligonucleotide
  Antisense strand to SEQ ID NO: 2531014
ugccagauaauuuauccca

SEQ ID NO: 2531016 - RNA, 19 nt, Artificial Sequence
  Description of Artificial Sequence: Synthetic oligonucleotide
  Sense strand starting at position 1196 of SEQ ID NO: 1888372
ggugcugcucaguuaugca

SEQ ID NO: 2531017 - RNA, 19 nt, Artificial Sequence
  Description of Artificial Sequence: Synthetic oligonucleotide
  Antisense strand to SEQ ID NO: 2531016
ugcauaacugagcagcacc

SEQ ID NO: 2531018 - RNA, 19 nt, Artificial Sequence
  Description of Artificial Sequence: Synthetic oligonucleotide
  Sense strand starting at position 2499 of SEQ ID NO: 1888372
gcaagaaggcuuugaagaa

SEQ ID NO: 2531019 - RNA, 19 nt, Artificial Sequence
  Description of Artificial Sequence: Synthetic oligonucleotide
  Antisense strand to SEQ ID NO: 2531018
uucuucaaagccuucuugc

SEQ ID NO: 2531020 - RNA, 19 nt, Artificial Sequence
  Description of Artificial Sequence: Synthetic oligonucleotide
  Sense strand starting at position 2159 of SEQ ID NO: 1888372
ccuggaggauauucugagu

SEQ ID NO: 2531021 - RNA, 19 nt, Artificial Sequence
  Description of Artificial Sequence: Synthetic oligonucleotide
  Antisense strand to SEQ ID NO: 2531020
acucagaauauccuccagg

SEQ ID NO: 2531022 - RNA, 19 nt, Artificial Sequence
  Description of Artificial Sequence: Synthetic oligonucleotide
  Sense strand starting at position 3550 of SEQ ID NO: 1888372
aggaauggucaaggccuaa

SEQ ID NO: 2531023 - RNA, 19 nt, Artificial Sequence
  Description of Artificial Sequence: Synthetic oligonucleotide
  Antisense strand to SEQ ID NO: 2531022
uuaggccuugaccauuccu

SEQ ID NO: 2531024 - RNA, 19 nt, Artificial Sequence
  Description of Artificial Sequence: Synthetic oligonucleotide
  Sense strand starting at position 1008 of SEQ ID NO: 1888372
ugaaauucuuugucaauga

SEQ ID NO: 2531025 - RNA, 19 nt, Artificial Sequence
  Description of Artificial Sequence: Synthetic oligonucleotide
  Antisense strand to SEQ ID NO: 2531024
ucauugacaaagaauuuca

SEQ ID NO: 2531026 - RNA, 19 nt, Artificial Sequence
  Description of Artificial Sequence: Synthetic oligonucleotide
  Sense strand starting at position 2174 of SEQ ID NO: 1888372
gaguauagcaaguaaguga

SEQ ID NO: 2531027 - RNA, 19 nt, Artificial Sequence
  Description of Artificial Sequence: Synthetic oligonucleotide
  Antisense strand to SEQ ID NO: 2531026
ucacuuacuugcuauacuc

SEQ ID NO: 2531028 - RNA, 19 nt, Artificial Sequence
  Description of Artificial Sequence: Synthetic oligonucleotide
  Sense strand starting at position 1711 of SEQ ID NO: 1888372
gcuugagaucaaggaagug

SEQ ID NO: 2531029 - RNA, 19 nt, Artificial Sequence
  Description of Artificial Sequence: Synthetic oligonucleotide
  Antisense strand to SEQ ID NO: 2531028
cacuuccuugaucucaagc

SEQ ID NO: 2531030 - RNA, 19 nt, Artificial Sequence
  Description of Artificial Sequence: Synthetic oligonucleotide
  Sense strand starting at position 2334 of SEQ ID NO: 1888372
uagacagacuguguugaua

SEQ ID NO: 2531031 - RNA, 19 nt, Artificial Sequence
  Description of Artificial Sequence: Synthetic oligonucleotide
  Antisense strand to SEQ ID NO: 2531030
uaucaacacagucugucua

SEQ ID NO: 2531032 - RNA, 19 nt, Artificial Sequence
  Description of Artificial Sequence: Synthetic oligonucleotide
  Sense strand starting at position 984 of SEQ ID NO: 1888372
gcucaagugagauaaugca

SEQ ID NO: 2531033 - RNA, 19 nt, Artificial Sequence
  Description of Artificial Sequence: Synthetic oligonucleotide
  Antisense strand to SEQ ID NO: 2531032
ugcauuaucucacuugagc

SEQ ID NO: 2531034 - RNA, 19 nt, Artificial Sequence
  Description of Artificial Sequence: Synthetic oligonucleotide
  Sense strand starting at position 3868 of SEQ ID NO: 1888372
cucagaacucacuggccaa

SEQ ID NO: 2531035 - RNA, 19 nt, Artificial Sequence
  Description of Artificial Sequence: Synthetic oligonucleotide
  Antisense strand to SEQ ID NO: 2531034
uuggccagugaguucugag

SEQ ID NO: 2531036 - RNA, 19 nt, Artificial Sequence
  Description of Artificial Sequence: Synthetic oligonucleotide
  Sense strand starting at position 994 of SEQ ID NO: 1888372
gauaaugcagggugugaaa

SEQ ID NO: 2531037 - RNA, 19 nt, Artificial Sequence
  Description of Artificial Sequence: Synthetic oligonucleotide
  Antisense strand to SEQ ID NO: 2531036
uuucacacccugcauuauc

SEQ ID NO: 2531038 - RNA, 19 nt, Artificial Sequence
  Description of Artificial Sequence: Synthetic oligonucleotide
  Sense strand starting at position 2818 of SEQ ID NO: 1888372
guguucuugugauuuagug

SEQ ID NO: 2531039 - RNA, 19 nt, Artificial Sequence
  Description of Artificial Sequence: Synthetic oligonucleotide
  Antisense strand to SEQ ID NO: 2531038
cacuaaaucacaagaacac

SEQ ID NO: 2531040 - RNA, 19 nt, Artificial Sequence
  Description of Artificial Sequence: Synthetic oligonucleotide
  Sense strand starting at position 2164 of SEQ ID NO: 1888372
aggauauucugaguauagc

SEQ ID NO: 2531041 - RNA, 19 nt, Artificial Sequence
  Description of Artificial Sequence: Synthetic oligonucleotide
  Antisense strand to SEQ ID NO: 2531040
gcuauacucagaauauccu

SEQ ID NO: 2531042 - RNA, 19 nt, Artificial Sequence
  Description of Artificial Sequence: Synthetic oligonucleotide
  Sense strand starting at position 992 of SEQ ID NO: 1888372
gagauaaugcaggguguga

SEQ ID NO: 2531043 - RNA, 19 nt, Artificial Sequence
  Description of Artificial Sequence: Synthetic oligonucleotide
  Antisense strand to SEQ ID NO: 2531042
ucacacccugcauuaucuc

SEQ ID NO: 2531044 - RNA, 19 nt, Artificial Sequence
  Description of Artificial Sequence: Synthetic oligonucleotide
  Sense strand starting at position 3293 of SEQ ID NO: 1888372
gcauccuccaccugggaga

SEQ ID NO: 2531045 - RNA, 19 nt, Artificial Sequence
  Description of Artificial Sequence: Synthetic oligonucleotide
  Antisense strand to SEQ ID NO: 2531044
ucucccagguggaggaugc

SEQ ID NO: 2531046 - RNA, 19 nt, Artificial Sequence
  Description of Artificial Sequence: Synthetic oligonucleotide
  Sense strand starting at position 3586 of SEQ ID NO: 1888372
gcaaauugccuaggagaug

SEQ ID NO: 2531047 - RNA, 19 nt, Artificial Sequence
  Description of Artificial Sequence: Synthetic oligonucleotide
  Antisense strand to SEQ ID NO: 2531046
caucuccuaggcaauuugc

SEQ ID NO: 2531048 - RNA, 19 nt, Artificial Sequence
  Description of Artificial Sequence: Synthetic oligonucleotide
  Sense strand starting at position 2333 of SEQ ID NO: 1888372
cuagacagacuguguugau

SEQ ID NO: 2531049 - RNA, 19 nt, Artificial Sequence
  Description of Artificial Sequence: Synthetic oligonucleotide
  Antisense strand to SEQ ID NO: 2531048
aucaacacagucugucuag

SEQ ID NO: 2531050 - RNA, 19 nt, Artificial Sequence
  Description of Artificial Sequence: Synthetic oligonucleotide
  Sense strand starting at position 2362 of SEQ ID NO: 1888372
caaguuccaugggcuaaua

SEQ ID NO: 2531051 - RNA, 19 nt, Artificial Sequence
  Description of Artificial Sequence: Synthetic oligonucleotide
  Antisense strand to SEQ ID NO: 2531050
uauuagcccauggaacuug

SEQ ID NO: 2531052 - RNA, 19 nt, Artificial Sequence
  Description of Artificial Sequence: Synthetic oligonucleotide
  Sense strand starting at position 3573 of SEQ ID NO: 1888372
cagaaacagcgaugcaaau

SEQ ID NO: 2531053 - RNA, 19 nt, Artificial Sequence
  Description of Artificial Sequence: Synthetic oligonucleotide
  Antisense strand to SEQ ID NO: 2531052
auuugcaucgcuguuucug

SEQ ID NO: 2531054 - RNA, 19 nt, Artificial Sequence
  Description of Artificial Sequence: Synthetic oligonucleotide
  Sense strand starting at position 1007 of SEQ ID NO: 1888372
gugaaauucuuugucaaug

SEQ ID NO: 2531055 - RNA, 19 nt, Artificial Sequence
  Description of Artificial Sequence: Synthetic oligonucleotide
  Antisense strand to SEQ ID NO: 2531054
cauugacaaagaauuucac

SEQ ID NO: 2531056 - RNA, 19 nt, Artificial Sequence
  Description of Artificial Sequence: Synthetic oligonucleotide
  Sense strand starting at position 2359 of SEQ ID NO: 1888372
uaacaaguuccaugggcua

SEQ ID NO: 2531057 - RNA, 19 nt, Artificial Sequence
  Description of Artificial Sequence: Synthetic oligonucleotide
  Antisense strand to SEQ ID NO: 2531056
uagcccauggaacuuguua

SEQ ID NO: 2531058 - RNA, 19 nt, Artificial Sequence
  Description of Artificial Sequence: Synthetic oligonucleotide
  Sense strand starting at position 2770 of SEQ ID NO: 1888372
agaguuugccagugaggag

SEQ ID NO: 2531059 - RNA, 19 nt, Artificial Sequence
  Description of Artificial Sequence: Synthetic oligonucleotide
  Antisense strand to SEQ ID NO: 2531058
cuccucacuggcaaacucu

SEQ ID NO: 2531060 - RNA, 19 nt, Artificial Sequence
  Description of Artificial Sequence: Synthetic oligonucleotide
  Sense strand starting at position 996 of SEQ ID NO: 1888372
uaaugcagggugugaaauu

SEQ ID NO: 2531061 - RNA, 19 nt, Artificial Sequence
  Description of Artificial Sequence: Synthetic oligonucleotide
  Antisense strand to SEQ ID NO: 2531060
aauuucacacccugcauua

SEQ ID NO: 2531062 - RNA, 19 nt, Artificial Sequence
  Description of Artificial Sequence: Synthetic oligonucleotide
  Sense strand starting at position 1006 of SEQ ID NO: 1888372
ugugaaauucuuugucaau

SEQ ID NO: 2531063 - RNA, 19 nt, Artificial Sequence
  Description of Artificial Sequence: Synthetic oligonucleotide
  Antisense strand to SEQ ID NO: 2531062
auugacaaagaauuucaca

SEQ ID NO: 2531064 - RNA, 19 nt, Artificial Sequence
  Description of Artificial Sequence: Synthetic oligonucleotide
  Sense strand starting at position 3741 of SEQ ID NO: 1888372
aaaggcucucccggaaagu

SEQ ID NO: 2531065 - RNA, 19 nt, Artificial Sequence
  Description of Artificial Sequence: Synthetic oligonucleotide
  Antisense strand to SEQ ID NO: 2531064
acuuuccgggagagccuuu

SEQ ID NO: 2531066 - RNA, 19 nt, Artificial Sequence
  Description of Artificial Sequence: Synthetic oligonucleotide
  Sense strand starting at position 3397 of SEQ ID NO: 1888372
gugggaaaguccucauagc

SEQ ID NO: 2531067 - RNA, 19 nt, Artificial Sequence
  Description of Artificial Sequence: Synthetic oligonucleotide
  Antisense strand to SEQ ID NO: 2531066
gcuaugaggacuuucccac

SEQ ID NO: 2531068 - RNA, 19 nt, Artificial Sequence
  Description of Artificial Sequence: Synthetic oligonucleotide
  Sense strand starting at position 2638 of SEQ ID NO: 1888372
cucacaaagugcuccgaaa

SEQ ID NO: 2531069 - RNA, 19 nt, Artificial Sequence
  Description of Artificial Sequence: Synthetic oligonucleotide
  Antisense strand to SEQ ID NO: 2531068
uuucggagcacuuugugag

SEQ ID NO: 2531070 - RNA, 19 nt, Artificial Sequence
  Description of Artificial Sequence: Synthetic oligonucleotide
  Sense strand starting at position 3911 of SEQ ID NO: 1888372
gcugaagucuauccacauu

SEQ ID NO: 2531071 - RNA, 19 nt, Artificial Sequence
  Description of Artificial Sequence: Synthetic oligonucleotide
  Antisense strand to SEQ ID NO: 2531070
aauguggauagacuucagc

SEQ ID NO: 2531072 - RNA, 19 nt, Artificial Sequence
  Description of Artificial Sequence: Synthetic oligonucleotide
  Sense strand starting at position 1005 of SEQ ID NO: 1888372
gugugaaauucuuugucaa

SEQ ID NO: 2531073 - RNA, 19 nt, Artificial Sequence
  Description of Artificial Sequence: Synthetic oligonucleotide
  Antisense strand to SEQ ID NO: 2531072
uugacaaagaauuucacac

SEQ ID NO: 2531074 - RNA, 19 nt, Artificial Sequence
  Description of Artificial Sequence: Synthetic oligonucleotide
  Sense strand starting at position 3297 of SEQ ID NO: 1888373
aucacacuuggcuaaugau

SEQ ID NO: 2531075 - RNA, 19 nt, Artificial Sequence
  Description of Artificial Sequence: Synthetic oligonucleotide
  Antisense strand to SEQ ID NO: 2531074
aucauuagccaagugugau

SEQ ID NO: 2531076 - RNA, 19 nt, Artificial Sequence
  Description of Artificial Sequence: Synthetic oligonucleotide
  Sense strand starting at position 3165 of SEQ ID NO: 1888373
agccauauuuguguugaau

SEQ ID NO: 2531077 - RNA, 19 nt, Artificial Sequence
  Description of Artificial Sequence: Synthetic oligonucleotide
  Antisense strand to SEQ ID NO: 2531076
auucaacacaaauauggcu

SEQ ID NO: 2531078 - RNA, 19 nt, Artificial Sequence
  Description of Artificial Sequence: Synthetic oligonucleotide
  Sense strand starting at position 3799 of SEQ ID NO: 1888373
ugggaaaucugagcuaaug

SEQ ID NO: 2531079 - RNA, 19 nt, Artificial Sequence
  Description of Artificial Sequence: Synthetic oligonucleotide
  Antisense strand to SEQ ID NO: 2531078
cauuagcucagauuuccca

SEQ ID NO: 2531080 - RNA, 19 nt, Artificial Sequence
  Description of Artificial Sequence: Synthetic oligonucleotide
  Sense strand starting at position 2818 of SEQ ID NO: 1888373
accagaguugccuauaaau

SEQ ID NO: 2531081 - RNA, 19 nt, Artificial Sequence
  Description of Artificial Sequence: Synthetic oligonucleotide
  Antisense strand to SEQ ID NO: 2531080
auuuauaggcaacucuggu

SEQ ID NO: 2531082 - RNA, 19 nt, Artificial Sequence
  Description of Artificial Sequence: Synthetic oligonucleotide
  Sense strand starting at position 2958 of SEQ ID NO: 1888373
aagagaauguaguuaaugu

SEQ ID NO: 2531083 - RNA, 19 nt, Artificial Sequence
  Description of Artificial Sequence: Synthetic oligonucleotide
  Antisense strand to SEQ ID NO: 2531082
acauuaacuacauucucuu

SEQ ID NO: 2531084 - RNA, 19 nt, Artificial Sequence
  Description of Artificial Sequence: Synthetic oligonucleotide
  Sense strand starting at position 555 of SEQ ID NO: 1888373
uggucuucuccugaaccca

SEQ ID NO: 2531085 - RNA, 19 nt, Artificial Sequence
  Description of Artificial Sequence: Synthetic oligonucleotide
  Antisense strand to SEQ ID NO: 2531084
uggguucaggagaagacca

SEQ ID NO: 2531086 - RNA, 19 nt, Artificial Sequence
  Description of Artificial Sequence: Synthetic oligonucleotide
  Sense strand starting at position 988 of SEQ ID NO: 1888373
ugggacagcugaucuuuga

SEQ ID NO: 2531087 - RNA, 19 nt, Artificial Sequence
  Description of Artificial Sequence: Synthetic oligonucleotide
  Antisense strand to SEQ ID NO: 2531086
ucaaagaucagcuguccca

SEQ ID NO: 2531088 - RNA, 19 nt, Artificial Sequence
  Description of Artificial Sequence: Synthetic oligonucleotide
  Sense strand starting at position 2874 of SEQ ID NO: 1888373
uuggaaauuggacgucaau

SEQ ID NO: 2531089 - RNA, 19 nt, Artificial Sequence
  Description of Artificial Sequence: Synthetic oligonucleotide
  Antisense strand to SEQ ID NO: 2531088
auugacguccaauuuccaa

SEQ ID NO: 2531090 - RNA, 19 nt, Artificial Sequence
  Description of Artificial Sequence: Synthetic oligonucleotide
  Sense strand starting at position 1004 of SEQ ID NO: 1888373
ugagguuuccuuugaaaug

SEQ ID NO: 2531091 - RNA, 19 nt, Artificial Sequence
  Description of Artificial Sequence: Synthetic oligonucleotide
  Antisense strand to SEQ ID NO: 2531090
cauuucaaaggaaaccuca

SEQ ID NO: 2531092 - RNA, 19 nt, Artificial Sequence
  Description of Artificial Sequence: Synthetic oligonucleotide
  Sense strand starting at position 3320 of SEQ ID NO: 1888373
aguagauauuagucaccau

SEQ ID NO: 2531093 - RNA, 19 nt, Artificial Sequence
  Description of Artificial Sequence: Synthetic oligonucleotide
  Antisense strand to SEQ ID NO: 2531092
auggugacuaauaucuacu

SEQ ID NO: 2531094 - RNA, 19 nt, Artificial Sequence
  Description of Artificial Sequence: Synthetic oligonucleotide
  Sense strand starting at position 3968 of SEQ ID NO: 1888373
gggcaugugguuuaacaca

SEQ ID NO: 2531095 - RNA, 19 nt, Artificial Sequence
  Description of Artificial Sequence: Synthetic oligonucleotide
  Antisense strand to SEQ ID NO: 2531094
uguguuaaaccacaugccc

SEQ ID NO: 2531096 - RNA, 19 nt, Artificial Sequence
  Description of Artificial Sequence: Synthetic oligonucleotide
  Sense strand starting at position 3814 of SEQ ID NO: 1888373
aaugguauugguuaggcua

SEQ ID NO: 2531097 - RNA, 19 nt, Artificial Sequence
  Description of Artificial Sequence: Synthetic oligonucleotide
  Antisense strand to SEQ ID NO: 2531096
uagccuaaccaauaccauu

SEQ ID NO: 2531098 - RNA, 19 nt, Artificial Sequence
  Description of Artificial Sequence: Synthetic oligonucleotide
  Sense strand starting at position 2816 of SEQ ID NO: 1888373
auaccagaguugccuauaa

SEQ ID NO: 2531099 - RNA, 19 nt, Artificial Sequence
  Description of Artificial Sequence: Synthetic oligonucleotide
  Antisense strand to SEQ ID NO: 2531098
uuauaggcaacucugguau

SEQ ID NO: 2531100 - RNA, 19 nt, Artificial Sequence
  Description of Artificial Sequence: Synthetic oligonucleotide
  Sense strand starting at position 2941 of SEQ ID NO: 1888373
gccaucagauuaccaguaa

SEQ ID NO: 2531101 - RNA, 19 nt, Artificial Sequence
  Description of Artificial Sequence: Synthetic oligonucleotide
  Antisense strand to SEQ ID NO: 2531100
uuacugguaaucugauggc

SEQ ID NO: 2531102 - RNA, 19 nt, Artificial Sequence
  Description of Artificial Sequence: Synthetic oligonucleotide
  Sense strand starting at position 2953 of SEQ ID NO: 1888373
ccaguaagagaauguaguu

SEQ ID NO: 2531103 - RNA, 19 nt, Artificial Sequence
  Description of Artificial Sequence: Synthetic oligonucleotide
  Antisense strand to SEQ ID NO: 2531102
aacuacauucucuuacugg

SEQ ID NO: 2531104 - RNA, 19 nt, Artificial Sequence
  Description of Artificial Sequence: Synthetic oligonucleotide
  Sense strand starting at position 3702 of SEQ ID NO: 1888373
auuggaugaaaguguaguu

SEQ ID NO: 2531105 - RNA, 19 nt, Artificial Sequence
  Description of Artificial Sequence: Synthetic oligonucleotide
  Antisense strand to SEQ ID NO: 2531104
aacuacacuuucauccaau

SEQ ID NO: 2531106 - RNA, 19 nt, Artificial Sequence
  Description of Artificial Sequence: Synthetic oligonucleotide
  Sense strand starting at position 924 of SEQ ID NO: 1888373
cagggagguacuuggcuua

SEQ ID NO: 2531107 - RNA, 19 nt, Artificial Sequence
  Description of Artificial Sequence: Synthetic oligonucleotide
  Antisense strand to SEQ ID NO: 2531106
uaagccaaguaccucccug

SEQ ID NO: 2531108 - RNA, 19 nt, Artificial Sequence
  Description of Artificial Sequence: Synthetic oligonucleotide
  Sense strand starting at position 1001 of SEQ ID NO: 1888373
cuuugagguuuccuuugaa

SEQ ID NO: 2531109 - RNA, 19 nt, Artificial Sequence
  Description of Artificial Sequence: Synthetic oligonucleotide
  Antisense strand to SEQ ID NO: 2531108
uucaaaggaaaccucaaag

SEQ ID NO: 2531110 - RNA, 19 nt, Artificial Sequence
  Description of Artificial Sequence: Synthetic oligonucleotide
  Sense strand starting at position 958 of SEQ ID NO: 1888373
gggucucugcuaugggaga

SEQ ID NO: 2531111 - RNA, 19 nt, Artificial Sequence
  Description of Artificial Sequence: Synthetic oligonucleotide
  Antisense strand to SEQ ID NO: 2531110
ucucccauagcagagaccc

SEQ ID NO: 2531112 - RNA, 19 nt, Artificial Sequence
  Description of Artificial Sequence: Synthetic oligonucleotide
  Sense strand starting at position 1372 of SEQ ID NO: 1888373
caagcucuggauugguaua

SEQ ID NO: 2531113 - RNA, 19 nt, Artificial Sequence
  Description of Artificial Sequence: Synthetic oligonucleotide
  Antisense strand to SEQ ID NO: 2531112
uauaccaauccagagcuug

SEQ ID NO: 2531114 - RNA, 19 nt, Artificial Sequence
  Description of Artificial Sequence: Synthetic oligonucleotide
  Sense strand starting at position 3817 of SEQ ID NO: 1888373
gguauugguuaggcuaaga

SEQ ID NO: 2531115 - RNA, 19 nt, Artificial Sequence
  Description of Artificial Sequence: Synthetic oligonucleotide
  Antisense strand to SEQ ID NO: 2531114
ucuuagccuaaccaauacc

SEQ ID NO: 2531116 - RNA, 19 nt, Artificial Sequence
  Description of Artificial Sequence: Synthetic oligonucleotide
  Sense strand starting at position 960 of SEQ ID NO: 1888373
gucucugcuaugggagaau

SEQ ID NO: 2531117 - RNA, 19 nt, Artificial Sequence
  Description of Artificial Sequence: Synthetic oligonucleotide
  Antisense strand to SEQ ID NO: 2531116
auucucccauagcagagac

SEQ ID NO: 2531118 - RNA, 19 nt, Artificial Sequence
  Description of Artificial Sequence: Synthetic oligonucleotide
  Sense strand starting at position 3124 of SEQ ID NO: 1888373
gguguuaacaaugagugcu

SEQ ID NO: 2531119 - RNA, 19 nt, Artificial Sequence
  Description of Artificial Sequence: Synthetic oligonucleotide
  Antisense strand to SEQ ID NO: 2531118
agcacucauuguuaacacc

SEQ ID NO: 2531120 - RNA, 19 nt, Artificial Sequence
  Description of Artificial Sequence: Synthetic oligonucleotide
  Sense strand starting at position 623 of SEQ ID NO: 1888373
aucuuagugucauccaauu

SEQ ID NO: 2531121 - RNA, 19 nt, Artificial Sequence
  Description of Artificial Sequence: Synthetic oligonucleotide
  Antisense strand to SEQ ID NO: 2531120
aauuggaugacacuaagau

SEQ ID NO: 2531122 - RNA, 19 nt, Artificial Sequence
  Description of Artificial Sequence: Synthetic oligonucleotide
  Sense strand starting at position 3306 of SEQ ID NO: 1888373
ggcuaaugauuguuaguag

SEQ ID NO: 2531123 - RNA, 19 nt, Artificial Sequence
  Description of Artificial Sequence: Synthetic oligonucleotide
  Antisense strand to SEQ ID NO: 2531122
cuacuaacaaucauuagcc

SEQ ID NO: 2531124 - RNA, 19 nt, Artificial Sequence
  Description of Artificial Sequence: Synthetic oligonucleotide
  Sense strand starting at position 992 of SEQ ID NO: 1888373
acagcugaucuuugagguu

SEQ ID NO: 2531125 - RNA, 19 nt, Artificial Sequence
  Description of Artificial Sequence: Synthetic oligonucleotide
  Antisense strand to SEQ ID NO: 2531124
aaccucaaagaucagcugu

SEQ ID NO: 2531126 - RNA, 19 nt, Artificial Sequence
  Description of Artificial Sequence: Synthetic oligonucleotide
  Sense strand starting at position 2702 of SEQ ID NO: 1888373
cugggauccugucugcaua

SEQ ID NO: 2531127 - RNA, 19 nt, Artificial Sequence
  Description of Artificial Sequence: Synthetic oligonucleotide
  Antisense strand to SEQ ID NO: 2531126
uaugcagacaggaucccag

SEQ ID NO: 2531128 - RNA, 19 nt, Artificial Sequence
  Description of Artificial Sequence: Synthetic oligonucleotide
  Sense strand starting at position 3903 of SEQ ID NO: 1888373
ccagaaaggcugugcacua

SEQ ID NO: 2531129 - RNA, 19 nt, Artificial Sequence
  Description of Artificial Sequence: Synthetic oligonucleotide
  Antisense strand to SEQ ID NO: 2531128
uagugcacagccuuucugg

SEQ ID NO: 2531130 - RNA, 19 nt, Artificial Sequence
  Description of Artificial Sequence: Synthetic oligonucleotide
  Sense strand starting at position 2703 of SEQ ID NO: 1888373
ugggauccugucugcauau

SEQ ID NO: 2531131 - RNA, 19 nt, Artificial Sequence
  Description of Artificial Sequence: Synthetic oligonucleotide
  Antisense strand to SEQ ID NO: 2531130
auaugcagacaggauccca

SEQ ID NO: 2531132 - RNA, 19 nt, Artificial Sequence
  Description of Artificial Sequence: Synthetic oligonucleotide
  Sense strand starting at position 799 of SEQ ID NO: 1888373
ccugucuguaacuggugaa

SEQ ID NO: 2531133 - RNA, 19 nt, Artificial Sequence
  Description of Artificial Sequence: Synthetic oligonucleotide
  Antisense strand to SEQ ID NO: 2531132
uucaccaguuacagacagg

SEQ ID NO: 2531134 - RNA, 19 nt, Artificial Sequence
  Description of Artificial Sequence: Synthetic oligonucleotide
  Sense strand starting at position 2965 of SEQ ID NO: 1888373
uguaguuaauguuccuaua

SEQ ID NO: 2531135 - RNA, 19 nt, Artificial Sequence
  Description of Artificial Sequence: Synthetic oligonucleotide
  Antisense strand to SEQ ID NO: 2531134
uauaggaacauuaacuaca

SEQ ID NO: 2531136 - RNA, 19 nt, Artificial Sequence
  Description of Artificial Sequence: Synthetic oligonucleotide
  Sense strand starting at position 617 of SEQ ID NO: 1888373
guuuaaaucuuagugucau

SEQ ID NO: 2531137 - RNA, 19 nt, Artificial Sequence
  Description of Artificial Sequence: Synthetic oligonucleotide
  Antisense strand to SEQ ID NO: 2531136
augacacuaagauuuaaac

SEQ ID NO: 2531138 - RNA, 19 nt, Artificial Sequence
  Description of Artificial Sequence: Synthetic oligonucleotide
  Sense strand starting at position 3859 of SEQ ID NO: 1888373
gauggugucaguuguggag

SEQ ID NO: 2531139 - RNA, 19 nt, Artificial Sequence
  Description of Artificial Sequence: Synthetic oligonucleotide
  Antisense strand to SEQ ID NO: 2531138
cuccacaacugacaccauc

SEQ ID NO: 2531140 - RNA, 19 nt, Artificial Sequence
  Description of Artificial Sequence: Synthetic oligonucleotide
  Sense strand starting at position 3871 of SEQ ID NO: 1888373
uguggagugccugguagaa

SEQ ID NO: 2531141 - RNA, 19 nt, Artificial Sequence
  Description of Artificial Sequence: Synthetic oligonucleotide
  Antisense strand to SEQ ID NO: 2531140
uucuaccaggcacuccaca

SEQ ID NO: 2531142 - RNA, 19 nt, Artificial Sequence
  Description of Artificial Sequence: Synthetic oligonucleotide
  Sense strand starting at position 3176 of SEQ ID NO: 1888373
uguugaaucaggugccuua

SEQ ID NO: 2531143 - RNA, 19 nt, Artificial Sequence
  Description of Artificial Sequence: Synthetic oligonucleotide
  Antisense strand to SEQ ID NO: 2531142
uaaggcaccugauucaaca

SEQ ID NO: 2531144 - RNA, 19 nt, Artificial Sequence
  Description of Artificial Sequence: Synthetic oligonucleotide
  Sense strand starting at position 3304 of SEQ ID NO: 1888373
uuggcuaaugauuguuagu

SEQ ID NO: 2531145 - RNA, 19 nt, Artificial Sequence
  Description of Artificial Sequence: Synthetic oligonucleotide
  Antisense strand to SEQ ID NO: 2531144
acuaacaaucauuagccaa

SEQ ID NO: 2531146 - RNA, 19 nt, Artificial Sequence
  Description of Artificial Sequence: Synthetic oligonucleotide
  Sense strand starting at position 3696 of SEQ ID NO: 1888373
gcacgcauuggaugaaagu

SEQ ID NO: 2531147 - RNA, 19 nt, Artificial Sequence
  Description of Artificial Sequence: Synthetic oligonucleotide
  Antisense strand to SEQ ID NO: 2531146
acuuucauccaaugcgugc

SEQ ID NO: 2531148 - RNA, 19 nt, Artificial Sequence
  Description of Artificial Sequence: Synthetic oligonucleotide
  Sense strand starting at position 1403 of SEQ ID NO: 1888373
uuagguugcucuuucuaua

SEQ ID NO: 2531149 - RNA, 19 nt, Artificial Sequence
  Description of Artificial Sequence: Synthetic oligonucleotide
  Antisense strand to SEQ ID NO: 2531148
uauagaaagagcaaccuaa

SEQ ID NO: 2531150 - RNA, 19 nt, Artificial Sequence
  Description of Artificial Sequence: Synthetic oligonucleotide
  Sense strand starting at position 3136 of SEQ ID NO: 1888373
gagugcuuucccgauucga

SEQ ID NO: 2531151 - RNA, 19 nt, Artificial Sequence
  Description of Artificial Sequence: Synthetic oligonucleotide
  Antisense strand to SEQ ID NO: 2531150
ucgaaucgggaaagcacuc

SEQ ID NO: 2531152 - RNA, 19 nt, Artificial Sequence
  Description of Artificial Sequence: Synthetic oligonucleotide
  Sense strand starting at position 3966 of SEQ ID NO: 1888373
gugggcaugugguuuaaca

SEQ ID NO: 2531153 - RNA, 19 nt, Artificial Sequence
  Description of Artificial Sequence: Synthetic oligonucleotide
  Antisense strand to SEQ ID NO: 2531152
uguuaaaccacaugcccac

SEQ ID NO: 2531154 - RNA, 19 nt, Artificial Sequence
  Description of Artificial Sequence: Synthetic oligonucleotide
  Sense strand starting at position 2410 of SEQ ID NO: 1888374
gaccuucuugcuucgcgaa

SEQ ID NO: 2531155 - RNA, 19 nt, Artificial Sequence
  Description of Artificial Sequence: Synthetic oligonucleotide
  Antisense strand to SEQ ID NO: 2531154
uucgcgaagcaagaagguc

SEQ ID NO: 2531156 - RNA, 19 nt, Artificial Sequence
  Description of Artificial Sequence: Synthetic oligonucleotide
  Sense strand starting at position 1186 of SEQ ID NO: 1888374
gccuguuccauaguuuguu

SEQ ID NO: 2531157 - RNA, 19 nt, Artificial Sequence
  Description of Artificial Sequence: Synthetic oligonucleotide
  Antisense strand to SEQ ID NO: 2531156
aacaaacuauggaacaggc

SEQ ID NO: 2531158 - RNA, 19 nt, Artificial Sequence
  Description of Artificial Sequence: Synthetic oligonucleotide
  Sense strand starting at position 1213 of SEQ ID NO: 1888374
gucagcuuuguguucccau

SEQ ID NO: 2531159 - RNA, 19 nt, Artificial Sequence
  Description of Artificial Sequence: Synthetic oligonucleotide
  Antisense strand to SEQ ID NO: 2531158
augggaacacaaagcugac

SEQ ID NO: 2531160 - RNA, 19 nt, Artificial Sequence
  Description of Artificial Sequence: Synthetic oligonucleotide
  Sense strand starting at position 164 of SEQ ID NO: 1888374
ggaggcugaucuuuaaaga

SEQ ID NO: 2531161 - RNA, 19 nt, Artificial Sequence
  Description of Artificial Sequence: Synthetic oligonucleotide
  Antisense strand to SEQ ID NO: 2531160
ucuuuaaagaucagccucc

SEQ ID NO: 2531162 - RNA, 19 nt, Artificial Sequence
  Description of Artificial Sequence: Synthetic oligonucleotide
  Sense strand starting at position 161 of SEQ ID NO: 1888374
agaggaggcugaucuuuaa

SEQ ID NO: 2531163 - RNA, 19 nt, Artificial Sequence
  Description of Artificial Sequence: Synthetic oligonucleotide
  Antisense strand to SEQ ID NO: 2531162
uuaaagaucagccuccucu

SEQ ID NO: 2531164 - RNA, 19 nt, Artificial Sequence
  Description of Artificial Sequence: Synthetic oligonucleotide
  Sense strand starting at position 848 of SEQ ID NO: 1888374
uaggucuuugaauauguaa

SEQ ID NO: 2531165 - RNA, 19 nt, Artificial Sequence
  Description of Artificial Sequence: Synthetic oligonucleotide
  Antisense strand to SEQ ID NO: 2531164
uuacauauucaaagaccua

SEQ ID NO: 2531166 - RNA, 19 nt, Artificial Sequence
  Description of Artificial Sequence: Synthetic oligonucleotide
  Sense strand starting at position 1472 of SEQ ID NO: 1888374
acaugaagugaaggucaau

SEQ ID NO: 2531167 - RNA, 19 nt, Artificial Sequence
  Description of Artificial Sequence: Synthetic oligonucleotide
  Antisense strand to SEQ ID NO: 2531166
auugaccuucacuucaugu

SEQ ID NO: 2531168 - RNA, 19 nt, Artificial Sequence
  Description of Artificial Sequence: Synthetic oligonucleotide
  Sense strand starting at position 785 of SEQ ID NO: 1888374
uagguagacugguugagaa

SEQ ID NO: 2531169 - RNA, 19 nt, Artificial Sequence
  Description of Artificial Sequence: Synthetic oligonucleotide
  Antisense strand to SEQ ID NO: 2531168
uucucaaccagucuaccua

SEQ ID NO: 2531170 - RNA, 19 nt, Artificial Sequence
  Description of Artificial Sequence: Synthetic oligonucleotide
  Sense strand starting at position 855 of SEQ ID NO: 1888374
uugaauauguaaguagaca

SEQ ID NO: 2531171 - RNA, 19 nt, Artificial Sequence
  Description of Artificial Sequence: Synthetic oligonucleotide
  Antisense strand to SEQ ID NO: 2531170
ugucuacuuacauauucaa

SEQ ID NO: 2531172 - RNA, 19 nt, Artificial Sequence
  Description of Artificial Sequence: Synthetic oligonucleotide
  Sense strand starting at position 2713 of SEQ ID NO: 1888374
gucuuuauucuagacacug

SEQ ID NO: 2531173 - RNA, 19 nt, Artificial Sequence
  Description of Artificial Sequence: Synthetic oligonucleotide
  Antisense strand to SEQ ID NO: 2531172
cagugucuagaauaaagac

SEQ ID NO: 2531174 - RNA, 19 nt, Artificial Sequence
  Description of Artificial Sequence: Synthetic oligonucleotide
  Sense strand starting at position 526 of SEQ ID NO: 1888374
cucacauuggaaugguuaa

SEQ ID NO: 2531175 - RNA, 19 nt, Artificial Sequence
  Description of Artificial Sequence: Synthetic oligonucleotide
  Antisense strand to SEQ ID NO: 2531174
uuaaccauuccaaugugag

SEQ ID NO: 2531176 - RNA, 19 nt, Artificial Sequence
  Description of Artificial Sequence: Synthetic oligonucleotide
  Sense strand starting at position 605 of SEQ ID NO: 1888374
agaugagcacuuugagacu

SEQ ID NO: 2531177 - RNA, 19 nt, Artificial Sequence
  Description of Artificial Sequence: Synthetic oligonucleotide
  Antisense strand to SEQ ID NO: 2531176
agucucaaagugcucaucu

SEQ ID NO: 2531178 - RNA, 19 nt, Artificial Sequence
  Description of Artificial Sequence: Synthetic oligonucleotide
  Sense strand starting at position 1220 of SEQ ID NO: 1888374
uuguguucccaugagaaca

SEQ ID NO: 2531179 - RNA, 19 nt, Artificial Sequence
  Description of Artificial Sequence: Synthetic oligonucleotide
  Antisense strand to SEQ ID NO: 2531178
uguucucaugggaacacaa

SEQ ID NO: 2531180 - RNA, 19 nt, Artificial Sequence
  Description of Artificial Sequence: Synthetic oligonucleotide
  Sense strand starting at position 3424 of SEQ ID NO: 1888374
guagcaaccagggauuagu

SEQ ID NO: 2531181 - RNA, 19 nt, Artificial Sequence
  Description of Artificial Sequence: Synthetic oligonucleotide
  Antisense strand to SEQ ID NO: 2531180
acuaaucccugguugcuac

SEQ ID NO: 2531182 - RNA, 19 nt, Artificial Sequence
  Description of Artificial Sequence: Synthetic oligonucleotide
  Sense strand starting at position 652 of SEQ ID NO: 1888374
gagugagacucucucacca

SEQ ID NO: 2531183 - RNA, 19 nt, Artificial Sequence
  Description of Artificial Sequence: Synthetic oligonucleotide
  Antisense strand to SEQ ID NO: 2531182
uggugagagagucucacuc

SEQ ID NO: 2531184 - RNA, 19 nt, Artificial Sequence
  Description of Artificial Sequence: Synthetic oligonucleotide
  Sense strand starting at position 2969 of SEQ ID NO: 1888374
uauguacgucgugcuuaau

SEQ ID NO: 2531185 - RNA, 19 nt, Artificial Sequence
  Description of Artificial Sequence: Synthetic oligonucleotide
  Antisense strand to SEQ ID NO: 2531184
auuaagcacgacguacaua

SEQ ID NO: 2531186 - RNA, 19 nt, Artificial Sequence
  Description of Artificial Sequence: Synthetic oligonucleotide
  Sense strand starting at position 3008 of SEQ ID NO: 1888374
ggcgcuguucacucaguuu

SEQ ID NO: 2531187 - RNA, 19 nt, Artificial Sequence
  Description of Artificial Sequence: Synthetic oligonucleotide
  Antisense strand to SEQ ID NO: 2531186
aaacugagugaacagcgcc

SEQ ID NO: 2531188 - RNA, 19 nt, Artificial Sequence
  Description of Artificial Sequence: Synthetic oligonucleotide
  Sense strand starting at position 843 of SEQ ID NO: 1888374
cucacuaggucuuugaaua

SEQ ID NO: 2531189 - RNA, 19 nt, Artificial Sequence
  Description of Artificial Sequence: Synthetic oligonucleotide
  Antisense strand to SEQ ID NO: 2531188
uauucaaagaccuagugag

SEQ ID NO: 2531190 - RNA, 19 nt, Artificial Sequence
  Description of Artificial Sequence: Synthetic oligonucleotide
  Sense strand starting at position 1207 of SEQ ID NO: 1888374
cgaugugucagcuuugugu

SEQ ID NO: 2531191 - RNA, 19 nt, Artificial Sequence
  Description of Artificial Sequence: Synthetic oligonucleotide
  Antisense strand to SEQ ID NO: 2531190
acacaaagcugacacaucg

SEQ ID NO: 2531192 - RNA, 19 nt, Artificial Sequence
  Description of Artificial Sequence: Synthetic oligonucleotide
  Sense strand starting at position 3217 of SEQ ID NO: 1888374
gugagaaugucauuauacc

SEQ ID NO: 2531193 - RNA, 19 nt, Artificial Sequence
  Description of Artificial Sequence: Synthetic oligonucleotide
  Antisense strand to SEQ ID NO: 2531192
gguauaaugacauucucac

SEQ ID NO: 2531194 - RNA, 19 nt, Artificial Sequence
  Description of Artificial Sequence: Synthetic oligonucleotide
  Sense strand starting at position 844 of SEQ ID NO: 1888374
ucacuaggucuuugaauau

SEQ ID NO: 2531195 - RNA, 19 nt, Artificial Sequence
  Description of Artificial Sequence: Synthetic oligonucleotide
  Antisense strand to SEQ ID NO: 2531194
auauucaaagaccuaguga

SEQ ID NO: 2531196 - RNA, 19 nt, Artificial Sequence
  Description of Artificial Sequence: Synthetic oligonucleotide
  Sense strand starting at position 3457 of SEQ ID NO: 1888374
uuuguuuauugaucuggaa

SEQ ID NO: 2531197 - RNA, 19 nt, Artificial Sequence
  Description of Artificial Sequence: Synthetic oligonucleotide
  Antisense strand to SEQ ID NO: 2531196
uuccagaucaauaaacaaa

SEQ ID NO: 2531198 - RNA, 19 nt, Artificial Sequence
  Description of Artificial Sequence: Synthetic oligonucleotide
  Sense strand starting at position 505 of SEQ ID NO: 1888374
ggcacaauuccaugaagua

SEQ ID NO: 2531199 - RNA, 19 nt, Artificial Sequence
  Description of Artificial Sequence: Synthetic oligonucleotide
  Antisense strand to SEQ ID NO: 2531198
uacuucauggaauugugcc

SEQ ID NO: 2531200 - RNA, 19 nt, Artificial Sequence
  Description of Artificial Sequence: Synthetic oligonucleotide
  Sense strand starting at position 2810 of SEQ ID NO: 1888374
gguguagguaucugcauuu

SEQ ID NO: 2531201 - RNA, 19 nt, Artificial Sequence
  Description of Artificial Sequence: Synthetic oligonucleotide
  Antisense strand to SEQ ID NO: 2531200
aaaugcagauaccuacacc

SEQ ID NO: 2531202 - RNA, 19 nt, Artificial Sequence
  Description of Artificial Sequence: Synthetic oligonucleotide
  Sense strand starting at position 3413 of SEQ ID NO: 1888374
uggauaguccuguagcaac

SEQ ID NO: 2531203 - RNA, 19 nt, Artificial Sequence
  Description of Artificial Sequence: Synthetic oligonucleotide
  Antisense strand to SEQ ID NO: 2531202
guugcuacaggacuaucca

SEQ ID NO: 2531204 - RNA, 19 nt, Artificial Sequence
  Description of Artificial Sequence: Synthetic oligonucleotide
  Sense strand starting at position 775 of SEQ ID NO: 1888374
acagcauuccuagguagac

SEQ ID NO: 2531205 - RNA, 19 nt, Artificial Sequence
  Description of Artificial Sequence: Synthetic oligonucleotide
  Antisense strand to SEQ ID NO: 2531204
gucuaccuaggaaugcugu

SEQ ID NO: 2531206 - RNA, 19 nt, Artificial Sequence
  Description of Artificial Sequence: Synthetic oligonucleotide
  Sense strand starting at position 481 of SEQ ID NO: 1888374
gccagaauauguucuuuaa

SEQ ID NO: 2531207 - RNA, 19 nt, Artificial Sequence
  Description of Artificial Sequence: Synthetic oligonucleotide
  Antisense strand to SEQ ID NO: 2531206
uuaaagaacauauucuggc

SEQ ID NO: 2531208 - RNA, 19 nt, Artificial Sequence
  Description of Artificial Sequence: Synthetic oligonucleotide
  Sense strand starting at position 3206 of SEQ ID NO: 1888374
uucuguuugaugugagaau

SEQ ID NO: 2531209 - RNA, 19 nt, Artificial Sequence
  Description of Artificial Sequence: Synthetic oligonucleotide
  Antisense strand to SEQ ID NO: 2531208
auucucacaucaaacagaa

SEQ ID NO: 2531210 - RNA, 19 nt, Artificial Sequence
  Description of Artificial Sequence: Synthetic oligonucleotide
  Sense strand starting at position 836 of SEQ ID NO: 1888374
gugaaugcucacuaggucu

SEQ ID NO: 2531211 - RNA, 19 nt, Artificial Sequence
  Description of Artificial Sequence: Synthetic oligonucleotide
  Antisense strand to SEQ ID NO: 2531210
agaccuagugagcauucac

SEQ ID NO: 2531212 - RNA, 19 nt, Artificial Sequence
  Description of Artificial Sequence: Synthetic oligonucleotide
  Sense strand starting at position 3434 of SEQ ID NO: 1888374
gggauuaguaucugcuuga

SEQ ID NO: 2531213 - RNA, 19 nt, Artificial Sequence
  Description of Artificial Sequence: Synthetic oligonucleotide
  Antisense strand to SEQ ID NO: 2531212
ucaagcagauacuaauccc

SEQ ID NO: 2531214 - RNA, 19 nt, Artificial Sequence
  Description of Artificial Sequence: Synthetic oligonucleotide
  Sense strand starting at position 776 of SEQ ID NO: 1888374
cagcauuccuagguagacu

SEQ ID NO: 2531215 - RNA, 19 nt, Artificial Sequence
  Description of Artificial Sequence: Synthetic oligonucleotide
  Antisense strand to SEQ ID NO: 2531214
agucuaccuaggaaugcug

SEQ ID NO: 2531216 - RNA, 19 nt, Artificial Sequence
  Description of Artificial Sequence: Synthetic oligonucleotide
  Sense strand starting at position 851 of SEQ ID NO: 1888374
gucuuugaauauguaagua

SEQ ID NO: 2531217 - RNA, 19 nt, Artificial Sequence
  Description of Artificial Sequence: Synthetic oligonucleotide
  Antisense strand to SEQ ID NO: 2531216
uacuuacauauucaaagac

SEQ ID NO: 2531218 - RNA, 19 nt, Artificial Sequence
  Description of Artificial Sequence: Synthetic oligonucleotide
  Sense strand starting at position 969 of SEQ ID NO: 1888374
gggcgagaaacuugauguc

SEQ ID NO: 2531219 - RNA, 19 nt, Artificial Sequence
  Description of Artificial Sequence: Synthetic oligonucleotide
  Antisense strand to SEQ ID NO: 2531218
gacaucaaguuucucgccc

SEQ ID NO: 2531220 - RNA, 19 nt, Artificial Sequence
  Description of Artificial Sequence: Synthetic oligonucleotide
  Sense strand starting at position 545 of SEQ ID NO: 1888374
cagguaaagugauccagcu

SEQ ID NO: 2531221 - RNA, 19 nt, Artificial Sequence
  Description of Artificial Sequence: Synthetic oligonucleotide
  Antisense strand to SEQ ID NO: 2531220
agcuggaucacuuuaccug

SEQ ID NO: 2531222 - RNA, 19 nt, Artificial Sequence
  Description of Artificial Sequence: Synthetic oligonucleotide
  Sense strand starting at position 3435 of SEQ ID NO: 1888374
ggauuaguaucugcuugau

SEQ ID NO: 2531223 - RNA, 19 nt, Artificial Sequence
  Description of Artificial Sequence: Synthetic oligonucleotide
  Antisense strand to SEQ ID NO: 2531222
aucaagcagauacuaaucc

SEQ ID NO: 2531224 - RNA, 19 nt, Artificial Sequence
  Description of Artificial Sequence: Synthetic oligonucleotide
  Sense strand starting at position 2422 of SEQ ID NO: 1888374
ucgcgaagcgucguaaacu

SEQ ID NO: 2531225 - RNA, 19 nt, Artificial Sequence
  Description of Artificial Sequence: Synthetic oligonucleotide
  Antisense strand to SEQ ID NO: 2531224
aguuuacgacgcuucgcga

SEQ ID NO: 2531226 - RNA, 19 nt, Artificial Sequence
  Description of Artificial Sequence: Synthetic oligonucleotide
  Sense strand starting at position 2420 of SEQ ID NO: 1888374
cuucgcgaagcgucguaaa

SEQ ID NO: 2531227 - RNA, 19 nt, Artificial Sequence
  Description of Artificial Sequence: Synthetic oligonucleotide
  Antisense strand to SEQ ID NO: 2531226
uuuacgacgcuucgcgaag

SEQ ID NO: 2531228 - RNA, 19 nt, Artificial Sequence
  Description of Artificial Sequence: Synthetic oligonucleotide
  Sense strand starting at position 3238 of SEQ ID NO: 1888374
cguuuaguucuuuagacac

SEQ ID NO: 2531229 - RNA, 19 nt, Artificial Sequence
  Description of Artificial Sequence: Synthetic oligonucleotide
  Antisense strand to SEQ ID NO: 2531228
gugucuaaagaacuaaacg

SEQ ID NO: 2531230 - RNA, 19 nt, Artificial Sequence
  Description of Artificial Sequence: Synthetic oligonucleotide
  Sense strand starting at position 3437 of SEQ ID NO: 1888374
auuaguaucugcuugauua

SEQ ID NO: 2531231 - RNA, 19 nt, Artificial Sequence
  Description of Artificial Sequence: Synthetic oligonucleotide
  Antisense strand to SEQ ID NO: 2531230
uaaucaagcagauacuaau

SEQ ID NO: 2531232 - RNA, 19 nt, Artificial Sequence
  Description of Artificial Sequence: Synthetic oligonucleotide
  Sense strand starting at position 850 of SEQ ID NO: 1888374
ggucuuugaauauguaagu

SEQ ID NO: 2531233 - RNA, 19 nt, Artificial Sequence
  Description of Artificial Sequence: Synthetic oligonucleotide
  Antisense strand to SEQ ID NO: 2531232
acuuacauauucaaagacc

SEQ ID NO: 2531234 - RNA, 19 nt, Artificial Sequence
  Description of Artificial Sequence: Synthetic oligonucleotide
  Sense strand starting at position 1292 of SEQ ID NO: 1888375
agaagaagcugguuggaua

SEQ ID NO: 2531235 - RNA, 19 nt, Artificial Sequence
  Description of Artificial Sequence: Synthetic oligonucleotide
  Antisense strand to SEQ ID NO: 2531234
uauccaaccagcuucuucu

SEQ ID NO: 2531236 - RNA, 19 nt, Artificial Sequence
  Description of Artificial Sequence: Synthetic oligonucleotide
  Sense strand starting at position 3178 of SEQ ID NO: 1888375
agcuguuuccucccguauu

SEQ ID NO: 2531237 - RNA, 19 nt, Artificial Sequence
  Description of Artificial Sequence: Synthetic oligonucleotide
  Antisense strand to SEQ ID NO: 2531236
aauacgggaggaaacagcu

SEQ ID NO: 2531238 - RNA, 19 nt, Artificial Sequence
  Description of Artificial Sequence: Synthetic oligonucleotide
  Sense strand starting at position 212 of SEQ ID NO: 1888375
gugagcaguccagaugaga

SEQ ID NO: 2531239 - RNA, 19 nt, Artificial Sequence
  Description of Artificial Sequence: Synthetic oligonucleotide
  Antisense strand to SEQ ID NO: 2531238
ucucaucuggacugcucac

SEQ ID NO: 2531240 - RNA, 19 nt, Artificial Sequence
  Description of Artificial Sequence: Synthetic oligonucleotide
  Sense strand starting at position 1488 of SEQ ID NO: 1888375
gaagauguuccauaagcuc

SEQ ID NO: 2531241 - RNA, 19 nt, Artificial Sequence
  Description of Artificial Sequence: Synthetic oligonucleotide
  Antisense strand to SEQ ID NO: 2531240
gagcuuauggaacaucuuc

SEQ ID NO: 2531242 - RNA, 19 nt, Artificial Sequence
  Description of Artificial Sequence: Synthetic oligonucleotide
  Sense strand starting at position 3024 of SEQ ID NO: 1888375
uugucagggucugcauuua

SEQ ID NO: 2531243 - RNA, 19 nt, Artificial Sequence
  Description of Artificial Sequence: Synthetic oligonucleotide
  Antisense strand to SEQ ID NO: 2531242
uaaaugcagacccugacaa

SEQ ID NO: 2531244 - RNA, 19 nt, Artificial Sequence
  Description of Artificial Sequence: Synthetic oligonucleotide
  Sense strand starting at position 3749 of SEQ ID NO: 1888375
gaugauaagcgugaaacuc

SEQ ID NO: 2531245 - RNA, 19 nt, Artificial Sequence
  Description of Artificial Sequence: Synthetic oligonucleotide
  Antisense strand to SEQ ID NO: 2531244
gaguuucacgcuuaucauc

SEQ ID NO: 2531246 - RNA, 19 nt, Artificial Sequence
  Description of Artificial Sequence: Synthetic oligonucleotide
  Sense strand starting at position 2537 of SEQ ID NO: 1888375
gugcuucugaccuaggaaa

SEQ ID NO: 2531247 - RNA, 19 nt, Artificial Sequence
  Description of Artificial Sequence: Synthetic oligonucleotide
  Antisense strand to SEQ ID NO: 2531246
uuuccuaggucagaagcac

SEQ ID NO: 2531248 - RNA, 19 nt, Artificial Sequence
  Description of Artificial Sequence: Synthetic oligonucleotide
  Sense strand starting at position 1734 of SEQ ID NO: 1888375
gaguuccauguguaagaac

SEQ ID NO: 2531249 - RNA, 19 nt, Artificial Sequence
  Description of Artificial Sequence: Synthetic oligonucleotide
  Antisense strand to SEQ ID NO: 2531248
guucuuacacauggaacuc

SEQ ID NO: 2531250 - RNA, 19 nt, Artificial Sequence
  Description of Artificial Sequence: Synthetic oligonucleotide
  Sense strand starting at position 1262 of SEQ ID NO: 1888375
gcgugaaaggagcaugaaa

SEQ ID NO: 2531251 - RNA, 19 nt, Artificial Sequence
  Description of Artificial Sequence: Synthetic oligonucleotide
  Antisense strand to SEQ ID NO: 2531250
uuucaugcuccuuucacgc

SEQ ID NO: 2531252 - RNA, 19 nt, Artificial Sequence
  Description of Artificial Sequence: Synthetic oligonucleotide
  Sense strand starting at position 2156 of SEQ ID NO: 1888375
cuugaagugcaauaacuuu

SEQ ID NO: 2531253 - RNA, 19 nt, Artificial Sequence
  Description of Artificial Sequence: Synthetic oligonucleotide
  Antisense strand to SEQ ID NO: 2531252
aaaguuauugcacuucaag

SEQ ID NO: 2531254 - RNA, 19 nt, Artificial Sequence
  Description of Artificial Sequence: Synthetic oligonucleotide
  Sense strand starting at position 669 of SEQ ID NO: 1888375
ugugaaagaugccucagaa

SEQ ID NO: 2531255 - RNA, 19 nt, Artificial Sequence
  Description of Artificial Sequence: Synthetic oligonucleotide
  Antisense strand to SEQ ID NO: 2531254
uucugaggcaucuuucaca

SEQ ID NO: 2531256 - RNA, 19 nt, Artificial Sequence
  Description of Artificial Sequence: Synthetic oligonucleotide
  Sense strand starting at position 2689 of SEQ ID NO: 1888375
ugcuaaauuggaggaguua

SEQ ID NO: 2531257 - RNA, 19 nt, Artificial Sequence
  Description of Artificial Sequence: Synthetic oligonucleotide
  Antisense strand to SEQ ID NO: 2531256
uaacuccuccaauuuagca

SEQ ID NO: 2531258 - RNA, 19 nt, Artificial Sequence
  Description of Artificial Sequence: Synthetic oligonucleotide
  Sense strand starting at position 3453 of SEQ ID NO: 1888375
aggccugggccucaugaua

SEQ ID NO: 2531259 - RNA, 19 nt, Artificial Sequence
  Description of Artificial Sequence: Synthetic oligonucleotide
  Antisense strand to SEQ ID NO: 2531258
uaucaugaggcccaggccu

SEQ ID NO: 2531260 - RNA, 19 nt, Artificial Sequence
  Description of Artificial Sequence: Synthetic oligonucleotide
  Sense strand starting at position 237 of SEQ ID NO: 1888375
gcagcugugacuuagggaa

SEQ ID NO: 2531261 - RNA, 19 nt, Artificial Sequence
  Description of Artificial Sequence: Synthetic oligonucleotide
  Antisense strand to SEQ ID NO: 2531260
uucccuaagucacagcugc

SEQ ID NO: 2531262 - RNA, 19 nt, Artificial Sequence
  Description of Artificial Sequence: Synthetic oligonucleotide
  Sense strand starting at position 1733 of SEQ ID NO: 1888375
agaguuccauguguaagaa

SEQ ID NO: 2531263 - RNA, 19 nt, Artificial Sequence
  Description of Artificial Sequence: Synthetic oligonucleotide
  Antisense strand to SEQ ID NO: 2531262
uucuuacacauggaacucu

SEQ ID NO: 2531264 - RNA, 19 nt, Artificial Sequence
  Description of Artificial Sequence: Synthetic oligonucleotide
  Sense strand starting at position 3746 of SEQ ID NO: 1888375
ccagaugauaagcgugaaa

SEQ ID NO: 2531265 - RNA, 19 nt, Artificial Sequence
  Description of Artificial Sequence: Synthetic oligonucleotide
  Antisense strand to SEQ ID NO: 2531264
uuucacgcuuaucaucugg

SEQ ID NO: 2531266 - RNA, 19 nt, Artificial Sequence
  Description of Artificial Sequence: Synthetic oligonucleotide
  Sense strand starting at position 3748 of SEQ ID NO: 1888375
agaugauaagcgugaaacu

SEQ ID NO: 2531267 - RNA, 19 nt, Artificial Sequence
  Description of Artificial Sequence: Synthetic oligonucleotide
  Antisense strand to SEQ ID NO: 2531266
aguuucacgcuuaucaucu

SEQ ID NO: 2531268 - RNA, 19 nt, Artificial Sequence
  Description of Artificial Sequence: Synthetic oligonucleotide
  Sense strand starting at position 3230 of SEQ ID NO: 1888375
gguaaagagugggauuuac

SEQ ID NO: 2531269 - RNA, 19 nt, Artificial Sequence
  Description of Artificial Sequence: Synthetic oligonucleotide
  Antisense strand to SEQ ID NO: 2531268
guaaaucccacucuuuacc

SEQ ID NO: 2531270 - RNA, 19 nt, Artificial Sequence
  Description of Artificial Sequence: Synthetic oligonucleotide
  Sense strand starting at position 1240 of SEQ ID NO: 1888375
gagccaagagcaugugaaa

SEQ ID NO: 2531271 - RNA, 19 nt, Artificial Sequence
  Description of Artificial Sequence: Synthetic oligonucleotide
  Antisense strand to SEQ ID NO: 2531270
uuucacaugcucuuggcuc

SEQ ID NO: 2531272 - RNA, 19 nt, Artificial Sequence
  Description of Artificial Sequence: Synthetic oligonucleotide
  Sense strand starting at position 2884 of SEQ ID NO: 1888375
aggacauguuucuuaccuu

SEQ ID NO: 2531273 - RNA, 19 nt, Artificial Sequence
  Description of Artificial Sequence: Synthetic oligonucleotide
  Antisense strand to SEQ ID NO: 2531272
aagguaagaaacauguccu

SEQ ID NO: 2531274 - RNA, 19 nt, Artificial Sequence
  Description of Artificial Sequence: Synthetic oligonucleotide
  Sense strand starting at position 1732 of SEQ ID NO: 1888375
gagaguuccauguguaaga

SEQ ID NO: 2531275 - RNA, 19 nt, Artificial Sequence
  Description of Artificial Sequence: Synthetic oligonucleotide
  Antisense strand to SEQ ID NO: 2531274
ucuuacacauggaacucuc

SEQ ID NO: 2531276 - RNA, 19 nt, Artificial Sequence
  Description of Artificial Sequence: Synthetic oligonucleotide
  Sense strand starting at position 77 of SEQ ID NO: 1888375
agaugcuucuucucuagga

SEQ ID NO: 2531277 - RNA, 19 nt, Artificial Sequence
  Description of Artificial Sequence: Synthetic oligonucleotide
  Antisense strand to SEQ ID NO: 2531276
uccuagagaagaagcaucu

SEQ ID NO: 2531278 - RNA, 19 nt, Artificial Sequence
  Description of Artificial Sequence: Synthetic oligonucleotide
  Sense strand starting at position 659 of SEQ ID NO: 1888375
ugaggaagcgugugaaaga

SEQ ID NO: 2531279 - RNA, 19 nt, Artificial Sequence
  Description of Artificial Sequence: Synthetic oligonucleotide
  Antisense strand to SEQ ID NO: 2531278
ucuuucacacgcuuccuca

SEQ ID NO: 2531280 - RNA, 19 nt, Artificial Sequence
  Description of Artificial Sequence: Synthetic oligonucleotide
  Sense strand starting at position 1376 of SEQ ID NO: 1888375
gagagugguucuccaucca

SEQ ID NO: 2531281 - RNA, 19 nt, Artificial Sequence
  Description of Artificial Sequence: Synthetic oligonucleotide
  Antisense strand to SEQ ID NO: 2531280
uggauggagaaccacucuc

SEQ ID NO: 2531282 - RNA, 19 nt, Artificial Sequence
  Description of Artificial Sequence: Synthetic oligonucleotide
  Sense strand starting at position 2539 of SEQ ID NO: 1888375
gcuucugaccuaggaaagu

SEQ ID NO: 2531283 - RNA, 19 nt, Artificial Sequence
  Description of Artificial Sequence: Synthetic oligonucleotide
  Antisense strand to SEQ ID NO: 2531282
acuuuccuaggucagaagc

SEQ ID NO: 2531284 - RNA, 19 nt, Artificial Sequence
  Description of Artificial Sequence: Synthetic oligonucleotide
  Sense strand starting at position 3973 of SEQ ID NO: 1888375
ucguuaguuaaugaguuaa

SEQ ID NO: 2531285 - RNA, 19 nt, Artificial Sequence
  Description of Artificial Sequence: Synthetic oligonucleotide
  Antisense strand to SEQ ID NO: 2531284
uuaacucauuaacuaacga

SEQ ID NO: 2531286 - RNA, 19 nt, Artificial Sequence
  Description of Artificial Sequence: Synthetic oligonucleotide
  Sense strand starting at position 74 of SEQ ID NO: 1888375
augagaugcuucuucucua

SEQ ID NO: 2531287 - RNA, 19 nt, Artificial Sequence
  Description of Artificial Sequence: Synthetic oligonucleotide
  Antisense strand to SEQ ID NO: 2531286
uagagaagaagcaucucau

SEQ ID NO: 2531288 - RNA, 19 nt, Artificial Sequence
  Description of Artificial Sequence: Synthetic oligonucleotide
  Sense strand starting at position 1730 of SEQ ID NO: 1888375
uggagaguuccauguguaa

SEQ ID NO: 2531289 - RNA, 19 nt, Artificial Sequence
  Description of Artificial Sequence: Synthetic oligonucleotide
  Antisense strand to SEQ ID NO: 2531288
uuacacauggaacucucca

SEQ ID NO: 2531290 - RNA, 19 nt, Artificial Sequence
  Description of Artificial Sequence: Synthetic oligonucleotide
  Sense strand starting at position 2357 of SEQ ID NO: 1888375
ugaagacucuuggcuuucu

SEQ ID NO: 2531291 - RNA, 19 nt, Artificial Sequence
  Description of Artificial Sequence: Synthetic oligonucleotide
  Antisense strand to SEQ ID NO: 2531290
agaaagccaagagucuuca

SEQ ID NO: 2531292 - RNA, 19 nt, Artificial Sequence
  Description of Artificial Sequence: Synthetic oligonucleotide
  Sense strand starting at position 42 of SEQ ID NO: 1888375
ugcuauagagcuuggaauu

SEQ ID NO: 2531293 - RNA, 19 nt, Artificial Sequence
  Description of Artificial Sequence: Synthetic oligonucleotide
  Antisense strand to SEQ ID NO: 2531292
aauuccaagcucuauagca

SEQ ID NO: 2531294 - RNA, 19 nt, Artificial Sequence
  Description of Artificial Sequence: Synthetic oligonucleotide
  Sense strand starting at position 2574 of SEQ ID NO: 1888375
ugucauagcugaguuggaa

SEQ ID NO: 2531295 - RNA, 19 nt, Artificial Sequence
  Description of Artificial Sequence: Synthetic oligonucleotide
  Antisense strand to SEQ ID NO: 2531294
uuccaacucagcuaugaca

SEQ ID NO: 2531296 - RNA, 19 nt, Artificial Sequence
  Description of Artificial Sequence: Synthetic oligonucleotide
  Sense strand starting at position 2923 of SEQ ID NO: 1888375
gcagcaaucucaguaauga

SEQ ID NO: 2531297 - RNA, 19 nt, Artificial Sequence
  Description of Artificial Sequence: Synthetic oligonucleotide
  Antisense strand to SEQ ID NO: 2531296
ucauuacugagauugcugc

SEQ ID NO: 2531298 - RNA, 19 nt, Artificial Sequence
  Description of Artificial Sequence: Synthetic oligonucleotide
  Sense strand starting at position 2345 of SEQ ID NO: 1888375
ucucuuguggucugaagac

SEQ ID NO: 2531299 - RNA, 19 nt, Artificial Sequence
  Description of Artificial Sequence: Synthetic oligonucleotide
  Antisense strand to SEQ ID NO: 2531298
gucuucagaccacaagaga

SEQ ID NO: 2531300 - RNA, 19 nt, Artificial Sequence
  Description of Artificial Sequence: Synthetic oligonucleotide
  Sense strand starting at position 81 of SEQ ID NO: 1888375
gcuucuucucuaggacuua

SEQ ID NO: 2531301 - RNA, 19 nt, Artificial Sequence
  Description of Artificial Sequence: Synthetic oligonucleotide
  Antisense strand to SEQ ID NO: 2531300
uaaguccuagagaagaagc

SEQ ID NO: 2531302 - RNA, 19 nt, Artificial Sequence
  Description of Artificial Sequence: Synthetic oligonucleotide
  Sense strand starting at position 1720 of SEQ ID NO: 1888375
uguagugcccuggagaguu

SEQ ID NO: 2531303 - RNA, 19 nt, Artificial Sequence
  Description of Artificial Sequence: Synthetic oligonucleotide
  Antisense strand to SEQ ID NO: 2531302
aacucuccagggcacuaca

SEQ ID NO: 2531304 - RNA, 19 nt, Artificial Sequence
  Description of Artificial Sequence: Synthetic oligonucleotide
  Sense strand starting at position 3965 of SEQ ID NO: 1888375
aggcaucuucguuaguuaa

SEQ ID NO: 2531305 - RNA, 19 nt, Artificial Sequence
  Description of Artificial Sequence: Synthetic oligonucleotide
  Antisense strand to SEQ ID NO: 2531304
uuaacuaacgaagaugccu

SEQ ID NO: 2531306 - RNA, 19 nt, Artificial Sequence
  Description of Artificial Sequence: Synthetic oligonucleotide
  Sense strand starting at position 3968 of SEQ ID NO: 1888375
caucuucguuaguuaauga

SEQ ID NO: 2531307 - RNA, 19 nt, Artificial Sequence
  Description of Artificial Sequence: Synthetic oligonucleotide
  Antisense strand to SEQ ID NO: 2531306
ucauuaacuaacgaagaug

SEQ ID NO: 2531308 - RNA, 19 nt, Artificial Sequence
  Description of Artificial Sequence: Synthetic oligonucleotide
  Sense strand starting at position 2446 of SEQ ID NO: 1888375
ggcaguuucuaugucacaa

SEQ ID NO: 2531309 - RNA, 19 nt, Artificial Sequence
  Description of Artificial Sequence: Synthetic oligonucleotide
  Antisense strand to SEQ ID NO: 2531308
uugugacauagaaacugcc

SEQ ID NO: 2531310 - RNA, 19 nt, Artificial Sequence
  Description of Artificial Sequence: Synthetic oligonucleotide
  Sense strand starting at position 2392 of SEQ ID NO: 1888375
gcuuguuaucacugacauu

SEQ ID NO: 2531311 - RNA, 19 nt, Artificial Sequence
  Description of Artificial Sequence: Synthetic oligonucleotide
  Antisense strand to SEQ ID NO: 2531310
aaugucagugauaacaagc

SEQ ID NO: 2531312 - RNA, 19 nt, Artificial Sequence
  Description of Artificial Sequence: Synthetic oligonucleotide
  Sense strand starting at position 3864 of SEQ ID NO: 1888375
auguguuuccgcuaccaaa

SEQ ID NO: 2531313 - RNA, 19 nt, Artificial Sequence
  Description of Artificial Sequence: Synthetic oligonucleotide
  Antisense strand to SEQ ID NO: 2531312
uuugguagcggaaacacau

SEQ ID NO: 2531314 - RNA, 19 nt, Artificial Sequence
  Description of Artificial Sequence: Synthetic oligonucleotide
  Sense strand starting at position 1449 of SEQ ID NO: 1888376
gguugauucgaugaugaua

SEQ ID NO: 2531315 - RNA, 19 nt, Artificial Sequence
  Description of Artificial Sequence: Synthetic oligonucleotide
  Antisense strand to SEQ ID NO: 2531314
uaucaucaucgaaucaacc

SEQ ID NO: 2531316 - RNA, 19 nt, Artificial Sequence
  Description of Artificial Sequence: Synthetic oligonucleotide
  Sense strand starting at position 3803 of SEQ ID NO: 1888376
agauaaaguauccagugua

SEQ ID NO: 2531317 - RNA, 19 nt, Artificial Sequence
  Description of Artificial Sequence: Synthetic oligonucleotide
  Antisense strand to SEQ ID NO: 2531316
uacacuggauacuuuaucu

SEQ ID NO: 2531318 - RNA, 19 nt, Artificial Sequence
  Description of Artificial Sequence: Synthetic oligonucleotide
  Sense strand starting at position 1308 of SEQ ID NO: 1888376
ucuugaggucaauaaaugu

SEQ ID NO: 2531319 - RNA, 19 nt, Artificial Sequence
  Description of Artificial Sequence: Synthetic oligonucleotide
  Antisense strand to SEQ ID NO: 2531318
acauuuauugaccucaaga

SEQ ID NO: 2531320 - RNA, 19 nt, Artificial Sequence
  Description of Artificial Sequence: Synthetic oligonucleotide
  Sense strand starting at position 236 of SEQ ID NO: 1888376
ccacuagugauuugugguu

SEQ ID NO: 2531321 - RNA, 19 nt, Artificial Sequence
  Description of Artificial Sequence: Synthetic oligonucleotide
  Antisense strand to SEQ ID NO: 2531320
aaccacaaaucacuagugg

SEQ ID NO: 2531322 - RNA, 19 nt, Artificial Sequence
  Description of Artificial Sequence: Synthetic oligonucleotide
  Sense strand starting at position 1200 of SEQ ID NO: 1888376
augauuaggcuaugaacua

SEQ ID NO: 2531323 - RNA, 19 nt, Artificial Sequence
  Description of Artificial Sequence: Synthetic oligonucleotide
  Antisense strand to SEQ ID NO: 2531322
uaguucauagccuaaucau

SEQ ID NO: 2531324 - RNA, 19 nt, Artificial Sequence
  Description of Artificial Sequence: Synthetic oligonucleotide
  Sense strand starting at position 1192 of SEQ ID NO: 1888376
gagauacuaugauuaggcu

SEQ ID NO: 2531325 - RNA, 19 nt, Artificial Sequence
  Description of Artificial Sequence: Synthetic oligonucleotide
  Antisense strand to SEQ ID NO: 2531324
agccuaaucauaguaucuc

SEQ ID NO: 2531326 - RNA, 19 nt, Artificial Sequence
  Description of Artificial Sequence: Synthetic oligonucleotide
  Sense strand starting at position 2120 of SEQ ID NO: 1888376
ccucucuguggugaagaga

SEQ ID NO: 2531327 - RNA, 19 nt, Artificial Sequence
  Description of Artificial Sequence: Synthetic oligonucleotide
  Antisense strand to SEQ ID NO: 2531326
ucucuucaccacagagagg

SEQ ID NO: 2531328 - RNA, 19 nt, Artificial Sequence
  Description of Artificial Sequence: Synthetic oligonucleotide
  Sense strand starting at position 1339 of SEQ ID NO: 1888376
auaaguacugagcaaaugu

SEQ ID NO: 2531329 - RNA, 19 nt, Artificial Sequence
  Description of Artificial Sequence: Synthetic oligonucleotide
  Antisense strand to SEQ ID NO: 2531328
acauuugcucaguacuuau

SEQ ID NO: 2531330 - RNA, 19 nt, Artificial Sequence
  Description of Artificial Sequence: Synthetic oligonucleotide
  Sense strand starting at position 3855 of SEQ ID NO: 1888376
uggcuuaaccuugaguaaa

SEQ ID NO: 2531331 - RNA, 19 nt, Artificial Sequence
  Description of Artificial Sequence: Synthetic oligonucleotide
  Antisense strand to SEQ ID NO: 2531330
uuuacucaagguuaagcca

SEQ ID NO: 2531332 - RNA, 19 nt, Artificial Sequence
  Description of Artificial Sequence: Synthetic oligonucleotide
  Sense strand starting at position 1260 of SEQ ID NO: 1888376
ggcuaucuguaggcauuua

SEQ ID NO: 2531333 - RNA, 19 nt, Artificial Sequence
  Description of Artificial Sequence: Synthetic oligonucleotide
  Antisense strand to SEQ ID NO: 2531332
uaaaugccuacagauagcc

SEQ ID NO: 2531334 - RNA, 19 nt, Artificial Sequence
  Description of Artificial Sequence: Synthetic oligonucleotide
  Sense strand starting at position 2696 of SEQ ID NO: 1888376
uugcauuaugaggaagcua

SEQ ID NO: 2531335 - RNA, 19 nt, Artificial Sequence
  Description of Artificial Sequence: Synthetic oligonucleotide
  Antisense strand to SEQ ID NO: 2531334
uagcuuccucauaaugcaa

SEQ ID NO: 2531336 - RNA, 19 nt, Artificial Sequence
  Description of Artificial Sequence: Synthetic oligonucleotide
  Sense strand starting at position 294 of SEQ ID NO: 1888376
gcuguuagugaagaauaca

SEQ ID NO: 2531337 - RNA, 19 nt, Artificial Sequence
  Description of Artificial Sequence: Synthetic oligonucleotide
  Antisense strand to SEQ ID NO: 2531336
uguauucuucacuaacagc

SEQ ID NO: 2531338 - RNA, 19 nt, Artificial Sequence
  Description of Artificial Sequence: Synthetic oligonucleotide
  Sense strand starting at position 1739 of SEQ ID NO: 1888376
auuaaauccuggcugauga

SEQ ID NO: 2531339 - RNA, 19 nt, Artificial Sequence
  Description of Artificial Sequence: Synthetic oligonucleotide
  Antisense strand to SEQ ID NO: 2531338
ucaucagccaggauuuaau

SEQ ID NO: 2531340 - RNA, 19 nt, Artificial Sequence
  Description of Artificial Sequence: Synthetic oligonucleotide
  Sense strand starting at position 1196 of SEQ ID NO: 1888376
uacuaugauuaggcuauga

SEQ ID NO: 2531341 - RNA, 19 nt, Artificial Sequence
  Description of Artificial Sequence: Synthetic oligonucleotide
  Antisense strand to SEQ ID NO: 2531340
ucauagccuaaucauagua

SEQ ID NO: 2531342 - RNA, 19 nt, Artificial Sequence
  Description of Artificial Sequence: Synthetic oligonucleotide
  Sense strand starting at position 1328 of SEQ ID NO: 1888376
cucuguauccaauaaguac

SEQ ID NO: 2531343 - RNA, 19 nt, Artificial Sequence
  Description of Artificial Sequence: Synthetic oligonucleotide
  Antisense strand to SEQ ID NO: 2531342
guacuuauuggauacagag

SEQ ID NO: 2531344 - RNA, 19 nt, Artificial Sequence
  Description of Artificial Sequence: Synthetic oligonucleotide
  Sense strand starting at position 1740 of SEQ ID NO: 1888376
uuaaauccuggcugaugaa

SEQ ID NO: 2531345 - RNA, 19 nt, Artificial Sequence
  Description of Artificial Sequence: Synthetic oligonucleotide
  Antisense strand to SEQ ID NO: 2531344
uucaucagccaggauuuaa

SEQ ID NO: 2531346 - RNA, 19 nt, Artificial Sequence
  Description of Artificial Sequence: Synthetic oligonucleotide
  Sense strand starting at position 1737 of SEQ ID NO: 1888376
agauuaaauccuggcugau

SEQ ID NO: 2531347 - RNA, 19 nt, Artificial Sequence
  Description of Artificial Sequence: Synthetic oligonucleotide
  Antisense strand to SEQ ID NO: 2531346
aucagccaggauuuaaucu

SEQ ID NO: 2531348 - RNA, 19 nt, Artificial Sequence
  Description of Artificial Sequence: Synthetic oligonucleotide
  Sense strand starting at position 3909 of SEQ ID NO: 1888376
uucugucaacuguaucaga

SEQ ID NO: 2531349 - RNA, 19 nt, Artificial Sequence
  Description of Artificial Sequence: Synthetic oligonucleotide
  Antisense strand to SEQ ID NO: 2531348
ucugauacaguugacagaa

SEQ ID NO: 2531350 - RNA, 19 nt, Artificial Sequence
  Description of Artificial Sequence: Synthetic oligonucleotide
  Sense strand starting at position 3883 of SEQ ID NO: 1888376
gggaguucagcucagugaa

SEQ ID NO: 2531351 - RNA, 19 nt, Artificial Sequence
  Description of Artificial Sequence: Synthetic oligonucleotide
  Antisense strand to SEQ ID NO: 2531350
uucacugagcugaacuccc

SEQ ID NO: 2531352 - RNA, 19 nt, Artificial Sequence
  Description of Artificial Sequence: Synthetic oligonucleotide
  Sense strand starting at position 1350 of SEQ ID NO: 1888376
gcaaauguuguugaauaua

SEQ ID NO: 2531353 - RNA, 19 nt, Artificial Sequence
  Description of Artificial Sequence: Synthetic oligonucleotide
  Antisense strand to SEQ ID NO: 2531352
uauauucaacaacauuugc

SEQ ID NO: 2531354 - RNA, 19 nt, Artificial Sequence
  Description of Artificial Sequence: Synthetic oligonucleotide
  Sense strand starting at position 1706 of SEQ ID NO: 1888376
uaacccauuugagagugaa

SEQ ID NO: 2531355 - RNA, 19 nt, Artificial Sequence
  Description of Artificial Sequence: Synthetic oligonucleotide
  Antisense strand to SEQ ID NO: 2531354
uucacucucaaauggguua

SEQ ID NO: 2531356 - RNA, 19 nt, Artificial Sequence
  Description of Artificial Sequence: Synthetic oligonucleotide
  Sense strand starting at position 2598 of SEQ ID NO: 1888376
uaauucucuguugagguau

SEQ ID NO: 2531357 - RNA, 19 nt, Artificial Sequence
  Description of Artificial Sequence: Synthetic oligonucleotide
  Antisense strand to SEQ ID NO: 2531356
auaccucaacagagaauua

SEQ ID NO: 2531358 - RNA, 19 nt, Artificial Sequence
  Description of Artificial Sequence: Synthetic oligonucleotide
  Sense strand starting at position 1259 of SEQ ID NO: 1888376
uggcuaucuguaggcauuu

SEQ ID NO: 2531359 - RNA, 19 nt, Artificial Sequence
  Description of Artificial Sequence: Synthetic oligonucleotide
  Antisense strand to SEQ ID NO: 2531358
aaaugccuacagauagcca

SEQ ID NO: 2531360 - RNA, 19 nt, Artificial Sequence
  Description of Artificial Sequence: Synthetic oligonucleotide
  Sense strand starting at position 1884 of SEQ ID NO: 1888376
ucccauuaaccugguagau

SEQ ID NO: 2531361 - RNA, 19 nt, Artificial Sequence
  Description of Artificial Sequence: Synthetic oligonucleotide
  Antisense strand to SEQ ID NO: 2531360
aucuaccagguuaauggga

SEQ ID NO: 2531362 - RNA, 19 nt, Artificial Sequence
  Description of Artificial Sequence: Synthetic oligonucleotide
  Sense strand starting at position 2093 of SEQ ID NO: 1888376
cugcucuuugagcaaagau

SEQ ID NO: 2531363 - RNA, 19 nt, Artificial Sequence
  Description of Artificial Sequence: Synthetic oligonucleotide
  Antisense strand to SEQ ID NO: 2531362
aucuuugcucaaagagcag

SEQ ID NO: 2531364 - RNA, 19 nt, Artificial Sequence
  Description of Artificial Sequence: Synthetic oligonucleotide
  Sense strand starting at position 1212 of SEQ ID NO: 1888376
ugaacuauacuguguauag

SEQ ID NO: 2531365 - RNA, 19 nt, Artificial Sequence
  Description of Artificial Sequence: Synthetic oligonucleotide
  Antisense strand to SEQ ID NO: 2531364
cuauacacaguauaguuca

SEQ ID NO: 2531366 - RNA, 19 nt, Artificial Sequence
  Description of Artificial Sequence: Synthetic oligonucleotide
  Sense strand starting at position 3161 of SEQ ID NO: 1888376
auuucuaggucucaaggaa

SEQ ID NO: 2531367 - RNA, 19 nt, Artificial Sequence
  Description of Artificial Sequence: Synthetic oligonucleotide
  Antisense strand to SEQ ID NO: 2531366
uuccuugagaccuagaaau

SEQ ID NO: 2531368 - RNA, 19 nt, Artificial Sequence
  Description of Artificial Sequence: Synthetic oligonucleotide
  Sense strand starting at position 2311 of SEQ ID NO: 1888376
cacucuuuagugugagaga

SEQ ID NO: 2531369 - RNA, 19 nt, Artificial Sequence
  Description of Artificial Sequence: Synthetic oligonucleotide
  Antisense strand to SEQ ID NO: 2531368
ucucucacacuaaagagug

SEQ ID NO: 2531370 - RNA, 19 nt, Artificial Sequence
  Description of Artificial Sequence: Synthetic oligonucleotide
  Sense strand starting at position 2712 of SEQ ID NO: 1888376
cuaauacuguuugucagaa

SEQ ID NO: 2531371 - RNA, 19 nt, Artificial Sequence
  Description of Artificial Sequence: Synthetic oligonucleotide
  Antisense strand to SEQ ID NO: 2531370
uucugacaaacaguauuag

SEQ ID NO: 2531372 - RNA, 19 nt, Artificial Sequence
  Description of Artificial Sequence: Synthetic oligonucleotide
  Sense strand starting at position 3802 of SEQ ID NO: 1888376
cagauaaaguauccagugu

SEQ ID NO: 2531373 - RNA, 19 nt, Artificial Sequence
  Description of Artificial Sequence: Synthetic oligonucleotide
  Antisense strand to SEQ ID NO: 2531372
acacuggauacuuuaucug

SEQ ID NO: 2531374 - RNA, 19 nt, Artificial Sequence
  Description of Artificial Sequence: Synthetic oligonucleotide
  Sense strand starting at position 3098 of SEQ ID NO: 1888376
gugagaacauuccucgauc

SEQ ID NO: 2531375 - RNA, 19 nt, Artificial Sequence
  Description of Artificial Sequence: Synthetic oligonucleotide
  Antisense strand to SEQ ID NO: 2531374
gaucgaggaauguucucac

SEQ ID NO: 2531376 - RNA, 19 nt, Artificial Sequence
  Description of Artificial Sequence: Synthetic oligonucleotide
  Sense strand starting at position 1102 of SEQ ID NO: 1888376
acagaaauuuggcaaucuc

SEQ ID NO: 2531377 - RNA, 19 nt, Artificial Sequence
  Description of Artificial Sequence: Synthetic oligonucleotide
  Antisense strand to SEQ ID NO: 2531376
gagauugccaaauuucugu

SEQ ID NO: 2531378 - RNA, 19 nt, Artificial Sequence
  Description of Artificial Sequence: Synthetic oligonucleotide
  Sense strand starting at position 1348 of SEQ ID NO: 1888376
gagcaaauguuguugaaua

SEQ ID NO: 2531379 - RNA, 19 nt, Artificial Sequence
  Description of Artificial Sequence: Synthetic oligonucleotide
  Antisense strand to SEQ ID NO: 2531378
uauucaacaacauuugcuc

SEQ ID NO: 2531380 - RNA, 19 nt, Artificial Sequence
  Description of Artificial Sequence: Synthetic oligonucleotide
  Sense strand starting at position 2685 of SEQ ID NO: 1888376
aggaucaggcauugcauua

SEQ ID NO: 2531381 - RNA, 19 nt, Artificial Sequence
  Description of Artificial Sequence: Synthetic oligonucleotide
  Antisense strand to SEQ ID NO: 2531380
uaaugcaaugccugauccu

SEQ ID NO: 2531382 - RNA, 19 nt, Artificial Sequence
  Description of Artificial Sequence: Synthetic oligonucleotide
  Sense strand starting at position 2181 of SEQ ID NO: 1888376
cgaucagauuccuuuauuc

SEQ ID NO: 2531383 - RNA, 19 nt, Artificial Sequence
  Description of Artificial Sequence: Synthetic oligonucleotide
  Antisense strand to SEQ ID NO: 2531382
gaauaaaggaaucugaucg

SEQ ID NO: 2531384 - RNA, 19 nt, Artificial Sequence
  Description of Artificial Sequence: Synthetic oligonucleotide
  Sense strand starting at position 2180 of SEQ ID NO: 1888376
ccgaucagauuccuuuauu

SEQ ID NO: 2531385 - RNA, 19 nt, Artificial Sequence
  Description of Artificial Sequence: Synthetic oligonucleotide
  Antisense strand to SEQ ID NO: 2531384
aauaaaggaaucugaucgg

SEQ ID NO: 2531386 - RNA, 19 nt, Artificial Sequence
  Description of Artificial Sequence: Synthetic oligonucleotide
  Sense strand starting at position 1113 of SEQ ID NO: 1888376
gcaaucucauguccugaaa

SEQ ID NO: 2531387 - RNA, 19 nt, Artificial Sequence
  Description of Artificial Sequence: Synthetic oligonucleotide
  Antisense strand to SEQ ID NO: 2531386
uuucaggacaugagauugc

SEQ ID NO: 2531388 - RNA, 19 nt, Artificial Sequence
  Description of Artificial Sequence: Synthetic oligonucleotide
  Sense strand starting at position 2110 of SEQ ID NO: 1888376
auaauagaguccucucugu

SEQ ID NO: 2531389 - RNA, 19 nt, Artificial Sequence
  Description of Artificial Sequence: Synthetic oligonucleotide
  Antisense strand to SEQ ID NO: 2531388
acagagaggacucuauuau

SEQ ID NO: 2531390 - RNA, 19 nt, Artificial Sequence
  Description of Artificial Sequence: Synthetic oligonucleotide
  Sense strand starting at position 57 of SEQ ID NO: 1888376
ggaucuugaguuggcaacu

SEQ ID NO: 2531391 - RNA, 19 nt, Artificial Sequence
  Description of Artificial Sequence: Synthetic oligonucleotide
  Antisense strand to SEQ ID NO: 2531390
aguugccaacucaagaucc

SEQ ID NO: 2531392 - RNA, 19 nt, Artificial Sequence
  Description of Artificial Sequence: Synthetic oligonucleotide
  Sense strand starting at position 2646 of SEQ ID NO: 1888376
gucacagacucagugcaaa

SEQ ID NO: 2531393 - RNA, 19 nt, Artificial Sequence
  Description of Artificial Sequence: Synthetic oligonucleotide
  Antisense strand to SEQ ID NO: 2531392
uuugcacugagucugugac

SEQ ID NO: 2531394 - RNA, 19 nt, Artificial Sequence
  Description of Artificial Sequence: Synthetic oligonucleotide
  Sense strand starting at position 3370 of SEQ ID NO: 1888377
ggugcugagacugaggauu

SEQ ID NO: 2531395 - RNA, 19 nt, Artificial Sequence
  Description of Artificial Sequence: Synthetic oligonucleotide
  Antisense strand to SEQ ID NO: 2531394
aauccucagucucagcacc

SEQ ID NO: 2531396 - RNA, 19 nt, Artificial Sequence
  Description of Artificial Sequence: Synthetic oligonucleotide
  Sense strand starting at position 706 of SEQ ID NO: 1888377
aggaguuagguacaucuuu

SEQ ID NO: 2531397 - RNA, 19 nt, Artificial Sequence
  Description of Artificial Sequence: Synthetic oligonucleotide
  Antisense strand to SEQ ID NO: 2531396
aaagauguaccuaacuccu

SEQ ID NO: 2531398 - RNA, 19 nt, Artificial Sequence
  Description of Artificial Sequence: Synthetic oligonucleotide
  Sense strand starting at position 695 of SEQ ID NO: 1888377
guaggaaucauaggaguua

SEQ ID NO: 2531399 - RNA, 19 nt, Artificial Sequence
  Description of Artificial Sequence: Synthetic oligonucleotide
  Antisense strand to SEQ ID NO: 2531398
uaacuccuaugauuccuac

SEQ ID NO: 2531400 - RNA, 19 nt, Artificial Sequence
  Description of Artificial Sequence: Synthetic oligonucleotide
  Sense strand starting at position 3549 of SEQ ID NO: 1888377
gggauucaucuauguggaa

SEQ ID NO: 2531401 - RNA, 19 nt, Artificial Sequence
  Description of Artificial Sequence: Synthetic oligonucleotide
  Antisense strand to SEQ ID NO: 2531400
uuccacauagaugaauccc

SEQ ID NO: 2531402 - RNA, 19 nt, Artificial Sequence
  Description of Artificial Sequence: Synthetic oligonucleotide
  Sense strand starting at position 2642 of SEQ ID NO: 1888377
aucauaaagucugugaaag

SEQ ID NO: 2531403 - RNA, 19 nt, Artificial Sequence
  Description of Artificial Sequence: Synthetic oligonucleotide
  Antisense strand to SEQ ID NO: 2531402
cuuucacagacuuuaugau

SEQ ID NO: 2531404 - RNA, 19 nt, Artificial Sequence
  Description of Artificial Sequence: Synthetic oligonucleotide
  Sense strand starting at position 2618 of SEQ ID NO: 1888377
gguuuaaggaaguggaauu

SEQ ID NO: 2531405 - RNA, 19 nt, Artificial Sequence
  Description of Artificial Sequence: Synthetic oligonucleotide
  Antisense strand to SEQ ID NO: 2531404
aauuccacuuccuuaaacc

SEQ ID NO: 2531406 - RNA, 19 nt, Artificial Sequence
  Description of Artificial Sequence: Synthetic oligonucleotide
  Sense strand starting at position 2643 of SEQ ID NO: 1888377
ucauaaagucugugaaagg

SEQ ID NO: 2531407 - RNA, 19 nt, Artificial Sequence
  Description of Artificial Sequence: Synthetic oligonucleotide
  Antisense strand to SEQ ID NO: 2531406
ccuuucacagacuuuauga

SEQ ID NO: 2531408 - RNA, 19 nt, Artificial Sequence
  Description of Artificial Sequence: Synthetic oligonucleotide
  Sense strand starting at position 2931 of SEQ ID NO: 1888377
aaaugauguuaugugacau

SEQ ID NO: 2531409 - RNA, 19 nt, Artificial Sequence
  Description of Artificial Sequence: Synthetic oligonucleotide
  Antisense strand to SEQ ID NO: 2531408
augucacauaacaucauuu

SEQ ID NO: 2531410 - RNA, 19 nt, Artificial Sequence
  Description of Artificial Sequence: Synthetic oligonucleotide
  Sense strand starting at position 2794 of SEQ ID NO: 1888377
agugaauguaaauaacguu

SEQ ID NO: 2531411 - RNA, 19 nt, Artificial Sequence
  Description of Artificial Sequence: Synthetic oligonucleotide
  Antisense strand to SEQ ID NO: 2531410
aacguuauuuacauucacu

SEQ ID NO: 2531412 - RNA, 19 nt, Artificial Sequence
  Description of Artificial Sequence: Synthetic oligonucleotide
  Sense strand starting at position 2373 of SEQ ID NO: 1888377
ugacaucagucccuacaua

SEQ ID NO: 2531413 - RNA, 19 nt, Artificial Sequence
  Description of Artificial Sequence: Synthetic oligonucleotide
  Antisense strand to SEQ ID NO: 2531412
uauguagggacugauguca

SEQ ID NO: 2531414 - RNA, 19 nt, Artificial Sequence
  Description of Artificial Sequence: Synthetic oligonucleotide
  Sense strand starting at position 3674 of SEQ ID NO: 1888377
augaguugguuucuggaag

SEQ ID NO: 2531415 - RNA, 19 nt, Artificial Sequence
  Description of Artificial Sequence: Synthetic oligonucleotide
  Antisense strand to SEQ ID NO: 2531414
cuuccagaaaccaacucau

SEQ ID NO: 2531416 - RNA, 19 nt, Artificial Sequence
  Description of Artificial Sequence: Synthetic oligonucleotide
  Sense strand starting at position 3697 of SEQ ID NO: 1888377
aguguuguccugugaauuu

SEQ ID NO: 2531417 - RNA, 19 nt, Artificial Sequence
  Description of Artificial Sequence: Synthetic oligonucleotide
  Antisense strand to SEQ ID NO: 2531416
aaauucacaggacaacacu

SEQ ID NO: 2531418 - RNA, 19 nt, Artificial Sequence
  Description of Artificial Sequence: Synthetic oligonucleotide
  Sense strand starting at position 1788 of SEQ ID NO: 1888377
cugguaccuccuuacucau

SEQ ID NO: 2531419 - RNA, 19 nt, Artificial Sequence
  Description of Artificial Sequence: Synthetic oligonucleotide
  Antisense strand to SEQ ID NO: 2531418
augaguaaggagguaccag

SEQ ID NO: 2531420 - RNA, 19 nt, Artificial Sequence
  Description of Artificial Sequence: Synthetic oligonucleotide
  Sense strand starting at position 2899 of SEQ ID NO: 1888377
cuuuaaucugggcaggcau

SEQ ID NO: 2531421 - RNA, 19 nt, Artificial Sequence
  Description of Artificial Sequence: Synthetic oligonucleotide
  Antisense strand to SEQ ID NO: 2531420
augccugcccagauuaaag

SEQ ID NO: 2531422 - RNA, 19 nt, Artificial Sequence
  Description of Artificial Sequence: Synthetic oligonucleotide
  Sense strand starting at position 3744 of SEQ ID NO: 1888377
gaagcaucauuguuaacug

SEQ ID NO: 2531423 - RNA, 19 nt, Artificial Sequence
  Description of Artificial Sequence: Synthetic oligonucleotide
  Antisense strand to SEQ ID NO: 2531422
caguuaacaaugaugcuuc

SEQ ID NO: 2531424 - RNA, 19 nt, Artificial Sequence
  Description of Artificial Sequence: Synthetic oligonucleotide
  Sense strand starting at position 2788 of SEQ ID NO: 1888377
caaugcagugaauguaaau

SEQ ID NO: 2531425 - RNA, 19 nt, Artificial Sequence
  Description of Artificial Sequence: Synthetic oligonucleotide
  Antisense strand to SEQ ID NO: 2531424
auuuacauucacugcauug

SEQ ID NO: 2531426 - RNA, 19 nt, Artificial Sequence
  Description of Artificial Sequence: Synthetic oligonucleotide
  Sense strand starting at position 3535 of SEQ ID NO: 1888377
uguacuuauuaguugggau

SEQ ID NO: 2531427 - RNA, 19 nt, Artificial Sequence
  Description of Artificial Sequence: Synthetic oligonucleotide
  Antisense strand to SEQ ID NO: 2531426
aucccaacuaauaaguaca

SEQ ID NO: 2531428 - RNA, 19 nt, Artificial Sequence
  Description of Artificial Sequence: Synthetic oligonucleotide
  Sense strand starting at position 3536 of SEQ ID NO: 1888377
guacuuauuaguugggauu

SEQ ID NO: 2531429 - RNA, 19 nt, Artificial Sequence
  Description of Artificial Sequence: Synthetic oligonucleotide
  Antisense strand to SEQ ID NO: 2531428
aaucccaacuaauaaguac

SEQ ID NO: 2531430 - RNA, 19 nt, Artificial Sequence
  Description of Artificial Sequence: Synthetic oligonucleotide
  Sense strand starting at position 2120 of SEQ ID NO: 1888377
ugcacuucccaguauauuc

SEQ ID NO: 2531431 - RNA, 19 nt, Artificial Sequence
  Description of Artificial Sequence: Synthetic oligonucleotide
  Antisense strand to SEQ ID NO: 2531430
gaauauacugggaagugca

SEQ ID NO: 2531432 - RNA, 19 nt, Artificial Sequence
  Description of Artificial Sequence: Synthetic oligonucleotide
  Sense strand starting at position 2650 of SEQ ID NO: 1888377
gucugugaaaggugaacuu

SEQ ID NO: 2531433 - RNA, 19 nt, Artificial Sequence
  Description of Artificial Sequence: Synthetic oligonucleotide
  Antisense strand to SEQ ID NO: 2531432
aaguucaccuuucacagac

SEQ ID NO: 2531434 - RNA, 19 nt, Artificial Sequence
  Description of Artificial Sequence: Synthetic oligonucleotide
  Sense strand starting at position 2196 of SEQ ID NO: 1888377
agcauagcuuucucaugaa

SEQ ID NO: 2531435 - RNA, 19 nt, Artificial Sequence
  Description of Artificial Sequence: Synthetic oligonucleotide
  Antisense strand to SEQ ID NO: 2531434
uucaugagaaagcuaugcu

SEQ ID NO: 2531436 - RNA, 19 nt, Artificial Sequence
  Description of Artificial Sequence: Synthetic oligonucleotide
  Sense strand starting at position 2785 of SEQ ID NO: 1888377
ugccaaugcagugaaugua

SEQ ID NO: 2531437 - RNA, 19 nt, Artificial Sequence
  Description of Artificial Sequence: Synthetic oligonucleotide
  Antisense strand to SEQ ID NO: 2531436
uacauucacugcauuggca

SEQ ID NO: 2531438 - RNA, 19 nt, Artificial Sequence
  Description of Artificial Sequence: Synthetic oligonucleotide
  Sense strand starting at position 2195 of SEQ ID NO: 1888377
gagcauagcuuucucauga

SEQ ID NO: 2531439 - RNA, 19 nt, Artificial Sequence
  Description of Artificial Sequence: Synthetic oligonucleotide
  Antisense strand to SEQ ID NO: 2531438
ucaugagaaagcuaugcuc

SEQ ID NO: 2531440 - RNA, 19 nt, Artificial Sequence
  Description of Artificial Sequence: Synthetic oligonucleotide
  Sense strand starting at position 3592 of SEQ ID NO: 1888377
cuguuugguuaccuaaacu

SEQ ID NO: 2531441 - RNA, 19 nt, Artificial Sequence
  Description of Artificial Sequence: Synthetic oligonucleotide
  Antisense strand to SEQ ID NO: 2531440
aguuuagguaaccaaacag

SEQ ID NO: 2531442 - RNA, 19 nt, Artificial Sequence
  Description of Artificial Sequence: Synthetic oligonucleotide
  Sense strand starting at position 3741 of SEQ ID NO: 1888377
ugugaagcaucauuguuaa

SEQ ID NO: 2531443 - RNA, 19 nt, Artificial Sequence
  Description of Artificial Sequence: Synthetic oligonucleotide
  Antisense strand to SEQ ID NO: 2531442
uuaacaaugaugcuucaca

SEQ ID NO: 2531444 - RNA, 19 nt, Artificial Sequence
  Description of Artificial Sequence: Synthetic oligonucleotide
  Sense strand starting at position 2343 of SEQ ID NO: 1888377
augauugcuuguuucugaa

SEQ ID NO: 2531445 - RNA, 19 nt, Artificial Sequence
  Description of Artificial Sequence: Synthetic oligonucleotide
  Antisense strand to SEQ ID NO: 2531444
uucagaaacaagcaaucau

SEQ ID NO: 2531446 - RNA, 19 nt, Artificial Sequence
  Description of Artificial Sequence: Synthetic oligonucleotide
  Sense strand starting at position 1310 of SEQ ID NO: 1888377
ucagcuucuccugagccau

SEQ ID NO: 2531447 - RNA, 19 nt, Artificial Sequence
  Description of Artificial Sequence: Synthetic oligonucleotide
  Antisense strand to SEQ ID NO: 2531446
auggcucaggagaagcuga

SEQ ID NO: 2531448 - RNA, 19 nt, Artificial Sequence
  Description of Artificial Sequence: Synthetic oligonucleotide
  Sense strand starting at position 1581 of SEQ ID NO: 1888377
gagcaagaaguuugugagu

SEQ ID NO: 2531449 - RNA, 19 nt, Artificial Sequence
  Description of Artificial Sequence: Synthetic oligonucleotide
  Antisense strand to SEQ ID NO: 2531448
acucacaaacuucuugcuc

SEQ ID NO: 2531450 - RNA, 19 nt, Artificial Sequence
  Description of Artificial Sequence: Synthetic oligonucleotide
  Sense strand starting at position 3261 of SEQ ID NO: 1888377
cgauuccacucagauuuau

SEQ ID NO: 2531451 - RNA, 19 nt, Artificial Sequence
  Description of Artificial Sequence: Synthetic oligonucleotide
  Antisense strand to SEQ ID NO: 2531450
auaaaucugaguggaaucg

SEQ ID NO: 2531452 - RNA, 19 nt, Artificial Sequence
  Description of Artificial Sequence: Synthetic oligonucleotide
  Sense strand starting at position 2898 of SEQ ID NO: 1888377
ccuuuaaucugggcaggca

SEQ ID NO: 2531453 - RNA, 19 nt, Artificial Sequence
  Description of Artificial Sequence: Synthetic oligonucleotide
  Antisense strand to SEQ ID NO: 2531452
ugccugcccagauuaaagg

SEQ ID NO: 2531454 - RNA, 19 nt, Artificial Sequence
  Description of Artificial Sequence: Synthetic oligonucleotide
  Sense strand starting at position 2165 of SEQ ID NO: 1888377
gcauaugacacguacguaa

SEQ ID NO: 2531455 - RNA, 19 nt, Artificial Sequence
  Description of Artificial Sequence: Synthetic oligonucleotide
  Antisense strand to SEQ ID NO: 2531454
uuacguacgugucauaugc

SEQ ID NO: 2531456 - RNA, 19 nt, Artificial Sequence
  Description of Artificial Sequence: Synthetic oligonucleotide
  Sense strand starting at position 3564 of SEQ ID NO: 1888377
ggaauaacguuugccucau

SEQ ID NO: 2531457 - RNA, 19 nt, Artificial Sequence
  Description of Artificial Sequence: Synthetic oligonucleotide
  Antisense strand to SEQ ID NO: 2531456
augaggcaaacguuauucc

SEQ ID NO: 2531458 - RNA, 19 nt, Artificial Sequence
  Description of Artificial Sequence: Synthetic oligonucleotide
  Sense strand starting at position 2342 of SEQ ID NO: 1888377
caugauugcuuguuucuga

SEQ ID NO: 2531459 - RNA, 19 nt, Artificial Sequence
  Description of Artificial Sequence: Synthetic oligonucleotide
  Antisense strand to SEQ ID NO: 2531458
ucagaaacaagcaaucaug

SEQ ID NO: 2531460 - RNA, 19 nt, Artificial Sequence
  Description of Artificial Sequence: Synthetic oligonucleotide
  Sense strand starting at position 2345 of SEQ ID NO: 1888377
gauugcuuguuucugaacu

SEQ ID NO: 2531461 - RNA, 19 nt, Artificial Sequence
  Description of Artificial Sequence: Synthetic oligonucleotide
  Antisense strand to SEQ ID NO: 2531460
aguucagaaacaagcaauc

SEQ ID NO: 2531462 - RNA, 19 nt, Artificial Sequence
  Description of Artificial Sequence: Synthetic oligonucleotide
  Sense strand starting at position 3753 of SEQ ID NO: 1888377
uuguuaacugguggauguu

SEQ ID NO: 2531463 - RNA, 19 nt, Artificial Sequence
  Description of Artificial Sequence: Synthetic oligonucleotide
  Antisense strand to SEQ ID NO: 2531462
aacauccaccaguuaacaa

SEQ ID NO: 2531464 - RNA, 19 nt, Artificial Sequence
  Description of Artificial Sequence: Synthetic oligonucleotide
  Sense strand starting at position 676 of SEQ ID NO: 1888377
uggguucauuuaugaggau

SEQ ID NO: 2531465 - RNA, 19 nt, Artificial Sequence
  Description of Artificial Sequence: Synthetic oligonucleotide
  Antisense strand to SEQ ID NO: 2531464
auccucauaaaugaaccca

SEQ ID NO: 2531466 - RNA, 19 nt, Artificial Sequence
  Description of Artificial Sequence: Synthetic oligonucleotide
  Sense strand starting at position 3563 of SEQ ID NO: 1888377
uggaauaacguuugccuca

SEQ ID NO: 2531467 - RNA, 19 nt, Artificial Sequence
  Description of Artificial Sequence: Synthetic oligonucleotide
  Antisense strand to SEQ ID NO: 2531466
ugaggcaaacguuauucca

SEQ ID NO: 2531468 - RNA, 19 nt, Artificial Sequence
  Description of Artificial Sequence: Synthetic oligonucleotide
  Sense strand starting at position 1590 of SEQ ID NO: 1888377
guuugugaguccuugauca

SEQ ID NO: 2531469 - RNA, 19 nt, Artificial Sequence
  Description of Artificial Sequence: Synthetic oligonucleotide
  Antisense strand to SEQ ID NO: 2531468
ugaucaaggacucacaaac

SEQ ID NO: 2531470 - RNA, 19 nt, Artificial Sequence
  Description of Artificial Sequence: Synthetic oligonucleotide
  Sense strand starting at position 2495 of SEQ ID NO: 1888377
gugugugaauaggcaucau

SEQ ID NO: 2531471 - RNA, 19 nt, Artificial Sequence
  Description of Artificial Sequence: Synthetic oligonucleotide
  Antisense strand to SEQ ID NO: 2531470
augaugccuauucacacac

SEQ ID NO: 2531472 - RNA, 19 nt, Artificial Sequence
  Description of Artificial Sequence: Synthetic oligonucleotide
  Sense strand starting at position 2125 of SEQ ID NO: 1888377
uucccaguauauucguuaa

SEQ ID NO: 2531473 - RNA, 19 nt, Artificial Sequence
  Description of Artificial Sequence: Synthetic oligonucleotide
  Antisense strand to SEQ ID NO: 2531472
uuaacgaauauacugggaa

SEQ ID NO: 2531474 - RNA, 19 nt, Artificial Sequence
  Description of Artificial Sequence: Synthetic oligonucleotide
  Sense strand starting at position 1000 of SEQ ID NO: 1888378
guauuugguguuuaguuau

SEQ ID NO: 2531475 - RNA, 19 nt, Artificial Sequence
  Description of Artificial Sequence: Synthetic oligonucleotide
  Antisense strand to SEQ ID NO: 2531474
auaacuaaacaccaaauac

SEQ ID NO: 2531476 - RNA, 19 nt, Artificial Sequence
  Description of Artificial Sequence: Synthetic oligonucleotide
  Sense strand starting at position 2609 of SEQ ID NO: 1888378
guaaguaggagcuacaaua

SEQ ID NO: 2531477 - RNA, 19 nt, Artificial Sequence
  Description of Artificial Sequence: Synthetic oligonucleotide
  Antisense strand to SEQ ID NO: 2531476
uauuguagcuccuacuuac

SEQ ID NO: 2531478 - RNA, 19 nt, Artificial Sequence
  Description of Artificial Sequence: Synthetic oligonucleotide
  Sense strand starting at position 3658 of SEQ ID NO: 1888378
cuuaucauucuggagguua

SEQ ID NO: 2531479 - RNA, 19 nt, Artificial Sequence
  Description of Artificial Sequence: Synthetic oligonucleotide
  Antisense strand to SEQ ID NO: 2531478
uaaccuccagaaugauaag

SEQ ID NO: 2531480 - RNA, 19 nt, Artificial Sequence
  Description of Artificial Sequence: Synthetic oligonucleotide
  Sense strand starting at position 926 of SEQ ID NO: 1888378
gagcaugguccugacaaca

SEQ ID NO: 2531481 - RNA, 19 nt, Artificial Sequence
  Description of Artificial Sequence: Synthetic oligonucleotide
  Antisense strand to SEQ ID NO: 2531480
uguugucaggaccaugcuc

SEQ ID NO: 2531482 - RNA, 19 nt, Artificial Sequence
  Description of Artificial Sequence: Synthetic oligonucleotide
  Sense strand starting at position 406 of SEQ ID NO: 1888378
ugagauuaugcuggaagac

SEQ ID NO: 2531483 - RNA, 19 nt, Artificial Sequence
  Description of Artificial Sequence: Synthetic oligonucleotide
  Antisense strand to SEQ ID NO: 2531482
gucuuccagcauaaucuca

SEQ ID NO: 2531484 - RNA, 19 nt, Artificial Sequence
  Description of Artificial Sequence: Synthetic oligonucleotide
  Sense strand starting at position 1701 of SEQ ID NO: 1888378
aggagaaucucuucuucca

SEQ ID NO: 2531485 - RNA, 19 nt, Artificial Sequence
  Description of Artificial Sequence: Synthetic oligonucleotide
  Antisense strand to SEQ ID NO: 2531484
uggaagaagagauucuccu

SEQ ID NO: 2531486 - RNA, 19 nt, Artificial Sequence
  Description of Artificial Sequence: Synthetic oligonucleotide
  Sense strand starting at position 3653 of SEQ ID NO: 1888378
augaucuuaucauucugga

SEQ ID NO: 2531487 - RNA, 19 nt, Artificial Sequence
  Description of Artificial Sequence: Synthetic oligonucleotide
  Antisense strand to SEQ ID NO: 2531486
uccagaaugauaagaucau

SEQ ID NO: 2531488 - RNA, 19 nt, Artificial Sequence
  Description of Artificial Sequence: Synthetic oligonucleotide
  Sense strand starting at position 3509 of SEQ ID NO: 1888378
uugcgcaaugcuguacuaa

SEQ ID NO: 2531489 - RNA, 19 nt, Artificial Sequence
  Description of Artificial Sequence: Synthetic oligonucleotide
  Antisense strand to SEQ ID NO: 2531488
uuaguacagcauugcgcaa

SEQ ID NO: 2531490 - RNA, 19 nt, Artificial Sequence
  Description of Artificial Sequence: Synthetic oligonucleotide
  Sense strand starting at position 1316 of SEQ ID NO: 1888378
aggguaucuguaggauaaa

SEQ ID NO: 2531491 - RNA, 19 nt, Artificial Sequence
  Description of Artificial Sequence: Synthetic oligonucleotide
  Antisense strand to SEQ ID NO: 2531490
uuuauccuacagauacccu

SEQ ID NO: 2531492 - RNA, 19 nt, Artificial Sequence
  Description of Artificial Sequence: Synthetic oligonucleotide
  Sense strand starting at position 2517 of SEQ ID NO: 1888378
guaagagcuaggcacuaaa

SEQ ID NO: 2531493 - RNA, 19 nt, Artificial Sequence
  Description of Artificial Sequence: Synthetic oligonucleotide
  Antisense strand to SEQ ID NO: 2531492
uuuagugccuagcucuuac

SEQ ID NO: 2531494 - RNA, 19 nt, Artificial Sequence
  Description of Artificial Sequence: Synthetic oligonucleotide
  Sense strand starting at position 1492 of SEQ ID NO: 1888378
agguaagaaugggcuuuaa

SEQ ID NO: 2531495 - RNA, 19 nt, Artificial Sequence
  Description of Artificial Sequence: Synthetic oligonucleotide
  Antisense strand to SEQ ID NO: 2531494
uuaaagcccauucuuaccu

SEQ ID NO: 2531496 - RNA, 19 nt, Artificial Sequence
  Description of Artificial Sequence: Synthetic oligonucleotide
  Sense strand starting at position 1313 of SEQ ID NO: 1888378
gggaggguaucuguaggau

SEQ ID NO: 2531497 - RNA, 19 nt, Artificial Sequence
  Description of Artificial Sequence: Synthetic oligonucleotide
  Antisense strand to SEQ ID NO: 2531496
auccuacagauacccuccc

SEQ ID NO: 2531498 - RNA, 19 nt, Artificial Sequence
  Description of Artificial Sequence: Synthetic oligonucleotide
  Sense strand starting at position 3660 of SEQ ID NO: 1888378
uaucauucuggagguuaga

SEQ ID NO: 2531499 - RNA, 19 nt, Artificial Sequence
  Description of Artificial Sequence: Synthetic oligonucleotide
  Antisense strand to SEQ ID NO: 2531498
ucuaaccuccagaaugaua

SEQ ID NO: 2531500 - RNA, 19 nt, Artificial Sequence
  Description of Artificial Sequence: Synthetic oligonucleotide
  Sense strand starting at position 1423 of SEQ ID NO: 1888378
uuacacucgccagaaauau

SEQ ID NO: 2531501 - RNA, 19 nt, Artificial Sequence
  Description of Artificial Sequence: Synthetic oligonucleotide
  Antisense strand to SEQ ID NO: 2531500
auauuucuggcgaguguaa

SEQ ID NO: 2531502 - RNA, 19 nt, Artificial Sequence
  Description of Artificial Sequence: Synthetic oligonucleotide
  Sense strand starting at position 1491 of SEQ ID NO: 1888378
gagguaagaaugggcuuua

SEQ ID NO: 2531503 - RNA, 19 nt, Artificial Sequence
  Description of Artificial Sequence: Synthetic oligonucleotide
  Antisense strand to SEQ ID NO: 2531502
uaaagcccauucuuaccuc

SEQ ID NO: 2531504 - RNA, 19 nt, Artificial Sequence
  Description of Artificial Sequence: Synthetic oligonucleotide
  Sense strand starting at position 3921 of SEQ ID NO: 1888378
acaucaagauccguaauca

SEQ ID NO: 2531505 - RNA, 19 nt, Artificial Sequence
  Description of Artificial Sequence: Synthetic oligonucleotide
  Antisense strand to SEQ ID NO: 2531504
ugauuacggaucuugaugu

SEQ ID NO: 2531506 - RNA, 19 nt, Artificial Sequence
  Description of Artificial Sequence: Synthetic oligonucleotide
  Sense strand starting at position 2868 of SEQ ID NO: 1888378
auggcauuaagugauagca

SEQ ID NO: 2531507 - RNA, 19 nt, Artificial Sequence
  Description of Artificial Sequence: Synthetic oligonucleotide
  Antisense strand to SEQ ID NO: 2531506
ugcuaucacuuaaugccau

SEQ ID NO: 2531508 - RNA, 19 nt, Artificial Sequence
  Description of Artificial Sequence: Synthetic oligonucleotide
  Sense strand starting at position 3499 of SEQ ID NO: 1888378
uuccaauuauuugcgcaau

SEQ ID NO: 2531509 - RNA, 19 nt, Artificial Sequence
  Description of Artificial Sequence: Synthetic oligonucleotide
  Antisense strand to SEQ ID NO: 2531508
auugcgcaaauaauuggaa

SEQ ID NO: 2531510 - RNA, 19 nt, Artificial Sequence
  Description of Artificial Sequence: Synthetic oligonucleotide
  Sense strand starting at position 2351 of SEQ ID NO: 1888378
accaaucaauggcuguaaa

SEQ ID NO: 2531511 - RNA, 19 nt, Artificial Sequence
  Description of Artificial Sequence: Synthetic oligonucleotide
  Antisense strand to SEQ ID NO: 2531510
uuuacagccauugauuggu

SEQ ID NO: 2531512 - RNA, 19 nt, Artificial Sequence
  Description of Artificial Sequence: Synthetic oligonucleotide
  Sense strand starting at position 999 of SEQ ID NO: 1888378
uguauuugguguuuaguua

SEQ ID NO: 2531513 - RNA, 19 nt, Artificial Sequence
  Description of Artificial Sequence: Synthetic oligonucleotide
  Antisense strand to SEQ ID NO: 2531512
uaacuaaacaccaaauaca

SEQ ID NO: 2531514 - RNA, 19 nt, Artificial Sequence
  Description of Artificial Sequence: Synthetic oligonucleotide
  Sense strand starting at position 3528 of SEQ ID NO: 1888378
guacaagagaaagguguuu

SEQ ID NO: 2531515 - RNA, 19 nt, Artificial Sequence
  Description of Artificial Sequence: Synthetic oligonucleotide
  Antisense strand to SEQ ID NO: 2531514
aaacaccuuucucuuguac

SEQ ID NO: 2531516 - RNA, 19 nt, Artificial Sequence
  Description of Artificial Sequence: Synthetic oligonucleotide
  Sense strand starting at position 2829 of SEQ ID NO: 1888378
uggguucuuacccagugau

SEQ ID NO: 2531517 - RNA, 19 nt, Artificial Sequence
  Description of Artificial Sequence: Synthetic oligonucleotide
  Antisense strand to SEQ ID NO: 2531516
aucacuggguaagaaccca

SEQ ID NO: 2531518 - RNA, 19 nt, Artificial Sequence
  Description of Artificial Sequence: Synthetic oligonucleotide
  Sense strand starting at position 3681 of SEQ ID NO: 1888378
uccuaaagucaagguauca

SEQ ID NO: 2531519 - RNA, 19 nt, Artificial Sequence
  Description of Artificial Sequence: Synthetic oligonucleotide
  Antisense strand to SEQ ID NO: 2531518
ugauaccuugacuuuagga

SEQ ID NO: 2531520 - RNA, 19 nt, Artificial Sequence
  Description of Artificial Sequence: Synthetic oligonucleotide
  Sense strand starting at position 1420 of SEQ ID NO: 1888378
acauuacacucgccagaaa

SEQ ID NO: 2531521 - RNA, 19 nt, Artificial Sequence
  Description of Artificial Sequence: Synthetic oligonucleotide
  Antisense strand to SEQ ID NO: 2531520
uuucuggcgaguguaaugu

SEQ ID NO: 2531522 - RNA, 19 nt, Artificial Sequence
  Description of Artificial Sequence: Synthetic oligonucleotide
  Sense strand starting at position 2594 of SEQ ID NO: 1888378
acgaucacacagugaguaa

SEQ ID NO: 2531523 - RNA, 19 nt, Artificial Sequence
  Description of Artificial Sequence: Synthetic oligonucleotide
  Antisense strand to SEQ ID NO: 2531522
uuacucacugugugaucgu

SEQ ID NO: 2531524 - RNA, 19 nt, Artificial Sequence
  Description of Artificial Sequence: Synthetic oligonucleotide
  Sense strand starting at position 3533 of SEQ ID NO: 1888378
agagaaagguguuuccucu

SEQ ID NO: 2531525 - RNA, 19 nt, Artificial Sequence
  Description of Artificial Sequence: Synthetic oligonucleotide
  Antisense strand to SEQ ID NO: 2531524
agaggaaacaccuuucucu

SEQ ID NO: 2531526 - RNA, 19 nt, Artificial Sequence
  Description of Artificial Sequence: Synthetic oligonucleotide
  Sense strand starting at position 3567 of SEQ ID NO: 1888378
guaggaaucuuccuguaac

SEQ ID NO: 2531527 - RNA, 19 nt, Artificial Sequence
  Description of Artificial Sequence: Synthetic oligonucleotide
  Antisense strand to SEQ ID NO: 2531526
guuacaggaagauuccuac

SEQ ID NO: 2531528 - RNA, 19 nt, Artificial Sequence
  Description of Artificial Sequence: Synthetic oligonucleotide
  Sense strand starting at position 1965 of SEQ ID NO: 1888378
ggaauugucuucucccuga

SEQ ID NO: 2531529 - RNA, 19 nt, Artificial Sequence
  Description of Artificial Sequence: Synthetic oligonucleotide
  Antisense strand to SEQ ID NO: 2531528
ucagggagaagacaauucc

SEQ ID NO: 2531530 - RNA, 19 nt, Artificial Sequence
  Description of Artificial Sequence: Synthetic oligonucleotide
  Sense strand starting at position 2332 of SEQ ID NO: 1888378
gccuguuacccaggagaac

SEQ ID NO: 2531531 - RNA, 19 nt, Artificial Sequence
  Description of Artificial Sequence: Synthetic oligonucleotide
  Antisense strand to SEQ ID NO: 2531530
guucuccuggguaacaggc

SEQ ID NO: 2531532 - RNA, 19 nt, Artificial Sequence
  Description of Artificial Sequence: Synthetic oligonucleotide
  Sense strand starting at position 3896 of SEQ ID NO: 1888378
cuugguaacccaggcuaau

SEQ ID NO: 2531533 - RNA, 19 nt, Artificial Sequence
  Description of Artificial Sequence: Synthetic oligonucleotide
  Antisense strand to SEQ ID NO: 2531532
auuagccuggguuaccaag

SEQ ID NO: 2531534 - RNA, 19 nt, Artificial Sequence
  Description of Artificial Sequence: Synthetic oligonucleotide
  Sense strand starting at position 1721 of SEQ ID NO: 1888378
gucagcaguguuuacaaua

SEQ ID NO: 2531535 - RNA, 19 nt, Artificial Sequence
  Description of Artificial Sequence: Synthetic oligonucleotide
  Antisense strand to SEQ ID NO: 2531534
uauuguaaacacugcugac

SEQ ID NO: 2531536 - RNA, 19 nt, Artificial Sequence
  Description of Artificial Sequence: Synthetic oligonucleotide
  Sense strand starting at position 2828 of SEQ ID NO: 1888378
uuggguucuuacccaguga

SEQ ID NO: 2531537 - RNA, 19 nt, Artificial Sequence
  Description of Artificial Sequence: Synthetic oligonucleotide
  Antisense strand to SEQ ID NO: 2531536
ucacuggguaagaacccaa

SEQ ID NO: 2531538 - RNA, 19 nt, Artificial Sequence
  Description of Artificial Sequence: Synthetic oligonucleotide
  Sense strand starting at position 3828 of SEQ ID NO: 1888378
accacaucuucgucuugga

SEQ ID NO: 2531539 - RNA, 19 nt, Artificial Sequence
  Description of Artificial Sequence: Synthetic oligonucleotide
  Antisense strand to SEQ ID NO: 2531538
uccaagacgaagauguggu

SEQ ID NO: 2531540 - RNA, 19 nt, Artificial Sequence
  Description of Artificial Sequence: Synthetic oligonucleotide
  Sense strand starting at position 3383 of SEQ ID NO: 1888378
uggccagauuguucucaau

SEQ ID NO: 2531541 - RNA, 19 nt, Artificial Sequence
  Description of Artificial Sequence: Synthetic oligonucleotide
  Antisense strand to SEQ ID NO: 2531540
auugagaacaaucuggcca

SEQ ID NO: 2531542 - RNA, 19 nt, Artificial Sequence
  Description of Artificial Sequence: Synthetic oligonucleotide
  Sense strand starting at position 296 of SEQ ID NO: 1888378
gauucuauaguggguuagu

SEQ ID NO: 2531543 - RNA, 19 nt, Artificial Sequence
  Description of Artificial Sequence: Synthetic oligonucleotide
  Antisense strand to SEQ ID NO: 2531542
acuaacccacuauagaauc

SEQ ID NO: 2531544 - RNA, 19 nt, Artificial Sequence
  Description of Artificial Sequence: Synthetic oligonucleotide
  Sense strand starting at position 1037 of SEQ ID NO: 1888378
auacauaugccauguagug

SEQ ID NO: 2531545 - RNA, 19 nt, Artificial Sequence
  Description of Artificial Sequence: Synthetic oligonucleotide
  Antisense strand to SEQ ID NO: 2531544
cacuacauggcauauguau

SEQ ID NO: 2531546 - RNA, 19 nt, Artificial Sequence
  Description of Artificial Sequence: Synthetic oligonucleotide
  Sense strand starting at position 297 of SEQ ID NO: 1888378
auucuauaguggguuaguu

SEQ ID NO: 2531547 - RNA, 19 nt, Artificial Sequence
  Description of Artificial Sequence: Synthetic oligonucleotide
  Antisense strand to SEQ ID NO: 2531546
aacuaacccacuauagaau

SEQ ID NO: 2531548 - RNA, 19 nt, Artificial Sequence
  Description of Artificial Sequence: Synthetic oligonucleotide
  Sense strand starting at position 3933 of SEQ ID NO: 1888378
guaaucacuucugcaaagu

SEQ ID NO: 2531549 - RNA, 19 nt, Artificial Sequence
  Description of Artificial Sequence: Synthetic oligonucleotide
  Antisense strand to SEQ ID NO: 2531548
acuuugcagaagugauuac

SEQ ID NO: 2531550 - RNA, 19 nt, Artificial Sequence
  Description of Artificial Sequence: Synthetic oligonucleotide
  Sense strand starting at position 3385 of SEQ ID NO: 1888378
gccagauuguucucaaucu

SEQ ID NO: 2531551 - RNA, 19 nt, Artificial Sequence
  Description of Artificial Sequence: Synthetic oligonucleotide
  Antisense strand to SEQ ID NO: 2531550
agauugagaacaaucuggc

SEQ ID NO: 2531552 - RNA, 19 nt, Artificial Sequence
  Description of Artificial Sequence: Synthetic oligonucleotide
  Sense strand starting at position 819 of SEQ ID NO: 1888378
cagacauuggugugaugcu

SEQ ID NO: 2531553 - RNA, 19 nt, Artificial Sequence
  Description of Artificial Sequence: Synthetic oligonucleotide
  Antisense strand to SEQ ID NO: 2531552
agcaucacaccaaugucug

SEQ ID NO: 2531554 - RNA, 19 nt, Artificial Sequence
  Description of Artificial Sequence: Synthetic oligonucleotide
  Sense strand starting at position 3864 of SEQ ID NO: 1888379
aucaguuaccaggaucuuu

SEQ ID NO: 2531555 - RNA, 19 nt, Artificial Sequence
  Description of Artificial Sequence: Synthetic oligonucleotide
  Antisense strand to SEQ ID NO: 2531554
aaagauccugguaacugau

SEQ ID NO: 2531556 - RNA, 19 nt, Artificial Sequence
  Description of Artificial Sequence: Synthetic oligonucleotide
  Sense strand starting at position 1488 of SEQ ID NO: 1888379
cuagauucuggccaugaca

SEQ ID NO: 2531557 - RNA, 19 nt, Artificial Sequence
  Description of Artificial Sequence: Synthetic oligonucleotide
  Antisense strand to SEQ ID NO: 2531556
ugucauggccagaaucuag

SEQ ID NO: 2531558 - RNA, 19 nt, Artificial Sequence
  Description of Artificial Sequence: Synthetic oligonucleotide
  Sense strand starting at position 1763 of SEQ ID NO: 1888379
ugcugauuuagacguuaca

SEQ ID NO: 2531559 - RNA, 19 nt, Artificial Sequence
  Description of Artificial Sequence: Synthetic oligonucleotide
  Antisense strand to SEQ ID NO: 2531558
uguaacgucuaaaucagca

SEQ ID NO: 2531560 - RNA, 19 nt, Artificial Sequence
  Description of Artificial Sequence: Synthetic oligonucleotide
  Sense strand starting at position 3401 of SEQ ID NO: 1888379
guaacucgcauuugagauu

SEQ ID NO: 2531561 - RNA, 19 nt, Artificial Sequence
  Description of Artificial Sequence: Synthetic oligonucleotide
  Antisense strand to SEQ ID NO: 2531560
aaucucaaaugcgaguuac

SEQ ID NO: 2531562 - RNA, 19 nt, Artificial Sequence
  Description of Artificial Sequence: Synthetic oligonucleotide
  Sense strand starting at position 890 of SEQ ID NO: 1888379
guuucuuaugauuaugaug

SEQ ID NO: 2531563 - RNA, 19 nt, Artificial Sequence
  Description of Artificial Sequence: Synthetic oligonucleotide
  Antisense strand to SEQ ID NO: 2531562
caucauaaucauaagaaac

SEQ ID NO: 2531564 - RNA, 19 nt, Artificial Sequence
  Description of Artificial Sequence: Synthetic oligonucleotide
  Sense strand starting at position 1654 of SEQ ID NO: 1888379
aguucaggugcagaaugaa

SEQ ID NO: 2531565 - RNA, 19 nt, Artificial Sequence
  Description of Artificial Sequence: Synthetic oligonucleotide
  Antisense strand to SEQ ID NO: 2531564
uucauucugcaccugaacu

SEQ ID NO: 2531566 - RNA, 19 nt, Artificial Sequence
  Description of Artificial Sequence: Synthetic oligonucleotide
  Sense strand starting at position 1682 of SEQ ID NO: 1888379
gggaauaucuguccauuaa

SEQ ID NO: 2531567 - RNA, 19 nt, Artificial Sequence
  Description of Artificial Sequence: Synthetic oligonucleotide
  Antisense strand to SEQ ID NO: 2531566
uuaauggacagauauuccc

SEQ ID NO: 2531568 - RNA, 19 nt, Artificial Sequence
  Description of Artificial Sequence: Synthetic oligonucleotide
  Sense strand starting at position 3291 of SEQ ID NO: 1888379
ugaccuuaguuaucagaga

SEQ ID NO: 2531569 - RNA, 19 nt, Artificial Sequence
  Description of Artificial Sequence: Synthetic oligonucleotide
  Antisense strand to SEQ ID NO: 2531568
ucucugauaacuaagguca

SEQ ID NO: 2531570 - RNA, 19 nt, Artificial Sequence
  Description of Artificial Sequence: Synthetic oligonucleotide
  Sense strand starting at position 55 of SEQ ID NO: 1888379
agucacaguccaggauaaa

SEQ ID NO: 2531571 - RNA, 19 nt, Artificial Sequence
  Description of Artificial Sequence: Synthetic oligonucleotide
  Antisense strand to SEQ ID NO: 2531570
uuuauccuggacugugacu

SEQ ID NO: 2531572 - RNA, 19 nt, Artificial Sequence
  Description of Artificial Sequence: Synthetic oligonucleotide
  Sense strand starting at position 316 of SEQ ID NO: 1888379
aucuaagaguggucaugaa

SEQ ID NO: 2531573 - RNA, 19 nt, Artificial Sequence
  Description of Artificial Sequence: Synthetic oligonucleotide
  Antisense strand to SEQ ID NO: 2531572
uucaugaccacucuuagau

SEQ ID NO: 2531574 - RNA, 19 nt, Artificial Sequence
  Description of Artificial Sequence: Synthetic oligonucleotide
  Sense strand starting at position 1216 of SEQ ID NO: 1888379
uuuaauagugaucagagcu

SEQ ID NO: 2531575 - RNA, 19 nt, Artificial Sequence
  Description of Artificial Sequence: Synthetic oligonucleotide
  Antisense strand to SEQ ID NO: 2531574
agcucugaucacuauuaaa

SEQ ID NO: 2531576 - RNA, 19 nt, Artificial Sequence
  Description of Artificial Sequence: Synthetic oligonucleotide
  Sense strand starting at position 3510 of SEQ ID NO: 1888379
gggaaaugugaccaguguu

SEQ ID NO: 2531577 - RNA, 19 nt, Artificial Sequence
  Description of Artificial Sequence: Synthetic oligonucleotide
  Antisense strand to SEQ ID NO: 2531576
aacacuggucacauuuccc

SEQ ID NO: 2531578 - RNA, 19 nt, Artificial Sequence
  Description of Artificial Sequence: Synthetic oligonucleotide
  Sense strand starting at position 1490 of SEQ ID NO: 1888379
agauucuggccaugacaag

SEQ ID NO: 2531579 - RNA, 19 nt, Artificial Sequence
  Description of Artificial Sequence: Synthetic oligonucleotide
  Antisense strand to SEQ ID NO: 2531578
cuugucauggccagaaucu

SEQ ID NO: 2531580 - RNA, 19 nt, Artificial Sequence
  Description of Artificial Sequence: Synthetic oligonucleotide
  Sense strand starting at position 453 of SEQ ID NO: 1888379
cuccaucacugugcuauuu

SEQ ID NO: 2531581 - RNA, 19 nt, Artificial Sequence
  Description of Artificial Sequence: Synthetic oligonucleotide
  Antisense strand to SEQ ID NO: 2531580
aaauagcacagugauggag

SEQ ID NO: 2531582 - RNA, 19 nt, Artificial Sequence
  Description of Artificial Sequence: Synthetic oligonucleotide
  Sense strand starting at position 834 of SEQ ID NO: 1888379
ggugaaauauuaucaguac

SEQ ID NO: 2531583 - RNA, 19 nt, Artificial Sequence
  Description of Artificial Sequence: Synthetic oligonucleotide
  Antisense strand to SEQ ID NO: 2531582
guacugauaauauuucacc

SEQ ID NO: 2531584 - RNA, 19 nt, Artificial Sequence
  Description of Artificial Sequence: Synthetic oligonucleotide
  Sense strand starting at position 1018 of SEQ ID NO: 1888379
aggaaaguaucuccaguac

SEQ ID NO: 2531585 - RNA, 19 nt, Artificial Sequence
  Description of Artificial Sequence: Synthetic oligonucleotide
  Antisense strand to SEQ ID NO: 2531584
guacuggagauacuuuccu

SEQ ID NO: 2531586 - RNA, 19 nt, Artificial Sequence
  Description of Artificial Sequence: Synthetic oligonucleotide
  Sense strand starting at position 313 of SEQ ID NO: 1888379
caaaucuaagaguggucau

SEQ ID NO: 2531587 - RNA, 19 nt, Artificial Sequence
  Description of Artificial Sequence: Synthetic oligonucleotide
  Antisense strand to SEQ ID NO: 2531586
augaccacucuuagauuug

SEQ ID NO: 2531588 - RNA, 19 nt, Artificial Sequence
  Description of Artificial Sequence: Synthetic oligonucleotide
  Sense strand starting at position 2150 of SEQ ID NO: 1888379
agaauuuacuuggauccua

SEQ ID NO: 2531589 - RNA, 19 nt, Artificial Sequence
  Description of Artificial Sequence: Synthetic oligonucleotide
  Antisense strand to SEQ ID NO: 2531588
uaggauccaaguaaauucu

SEQ ID NO: 2531590 - RNA, 19 nt, Artificial Sequence
  Description of Artificial Sequence: Synthetic oligonucleotide
  Sense strand starting at position 2540 of SEQ ID NO: 1888379
gggcauaugcaugauuauu

SEQ ID NO: 2531591 - RNA, 19 nt, Artificial Sequence
  Description of Artificial Sequence: Synthetic oligonucleotide
  Antisense strand to SEQ ID NO: 2531590
aauaaucaugcauaugccc

SEQ ID NO: 2531592 - RNA, 19 nt, Artificial Sequence
  Description of Artificial Sequence: Synthetic oligonucleotide
  Sense strand starting at position 636 of SEQ ID NO: 1888379
gugguuuggcuggauaaga

SEQ ID NO: 2531593 - RNA, 19 nt, Artificial Sequence
  Description of Artificial Sequence: Synthetic oligonucleotide
  Antisense strand to SEQ ID NO: 2531592
ucuuauccagccaaaccac

SEQ ID NO: 2531594 - RNA, 19 nt, Artificial Sequence
  Description of Artificial Sequence: Synthetic oligonucleotide
  Sense strand starting at position 3188 of SEQ ID NO: 1888379
uuuguuauucugggaagau

SEQ ID NO: 2531595 - RNA, 19 nt, Artificial Sequence
  Description of Artificial Sequence: Synthetic oligonucleotide
  Antisense strand to SEQ ID NO: 2531594
aucuucccagaauaacaaa

SEQ ID NO: 2531596 - RNA, 19 nt, Artificial Sequence
  Description of Artificial Sequence: Synthetic oligonucleotide
  Sense strand starting at position 3770 of SEQ ID NO: 1888379
uguauacugcauggagaga

SEQ ID NO: 2531597 - RNA, 19 nt, Artificial Sequence
  Description of Artificial Sequence: Synthetic oligonucleotide
  Antisense strand to SEQ ID NO: 2531596
ucucuccaugcaguauaca

SEQ ID NO: 2531598 - RNA, 19 nt, Artificial Sequence
  Description of Artificial Sequence: Synthetic oligonucleotide
  Sense strand starting at position 510 of SEQ ID NO: 1888379
cgcagagcucaacaacaua

SEQ ID NO: 2531599 - RNA, 19 nt, Artificial Sequence
  Description of Artificial Sequence: Synthetic oligonucleotide
  Antisense strand to SEQ ID NO: 2531598
uauguuguugagcucugcg

SEQ ID NO: 2531600 - RNA, 19 nt, Artificial Sequence
  Description of Artificial Sequence: Synthetic oligonucleotide
  Sense strand starting at position 1487 of SEQ ID NO: 1888379
acuagauucuggccaugac

SEQ ID NO: 2531601 - RNA, 19 nt, Artificial Sequence
  Description of Artificial Sequence: Synthetic oligonucleotide
  Antisense strand to SEQ ID NO: 2531600
gucauggccagaaucuagu

SEQ ID NO: 2531602 - RNA, 19 nt, Artificial Sequence
  Description of Artificial Sequence: Synthetic oligonucleotide
  Sense strand starting at position 229 of SEQ ID NO: 1888379
ucaguuucuuaaguaagag

SEQ ID NO: 2531603 - RNA, 19 nt, Artificial Sequence
  Description of Artificial Sequence: Synthetic oligonucleotide
  Antisense strand to SEQ ID NO: 2531602
cucuuacuuaagaaacuga

SEQ ID NO: 2531604 - RNA, 19 nt, Artificial Sequence
  Description of Artificial Sequence: Synthetic oligonucleotide
  Sense strand starting at position 544 of SEQ ID NO: 1888379
agagaugaugggcguugaa

SEQ ID NO: 2531605 - RNA, 19 nt, Artificial Sequence
  Description of Artificial Sequence: Synthetic oligonucleotide
  Antisense strand to SEQ ID NO: 2531604
uucaacgcccaucaucucu

SEQ ID NO: 2531606 - RNA, 19 nt, Artificial Sequence
  Description of Artificial Sequence: Synthetic oligonucleotide
  Sense strand starting at position 388 of SEQ ID NO: 1888379
aggcuaugugcccacagaa

SEQ ID NO: 2531607 - RNA, 19 nt, Artificial Sequence
  Description of Artificial Sequence: Synthetic oligonucleotide
  Antisense strand to SEQ ID NO: 2531606
uucugugggcacauagccu

SEQ ID NO: 2531608 - RNA, 19 nt, Artificial Sequence
  Description of Artificial Sequence: Synthetic oligonucleotide
  Sense strand starting at position 1068 of SEQ ID NO: 1888379
ggguaagcuacugaugcua

SEQ ID NO: 2531609 - RNA, 19 nt, Artificial Sequence
  Description of Artificial Sequence: Synthetic oligonucleotide
  Antisense strand to SEQ ID NO: 2531608
uagcaucaguagcuuaccc

SEQ ID NO: 2531610 - RNA, 19 nt, Artificial Sequence
  Description of Artificial Sequence: Synthetic oligonucleotide
  Sense strand starting at position 3050 of SEQ ID NO: 1888379
gccacugcucaguaacaaa

SEQ ID NO: 2531611 - RNA, 19 nt, Artificial Sequence
  Description of Artificial Sequence: Synthetic oligonucleotide
  Antisense strand to SEQ ID NO: 2531610
uuuguuacugagcaguggc

SEQ ID NO: 2531612 - RNA, 19 nt, Artificial Sequence
  Description of Artificial Sequence: Synthetic oligonucleotide
  Sense strand starting at position 1215 of SEQ ID NO: 1888379
cuuuaauagugaucagagc

SEQ ID NO: 2531613 - RNA, 19 nt, Artificial Sequence
  Description of Artificial Sequence: Synthetic oligonucleotide
  Antisense strand to SEQ ID NO: 2531612
gcucugaucacuauuaaag

SEQ ID NO: 2531614 - RNA, 19 nt, Artificial Sequence
  Description of Artificial Sequence: Synthetic oligonucleotide
  Sense strand starting at position 1852 of SEQ ID NO: 1888379
uaaucauugucagcugaga

SEQ ID NO: 2531615 - RNA, 19 nt, Artificial Sequence
  Description of Artificial Sequence: Synthetic oligonucleotide
  Antisense strand to SEQ ID NO: 2531614
ucucagcugacaaugauua

SEQ ID NO: 2531616 - RNA, 19 nt, Artificial Sequence
  Description of Artificial Sequence: Synthetic oligonucleotide
  Sense strand starting at position 1206 of SEQ ID NO: 1888379
uguuuccaucuuuaauagu

SEQ ID NO: 2531617 - RNA, 19 nt, Artificial Sequence
  Description of Artificial Sequence: Synthetic oligonucleotide
  Antisense strand to SEQ ID NO: 2531616
acuauuaaagauggaaaca

SEQ ID NO: 2531618 - RNA, 19 nt, Artificial Sequence
  Description of Artificial Sequence: Synthetic oligonucleotide
  Sense strand starting at position 2093 of SEQ ID NO: 1888379
ugccuccagcaguaagaua

SEQ ID NO: 2531619 - RNA, 19 nt, Artificial Sequence
  Description of Artificial Sequence: Synthetic oligonucleotide
  Antisense strand to SEQ ID NO: 2531618
uaucuuacugcuggaggca

SEQ ID NO: 2531620 - RNA, 19 nt, Artificial Sequence
  Description of Artificial Sequence: Synthetic oligonucleotide
  Sense strand starting at position 1166 of SEQ ID NO: 1888379
aggcucaugcagcagaauu

SEQ ID NO: 2531621 - RNA, 19 nt, Artificial Sequence
  Description of Artificial Sequence: Synthetic oligonucleotide
  Antisense strand to SEQ ID NO: 2531620
aauucugcugcaugagccu

SEQ ID NO: 2531622 - RNA, 19 nt, Artificial Sequence
  Description of Artificial Sequence: Synthetic oligonucleotide
  Sense strand starting at position 3677 of SEQ ID NO: 1888379
augacuuacggucagcauu

SEQ ID NO: 2531623 - RNA, 19 nt, Artificial Sequence
  Description of Artificial Sequence: Synthetic oligonucleotide
  Antisense strand to SEQ ID NO: 2531622
aaugcugaccguaagucau

SEQ ID NO: 2531624 - RNA, 19 nt, Artificial Sequence
  Description of Artificial Sequence: Synthetic oligonucleotide
  Sense strand starting at position 2943 of SEQ ID NO: 1888379
gaaauauuguggguuuccu

SEQ ID NO: 2531625 - RNA, 19 nt, Artificial Sequence
  Description of Artificial Sequence: Synthetic oligonucleotide
  Antisense strand to SEQ ID NO: 2531624
aggaaacccacaauauuuc

SEQ ID NO: 2531626 - RNA, 19 nt, Artificial Sequence
  Description of Artificial Sequence: Synthetic oligonucleotide
  Sense strand starting at position 2808 of SEQ ID NO: 1888379
ugugcuaugccuuaauaaa

SEQ ID NO: 2531627 - RNA, 19 nt, Artificial Sequence
  Description of Artificial Sequence: Synthetic oligonucleotide
  Antisense strand to SEQ ID NO: 2531626
uuuauuaaggcauagcaca

SEQ ID NO: 2531628 - RNA, 19 nt, Artificial Sequence
  Description of Artificial Sequence: Synthetic oligonucleotide
  Sense strand starting at position 444 of SEQ ID NO: 1888379
ugugaaacgcuccaucacu

SEQ ID NO: 2531629 - RNA, 19 nt, Artificial Sequence
  Description of Artificial Sequence: Synthetic oligonucleotide
  Antisense strand to SEQ ID NO: 2531628
agugauggagcguuucaca

SEQ ID NO: 2531630 - RNA, 19 nt, Artificial Sequence
  Description of Artificial Sequence: Synthetic oligonucleotide
  Sense strand starting at position 632 of SEQ ID NO: 1888379
aagagugguuuggcuggau

SEQ ID NO: 2531631 - RNA, 19 nt, Artificial Sequence
  Description of Artificial Sequence: Synthetic oligonucleotide
  Antisense strand to SEQ ID NO: 2531630
auccagccaaaccacucuu

SEQ ID NO: 2531632 - RNA, 19 nt, Artificial Sequence
  Description of Artificial Sequence: Synthetic oligonucleotide
  Sense strand starting at position 1016 of SEQ ID NO: 1888379
gcaggaaaguaucuccagu

SEQ ID NO: 2531633 - RNA, 19 nt, Artificial Sequence
  Description of Artificial Sequence: Synthetic oligonucleotide
  Antisense strand to SEQ ID NO: 2531632
acuggagauacuuuccugc

SEQ ID NO: 2531634 - RNA, 19 nt, Artificial Sequence
  Description of Artificial Sequence: Synthetic oligonucleotide
  Sense strand starting at position 3406 of SEQ ID NO: 1888382
ggacaucauuauguugaaa

SEQ ID NO: 2531635 - RNA, 19 nt, Artificial Sequence
  Description of Artificial Sequence: Synthetic oligonucleotide
  Antisense strand to SEQ ID NO: 2531634
uuucaacauaaugaugucc

SEQ ID NO: 2531636 - RNA, 19 nt, Artificial Sequence
  Description of Artificial Sequence: Synthetic oligonucleotide
  Sense strand starting at position 3409 of SEQ ID NO: 1888382
caucauuauguugaaagug

SEQ ID NO: 2531637 - RNA, 19 nt, Artificial Sequence
  Description of Artificial Sequence: Synthetic oligonucleotide
  Antisense strand to SEQ ID NO: 2531636
cacuuucaacauaaugaug

SEQ ID NO: 2531638 - RNA, 19 nt, Artificial Sequence
  Description of Artificial Sequence: Synthetic oligonucleotide
  Sense strand starting at position 3492 of SEQ ID NO: 1888382
ggcuuucuuguagaggaaa

SEQ ID NO: 2531639 - RNA, 19 nt, Artificial Sequence
  Description of Artificial Sequence: Synthetic oligonucleotide
  Antisense strand to SEQ ID NO: 2531638
uuuccucuacaagaaagcc

SEQ ID NO: 2531640 - RNA, 19 nt, Artificial Sequence
  Description of Artificial Sequence: Synthetic oligonucleotide
  Sense strand starting at position 3397 of SEQ ID NO: 1888382
ucuuauuacggacaucauu

SEQ ID NO: 2531641 - RNA, 19 nt, Artificial Sequence
  Description of Artificial Sequence: Synthetic oligonucleotide
  Antisense strand to SEQ ID NO: 2531640
aaugauguccguaauaaga

SEQ ID NO: 2531642 - RNA, 19 nt, Artificial Sequence
  Description of Artificial Sequence: Synthetic oligonucleotide
  Sense strand starting at position 2487 of SEQ ID NO: 1888382
ugccguugcaggcuugaau

SEQ ID NO: 2531643 - RNA, 19 nt, Artificial Sequence
  Description of Artificial Sequence: Synthetic oligonucleotide
  Antisense strand to SEQ ID NO: 2531642
auucaagccugcaacggca

SEQ ID NO: 2531644 - RNA, 19 nt, Artificial Sequence
  Description of Artificial Sequence: Synthetic oligonucleotide
  Sense strand starting at position 3940 of SEQ ID NO: 1888382
auggguaacucagugagau

SEQ ID NO: 2531645 - RNA, 19 nt, Artificial Sequence
  Description of Artificial Sequence: Synthetic oligonucleotide
  Antisense strand to SEQ ID NO: 2531644
aucucacugaguuacccau

SEQ ID NO: 2531646 - RNA, 19 nt, Artificial Sequence
  Description of Artificial Sequence: Synthetic oligonucleotide
  Sense strand starting at position 3390 of SEQ ID NO: 1888382
gaccauaucuuauuacgga

SEQ ID NO: 2531647 - RNA, 19 nt, Artificial Sequence
  Description of Artificial Sequence: Synthetic oligonucleotide
  Antisense strand to SEQ ID NO: 2531646
uccguaauaagauaugguc

SEQ ID NO: 2531648 - RNA, 19 nt, Artificial Sequence
  Description of Artificial Sequence: Synthetic oligonucleotide
  Sense strand starting at position 2784 of SEQ ID NO: 1888382
ugcacaaaguuauugaaga

SEQ ID NO: 2531649 - RNA, 19 nt, Artificial Sequence
  Description of Artificial Sequence: Synthetic oligonucleotide
  Antisense strand to SEQ ID NO: 2531648
ucuucaauaacuuugugca

SEQ ID NO: 2531650 - RNA, 19 nt, Artificial Sequence
  Description of Artificial Sequence: Synthetic oligonucleotide
  Sense strand starting at position 3025 of SEQ ID NO: 1888382
augcaaauguuacucagaa

SEQ ID NO: 2531651 - RNA, 19 nt, Artificial Sequence
  Description of Artificial Sequence: Synthetic oligonucleotide
  Antisense strand to SEQ ID NO: 2531650
uucugaguaacauuugcau

SEQ ID NO: 2531652 - RNA, 19 nt, Artificial Sequence
  Description of Artificial Sequence: Synthetic oligonucleotide
  Sense strand starting at position 3640 of SEQ ID NO: 1888382
guacuuuagaaaugagguu

SEQ ID NO: 2531653 - RNA, 19 nt, Artificial Sequence
  Description of Artificial Sequence: Synthetic oligonucleotide
  Antisense strand to SEQ ID NO: 2531652
aaccucauuucuaaaguac

SEQ ID NO: 2531654 - RNA, 19 nt, Artificial Sequence
  Description of Artificial Sequence: Synthetic oligonucleotide
  Sense strand starting at position 1881 of SEQ ID NO: 1888382
ugacaagugcccgguauuu

SEQ ID NO: 2531655 - RNA, 19 nt, Artificial Sequence
  Description of Artificial Sequence: Synthetic oligonucleotide
  Antisense strand to SEQ ID NO: 2531654
aaauaccgggcacuuguca

SEQ ID NO: 2531656 - RNA, 19 nt, Artificial Sequence
  Description of Artificial Sequence: Synthetic oligonucleotide
  Sense strand starting at position 3941 of SEQ ID NO: 1888382
uggguaacucagugagauc

SEQ ID NO: 2531657 - RNA, 19 nt, Artificial Sequence
  Description of Artificial Sequence: Synthetic oligonucleotide
  Antisense strand to SEQ ID NO: 2531656
gaucucacugaguuaccca

SEQ ID NO: 2531658 - RNA, 19 nt, Artificial Sequence
  Description of Artificial Sequence: Synthetic oligonucleotide
  Sense strand starting at position 2895 of SEQ ID NO: 1888382
ucucauccuguauauguaa

SEQ ID NO: 2531659 - RNA, 19 nt, Artificial Sequence
  Description of Artificial Sequence: Synthetic oligonucleotide
  Antisense strand to SEQ ID NO: 2531658
uuacauauacaggaugaga

SEQ ID NO: 2531660 - RNA, 19 nt, Artificial Sequence
  Description of Artificial Sequence: Synthetic oligonucleotide
  Sense strand starting at position 3238 of SEQ ID NO: 1888382
guaagauuauaguucuuag

SEQ ID NO: 2531661 - RNA, 19 nt, Artificial Sequence
  Description of Artificial Sequence: Synthetic oligonucleotide
  Antisense strand to SEQ ID NO: 2531660
cuaagaacuauaaucuuac

SEQ ID NO: 2531662 - RNA, 19 nt, Artificial Sequence
  Description of Artificial Sequence: Synthetic oligonucleotide
  Sense strand starting at position 3806 of SEQ ID NO: 1888382
accagugacucuucuuaua

SEQ ID NO: 2531663 - RNA, 19 nt, Artificial Sequence
  Description of Artificial Sequence: Synthetic oligonucleotide
  Antisense strand to SEQ ID NO: 2531662
uauaagaagagucacuggu

SEQ ID NO: 2531664 - RNA, 19 nt, Artificial Sequence
  Description of Artificial Sequence: Synthetic oligonucleotide
  Sense strand starting at position 3026 of SEQ ID NO: 1888382
ugcaaauguuacucagaau

SEQ ID NO: 2531665 - RNA, 19 nt, Artificial Sequence
  Description of Artificial Sequence: Synthetic oligonucleotide
  Antisense strand to SEQ ID NO: 2531664
auucugaguaacauuugca

SEQ ID NO: 2531666 - RNA, 19 nt, Artificial Sequence
  Description of Artificial Sequence: Synthetic oligonucleotide
  Sense strand starting at position 341 of SEQ ID NO: 1888382
gggugaguccuagagcuug

SEQ ID NO: 2531667 - RNA, 19 nt, Artificial Sequence
  Description of Artificial Sequence: Synthetic oligonucleotide
  Antisense strand to SEQ ID NO: 2531666
caagcucuaggacucaccc

SEQ ID NO: 2531668 - RNA, 19 nt, Artificial Sequence
  Description of Artificial Sequence: Synthetic oligonucleotide
  Sense strand starting at position 2613 of SEQ ID NO: 1888382
ugucuaacugguuagaugu

SEQ ID NO: 2531669 - RNA, 19 nt, Artificial Sequence
  Description of Artificial Sequence: Synthetic oligonucleotide
  Antisense strand to SEQ ID NO: 2531668
acaucuaaccaguuagaca

SEQ ID NO: 2531670 - RNA, 19 nt, Artificial Sequence
  Description of Artificial Sequence: Synthetic oligonucleotide
  Sense strand starting at position 1937 of SEQ ID NO: 1888382
gugaaagugguccaguauu

SEQ ID NO: 2531671 - RNA, 19 nt, Artificial Sequence
  Description of Artificial Sequence: Synthetic oligonucleotide
  Antisense strand to SEQ ID NO: 2531670
aauacuggaccacuuucac

SEQ ID NO: 2531672 - RNA, 19 nt, Artificial Sequence
  Description of Artificial Sequence: Synthetic oligonucleotide
  Sense strand starting at position 3538 of SEQ ID NO: 1888382
aaaguugaagucuguuaua

SEQ ID NO: 2531673 - RNA, 19 nt, Artificial Sequence
  Description of Artificial Sequence: Synthetic oligonucleotide
  Antisense strand to SEQ ID NO: 2531672
uauaacagacuucaacuuu

SEQ ID NO: 2531674 - RNA, 19 nt, Artificial Sequence
  Description of Artificial Sequence: Synthetic oligonucleotide
  Sense strand starting at position 2612 of SEQ ID NO: 1888382
cugucuaacugguuagaug

SEQ ID NO: 2531675 - RNA, 19 nt, Artificial Sequence
  Description of Artificial Sequence: Synthetic oligonucleotide
  Antisense strand to SEQ ID NO: 2531674
caucuaaccaguuagacag

SEQ ID NO: 2531676 - RNA, 19 nt, Artificial Sequence
  Description of Artificial Sequence: Synthetic oligonucleotide
  Sense strand starting at position 1394 of SEQ ID NO: 1888382
ggauaagacucccucgguu

SEQ ID NO: 2531677 - RNA, 19 nt, Artificial Sequence
  Description of Artificial Sequence: Synthetic oligonucleotide
  Antisense strand to SEQ ID NO: 2531676
aaccgagggagucuuaucc

SEQ ID NO: 2531678 - RNA, 19 nt, Artificial Sequence
  Description of Artificial Sequence: Synthetic oligonucleotide
  Sense strand starting at position 1935 of SEQ ID NO: 1888382
aagugaaagugguccagua

SEQ ID NO: 2531679 - RNA, 19 nt, Artificial Sequence
  Description of Artificial Sequence: Synthetic oligonucleotide
  Antisense strand to SEQ ID NO: 2531678
uacuggaccacuuucacuu

SEQ ID NO: 2531680 - RNA, 19 nt, Artificial Sequence
  Description of Artificial Sequence: Synthetic oligonucleotide
  Sense strand starting at position 2639 of SEQ ID NO: 1888382
guugcaagugccguguuua

SEQ ID NO: 2531681 - RNA, 19 nt, Artificial Sequence
  Description of Artificial Sequence: Synthetic oligonucleotide
  Antisense strand to SEQ ID NO: 2531680
uaaacacggcacuugcaac

SEQ ID NO: 2531682 - RNA, 19 nt, Artificial Sequence
  Description of Artificial Sequence: Synthetic oligonucleotide
  Sense strand starting at position 510 of SEQ ID NO: 1888382
aggcuugucugaguggaaa

SEQ ID NO: 2531683 - RNA, 19 nt, Artificial Sequence
  Description of Artificial Sequence: Synthetic oligonucleotide
  Antisense strand to SEQ ID NO: 2531682
uuuccacucagacaagccu

SEQ ID NO: 2531684 - RNA, 19 nt, Artificial Sequence
  Description of Artificial Sequence: Synthetic oligonucleotide
  Sense strand starting at position 3470 of SEQ ID NO: 1888382
guuuauuagccuuacucac

SEQ ID NO: 2531685 - RNA, 19 nt, Artificial Sequence
  Description of Artificial Sequence: Synthetic oligonucleotide
  Antisense strand to SEQ ID NO: 2531684
gugaguaaggcuaauaaac

SEQ ID NO: 2531686 - RNA, 19 nt, Artificial Sequence
  Description of Artificial Sequence: Synthetic oligonucleotide
  Sense strand starting at position 1397 of SEQ ID NO: 1888382
uaagacucccucgguuaua

SEQ ID NO: 2531687 - RNA, 19 nt, Artificial Sequence
  Description of Artificial Sequence: Synthetic oligonucleotide
  Antisense strand to SEQ ID NO: 2531686
uauaaccgagggagucuua

SEQ ID NO: 2531688 - RNA, 19 nt, Artificial Sequence
  Description of Artificial Sequence: Synthetic oligonucleotide
  Sense strand starting at position 1396 of SEQ ID NO: 1888382
auaagacucccucgguuau

SEQ ID NO: 2531689 - RNA, 19 nt, Artificial Sequence
  Description of Artificial Sequence: Synthetic oligonucleotide
  Antisense strand to SEQ ID NO: 2531688
auaaccgagggagucuuau

SEQ ID NO: 2531690 - RNA, 19 nt, Artificial Sequence
  Description of Artificial Sequence: Synthetic oligonucleotide
  Sense strand starting at position 2619 of SEQ ID NO: 1888382
acugguuagaugugagcua

SEQ ID NO: 2531691 - RNA, 19 nt, Artificial Sequence
  Description of Artificial Sequence: Synthetic oligonucleotide
  Antisense strand to SEQ ID NO: 2531690
uagcucacaucuaaccagu

SEQ ID NO: 2531692 - RNA, 19 nt, Artificial Sequence
  Description of Artificial Sequence: Synthetic oligonucleotide
  Sense strand starting at position 2176 of SEQ ID NO: 1888382
uacuguuuagcuugauuag

SEQ ID NO: 2531693 - RNA, 19 nt, Artificial Sequence
  Description of Artificial Sequence: Synthetic oligonucleotide
  Antisense strand to SEQ ID NO: 2531692
cuaaucaagcuaaacagua

SEQ ID NO: 2531694 - RNA, 19 nt, Artificial Sequence
  Description of Artificial Sequence: Synthetic oligonucleotide
  Sense strand starting at position 2610 of SEQ ID NO: 1888382
agcugucuaacugguuaga

SEQ ID NO: 2531695 - RNA, 19 nt, Artificial Sequence
  Description of Artificial Sequence: Synthetic oligonucleotide
  Antisense strand to SEQ ID NO: 2531694
ucuaaccaguuagacagcu

SEQ ID NO: 2531696 - RNA, 19 nt, Artificial Sequence
  Description of Artificial Sequence: Synthetic oligonucleotide
  Sense strand starting at position 2174 of SEQ ID NO: 1888382
acuacuguuuagcuugauu

SEQ ID NO: 2531697 - RNA, 19 nt, Artificial Sequence
  Description of Artificial Sequence: Synthetic oligonucleotide
  Antisense strand to SEQ ID NO: 2531696
aaucaagcuaaacaguagu

SEQ ID NO: 2531698 - RNA, 19 nt, Artificial Sequence
  Description of Artificial Sequence: Synthetic oligonucleotide
  Sense strand starting at position 3809 of SEQ ID NO: 1888382
agugacucuucuuauauuu

SEQ ID NO: 2531699 - RNA, 19 nt, Artificial Sequence
  Description of Artificial Sequence: Synthetic oligonucleotide
  Antisense strand to SEQ ID NO: 2531698
aaauauaagaagagucacu

SEQ ID NO: 2531700 - RNA, 19 nt, Artificial Sequence
  Description of Artificial Sequence: Synthetic oligonucleotide
  Sense strand starting at position 2608 of SEQ ID NO: 1888382
ugagcugucuaacugguua

SEQ ID NO: 2531701 - RNA, 19 nt, Artificial Sequence
  Description of Artificial Sequence: Synthetic oligonucleotide
  Antisense strand to SEQ ID NO: 2531700
uaaccaguuagacagcuca

SEQ ID NO: 2531702 - RNA, 19 nt, Artificial Sequence
  Description of Artificial Sequence: Synthetic oligonucleotide
  Sense strand starting at position 2693 of SEQ ID NO: 1888382
ggauucuuagucggccuau

SEQ ID NO: 2531703 - RNA, 19 nt, Artificial Sequence
  Description of Artificial Sequence: Synthetic oligonucleotide
  Antisense strand to SEQ ID NO: 2531702
auaggccgacuaagaaucc

SEQ ID NO: 2531704 - RNA, 19 nt, Artificial Sequence
  Description of Artificial Sequence: Synthetic oligonucleotide
  Sense strand starting at position 3952 of SEQ ID NO: 1888382
gugagaucccagcgcuaca

SEQ ID NO: 2531705 - RNA, 19 nt, Artificial Sequence
  Description of Artificial Sequence: Synthetic oligonucleotide
  Antisense strand to SEQ ID NO: 2531704
uguagcgcugggaucucac

SEQ ID NO: 2531706 - RNA, 19 nt, Artificial Sequence
  Description of Artificial Sequence: Synthetic oligonucleotide
  Sense strand starting at position 1880 of SEQ ID NO: 1888382
cugacaagugcccgguauu

SEQ ID NO: 2531707 - RNA, 19 nt, Artificial Sequence
  Description of Artificial Sequence: Synthetic oligonucleotide
  Antisense strand to SEQ ID NO: 2531706
aauaccgggcacuugucag

SEQ ID NO: 2531708 - RNA, 19 nt, Artificial Sequence
  Description of Artificial Sequence: Synthetic oligonucleotide
  Sense strand starting at position 3417 of SEQ ID NO: 1888382
uguugaaagugauacaaau

SEQ ID NO: 2531709 - RNA, 19 nt, Artificial Sequence
  Description of Artificial Sequence: Synthetic oligonucleotide
  Antisense strand to SEQ ID NO: 2531708
auuuguaucacuuucaaca

SEQ ID NO: 2531710 - RNA, 19 nt, Artificial Sequence
  Description of Artificial Sequence: Synthetic oligonucleotide
  Sense strand starting at position 3230 of SEQ ID NO: 1888382
cagaauguguaagauuaua

SEQ ID NO: 2531711 - RNA, 19 nt, Artificial Sequence
  Description of Artificial Sequence: Synthetic oligonucleotide
  Antisense strand to SEQ ID NO: 2531710
uauaaucuuacacauucug

SEQ ID NO: 2531712 - RNA, 19 nt, Artificial Sequence
  Description of Artificial Sequence: Synthetic oligonucleotide
  Sense strand starting at position 939 of SEQ ID NO: 1888382
aaugcaucugcggguuacu

SEQ ID NO: 2531713 - RNA, 19 nt, Artificial Sequence
  Description of Artificial Sequence: Synthetic oligonucleotide
  Antisense strand to SEQ ID NO: 2531712
aguaacccgcagaugcauu

SEQ ID NO: 2531714 - RNA, 19 nt, Artificial Sequence
  Description of Artificial Sequence: Synthetic oligonucleotide
  Sense strand starting at position 791 of SEQ ID NO: 1888383
gucugcuuauaauuugauu

SEQ ID NO: 2531715 - RNA, 19 nt, Artificial Sequence
  Description of Artificial Sequence: Synthetic oligonucleotide
  Antisense strand to SEQ ID NO: 2531714
aaucaaauuauaagcagac

SEQ ID NO: 2531716 - RNA, 19 nt, Artificial Sequence
  Description of Artificial Sequence: Synthetic oligonucleotide
  Sense strand starting at position 2880 of SEQ ID NO: 1888383
ccacacauccauugggaua

SEQ ID NO: 2531717 - RNA, 19 nt, Artificial Sequence
  Description of Artificial Sequence: Synthetic oligonucleotide
  Antisense strand to SEQ ID NO: 2531716
uaucccaauggaugugugg

SEQ ID NO: 2531718 - RNA, 19 nt, Artificial Sequence
  Description of Artificial Sequence: Synthetic oligonucleotide
  Sense strand starting at position 1265 of SEQ ID NO: 1888383
auugaauggccuuaaaucu

SEQ ID NO: 2531719 - RNA, 19 nt, Artificial Sequence
  Description of Artificial Sequence: Synthetic oligonucleotide
  Antisense strand to SEQ ID NO: 2531718
agauuuaaggccauucaau

SEQ ID NO: 2531720 - RNA, 19 nt, Artificial Sequence
  Description of Artificial Sequence: Synthetic oligonucleotide
  Sense strand starting at position 253 of SEQ ID NO: 1888383
uaaacacuggucugaauga

SEQ ID NO: 2531721 - RNA, 19 nt, Artificial Sequence
  Description of Artificial Sequence: Synthetic oligonucleotide
  Antisense strand to SEQ ID NO: 2531720
ucauucagaccaguguuua

SEQ ID NO: 2531722 - RNA, 19 nt, Artificial Sequence
  Description of Artificial Sequence: Synthetic oligonucleotide
  Sense strand starting at position 1122 of SEQ ID NO: 1888383
aucaguuuccaaggaauga

SEQ ID NO: 2531723 - RNA, 19 nt, Artificial Sequence
  Description of Artificial Sequence: Synthetic oligonucleotide
  Antisense strand to SEQ ID NO: 2531722
ucauuccuuggaaacugau

SEQ ID NO: 2531724 - RNA, 19 nt, Artificial Sequence
  Description of Artificial Sequence: Synthetic oligonucleotide
  Sense strand starting at position 1887 of SEQ ID NO: 1888383
agaauaauucucuggguga

SEQ ID NO: 2531725 - RNA, 19 nt, Artificial Sequence
  Description of Artificial Sequence: Synthetic oligonucleotide
  Antisense strand to SEQ ID NO: 2531724
ucacccagagaauuauucu

SEQ ID NO: 2531726 - RNA, 19 nt, Artificial Sequence
  Description of Artificial Sequence: Synthetic oligonucleotide
  Sense strand starting at position 1885 of SEQ ID NO: 1888383
ggagaauaauucucugggu

SEQ ID NO: 2531727 - RNA, 19 nt, Artificial Sequence
  Description of Artificial Sequence: Synthetic oligonucleotide
  Antisense strand to SEQ ID NO: 2531726
acccagagaauuauucucc

SEQ ID NO: 2531728 - RNA, 19 nt, Artificial Sequence
  Description of Artificial Sequence: Synthetic oligonucleotide
  Sense strand starting at position 1886 of SEQ ID NO: 1888383
gagaauaauucucugggug

SEQ ID NO: 2531729 - RNA, 19 nt, Artificial Sequence
  Description of Artificial Sequence: Synthetic oligonucleotide
  Antisense strand to SEQ ID NO: 2531728
cacccagagaauuauucuc

SEQ ID NO: 2531730 - RNA, 19 nt, Artificial Sequence
  Description of Artificial Sequence: Synthetic oligonucleotide
  Sense strand starting at position 1349 of SEQ ID NO: 1888383
auguguauauuuguaaggu

SEQ ID NO: 2531731 - RNA, 19 nt, Artificial Sequence
  Description of Artificial Sequence: Synthetic oligonucleotide
  Antisense strand to SEQ ID NO: 2531730
accuuacaaauauacacau

SEQ ID NO: 2531732 - RNA, 19 nt, Artificial Sequence
  Description of Artificial Sequence: Synthetic oligonucleotide
  Sense strand starting at position 2793 of SEQ ID NO: 1888383
caaagaugauaugcaaagu

SEQ ID NO: 2531733 - RNA, 19 nt, Artificial Sequence
  Description of Artificial Sequence: Synthetic oligonucleotide
  Antisense strand to SEQ ID NO: 2531732
acuuugcauaucaucuuug

SEQ ID NO: 2531734 - RNA, 19 nt, Artificial Sequence
  Description of Artificial Sequence: Synthetic oligonucleotide
  Sense strand starting at position 1947 of SEQ ID NO: 1888383
ucucaagaaugauugcaga

SEQ ID NO: 2531735 - RNA, 19 nt, Artificial Sequence
  Description of Artificial Sequence: Synthetic oligonucleotide
  Antisense strand to SEQ ID NO: 2531734
ucugcaaucauucuugaga

SEQ ID NO: 2531736 - RNA, 19 nt, Artificial Sequence
  Description of Artificial Sequence: Synthetic oligonucleotide
  Sense strand starting at position 1135 of SEQ ID NO: 1888383
gaaugagacauauguguga

SEQ ID NO: 2531737 - RNA, 19 nt, Artificial Sequence
  Description of Artificial Sequence: Synthetic oligonucleotide
  Antisense strand to SEQ ID NO: 2531736
ucacacauaugucucauuc

SEQ ID NO: 2531738 - RNA, 19 nt, Artificial Sequence
  Description of Artificial Sequence: Synthetic oligonucleotide
  Sense strand starting at position 1118 of SEQ ID NO: 1888383
uugaaucaguuuccaagga

SEQ ID NO: 2531739 - RNA, 19 nt, Artificial Sequence
  Description of Artificial Sequence: Synthetic oligonucleotide
  Antisense strand to SEQ ID NO: 2531738
uccuuggaaacugauucaa

SEQ ID NO: 2531740 - RNA, 19 nt, Artificial Sequence
  Description of Artificial Sequence: Synthetic oligonucleotide
  Sense strand starting at position 3060 of SEQ ID NO: 1888383
acgauaaucagcgaucaca

SEQ ID NO: 2531741 - RNA, 19 nt, Artificial Sequence
  Description of Artificial Sequence: Synthetic oligonucleotide
  Antisense strand to SEQ ID NO: 2531740
ugugaucgcugauuaucgu

SEQ ID NO: 2531742 - RNA, 19 nt, Artificial Sequence
  Description of Artificial Sequence: Synthetic oligonucleotide
  Sense strand starting at position 1554 of SEQ ID NO: 1888383
gcccucgaagaguauaaua

SEQ ID NO: 2531743 - RNA, 19 nt, Artificial Sequence
  Description of Artificial Sequence: Synthetic oligonucleotide
  Antisense strand to SEQ ID NO: 2531742
uauuauacucuucgagggc

SEQ ID NO: 2531744 - RNA, 19 nt, Artificial Sequence
  Description of Artificial Sequence: Synthetic oligonucleotide
  Sense strand starting at position 2083 of SEQ ID NO: 1888383
ggaacucugugguuauaaa

SEQ ID NO: 2531745 - RNA, 19 nt, Artificial Sequence
  Description of Artificial Sequence: Synthetic oligonucleotide
  Antisense strand to SEQ ID NO: 2531744
uuuauaaccacagaguucc

SEQ ID NO: 2531746 - RNA, 19 nt, Artificial Sequence
  Description of Artificial Sequence: Synthetic oligonucleotide
  Sense strand starting at position 2070 of SEQ ID NO: 1888383
cccagugauccauggaacu

SEQ ID NO: 2531747 - RNA, 19 nt, Artificial Sequence
  Description of Artificial Sequence: Synthetic oligonucleotide
  Antisense strand to SEQ ID NO: 2531746
aguuccauggaucacuggg

SEQ ID NO: 2531748 - RNA, 19 nt, Artificial Sequence
  Description of Artificial Sequence: Synthetic oligonucleotide
  Sense strand starting at position 1262 of SEQ ID NO: 1888383
uuuauugaauggccuuaaa

SEQ ID NO: 2531749 - RNA, 19 nt, Artificial Sequence
  Description of Artificial Sequence: Synthetic oligonucleotide
  Antisense strand to SEQ ID NO: 2531748
uuuaaggccauucaauaaa

SEQ ID NO: 2531750 - RNA, 19 nt, Artificial Sequence
  Description of Artificial Sequence: Synthetic oligonucleotide
  Sense strand starting at position 1114 of SEQ ID NO: 1888383
cugauugaaucaguuucca

SEQ ID NO: 2531751 - RNA, 19 nt, Artificial Sequence
  Description of Artificial Sequence: Synthetic oligonucleotide
  Antisense strand to SEQ ID NO: 2531750
uggaaacugauucaaucag

SEQ ID NO: 2531752 - RNA, 19 nt, Artificial Sequence
  Description of Artificial Sequence: Synthetic oligonucleotide
  Sense strand starting at position 2804 of SEQ ID NO: 1888383
ugcaaaguccagcaaacau

SEQ ID NO: 2531753 - RNA, 19 nt, Artificial Sequence
  Description of Artificial Sequence: Synthetic oligonucleotide
  Antisense strand to SEQ ID NO: 2531752
auguuugcuggacuuugca

SEQ ID NO: 2531754 - RNA, 19 nt, Artificial Sequence
  Description of Artificial Sequence: Synthetic oligonucleotide
  Sense strand starting at position 2691 of SEQ ID NO: 1888383
agagguuaauaucuagcau

SEQ ID NO: 2531755 - RNA, 19 nt, Artificial Sequence
  Description of Artificial Sequence: Synthetic oligonucleotide
  Antisense strand to SEQ ID NO: 2531754
augcuagauauuaaccucu

SEQ ID NO: 2531756 - RNA, 19 nt, Artificial Sequence
  Description of Artificial Sequence: Synthetic oligonucleotide
  Sense strand starting at position 739 of SEQ ID NO: 1888383
aggacucaauugcuaaagu

SEQ ID NO: 2531757 - RNA, 19 nt, Artificial Sequence
  Description of Artificial Sequence: Synthetic oligonucleotide
  Antisense strand to SEQ ID NO: 2531756
acuuuagcaauugaguccu

SEQ ID NO: 2531758 - RNA, 19 nt, Artificial Sequence
  Description of Artificial Sequence: Synthetic oligonucleotide
  Sense strand starting at position 3210 of SEQ ID NO: 1888383
aaaggaacuuuguuguuua

SEQ ID NO: 2531759 - RNA, 19 nt, Artificial Sequence
  Description of Artificial Sequence: Synthetic oligonucleotide
  Antisense strand to SEQ ID NO: 2531758
uaaacaacaaaguuccuuu

SEQ ID NO: 2531760 - RNA, 19 nt, Artificial Sequence
  Description of Artificial Sequence: Synthetic oligonucleotide
  Sense strand starting at position 2391 of SEQ ID NO: 1888383
uuaguccagccuuaagacu

SEQ ID NO: 2531761 - RNA, 19 nt, Artificial Sequence
  Description of Artificial Sequence: Synthetic oligonucleotide
  Antisense strand to SEQ ID NO: 2531760
agucuuaaggcuggacuaa

SEQ ID NO: 2531762 - RNA, 19 nt, Artificial Sequence
  Description of Artificial Sequence: Synthetic oligonucleotide
  Sense strand starting at position 3355 of SEQ ID NO: 1888383
agaacaagccuguaagcuu

SEQ ID NO: 2531763 - RNA, 19 nt, Artificial Sequence
  Description of Artificial Sequence: Synthetic oligonucleotide
  Antisense strand to SEQ ID NO: 2531762
aagcuuacaggcuuguucu

SEQ ID NO: 2531764 - RNA, 19 nt, Artificial Sequence
  Description of Artificial Sequence: Synthetic oligonucleotide
  Sense strand starting at position 3118 of SEQ ID NO: 1888383
gagaucuuugcauaugcau

SEQ ID NO: 2531765 - RNA, 19 nt, Artificial Sequence
  Description of Artificial Sequence: Synthetic oligonucleotide
  Antisense strand to SEQ ID NO: 2531764
augcauaugcaaagaucuc

SEQ ID NO: 2531766 - RNA, 19 nt, Artificial Sequence
  Description of Artificial Sequence: Synthetic oligonucleotide
  Sense strand starting at position 3532 of SEQ ID NO: 1888383
augaaaguaucucugcaca

SEQ ID NO: 2531767 - RNA, 19 nt, Artificial Sequence
  Description of Artificial Sequence: Synthetic oligonucleotide
  Antisense strand to SEQ ID NO: 2531766
ugugcagagauacuuucau

SEQ ID NO: 2531768 - RNA, 19 nt, Artificial Sequence
  Description of Artificial Sequence: Synthetic oligonucleotide
  Sense strand starting at position 651 of SEQ ID NO: 1888383
uaagguaugccugauguca

SEQ ID NO: 2531769 - RNA, 19 nt, Artificial Sequence
  Description of Artificial Sequence: Synthetic oligonucleotide
  Antisense strand to SEQ ID NO: 2531768
ugacaucaggcauaccuua

SEQ ID NO: 2531770 - RNA, 19 nt, Artificial Sequence
  Description of Artificial Sequence: Synthetic oligonucleotide
  Sense strand starting at position 1139 of SEQ ID NO: 1888383
gagacauaugugugaguua

SEQ ID NO: 2531771 - RNA, 19 nt, Artificial Sequence
  Description of Artificial Sequence: Synthetic oligonucleotide
  Antisense strand to SEQ ID NO: 2531770
uaacucacacauaugucuc

SEQ ID NO: 2531772 - RNA, 19 nt, Artificial Sequence
  Description of Artificial Sequence: Synthetic oligonucleotide
  Sense strand starting at position 1137 of SEQ ID NO: 1888383
augagacauaugugugagu

SEQ ID NO: 2531773 - RNA, 19 nt, Artificial Sequence
  Description of Artificial Sequence: Synthetic oligonucleotide
  Antisense strand to SEQ ID NO: 2531772
acucacacauaugucucau

SEQ ID NO: 2531774 - RNA, 19 nt, Artificial Sequence
  Description of Artificial Sequence: Synthetic oligonucleotide
  Sense strand starting at position 1176 of SEQ ID NO: 1888383
ucuuucuugcaaggaauua

SEQ ID NO: 2531775 - RNA, 19 nt, Artificial Sequence
  Description of Artificial Sequence: Synthetic oligonucleotide
  Antisense strand to SEQ ID NO: 2531774
uaauuccuugcaagaaaga

SEQ ID NO: 2531776 - RNA, 19 nt, Artificial Sequence
  Description of Artificial Sequence: Synthetic oligonucleotide
  Sense strand starting at position 1849 of SEQ ID NO: 1888383
auuaccuugcugcagauau

SEQ ID NO: 2531777 - RNA, 19 nt, Artificial Sequence
  Description of Artificial Sequence: Synthetic oligonucleotide
  Antisense strand to SEQ ID NO: 2531776
auaucugcagcaagguaau

SEQ ID NO: 2531778 - RNA, 19 nt, Artificial Sequence
  Description of Artificial Sequence: Synthetic oligonucleotide
  Sense strand starting at position 3966 of SEQ ID NO: 1888383
ggaaguuuauauguuccau

SEQ ID NO: 2531779 - RNA, 19 nt, Artificial Sequence
  Description of Artificial Sequence: Synthetic oligonucleotide
  Antisense strand to SEQ ID NO: 2531778
auggaacauauaaacuucc

SEQ ID NO: 2531780 - RNA, 19 nt, Artificial Sequence
  Description of Artificial Sequence: Synthetic oligonucleotide
  Sense strand starting at position 2131 of SEQ ID NO: 1888383
uuagccauggugcaauuaa

SEQ ID NO: 2531781 - RNA, 19 nt, Artificial Sequence
  Description of Artificial Sequence: Synthetic oligonucleotide
  Antisense strand to SEQ ID NO: 2531780
uuaauugcaccauggcuaa

SEQ ID NO: 2531782 - RNA, 19 nt, Artificial Sequence
  Description of Artificial Sequence: Synthetic oligonucleotide
  Sense strand starting at position 1107 of SEQ ID NO: 1888383
uggcucucugauugaauca

SEQ ID NO: 2531783 - RNA, 19 nt, Artificial Sequence
  Description of Artificial Sequence: Synthetic oligonucleotide
  Antisense strand to SEQ ID NO: 2531782
ugauucaaucagagagcca

SEQ ID NO: 2531784 - RNA, 19 nt, Artificial Sequence
  Description of Artificial Sequence: Synthetic oligonucleotide
  Sense strand starting at position 3058 of SEQ ID NO: 1888383
auacgauaaucagcgauca

SEQ ID NO: 2531785 - RNA, 19 nt, Artificial Sequence
  Description of Artificial Sequence: Synthetic oligonucleotide
  Antisense strand to SEQ ID NO: 2531784
ugaucgcugauuaucguau

SEQ ID NO: 2531786 - RNA, 19 nt, Artificial Sequence
  Description of Artificial Sequence: Synthetic oligonucleotide
  Sense strand starting at position 1151 of SEQ ID NO: 1888383
ugaguuauaucuccuuuac

SEQ ID NO: 2531787 - RNA, 19 nt, Artificial Sequence
  Description of Artificial Sequence: Synthetic oligonucleotide
  Antisense strand to SEQ ID NO: 2531786
guaaaggagauauaacuca

SEQ ID NO: 2531788 - RNA, 19 nt, Artificial Sequence
  Description of Artificial Sequence: Synthetic oligonucleotide
  Sense strand starting at position 3530 of SEQ ID NO: 1888383
uuaugaaaguaucucugca

SEQ ID NO: 2531789 - RNA, 19 nt, Artificial Sequence
  Description of Artificial Sequence: Synthetic oligonucleotide
  Antisense strand to SEQ ID NO: 2531788
ugcagagauacuuucauaa

SEQ ID NO: 2531790 - RNA, 19 nt, Artificial Sequence
  Description of Artificial Sequence: Synthetic oligonucleotide
  Sense strand starting at position 1138 of SEQ ID NO: 1888383
ugagacauaugugugaguu

SEQ ID NO: 2531791 - RNA, 19 nt, Artificial Sequence
  Description of Artificial Sequence: Synthetic oligonucleotide
  Antisense strand to SEQ ID NO: 2531790
aacucacacauaugucuca

SEQ ID NO: 2531792 - RNA, 19 nt, Artificial Sequence
  Description of Artificial Sequence: Synthetic oligonucleotide
  Sense strand starting at position 1610 of SEQ ID NO: 1888383
cuuaauagccauuguugaa

SEQ ID NO: 2531793 - RNA, 19 nt, Artificial Sequence
  Description of Artificial Sequence: Synthetic oligonucleotide
  Antisense strand to SEQ ID NO: 2531792
uucaacaauggcuauuaag

SEQ ID NO: 2531794 - RNA, 19 nt, Artificial Sequence
  Description of Artificial Sequence: Synthetic oligonucleotide
  Sense strand starting at position 1481 of SEQ ID NO: 1888384
gugguacagagacauguaa

SEQ ID NO: 2531795 - RNA, 19 nt, Artificial Sequence
  Description of Artificial Sequence: Synthetic oligonucleotide
  Antisense strand to SEQ ID NO: 2531794
uuacaugucucuguaccac

SEQ ID NO: 2531796 - RNA, 19 nt, Artificial Sequence
  Description of Artificial Sequence: Synthetic oligonucleotide
  Sense strand starting at position 3366 of SEQ ID NO: 1888384
auacucuuccucgaggaca

SEQ ID NO: 2531797 - RNA, 19 nt, Artificial Sequence
  Description of Artificial Sequence: Synthetic oligonucleotide
  Antisense strand to SEQ ID NO: 2531796
uguccucgaggaagaguau

SEQ ID NO: 2531798 - RNA, 19 nt, Artificial Sequence
  Description of Artificial Sequence: Synthetic oligonucleotide
  Sense strand starting at position 1559 of SEQ ID NO: 1888384
acauuauuggaagguauua

SEQ ID NO: 2531799 - RNA, 19 nt, Artificial Sequence
  Description of Artificial Sequence: Synthetic oligonucleotide
  Antisense strand to SEQ ID NO: 2531798
uaauaccuuccaauaaugu

SEQ ID NO: 2531800 - RNA, 19 nt, Artificial Sequence
  Description of Artificial Sequence: Synthetic oligonucleotide
  Sense strand starting at position 2564 of SEQ ID NO: 1888384
gggaacucacacuguaaua

SEQ ID NO: 2531801 - RNA, 19 nt, Artificial Sequence
  Description of Artificial Sequence: Synthetic oligonucleotide
  Antisense strand to SEQ ID NO: 2531800
uauuacagugugaguuccc

SEQ ID NO: 2531802 - RNA, 19 nt, Artificial Sequence
  Description of Artificial Sequence: Synthetic oligonucleotide
  Sense strand starting at position 3733 of SEQ ID NO: 1888384
cuuccugaccauggaagau

SEQ ID NO: 2531803 - RNA, 19 nt, Artificial Sequence
  Description of Artificial Sequence: Synthetic oligonucleotide
  Antisense strand to SEQ ID NO: 2531802
aucuuccauggucaggaag

SEQ ID NO: 2531804 - RNA, 19 nt, Artificial Sequence
  Description of Artificial Sequence: Synthetic oligonucleotide
  Sense strand starting at position 2539 of SEQ ID NO: 1888384
ggaagucgaugauuagaau

SEQ ID NO: 2531805 - RNA, 19 nt, Artificial Sequence
  Description of Artificial Sequence: Synthetic oligonucleotide
  Antisense strand to SEQ ID NO: 2531804
auucuaaucaucgacuucc

SEQ ID NO: 2531806 - RNA, 19 nt, Artificial Sequence
  Description of Artificial Sequence: Synthetic oligonucleotide
  Sense strand starting at position 239 of SEQ ID NO: 1888384
gggugaauuaagcagcaaa

SEQ ID NO: 2531807 - RNA, 19 nt, Artificial Sequence
  Description of Artificial Sequence: Synthetic oligonucleotide
  Antisense strand to SEQ ID NO: 2531806
uuugcugcuuaauucaccc

SEQ ID NO: 2531808 - RNA, 19 nt, Artificial Sequence
  Description of Artificial Sequence: Synthetic oligonucleotide
  Sense strand starting at position 1664 of SEQ ID NO: 1888384
auacaaauguuucucagga

SEQ ID NO: 2531809 - RNA, 19 nt, Artificial Sequence
  Description of Artificial Sequence: Synthetic oligonucleotide
  Antisense strand to SEQ ID NO: 2531808
uccugagaaacauuuguau

SEQ ID NO: 2531810 - RNA, 19 nt, Artificial Sequence
  Description of Artificial Sequence: Synthetic oligonucleotide
  Sense strand starting at position 1242 of SEQ ID NO: 1888384
gaaagagaguuaucuuucu

SEQ ID NO: 2531811 - RNA, 19 nt, Artificial Sequence
  Description of Artificial Sequence: Synthetic oligonucleotide
  Antisense strand to SEQ ID NO: 2531810
agaaagauaacucucuuuc

SEQ ID NO: 2531812 - RNA, 19 nt, Artificial Sequence
  Description of Artificial Sequence: Synthetic oligonucleotide
  Sense strand starting at position 2051 of SEQ ID NO: 1888384
gaauguugaguuuagagua

SEQ ID NO: 2531813 - RNA, 19 nt, Artificial Sequence
  Description of Artificial Sequence: Synthetic oligonucleotide
  Antisense strand to SEQ ID NO: 2531812
uacucuaaacucaacauuc

SEQ ID NO: 2531814 - RNA, 19 nt, Artificial Sequence
  Description of Artificial Sequence: Synthetic oligonucleotide
  Sense strand starting at position 2580 of SEQ ID NO: 1888384
auagcuaagccugaugaau

SEQ ID NO: 2531815 - RNA, 19 nt, Artificial Sequence
  Description of Artificial Sequence: Synthetic oligonucleotide
  Antisense strand to SEQ ID NO: 2531814
auucaucaggcuuagcuau

SEQ ID NO: 2531816 - RNA, 19 nt, Artificial Sequence
  Description of Artificial Sequence: Synthetic oligonucleotide
  Sense strand starting at position 2077 of SEQ ID NO: 1888384
cucugauuaccucauguga

SEQ ID NO: 2531817 - RNA, 19 nt, Artificial Sequence
  Description of Artificial Sequence: Synthetic oligonucleotide
  Antisense strand to SEQ ID NO: 2531816
ucacaugagguaaucagag

SEQ ID NO: 2531818 - RNA, 19 nt, Artificial Sequence
  Description of Artificial Sequence: Synthetic oligonucleotide
  Sense strand starting at position 1789 of SEQ ID NO: 1888384
augauacauuauguaccua

SEQ ID NO: 2531819 - RNA, 19 nt, Artificial Sequence
  Description of Artificial Sequence: Synthetic oligonucleotide
  Antisense strand to SEQ ID NO: 2531818
uagguacauaauguaucau

SEQ ID NO: 2531820 - RNA, 19 nt, Artificial Sequence
  Description of Artificial Sequence: Synthetic oligonucleotide
  Sense strand starting at position 1639 of SEQ ID NO: 1888384
guugucuguggagaagaau

SEQ ID NO: 2531821 - RNA, 19 nt, Artificial Sequence
  Description of Artificial Sequence: Synthetic oligonucleotide
  Antisense strand to SEQ ID NO: 2531820
auucuucuccacagacaac

SEQ ID NO: 2531822 - RNA, 19 nt, Artificial Sequence
  Description of Artificial Sequence: Synthetic oligonucleotide
  Sense strand starting at position 1843 of SEQ ID NO: 1888384
gggaguuguagguauuaau

SEQ ID NO: 2531823 - RNA, 19 nt, Artificial Sequence
  Description of Artificial Sequence: Synthetic oligonucleotide
  Antisense strand to SEQ ID NO: 2531822
auuaauaccuacaacuccc

SEQ ID NO: 2531824 - RNA, 19 nt, Artificial Sequence
  Description of Artificial Sequence: Synthetic oligonucleotide
  Sense strand starting at position 3438 of SEQ ID NO: 1888384
agaacuauuucugguauuu

SEQ ID NO: 2531825 - RNA, 19 nt, Artificial Sequence
  Description of Artificial Sequence: Synthetic oligonucleotide
  Antisense strand to SEQ ID NO: 2531824
aaauaccagaaauaguucu

SEQ ID NO: 2531826 - RNA, 19 nt, Artificial Sequence
  Description of Artificial Sequence: Synthetic oligonucleotide
  Sense strand starting at position 2341 of SEQ ID NO: 1888384
acugguccugaucauaagu

SEQ ID NO: 2531827 - RNA, 19 nt, Artificial Sequence
  Description of Artificial Sequence: Synthetic oligonucleotide
  Antisense strand to SEQ ID NO: 2531826
acuuaugaucaggaccagu

SEQ ID NO: 2531828 - RNA, 19 nt, Artificial Sequence
  Description of Artificial Sequence: Synthetic oligonucleotide
  Sense strand starting at position 1483 of SEQ ID NO: 1888384
gguacagagacauguaauu

SEQ ID NO: 2531829 - RNA, 19 nt, Artificial Sequence
  Description of Artificial Sequence: Synthetic oligonucleotide
  Antisense strand to SEQ ID NO: 2531828
aauuacaugucucuguacc

SEQ ID NO: 2531830 - RNA, 19 nt, Artificial Sequence
  Description of Artificial Sequence: Synthetic oligonucleotide
  Sense strand starting at position 3674 of SEQ ID NO: 1888384
agcauuguugaaggagaca

SEQ ID NO: 2531831 - RNA, 19 nt, Artificial Sequence
  Description of Artificial Sequence: Synthetic oligonucleotide
  Antisense strand to SEQ ID NO: 2531830
ugucuccuucaacaaugcu

SEQ ID NO: 2531832 - RNA, 19 nt, Artificial Sequence
  Description of Artificial Sequence: Synthetic oligonucleotide
  Sense strand starting at position 282 of SEQ ID NO: 1888384
uuugauauaucccuggacu

SEQ ID NO: 2531833 - RNA, 19 nt, Artificial Sequence
  Description of Artificial Sequence: Synthetic oligonucleotide
  Antisense strand to SEQ ID NO: 2531832
aguccagggauauaucaaa

SEQ ID NO: 2531834 - RNA, 19 nt, Artificial Sequence
  Description of Artificial Sequence: Synthetic oligonucleotide
  Sense strand starting at position 3930 of SEQ ID NO: 1888384
gagaaauaggucugguuau

SEQ ID NO: 2531835 - RNA, 19 nt, Artificial Sequence
  Description of Artificial Sequence: Synthetic oligonucleotide
  Antisense strand to SEQ ID NO: 2531834
auaaccagaccuauuucuc

SEQ ID NO: 2531836 - RNA, 19 nt, Artificial Sequence
  Description of Artificial Sequence: Synthetic oligonucleotide
  Sense strand starting at position 283 of SEQ ID NO: 1888384
uugauauaucccuggacuc

SEQ ID NO: 2531837 - RNA, 19 nt, Artificial Sequence
  Description of Artificial Sequence: Synthetic oligonucleotide
  Antisense strand to SEQ ID NO: 2531836
gaguccagggauauaucaa

SEQ ID NO: 2531838 - RNA, 19 nt, Artificial Sequence
  Description of Artificial Sequence: Synthetic oligonucleotide
  Sense strand starting at position 2665 of SEQ ID NO: 1888384
uauucuuggcugggagaag

SEQ ID NO: 2531839 - RNA, 19 nt, Artificial Sequence
  Description of Artificial Sequence: Synthetic oligonucleotide
  Antisense strand to SEQ ID NO: 2531838
cuucucccagccaagaaua

SEQ ID NO: 2531840 - RNA, 19 nt, Artificial Sequence
  Description of Artificial Sequence: Synthetic oligonucleotide
  Sense strand starting at position 272 of SEQ ID NO: 1888384
aaagguagucuuugauaua

SEQ ID NO: 2531841 - RNA, 19 nt, Artificial Sequence
  Description of Artificial Sequence: Synthetic oligonucleotide
  Antisense strand to SEQ ID NO: 2531840
uauaucaaagacuaccuuu

SEQ ID NO: 2531842 - RNA, 19 nt, Artificial Sequence
  Description of Artificial Sequence: Synthetic oligonucleotide
  Sense strand starting at position 3950 of SEQ ID NO: 1888384
aaaguaugacagugauucu

SEQ ID NO: 2531843 - RNA, 19 nt, Artificial Sequence
  Description of Artificial Sequence: Synthetic oligonucleotide
  Antisense strand to SEQ ID NO: 2531842
agaaucacugucauacuuu

SEQ ID NO: 2531844 - RNA, 19 nt, Artificial Sequence
  Description of Artificial Sequence: Synthetic oligonucleotide
  Sense strand starting at position 268 of SEQ ID NO: 1888384
uaugaaagguagucuuuga

SEQ ID NO: 2531845 - RNA, 19 nt, Artificial Sequence
  Description of Artificial Sequence: Synthetic oligonucleotide
  Antisense strand to SEQ ID NO: 2531844
ucaaagacuaccuuucaua

SEQ ID NO: 2531846 - RNA, 19 nt, Artificial Sequence
  Description of Artificial Sequence: Synthetic oligonucleotide
  Sense strand starting at position 2640 of SEQ ID NO: 1888384
gagacuucuguacaugcau

SEQ ID NO: 2531847 - RNA, 19 nt, Artificial Sequence
  Description of Artificial Sequence: Synthetic oligonucleotide
  Antisense strand to SEQ ID NO: 2531846
augcauguacagaagucuc

SEQ ID NO: 2531848 - RNA, 19 nt, Artificial Sequence
  Description of Artificial Sequence: Synthetic oligonucleotide
  Sense strand starting at position 1310 of SEQ ID NO: 1888384
gaguucuugccagaacuca

SEQ ID NO: 2531849 - RNA, 19 nt, Artificial Sequence
  Description of Artificial Sequence: Synthetic oligonucleotide
  Antisense strand to SEQ ID NO: 2531848
ugaguucuggcaagaacuc

SEQ ID NO: 2531850 - RNA, 19 nt, Artificial Sequence
  Description of Artificial Sequence: Synthetic oligonucleotide
  Sense strand starting at position 569 of SEQ ID NO: 1888384
ucugaucucccugggauua

SEQ ID NO: 2531851 - RNA, 19 nt, Artificial Sequence
  Description of Artificial Sequence: Synthetic oligonucleotide
  Antisense strand to SEQ ID NO: 2531850
uaaucccagggagaucaga

SEQ ID NO: 2531852 - RNA, 19 nt, Artificial Sequence
  Description of Artificial Sequence: Synthetic oligonucleotide
  Sense strand starting at position 921 of SEQ ID NO: 1888384
auguauuguagucaauaug

SEQ ID NO: 2531853 - RNA, 19 nt, Artificial Sequence
  Description of Artificial Sequence: Synthetic oligonucleotide
  Antisense strand to SEQ ID NO: 2531852
cauauugacuacaauacau

SEQ ID NO: 2531854 - RNA, 19 nt, Artificial Sequence
  Description of Artificial Sequence: Synthetic oligonucleotide
  Sense strand starting at position 230 of SEQ ID NO: 1888384
acacacugugggugaauua

SEQ ID NO: 2531855 - RNA, 19 nt, Artificial Sequence
  Description of Artificial Sequence: Synthetic oligonucleotide
  Antisense strand to SEQ ID NO: 2531854
uaauucacccacagugugu

SEQ ID NO: 2531856 - RNA, 19 nt, Artificial Sequence
  Description of Artificial Sequence: Synthetic oligonucleotide
  Sense strand starting at position 2048 of SEQ ID NO: 1888384
uuggaauguugaguuuaga

SEQ ID NO: 2531857 - RNA, 19 nt, Artificial Sequence
  Description of Artificial Sequence: Synthetic oligonucleotide
  Antisense strand to SEQ ID NO: 2531856
ucuaaacucaacauuccaa

SEQ ID NO: 2531858 - RNA, 19 nt, Artificial Sequence
  Description of Artificial Sequence: Synthetic oligonucleotide
  Sense strand starting at position 1116 of SEQ ID NO: 1888384
ugaauuacguauccugaaa

SEQ ID NO: 2531859 - RNA, 19 nt, Artificial Sequence
  Description of Artificial Sequence: Synthetic oligonucleotide
  Antisense strand to SEQ ID NO: 2531858
uuucaggauacguaauuca

SEQ ID NO: 2531860 - RNA, 19 nt, Artificial Sequence
  Description of Artificial Sequence: Synthetic oligonucleotide
  Sense strand starting at position 3364 of SEQ ID NO: 1888384
acauacucuuccucgagga

SEQ ID NO: 2531861 - RNA, 19 nt, Artificial Sequence
  Description of Artificial Sequence: Synthetic oligonucleotide
  Antisense strand to SEQ ID NO: 2531860
uccucgaggaagaguaugu

SEQ ID NO: 2531862 - RNA, 19 nt, Artificial Sequence
  Description of Artificial Sequence: Synthetic oligonucleotide
  Sense strand starting at position 2664 of SEQ ID NO: 1888384
uuauucuuggcugggagaa

SEQ ID NO: 2531863 - RNA, 19 nt, Artificial Sequence
  Description of Artificial Sequence: Synthetic oligonucleotide
  Antisense strand to SEQ ID NO: 2531862
uucucccagccaagaauaa

SEQ ID NO: 2531864 - RNA, 19 nt, Artificial Sequence
  Description of Artificial Sequence: Synthetic oligonucleotide
  Sense strand starting at position 2663 of SEQ ID NO: 1888384
auuauucuuggcugggaga

SEQ ID NO: 2531865 - RNA, 19 nt, Artificial Sequence
  Description of Artificial Sequence: Synthetic oligonucleotide
  Antisense strand to SEQ ID NO: 2531864
ucucccagccaagaauaau

SEQ ID NO: 2531866 - RNA, 19 nt, Artificial Sequence
  Description of Artificial Sequence: Synthetic oligonucleotide
  Sense strand starting at position 1581 of SEQ ID NO: 1888384
gaaagcaacuugguacuua

SEQ ID NO: 2531867 - RNA, 19 nt, Artificial Sequence
  Description of Artificial Sequence: Synthetic oligonucleotide
  Antisense strand to SEQ ID NO: 2531866
uaaguaccaaguugcuuuc

SEQ ID NO: 2531868 - RNA, 19 nt, Artificial Sequence
  Description of Artificial Sequence: Synthetic oligonucleotide
  Sense strand starting at position 2056 of SEQ ID NO: 1888384
uugaguuuagaguaagucu

SEQ ID NO: 2531869 - RNA, 19 nt, Artificial Sequence
  Description of Artificial Sequence: Synthetic oligonucleotide
  Antisense strand to SEQ ID NO: 2531868
agacuuacucuaaacucaa

SEQ ID NO: 2531870 - RNA, 19 nt, Artificial Sequence
  Description of Artificial Sequence: Synthetic oligonucleotide
  Sense strand starting at position 409 of SEQ ID NO: 1888384
cuaauaaugccaggacucu

SEQ ID NO: 2531871 - RNA, 19 nt, Artificial Sequence
  Description of Artificial Sequence: Synthetic oligonucleotide
  Antisense strand to SEQ ID NO: 2531870
agaguccuggcauuauuag

SEQ ID NO: 2531872 - RNA, 19 nt, Artificial Sequence
  Description of Artificial Sequence: Synthetic oligonucleotide
  Sense strand starting at position 2536 of SEQ ID NO: 1888384
uuuggaagucgaugauuag

SEQ ID NO: 2531873 - RNA, 19 nt, Artificial Sequence
  Description of Artificial Sequence: Synthetic oligonucleotide
  Antisense strand to SEQ ID NO: 2531872
cuaaucaucgacuuccaaa

SEQ ID NO: 2531874 - RNA, 19 nt, Artificial Sequence
  Description of Artificial Sequence: Synthetic oligonucleotide
  Sense strand starting at position 3895 of SEQ ID NO: 1888385
uuaugcuuucuagaaacag

SEQ ID NO: 2531875 - RNA, 19 nt, Artificial Sequence
  Description of Artificial Sequence: Synthetic oligonucleotide
  Antisense strand to SEQ ID NO: 2531874
cuguuucuagaaagcauaa

SEQ ID NO: 2531876 - RNA, 19 nt, Artificial Sequence
  Description of Artificial Sequence: Synthetic oligonucleotide
  Sense strand starting at position 3283 of SEQ ID NO: 1888385
ugagucauacaacaguuau

SEQ ID NO: 2531877 - RNA, 19 nt, Artificial Sequence
  Description of Artificial Sequence: Synthetic oligonucleotide
  Antisense strand to SEQ ID NO: 2531876
auaacuguuguaugacuca

SEQ ID NO: 2531878 - RNA, 19 nt, Artificial Sequence
  Description of Artificial Sequence: Synthetic oligonucleotide
  Sense strand starting at position 2483 of SEQ ID NO: 1888385
ccaugagaagaauguuauc

SEQ ID NO: 2531879 - RNA, 19 nt, Artificial Sequence
  Description of Artificial Sequence: Synthetic oligonucleotide
  Antisense strand to SEQ ID NO: 2531878
gauaacauucuucucaugg

SEQ ID NO: 2531880 - RNA, 19 nt, Artificial Sequence
  Description of Artificial Sequence: Synthetic oligonucleotide
  Sense strand starting at position 1731 of SEQ ID NO: 1888385
aucuguguccaagagaacu

SEQ ID NO: 2531881 - RNA, 19 nt, Artificial Sequence
  Description of Artificial Sequence: Synthetic oligonucleotide
  Antisense strand to SEQ ID NO: 2531880
aguucucuuggacacagau

SEQ ID NO: 2531882 - RNA, 19 nt, Artificial Sequence
  Description of Artificial Sequence: Synthetic oligonucleotide
  Sense strand starting at position 1353 of SEQ ID NO: 1888385
gugagucacaaaugagaca

SEQ ID NO: 2531883 - RNA, 19 nt, Artificial Sequence
  Description of Artificial Sequence: Synthetic oligonucleotide
  Antisense strand to SEQ ID NO: 2531882
ugucucauuugugacucac

SEQ ID NO: 2531884 - RNA, 19 nt, Artificial Sequence
  Description of Artificial Sequence: Synthetic oligonucleotide
  Sense strand starting at position 3347 of SEQ ID NO: 1888385
guuacuaagcaggaguaaa

SEQ ID NO: 2531885 - RNA, 19 nt, Artificial Sequence
  Description of Artificial Sequence: Synthetic oligonucleotide
  Antisense strand to SEQ ID NO: 2531884
uuuacuccugcuuaguaac

SEQ ID NO: 2531886 - RNA, 19 nt, Artificial Sequence
  Description of Artificial Sequence: Synthetic oligonucleotide
  Sense strand starting at position 1510 of SEQ ID NO: 1888385
agugcuuccauggagaaac

SEQ ID NO: 2531887 - RNA, 19 nt, Artificial Sequence
  Description of Artificial Sequence: Synthetic oligonucleotide
  Antisense strand to SEQ ID NO: 2531886
guuucuccauggaagcacu

SEQ ID NO: 2531888 - RNA, 19 nt, Artificial Sequence
  Description of Artificial Sequence: Synthetic oligonucleotide
  Sense strand starting at position 2091 of SEQ ID NO: 1888385
auuaaaggcuuauugaaug

SEQ ID NO: 2531889 - RNA, 19 nt, Artificial Sequence
  Description of Artificial Sequence: Synthetic oligonucleotide
  Antisense strand to SEQ ID NO: 2531888
cauucaauaagccuuuaau

SEQ ID NO: 2531890 - RNA, 19 nt, Artificial Sequence
  Description of Artificial Sequence: Synthetic oligonucleotide
  Sense strand starting at position 1395 of SEQ ID NO: 1888385
uugaauacuguggauguau

SEQ ID NO: 2531891 - RNA, 19 nt, Artificial Sequence
  Description of Artificial Sequence: Synthetic oligonucleotide
  Antisense strand to SEQ ID NO: 2531890
auacauccacaguauucaa

SEQ ID NO: 2531892 - RNA, 19 nt, Artificial Sequence
  Description of Artificial Sequence: Synthetic oligonucleotide
  Sense strand starting at position 2961 of SEQ ID NO: 1888385
uguauagagugauuacaaa

SEQ ID NO: 2531893 - RNA, 19 nt, Artificial Sequence
  Description of Artificial Sequence: Synthetic oligonucleotide
  Antisense strand to SEQ ID NO: 2531892
uuuguaaucacucuauaca

SEQ ID NO: 2531894 - RNA, 19 nt, Artificial Sequence
  Description of Artificial Sequence: Synthetic oligonucleotide
  Sense strand starting at position 2272 of SEQ ID NO: 1888385
caguuacaugaagguaaua

SEQ ID NO: 2531895 - RNA, 19 nt, Artificial Sequence
  Description of Artificial Sequence: Synthetic oligonucleotide
  Antisense strand to SEQ ID NO: 2531894
uauuaccuucauguaacug

SEQ ID NO: 2531896 - RNA, 19 nt, Artificial Sequence
  Description of Artificial Sequence: Synthetic oligonucleotide
  Sense strand starting at position 790 of SEQ ID NO: 1888385
gauugcagaguuuaacacu

SEQ ID NO: 2531897 - RNA, 19 nt, Artificial Sequence
  Description of Artificial Sequence: Synthetic oligonucleotide
  Antisense strand to SEQ ID NO: 2531896
aguguuaaacucugcaauc

SEQ ID NO: 2531898 - RNA, 19 nt, Artificial Sequence
  Description of Artificial Sequence: Synthetic oligonucleotide
  Sense strand starting at position 3236 of SEQ ID NO: 1888385
uggauacacugcuuauaaa

SEQ ID NO: 2531899 - RNA, 19 nt, Artificial Sequence
  Description of Artificial Sequence: Synthetic oligonucleotide
  Antisense strand to SEQ ID NO: 2531898
uuuauaagcaguguaucca

SEQ ID NO: 2531900 - RNA, 19 nt, Artificial Sequence
  Description of Artificial Sequence: Synthetic oligonucleotide
  Sense strand starting at position 3100 of SEQ ID NO: 1888385
cugccagaagucuguauuu

SEQ ID NO: 2531901 - RNA, 19 nt, Artificial Sequence
  Description of Artificial Sequence: Synthetic oligonucleotide
  Antisense strand to SEQ ID NO: 2531900
aaauacagacuucuggcag

SEQ ID NO: 2531902 - RNA, 19 nt, Artificial Sequence
  Description of Artificial Sequence: Synthetic oligonucleotide
  Sense strand starting at position 3564 of SEQ ID NO: 1888385
ccauaaauguaugugaaca

SEQ ID NO: 2531903 - RNA, 19 nt, Artificial Sequence
  Description of Artificial Sequence: Synthetic oligonucleotide
  Antisense strand to SEQ ID NO: 2531902
uguucacauacauuuaugg

SEQ ID NO: 2531904 - RNA, 19 nt, Artificial Sequence
  Description of Artificial Sequence: Synthetic oligonucleotide
  Sense strand starting at position 2198 of SEQ ID NO: 1888385
ggcuaaaggaccuaucugu

SEQ ID NO: 2531905 - RNA, 19 nt, Artificial Sequence
  Description of Artificial Sequence: Synthetic oligonucleotide
  Antisense strand to SEQ ID NO: 2531904
acagauagguccuuuagcc

SEQ ID NO: 2531906 - RNA, 19 nt, Artificial Sequence
  Description of Artificial Sequence: Synthetic oligonucleotide
  Sense strand starting at position 2354 of SEQ ID NO: 1888385
aguauagaguaaguaucaa

SEQ ID NO: 2531907 - RNA, 19 nt, Artificial Sequence
  Description of Artificial Sequence: Synthetic oligonucleotide
  Antisense strand to SEQ ID NO: 2531906
uugauacuuacucuauacu

SEQ ID NO: 2531908 - RNA, 19 nt, Artificial Sequence
  Description of Artificial Sequence: Synthetic oligonucleotide
  Sense strand starting at position 1384 of SEQ ID NO: 1888385
uagggagugguuugaauac

SEQ ID NO: 2531909 - RNA, 19 nt, Artificial Sequence
  Description of Artificial Sequence: Synthetic oligonucleotide
  Antisense strand to SEQ ID NO: 2531908
guauucaaaccacucccua

SEQ ID NO: 2531910 - RNA, 19 nt, Artificial Sequence
  Description of Artificial Sequence: Synthetic oligonucleotide
  Sense strand starting at position 1927 of SEQ ID NO: 1888385
cauuuaaauguucggcuuu

SEQ ID NO: 2531911 - RNA, 19 nt, Artificial Sequence
  Description of Artificial Sequence: Synthetic oligonucleotide
  Antisense strand to SEQ ID NO: 2531910
aaagccgaacauuuaaaug

SEQ ID NO: 2531912 - RNA, 19 nt, Artificial Sequence
  Description of Artificial Sequence: Synthetic oligonucleotide
  Sense strand starting at position 36 of SEQ ID NO: 1888385
uuaccuauuugauaagaug

SEQ ID NO: 2531913 - RNA, 19 nt, Artificial Sequence
  Description of Artificial Sequence: Synthetic oligonucleotide
  Antisense strand to SEQ ID NO: 2531912
caucuuaucaaauagguaa

SEQ ID NO: 2531914 - RNA, 19 nt, Artificial Sequence
  Description of Artificial Sequence: Synthetic oligonucleotide
  Sense strand starting at position 1509 of SEQ ID NO: 1888385
aagugcuuccauggagaaa

SEQ ID NO: 2531915 - RNA, 19 nt, Artificial Sequence
  Description of Artificial Sequence: Synthetic oligonucleotide
  Antisense strand to SEQ ID NO: 2531914
uuucuccauggaagcacuu

SEQ ID NO: 2531916 - RNA, 19 nt, Artificial Sequence
  Description of Artificial Sequence: Synthetic oligonucleotide
  Sense strand starting at position 1440 of SEQ ID NO: 1888385
ggaacuagcuuggugaaca

SEQ ID NO: 2531917 - RNA, 19 nt, Artificial Sequence
  Description of Artificial Sequence: Synthetic oligonucleotide
  Antisense strand to SEQ ID NO: 2531916
uguucaccaagcuaguucc

SEQ ID NO: 2531918 - RNA, 19 nt, Artificial Sequence
  Description of Artificial Sequence: Synthetic oligonucleotide
  Sense strand starting at position 3694 of SEQ ID NO: 1888385
cggaaauauuuggaaauuc

SEQ ID NO: 2531919 - RNA, 19 nt, Artificial Sequence
  Description of Artificial Sequence: Synthetic oligonucleotide
  Antisense strand to SEQ ID NO: 2531918
gaauuuccaaauauuuccg

SEQ ID NO: 2531920 - RNA, 19 nt, Artificial Sequence
  Description of Artificial Sequence: Synthetic oligonucleotide
  Sense strand starting at position 3760 of SEQ ID NO: 1888385
ucuaccagucuguaauauu

SEQ ID NO: 2531921 - RNA, 19 nt, Artificial Sequence
  Description of Artificial Sequence: Synthetic oligonucleotide
  Antisense strand to SEQ ID NO: 2531920
aauauuacagacugguaga

SEQ ID NO: 2531922 - RNA, 19 nt, Artificial Sequence
  Description of Artificial Sequence: Synthetic oligonucleotide
  Sense strand starting at position 3563 of SEQ ID NO: 1888385
uccauaaauguaugugaac

SEQ ID NO: 2531923 - RNA, 19 nt, Artificial Sequence
  Description of Artificial Sequence: Synthetic oligonucleotide
  Antisense strand to SEQ ID NO: 2531922
guucacauacauuuaugga

SEQ ID NO: 2531924 - RNA, 19 nt, Artificial Sequence
  Description of Artificial Sequence: Synthetic oligonucleotide
  Sense strand starting at position 104 of SEQ ID NO: 1888385
agguuuacugcuuacccaa

SEQ ID NO: 2531925 - RNA, 19 nt, Artificial Sequence
  Description of Artificial Sequence: Synthetic oligonucleotide
  Antisense strand to SEQ ID NO: 2531924
uuggguaagcaguaaaccu

SEQ ID NO: 2531926 - RNA, 19 nt, Artificial Sequence
  Description of Artificial Sequence: Synthetic oligonucleotide
  Sense strand starting at position 172 of SEQ ID NO: 1888385
gaacacuugccagguaaca

SEQ ID NO: 2531927 - RNA, 19 nt, Artificial Sequence
  Description of Artificial Sequence: Synthetic oligonucleotide
  Antisense strand to SEQ ID NO: 2531926
uguuaccuggcaaguguuc

SEQ ID NO: 2531928 - RNA, 19 nt, Artificial Sequence
  Description of Artificial Sequence: Synthetic oligonucleotide
  Sense strand starting at position 2106 of SEQ ID NO: 1888385
aauggugaaugccuugaau

SEQ ID NO: 2531929 - RNA, 19 nt, Artificial Sequence
  Description of Artificial Sequence: Synthetic oligonucleotide
  Antisense strand to SEQ ID NO: 2531928
auucaaggcauucaccauu

SEQ ID NO: 2531930 - RNA, 19 nt, Artificial Sequence
  Description of Artificial Sequence: Synthetic oligonucleotide
  Sense strand starting at position 2958 of SEQ ID NO: 1888385
uauuguauagagugauuac

SEQ ID NO: 2531931 - RNA, 19 nt, Artificial Sequence
  Description of Artificial Sequence: Synthetic oligonucleotide
  Antisense strand to SEQ ID NO: 2531930
guaaucacucuauacaaua

SEQ ID NO: 2531932 - RNA, 19 nt, Artificial Sequence
  Description of Artificial Sequence: Synthetic oligonucleotide
  Sense strand starting at position 1386 of SEQ ID NO: 1888385
gggagugguuugaauacug

SEQ ID NO: 2531933 - RNA, 19 nt, Artificial Sequence
  Description of Artificial Sequence: Synthetic oligonucleotide
  Antisense strand to SEQ ID NO: 2531932
caguauucaaaccacuccc

SEQ ID NO: 2531934 - RNA, 19 nt, Artificial Sequence
  Description of Artificial Sequence: Synthetic oligonucleotide
  Sense strand starting at position 3576 of SEQ ID NO: 1888385
gugaacauuucugaagacu

SEQ ID NO: 2531935 - RNA, 19 nt, Artificial Sequence
  Description of Artificial Sequence: Synthetic oligonucleotide
  Antisense strand to SEQ ID NO: 2531934
agucuucagaaauguucac

SEQ ID NO: 2531936 - RNA, 19 nt, Artificial Sequence
  Description of Artificial Sequence: Synthetic oligonucleotide
  Sense strand starting at position 1728 of SEQ ID NO: 1888385
gccaucuguguccaagaga

SEQ ID NO: 2531937 - RNA, 19 nt, Artificial Sequence
  Description of Artificial Sequence: Synthetic oligonucleotide
  Antisense strand to SEQ ID NO: 2531936
ucucuuggacacagauggc

SEQ ID NO: 2531938 - RNA, 19 nt, Artificial Sequence
  Description of Artificial Sequence: Synthetic oligonucleotide
  Sense strand starting at position 2097 of SEQ ID NO: 1888385
ggcuuauugaauggugaau

SEQ ID NO: 2531939 - RNA, 19 nt, Artificial Sequence
  Description of Artificial Sequence: Synthetic oligonucleotide
  Antisense strand to SEQ ID NO: 2531938
auucaccauucaauaagcc

SEQ ID NO: 2531940 - RNA, 19 nt, Artificial Sequence
  Description of Artificial Sequence: Synthetic oligonucleotide
  Sense strand starting at position 1345 of SEQ ID NO: 1888385
guaaucuagugagucacaa

SEQ ID NO: 2531941 - RNA, 19 nt, Artificial Sequence
  Description of Artificial Sequence: Synthetic oligonucleotide
  Antisense strand to SEQ ID NO: 2531940
uugugacucacuagauuac

SEQ ID NO: 2531942 - RNA, 19 nt, Artificial Sequence
  Description of Artificial Sequence: Synthetic oligonucleotide
  Sense strand starting at position 3402 of SEQ ID NO: 1888385
gucauuaguggcuagauug

SEQ ID NO: 2531943 - RNA, 19 nt, Artificial Sequence
  Description of Artificial Sequence: Synthetic oligonucleotide
  Antisense strand to SEQ ID NO: 2531942
caaucuagccacuaaugac

SEQ ID NO: 2531944 - RNA, 19 nt, Artificial Sequence
  Description of Artificial Sequence: Synthetic oligonucleotide
  Sense strand starting at position 2770 of SEQ ID NO: 1888385
ccaugacaaguuuguuaau

SEQ ID NO: 2531945 - RNA, 19 nt, Artificial Sequence
  Description of Artificial Sequence: Synthetic oligonucleotide
  Antisense strand to SEQ ID NO: 2531944
auuaacaaacuugucaugg

SEQ ID NO: 2531946 - RNA, 19 nt, Artificial Sequence
  Description of Artificial Sequence: Synthetic oligonucleotide
  Sense strand starting at position 1530 of SEQ ID NO: 1888385
cugguauaagccuaaagcu

SEQ ID NO: 2531947 - RNA, 19 nt, Artificial Sequence
  Description of Artificial Sequence: Synthetic oligonucleotide
  Antisense strand to SEQ ID NO: 2531946
agcuuuaggcuuauaccag

SEQ ID NO: 2531948 - RNA, 19 nt, Artificial Sequence
  Description of Artificial Sequence: Synthetic oligonucleotide
  Sense strand starting at position 3693 of SEQ ID NO: 1888385
acggaaauauuuggaaauu

SEQ ID NO: 2531949 - RNA, 19 nt, Artificial Sequence
  Description of Artificial Sequence: Synthetic oligonucleotide
  Antisense strand to SEQ ID NO: 2531948
aauuuccaaauauuuccgu

SEQ ID NO: 2531950 - RNA, 19 nt, Artificial Sequence
  Description of Artificial Sequence: Synthetic oligonucleotide
  Sense strand starting at position 2155 of SEQ ID NO: 1888385
cuaugaagcaugugaaagu

SEQ ID NO: 2531951 - RNA, 19 nt, Artificial Sequence
  Description of Artificial Sequence: Synthetic oligonucleotide
  Antisense strand to SEQ ID NO: 2531950
acuuucacaugcuucauag

SEQ ID NO: 2531952 - RNA, 19 nt, Artificial Sequence
  Description of Artificial Sequence: Synthetic oligonucleotide
  Sense strand starting at position 3346 of SEQ ID NO: 1888385
uguuacuaagcaggaguaa

SEQ ID NO: 2531953 - RNA, 19 nt, Artificial Sequence
  Description of Artificial Sequence: Synthetic oligonucleotide
  Antisense strand to SEQ ID NO: 2531952
uuacuccugcuuaguaaca

SEQ ID NO: 2531954 - RNA, 19 nt, Artificial Sequence
  Description of Artificial Sequence: Synthetic oligonucleotide
  Sense strand starting at position 109 of SEQ ID NO: 1888386
acaagacggcauuaaaucu

SEQ ID NO: 2531955 - RNA, 19 nt, Artificial Sequence
  Description of Artificial Sequence: Synthetic oligonucleotide
  Antisense strand to SEQ ID NO: 2531954
agauuuaaugccgucuugu

SEQ ID NO: 2531956 - RNA, 19 nt, Artificial Sequence
  Description of Artificial Sequence: Synthetic oligonucleotide
  Sense strand starting at position 1197 of SEQ ID NO: 1888386
uuuggaaaucuuuacaguu

SEQ ID NO: 2531957 - RNA, 19 nt, Artificial Sequence
  Description of Artificial Sequence: Synthetic oligonucleotide
  Antisense strand to SEQ ID NO: 2531956
aacuguaaagauuuccaaa

SEQ ID NO: 2531958 - RNA, 19 nt, Artificial Sequence
  Description of Artificial Sequence: Synthetic oligonucleotide
  Sense strand starting at position 2445 of SEQ ID NO: 1888386
uuacauccgaugggauaaa

SEQ ID NO: 2531959 - RNA, 19 nt, Artificial Sequence
  Description of Artificial Sequence: Synthetic oligonucleotide
  Antisense strand to SEQ ID NO: 2531958
uuuaucccaucggauguaa

SEQ ID NO: 2531960 - RNA, 19 nt, Artificial Sequence
  Description of Artificial Sequence: Synthetic oligonucleotide
  Sense strand starting at position 761 of SEQ ID NO: 1888386
aauuguauuugucugugau

SEQ ID NO: 2531961 - RNA, 19 nt, Artificial Sequence
  Description of Artificial Sequence: Synthetic oligonucleotide
  Antisense strand to SEQ ID NO: 2531960
aucacagacaaauacaauu

SEQ ID NO: 2531962 - RNA, 19 nt, Artificial Sequence
  Description of Artificial Sequence: Synthetic oligonucleotide
  Sense strand starting at position 2843 of SEQ ID NO: 1888386
guggaauccacacauguug

SEQ ID NO: 2531963 - RNA, 19 nt, Artificial Sequence
  Description of Artificial Sequence: Synthetic oligonucleotide
  Antisense strand to SEQ ID NO: 2531962
caacauguguggauuccac

SEQ ID NO: 2531964 - RNA, 19 nt, Artificial Sequence
  Description of Artificial Sequence: Synthetic oligonucleotide
  Sense strand starting at position 769 of SEQ ID NO: 1888386
uugucugugaucuagaaag

SEQ ID NO: 2531965 - RNA, 19 nt, Artificial Sequence
  Description of Artificial Sequence: Synthetic oligonucleotide
  Antisense strand to SEQ ID NO: 2531964
cuuucuagaucacagacaa

SEQ ID NO: 2531966 - RNA, 19 nt, Artificial Sequence
  Description of Artificial Sequence: Synthetic oligonucleotide
  Sense strand starting at position 3700 of SEQ ID NO: 1888386
aauggacuauguuucuaga

SEQ ID NO: 2531967 - RNA, 19 nt, Artificial Sequence
  Description of Artificial Sequence: Synthetic oligonucleotide
  Antisense strand to SEQ ID NO: 2531966
ucuagaaacauaguccauu

SEQ ID NO: 2531968 - RNA, 19 nt, Artificial Sequence
  Description of Artificial Sequence: Synthetic oligonucleotide
  Sense strand starting at position 2444 of SEQ ID NO: 1888386
cuuacauccgaugggauaa

SEQ ID NO: 2531969 - RNA, 19 nt, Artificial Sequence
  Description of Artificial Sequence: Synthetic oligonucleotide
  Antisense strand to SEQ ID NO: 2531968
uuaucccaucggauguaag

SEQ ID NO: 2531970 - RNA, 19 nt, Artificial Sequence
  Description of Artificial Sequence: Synthetic oligonucleotide
  Sense strand starting at position 3695 of SEQ ID NO: 1888386
caagcaauggacuauguuu

SEQ ID NO: 2531971 - RNA, 19 nt, Artificial Sequence
  Description of Artificial Sequence: Synthetic oligonucleotide
  Antisense strand to SEQ ID NO: 2531970
aaacauaguccauugcuug

SEQ ID NO: 2531972 - RNA, 19 nt, Artificial Sequence
  Description of Artificial Sequence: Synthetic oligonucleotide
  Sense strand starting at position 3702 of SEQ ID NO: 1888386
uggacuauguuucuagaga

SEQ ID NO: 2531973 - RNA, 19 nt, Artificial Sequence
  Description of Artificial Sequence: Synthetic oligonucleotide
  Antisense strand to SEQ ID NO: 2531972
ucucuagaaacauagucca

SEQ ID NO: 2531974 - RNA, 19 nt, Artificial Sequence
  Description of Artificial Sequence: Synthetic oligonucleotide
  Sense strand starting at position 3864 of SEQ ID NO: 1888386
agaaucuggcuuuggauaa

SEQ ID NO: 2531975 - RNA, 19 nt, Artificial Sequence
  Description of Artificial Sequence: Synthetic oligonucleotide
  Antisense strand to SEQ ID NO: 2531974
uuauccaaagccagauucu

SEQ ID NO: 2531976 - RNA, 19 nt, Artificial Sequence
  Description of Artificial Sequence: Synthetic oligonucleotide
  Sense strand starting at position 41 of SEQ ID NO: 1888386
gaucuauggccauggaaca

SEQ ID NO: 2531977 - RNA, 19 nt, Artificial Sequence
  Description of Artificial Sequence: Synthetic oligonucleotide
  Antisense strand to SEQ ID NO: 2531976
uguuccauggccauagauc

SEQ ID NO: 2531978 - RNA, 19 nt, Artificial Sequence
  Description of Artificial Sequence: Synthetic oligonucleotide
  Sense strand starting at position 293 of SEQ ID NO: 1888386
cggauaguguuuccauuuc

SEQ ID NO: 2531979 - RNA, 19 nt, Artificial Sequence
  Description of Artificial Sequence: Synthetic oligonucleotide
  Antisense strand to SEQ ID NO: 2531978
gaaauggaaacacuauccg

SEQ ID NO: 2531980 - RNA, 19 nt, Artificial Sequence
  Description of Artificial Sequence: Synthetic oligonucleotide
  Sense strand starting at position 2039 of SEQ ID NO: 1888386
ugaccaaaguucuuauaug

SEQ ID NO: 2531981 - RNA, 19 nt, Artificial Sequence
  Description of Artificial Sequence: Synthetic oligonucleotide
  Antisense strand to SEQ ID NO: 2531980
cauauaagaacuuugguca

SEQ ID NO: 2531982 - RNA, 19 nt, Artificial Sequence
  Description of Artificial Sequence: Synthetic oligonucleotide
  Sense strand starting at position 762 of SEQ ID NO: 1888386
auuguauuugucugugauc

SEQ ID NO: 2531983 - RNA, 19 nt, Artificial Sequence
  Description of Artificial Sequence: Synthetic oligonucleotide
  Antisense strand to SEQ ID NO: 2531982
gaucacagacaaauacaau

SEQ ID NO: 2531984 - RNA, 19 nt, Artificial Sequence
  Description of Artificial Sequence: Synthetic oligonucleotide
  Sense strand starting at position 764 of SEQ ID NO: 1888386
uguauuugucugugaucua

SEQ ID NO: 2531985 - RNA, 19 nt, Artificial Sequence
  Description of Artificial Sequence: Synthetic oligonucleotide
  Antisense strand to SEQ ID NO: 2531984
uagaucacagacaaauaca

SEQ ID NO: 2531986 - RNA, 19 nt, Artificial Sequence
  Description of Artificial Sequence: Synthetic oligonucleotide
  Sense strand starting at position 771 of SEQ ID NO: 1888386
gucugugaucuagaaagua

SEQ ID NO: 2531987 - RNA, 19 nt, Artificial Sequence
  Description of Artificial Sequence: Synthetic oligonucleotide
  Antisense strand to SEQ ID NO: 2531986
uacuuucuagaucacagac

SEQ ID NO: 2531988 - RNA, 19 nt, Artificial Sequence
  Description of Artificial Sequence: Synthetic oligonucleotide
  Sense strand starting at position 596 of SEQ ID NO: 1888386
ucuagcaaccaaugagauu

SEQ ID NO: 2531989 - RNA, 19 nt, Artificial Sequence
  Description of Artificial Sequence: Synthetic oligonucleotide
  Antisense strand to SEQ ID NO: 2531988
aaucucauugguugcuaga

SEQ ID NO: 2531990 - RNA, 19 nt, Artificial Sequence
  Description of Artificial Sequence: Synthetic oligonucleotide
  Sense strand starting at position 3907 of SEQ ID NO: 1888386
uuauauaaagcuggacauu

SEQ ID NO: 2531991 - RNA, 19 nt, Artificial Sequence
  Description of Artificial Sequence: Synthetic oligonucleotide
  Antisense strand to SEQ ID NO: 2531990
aauguccagcuuuauauaa

SEQ ID NO: 2531992 - RNA, 19 nt, Artificial Sequence
  Description of Artificial Sequence: Synthetic oligonucleotide
  Sense strand starting at position 2377 of SEQ ID NO: 1888386
ggagacccucgaugaguaa

SEQ ID NO: 2531993 - RNA, 19 nt, Artificial Sequence
  Description of Artificial Sequence: Synthetic oligonucleotide
  Antisense strand to SEQ ID NO: 2531992
uuacucaucgagggucucc

SEQ ID NO: 2531994 - RNA, 19 nt, Artificial Sequence
  Description of Artificial Sequence: Synthetic oligonucleotide
  Sense strand starting at position 2443 of SEQ ID NO: 1888386
ucuuacauccgaugggaua

SEQ ID NO: 2531995 - RNA, 19 nt, Artificial Sequence
  Description of Artificial Sequence: Synthetic oligonucleotide
  Antisense strand to SEQ ID NO: 2531994
uaucccaucggauguaaga

SEQ ID NO: 2531996 - RNA, 19 nt, Artificial Sequence
  Description of Artificial Sequence: Synthetic oligonucleotide
  Sense strand starting at position 763 of SEQ ID NO: 1888386
uuguauuugucugugaucu

SEQ ID NO: 2531997 - RNA, 19 nt, Artificial Sequence
  Description of Artificial Sequence: Synthetic oligonucleotide
  Antisense strand to SEQ ID NO: 2531996
agaucacagacaaauacaa

SEQ ID NO: 2531998 - RNA, 19 nt, Artificial Sequence
  Description of Artificial Sequence: Synthetic oligonucleotide
  Sense strand starting at position 2243 of SEQ ID NO: 1888386
aaaugaugucggcauugac

SEQ ID NO: 2531999 - RNA, 19 nt, Artificial Sequence
  Description of Artificial Sequence: Synthetic oligonucleotide
  Antisense strand to SEQ ID NO: 2531998
gucaaugccgacaucauuu

SEQ ID NO: 2532000 - RNA, 19 nt, Artificial Sequence
  Description of Artificial Sequence: Synthetic oligonucleotide
  Sense strand starting at position 2250 of SEQ ID NO: 1888386
gucggcauugaccaaugaa

SEQ ID NO: 2532001 - RNA, 19 nt, Artificial Sequence
  Description of Artificial Sequence: Synthetic oligonucleotide
  Antisense strand to SEQ ID NO: 2532000
uucauuggucaaugccgac

SEQ ID NO: 2532002 - RNA, 19 nt, Artificial Sequence
  Description of Artificial Sequence: Synthetic oligonucleotide
  Sense strand starting at position 3026 of SEQ ID NO: 1888386
uugacaaucccuggccaaa

SEQ ID NO: 2532003 - RNA, 19 nt, Artificial Sequence
  Description of Artificial Sequence: Synthetic oligonucleotide
  Antisense strand to SEQ ID NO: 2532002
uuuggccagggauugucaa

SEQ ID NO: 2532004 - RNA, 19 nt, Artificial Sequence
  Description of Artificial Sequence: Synthetic oligonucleotide
  Sense strand starting at position 3273 of SEQ ID NO: 1888386
gccgcaugugguaagguuu

SEQ ID NO: 2532005 - RNA, 19 nt, Artificial Sequence
  Description of Artificial Sequence: Synthetic oligonucleotide
  Antisense strand to SEQ ID NO: 2532004
aaaccuuaccacaugcggc

SEQ ID NO: 2532006 - RNA, 19 nt, Artificial Sequence
  Description of Artificial Sequence: Synthetic oligonucleotide
  Sense strand starting at position 1736 of SEQ ID NO: 1888386
ggcaguuugccagagaaug

SEQ ID NO: 2532007 - RNA, 19 nt, Artificial Sequence
  Description of Artificial Sequence: Synthetic oligonucleotide
  Antisense strand to SEQ ID NO: 2532006
cauucucuggcaaacugcc

SEQ ID NO: 2532008 - RNA, 19 nt, Artificial Sequence
  Description of Artificial Sequence: Synthetic oligonucleotide
  Sense strand starting at position 1440 of SEQ ID NO: 1888386
gcuuuaugccucgugcuga

SEQ ID NO: 2532009 - RNA, 19 nt, Artificial Sequence
  Description of Artificial Sequence: Synthetic oligonucleotide
  Antisense strand to SEQ ID NO: 2532008
ucagcacgaggcauaaagc

SEQ ID NO: 2532010 - RNA, 19 nt, Artificial Sequence
  Description of Artificial Sequence: Synthetic oligonucleotide
  Sense strand starting at position 3861 of SEQ ID NO: 1888386
cccagaaucuggcuuugga

SEQ ID NO: 2532011 - RNA, 19 nt, Artificial Sequence
  Description of Artificial Sequence: Synthetic oligonucleotide
  Antisense strand to SEQ ID NO: 2532010
uccaaagccagauucuggg

SEQ ID NO: 2532012 - RNA, 19 nt, Artificial Sequence
  Description of Artificial Sequence: Synthetic oligonucleotide
  Sense strand starting at position 3543 of SEQ ID NO: 1888386
auaggcaaauugucaucua

SEQ ID NO: 2532013 - RNA, 19 nt, Artificial Sequence
  Description of Artificial Sequence: Synthetic oligonucleotide
  Antisense strand to SEQ ID NO: 2532012
uagaugacaauuugccuau

SEQ ID NO: 2532014 - RNA, 19 nt, Artificial Sequence
  Description of Artificial Sequence: Synthetic oligonucleotide
  Sense strand starting at position 3015 of SEQ ID NO: 1888386
acggcaagagguugacaau

SEQ ID NO: 2532015 - RNA, 19 nt, Artificial Sequence
  Description of Artificial Sequence: Synthetic oligonucleotide
  Antisense strand to SEQ ID NO: 2532014
auugucaaccucuugccgu

SEQ ID NO: 2532016 - RNA, 19 nt, Artificial Sequence
  Description of Artificial Sequence: Synthetic oligonucleotide
  Sense strand starting at position 2973 of SEQ ID NO: 1888386
gaauucugagaaggugcuu

SEQ ID NO: 2532017 - RNA, 19 nt, Artificial Sequence
  Description of Artificial Sequence: Synthetic oligonucleotide
  Antisense strand to SEQ ID NO: 2532016
aagcaccuucucagaauuc

SEQ ID NO: 2532018 - RNA, 19 nt, Artificial Sequence
  Description of Artificial Sequence: Synthetic oligonucleotide
  Sense strand starting at position 961 of SEQ ID NO: 1888386
cgaaaugaagcguaucuua

SEQ ID NO: 2532019 - RNA, 19 nt, Artificial Sequence
  Description of Artificial Sequence: Synthetic oligonucleotide
  Antisense strand to SEQ ID NO: 2532018
uaagauacgcuucauuucg

SEQ ID NO: 2532020 - RNA, 19 nt, Artificial Sequence
  Description of Artificial Sequence: Synthetic oligonucleotide
  Sense strand starting at position 517 of SEQ ID NO: 1888386
aaauuaucagcagguggua

SEQ ID NO: 2532021 - RNA, 19 nt, Artificial Sequence
  Description of Artificial Sequence: Synthetic oligonucleotide
  Antisense strand to SEQ ID NO: 2532020
uaccaccugcugauaauuu

SEQ ID NO: 2532022 - RNA, 19 nt, Artificial Sequence
  Description of Artificial Sequence: Synthetic oligonucleotide
  Sense strand starting at position 2334 of SEQ ID NO: 1888386
cugaguccucauuggaucu

SEQ ID NO: 2532023 - RNA, 19 nt, Artificial Sequence
  Description of Artificial Sequence: Synthetic oligonucleotide
  Antisense strand to SEQ ID NO: 2532022
agauccaaugaggacucag

SEQ ID NO: 2532024 - RNA, 19 nt, Artificial Sequence
  Description of Artificial Sequence: Synthetic oligonucleotide
  Sense strand starting at position 3823 of SEQ ID NO: 1888386
aucugauguuucuuccaca

SEQ ID NO: 2532025 - RNA, 19 nt, Artificial Sequence
  Description of Artificial Sequence: Synthetic oligonucleotide
  Antisense strand to SEQ ID NO: 2532024
uguggaagaaacaucagau

SEQ ID NO: 2532026 - RNA, 19 nt, Artificial Sequence
  Description of Artificial Sequence: Synthetic oligonucleotide
  Sense strand starting at position 519 of SEQ ID NO: 1888386
auuaucagcaggugguaua

SEQ ID NO: 2532027 - RNA, 19 nt, Artificial Sequence
  Description of Artificial Sequence: Synthetic oligonucleotide
  Antisense strand to SEQ ID NO: 2532026
uauaccaccugcugauaau

SEQ ID NO: 2532028 - RNA, 19 nt, Artificial Sequence
  Description of Artificial Sequence: Synthetic oligonucleotide
  Sense strand starting at position 2047 of SEQ ID NO: 1888386
guucuuauaugccuuaaag

SEQ ID NO: 2532029 - RNA, 19 nt, Artificial Sequence
  Description of Artificial Sequence: Synthetic oligonucleotide
  Antisense strand to SEQ ID NO: 2532028
cuuuaaggcauauaagaac

SEQ ID NO: 2532030 - RNA, 19 nt, Artificial Sequence
  Description of Artificial Sequence: Synthetic oligonucleotide
  Sense strand starting at position 3334 of SEQ ID NO: 1888386
caggaaagcucuuccuugu

SEQ ID NO: 2532031 - RNA, 19 nt, Artificial Sequence
  Description of Artificial Sequence: Synthetic oligonucleotide
  Antisense strand to SEQ ID NO: 2532030
acaaggaagagcuuuccug

SEQ ID NO: 2532032 - RNA, 19 nt, Artificial Sequence
  Description of Artificial Sequence: Synthetic oligonucleotide
  Sense strand starting at position 725 of SEQ ID NO: 1888386
uggaauguuuggcucuauu

SEQ ID NO: 2532033 - RNA, 19 nt, Artificial Sequence
  Description of Artificial Sequence: Synthetic oligonucleotide
  Antisense strand to SEQ ID NO: 2532032
aauagagccaaacauucca

SEQ ID NO: 2532034 - RNA, 19 nt, Artificial Sequence
  Description of Artificial Sequence: Synthetic oligonucleotide
  Sense strand starting at position 230 of SEQ ID NO: 1888387
acuuguauuuagcuucuga

SEQ ID NO: 2532035 - RNA, 19 nt, Artificial Sequence
  Description of Artificial Sequence: Synthetic oligonucleotide
  Antisense strand to SEQ ID NO: 2532034
ucagaagcuaaauacaagu

SEQ ID NO: 2532036 - RNA, 19 nt, Artificial Sequence
  Description of Artificial Sequence: Synthetic oligonucleotide
  Sense strand starting at position 1312 of SEQ ID NO: 1888387
aguuauggugacuaauauc

SEQ ID NO: 2532037 - RNA, 19 nt, Artificial Sequence
  Description of Artificial Sequence: Synthetic oligonucleotide
  Antisense strand to SEQ ID NO: 2532036
gauauuagucaccauaacu

SEQ ID NO: 2532038 - RNA, 19 nt, Artificial Sequence
  Description of Artificial Sequence: Synthetic oligonucleotide
  Sense strand starting at position 1318 of SEQ ID NO: 1888387
ggugacuaauaucuacuaa

SEQ ID NO: 2532039 - RNA, 19 nt, Artificial Sequence
  Description of Artificial Sequence: Synthetic oligonucleotide
  Antisense strand to SEQ ID NO: 2532038
uuaguagauauuagucacc

SEQ ID NO: 2532040 - RNA, 19 nt, Artificial Sequence
  Description of Artificial Sequence: Synthetic oligonucleotide
  Sense strand starting at position 86 of SEQ ID NO: 1888387
cccauaugcaugggagaag

SEQ ID NO: 2532041 - RNA, 19 nt, Artificial Sequence
  Description of Artificial Sequence: Synthetic oligonucleotide
  Antisense strand to SEQ ID NO: 2532040
cuucucccaugcauauggg

SEQ ID NO: 2532042 - RNA, 19 nt, Artificial Sequence
  Description of Artificial Sequence: Synthetic oligonucleotide
  Sense strand starting at position 1373 of SEQ ID NO: 1888387
auaguugugagugaaacac

SEQ ID NO: 2532043 - RNA, 19 nt, Artificial Sequence
  Description of Artificial Sequence: Synthetic oligonucleotide
  Antisense strand to SEQ ID NO: 2532042
guguuucacucacaacuau

SEQ ID NO: 2532044 - RNA, 19 nt, Artificial Sequence
  Description of Artificial Sequence: Synthetic oligonucleotide
  Sense strand starting at position 1928 of SEQ ID NO: 1888387
gcgagauaugcagacagga

SEQ ID NO: 2532045 - RNA, 19 nt, Artificial Sequence
  Description of Artificial Sequence: Synthetic oligonucleotide
  Antisense strand to SEQ ID NO: 2532044
uccugucugcauaucucgc

SEQ ID NO: 2532046 - RNA, 19 nt, Artificial Sequence
  Description of Artificial Sequence: Synthetic oligonucleotide
  Sense strand starting at position 3381 of SEQ ID NO: 1888387
ucgugugaggcaaggaguu

SEQ ID NO: 2532047 - RNA, 19 nt, Artificial Sequence
  Description of Artificial Sequence: Synthetic oligonucleotide
  Antisense strand to SEQ ID NO: 2532046
aacuccuugccucacacga

SEQ ID NO: 2532048 - RNA, 19 nt, Artificial Sequence
  Description of Artificial Sequence: Synthetic oligonucleotide
  Sense strand starting at position 100 of SEQ ID NO: 1888387
agaagaugauacuauuucu

SEQ ID NO: 2532049 - RNA, 19 nt, Artificial Sequence
  Description of Artificial Sequence: Synthetic oligonucleotide
  Antisense strand to SEQ ID NO: 2532048
agaaauaguaucaucuucu

SEQ ID NO: 2532050 - RNA, 19 nt, Artificial Sequence
  Description of Artificial Sequence: Synthetic oligonucleotide
  Sense strand starting at position 84 of SEQ ID NO: 1888387
aucccauaugcaugggaga

SEQ ID NO: 2532051 - RNA, 19 nt, Artificial Sequence
  Description of Artificial Sequence: Synthetic oligonucleotide
  Antisense strand to SEQ ID NO: 2532050
ucucccaugcauaugggau

SEQ ID NO: 2532052 - RNA, 19 nt, Artificial Sequence
  Description of Artificial Sequence: Synthetic oligonucleotide
  Sense strand starting at position 85 of SEQ ID NO: 1888387
ucccauaugcaugggagaa

SEQ ID NO: 2532053 - RNA, 19 nt, Artificial Sequence
  Description of Artificial Sequence: Synthetic oligonucleotide
  Antisense strand to SEQ ID NO: 2532052
uucucccaugcauauggga

SEQ ID NO: 2532054 - RNA, 19 nt, Artificial Sequence
  Description of Artificial Sequence: Synthetic oligonucleotide
  Sense strand starting at position 1833 of SEQ ID NO: 1888387
ugguaugaauuaucaucau

SEQ ID NO: 2532055 - RNA, 19 nt, Artificial Sequence
  Description of Artificial Sequence: Synthetic oligonucleotide
  Antisense strand to SEQ ID NO: 2532054
augaugauaauucauacca

SEQ ID NO: 2532056 - RNA, 19 nt, Artificial Sequence
  Description of Artificial Sequence: Synthetic oligonucleotide
  Sense strand starting at position 238 of SEQ ID NO: 1888387
uuagcuucugaugggagaa

SEQ ID NO: 2532057 - RNA, 19 nt, Artificial Sequence
  Description of Artificial Sequence: Synthetic oligonucleotide
  Antisense strand to SEQ ID NO: 2532056
uucucccaucagaagcuaa

SEQ ID NO: 2532058 - RNA, 19 nt, Artificial Sequence
  Description of Artificial Sequence: Synthetic oligonucleotide
  Sense strand starting at position 435 of SEQ ID NO: 1888387
ugacuagcugauggagauu

SEQ ID NO: 2532059 - RNA, 19 nt, Artificial Sequence
  Description of Artificial Sequence: Synthetic oligonucleotide
  Antisense strand to SEQ ID NO: 2532058
aaucuccaucagcuaguca

SEQ ID NO: 2532060 - RNA, 19 nt, Artificial Sequence
  Description of Artificial Sequence: Synthetic oligonucleotide
  Sense strand starting at position 636 of SEQ ID NO: 1888387
agguaagguccuggaacua

SEQ ID NO: 2532061 - RNA, 19 nt, Artificial Sequence
  Description of Artificial Sequence: Synthetic oligonucleotide
  Antisense strand to SEQ ID NO: 2532060
uaguuccaggaccuuaccu

SEQ ID NO: 2532062 - RNA, 19 nt, Artificial Sequence
  Description of Artificial Sequence: Synthetic oligonucleotide
  Sense strand starting at position 26 of SEQ ID NO: 1888387
uacaaauaccacggguuaa

SEQ ID NO: 2532063 - RNA, 19 nt, Artificial Sequence
  Description of Artificial Sequence: Synthetic oligonucleotide
  Antisense strand to SEQ ID NO: 2532062
uuaacccgugguauuugua

SEQ ID NO: 2532064 - RNA, 19 nt, Artificial Sequence
  Description of Artificial Sequence: Synthetic oligonucleotide
  Sense strand starting at position 1394 of SEQ ID NO: 1888387
aaagaaauagcgcauagua

SEQ ID NO: 2532065 - RNA, 19 nt, Artificial Sequence
  Description of Artificial Sequence: Synthetic oligonucleotide
  Antisense strand to SEQ ID NO: 2532064
uacuaugcgcuauuucuuu

SEQ ID NO: 2532066 - RNA, 19 nt, Artificial Sequence
  Description of Artificial Sequence: Synthetic oligonucleotide
  Sense strand starting at position 1311 of SEQ ID NO: 1888387
gaguuauggugacuaauau

SEQ ID NO: 2532067 - RNA, 19 nt, Artificial Sequence
  Description of Artificial Sequence: Synthetic oligonucleotide
  Antisense strand to SEQ ID NO: 2532066
auauuagucaccauaacuc

SEQ ID NO: 2532068 - RNA, 19 nt, Artificial Sequence
  Description of Artificial Sequence: Synthetic oligonucleotide
  Sense strand starting at position 1478 of SEQ ID NO: 1888387
acaaauauggcuggugaug

SEQ ID NO: 2532069 - RNA, 19 nt, Artificial Sequence
  Description of Artificial Sequence: Synthetic oligonucleotide
  Antisense strand to SEQ ID NO: 2532068
caucaccagccauauuugu

SEQ ID NO: 2532070 - RNA, 19 nt, Artificial Sequence
  Description of Artificial Sequence: Synthetic oligonucleotide
  Sense strand starting at position 1366 of SEQ ID NO: 1888387
agaagacauaguugugagu

SEQ ID NO: 2532071 - RNA, 19 nt, Artificial Sequence
  Description of Artificial Sequence: Synthetic oligonucleotide
  Antisense strand to SEQ ID NO: 2532070
acucacaacuaugucuucu

SEQ ID NO: 2532072 - RNA, 19 nt, Artificial Sequence
  Description of Artificial Sequence: Synthetic oligonucleotide
  Sense strand starting at position 1396 of SEQ ID NO: 1888387
agaaauagcgcauaguaca

SEQ ID NO: 2532073 - RNA, 19 nt, Artificial Sequence
  Description of Artificial Sequence: Synthetic oligonucleotide
  Antisense strand to SEQ ID NO: 2532072
uguacuaugcgcuauuucu

SEQ ID NO: 2532074 - RNA, 19 nt, Artificial Sequence
  Description of Artificial Sequence: Synthetic oligonucleotide
  Sense strand starting at position 160 of SEQ ID NO: 1888387
aucagaaacgcuuggacau

SEQ ID NO: 2532075 - RNA, 19 nt, Artificial Sequence
  Description of Artificial Sequence: Synthetic oligonucleotide
  Antisense strand to SEQ ID NO: 2532074
auguccaagcguuucugau

SEQ ID NO: 2532076 - RNA, 19 nt, Artificial Sequence
  Description of Artificial Sequence: Synthetic oligonucleotide
  Sense strand starting at position 1477 of SEQ ID NO: 1888387
cacaaauauggcuggugau

SEQ ID NO: 2532077 - RNA, 19 nt, Artificial Sequence
  Description of Artificial Sequence: Synthetic oligonucleotide
  Antisense strand to SEQ ID NO: 2532076
aucaccagccauauuugug

SEQ ID NO: 2532078 - RNA, 19 nt, Artificial Sequence
  Description of Artificial Sequence: Synthetic oligonucleotide
  Sense strand starting at position 1372 of SEQ ID NO: 1888387
cauaguugugagugaaaca

SEQ ID NO: 2532079 - RNA, 19 nt, Artificial Sequence
  Description of Artificial Sequence: Synthetic oligonucleotide
  Antisense strand to SEQ ID NO: 2532078
uguuucacucacaacuaug

SEQ ID NO: 2532080 - RNA, 19 nt, Artificial Sequence
  Description of Artificial Sequence: Synthetic oligonucleotide
  Sense strand starting at position 1506 of SEQ ID NO: 1888387
cgggaaagcacucauuguu

SEQ ID NO: 2532081 - RNA, 19 nt, Artificial Sequence
  Description of Artificial Sequence: Synthetic oligonucleotide
  Antisense strand to SEQ ID NO: 2532080
aacaaugagugcuuucccg

SEQ ID NO: 2532082 - RNA, 19 nt, Artificial Sequence
  Description of Artificial Sequence: Synthetic oligonucleotide
  Sense strand starting at position 1567 of SEQ ID NO: 1888387
ugacaauggcacugagguu

SEQ ID NO: 2532083 - RNA, 19 nt, Artificial Sequence
  Description of Artificial Sequence: Synthetic oligonucleotide
  Antisense strand to SEQ ID NO: 2532082
aaccucagugccauuguca

SEQ ID NO: 2532084 - RNA, 19 nt, Artificial Sequence
  Description of Artificial Sequence: Synthetic oligonucleotide
  Sense strand starting at position 1826 of SEQ ID NO: 1888387
gcaacucugguaugaauua

SEQ ID NO: 2532085 - RNA, 19 nt, Artificial Sequence
  Description of Artificial Sequence: Synthetic oligonucleotide
  Antisense strand to SEQ ID NO: 2532084
uaauucauaccagaguugc

SEQ ID NO: 2532086 - RNA, 19 nt, Artificial Sequence
  Description of Artificial Sequence: Synthetic oligonucleotide
  Sense strand starting at position 161 of SEQ ID NO: 1888387
ucagaaacgcuuggacauu

SEQ ID NO: 2532087 - RNA, 19 nt, Artificial Sequence
  Description of Artificial Sequence: Synthetic oligonucleotide
  Antisense strand to SEQ ID NO: 2532086
aauguccaagcguuucuga

SEQ ID NO: 2532088 - RNA, 19 nt, Artificial Sequence
  Description of Artificial Sequence: Synthetic oligonucleotide
  Sense strand starting at position 25 of SEQ ID NO: 1888387
guacaaauaccacggguua

SEQ ID NO: 2532089 - RNA, 19 nt, Artificial Sequence
  Description of Artificial Sequence: Synthetic oligonucleotide
  Antisense strand to SEQ ID NO: 2532088
uaacccgugguauuuguac

SEQ ID NO: 2532090 - RNA, 19 nt, Artificial Sequence
  Description of Artificial Sequence: Synthetic oligonucleotide
  Sense strand starting at position 3275 of SEQ ID NO: 1888387
agagcuuggacauguccua

SEQ ID NO: 2532091 - RNA, 19 nt, Artificial Sequence
  Description of Artificial Sequence: Synthetic oligonucleotide
  Antisense strand to SEQ ID NO: 2532090
uaggacauguccaagcucu

SEQ ID NO: 2532092 - RNA, 19 nt, Artificial Sequence
  Description of Artificial Sequence: Synthetic oligonucleotide
  Sense strand starting at position 1299 of SEQ ID NO: 1888387
uccugugcuggagaguuau

SEQ ID NO: 2532093 - RNA, 19 nt, Artificial Sequence
  Description of Artificial Sequence: Synthetic oligonucleotide
  Antisense strand to SEQ ID NO: 2532092
auaacucuccagcacagga

SEQ ID NO: 2532094 - RNA, 19 nt, Artificial Sequence
  Description of Artificial Sequence: Synthetic oligonucleotide
  Sense strand starting at position 557 of SEQ ID NO: 1888387
uugcaaaugagcuaacgua

SEQ ID NO: 2532095 - RNA, 19 nt, Artificial Sequence
  Description of Artificial Sequence: Synthetic oligonucleotide
  Antisense strand to SEQ ID NO: 2532094
uacguuagcucauuugcaa

SEQ ID NO: 2532096 - RNA, 19 nt, Artificial Sequence
  Description of Artificial Sequence: Synthetic oligonucleotide
  Sense strand starting at position 659 of SEQ ID NO: 1888387
guccuaaauuguguuaaac

SEQ ID NO: 2532097 - RNA, 19 nt, Artificial Sequence
  Description of Artificial Sequence: Synthetic oligonucleotide
  Antisense strand to SEQ ID NO: 2532096
guuuaacacaauuuaggac

SEQ ID NO: 2532098 - RNA, 19 nt, Artificial Sequence
  Description of Artificial Sequence: Synthetic oligonucleotide
  Sense strand starting at position 235 of SEQ ID NO: 1888387
uauuuagcuucugauggga

SEQ ID NO: 2532099 - RNA, 19 nt, Artificial Sequence
  Description of Artificial Sequence: Synthetic oligonucleotide
  Antisense strand to SEQ ID NO: 2532098
ucccaucagaagcuaaaua

SEQ ID NO: 2532100 - RNA, 19 nt, Artificial Sequence
  Description of Artificial Sequence: Synthetic oligonucleotide
  Sense strand starting at position 97 of SEQ ID NO: 1888387
gggagaagaugauacuauu

SEQ ID NO: 2532101 - RNA, 19 nt, Artificial Sequence
  Description of Artificial Sequence: Synthetic oligonucleotide
  Antisense strand to SEQ ID NO: 2532100
aauaguaucaucuucuccc

SEQ ID NO: 2532102 - RNA, 19 nt, Artificial Sequence
  Description of Artificial Sequence: Synthetic oligonucleotide
  Sense strand starting at position 481 of SEQ ID NO: 1888387
ggccuaugguucuuaauau

SEQ ID NO: 2532103 - RNA, 19 nt, Artificial Sequence
  Description of Artificial Sequence: Synthetic oligonucleotide
  Antisense strand to SEQ ID NO: 2532102
auauuaagaaccauaggcc

SEQ ID NO: 2532104 - RNA, 19 nt, Artificial Sequence
  Description of Artificial Sequence: Synthetic oligonucleotide
  Sense strand starting at position 1297 of SEQ ID NO: 1888387
ucuccugugcuggagaguu

SEQ ID NO: 2532105 - RNA, 19 nt, Artificial Sequence
  Description of Artificial Sequence: Synthetic oligonucleotide
  Antisense strand to SEQ ID NO: 2532104
aacucuccagcacaggaga

SEQ ID NO: 2532106 - RNA, 19 nt, Artificial Sequence
  Description of Artificial Sequence: Synthetic oligonucleotide
  Sense strand starting at position 2429 of SEQ ID NO: 1888387
guuggugguaugugaauaa

SEQ ID NO: 2532107 - RNA, 19 nt, Artificial Sequence
  Description of Artificial Sequence: Synthetic oligonucleotide
  Antisense strand to SEQ ID NO: 2532106
uuauucacauaccaccaac

SEQ ID NO: 2532108 - RNA, 19 nt, Artificial Sequence
  Description of Artificial Sequence: Synthetic oligonucleotide
  Sense strand starting at position 1340 of SEQ ID NO: 1888387
ucauuagccaagugugaug

SEQ ID NO: 2532109 - RNA, 19 nt, Artificial Sequence
  Description of Artificial Sequence: Synthetic oligonucleotide
  Antisense strand to SEQ ID NO: 2532108
caucacacuuggcuaauga

SEQ ID NO: 2532110 - RNA, 19 nt, Artificial Sequence
  Description of Artificial Sequence: Synthetic oligonucleotide
  Sense strand starting at position 887 of SEQ ID NO: 1888387
ugcuuccagcauuggauua

SEQ ID NO: 2532111 - RNA, 19 nt, Artificial Sequence
  Description of Artificial Sequence: Synthetic oligonucleotide
  Antisense strand to SEQ ID NO: 2532110
uaauccaaugcuggaagca

SEQ ID NO: 2532112 - RNA, 19 nt, Artificial Sequence
  Description of Artificial Sequence: Synthetic oligonucleotide
  Sense strand starting at position 106 of SEQ ID NO: 1888387
ugauacuauuucuagucuu

SEQ ID NO: 2532113 - RNA, 19 nt, Artificial Sequence
  Description of Artificial Sequence: Synthetic oligonucleotide
  Antisense strand to SEQ ID NO: 2532112
aagacuagaaauaguauca

SEQ ID NO: 2532114 - RNA, 19 nt, Artificial Sequence
  Description of Artificial Sequence: Synthetic oligonucleotide
  Sense strand starting at position 1491 of SEQ ID NO: 1888388
uguguuauuuccuucugaa

SEQ ID NO: 2532115 - RNA, 19 nt, Artificial Sequence
  Description of Artificial Sequence: Synthetic oligonucleotide
  Antisense strand to SEQ ID NO: 2532114
uucagaaggaaauaacaca

SEQ ID NO: 2532116 - RNA, 19 nt, Artificial Sequence
  Description of Artificial Sequence: Synthetic oligonucleotide
  Sense strand starting at position 2782 of SEQ ID NO: 1888388
cuucuuucggcucauauuu

SEQ ID NO: 2532117 - RNA, 19 nt, Artificial Sequence
  Description of Artificial Sequence: Synthetic oligonucleotide
  Antisense strand to SEQ ID NO: 2532116
aaauaugagccgaaagaag

SEQ ID NO: 2532118 - RNA, 19 nt, Artificial Sequence
  Description of Artificial Sequence: Synthetic oligonucleotide
  Sense strand starting at position 451 of SEQ ID NO: 1888388
uagaucucagguuaaaugu

SEQ ID NO: 2532119 - RNA, 19 nt, Artificial Sequence
  Description of Artificial Sequence: Synthetic oligonucleotide
  Antisense strand to SEQ ID NO: 2532118
acauuuaaccugagaucua

SEQ ID NO: 2532120 - RNA, 19 nt, Artificial Sequence
  Description of Artificial Sequence: Synthetic oligonucleotide
  Sense strand starting at position 2109 of SEQ ID NO: 1888388
gggagcaagccagauucua

SEQ ID NO: 2532121 - RNA, 19 nt, Artificial Sequence
  Description of Artificial Sequence: Synthetic oligonucleotide
  Antisense strand to SEQ ID NO: 2532120
uagaaucuggcuugcuccc

SEQ ID NO: 2532122 - RNA, 19 nt, Artificial Sequence
  Description of Artificial Sequence: Synthetic oligonucleotide
  Sense strand starting at position 1490 of SEQ ID NO: 1888388
cuguguuauuuccuucuga

SEQ ID NO: 2532123 - RNA, 19 nt, Artificial Sequence
  Description of Artificial Sequence: Synthetic oligonucleotide
  Antisense strand to SEQ ID NO: 2532122
ucagaaggaaauaacacag

SEQ ID NO: 2532124 - RNA, 19 nt, Artificial Sequence
  Description of Artificial Sequence: Synthetic oligonucleotide
  Sense strand starting at position 2130 of SEQ ID NO: 1888388
aacagugucccugacauug

SEQ ID NO: 2532125 - RNA, 19 nt, Artificial Sequence
  Description of Artificial Sequence: Synthetic oligonucleotide
  Antisense strand to SEQ ID NO: 2532124
caaugucagggacacuguu

SEQ ID NO: 2532126 - RNA, 19 nt, Artificial Sequence
  Description of Artificial Sequence: Synthetic oligonucleotide
  Sense strand starting at position 2159 of SEQ ID NO: 1888388
ugcacagauagaggugaua

SEQ ID NO: 2532127 - RNA, 19 nt, Artificial Sequence
  Description of Artificial Sequence: Synthetic oligonucleotide
  Antisense strand to SEQ ID NO: 2532126
uaucaccucuaucugugca

SEQ ID NO: 2532128 - RNA, 19 nt, Artificial Sequence
  Description of Artificial Sequence: Synthetic oligonucleotide
  Sense strand starting at position 3605 of SEQ ID NO: 1888388
gguacauuauuauccauga

SEQ ID NO: 2532129 - RNA, 19 nt, Artificial Sequence
  Description of Artificial Sequence: Synthetic oligonucleotide
  Antisense strand to SEQ ID NO: 2532128
ucauggauaauaauguacc

SEQ ID NO: 2532130 - RNA, 19 nt, Artificial Sequence
  Description of Artificial Sequence: Synthetic oligonucleotide
  Sense strand starting at position 2577 of SEQ ID NO: 1888388
ucugguggagucuacaauu

SEQ ID NO: 2532131 - RNA, 19 nt, Artificial Sequence
  Description of Artificial Sequence: Synthetic oligonucleotide
  Antisense strand to SEQ ID NO: 2532130
aauuguagacuccaccaga

SEQ ID NO: 2532132 - RNA, 19 nt, Artificial Sequence
  Description of Artificial Sequence: Synthetic oligonucleotide
  Sense strand starting at position 1888 of SEQ ID NO: 1888388
ggcucaucucaugaucuca

SEQ ID NO: 2532133 - RNA, 19 nt, Artificial Sequence
  Description of Artificial Sequence: Synthetic oligonucleotide
  Antisense strand to SEQ ID NO: 2532132
ugagaucaugagaugagcc

SEQ ID NO: 2532134 - RNA, 19 nt, Artificial Sequence
  Description of Artificial Sequence: Synthetic oligonucleotide
  Sense strand starting at position 3570 of SEQ ID NO: 1888388
guugcaguacguuugcuaa

SEQ ID NO: 2532135 - RNA, 19 nt, Artificial Sequence
  Description of Artificial Sequence: Synthetic oligonucleotide
  Antisense strand to SEQ ID NO: 2532134
uuagcaaacguacugcaac

SEQ ID NO: 2532136 - RNA, 19 nt, Artificial Sequence
  Description of Artificial Sequence: Synthetic oligonucleotide
  Sense strand starting at position 2884 of SEQ ID NO: 1888388
ggacuuugccaugagcaac

SEQ ID NO: 2532137 - RNA, 19 nt, Artificial Sequence
  Description of Artificial Sequence: Synthetic oligonucleotide
  Antisense strand to SEQ ID NO: 2532136
guugcucauggcaaagucc

SEQ ID NO: 2532138 - RNA, 19 nt, Artificial Sequence
  Description of Artificial Sequence: Synthetic oligonucleotide
  Sense strand starting at position 515 of SEQ ID NO: 1888388
auuggaaaugucugcagag

SEQ ID NO: 2532139 - RNA, 19 nt, Artificial Sequence
  Description of Artificial Sequence: Synthetic oligonucleotide
  Antisense strand to SEQ ID NO: 2532138
cucugcagacauuuccaau

SEQ ID NO: 2532140 - RNA, 19 nt, Artificial Sequence
  Description of Artificial Sequence: Synthetic oligonucleotide
  Sense strand starting at position 3074 of SEQ ID NO: 1888388
gccugaagcgauaguugug

SEQ ID NO: 2532141 - RNA, 19 nt, Artificial Sequence
  Description of Artificial Sequence: Synthetic oligonucleotide
  Antisense strand to SEQ ID NO: 2532140
cacaacuaucgcuucaggc

SEQ ID NO: 2532142 - RNA, 19 nt, Artificial Sequence
  Description of Artificial Sequence: Synthetic oligonucleotide
  Sense strand starting at position 517 of SEQ ID NO: 1888388
uggaaaugucugcagagca

SEQ ID NO: 2532143 - RNA, 19 nt, Artificial Sequence
  Description of Artificial Sequence: Synthetic oligonucleotide
  Antisense strand to SEQ ID NO: 2532142
ugcucugcagacauuucca

SEQ ID NO: 2532144 - RNA, 19 nt, Artificial Sequence
  Description of Artificial Sequence: Synthetic oligonucleotide
  Sense strand starting at position 2834 of SEQ ID NO: 1888388
cuagaaucccucuggcaga

SEQ ID NO: 2532145 - RNA, 19 nt, Artificial Sequence
  Description of Artificial Sequence: Synthetic oligonucleotide
  Antisense strand to SEQ ID NO: 2532144
ucugccagagggauucuag

SEQ ID NO: 2532146 - RNA, 19 nt, Artificial Sequence
  Description of Artificial Sequence: Synthetic oligonucleotide
  Sense strand starting at position 3473 of SEQ ID NO: 1888388
agagcagugauagguuuaa

SEQ ID NO: 2532147 - RNA, 19 nt, Artificial Sequence
  Description of Artificial Sequence: Synthetic oligonucleotide
  Antisense strand to SEQ ID NO: 2532146
uuaaaccuaucacugcucu

SEQ ID NO: 2532148 - RNA, 19 nt, Artificial Sequence
  Description of Artificial Sequence: Synthetic oligonucleotide
  Sense strand starting at position 2656 of SEQ ID NO: 1888388
cucugcuuuggguaugaca

SEQ ID NO: 2532149 - RNA, 19 nt, Artificial Sequence
  Description of Artificial Sequence: Synthetic oligonucleotide
  Antisense strand to SEQ ID NO: 2532148
ugucauacccaaagcagag

SEQ ID NO: 2532150 - RNA, 19 nt, Artificial Sequence
  Description of Artificial Sequence: Synthetic oligonucleotide
  Sense strand starting at position 3703 of SEQ ID NO: 1888388
gcacgauuacaguaaagca

SEQ ID NO: 2532151 - RNA, 19 nt, Artificial Sequence
  Description of Artificial Sequence: Synthetic oligonucleotide
  Antisense strand to SEQ ID NO: 2532150
ugcuuuacuguaaucgugc

SEQ ID NO: 2532152 - RNA, 19 nt, Artificial Sequence
  Description of Artificial Sequence: Synthetic oligonucleotide
  Sense strand starting at position 1540 of SEQ ID NO: 1888388
agauguguccugcaucaau

SEQ ID NO: 2532153 - RNA, 19 nt, Artificial Sequence
  Description of Artificial Sequence: Synthetic oligonucleotide
  Antisense strand to SEQ ID NO: 2532152
auugaugcaggacacaucu

SEQ ID NO: 2532154 - RNA, 19 nt, Artificial Sequence
  Description of Artificial Sequence: Synthetic oligonucleotide
  Sense strand starting at position 2151 of SEQ ID NO: 1888388
gugcuuacugcacagauag

SEQ ID NO: 2532155 - RNA, 19 nt, Artificial Sequence
  Description of Artificial Sequence: Synthetic oligonucleotide
  Antisense strand to SEQ ID NO: 2532154
cuaucugugcaguaagcac

SEQ ID NO: 2532156 - RNA, 19 nt, Artificial Sequence
  Description of Artificial Sequence: Synthetic oligonucleotide
  Sense strand starting at position 2883 of SEQ ID NO: 1888388
gggacuuugccaugagcaa

SEQ ID NO: 2532157 - RNA, 19 nt, Artificial Sequence
  Description of Artificial Sequence: Synthetic oligonucleotide
  Antisense strand to SEQ ID NO: 2532156
uugcucauggcaaaguccc

SEQ ID NO: 2532158 - RNA, 19 nt, Artificial Sequence
  Description of Artificial Sequence: Synthetic oligonucleotide
  Sense strand starting at position 3810 of SEQ ID NO: 1888388
guccacauugucugauaua

SEQ ID NO: 2532159 - RNA, 19 nt, Artificial Sequence
  Description of Artificial Sequence: Synthetic oligonucleotide
  Antisense strand to SEQ ID NO: 2532158
uauaucagacaauguggac

SEQ ID NO: 2532160 - RNA, 19 nt, Artificial Sequence
  Description of Artificial Sequence: Synthetic oligonucleotide
  Sense strand starting at position 2039 of SEQ ID NO: 1888388
cggaguguucuguaucuaa

SEQ ID NO: 2532161 - RNA, 19 nt, Artificial Sequence
  Description of Artificial Sequence: Synthetic oligonucleotide
  Antisense strand to SEQ ID NO: 2532160
uuagauacagaacacuccg

SEQ ID NO: 2532162 - RNA, 19 nt, Artificial Sequence
  Description of Artificial Sequence: Synthetic oligonucleotide
  Sense strand starting at position 3337 of SEQ ID NO: 1888388
ugccaaggcuagucugaaa

SEQ ID NO: 2532163 - RNA, 19 nt, Artificial Sequence
  Description of Artificial Sequence: Synthetic oligonucleotide
  Antisense strand to SEQ ID NO: 2532162
uuucagacuagccuuggca

SEQ ID NO: 2532164 - RNA, 19 nt, Artificial Sequence
  Description of Artificial Sequence: Synthetic oligonucleotide
  Sense strand starting at position 3901 of SEQ ID NO: 1888388
uaguuaaagugaguuucuu

SEQ ID NO: 2532165 - RNA, 19 nt, Artificial Sequence
  Description of Artificial Sequence: Synthetic oligonucleotide
  Antisense strand to SEQ ID NO: 2532164
aagaaacucacuuuaacua

SEQ ID NO: 2532166 - RNA, 19 nt, Artificial Sequence
  Description of Artificial Sequence: Synthetic oligonucleotide
  Sense strand starting at position 2149 of SEQ ID NO: 1888388
cugugcuuacugcacagau

SEQ ID NO: 2532167 - RNA, 19 nt, Artificial Sequence
  Description of Artificial Sequence: Synthetic oligonucleotide
  Antisense strand to SEQ ID NO: 2532166
aucugugcaguaagcacag

SEQ ID NO: 2532168 - RNA, 19 nt, Artificial Sequence
  Description of Artificial Sequence: Synthetic oligonucleotide
  Sense strand starting at position 3077 of SEQ ID NO: 1888388
ugaagcgauaguugugaua

SEQ ID NO: 2532169 - RNA, 19 nt, Artificial Sequence
  Description of Artificial Sequence: Synthetic oligonucleotide
  Antisense strand to SEQ ID NO: 2532168
uaucacaacuaucgcuuca

SEQ ID NO: 2532170 - RNA, 19 nt, Artificial Sequence
  Description of Artificial Sequence: Synthetic oligonucleotide
  Sense strand starting at position 3 of SEQ ID NO: 1888388
aucacaggguuauaagaaa

SEQ ID NO: 2532171 - RNA, 19 nt, Artificial Sequence
  Description of Artificial Sequence: Synthetic oligonucleotide
  Antisense strand to SEQ ID NO: 2532170
uuucuuauaacccugugau

SEQ ID NO: 2532172 - RNA, 19 nt, Artificial Sequence
  Description of Artificial Sequence: Synthetic oligonucleotide
  Sense strand starting at position 368 of SEQ ID NO: 1888388
gaguucuccuggucuuauc

SEQ ID NO: 2532173 - RNA, 19 nt, Artificial Sequence
  Description of Artificial Sequence: Synthetic oligonucleotide
  Antisense strand to SEQ ID NO: 2532172
gauaagaccaggagaacuc

SEQ ID NO: 2532174 - RNA, 19 nt, Artificial Sequence
  Description of Artificial Sequence: Synthetic oligonucleotide
  Sense strand starting at position 2043 of SEQ ID NO: 1888388
guguucuguaucuaaugca

SEQ ID NO: 2532175 - RNA, 19 nt, Artificial Sequence
  Description of Artificial Sequence: Synthetic oligonucleotide
  Antisense strand to SEQ ID NO: 2532174
ugcauuagauacagaacac

SEQ ID NO: 2532176 - RNA, 19 nt, Artificial Sequence
  Description of Artificial Sequence: Synthetic oligonucleotide
  Sense strand starting at position 3886 of SEQ ID NO: 1888388
cuaauugugucuuuauagu

SEQ ID NO: 2532177 - RNA, 19 nt, Artificial Sequence
  Description of Artificial Sequence: Synthetic oligonucleotide
  Antisense strand to SEQ ID NO: 2532176
acuauaaagacacaauuag

SEQ ID NO: 2532178 - RNA, 19 nt, Artificial Sequence
  Description of Artificial Sequence: Synthetic oligonucleotide
  Sense strand starting at position 79 of SEQ ID NO: 1888388
cccgaucuguccuugauuc

SEQ ID NO: 2532179 - RNA, 19 nt, Artificial Sequence
  Description of Artificial Sequence: Synthetic oligonucleotide
  Antisense strand to SEQ ID NO: 2532178
gaaucaaggacagaucggg

SEQ ID NO: 2532180 - RNA, 19 nt, Artificial Sequence
  Description of Artificial Sequence: Synthetic oligonucleotide
  Sense strand starting at position 2652 of SEQ ID NO: 1888388
gugacucugcuuuggguau

SEQ ID NO: 2532181 - RNA, 19 nt, Artificial Sequence
  Description of Artificial Sequence: Synthetic oligonucleotide
  Antisense strand to SEQ ID NO: 2532180
auacccaaagcagagucac

SEQ ID NO: 2532182 - RNA, 19 nt, Artificial Sequence
  Description of Artificial Sequence: Synthetic oligonucleotide
  Sense strand starting at position 2449 of SEQ ID NO: 1888388
cuccuuuguguuuggucaa

SEQ ID NO: 2532183 - RNA, 19 nt, Artificial Sequence
  Description of Artificial Sequence: Synthetic oligonucleotide
  Antisense strand to SEQ ID NO: 2532182
uugaccaaacacaaaggag

SEQ ID NO: 2532184 - RNA, 19 nt, Artificial Sequence
  Description of Artificial Sequence: Synthetic oligonucleotide
  Sense strand starting at position 2452 of SEQ ID NO: 1888388
cuuuguguuuggucaaggu

SEQ ID NO: 2532185 - RNA, 19 nt, Artificial Sequence
  Description of Artificial Sequence: Synthetic oligonucleotide
  Antisense strand to SEQ ID NO: 2532184
accuugaccaaacacaaag

SEQ ID NO: 2532186 - RNA, 19 nt, Artificial Sequence
  Description of Artificial Sequence: Synthetic oligonucleotide
  Sense strand starting at position 2141 of SEQ ID NO: 1888388
ugacauugcugugcuuacu

SEQ ID NO: 2532187 - RNA, 19 nt, Artificial Sequence
  Description of Artificial Sequence: Synthetic oligonucleotide
  Antisense strand to SEQ ID NO: 2532186
aguaagcacagcaauguca

SEQ ID NO: 2532188 - RNA, 19 nt, Artificial Sequence
  Description of Artificial Sequence: Synthetic oligonucleotide
  Sense strand starting at position 2448 of SEQ ID NO: 1888388
ucuccuuuguguuugguca

SEQ ID NO: 2532189 - RNA, 19 nt, Artificial Sequence
  Description of Artificial Sequence: Synthetic oligonucleotide
  Antisense strand to SEQ ID NO: 2532188
ugaccaaacacaaaggaga

SEQ ID NO: 2532190 - RNA, 19 nt, Artificial Sequence
  Description of Artificial Sequence: Synthetic oligonucleotide
  Sense strand starting at position 2779 of SEQ ID NO: 1888388
ggccuucuuucggcucaua

SEQ ID NO: 2532191 - RNA, 19 nt, Artificial Sequence
  Description of Artificial Sequence: Synthetic oligonucleotide
  Antisense strand to SEQ ID NO: 2532190
uaugagccgaaagaaggcc

SEQ ID NO: 2532192 - RNA, 19 nt, Artificial Sequence
  Description of Artificial Sequence: Synthetic oligonucleotide
  Sense strand starting at position 612 of SEQ ID NO: 1888388
gccucaucggguuggcauu

SEQ ID NO: 2532193 - RNA, 19 nt, Artificial Sequence
  Description of Artificial Sequence: Synthetic oligonucleotide
  Antisense strand to SEQ ID NO: 2532192
aaugccaacccgaugaggc

SEQ ID NO: 2532194 - RNA, 19 nt, Artificial Sequence
  Description of Artificial Sequence: Synthetic oligonucleotide
  Sense strand starting at position 1920 of SEQ ID NO: 1888389
gguccagucucauuuaccu

SEQ ID NO: 2532195 - RNA, 19 nt, Artificial Sequence
  Description of Artificial Sequence: Synthetic oligonucleotide
  Antisense strand to SEQ ID NO: 2532194
agguaaaugagacuggacc

SEQ ID NO: 2532196 - RNA, 19 nt, Artificial Sequence
  Description of Artificial Sequence: Synthetic oligonucleotide
  Sense strand starting at position 1657 of SEQ ID NO: 1888389
uccauauggguuuaauacu

SEQ ID NO: 2532197 - RNA, 19 nt, Artificial Sequence
  Description of Artificial Sequence: Synthetic oligonucleotide
  Antisense strand to SEQ ID NO: 2532196
aguauuaaacccauaugga

SEQ ID NO: 2532198 - RNA, 19 nt, Artificial Sequence
  Description of Artificial Sequence: Synthetic oligonucleotide
  Sense strand starting at position 2551 of SEQ ID NO: 1888389
ggaggugcucauuagaaug

SEQ ID NO: 2532199 - RNA, 19 nt, Artificial Sequence
  Description of Artificial Sequence: Synthetic oligonucleotide
  Antisense strand to SEQ ID NO: 2532198
cauucuaaugagcaccucc

SEQ ID NO: 2532200 - RNA, 19 nt, Artificial Sequence
  Description of Artificial Sequence: Synthetic oligonucleotide
  Sense strand starting at position 2117 of SEQ ID NO: 1888389
gaacauucucuagguagaa

SEQ ID NO: 2532201 - RNA, 19 nt, Artificial Sequence
  Description of Artificial Sequence: Synthetic oligonucleotide
  Antisense strand to SEQ ID NO: 2532200
uucuaccuagagaauguuc

SEQ ID NO: 2532202 - RNA, 19 nt, Artificial Sequence
  Description of Artificial Sequence: Synthetic oligonucleotide
  Sense strand starting at position 3953 of SEQ ID NO: 1888389
uaggcaagaccauauaugu

SEQ ID NO: 2532203 - RNA, 19 nt, Artificial Sequence
  Description of Artificial Sequence: Synthetic oligonucleotide
  Antisense strand to SEQ ID NO: 2532202
acauauauggucuugccua

SEQ ID NO: 2532204 - RNA, 19 nt, Artificial Sequence
  Description of Artificial Sequence: Synthetic oligonucleotide
  Sense strand starting at position 161 of SEQ ID NO: 1888389
uggaaaucacuuggaagca

SEQ ID NO: 2532205 - RNA, 19 nt, Artificial Sequence
  Description of Artificial Sequence: Synthetic oligonucleotide
  Antisense strand to SEQ ID NO: 2532204
ugcuuccaagugauuucca

SEQ ID NO: 2532206 - RNA, 19 nt, Artificial Sequence
  Description of Artificial Sequence: Synthetic oligonucleotide
  Sense strand starting at position 920 of SEQ ID NO: 1888389
aaaggaguccagugaaauc

SEQ ID NO: 2532207 - RNA, 19 nt, Artificial Sequence
  Description of Artificial Sequence: Synthetic oligonucleotide
  Antisense strand to SEQ ID NO: 2532206
gauuucacuggacuccuuu

SEQ ID NO: 2532208 - RNA, 19 nt, Artificial Sequence
  Description of Artificial Sequence: Synthetic oligonucleotide
  Sense strand starting at position 904 of SEQ ID NO: 1888389
gaugcucuuggguaacaaa

SEQ ID NO: 2532209 - RNA, 19 nt, Artificial Sequence
  Description of Artificial Sequence: Synthetic oligonucleotide
  Antisense strand to SEQ ID NO: 2532208
uuuguuacccaagagcauc

SEQ ID NO: 2532210 - RNA, 19 nt, Artificial Sequence
  Description of Artificial Sequence: Synthetic oligonucleotide
  Sense strand starting at position 1982 of SEQ ID NO: 1888389
ugguucaaggaaugaagua

SEQ ID NO: 2532211 - RNA, 19 nt, Artificial Sequence
  Description of Artificial Sequence: Synthetic oligonucleotide
  Antisense strand to SEQ ID NO: 2532210
uacuucauuccuugaacca

SEQ ID NO: 2532212 - RNA, 19 nt, Artificial Sequence
  Description of Artificial Sequence: Synthetic oligonucleotide
  Sense strand starting at position 1067 of SEQ ID NO: 1888389
cuuugaugaacgcauggga

SEQ ID NO: 2532213 - RNA, 19 nt, Artificial Sequence
  Description of Artificial Sequence: Synthetic oligonucleotide
  Antisense strand to SEQ ID NO: 2532212
ucccaugcguucaucaaag

SEQ ID NO: 2532214 - RNA, 19 nt, Artificial Sequence
  Description of Artificial Sequence: Synthetic oligonucleotide
  Sense strand starting at position 444 of SEQ ID NO: 1888389
caggacuuggguugagacu

SEQ ID NO: 2532215 - RNA, 19 nt, Artificial Sequence
  Description of Artificial Sequence: Synthetic oligonucleotide
  Antisense strand to SEQ ID NO: 2532214
agucucaacccaaguccug

SEQ ID NO: 2532216 - RNA, 19 nt, Artificial Sequence
  Description of Artificial Sequence: Synthetic oligonucleotide
  Sense strand starting at position 1961 of SEQ ID NO: 1888389
uuggaagugcuccauaaac

SEQ ID NO: 2532217 - RNA, 19 nt, Artificial Sequence
  Description of Artificial Sequence: Synthetic oligonucleotide
  Antisense strand to SEQ ID NO: 2532216
guuuauggagcacuuccaa

SEQ ID NO: 2532218 - RNA, 19 nt, Artificial Sequence
  Description of Artificial Sequence: Synthetic oligonucleotide
  Sense strand starting at position 544 of SEQ ID NO: 1888389
gguggugaugauugaauga

SEQ ID NO: 2532219 - RNA, 19 nt, Artificial Sequence
  Description of Artificial Sequence: Synthetic oligonucleotide
  Antisense strand to SEQ ID NO: 2532218
ucauucaaucaucaccacc

SEQ ID NO: 2532220 - RNA, 19 nt, Artificial Sequence
  Description of Artificial Sequence: Synthetic oligonucleotide
  Sense strand starting at position 694 of SEQ ID NO: 1888389
ucacaaugugaaggguaau

SEQ ID NO: 2532221 - RNA, 19 nt, Artificial Sequence
  Description of Artificial Sequence: Synthetic oligonucleotide
  Antisense strand to SEQ ID NO: 2532220
auuacccuucacauuguga

SEQ ID NO: 2532222 - RNA, 19 nt, Artificial Sequence
  Description of Artificial Sequence: Synthetic oligonucleotide
  Sense strand starting at position 2018 of SEQ ID NO: 1888389
gcuaaugaaagugaauguu

SEQ ID NO: 2532223 - RNA, 19 nt, Artificial Sequence
  Description of Artificial Sequence: Synthetic oligonucleotide
  Antisense strand to SEQ ID NO: 2532222
aacauucacuuucauuagc

SEQ ID NO: 2532224 - RNA, 19 nt, Artificial Sequence
  Description of Artificial Sequence: Synthetic oligonucleotide
  Sense strand starting at position 2687 of SEQ ID NO: 1888389
agauauauugcaugacacu

SEQ ID NO: 2532225 - RNA, 19 nt, Artificial Sequence
  Description of Artificial Sequence: Synthetic oligonucleotide
  Antisense strand to SEQ ID NO: 2532224
agugucaugcaauauaucu

SEQ ID NO: 2532226 - RNA, 19 nt, Artificial Sequence
  Description of Artificial Sequence: Synthetic oligonucleotide
  Sense strand starting at position 1753 of SEQ ID NO: 1888389
caugaacugugagucaaau

SEQ ID NO: 2532227 - RNA, 19 nt, Artificial Sequence
  Description of Artificial Sequence: Synthetic oligonucleotide
  Antisense strand to SEQ ID NO: 2532226
auuugacucacaguucaug

SEQ ID NO: 2532228 - RNA, 19 nt, Artificial Sequence
  Description of Artificial Sequence: Synthetic oligonucleotide
  Sense strand starting at position 2548 of SEQ ID NO: 1888389
cuuggaggugcucauuaga

SEQ ID NO: 2532229 - RNA, 19 nt, Artificial Sequence
  Description of Artificial Sequence: Synthetic oligonucleotide
  Antisense strand to SEQ ID NO: 2532228
ucuaaugagcaccuccaag

SEQ ID NO: 2532230 - RNA, 19 nt, Artificial Sequence
  Description of Artificial Sequence: Synthetic oligonucleotide
  Sense strand starting at position 3725 of SEQ ID NO: 1888389
ucugaaaguuccucagaug

SEQ ID NO: 2532231 - RNA, 19 nt, Artificial Sequence
  Description of Artificial Sequence: Synthetic oligonucleotide
  Antisense strand to SEQ ID NO: 2532230
caucugaggaacuuucaga

SEQ ID NO: 2532232 - RNA, 19 nt, Artificial Sequence
  Description of Artificial Sequence: Synthetic oligonucleotide
  Sense strand starting at position 1058 of SEQ ID NO: 1888389
ucagcuagacuuugaugaa

SEQ ID NO: 2532233 - RNA, 19 nt, Artificial Sequence
  Description of Artificial Sequence: Synthetic oligonucleotide
  Antisense strand to SEQ ID NO: 2532232
uucaucaaagucuagcuga

SEQ ID NO: 2532234 - RNA, 19 nt, Artificial Sequence
  Description of Artificial Sequence: Synthetic oligonucleotide
  Sense strand starting at position 2024 of SEQ ID NO: 1888389
gaaagugaauguuucuaug

SEQ ID NO: 2532235 - RNA, 19 nt, Artificial Sequence
  Description of Artificial Sequence: Synthetic oligonucleotide
  Antisense strand to SEQ ID NO: 2532234
cauagaaacauucacuuuc

SEQ ID NO: 2532236 - RNA, 19 nt, Artificial Sequence
  Description of Artificial Sequence: Synthetic oligonucleotide
  Sense strand starting at position 1038 of SEQ ID NO: 1888389
gaaaguguuauggaagugu

SEQ ID NO: 2532237 - RNA, 19 nt, Artificial Sequence
  Description of Artificial Sequence: Synthetic oligonucleotide
  Antisense strand to SEQ ID NO: 2532236
acacuuccauaacacuuuc

SEQ ID NO: 2532238 - RNA, 19 nt, Artificial Sequence
  Description of Artificial Sequence: Synthetic oligonucleotide
  Sense strand starting at position 2672 of SEQ ID NO: 1888389
ucagguuugcuacacagau

SEQ ID NO: 2532239 - RNA, 19 nt, Artificial Sequence
  Description of Artificial Sequence: Synthetic oligonucleotide
  Antisense strand to SEQ ID NO: 2532238
aucuguguagcaaaccuga

SEQ ID NO: 2532240 - RNA, 19 nt, Artificial Sequence
  Description of Artificial Sequence: Synthetic oligonucleotide
  Sense strand starting at position 3553 of SEQ ID NO: 1888389
uugaguaaucuccaagcug

SEQ ID NO: 2532241 - RNA, 19 nt, Artificial Sequence
  Description of Artificial Sequence: Synthetic oligonucleotide
  Antisense strand to SEQ ID NO: 2532240
cagcuuggagauuacucaa

SEQ ID NO: 2532242 - RNA, 19 nt, Artificial Sequence
  Description of Artificial Sequence: Synthetic oligonucleotide
  Sense strand starting at position 2572 of SEQ ID NO: 1888389
gguuccuaggccuaccaaa

SEQ ID NO: 2532243 - RNA, 19 nt, Artificial Sequence
  Description of Artificial Sequence: Synthetic oligonucleotide
  Antisense strand to SEQ ID NO: 2532242
uuugguaggccuaggaacc

SEQ ID NO: 2532244 - RNA, 19 nt, Artificial Sequence
  Description of Artificial Sequence: Synthetic oligonucleotide
  Sense strand starting at position 174 of SEQ ID NO: 1888389
gaagcaggguuauuccaga

SEQ ID NO: 2532245 - RNA, 19 nt, Artificial Sequence
  Description of Artificial Sequence: Synthetic oligonucleotide
  Antisense strand to SEQ ID NO: 2532244
ucuggaauaacccugcuuc

SEQ ID NO: 2532246 - RNA, 19 nt, Artificial Sequence
  Description of Artificial Sequence: Synthetic oligonucleotide
  Sense strand starting at position 2168 of SEQ ID NO: 1888389
auugaaauauuggcacuuu

SEQ ID NO: 2532247 - RNA, 19 nt, Artificial Sequence
  Description of Artificial Sequence: Synthetic oligonucleotide
  Antisense strand to SEQ ID NO: 2532246
aaagugccaauauuucaau

SEQ ID NO: 2532248 - RNA, 19 nt, Artificial Sequence
  Description of Artificial Sequence: Synthetic oligonucleotide
  Sense strand starting at position 1750 of SEQ ID NO: 1888389
gaccaugaacugugaguca

SEQ ID NO: 2532249 - RNA, 19 nt, Artificial Sequence
  Description of Artificial Sequence: Synthetic oligonucleotide
  Antisense strand to SEQ ID NO: 2532248
ugacucacaguucaugguc

SEQ ID NO: 2532250 - RNA, 19 nt, Artificial Sequence
  Description of Artificial Sequence: Synthetic oligonucleotide
  Sense strand starting at position 1582 of SEQ ID NO: 1888389
aggucuggauugguuuaaa

SEQ ID NO: 2532251 - RNA, 19 nt, Artificial Sequence
  Description of Artificial Sequence: Synthetic oligonucleotide
  Antisense strand to SEQ ID NO: 2532250
uuuaaaccaauccagaccu

SEQ ID NO: 2532252 - RNA, 19 nt, Artificial Sequence
  Description of Artificial Sequence: Synthetic oligonucleotide
  Sense strand starting at position 1426 of SEQ ID NO: 1888389
agagguguuuauccugaga

SEQ ID NO: 2532253 - RNA, 19 nt, Artificial Sequence
  Description of Artificial Sequence: Synthetic oligonucleotide
  Antisense strand to SEQ ID NO: 2532252
ucucaggauaaacaccucu

SEQ ID NO: 2532254 - RNA, 19 nt, Artificial Sequence
  Description of Artificial Sequence: Synthetic oligonucleotide
  Sense strand starting at position 678 of SEQ ID NO: 1888389
ugguaaugugggcaauuca

SEQ ID NO: 2532255 - RNA, 19 nt, Artificial Sequence
  Description of Artificial Sequence: Synthetic oligonucleotide
  Antisense strand to SEQ ID NO: 2532254
ugaauugcccacauuacca

SEQ ID NO: 2532256 - RNA, 19 nt, Artificial Sequence
  Description of Artificial Sequence: Synthetic oligonucleotide
  Sense strand starting at position 2069 of SEQ ID NO: 1888389
ggcacuugcuuuguauuua

SEQ ID NO: 2532257 - RNA, 19 nt, Artificial Sequence
  Description of Artificial Sequence: Synthetic oligonucleotide
  Antisense strand to SEQ ID NO: 2532256
uaaauacaaagcaagugcc

SEQ ID NO: 2532258 - RNA, 19 nt, Artificial Sequence
  Description of Artificial Sequence: Synthetic oligonucleotide
  Sense strand starting at position 1804 of SEQ ID NO: 1888389
auggaugccucaguugaaa

SEQ ID NO: 2532259 - RNA, 19 nt, Artificial Sequence
  Description of Artificial Sequence: Synthetic oligonucleotide
  Antisense strand to SEQ ID NO: 2532258
uuucaacugaggcauccau

SEQ ID NO: 2532260 - RNA, 19 nt, Artificial Sequence
  Description of Artificial Sequence: Synthetic oligonucleotide
  Sense strand starting at position 3714 of SEQ ID NO: 1888389
gaaucugcaugucugaaag

SEQ ID NO: 2532261 - RNA, 19 nt, Artificial Sequence
  Description of Artificial Sequence: Synthetic oligonucleotide
  Antisense strand to SEQ ID NO: 2532260
cuuucagacaugcagauuc

SEQ ID NO: 2532262 - RNA, 19 nt, Artificial Sequence
  Description of Artificial Sequence: Synthetic oligonucleotide
  Sense strand starting at position 2017 of SEQ ID NO: 1888389
agcuaaugaaagugaaugu

SEQ ID NO: 2532263 - RNA, 19 nt, Artificial Sequence
  Description of Artificial Sequence: Synthetic oligonucleotide
  Antisense strand to SEQ ID NO: 2532262
acauucacuuucauuagcu

SEQ ID NO: 2532264 - RNA, 19 nt, Artificial Sequence
  Description of Artificial Sequence: Synthetic oligonucleotide
  Sense strand starting at position 1674 of SEQ ID NO: 1888389
cuuacaguuccugagagcu

SEQ ID NO: 2532265 - RNA, 19 nt, Artificial Sequence
  Description of Artificial Sequence: Synthetic oligonucleotide
  Antisense strand to SEQ ID NO: 2532264
agcucucaggaacuguaag

SEQ ID NO: 2532266 - RNA, 19 nt, Artificial Sequence
  Description of Artificial Sequence: Synthetic oligonucleotide
  Sense strand starting at position 903 of SEQ ID NO: 1888389
ggaugcucuuggguaacaa

SEQ ID NO: 2532267 - RNA, 19 nt, Artificial Sequence
  Description of Artificial Sequence: Synthetic oligonucleotide
  Antisense strand to SEQ ID NO: 2532266
uuguuacccaagagcaucc

SEQ ID NO: 2532268 - RNA, 19 nt, Artificial Sequence
  Description of Artificial Sequence: Synthetic oligonucleotide
  Sense strand starting at position 1094 of SEQ ID NO: 1888389
gguagagauggcuggaagu

SEQ ID NO: 2532269 - RNA, 19 nt, Artificial Sequence
  Description of Artificial Sequence: Synthetic oligonucleotide
  Antisense strand to SEQ ID NO: 2532268
acuuccagccaucucuacc

SEQ ID NO: 2532270 - RNA, 19 nt, Artificial Sequence
  Description of Artificial Sequence: Synthetic oligonucleotide
  Sense strand starting at position 2696 of SEQ ID NO: 1888389
gcaugacacugagauuuag

SEQ ID NO: 2532271 - RNA, 19 nt, Artificial Sequence
  Description of Artificial Sequence: Synthetic oligonucleotide
  Antisense strand to SEQ ID NO: 2532270
cuaaaucucagugucaugc

SEQ ID NO: 2532272 - RNA, 19 nt, Artificial Sequence
  Description of Artificial Sequence: Synthetic oligonucleotide
  Sense strand starting at position 2068 of SEQ ID NO: 1888389
gggcacuugcuuuguauuu

SEQ ID NO: 2532273 - RNA, 19 nt, Artificial Sequence
  Description of Artificial Sequence: Synthetic oligonucleotide
  Antisense strand to SEQ ID NO: 2532272
aaauacaaagcaagugccc

SEQ ID NO: 2532274 - RNA, 19 nt, Artificial Sequence
  Description of Artificial Sequence: Synthetic oligonucleotide
  Sense strand starting at position 2021 of SEQ ID NO: 1888390
agcgcauuccugcugacga

SEQ ID NO: 2532275 - RNA, 19 nt, Artificial Sequence
  Description of Artificial Sequence: Synthetic oligonucleotide
  Antisense strand to SEQ ID NO: 2532274
ucgucagcaggaaugcgcu

SEQ ID NO: 2532276 - RNA, 19 nt, Artificial Sequence
  Description of Artificial Sequence: Synthetic oligonucleotide
  Sense strand starting at position 1256 of SEQ ID NO: 1888390
gugagaauccgccauagaa

SEQ ID NO: 2532277 - RNA, 19 nt, Artificial Sequence
  Description of Artificial Sequence: Synthetic oligonucleotide
  Antisense strand to SEQ ID NO: 2532276
uucuauggcggauucucac

SEQ ID NO: 2532278 - RNA, 19 nt, Artificial Sequence
  Description of Artificial Sequence: Synthetic oligonucleotide
  Sense strand starting at position 1011 of SEQ ID NO: 1888390
gcaggcucuggauaucaga

SEQ ID NO: 2532279 - RNA, 19 nt, Artificial Sequence
  Description of Artificial Sequence: Synthetic oligonucleotide
  Antisense strand to SEQ ID NO: 2532278
ucugauauccagagccugc

SEQ ID NO: 2532280 - RNA, 19 nt, Artificial Sequence
  Description of Artificial Sequence: Synthetic oligonucleotide
  Sense strand starting at position 1338 of SEQ ID NO: 1888390
cugaaagacugucucgaug

SEQ ID NO: 2532281 - RNA, 19 nt, Artificial Sequence
  Description of Artificial Sequence: Synthetic oligonucleotide
  Antisense strand to SEQ ID NO: 2532280
caucgagacagucuuucag

SEQ ID NO: 2532282 - RNA, 19 nt, Artificial Sequence
  Description of Artificial Sequence: Synthetic oligonucleotide
  Sense strand starting at position 3560 of SEQ ID NO: 1888390
aucugaggguuguuucaga

SEQ ID NO: 2532283 - RNA, 19 nt, Artificial Sequence
  Description of Artificial Sequence: Synthetic oligonucleotide
  Antisense strand to SEQ ID NO: 2532282
ucugaaacaacccucagau

SEQ ID NO: 2532284 - RNA, 19 nt, Artificial Sequence
  Description of Artificial Sequence: Synthetic oligonucleotide
  Sense strand starting at position 2636 of SEQ ID NO: 1888390
gaacauggguggucacagu

SEQ ID NO: 2532285 - RNA, 19 nt, Artificial Sequence
  Description of Artificial Sequence: Synthetic oligonucleotide
  Antisense strand to SEQ ID NO: 2532284
acugugaccacccauguuc

SEQ ID NO: 2532286 - RNA, 19 nt, Artificial Sequence
  Description of Artificial Sequence: Synthetic oligonucleotide
  Sense strand starting at position 3558 of SEQ ID NO: 1888390
ggaucugaggguuguuuca

SEQ ID NO: 2532287 - RNA, 19 nt, Artificial Sequence
  Description of Artificial Sequence: Synthetic oligonucleotide
  Antisense strand to SEQ ID NO: 2532286
ugaaacaacccucagaucc

SEQ ID NO: 2532288 - RNA, 19 nt, Artificial Sequence
  Description of Artificial Sequence: Synthetic oligonucleotide
  Sense strand starting at position 1280 of SEQ ID NO: 1888390
gguucugggaacugucauu

SEQ ID NO: 2532289 - RNA, 19 nt, Artificial Sequence
  Description of Artificial Sequence: Synthetic oligonucleotide
  Antisense strand to SEQ ID NO: 2532288
aaugacaguucccagaacc

SEQ ID NO: 2532290 - RNA, 19 nt, Artificial Sequence
  Description of Artificial Sequence: Synthetic oligonucleotide
  Sense strand starting at position 3221 of SEQ ID NO: 1888390
gcuggucuguggaaagaga

SEQ ID NO: 2532291 - RNA, 19 nt, Artificial Sequence
  Description of Artificial Sequence: Synthetic oligonucleotide
  Antisense strand to SEQ ID NO: 2532290
ucucuuuccacagaccagc

SEQ ID NO: 2532292 - RNA, 19 nt, Artificial Sequence
  Description of Artificial Sequence: Synthetic oligonucleotide
  Sense strand starting at position 868 of SEQ ID NO: 1888390
ucgccuguaacuggaaaga

SEQ ID NO: 2532293 - RNA, 19 nt, Artificial Sequence
  Description of Artificial Sequence: Synthetic oligonucleotide
  Antisense strand to SEQ ID NO: 2532292
ucuuuccaguuacaggcga

SEQ ID NO: 2532294 - RNA, 19 nt, Artificial Sequence
  Description of Artificial Sequence: Synthetic oligonucleotide
  Sense strand starting at position 1196 of SEQ ID NO: 1888390
cgugcauuggccugauuuc

SEQ ID NO: 2532295 - RNA, 19 nt, Artificial Sequence
  Description of Artificial Sequence: Synthetic oligonucleotide
  Antisense strand to SEQ ID NO: 2532294
gaaaucaggccaaugcacg

SEQ ID NO: 2532296 - RNA, 19 nt, Artificial Sequence
  Description of Artificial Sequence: Synthetic oligonucleotide
  Sense strand starting at position 1363 of SEQ ID NO: 1888390
ugaucucgcuggguugaga

SEQ ID NO: 2532297 - RNA, 19 nt, Artificial Sequence
  Description of Artificial Sequence: Synthetic oligonucleotide
  Antisense strand to SEQ ID NO: 2532296
ucucaacccagcgagauca

SEQ ID NO: 2532298 - RNA, 19 nt, Artificial Sequence
  Description of Artificial Sequence: Synthetic oligonucleotide
  Sense strand starting at position 3484 of SEQ ID NO: 1888390
gggugaccuccgugaucua

SEQ ID NO: 2532299 - RNA, 19 nt, Artificial Sequence
  Description of Artificial Sequence: Synthetic oligonucleotide
  Antisense strand to SEQ ID NO: 2532298
uagaucacggaggucaccc

SEQ ID NO: 2532300 - RNA, 19 nt, Artificial Sequence
  Description of Artificial Sequence: Synthetic oligonucleotide
  Sense strand starting at position 1226 of SEQ ID NO: 1888390
uugccuguaagcugagaau

SEQ ID NO: 2532301 - RNA, 19 nt, Artificial Sequence
  Description of Artificial Sequence: Synthetic oligonucleotide
  Antisense strand to SEQ ID NO: 2532300
auucucagcuuacaggcaa

SEQ ID NO: 2532302 - RNA, 19 nt, Artificial Sequence
  Description of Artificial Sequence: Synthetic oligonucleotide
  Sense strand starting at position 1229 of SEQ ID NO: 1888390
ccuguaagcugagaauuuc

SEQ ID NO: 2532303 - RNA, 19 nt, Artificial Sequence
  Description of Artificial Sequence: Synthetic oligonucleotide
  Antisense strand to SEQ ID NO: 2532302
gaaauucucagcuuacagg

SEQ ID NO: 2532304 - RNA, 19 nt, Artificial Sequence
  Description of Artificial Sequence: Synthetic oligonucleotide
  Sense strand starting at position 2023 of SEQ ID NO: 1888390
cgcauuccugcugacgaga

SEQ ID NO: 2532305 - RNA, 19 nt, Artificial Sequence
  Description of Artificial Sequence: Synthetic oligonucleotide
  Antisense strand to SEQ ID NO: 2532304
ucucgucagcaggaaugcg

SEQ ID NO: 2532306 - RNA, 19 nt, Artificial Sequence
  Description of Artificial Sequence: Synthetic oligonucleotide
  Sense strand starting at position 3131 of SEQ ID NO: 1888390
ccgagugccuggguaacau

SEQ ID NO: 2532307 - RNA, 19 nt, Artificial Sequence
  Description of Artificial Sequence: Synthetic oligonucleotide
  Antisense strand to SEQ ID NO: 2532306
auguuacccaggcacucgg

SEQ ID NO: 2532308 - RNA, 19 nt, Artificial Sequence
  Description of Artificial Sequence: Synthetic oligonucleotide
  Sense strand starting at position 2775 of SEQ ID NO: 1888390
uggcauccugccugguaua

SEQ ID NO: 2532309 - RNA, 19 nt, Artificial Sequence
  Description of Artificial Sequence: Synthetic oligonucleotide
  Antisense strand to SEQ ID NO: 2532308
uauaccaggcaggaugcca

SEQ ID NO: 2532310 - RNA, 19 nt, Artificial Sequence
  Description of Artificial Sequence: Synthetic oligonucleotide
  Sense strand starting at position 1089 of SEQ ID NO: 1888390
cugcguuuccuuuagugac

SEQ ID NO: 2532311 - RNA, 19 nt, Artificial Sequence
  Description of Artificial Sequence: Synthetic oligonucleotide
  Antisense strand to SEQ ID NO: 2532310
gucacuaaaggaaacgcag

SEQ ID NO: 2532312 - RNA, 19 nt, Artificial Sequence
  Description of Artificial Sequence: Synthetic oligonucleotide
  Sense strand starting at position 1361 of SEQ ID NO: 1888390
ugugaucucgcuggguuga

SEQ ID NO: 2532313 - RNA, 19 nt, Artificial Sequence
  Description of Artificial Sequence: Synthetic oligonucleotide
  Antisense strand to SEQ ID NO: 2532312
ucaacccagcgagaucaca

SEQ ID NO: 2532314 - RNA, 19 nt, Artificial Sequence
  Description of Artificial Sequence: Synthetic oligonucleotide
  Sense strand starting at position 1775 of SEQ ID NO: 1888390
gguuaagccuuucccguua

SEQ ID NO: 2532315 - RNA, 19 nt, Artificial Sequence
  Description of Artificial Sequence: Synthetic oligonucleotide
  Antisense strand to SEQ ID NO: 2532314
uaacgggaaaggcuuaacc

SEQ ID NO: 2532316 - RNA, 19 nt, Artificial Sequence
  Description of Artificial Sequence: Synthetic oligonucleotide
  Sense strand starting at position 1360 of SEQ ID NO: 1888390
cugugaucucgcuggguug

SEQ ID NO: 2532317 - RNA, 19 nt, Artificial Sequence
  Description of Artificial Sequence: Synthetic oligonucleotide
  Antisense strand to SEQ ID NO: 2532316
caacccagcgagaucacag

SEQ ID NO: 2532318 - RNA, 19 nt, Artificial Sequence
  Description of Artificial Sequence: Synthetic oligonucleotide
  Sense strand starting at position 2910 of SEQ ID NO: 1888390
uucucaaguugucaagaga

SEQ ID NO: 2532319 - RNA, 19 nt, Artificial Sequence
  Description of Artificial Sequence: Synthetic oligonucleotide
  Antisense strand to SEQ ID NO: 2532318
ucucuugacaacuugagaa

SEQ ID NO: 2532320 - RNA, 19 nt, Artificial Sequence
  Description of Artificial Sequence: Synthetic oligonucleotide
  Sense strand starting at position 3217 of SEQ ID NO: 1888390
cgcggcuggucuguggaaa

SEQ ID NO: 2532321 - RNA, 19 nt, Artificial Sequence
  Description of Artificial Sequence: Synthetic oligonucleotide
  Antisense strand to SEQ ID NO: 2532320
uuuccacagaccagccgcg

SEQ ID NO: 2532322 - RNA, 19 nt, Artificial Sequence
  Description of Artificial Sequence: Synthetic oligonucleotide
  Sense strand starting at position 9 of SEQ ID NO: 1888390
ccaagcaucuguggaacaa

SEQ ID NO: 2532323 - RNA, 19 nt, Artificial Sequence
  Description of Artificial Sequence: Synthetic oligonucleotide
  Antisense strand to SEQ ID NO: 2532322
uuguuccacagaugcuugg

SEQ ID NO: 2532324 - RNA, 19 nt, Artificial Sequence
  Description of Artificial Sequence: Synthetic oligonucleotide
  Sense strand starting at position 2025 of SEQ ID NO: 1888390
cauuccugcugacgagaau

SEQ ID NO: 2532325 - RNA, 19 nt, Artificial Sequence
  Description of Artificial Sequence: Synthetic oligonucleotide
  Antisense strand to SEQ ID NO: 2532324
auucucgucagcaggaaug

SEQ ID NO: 2532326 - RNA, 19 nt, Artificial Sequence
  Description of Artificial Sequence: Synthetic oligonucleotide
  Sense strand starting at position 3219 of SEQ ID NO: 1888390
cggcuggucuguggaaaga

SEQ ID NO: 2532327 - RNA, 19 nt, Artificial Sequence
  Description of Artificial Sequence: Synthetic oligonucleotide
  Antisense strand to SEQ ID NO: 2532326
ucuuuccacagaccagccg

SEQ ID NO: 2532328 - RNA, 19 nt, Artificial Sequence
  Description of Artificial Sequence: Synthetic oligonucleotide
  Sense strand starting at position 3271 of SEQ ID NO: 1888391
uguugugcucuuccucauu

SEQ ID NO: 2532329 - RNA, 19 nt, Artificial Sequence
  Description of Artificial Sequence: Synthetic oligonucleotide
  Antisense strand to SEQ ID NO: 2532328
aaugaggaagagcacaaca

SEQ ID NO: 2532330 - RNA, 19 nt, Artificial Sequence
  Description of Artificial Sequence: Synthetic oligonucleotide
  Sense strand starting at position 178 of SEQ ID NO: 1888391
ucuaauagggaauguacua

SEQ ID NO: 2532331 - RNA, 19 nt, Artificial Sequence
  Description of Artificial Sequence: Synthetic oligonucleotide
  Antisense strand to SEQ ID NO: 2532330
uaguacauucccuauuaga

SEQ ID NO: 2532332 - RNA, 19 nt, Artificial Sequence
  Description of Artificial Sequence: Synthetic oligonucleotide
  Sense strand starting at position 1319 of SEQ ID NO: 1888391
uugggagaauuggagauuu

SEQ ID NO: 2532333 - RNA, 19 nt, Artificial Sequence
  Description of Artificial Sequence: Synthetic oligonucleotide
  Antisense strand to SEQ ID NO: 2532332
aaaucuccaauucucccaa

SEQ ID NO: 2532334 - RNA, 19 nt, Artificial Sequence
  Description of Artificial Sequence: Synthetic oligonucleotide
  Sense strand starting at position 3106 of SEQ ID NO: 1888391
gguugagcacaagacuauu

SEQ ID NO: 2532335 - RNA, 19 nt, Artificial Sequence
  Description of Artificial Sequence: Synthetic oligonucleotide
  Antisense strand to SEQ ID NO: 2532334
aauagucuugugcucaacc

SEQ ID NO: 2532336 - RNA, 19 nt, Artificial Sequence
  Description of Artificial Sequence: Synthetic oligonucleotide
  Sense strand starting at position 1336 of SEQ ID NO: 1888391
uugaaauacagaggugagu

SEQ ID NO: 2532337 - RNA, 19 nt, Artificial Sequence
  Description of Artificial Sequence: Synthetic oligonucleotide
  Antisense strand to SEQ ID NO: 2532336
acucaccucuguauuucaa

SEQ ID NO: 2532338 - RNA, 19 nt, Artificial Sequence
  Description of Artificial Sequence: Synthetic oligonucleotide
  Sense strand starting at position 841 of SEQ ID NO: 1888391
ucaggacuucugggaagug

SEQ ID NO: 2532339 - RNA, 19 nt, Artificial Sequence
  Description of Artificial Sequence: Synthetic oligonucleotide
  Antisense strand to SEQ ID NO: 2532338
cacuucccagaaguccuga

SEQ ID NO: 2532340 - RNA, 19 nt, Artificial Sequence
  Description of Artificial Sequence: Synthetic oligonucleotide
  Sense strand starting at position 3935 of SEQ ID NO: 1888391
cgaagcaaacuguaaugau

SEQ ID NO: 2532341 - RNA, 19 nt, Artificial Sequence
  Description of Artificial Sequence: Synthetic oligonucleotide
  Antisense strand to SEQ ID NO: 2532340
aucauuacaguuugcuucg

SEQ ID NO: 2532342 - RNA, 19 nt, Artificial Sequence
  Description of Artificial Sequence: Synthetic oligonucleotide
  Sense strand starting at position 3056 of SEQ ID NO: 1888391
gacguauguguugccucuu

SEQ ID NO: 2532343 - RNA, 19 nt, Artificial Sequence
  Description of Artificial Sequence: Synthetic oligonucleotide
  Antisense strand to SEQ ID NO: 2532342
aagaggcaacacauacguc

SEQ ID NO: 2532344 - RNA, 19 nt, Artificial Sequence
  Description of Artificial Sequence: Synthetic oligonucleotide
  Sense strand starting at position 1484 of SEQ ID NO: 1888391
auugcaagugguuagaaau

SEQ ID NO: 2532345 - RNA, 19 nt, Artificial Sequence
  Description of Artificial Sequence: Synthetic oligonucleotide
  Antisense strand to SEQ ID NO: 2532344
auuucuaaccacuugcaau

SEQ ID NO: 2532346 - RNA, 19 nt, Artificial Sequence
  Description of Artificial Sequence: Synthetic oligonucleotide
  Sense strand starting at position 2095 of SEQ ID NO: 1888391
ugauuucuccugugagcuc

SEQ ID NO: 2532347 - RNA, 19 nt, Artificial Sequence
  Description of Artificial Sequence: Synthetic oligonucleotide
  Antisense strand to SEQ ID NO: 2532346
gagcucacaggagaaauca

SEQ ID NO: 2532348 - RNA, 19 nt, Artificial Sequence
  Description of Artificial Sequence: Synthetic oligonucleotide
  Sense strand starting at position 2862 of SEQ ID NO: 1888391
aucauucuugggugacaga

SEQ ID NO: 2532349 - RNA, 19 nt, Artificial Sequence
  Description of Artificial Sequence: Synthetic oligonucleotide
  Antisense strand to SEQ ID NO: 2532348
ucugucacccaagaaugau

SEQ ID NO: 2532350 - RNA, 19 nt, Artificial Sequence
  Description of Artificial Sequence: Synthetic oligonucleotide
  Sense strand starting at position 3046 of SEQ ID NO: 1888391
gucauuuauagacguaugu

SEQ ID NO: 2532351 - RNA, 19 nt, Artificial Sequence
  Description of Artificial Sequence: Synthetic oligonucleotide
  Antisense strand to SEQ ID NO: 2532350
acauacgucuauaaaugac

SEQ ID NO: 2532352 - RNA, 19 nt, Artificial Sequence
  Description of Artificial Sequence: Synthetic oligonucleotide
  Sense strand starting at position 1490 of SEQ ID NO: 1888391
agugguuagaaaugaguaa

SEQ ID NO: 2532353 - RNA, 19 nt, Artificial Sequence
  Description of Artificial Sequence: Synthetic oligonucleotide
  Antisense strand to SEQ ID NO: 2532352
uuacucauuucuaaccacu

SEQ ID NO: 2532354 - RNA, 19 nt, Artificial Sequence
  Description of Artificial Sequence: Synthetic oligonucleotide
  Sense strand starting at position 3912 of SEQ ID NO: 1888391
ugggaaaggucaguugauu

SEQ ID NO: 2532355 - RNA, 19 nt, Artificial Sequence
  Description of Artificial Sequence: Synthetic oligonucleotide
  Antisense strand to SEQ ID NO: 2532354
aaucaacugaccuuuccca

SEQ ID NO: 2532356 - RNA, 19 nt, Artificial Sequence
  Description of Artificial Sequence: Synthetic oligonucleotide
  Sense strand starting at position 60 of SEQ ID NO: 1888391
ggaacugcucagcaucaca

SEQ ID NO: 2532357 - RNA, 19 nt, Artificial Sequence
  Description of Artificial Sequence: Synthetic oligonucleotide
  Antisense strand to SEQ ID NO: 2532356
ugugaugcugagcaguucc

SEQ ID NO: 2532358 - RNA, 19 nt, Artificial Sequence
  Description of Artificial Sequence: Synthetic oligonucleotide
  Sense strand starting at position 3392 of SEQ ID NO: 1888391
uccucuagugaccaaguua

SEQ ID NO: 2532359 - RNA, 19 nt, Artificial Sequence
  Description of Artificial Sequence: Synthetic oligonucleotide
  Antisense strand to SEQ ID NO: 2532358
uaacuuggucacuagagga

SEQ ID NO: 2532360 - RNA, 19 nt, Artificial Sequence
  Description of Artificial Sequence: Synthetic oligonucleotide
  Sense strand starting at position 3 of SEQ ID NO: 1888391
ugagguuaauagucucaag

SEQ ID NO: 2532361 - RNA, 19 nt, Artificial Sequence
  Description of Artificial Sequence: Synthetic oligonucleotide
  Antisense strand to SEQ ID NO: 2532360
cuugagacuauuaaccuca

SEQ ID NO: 2532362 - RNA, 19 nt, Artificial Sequence
  Description of Artificial Sequence: Synthetic oligonucleotide
  Sense strand starting at position 2303 of SEQ ID NO: 1888391
cuuccugucccuuaaggau

SEQ ID NO: 2532363 - RNA, 19 nt, Artificial Sequence
  Description of Artificial Sequence: Synthetic oligonucleotide
  Antisense strand to SEQ ID NO: 2532362
auccuuaagggacaggaag

SEQ ID NO: 2532364 - RNA, 19 nt, Artificial Sequence
  Description of Artificial Sequence: Synthetic oligonucleotide
  Sense strand starting at position 1880 of SEQ ID NO: 1888391
accaauggcuaaguuuaaa

SEQ ID NO: 2532365 - RNA, 19 nt, Artificial Sequence
  Description of Artificial Sequence: Synthetic oligonucleotide
  Antisense strand to SEQ ID NO: 2532364
uuuaaacuuagccauuggu

SEQ ID NO: 2532366 - RNA, 19 nt, Artificial Sequence
  Description of Artificial Sequence: Synthetic oligonucleotide
  Sense strand starting at position 3829 of SEQ ID NO: 1888391
augagacuguuaccacuuu

SEQ ID NO: 2532367 - RNA, 19 nt, Artificial Sequence
  Description of Artificial Sequence: Synthetic oligonucleotide
  Antisense strand to SEQ ID NO: 2532366
aaagugguaacagucucau

SEQ ID NO: 2532368 - RNA, 19 nt, Artificial Sequence
  Description of Artificial Sequence: Synthetic oligonucleotide
  Sense strand starting at position 3597 of SEQ ID NO: 1888391
uucuuuggaccguguauuu

SEQ ID NO: 2532369 - RNA, 19 nt, Artificial Sequence
  Description of Artificial Sequence: Synthetic oligonucleotide
  Antisense strand to SEQ ID NO: 2532368
aaauacacgguccaaagaa

SEQ ID NO: 2532370 - RNA, 19 nt, Artificial Sequence
  Description of Artificial Sequence: Synthetic oligonucleotide
  Sense strand starting at position 78 of SEQ ID NO: 1888391
acaguuacccagugauaca

SEQ ID NO: 2532371 - RNA, 19 nt, Artificial Sequence
  Description of Artificial Sequence: Synthetic oligonucleotide
  Antisense strand to SEQ ID NO: 2532370
uguaucacuggguaacugu

SEQ ID NO: 2532372 - RNA, 19 nt, Artificial Sequence
  Description of Artificial Sequence: Synthetic oligonucleotide
  Sense strand starting at position 1483 of SEQ ID NO: 1888391
aauugcaagugguuagaaa

SEQ ID NO: 2532373 - RNA, 19 nt, Artificial Sequence
  Description of Artificial Sequence: Synthetic oligonucleotide
  Antisense strand to SEQ ID NO: 2532372
uuucuaaccacuugcaauu

SEQ ID NO: 2532374 - RNA, 19 nt, Artificial Sequence
  Description of Artificial Sequence: Synthetic oligonucleotide
  Sense strand starting at position 3921 of SEQ ID NO: 1888391
ucaguugauugauucgaag

SEQ ID NO: 2532375 - RNA, 19 nt, Artificial Sequence
  Description of Artificial Sequence: Synthetic oligonucleotide
  Antisense strand to SEQ ID NO: 2532374
cuucgaaucaaucaacuga

SEQ ID NO: 2532376 - RNA, 19 nt, Artificial Sequence
  Description of Artificial Sequence: Synthetic oligonucleotide
  Sense strand starting at position 538 of SEQ ID NO: 1888391
uacagcucugcagaagagu

SEQ ID NO: 2532377 - RNA, 19 nt, Artificial Sequence
  Description of Artificial Sequence: Synthetic oligonucleotide
  Antisense strand to SEQ ID NO: 2532376
acucuucugcagagcugua

SEQ ID NO: 2532378 - RNA, 19 nt, Artificial Sequence
  Description of Artificial Sequence: Synthetic oligonucleotide
  Sense strand starting at position 3748 of SEQ ID NO: 1888391
aacugaagagucgguauca

SEQ ID NO: 2532379 - RNA, 19 nt, Artificial Sequence
  Description of Artificial Sequence: Synthetic oligonucleotide
  Antisense strand to SEQ ID NO: 2532378
ugauaccgacucuucaguu

SEQ ID NO: 2532380 - RNA, 19 nt, Artificial Sequence
  Description of Artificial Sequence: Synthetic oligonucleotide
  Sense strand starting at position 534 of SEQ ID NO: 1888391
acaauacagcucugcagaa

SEQ ID NO: 2532381 - RNA, 19 nt, Artificial Sequence
  Description of Artificial Sequence: Synthetic oligonucleotide
  Antisense strand to SEQ ID NO: 2532380
uucugcagagcuguauugu

SEQ ID NO: 2532382 - RNA, 19 nt, Artificial Sequence
  Description of Artificial Sequence: Synthetic oligonucleotide
  Sense strand starting at position 2613 of SEQ ID NO: 1888391
agauaucccaguugguuga

SEQ ID NO: 2532383 - RNA, 19 nt, Artificial Sequence
  Description of Artificial Sequence: Synthetic oligonucleotide
  Antisense strand to SEQ ID NO: 2532382
ucaaccaacugggauaucu

SEQ ID NO: 2532384 - RNA, 19 nt, Artificial Sequence
  Description of Artificial Sequence: Synthetic oligonucleotide
  Sense strand starting at position 1854 of SEQ ID NO: 1888391
ucaauaaacugucuauggu

SEQ ID NO: 2532385 - RNA, 19 nt, Artificial Sequence
  Description of Artificial Sequence: Synthetic oligonucleotide
  Antisense strand to SEQ ID NO: 2532384
accauagacaguuuauuga

SEQ ID NO: 2532386 - RNA, 19 nt, Artificial Sequence
  Description of Artificial Sequence: Synthetic oligonucleotide
  Sense strand starting at position 2318 of SEQ ID NO: 1888391
ggauaacugcuaugagguu

SEQ ID NO: 2532387 - RNA, 19 nt, Artificial Sequence
  Description of Artificial Sequence: Synthetic oligonucleotide
  Antisense strand to SEQ ID NO: 2532386
aaccucauagcaguuaucc

SEQ ID NO: 2532388 - RNA, 19 nt, Artificial Sequence
  Description of Artificial Sequence: Synthetic oligonucleotide
  Sense strand starting at position 3900 of SEQ ID NO: 1888391
caacuuggccugugggaaa

SEQ ID NO: 2532389 - RNA, 19 nt, Artificial Sequence
  Description of Artificial Sequence: Synthetic oligonucleotide
  Antisense strand to SEQ ID NO: 2532388
uuucccacaggccaaguug

SEQ ID NO: 2532390 - RNA, 19 nt, Artificial Sequence
  Description of Artificial Sequence: Synthetic oligonucleotide
  Sense strand starting at position 2432 of SEQ ID NO: 1888391
gugaaauuaucuuccucug

SEQ ID NO: 2532391 - RNA, 19 nt, Artificial Sequence
  Description of Artificial Sequence: Synthetic oligonucleotide
  Antisense strand to SEQ ID NO: 2532390
cagaggaagauaauuucac

SEQ ID NO: 2532392 - RNA, 19 nt, Artificial Sequence
  Description of Artificial Sequence: Synthetic oligonucleotide
  Sense strand starting at position 3525 of SEQ ID NO: 1888391
aggaauagcuccucuguaa

SEQ ID NO: 2532393 - RNA, 19 nt, Artificial Sequence
  Description of Artificial Sequence: Synthetic oligonucleotide
  Antisense strand to SEQ ID NO: 2532392
uuacagaggagcuauuccu

SEQ ID NO: 2532394 - RNA, 19 nt, Artificial Sequence
  Description of Artificial Sequence: Synthetic oligonucleotide
  Sense strand starting at position 2419 of SEQ ID NO: 1888391
agucaucaaguuugugaaa

SEQ ID NO: 2532395 - RNA, 19 nt, Artificial Sequence
  Description of Artificial Sequence: Synthetic oligonucleotide
  Antisense strand to SEQ ID NO: 2532394
uuucacaaacuugaugacu

SEQ ID NO: 2532396 - RNA, 19 nt, Artificial Sequence
  Description of Artificial Sequence: Synthetic oligonucleotide
  Sense strand starting at position 1740 of SEQ ID NO: 1888391
ugauuuccuuaguaauaag

SEQ ID NO: 2532397 - RNA, 19 nt, Artificial Sequence
  Description of Artificial Sequence: Synthetic oligonucleotide
  Antisense strand to SEQ ID NO: 2532396
cuuauuacuaaggaaauca

SEQ ID NO: 2532398 - RNA, 19 nt, Artificial Sequence
  Description of Artificial Sequence: Synthetic oligonucleotide
  Sense strand starting at position 2617 of SEQ ID NO: 1888391
aucccaguugguugaacau

SEQ ID NO: 2532399 - RNA, 19 nt, Artificial Sequence
  Description of Artificial Sequence: Synthetic oligonucleotide
  Antisense strand to SEQ ID NO: 2532398
auguucaaccaacugggau

SEQ ID NO: 2532400 - RNA, 19 nt, Artificial Sequence
  Description of Artificial Sequence: Synthetic oligonucleotide
  Sense strand starting at position 612 of SEQ ID NO: 1888391
ugugucuuagccuaaagac

SEQ ID NO: 2532401 - RNA, 19 nt, Artificial Sequence
  Description of Artificial Sequence: Synthetic oligonucleotide
  Antisense strand to SEQ ID NO: 2532400
gucuuuaggcuaagacaca

SEQ ID NO: 2532402 - RNA, 19 nt, Artificial Sequence
  Description of Artificial Sequence: Synthetic oligonucleotide
  Sense strand starting at position 2967 of SEQ ID NO: 1888391
ugggcaacuuucucaucau

SEQ ID NO: 2532403 - RNA, 19 nt, Artificial Sequence
  Description of Artificial Sequence: Synthetic oligonucleotide
  Antisense strand to SEQ ID NO: 2532402
augaugagaaaguugccca

SEQ ID NO: 2532404 - RNA, 19 nt, Artificial Sequence
  Description of Artificial Sequence: Synthetic oligonucleotide
  Sense strand starting at position 2032 of SEQ ID NO: 1888391
uguacuuucguuuacauaa

SEQ ID NO: 2532405 - RNA, 19 nt, Artificial Sequence
  Description of Artificial Sequence: Synthetic oligonucleotide
  Antisense strand to SEQ ID NO: 2532404
uuauguaaacgaaaguaca

SEQ ID NO: 2532406 - RNA, 19 nt, Artificial Sequence
  Description of Artificial Sequence: Synthetic oligonucleotide
  Sense strand starting at position 2420 of SEQ ID NO: 1888391
gucaucaaguuugugaaau

SEQ ID NO: 2532407 - RNA, 19 nt, Artificial Sequence
  Description of Artificial Sequence: Synthetic oligonucleotide
  Antisense strand to SEQ ID NO: 2532406
auuucacaaacuugaugac

SEQ ID NO: 2532408 - RNA, 19 nt, Artificial Sequence
  Description of Artificial Sequence: Synthetic oligonucleotide
  Sense strand starting at position 2695 of SEQ ID NO: 1888392
aagagugacuaucuaagua

SEQ ID NO: 2532409 - RNA, 19 nt, Artificial Sequence
  Description of Artificial Sequence: Synthetic oligonucleotide
  Antisense strand to SEQ ID NO: 2532408
uacuuagauagucacucuu

SEQ ID NO: 2532410 - RNA, 19 nt, Artificial Sequence
  Description of Artificial Sequence: Synthetic oligonucleotide
  Sense strand starting at position 114 of SEQ ID NO: 1888392
ugagauuauuacuccagua

SEQ ID NO: 2532411 - RNA, 19 nt, Artificial Sequence
  Description of Artificial Sequence: Synthetic oligonucleotide
  Antisense strand to SEQ ID NO: 2532410
uacuggaguaauaaucuca

SEQ ID NO: 2532412 - RNA, 19 nt, Artificial Sequence
  Description of Artificial Sequence: Synthetic oligonucleotide
  Sense strand starting at position 3388 of SEQ ID NO: 1888392
aguucucgagacugggaaa

SEQ ID NO: 2532413 - RNA, 19 nt, Artificial Sequence
  Description of Artificial Sequence: Synthetic oligonucleotide
  Antisense strand to SEQ ID NO: 2532412
uuucccagucucgagaacu

SEQ ID NO: 2532414 - RNA, 19 nt, Artificial Sequence
  Description of Artificial Sequence: Synthetic oligonucleotide
  Sense strand starting at position 1743 of SEQ ID NO: 1888392
uggaauuucuugccguauu

SEQ ID NO: 2532415 - RNA, 19 nt, Artificial Sequence
  Description of Artificial Sequence: Synthetic oligonucleotide
  Antisense strand to SEQ ID NO: 2532414
aauacggcaagaaauucca

SEQ ID NO: 2532416 - RNA, 19 nt, Artificial Sequence
  Description of Artificial Sequence: Synthetic oligonucleotide
  Sense strand starting at position 1307 of SEQ ID NO: 1888392
uugaaagucauuggaagca

SEQ ID NO: 2532417 - RNA, 19 nt, Artificial Sequence
  Description of Artificial Sequence: Synthetic oligonucleotide
  Antisense strand to SEQ ID NO: 2532416
ugcuuccaaugacuuucaa

SEQ ID NO: 2532418 - RNA, 19 nt, Artificial Sequence
  Description of Artificial Sequence: Synthetic oligonucleotide
  Sense strand starting at position 398 of SEQ ID NO: 1888392
aguauuguaauuugcaguu

SEQ ID NO: 2532419 - RNA, 19 nt, Artificial Sequence
  Description of Artificial Sequence: Synthetic oligonucleotide
  Antisense strand to SEQ ID NO: 2532418
aacugcaaauuacaauacu

SEQ ID NO: 2532420 - RNA, 19 nt, Artificial Sequence
  Description of Artificial Sequence: Synthetic oligonucleotide
  Sense strand starting at position 884 of SEQ ID NO: 1888392
cguaauucuguacacagga

SEQ ID NO: 2532421 - RNA, 19 nt, Artificial Sequence
  Description of Artificial Sequence: Synthetic oligonucleotide
  Antisense strand to SEQ ID NO: 2532420
uccuguguacagaauuacg

SEQ ID NO: 2532422 - RNA, 19 nt, Artificial Sequence
  Description of Artificial Sequence: Synthetic oligonucleotide
  Sense strand starting at position 113 of SEQ ID NO: 1888392
uugagauuauuacuccagu

SEQ ID NO: 2532423 - RNA, 19 nt, Artificial Sequence
  Description of Artificial Sequence: Synthetic oligonucleotide
  Antisense strand to SEQ ID NO: 2532422
acuggaguaauaaucucaa

SEQ ID NO: 2532424 - RNA, 19 nt, Artificial Sequence
  Description of Artificial Sequence: Synthetic oligonucleotide
  Sense strand starting at position 3389 of SEQ ID NO: 1888392
guucucgagacugggaaau

SEQ ID NO: 2532425 - RNA, 19 nt, Artificial Sequence
  Description of Artificial Sequence: Synthetic oligonucleotide
  Antisense strand to SEQ ID NO: 2532424
auuucccagucucgagaac

SEQ ID NO: 2532426 - RNA, 19 nt, Artificial Sequence
  Description of Artificial Sequence: Synthetic oligonucleotide
  Sense strand starting at position 1783 of SEQ ID NO: 1888392
aaaugagaauguguuaguc

SEQ ID NO: 2532427 - RNA, 19 nt, Artificial Sequence
  Description of Artificial Sequence: Synthetic oligonucleotide
  Antisense strand to SEQ ID NO: 2532426
gacuaacacauucucauuu

SEQ ID NO: 2532428 - RNA, 19 nt, Artificial Sequence
  Description of Artificial Sequence: Synthetic oligonucleotide
  Sense strand starting at position 2480 of SEQ ID NO: 1888392
uauauuggugcaggaugau

SEQ ID NO: 2532429 - RNA, 19 nt, Artificial Sequence
  Description of Artificial Sequence: Synthetic oligonucleotide
  Antisense strand to SEQ ID NO: 2532428
aucauccugcaccaauaua

SEQ ID NO: 2532430 - RNA, 19 nt, Artificial Sequence
  Description of Artificial Sequence: Synthetic oligonucleotide
  Sense strand starting at position 1267 of SEQ ID NO: 1888392
agguguauuuauuagaaag

SEQ ID NO: 2532431 - RNA, 19 nt, Artificial Sequence
  Description of Artificial Sequence: Synthetic oligonucleotide
  Antisense strand to SEQ ID NO: 2532430
cuuucuaauaaauacaccu

SEQ ID NO: 2532432 - RNA, 19 nt, Artificial Sequence
  Description of Artificial Sequence: Synthetic oligonucleotide
  Sense strand starting at position 2354 of SEQ ID NO: 1888392
guuaguuuggauuauuagu

SEQ ID NO: 2532433 - RNA, 19 nt, Artificial Sequence
  Description of Artificial Sequence: Synthetic oligonucleotide
  Antisense strand to SEQ ID NO: 2532432
acuaauaauccaaacuaac

SEQ ID NO: 2532434 - RNA, 19 nt, Artificial Sequence
  Description of Artificial Sequence: Synthetic oligonucleotide
  Sense strand starting at position 426 of SEQ ID NO: 1888392
ccguguaggcuagaauaag

SEQ ID NO: 2532435 - RNA, 19 nt, Artificial Sequence
  Description of Artificial Sequence: Synthetic oligonucleotide
  Antisense strand to SEQ ID NO: 2532434
cuuauucuagccuacacgg

SEQ ID NO: 2532436 - RNA, 19 nt, Artificial Sequence
  Description of Artificial Sequence: Synthetic oligonucleotide
  Sense strand starting at position 2654 of SEQ ID NO: 1888392
uucaguaugguaggaguga

SEQ ID NO: 2532437 - RNA, 19 nt, Artificial Sequence
  Description of Artificial Sequence: Synthetic oligonucleotide
  Antisense strand to SEQ ID NO: 2532436
ucacuccuaccauacugaa

SEQ ID NO: 2532438 - RNA, 19 nt, Artificial Sequence
  Description of Artificial Sequence: Synthetic oligonucleotide
  Sense strand starting at position 2235 of SEQ ID NO: 1888392
uccgacuucuaagucaaua

SEQ ID NO: 2532439 - RNA, 19 nt, Artificial Sequence
  Description of Artificial Sequence: Synthetic oligonucleotide
  Antisense strand to SEQ ID NO: 2532438
uauugacuuagaagucgga

SEQ ID NO: 2532440 - RNA, 19 nt, Artificial Sequence
  Description of Artificial Sequence: Synthetic oligonucleotide
  Sense strand starting at position 424 of SEQ ID NO: 1888392
caccguguaggcuagaaua

SEQ ID NO: 2532441 - RNA, 19 nt, Artificial Sequence
  Description of Artificial Sequence: Synthetic oligonucleotide
  Antisense strand to SEQ ID NO: 2532440
uauucuagccuacacggug

SEQ ID NO: 2532442 - RNA, 19 nt, Artificial Sequence
  Description of Artificial Sequence: Synthetic oligonucleotide
  Sense strand starting at position 3303 of SEQ ID NO: 1888392
gauagauagugucuuaguc

SEQ ID NO: 2532443 - RNA, 19 nt, Artificial Sequence
  Description of Artificial Sequence: Synthetic oligonucleotide
  Antisense strand to SEQ ID NO: 2532442
gacuaagacacuaucuauc

SEQ ID NO: 2532444 - RNA, 19 nt, Artificial Sequence
  Description of Artificial Sequence: Synthetic oligonucleotide
  Sense strand starting at position 1787 of SEQ ID NO: 1888392
gagaauguguuagucuagu

SEQ ID NO: 2532445 - RNA, 19 nt, Artificial Sequence
  Description of Artificial Sequence: Synthetic oligonucleotide
  Antisense strand to SEQ ID NO: 2532444
acuagacuaacacauucuc

SEQ ID NO: 2532446 - RNA, 19 nt, Artificial Sequence
  Description of Artificial Sequence: Synthetic oligonucleotide
  Sense strand starting at position 2612 of SEQ ID NO: 1888392
aagcuugugcgugaauaag

SEQ ID NO: 2532447 - RNA, 19 nt, Artificial Sequence
  Description of Artificial Sequence: Synthetic oligonucleotide
  Antisense strand to SEQ ID NO: 2532446
cuuauucacgcacaagcuu

SEQ ID NO: 2532448 - RNA, 19 nt, Artificial Sequence
  Description of Artificial Sequence: Synthetic oligonucleotide
  Sense strand starting at position 2362 of SEQ ID NO: 1888392
ggauuauuagugugugagu

SEQ ID NO: 2532449 - RNA, 19 nt, Artificial Sequence
  Description of Artificial Sequence: Synthetic oligonucleotide
  Antisense strand to SEQ ID NO: 2532448
acucacacacuaauaaucc

SEQ ID NO: 2532450 - RNA, 19 nt, Artificial Sequence
  Description of Artificial Sequence: Synthetic oligonucleotide
  Sense strand starting at position 2363 of SEQ ID NO: 1888392
gauuauuagugugugaguu

SEQ ID NO: 2532451 - RNA, 19 nt, Artificial Sequence
  Description of Artificial Sequence: Synthetic oligonucleotide
  Antisense strand to SEQ ID NO: 2532450
aacucacacacuaauaauc

SEQ ID NO: 2532452 - RNA, 19 nt, Artificial Sequence
  Description of Artificial Sequence: Synthetic oligonucleotide
  Sense strand starting at position 1416 of SEQ ID NO: 1888392
aggagagcauuugguaacu

SEQ ID NO: 2532453 - RNA, 19 nt, Artificial Sequence
  Description of Artificial Sequence: Synthetic oligonucleotide
  Antisense strand to SEQ ID NO: 2532452
aguuaccaaaugcucuccu

SEQ ID NO: 2532454 - RNA, 19 nt, Artificial Sequence
  Description of Artificial Sequence: Synthetic oligonucleotide
  Sense strand starting at position 2364 of SEQ ID NO: 1888392
auuauuagugugugaguuc

SEQ ID NO: 2532455 - RNA, 19 nt, Artificial Sequence
  Description of Artificial Sequence: Synthetic oligonucleotide
  Antisense strand to SEQ ID NO: 2532454
gaacucacacacuaauaau

SEQ ID NO: 2532456 - RNA, 19 nt, Artificial Sequence
  Description of Artificial Sequence: Synthetic oligonucleotide
  Sense strand starting at position 1018 of SEQ ID NO: 1888392
gcauguguauauguguaaa

SEQ ID NO: 2532457 - RNA, 19 nt, Artificial Sequence
  Description of Artificial Sequence: Synthetic oligonucleotide
  Antisense strand to SEQ ID NO: 2532456
uuuacacauauacacaugc

SEQ ID NO: 2532458 - RNA, 19 nt, Artificial Sequence
  Description of Artificial Sequence: Synthetic oligonucleotide
  Sense strand starting at position 1793 of SEQ ID NO: 1888392
guguuagucuagucucaug

SEQ ID NO: 2532459 - RNA, 19 nt, Artificial Sequence
  Description of Artificial Sequence: Synthetic oligonucleotide
  Antisense strand to SEQ ID NO: 2532458
caugagacuagacuaacac

SEQ ID NO: 2532460 - RNA, 19 nt, Artificial Sequence
  Description of Artificial Sequence: Synthetic oligonucleotide
  Sense strand starting at position 2611 of SEQ ID NO: 1888392
uaagcuugugcgugaauaa

SEQ ID NO: 2532461 - RNA, 19 nt, Artificial Sequence
  Description of Artificial Sequence: Synthetic oligonucleotide
  Antisense strand to SEQ ID NO: 2532460
uuauucacgcacaagcuua

SEQ ID NO: 2532462 - RNA, 19 nt, Artificial Sequence
  Description of Artificial Sequence: Synthetic oligonucleotide
  Sense strand starting at position 3330 of SEQ ID NO: 1888392
gcuaauguagcaugccuua

SEQ ID NO: 2532463 - RNA, 19 nt, Artificial Sequence
  Description of Artificial Sequence: Synthetic oligonucleotide
  Antisense strand to SEQ ID NO: 2532462
uaaggcaugcuacauuagc

SEQ ID NO: 2532464 - RNA, 19 nt, Artificial Sequence
  Description of Artificial Sequence: Synthetic oligonucleotide
  Sense strand starting at position 2610 of SEQ ID NO: 1888392
cuaagcuugugcgugaaua

SEQ ID NO: 2532465 - RNA, 19 nt, Artificial Sequence
  Description of Artificial Sequence: Synthetic oligonucleotide
  Antisense strand to SEQ ID NO: 2532464
uauucacgcacaagcuuag

SEQ ID NO: 2532466 - RNA, 19 nt, Artificial Sequence
  Description of Artificial Sequence: Synthetic oligonucleotide
  Sense strand starting at position 3263 of SEQ ID NO: 1888392
ccagauagauuagguagau

SEQ ID NO: 2532467 - RNA, 19 nt, Artificial Sequence
  Description of Artificial Sequence: Synthetic oligonucleotide
  Antisense strand to SEQ ID NO: 2532466
aucuaccuaaucuaucugg

SEQ ID NO: 2532468 - RNA, 19 nt, Artificial Sequence
  Description of Artificial Sequence: Synthetic oligonucleotide
  Sense strand starting at position 3307 of SEQ ID NO: 1888392
gauagugucuuaguccguu

SEQ ID NO: 2532469 - RNA, 19 nt, Artificial Sequence
  Description of Artificial Sequence: Synthetic oligonucleotide
  Antisense strand to SEQ ID NO: 2532468
aacggacuaagacacuauc

SEQ ID NO: 2532470 - RNA, 19 nt, Artificial Sequence
  Description of Artificial Sequence: Synthetic oligonucleotide
  Sense strand starting at position 3789 of SEQ ID NO: 1888392
cuuagauggugucagggau

SEQ ID NO: 2532471 - RNA, 19 nt, Artificial Sequence
  Description of Artificial Sequence: Synthetic oligonucleotide
  Antisense strand to SEQ ID NO: 2532470
aucccugacaccaucuaag

SEQ ID NO: 2532472 - RNA, 19 nt, Artificial Sequence
  Description of Artificial Sequence: Synthetic oligonucleotide
  Sense strand starting at position 1741 of SEQ ID NO: 1888392
aauggaauuucuugccgua

SEQ ID NO: 2532473 - RNA, 19 nt, Artificial Sequence
  Description of Artificial Sequence: Synthetic oligonucleotide
  Antisense strand to SEQ ID NO: 2532472
uacggcaagaaauuccauu

SEQ ID NO: 2532474 - RNA, 19 nt, Artificial Sequence
  Description of Artificial Sequence: Synthetic oligonucleotide
  Sense strand starting at position 3489 of SEQ ID NO: 1888392
guaugcaugugacagagaa

SEQ ID NO: 2532475 - RNA, 19 nt, Artificial Sequence
  Description of Artificial Sequence: Synthetic oligonucleotide
  Antisense strand to SEQ ID NO: 2532474
uucucugucacaugcauac

SEQ ID NO: 2532476 - RNA, 19 nt, Artificial Sequence
  Description of Artificial Sequence: Synthetic oligonucleotide
  Sense strand starting at position 2226 of SEQ ID NO: 1888392
auaauagaguccgacuucu

SEQ ID NO: 2532477 - RNA, 19 nt, Artificial Sequence
  Description of Artificial Sequence: Synthetic oligonucleotide
  Antisense strand to SEQ ID NO: 2532476
agaagucggacucuauuau

SEQ ID NO: 2532478 - RNA, 19 nt, Artificial Sequence
  Description of Artificial Sequence: Synthetic oligonucleotide
  Sense strand starting at position 1744 of SEQ ID NO: 1888392
ggaauuucuugccguauua

SEQ ID NO: 2532479 - RNA, 19 nt, Artificial Sequence
  Description of Artificial Sequence: Synthetic oligonucleotide
  Antisense strand to SEQ ID NO: 2532478
uaauacggcaagaaauucc

SEQ ID NO: 2532480 - RNA, 19 nt, Artificial Sequence
  Description of Artificial Sequence: Synthetic oligonucleotide
  Sense strand starting at position 1070 of SEQ ID NO: 1888392
agguaucacuccuggagac

SEQ ID NO: 2532481 - RNA, 19 nt, Artificial Sequence
  Description of Artificial Sequence: Synthetic oligonucleotide
  Antisense strand to SEQ ID NO: 2532480
gucuccaggagugauaccu

SEQ ID NO: 2532482 - RNA, 19 nt, Artificial Sequence
  Description of Artificial Sequence: Synthetic oligonucleotide
  Sense strand starting at position 1785 of SEQ ID NO: 1888392
augagaauguguuagucua

SEQ ID NO: 2532483 - RNA, 19 nt, Artificial Sequence
  Description of Artificial Sequence: Synthetic oligonucleotide
  Antisense strand to SEQ ID NO: 2532482
uagacuaacacauucucau

SEQ ID NO: 2532484 - RNA, 19 nt, Artificial Sequence
  Description of Artificial Sequence: Synthetic oligonucleotide
  Sense strand starting at position 2618 of SEQ ID NO: 1888392
gugcgugaauaagauuaaa

SEQ ID NO: 2532485 - RNA, 19 nt, Artificial Sequence
  Description of Artificial Sequence: Synthetic oligonucleotide
  Antisense strand to SEQ ID NO: 2532484
uuuaaucuuauucacgcac

SEQ ID NO: 2532486 - RNA, 19 nt, Artificial Sequence
  Description of Artificial Sequence: Synthetic oligonucleotide
  Sense strand starting at position 3300 of SEQ ID NO: 1888392
auggauagauagugucuua

SEQ ID NO: 2532487 - RNA, 19 nt, Artificial Sequence
  Description of Artificial Sequence: Synthetic oligonucleotide
  Antisense strand to SEQ ID NO: 2532486
uaagacacuaucuauccau

SEQ ID NO: 2532488 - RNA, 19 nt, Artificial Sequence
  Description of Artificial Sequence: Synthetic oligonucleotide
  Sense strand starting at position 3468 of SEQ ID NO: 1888393
uaauuaauguaccugagga

SEQ ID NO: 2532489 - RNA, 19 nt, Artificial Sequence
  Description of Artificial Sequence: Synthetic oligonucleotide
  Antisense strand to SEQ ID NO: 2532488
uccucagguacauuaauua

SEQ ID NO: 2532490 - RNA, 19 nt, Artificial Sequence
  Description of Artificial Sequence: Synthetic oligonucleotide
  Sense strand starting at position 477 of SEQ ID NO: 1888393
guuucuaucuugguauuua

SEQ ID NO: 2532491 - RNA, 19 nt, Artificial Sequence
  Description of Artificial Sequence: Synthetic oligonucleotide
  Antisense strand to SEQ ID NO: 2532490
uaaauaccaagauagaaac

SEQ ID NO: 2532492 - RNA, 19 nt, Artificial Sequence
  Description of Artificial Sequence: Synthetic oligonucleotide
  Sense strand starting at position 3116 of SEQ ID NO: 1888393
ucaggacauuaguuauuaa

SEQ ID NO: 2532493 - RNA, 19 nt, Artificial Sequence
  Description of Artificial Sequence: Synthetic oligonucleotide
  Antisense strand to SEQ ID NO: 2532492
uuaauaacuaauguccuga

SEQ ID NO: 2532494 - RNA, 19 nt, Artificial Sequence
  Description of Artificial Sequence: Synthetic oligonucleotide
  Sense strand starting at position 476 of SEQ ID NO: 1888393
gguuucuaucuugguauuu

SEQ ID NO: 2532495 - RNA, 19 nt, Artificial Sequence
  Description of Artificial Sequence: Synthetic oligonucleotide
  Antisense strand to SEQ ID NO: 2532494
aaauaccaagauagaaacc

SEQ ID NO: 2532496 - RNA, 19 nt, Artificial Sequence
  Description of Artificial Sequence: Synthetic oligonucleotide
  Sense strand starting at position 1296 of SEQ ID NO: 1888393
ugagcaaagcuuuaugaau

SEQ ID NO: 2532497 - RNA, 19 nt, Artificial Sequence
  Description of Artificial Sequence: Synthetic oligonucleotide
  Antisense strand to SEQ ID NO: 2532496
auucauaaagcuuugcuca

SEQ ID NO: 2532498 - RNA, 19 nt, Artificial Sequence
  Description of Artificial Sequence: Synthetic oligonucleotide
  Sense strand starting at position 1474 of SEQ ID NO: 1888393
auuaguuaacucugggaua

SEQ ID NO: 2532499 - RNA, 19 nt, Artificial Sequence
  Description of Artificial Sequence: Synthetic oligonucleotide
  Antisense strand to SEQ ID NO: 2532498
uaucccagaguuaacuaau

SEQ ID NO: 2532500 - RNA, 19 nt, Artificial Sequence
  Description of Artificial Sequence: Synthetic oligonucleotide
  Sense strand starting at position 514 of SEQ ID NO: 1888393
gggauauuauguuuauaug

SEQ ID NO: 2532501 - RNA, 19 nt, Artificial Sequence
  Description of Artificial Sequence: Synthetic oligonucleotide
  Antisense strand to SEQ ID NO: 2532500
cauauaaacauaauauccc

SEQ ID NO: 2532502 - RNA, 19 nt, Artificial Sequence
  Description of Artificial Sequence: Synthetic oligonucleotide
  Sense strand starting at position 3848 of SEQ ID NO: 1888393
aucauaugugaaggcaaga

SEQ ID NO: 2532503 - RNA, 19 nt, Artificial Sequence
  Description of Artificial Sequence: Synthetic oligonucleotide
  Antisense strand to SEQ ID NO: 2532502
ucuugccuucacauaugau

SEQ ID NO: 2532504 - RNA, 19 nt, Artificial Sequence
  Description of Artificial Sequence: Synthetic oligonucleotide
  Sense strand starting at position 1476 of SEQ ID NO: 1888393
uaguuaacucugggauaug

SEQ ID NO: 2532505 - RNA, 19 nt, Artificial Sequence
  Description of Artificial Sequence: Synthetic oligonucleotide
  Antisense strand to SEQ ID NO: 2532504
cauaucccagaguuaacua

SEQ ID NO: 2532506 - RNA, 19 nt, Artificial Sequence
  Description of Artificial Sequence: Synthetic oligonucleotide
  Sense strand starting at position 56 of SEQ ID NO: 1888393
uuaacaaagugagucuuaa

SEQ ID NO: 2532507 - RNA, 19 nt, Artificial Sequence
  Description of Artificial Sequence: Synthetic oligonucleotide
  Antisense strand to SEQ ID NO: 2532506
uuaagacucacuuuguuaa

SEQ ID NO: 2532508 - RNA, 19 nt, Artificial Sequence
  Description of Artificial Sequence: Synthetic oligonucleotide
  Sense strand starting at position 3982 of SEQ ID NO: 1888393
acagaugcucuuuaaagca

SEQ ID NO: 2532509 - RNA, 19 nt, Artificial Sequence
  Description of Artificial Sequence: Synthetic oligonucleotide
  Antisense strand to SEQ ID NO: 2532508
ugcuuuaaagagcaucugu

SEQ ID NO: 2532510 - RNA, 19 nt, Artificial Sequence
  Description of Artificial Sequence: Synthetic oligonucleotide
  Sense strand starting at position 1280 of SEQ ID NO: 1888393
guuguuuaaccauaccuga

SEQ ID NO: 2532511 - RNA, 19 nt, Artificial Sequence
  Description of Artificial Sequence: Synthetic oligonucleotide
  Antisense strand to SEQ ID NO: 2532510
ucagguaugguuaaacaac

SEQ ID NO: 2532512 - RNA, 19 nt, Artificial Sequence
  Description of Artificial Sequence: Synthetic oligonucleotide
  Sense strand starting at position 1380 of SEQ ID NO: 1888393
uugucagugcaauacaaga

SEQ ID NO: 2532513 - RNA, 19 nt, Artificial Sequence
  Description of Artificial Sequence: Synthetic oligonucleotide
  Antisense strand to SEQ ID NO: 2532512
ucuuguauugcacugacaa

SEQ ID NO: 2532514 - RNA, 19 nt, Artificial Sequence
  Description of Artificial Sequence: Synthetic oligonucleotide
  Sense strand starting at position 864 of SEQ ID NO: 1888393
aaaucaguucgcuaaugag

SEQ ID NO: 2532515 - RNA, 19 nt, Artificial Sequence
  Description of Artificial Sequence: Synthetic oligonucleotide
  Antisense strand to SEQ ID NO: 2532514
cucauuagcgaacugauuu

SEQ ID NO: 2532516 - RNA, 19 nt, Artificial Sequence
  Description of Artificial Sequence: Synthetic oligonucleotide
  Sense strand starting at position 2759 of SEQ ID NO: 1888393
auagaacucugugcagaca

SEQ ID NO: 2532517 - RNA, 19 nt, Artificial Sequence
  Description of Artificial Sequence: Synthetic oligonucleotide
  Antisense strand to SEQ ID NO: 2532516
ugucugcacagaguucuau

SEQ ID NO: 2532518 - RNA, 19 nt, Artificial Sequence
  Description of Artificial Sequence: Synthetic oligonucleotide
  Sense strand starting at position 1035 of SEQ ID NO: 1888393
gcaguuuggcaacacaaau

SEQ ID NO: 2532519 - RNA, 19 nt, Artificial Sequence
  Description of Artificial Sequence: Synthetic oligonucleotide
  Antisense strand to SEQ ID NO: 2532518
auuuguguugccaaacugc

SEQ ID NO: 2532520 - RNA, 19 nt, Artificial Sequence
  Description of Artificial Sequence: Synthetic oligonucleotide
  Sense strand starting at position 775 of SEQ ID NO: 1888393
ugagucugccuugacaauu

SEQ ID NO: 2532521 - RNA, 19 nt, Artificial Sequence
  Description of Artificial Sequence: Synthetic oligonucleotide
  Antisense strand to SEQ ID NO: 2532520
aauugucaaggcagacuca

SEQ ID NO: 2532522 - RNA, 19 nt, Artificial Sequence
  Description of Artificial Sequence: Synthetic oligonucleotide
  Sense strand starting at position 1900 of SEQ ID NO: 1888393
cagagagcugagcgaaaua

SEQ ID NO: 2532523 - RNA, 19 nt, Artificial Sequence
  Description of Artificial Sequence: Synthetic oligonucleotide
  Antisense strand to SEQ ID NO: 2532522
uauuucgcucagcucucug

SEQ ID NO: 2532524 - RNA, 19 nt, Artificial Sequence
  Description of Artificial Sequence: Synthetic oligonucleotide
  Sense strand starting at position 729 of SEQ ID NO: 1888393
guacuuaucagugaaguuu

SEQ ID NO: 2532525 - RNA, 19 nt, Artificial Sequence
  Description of Artificial Sequence: Synthetic oligonucleotide
  Antisense strand to SEQ ID NO: 2532524
aaacuucacugauaaguac

SEQ ID NO: 2532526 - RNA, 19 nt, Artificial Sequence
  Description of Artificial Sequence: Synthetic oligonucleotide
  Sense strand starting at position 465 of SEQ ID NO: 1888393
gaggaauuguugguuucua

SEQ ID NO: 2532527 - RNA, 19 nt, Artificial Sequence
  Description of Artificial Sequence: Synthetic oligonucleotide
  Antisense strand to SEQ ID NO: 2532526
uagaaaccaacaauuccuc

SEQ ID NO: 2532528 - RNA, 19 nt, Artificial Sequence
  Description of Artificial Sequence: Synthetic oligonucleotide
  Sense strand starting at position 88 of SEQ ID NO: 1888393
aucagauaguuugucuuaa

SEQ ID NO: 2532529 - RNA, 19 nt, Artificial Sequence
  Description of Artificial Sequence: Synthetic oligonucleotide
  Antisense strand to SEQ ID NO: 2532528
uuaagacaaacuaucugau

SEQ ID NO: 2532530 - RNA, 19 nt, Artificial Sequence
  Description of Artificial Sequence: Synthetic oligonucleotide
  Sense strand starting at position 3119 of SEQ ID NO: 1888393
ggacauuaguuauuaagcu

SEQ ID NO: 2532531 - RNA, 19 nt, Artificial Sequence
  Description of Artificial Sequence: Synthetic oligonucleotide
  Antisense strand to SEQ ID NO: 2532530
agcuuaauaacuaaugucc

SEQ ID NO: 2532532 - RNA, 19 nt, Artificial Sequence
  Description of Artificial Sequence: Synthetic oligonucleotide
  Sense strand starting at position 1109 of SEQ ID NO: 1888393
agguauguagccuagugaa

SEQ ID NO: 2532533 - RNA, 19 nt, Artificial Sequence
  Description of Artificial Sequence: Synthetic oligonucleotide
  Antisense strand to SEQ ID NO: 2532532
uucacuaggcuacauaccu

SEQ ID NO: 2532534 - RNA, 19 nt, Artificial Sequence
  Description of Artificial Sequence: Synthetic oligonucleotide
  Sense strand starting at position 464 of SEQ ID NO: 1888393
agaggaauuguugguuucu

SEQ ID NO: 2532535 - RNA, 19 nt, Artificial Sequence
  Description of Artificial Sequence: Synthetic oligonucleotide
  Antisense strand to SEQ ID NO: 2532534
agaaaccaacaauuccucu

SEQ ID NO: 2532536 - RNA, 19 nt, Artificial Sequence
  Description of Artificial Sequence: Synthetic oligonucleotide
  Sense strand starting at position 2393 of SEQ ID NO: 1888393
uccagugaccugggaaugu

SEQ ID NO: 2532537 - RNA, 19 nt, Artificial Sequence
  Description of Artificial Sequence: Synthetic oligonucleotide
  Antisense strand to SEQ ID NO: 2532536
acauucccaggucacugga

SEQ ID NO: 2532538 - RNA, 19 nt, Artificial Sequence
  Description of Artificial Sequence: Synthetic oligonucleotide
  Sense strand starting at position 89 of SEQ ID NO: 1888393
ucagauaguuugucuuaag

SEQ ID NO: 2532539 - RNA, 19 nt, Artificial Sequence
  Description of Artificial Sequence: Synthetic oligonucleotide
  Antisense strand to SEQ ID NO: 2532538
cuuaagacaaacuaucuga

SEQ ID NO: 2532540 - RNA, 19 nt, Artificial Sequence
  Description of Artificial Sequence: Synthetic oligonucleotide
  Sense strand starting at position 2535 of SEQ ID NO: 1888393
gcauauaaucucggagauc

SEQ ID NO: 2532541 - RNA, 19 nt, Artificial Sequence
  Description of Artificial Sequence: Synthetic oligonucleotide
  Antisense strand to SEQ ID NO: 2532540
gaucuccgagauuauaugc

SEQ ID NO: 2532542 - RNA, 19 nt, Artificial Sequence
  Description of Artificial Sequence: Synthetic oligonucleotide
  Sense strand starting at position 466 of SEQ ID NO: 1888393
aggaauuguugguuucuau

SEQ ID NO: 2532543 - RNA, 19 nt, Artificial Sequence
  Description of Artificial Sequence: Synthetic oligonucleotide
  Antisense strand to SEQ ID NO: 2532542
auagaaaccaacaauuccu

SEQ ID NO: 2532544 - RNA, 19 nt, Artificial Sequence
  Description of Artificial Sequence: Synthetic oligonucleotide
  Sense strand starting at position 1854 of SEQ ID NO: 1888393
guguuugugggagaaguuu

SEQ ID NO: 2532545 - RNA, 19 nt, Artificial Sequence
  Description of Artificial Sequence: Synthetic oligonucleotide
  Antisense strand to SEQ ID NO: 2532544
aaacuucucccacaaacac

SEQ ID NO: 2532546 - RNA, 19 nt, Artificial Sequence
  Description of Artificial Sequence: Synthetic oligonucleotide
  Sense strand starting at position 2329 of SEQ ID NO: 1888393
cuccgacuucccugacaac

SEQ ID NO: 2532547 - RNA, 19 nt, Artificial Sequence
  Description of Artificial Sequence: Synthetic oligonucleotide
  Antisense strand to SEQ ID NO: 2532546
guugucagggaagucggag

SEQ ID NO: 2532548 - RNA, 19 nt, Artificial Sequence
  Description of Artificial Sequence: Synthetic oligonucleotide
  Sense strand starting at position 1274 of SEQ ID NO: 1888393
uuagcaguuguuuaaccau

SEQ ID NO: 2532549 - RNA, 19 nt, Artificial Sequence
  Description of Artificial Sequence: Synthetic oligonucleotide
  Antisense strand to SEQ ID NO: 2532548
augguuaaacaacugcuaa

SEQ ID NO: 2532550 - RNA, 19 nt, Artificial Sequence
  Description of Artificial Sequence: Synthetic oligonucleotide
  Sense strand starting at position 1575 of SEQ ID NO: 1888393
aauacuaugugugcugaga

SEQ ID NO: 2532551 - RNA, 19 nt, Artificial Sequence
  Description of Artificial Sequence: Synthetic oligonucleotide
  Antisense strand to SEQ ID NO: 2532550
ucucagcacacauaguauu

SEQ ID NO: 2532552 - RNA, 19 nt, Artificial Sequence
  Description of Artificial Sequence: Synthetic oligonucleotide
  Sense strand starting at position 115 of SEQ ID NO: 1888393
agagcaauuuaccaguuga

SEQ ID NO: 2532553 - RNA, 19 nt, Artificial Sequence
  Description of Artificial Sequence: Synthetic oligonucleotide
  Antisense strand to SEQ ID NO: 2532552
ucaacugguaaauugcucu

SEQ ID NO: 2532554 - RNA, 19 nt, Artificial Sequence
  Description of Artificial Sequence: Synthetic oligonucleotide
  Sense strand starting at position 727 of SEQ ID NO: 1888393
uuguacuuaucagugaagu

SEQ ID NO: 2532555 - RNA, 19 nt, Artificial Sequence
  Description of Artificial Sequence: Synthetic oligonucleotide
  Antisense strand to SEQ ID NO: 2532554
acuucacugauaaguacaa

SEQ ID NO: 2532556 - RNA, 19 nt, Artificial Sequence
  Description of Artificial Sequence: Synthetic oligonucleotide
  Sense strand starting at position 761 of SEQ ID NO: 1888393
agcacuaauccaugugagu

SEQ ID NO: 2532557 - RNA, 19 nt, Artificial Sequence
  Description of Artificial Sequence: Synthetic oligonucleotide
  Antisense strand to SEQ ID NO: 2532556
acucacauggauuagugcu

SEQ ID NO: 2532558 - RNA, 19 nt, Artificial Sequence
  Description of Artificial Sequence: Synthetic oligonucleotide
  Sense strand starting at position 728 of SEQ ID NO: 1888393
uguacuuaucagugaaguu

SEQ ID NO: 2532559 - RNA, 19 nt, Artificial Sequence
  Description of Artificial Sequence: Synthetic oligonucleotide
  Antisense strand to SEQ ID NO: 2532558
aacuucacugauaaguaca

SEQ ID NO: 2532560 - RNA, 19 nt, Artificial Sequence
  Description of Artificial Sequence: Synthetic oligonucleotide
  Sense strand starting at position 1420 of SEQ ID NO: 1888393
uuauguagugugugaaaua

SEQ ID NO: 2532561 - RNA, 19 nt, Artificial Sequence
  Description of Artificial Sequence: Synthetic oligonucleotide
  Antisense strand to SEQ ID NO: 2532560
uauuucacacacuacauaa

SEQ ID NO: 2532562 - RNA, 19 nt, Artificial Sequence
  Description of Artificial Sequence: Synthetic oligonucleotide
  Sense strand starting at position 3639 of SEQ ID NO: 1888393
ucgucagguuauccaaacu

SEQ ID NO: 2532563 - RNA, 19 nt, Artificial Sequence
  Description of Artificial Sequence: Synthetic oligonucleotide
  Antisense strand to SEQ ID NO: 2532562
aguuuggauaaccugacga

SEQ ID NO: 2532564 - RNA, 19 nt, Artificial Sequence
  Description of Artificial Sequence: Synthetic oligonucleotide
  Sense strand starting at position 90 of SEQ ID NO: 1888393
cagauaguuugucuuaagc

SEQ ID NO: 2532565 - RNA, 19 nt, Artificial Sequence
  Description of Artificial Sequence: Synthetic oligonucleotide
  Antisense strand to SEQ ID NO: 2532564
gcuuaagacaaacuaucug

SEQ ID NO: 2532566 - RNA, 19 nt, Artificial Sequence
  Description of Artificial Sequence: Synthetic oligonucleotide
  Sense strand starting at position 772 of SEQ ID NO: 1888393
augugagucugccuugaca

SEQ ID NO: 2532567 - RNA, 19 nt, Artificial Sequence
  Description of Artificial Sequence: Synthetic oligonucleotide
  Antisense strand to SEQ ID NO: 2532566
ugucaaggcagacucacau

SEQ ID NO: 2532568 - RNA, 19 nt, Artificial Sequence
  Description of Artificial Sequence: Synthetic oligonucleotide
  Sense strand starting at position 2659 of SEQ ID NO: 1888394
gggugauuuggcggagagu

SEQ ID NO: 2532569 - RNA, 19 nt, Artificial Sequence
  Description of Artificial Sequence: Synthetic oligonucleotide
  Antisense strand to SEQ ID NO: 2532568
acucuccgccaaaucaccc

SEQ ID NO: 2532570 - RNA, 19 nt, Artificial Sequence
  Description of Artificial Sequence: Synthetic oligonucleotide
  Sense strand starting at position 2284 of SEQ ID NO: 1888394
ccuugucuucuagaggaug

SEQ ID NO: 2532571 - RNA, 19 nt, Artificial Sequence
  Description of Artificial Sequence: Synthetic oligonucleotide
  Antisense strand to SEQ ID NO: 2532570
cauccucuagaagacaagg

SEQ ID NO: 2532572 - RNA, 19 nt, Artificial Sequence
  Description of Artificial Sequence: Synthetic oligonucleotide
  Sense strand starting at position 3912 of SEQ ID NO: 1888394
uggaauucggcugaauuga

SEQ ID NO: 2532573 - RNA, 19 nt, Artificial Sequence
  Description of Artificial Sequence: Synthetic oligonucleotide
  Antisense strand to SEQ ID NO: 2532572
ucaauucagccgaauucca

SEQ ID NO: 2532574 - RNA, 19 nt, Artificial Sequence
  Description of Artificial Sequence: Synthetic oligonucleotide
  Sense strand starting at position 1791 of SEQ ID NO: 1888394
gacucuucccaggauugca

SEQ ID NO: 2532575 - RNA, 19 nt, Artificial Sequence
  Description of Artificial Sequence: Synthetic oligonucleotide
  Antisense strand to SEQ ID NO: 2532574
ugcaauccugggaagaguc

SEQ ID NO: 2532576 - RNA, 19 nt, Artificial Sequence
  Description of Artificial Sequence: Synthetic oligonucleotide
  Sense strand starting at position 3347 of SEQ ID NO: 1888394
gacagacaacaguguccua

SEQ ID NO: 2532577 - RNA, 19 nt, Artificial Sequence
  Description of Artificial Sequence: Synthetic oligonucleotide
  Antisense strand to SEQ ID NO: 2532576
uaggacacuguugucuguc

SEQ ID NO: 2532578 - RNA, 19 nt, Artificial Sequence
  Description of Artificial Sequence: Synthetic oligonucleotide
  Sense strand starting at position 2446 of SEQ ID NO: 1888394
ucaucagcuuccucagaga

SEQ ID NO: 2532579 - RNA, 19 nt, Artificial Sequence
  Description of Artificial Sequence: Synthetic oligonucleotide
  Antisense strand to SEQ ID NO: 2532578
ucucugaggaagcugauga

SEQ ID NO: 2532580 - RNA, 19 nt, Artificial Sequence
  Description of Artificial Sequence: Synthetic oligonucleotide
  Sense strand starting at position 1783 of SEQ ID NO: 1888394
gcgcgugugacucuuccca

SEQ ID NO: 2532581 - RNA, 19 nt, Artificial Sequence
  Description of Artificial Sequence: Synthetic oligonucleotide
  Antisense strand to SEQ ID NO: 2532580
ugggaagagucacacgcgc

SEQ ID NO: 2532582 - RNA, 19 nt, Artificial Sequence
  Description of Artificial Sequence: Synthetic oligonucleotide
  Sense strand starting at position 1734 of SEQ ID NO: 1888394
agggauguguccuccacac

SEQ ID NO: 2532583 - RNA, 19 nt, Artificial Sequence
  Description of Artificial Sequence: Synthetic oligonucleotide
  Antisense strand to SEQ ID NO: 2532582
guguggaggacacaucccu

SEQ ID NO: 2532584 - RNA, 19 nt, Artificial Sequence
  Description of Artificial Sequence: Synthetic oligonucleotide
  Sense strand starting at position 722 of SEQ ID NO: 1888394
guguccacucagggauuau

SEQ ID NO: 2532585 - RNA, 19 nt, Artificial Sequence
  Description of Artificial Sequence: Synthetic oligonucleotide
  Antisense strand to SEQ ID NO: 2532584
auaaucccugaguggacac

SEQ ID NO: 2532586 - RNA, 19 nt, Artificial Sequence
  Description of Artificial Sequence: Synthetic oligonucleotide
  Sense strand starting at position 3911 of SEQ ID NO: 1888394
uuggaauucggcugaauug

SEQ ID NO: 2532587 - RNA, 19 nt, Artificial Sequence
  Description of Artificial Sequence: Synthetic oligonucleotide
  Antisense strand to SEQ ID NO: 2532586
caauucagccgaauuccaa

SEQ ID NO: 2532588 - RNA, 19 nt, Artificial Sequence
  Description of Artificial Sequence: Synthetic oligonucleotide
  Sense strand starting at position 3219 of SEQ ID NO: 1888394
gggagcuagccugagugua

SEQ ID NO: 2532589 - RNA, 19 nt, Artificial Sequence
  Description of Artificial Sequence: Synthetic oligonucleotide
  Antisense strand to SEQ ID NO: 2532588
uacacucaggcuagcuccc

SEQ ID NO: 2532590 - RNA, 19 nt, Artificial Sequence
  Description of Artificial Sequence: Synthetic oligonucleotide
  Sense strand starting at position 1787 of SEQ ID NO: 1888394
gugugacucuucccaggau

SEQ ID NO: 2532591 - RNA, 19 nt, Artificial Sequence
  Description of Artificial Sequence: Synthetic oligonucleotide
  Antisense strand to SEQ ID NO: 2532590
auccugggaagagucacac

SEQ ID NO: 2532592 - RNA, 19 nt, Artificial Sequence
  Description of Artificial Sequence: Synthetic oligonucleotide
  Sense strand starting at position 2286 of SEQ ID NO: 1888394
uugucuucuagaggaugca

SEQ ID NO: 2532593 - RNA, 19 nt, Artificial Sequence
  Description of Artificial Sequence: Synthetic oligonucleotide
  Antisense strand to SEQ ID NO: 2532592
ugcauccucuagaagacaa

SEQ ID NO: 2532594 - RNA, 19 nt, Artificial Sequence
  Description of Artificial Sequence: Synthetic oligonucleotide
  Sense strand starting at position 1893 of SEQ ID NO: 1888394
uguagaagucugcauggca

SEQ ID NO: 2532595 - RNA, 19 nt, Artificial Sequence
  Description of Artificial Sequence: Synthetic oligonucleotide
  Antisense strand to SEQ ID NO: 2532594
ugccaugcagacuucuaca

SEQ ID NO: 2532596 - RNA, 19 nt, Artificial Sequence
  Description of Artificial Sequence: Synthetic oligonucleotide
  Sense strand starting at position 1600 of SEQ ID NO: 1888394
ucagauuugcccggugugu

SEQ ID NO: 2532597 - RNA, 19 nt, Artificial Sequence
  Description of Artificial Sequence: Synthetic oligonucleotide
  Antisense strand to SEQ ID NO: 2532596
acacaccgggcaaaucuga

SEQ ID NO: 2532598 - RNA, 19 nt, Artificial Sequence
  Description of Artificial Sequence: Synthetic oligonucleotide
  Sense strand starting at position 1503 of SEQ ID NO: 1888394
ucuggcuuguuucuggaaa

SEQ ID NO: 2532599 - RNA, 19 nt, Artificial Sequence
  Description of Artificial Sequence: Synthetic oligonucleotide
  Antisense strand to SEQ ID NO: 2532598
uuuccagaaacaagccaga

SEQ ID NO: 2532600 - RNA, 19 nt, Artificial Sequence
  Description of Artificial Sequence: Synthetic oligonucleotide
  Sense strand starting at position 2046 of SEQ ID NO: 1888394
ccuaaauguuuaucgaguc

SEQ ID NO: 2532601 - RNA, 19 nt, Artificial Sequence
  Description of Artificial Sequence: Synthetic oligonucleotide
  Antisense strand to SEQ ID NO: 2532600
gacucgauaaacauuuagg

SEQ ID NO: 2532602 - RNA, 19 nt, Artificial Sequence
  Description of Artificial Sequence: Synthetic oligonucleotide
  Sense strand starting at position 480 of SEQ ID NO: 1888394
ccaggaucuguuugggcga

SEQ ID NO: 2532603 - RNA, 19 nt, Artificial Sequence
  Description of Artificial Sequence: Synthetic oligonucleotide
  Antisense strand to SEQ ID NO: 2532602
ucgcccaaacagauccugg

SEQ ID NO: 2532604 - RNA, 19 nt, Artificial Sequence
  Description of Artificial Sequence: Synthetic oligonucleotide
  Sense strand starting at position 2043 of SEQ ID NO: 1888394
cugccuaaauguuuaucga

SEQ ID NO: 2532605 - RNA, 19 nt, Artificial Sequence
  Description of Artificial Sequence: Synthetic oligonucleotide
  Antisense strand to SEQ ID NO: 2532604
ucgauaaacauuuaggcag

SEQ ID NO: 2532606 - RNA, 19 nt, Artificial Sequence
  Description of Artificial Sequence: Synthetic oligonucleotide
  Sense strand starting at position 1096 of SEQ ID NO: 1888394
ggaagucagauccgugcau

SEQ ID NO: 2532607 - RNA, 19 nt, Artificial Sequence
  Description of Artificial Sequence: Synthetic oligonucleotide
  Antisense strand to SEQ ID NO: 2532606
augcacggaucugacuucc

SEQ ID NO: 2532608 - RNA, 19 nt, Artificial Sequence
  Description of Artificial Sequence: Synthetic oligonucleotide
  Sense strand starting at position 1878 of SEQ ID NO: 1888394
cuuguuucccuuugaugua

SEQ ID NO: 2532609 - RNA, 19 nt, Artificial Sequence
  Description of Artificial Sequence: Synthetic oligonucleotide
  Antisense strand to SEQ ID NO: 2532608
uacaucaaagggaaacaag

SEQ ID NO: 2532610 - RNA, 19 nt, Artificial Sequence
  Description of Artificial Sequence: Synthetic oligonucleotide
  Sense strand starting at position 2083 of SEQ ID NO: 1888394
cgugcugugcaacaaauua

SEQ ID NO: 2532611 - RNA, 19 nt, Artificial Sequence
  Description of Artificial Sequence: Synthetic oligonucleotide
  Antisense strand to SEQ ID NO: 2532610
uaauuuguugcacagcacg

SEQ ID NO: 2532612 - RNA, 19 nt, Artificial Sequence
  Description of Artificial Sequence: Synthetic oligonucleotide
  Sense strand starting at position 2298 of SEQ ID NO: 1888394
ggaugcacucuuggcugua

SEQ ID NO: 2532613 - RNA, 19 nt, Artificial Sequence
  Description of Artificial Sequence: Synthetic oligonucleotide
  Antisense strand to SEQ ID NO: 2532612
uacagccaagagugcaucc

SEQ ID NO: 2532614 - RNA, 19 nt, Artificial Sequence
  Description of Artificial Sequence: Synthetic oligonucleotide
  Sense strand starting at position 1496 of SEQ ID NO: 1888394
cacugagucuggcuuguuu

SEQ ID NO: 2532615 - RNA, 19 nt, Artificial Sequence
  Description of Artificial Sequence: Synthetic oligonucleotide
  Antisense strand to SEQ ID NO: 2532614
aaacaagccagacucagug

SEQ ID NO: 2532616 - RNA, 19 nt, Artificial Sequence
  Description of Artificial Sequence: Synthetic oligonucleotide
  Sense strand starting at position 1788 of SEQ ID NO: 1888394
ugugacucuucccaggauu

SEQ ID NO: 2532617 - RNA, 19 nt, Artificial Sequence
  Description of Artificial Sequence: Synthetic oligonucleotide
  Antisense strand to SEQ ID NO: 2532616
aauccugggaagagucaca

SEQ ID NO: 2532618 - RNA, 19 nt, Artificial Sequence
  Description of Artificial Sequence: Synthetic oligonucleotide
  Sense strand starting at position 2282 of SEQ ID NO: 1888394
uuccuugucuucuagagga

SEQ ID NO: 2532619 - RNA, 19 nt, Artificial Sequence
  Description of Artificial Sequence: Synthetic oligonucleotide
  Antisense strand to SEQ ID NO: 2532618
uccucuagaagacaaggaa

SEQ ID NO: 2532620 - RNA, 19 nt, Artificial Sequence
  Description of Artificial Sequence: Synthetic oligonucleotide
  Sense strand starting at position 3036 of SEQ ID NO: 1888394
gaaugaguauagggcuuau

SEQ ID NO: 2532621 - RNA, 19 nt, Artificial Sequence
  Description of Artificial Sequence: Synthetic oligonucleotide
  Antisense strand to SEQ ID NO: 2532620
auaagcccuauacucauuc

SEQ ID NO: 2532622 - RNA, 19 nt, Artificial Sequence
  Description of Artificial Sequence: Synthetic oligonucleotide
  Sense strand starting at position 1898 of SEQ ID NO: 1888394
aagucugcauggcaugaau

SEQ ID NO: 2532623 - RNA, 19 nt, Artificial Sequence
  Description of Artificial Sequence: Synthetic oligonucleotide
  Antisense strand to SEQ ID NO: 2532622
auucaugccaugcagacuu

SEQ ID NO: 2532624 - RNA, 19 nt, Artificial Sequence
  Description of Artificial Sequence: Synthetic oligonucleotide
  Sense strand starting at position 721 of SEQ ID NO: 1888394
uguguccacucagggauua

SEQ ID NO: 2532625 - RNA, 19 nt, Artificial Sequence
  Description of Artificial Sequence: Synthetic oligonucleotide
  Antisense strand to SEQ ID NO: 2532624
uaaucccugaguggacaca

SEQ ID NO: 2532626 - RNA, 19 nt, Artificial Sequence
  Description of Artificial Sequence: Synthetic oligonucleotide
  Sense strand starting at position 1881 of SEQ ID NO: 1888394
guuucccuuugauguagaa

SEQ ID NO: 2532627 - RNA, 19 nt, Artificial Sequence
  Description of Artificial Sequence: Synthetic oligonucleotide
  Antisense strand to SEQ ID NO: 2532626
uucuacaucaaagggaaac

SEQ ID NO: 2532628 - RNA, 19 nt, Artificial Sequence
  Description of Artificial Sequence: Synthetic oligonucleotide
  Sense strand starting at position 1505 of SEQ ID NO: 1888394
uggcuuguuucuggaaacu

SEQ ID NO: 2532629 - RNA, 19 nt, Artificial Sequence
  Description of Artificial Sequence: Synthetic oligonucleotide
  Antisense strand to SEQ ID NO: 2532628
aguuuccagaaacaagcca

SEQ ID NO: 2532630 - RNA, 19 nt, Artificial Sequence
  Description of Artificial Sequence: Synthetic oligonucleotide
  Sense strand starting at position 1504 of SEQ ID NO: 1888394
cuggcuuguuucuggaaac

SEQ ID NO: 2532631 - RNA, 19 nt, Artificial Sequence
  Description of Artificial Sequence: Synthetic oligonucleotide
  Antisense strand to SEQ ID NO: 2532630
guuuccagaaacaagccag

SEQ ID NO: 2532632 - RNA, 19 nt, Artificial Sequence
  Description of Artificial Sequence: Synthetic oligonucleotide
  Sense strand starting at position 2058 of SEQ ID NO: 1888394
ucgagucccuccugcauua

SEQ ID NO: 2532633 - RNA, 19 nt, Artificial Sequence
  Description of Artificial Sequence: Synthetic oligonucleotide
  Antisense strand to SEQ ID NO: 2532632
uaaugcaggagggacucga

SEQ ID NO: 2532634 - RNA, 19 nt, Artificial Sequence
  Description of Artificial Sequence: Synthetic oligonucleotide
  Sense strand starting at position 173 of SEQ ID NO: 1888395
uuagaaagauaucuauggu

SEQ ID NO: 2532635 - RNA, 19 nt, Artificial Sequence
  Description of Artificial Sequence: Synthetic oligonucleotide
  Antisense strand to SEQ ID NO: 2532634
accauagauaucuuucuaa

SEQ ID NO: 2532636 - RNA, 19 nt, Artificial Sequence
  Description of Artificial Sequence: Synthetic oligonucleotide
  Sense strand starting at position 1713 of SEQ ID NO: 1888395
gacaguggaaguuaguaau

SEQ ID NO: 2532637 - RNA, 19 nt, Artificial Sequence
  Description of Artificial Sequence: Synthetic oligonucleotide
  Antisense strand to SEQ ID NO: 2532636
auuacuaacuuccacuguc

SEQ ID NO: 2532638 - RNA, 19 nt, Artificial Sequence
  Description of Artificial Sequence: Synthetic oligonucleotide
  Sense strand starting at position 1555 of SEQ ID NO: 1888395
uuuauuaaggccuaugaua

SEQ ID NO: 2532639 - RNA, 19 nt, Artificial Sequence
  Description of Artificial Sequence: Synthetic oligonucleotide
  Antisense strand to SEQ ID NO: 2532638
uaucauaggccuuaauaaa

SEQ ID NO: 2532640 - RNA, 19 nt, Artificial Sequence
  Description of Artificial Sequence: Synthetic oligonucleotide
  Sense strand starting at position 3102 of SEQ ID NO: 1888395
guucucagacaugaccuau

SEQ ID NO: 2532641 - RNA, 19 nt, Artificial Sequence
  Description of Artificial Sequence: Synthetic oligonucleotide
  Antisense strand to SEQ ID NO: 2532640
auaggucaugucugagaac

SEQ ID NO: 2532642 - RNA, 19 nt, Artificial Sequence
  Description of Artificial Sequence: Synthetic oligonucleotide
  Sense strand starting at position 2341 of SEQ ID NO: 1888395
cuggcuaaagguuacuaaa

SEQ ID NO: 2532643 - RNA, 19 nt, Artificial Sequence
  Description of Artificial Sequence: Synthetic oligonucleotide
  Antisense strand to SEQ ID NO: 2532642
uuuaguaaccuuuagccag

SEQ ID NO: 2532644 - RNA, 19 nt, Artificial Sequence
  Description of Artificial Sequence: Synthetic oligonucleotide
  Sense strand starting at position 371 of SEQ ID NO: 1888395
auuguauuacaggaguuau

SEQ ID NO: 2532645 - RNA, 19 nt, Artificial Sequence
  Description of Artificial Sequence: Synthetic oligonucleotide
  Antisense strand to SEQ ID NO: 2532644
auaacuccuguaauacaau

SEQ ID NO: 2532646 - RNA, 19 nt, Artificial Sequence
  Description of Artificial Sequence: Synthetic oligonucleotide
  Sense strand starting at position 1519 of SEQ ID NO: 1888395
gagauucuugggcacuuau

SEQ ID NO: 2532647 - RNA, 19 nt, Artificial Sequence
  Description of Artificial Sequence: Synthetic oligonucleotide
  Antisense strand to SEQ ID NO: 2532646
auaagugcccaagaaucuc

SEQ ID NO: 2532648 - RNA, 19 nt, Artificial Sequence
  Description of Artificial Sequence: Synthetic oligonucleotide
  Sense strand starting at position 3411 of SEQ ID NO: 1888395
gggacucaugcugagcaaa

SEQ ID NO: 2532649 - RNA, 19 nt, Artificial Sequence
  Description of Artificial Sequence: Synthetic oligonucleotide
  Antisense strand to SEQ ID NO: 2532648
uuugcucagcaugaguccc

SEQ ID NO: 2532650 - RNA, 19 nt, Artificial Sequence
  Description of Artificial Sequence: Synthetic oligonucleotide
  Sense strand starting at position 27 of SEQ ID NO: 1888395
ggaagcuggauagguaaau

SEQ ID NO: 2532651 - RNA, 19 nt, Artificial Sequence
  Description of Artificial Sequence: Synthetic oligonucleotide
  Antisense strand to SEQ ID NO: 2532650
auuuaccuauccagcuucc

SEQ ID NO: 2532652 - RNA, 19 nt, Artificial Sequence
  Description of Artificial Sequence: Synthetic oligonucleotide
  Sense strand starting at position 1518 of SEQ ID NO: 1888395
agagauucuugggcacuua

SEQ ID NO: 2532653 - RNA, 19 nt, Artificial Sequence
  Description of Artificial Sequence: Synthetic oligonucleotide
  Antisense strand to SEQ ID NO: 2532652
uaagugcccaagaaucucu

SEQ ID NO: 2532654 - RNA, 19 nt, Artificial Sequence
  Description of Artificial Sequence: Synthetic oligonucleotide
  Sense strand starting at position 3113 of SEQ ID NO: 1888395
ugaccuauuugauaauuga

SEQ ID NO: 2532655 - RNA, 19 nt, Artificial Sequence
  Description of Artificial Sequence: Synthetic oligonucleotide
  Antisense strand to SEQ ID NO: 2532654
ucaauuaucaaauagguca

SEQ ID NO: 2532656 - RNA, 19 nt, Artificial Sequence
  Description of Artificial Sequence: Synthetic oligonucleotide
  Sense strand starting at position 1350 of SEQ ID NO: 1888395
ucaugugagucacugaaag

SEQ ID NO: 2532657 - RNA, 19 nt, Artificial Sequence
  Description of Artificial Sequence: Synthetic oligonucleotide
  Antisense strand to SEQ ID NO: 2532656
cuuucagugacucacauga

SEQ ID NO: 2532658 - RNA, 19 nt, Artificial Sequence
  Description of Artificial Sequence: Synthetic oligonucleotide
  Sense strand starting at position 1622 of SEQ ID NO: 1888395
guuugucauggugaaugga

SEQ ID NO: 2532659 - RNA, 19 nt, Artificial Sequence
  Description of Artificial Sequence: Synthetic oligonucleotide
  Antisense strand to SEQ ID NO: 2532658
uccauucaccaugacaaac

SEQ ID NO: 2532660 - RNA, 19 nt, Artificial Sequence
  Description of Artificial Sequence: Synthetic oligonucleotide
  Sense strand starting at position 940 of SEQ ID NO: 1888395
gugugcagacaucaugaca

SEQ ID NO: 2532661 - RNA, 19 nt, Artificial Sequence
  Description of Artificial Sequence: Synthetic oligonucleotide
  Antisense strand to SEQ ID NO: 2532660
ugucaugaugucugcacac

SEQ ID NO: 2532662 - RNA, 19 nt, Artificial Sequence
  Description of Artificial Sequence: Synthetic oligonucleotide
  Sense strand starting at position 1437 of SEQ ID NO: 1888395
ccuuaaagguaaucaguau

SEQ ID NO: 2532663 - RNA, 19 nt, Artificial Sequence
  Description of Artificial Sequence: Synthetic oligonucleotide
  Antisense strand to SEQ ID NO: 2532662
auacugauuaccuuuaagg

SEQ ID NO: 2532664 - RNA, 19 nt, Artificial Sequence
  Description of Artificial Sequence: Synthetic oligonucleotide
  Sense strand starting at position 1579 of SEQ ID NO: 1888395
gcccuugugauagaugauc

SEQ ID NO: 2532665 - RNA, 19 nt, Artificial Sequence
  Description of Artificial Sequence: Synthetic oligonucleotide
  Antisense strand to SEQ ID NO: 2532664
gaucaucuaucacaagggc

SEQ ID NO: 2532666 - RNA, 19 nt, Artificial Sequence
  Description of Artificial Sequence: Synthetic oligonucleotide
  Sense strand starting at position 45 of SEQ ID NO: 1888395
uggguucugcguuauuucu

SEQ ID NO: 2532667 - RNA, 19 nt, Artificial Sequence
  Description of Artificial Sequence: Synthetic oligonucleotide
  Antisense strand to SEQ ID NO: 2532666
agaaauaacgcagaaccca

SEQ ID NO: 2532668 - RNA, 19 nt, Artificial Sequence
  Description of Artificial Sequence: Synthetic oligonucleotide
  Sense strand starting at position 53 of SEQ ID NO: 1888395
gcguuauuucugcaacucu

SEQ ID NO: 2532669 - RNA, 19 nt, Artificial Sequence
  Description of Artificial Sequence: Synthetic oligonucleotide
  Antisense strand to SEQ ID NO: 2532668
agaguugcagaaauaacgc

SEQ ID NO: 2532670 - RNA, 19 nt, Artificial Sequence
  Description of Artificial Sequence: Synthetic oligonucleotide
  Sense strand starting at position 1276 of SEQ ID NO: 1888395
uaauguucucagcacgaga

SEQ ID NO: 2532671 - RNA, 19 nt, Artificial Sequence
  Description of Artificial Sequence: Synthetic oligonucleotide
  Antisense strand to SEQ ID NO: 2532670
ucucgugcugagaacauua

SEQ ID NO: 2532672 - RNA, 19 nt, Artificial Sequence
  Description of Artificial Sequence: Synthetic oligonucleotide
  Sense strand starting at position 3200 of SEQ ID NO: 1888395
guucuuacccucuagucaa

SEQ ID NO: 2532673 - RNA, 19 nt, Artificial Sequence
  Description of Artificial Sequence: Synthetic oligonucleotide
  Antisense strand to SEQ ID NO: 2532672
uugacuagaggguaagaac

SEQ ID NO: 2532674 - RNA, 19 nt, Artificial Sequence
  Description of Artificial Sequence: Synthetic oligonucleotide
  Sense strand starting at position 3592 of SEQ ID NO: 1888395
augcuucuaccugaauguu

SEQ ID NO: 2532675 - RNA, 19 nt, Artificial Sequence
  Description of Artificial Sequence: Synthetic oligonucleotide
  Antisense strand to SEQ ID NO: 2532674
aacauucagguagaagcau

SEQ ID NO: 2532676 - RNA, 19 nt, Artificial Sequence
  Description of Artificial Sequence: Synthetic oligonucleotide
  Sense strand starting at position 326 of SEQ ID NO: 1888395
ucugaauggcgccacuaaa

SEQ ID NO: 2532677 - RNA, 19 nt, Artificial Sequence
  Description of Artificial Sequence: Synthetic oligonucleotide
  Antisense strand to SEQ ID NO: 2532676
uuuaguggcgccauucaga

SEQ ID NO: 2532678 - RNA, 19 nt, Artificial Sequence
  Description of Artificial Sequence: Synthetic oligonucleotide
  Sense strand starting at position 3778 of SEQ ID NO: 1888395
ugcaacacgaugugagaua

SEQ ID NO: 2532679 - RNA, 19 nt, Artificial Sequence
  Description of Artificial Sequence: Synthetic oligonucleotide
  Antisense strand to SEQ ID NO: 2532678
uaucucacaucguguugca

SEQ ID NO: 2532680 - RNA, 19 nt, Artificial Sequence
  Description of Artificial Sequence: Synthetic oligonucleotide
  Sense strand starting at position 1163 of SEQ ID NO: 1888395
caggguuauucuguuugga

SEQ ID NO: 2532681 - RNA, 19 nt, Artificial Sequence
  Description of Artificial Sequence: Synthetic oligonucleotide
  Antisense strand to SEQ ID NO: 2532680
uccaaacagaauaacccug

SEQ ID NO: 2532682 - RNA, 19 nt, Artificial Sequence
  Description of Artificial Sequence: Synthetic oligonucleotide
  Sense strand starting at position 3074 of SEQ ID NO: 1888395
ggcauaaugucacuuccag

SEQ ID NO: 2532683 - RNA, 19 nt, Artificial Sequence
  Description of Artificial Sequence: Synthetic oligonucleotide
  Antisense strand to SEQ ID NO: 2532682
cuggaagugacauuaugcc

SEQ ID NO: 2532684 - RNA, 19 nt, Artificial Sequence
  Description of Artificial Sequence: Synthetic oligonucleotide
  Sense strand starting at position 745 of SEQ ID NO: 1888395
aagaguccucgguaaggcu

SEQ ID NO: 2532685 - RNA, 19 nt, Artificial Sequence
  Description of Artificial Sequence: Synthetic oligonucleotide
  Antisense strand to SEQ ID NO: 2532684
agccuuaccgaggacucuu

SEQ ID NO: 2532686 - RNA, 19 nt, Artificial Sequence
  Description of Artificial Sequence: Synthetic oligonucleotide
  Sense strand starting at position 361 of SEQ ID NO: 1888395
uguuccuaggauuguauua

SEQ ID NO: 2532687 - RNA, 19 nt, Artificial Sequence
  Description of Artificial Sequence: Synthetic oligonucleotide
  Antisense strand to SEQ ID NO: 2532686
uaauacaauccuaggaaca

SEQ ID NO: 2532688 - RNA, 19 nt, Artificial Sequence
  Description of Artificial Sequence: Synthetic oligonucleotide
  Sense strand starting at position 52 of SEQ ID NO: 1888395
ugcguuauuucugcaacuc

SEQ ID NO: 2532689 - RNA, 19 nt, Artificial Sequence
  Description of Artificial Sequence: Synthetic oligonucleotide
  Antisense strand to SEQ ID NO: 2532688
gaguugcagaaauaacgca

SEQ ID NO: 2532690 - RNA, 19 nt, Artificial Sequence
  Description of Artificial Sequence: Synthetic oligonucleotide
  Sense strand starting at position 1572 of SEQ ID NO: 1888395
uaagguagcccuugugaua

SEQ ID NO: 2532691 - RNA, 19 nt, Artificial Sequence
  Description of Artificial Sequence: Synthetic oligonucleotide
  Antisense strand to SEQ ID NO: 2532690
uaucacaagggcuaccuua

SEQ ID NO: 2532692 - RNA, 19 nt, Artificial Sequence
  Description of Artificial Sequence: Synthetic oligonucleotide
  Sense strand starting at position 3094 of SEQ ID NO: 1888395
cuuugccaguucucagaca

SEQ ID NO: 2532693 - RNA, 19 nt, Artificial Sequence
  Description of Artificial Sequence: Synthetic oligonucleotide
  Antisense strand to SEQ ID NO: 2532692
ugucugagaacuggcaaag

SEQ ID NO: 2532694 - RNA, 19 nt, Artificial Sequence
  Description of Artificial Sequence: Synthetic oligonucleotide
  Sense strand starting at position 851 of SEQ ID NO: 1888395
aagucacaggcuugcauau

SEQ ID NO: 2532695 - RNA, 19 nt, Artificial Sequence
  Description of Artificial Sequence: Synthetic oligonucleotide
  Antisense strand to SEQ ID NO: 2532694
auaugcaagccugugacuu

SEQ ID NO: 2532696 - RNA, 19 nt, Artificial Sequence
  Description of Artificial Sequence: Synthetic oligonucleotide
  Sense strand starting at position 2276 of SEQ ID NO: 1888395
gcgcuauugagaggugaag

SEQ ID NO: 2532697 - RNA, 19 nt, Artificial Sequence
  Description of Artificial Sequence: Synthetic oligonucleotide
  Antisense strand to SEQ ID NO: 2532696
cuucaccucucaauagcgc

SEQ ID NO: 2532698 - RNA, 19 nt, Artificial Sequence
  Description of Artificial Sequence: Synthetic oligonucleotide
  Sense strand starting at position 1619 of SEQ ID NO: 1888395
ccuguuugucauggugaau

SEQ ID NO: 2532699 - RNA, 19 nt, Artificial Sequence
  Description of Artificial Sequence: Synthetic oligonucleotide
  Antisense strand to SEQ ID NO: 2532698
auucaccaugacaaacagg

SEQ ID NO: 2532700 - RNA, 19 nt, Artificial Sequence
  Description of Artificial Sequence: Synthetic oligonucleotide
  Sense strand starting at position 1504 of SEQ ID NO: 1888395
agggacuauugucaagaga

SEQ ID NO: 2532701 - RNA, 19 nt, Artificial Sequence
  Description of Artificial Sequence: Synthetic oligonucleotide
  Antisense strand to SEQ ID NO: 2532700
ucucuugacaauagucccu

SEQ ID NO: 2532702 - RNA, 19 nt, Artificial Sequence
  Description of Artificial Sequence: Synthetic oligonucleotide
  Sense strand starting at position 1763 of SEQ ID NO: 1888395
ccaagugauuugcaguuaa

SEQ ID NO: 2532703 - RNA, 19 nt, Artificial Sequence
  Description of Artificial Sequence: Synthetic oligonucleotide
  Antisense strand to SEQ ID NO: 2532702
uuaacugcaaaucacuugg

SEQ ID NO: 2532704 - RNA, 19 nt, Artificial Sequence
  Description of Artificial Sequence: Synthetic oligonucleotide
  Sense strand starting at position 2330 of SEQ ID NO: 1888395
aacuuugcugucuggcuaa

SEQ ID NO: 2532705 - RNA, 19 nt, Artificial Sequence
  Description of Artificial Sequence: Synthetic oligonucleotide
  Antisense strand to SEQ ID NO: 2532704
uuagccagacagcaaaguu

SEQ ID NO: 2532706 - RNA, 19 nt, Artificial Sequence
  Description of Artificial Sequence: Synthetic oligonucleotide
  Sense strand starting at position 1263 of SEQ ID NO: 1888395
guguccaugucacuaaugu

SEQ ID NO: 2532707 - RNA, 19 nt, Artificial Sequence
  Description of Artificial Sequence: Synthetic oligonucleotide
  Antisense strand to SEQ ID NO: 2532706
acauuagugacauggacac

SEQ ID NO: 2532708 - RNA, 19 nt, Artificial Sequence
  Description of Artificial Sequence: Synthetic oligonucleotide
  Sense strand starting at position 2329 of SEQ ID NO: 1888395
gaacuuugcugucuggcua

SEQ ID NO: 2532709 - RNA, 19 nt, Artificial Sequence
  Description of Artificial Sequence: Synthetic oligonucleotide
  Antisense strand to SEQ ID NO: 2532708
uagccagacagcaaaguuc

SEQ ID NO: 2532710 - RNA, 19 nt, Artificial Sequence
  Description of Artificial Sequence: Synthetic oligonucleotide
  Sense strand starting at position 179 of SEQ ID NO: 1888395
agauaucuaugguaacuga

SEQ ID NO: 2532711 - RNA, 19 nt, Artificial Sequence
  Description of Artificial Sequence: Synthetic oligonucleotide
  Antisense strand to SEQ ID NO: 2532710
ucaguuaccauagauaucu

SEQ ID NO: 2532712 - RNA, 19 nt, Artificial Sequence
  Description of Artificial Sequence: Synthetic oligonucleotide
  Sense strand starting at position 366 of SEQ ID NO: 1888395
cuaggauuguauuacagga

SEQ ID NO: 2532713 - RNA, 19 nt, Artificial Sequence
  Description of Artificial Sequence: Synthetic oligonucleotide
  Antisense strand to SEQ ID NO: 2532712
uccuguaauacaauccuag

SEQ ID NO: 2532714 - RNA, 19 nt, Artificial Sequence
  Description of Artificial Sequence: Synthetic oligonucleotide
  Sense strand starting at position 1051 of SEQ ID NO: 1888396
augaauuggugauuccaaa

SEQ ID NO: 2532715 - RNA, 19 nt, Artificial Sequence
  Description of Artificial Sequence: Synthetic oligonucleotide
  Antisense strand to SEQ ID NO: 2532714
uuuggaaucaccaauucau

SEQ ID NO: 2532716 - RNA, 19 nt, Artificial Sequence
  Description of Artificial Sequence: Synthetic oligonucleotide
  Sense strand starting at position 378 of SEQ ID NO: 1888396
acauauuagcauggaauga

SEQ ID NO: 2532717 - RNA, 19 nt, Artificial Sequence
  Description of Artificial Sequence: Synthetic oligonucleotide
  Antisense strand to SEQ ID NO: 2532716
ucauuccaugcuaauaugu

SEQ ID NO: 2532718 - RNA, 19 nt, Artificial Sequence
  Description of Artificial Sequence: Synthetic oligonucleotide
  Sense strand starting at position 1437 of SEQ ID NO: 1888396
gccuuugcucaugugagca

SEQ ID NO: 2532719 - RNA, 19 nt, Artificial Sequence
  Description of Artificial Sequence: Synthetic oligonucleotide
  Antisense strand to SEQ ID NO: 2532718
ugcucacaugagcaaaggc

SEQ ID NO: 2532720 - RNA, 19 nt, Artificial Sequence
  Description of Artificial Sequence: Synthetic oligonucleotide
  Sense strand starting at position 3123 of SEQ ID NO: 1888396
cguguuagcauccuuguga

SEQ ID NO: 2532721 - RNA, 19 nt, Artificial Sequence
  Description of Artificial Sequence: Synthetic oligonucleotide
  Antisense strand to SEQ ID NO: 2532720
ucacaaggaugcuaacacg

SEQ ID NO: 2532722 - RNA, 19 nt, Artificial Sequence
  Description of Artificial Sequence: Synthetic oligonucleotide
  Sense strand starting at position 3257 of SEQ ID NO: 1888396
uauagaucugguuauggua

SEQ ID NO: 2532723 - RNA, 19 nt, Artificial Sequence
  Description of Artificial Sequence: Synthetic oligonucleotide
  Antisense strand to SEQ ID NO: 2532722
uaccauaaccagaucuaua

SEQ ID NO: 2532724 - RNA, 19 nt, Artificial Sequence
  Description of Artificial Sequence: Synthetic oligonucleotide
  Sense strand starting at position 760 of SEQ ID NO: 1888396
gccugaggcggcaggaauu

SEQ ID NO: 2532725 - RNA, 19 nt, Artificial Sequence
  Description of Artificial Sequence: Synthetic oligonucleotide
  Antisense strand to SEQ ID NO: 2532724
aauuccugccgccucaggc

SEQ ID NO: 2532726 - RNA, 19 nt, Artificial Sequence
  Description of Artificial Sequence: Synthetic oligonucleotide
  Sense strand starting at position 1992 of SEQ ID NO: 1888396
agguucuauuuagauuugu

SEQ ID NO: 2532727 - RNA, 19 nt, Artificial Sequence
  Description of Artificial Sequence: Synthetic oligonucleotide
  Antisense strand to SEQ ID NO: 2532726
acaaaucuaaauagaaccu

SEQ ID NO: 2532728 - RNA, 19 nt, Artificial Sequence
  Description of Artificial Sequence: Synthetic oligonucleotide
  Sense strand starting at position 2520 of SEQ ID NO: 1888396
uaccauaggugacuuauga

SEQ ID NO: 2532729 - RNA, 19 nt, Artificial Sequence
  Description of Artificial Sequence: Synthetic oligonucleotide
  Antisense strand to SEQ ID NO: 2532728
ucauaagucaccuauggua

SEQ ID NO: 2532730 - RNA, 19 nt, Artificial Sequence
  Description of Artificial Sequence: Synthetic oligonucleotide
  Sense strand starting at position 2868 of SEQ ID NO: 1888396
gggagaaucgacuguggau

SEQ ID NO: 2532731 - RNA, 19 nt, Artificial Sequence
  Description of Artificial Sequence: Synthetic oligonucleotide
  Antisense strand to SEQ ID NO: 2532730
auccacagucgauucuccc

SEQ ID NO: 2532732 - RNA, 19 nt, Artificial Sequence
  Description of Artificial Sequence: Synthetic oligonucleotide
  Sense strand starting at position 3264 of SEQ ID NO: 1888396
cugguuaugguauauuaau

SEQ ID NO: 2532733 - RNA, 19 nt, Artificial Sequence
  Description of Artificial Sequence: Synthetic oligonucleotide
  Antisense strand to SEQ ID NO: 2532732
auuaauauaccauaaccag

SEQ ID NO: 2532734 - RNA, 19 nt, Artificial Sequence
  Description of Artificial Sequence: Synthetic oligonucleotide
  Sense strand starting at position 1262 of SEQ ID NO: 1888396
ccaugcauuucugucuauu

SEQ ID NO: 2532735 - RNA, 19 nt, Artificial Sequence
  Description of Artificial Sequence: Synthetic oligonucleotide
  Antisense strand to SEQ ID NO: 2532734
aauagacagaaaugcaugg

SEQ ID NO: 2532736 - RNA, 19 nt, Artificial Sequence
  Description of Artificial Sequence: Synthetic oligonucleotide
  Sense strand starting at position 2464 of SEQ ID NO: 1888396
auuauaaugucuuugagac

SEQ ID NO: 2532737 - RNA, 19 nt, Artificial Sequence
  Description of Artificial Sequence: Synthetic oligonucleotide
  Antisense strand to SEQ ID NO: 2532736
gucucaaagacauuauaau

SEQ ID NO: 2532738 - RNA, 19 nt, Artificial Sequence
  Description of Artificial Sequence: Synthetic oligonucleotide
  Sense strand starting at position 2857 of SEQ ID NO: 1888396
aggcauggccagggagaau

SEQ ID NO: 2532739 - RNA, 19 nt, Artificial Sequence
  Description of Artificial Sequence: Synthetic oligonucleotide
  Antisense strand to SEQ ID NO: 2532738
auucucccuggccaugccu

SEQ ID NO: 2532740 - RNA, 19 nt, Artificial Sequence
  Description of Artificial Sequence: Synthetic oligonucleotide
  Sense strand starting at position 3726 of SEQ ID NO: 1888396
gccaauaugacauguggaa

SEQ ID NO: 2532741 - RNA, 19 nt, Artificial Sequence
  Description of Artificial Sequence: Synthetic oligonucleotide
  Antisense strand to SEQ ID NO: 2532740
uuccacaugucauauuggc

SEQ ID NO: 2532742 - RNA, 19 nt, Artificial Sequence
  Description of Artificial Sequence: Synthetic oligonucleotide
  Sense strand starting at position 893 of SEQ ID NO: 1888396
ggcaaucucaggcacgaaa

SEQ ID NO: 2532743 - RNA, 19 nt, Artificial Sequence
  Description of Artificial Sequence: Synthetic oligonucleotide
  Antisense strand to SEQ ID NO: 2532742
uuucgugccugagauugcc

SEQ ID NO: 2532744 - RNA, 19 nt, Artificial Sequence
  Description of Artificial Sequence: Synthetic oligonucleotide
  Sense strand starting at position 3620 of SEQ ID NO: 1888396
aucuauaucuaccuguaga

SEQ ID NO: 2532745 - RNA, 19 nt, Artificial Sequence
  Description of Artificial Sequence: Synthetic oligonucleotide
  Antisense strand to SEQ ID NO: 2532744
ucuacagguagauauagau

SEQ ID NO: 2532746 - RNA, 19 nt, Artificial Sequence
  Description of Artificial Sequence: Synthetic oligonucleotide
  Sense strand starting at position 3439 of SEQ ID NO: 1888396
gggcauaaauggcuccaga

SEQ ID NO: 2532747 - RNA, 19 nt, Artificial Sequence
  Description of Artificial Sequence: Synthetic oligonucleotide
  Antisense strand to SEQ ID NO: 2532746
ucuggagccauuuaugccc

SEQ ID NO: 2532748 - RNA, 19 nt, Artificial Sequence
  Description of Artificial Sequence: Synthetic oligonucleotide
  Sense strand starting at position 3340 of SEQ ID NO: 1888396
agugguuuccuuuauaacc

SEQ ID NO: 2532749 - RNA, 19 nt, Artificial Sequence
  Description of Artificial Sequence: Synthetic oligonucleotide
  Antisense strand to SEQ ID NO: 2532748
gguuauaaaggaaaccacu

SEQ ID NO: 2532750 - RNA, 19 nt, Artificial Sequence
  Description of Artificial Sequence: Synthetic oligonucleotide
  Sense strand starting at position 147 of SEQ ID NO: 1888396
cuggguagguauuccuaaa

SEQ ID NO: 2532751 - RNA, 19 nt, Artificial Sequence
  Description of Artificial Sequence: Synthetic oligonucleotide
  Antisense strand to SEQ ID NO: 2532750
uuuaggaauaccuacccag

SEQ ID NO: 2532752 - RNA, 19 nt, Artificial Sequence
  Description of Artificial Sequence: Synthetic oligonucleotide
  Sense strand starting at position 1253 of SEQ ID NO: 1888396
uuccaaucgccaugcauuu

SEQ ID NO: 2532753 - RNA, 19 nt, Artificial Sequence
  Description of Artificial Sequence: Synthetic oligonucleotide
  Antisense strand to SEQ ID NO: 2532752
aaaugcauggcgauuggaa

SEQ ID NO: 2532754 - RNA, 19 nt, Artificial Sequence
  Description of Artificial Sequence: Synthetic oligonucleotide
  Sense strand starting at position 2465 of SEQ ID NO: 1888396
uuauaaugucuuugagacg

SEQ ID NO: 2532755 - RNA, 19 nt, Artificial Sequence
  Description of Artificial Sequence: Synthetic oligonucleotide
  Antisense strand to SEQ ID NO: 2532754
cgucucaaagacauuauaa

SEQ ID NO: 2532756 - RNA, 19 nt, Artificial Sequence
  Description of Artificial Sequence: Synthetic oligonucleotide
  Sense strand starting at position 1014 of SEQ ID NO: 1888396
ugaugcaucucuuugaauc

SEQ ID NO: 2532757 - RNA, 19 nt, Artificial Sequence
  Description of Artificial Sequence: Synthetic oligonucleotide
  Antisense strand to SEQ ID NO: 2532756
gauucaaagagaugcauca

SEQ ID NO: 2532758 - RNA, 19 nt, Artificial Sequence
  Description of Artificial Sequence: Synthetic oligonucleotide
  Sense strand starting at position 400 of SEQ ID NO: 1888396
uuucuuagaagcuguggga

SEQ ID NO: 2532759 - RNA, 19 nt, Artificial Sequence
  Description of Artificial Sequence: Synthetic oligonucleotide
  Antisense strand to SEQ ID NO: 2532758
ucccacagcuucuaagaaa

SEQ ID NO: 2532760 - RNA, 19 nt, Artificial Sequence
  Description of Artificial Sequence: Synthetic oligonucleotide
  Sense strand starting at position 510 of SEQ ID NO: 1888396
ggacucaaggccggugaau

SEQ ID NO: 2532761 - RNA, 19 nt, Artificial Sequence
  Description of Artificial Sequence: Synthetic oligonucleotide
  Antisense strand to SEQ ID NO: 2532760
auucaccggccuugagucc

SEQ ID NO: 2532762 - RNA, 19 nt, Artificial Sequence
  Description of Artificial Sequence: Synthetic oligonucleotide
  Sense strand starting at position 906 of SEQ ID NO: 1888396
acgaaauaugcauagcugu

SEQ ID NO: 2532763 - RNA, 19 nt, Artificial Sequence
  Description of Artificial Sequence: Synthetic oligonucleotide
  Antisense strand to SEQ ID NO: 2532762
acagcuaugcauauuucgu

SEQ ID NO: 2532764 - RNA, 19 nt, Artificial Sequence
  Description of Artificial Sequence: Synthetic oligonucleotide
  Sense strand starting at position 3767 of SEQ ID NO: 1888396
ugggauuucuagugggaaa

SEQ ID NO: 2532765 - RNA, 19 nt, Artificial Sequence
  Description of Artificial Sequence: Synthetic oligonucleotide
  Antisense strand to SEQ ID NO: 2532764
uuucccacuagaaauccca

SEQ ID NO: 2532766 - RNA, 19 nt, Artificial Sequence
  Description of Artificial Sequence: Synthetic oligonucleotide
  Sense strand starting at position 3060 of SEQ ID NO: 1888396
gcuagccuuuaacugaaau

SEQ ID NO: 2532767 - RNA, 19 nt, Artificial Sequence
  Description of Artificial Sequence: Synthetic oligonucleotide
  Antisense strand to SEQ ID NO: 2532766
auuucaguuaaaggcuagc

SEQ ID NO: 2532768 - RNA, 19 nt, Artificial Sequence
  Description of Artificial Sequence: Synthetic oligonucleotide
  Sense strand starting at position 204 of SEQ ID NO: 1888396
aaagguuaucauggugcau

SEQ ID NO: 2532769 - RNA, 19 nt, Artificial Sequence
  Description of Artificial Sequence: Synthetic oligonucleotide
  Antisense strand to SEQ ID NO: 2532768
augcaccaugauaaccuuu

SEQ ID NO: 2532770 - RNA, 19 nt, Artificial Sequence
  Description of Artificial Sequence: Synthetic oligonucleotide
  Sense strand starting at position 1046 of SEQ ID NO: 1888396
uugcuaugaauuggugauu

SEQ ID NO: 2532771 - RNA, 19 nt, Artificial Sequence
  Description of Artificial Sequence: Synthetic oligonucleotide
  Antisense strand to SEQ ID NO: 2532770
aaucaccaauucauagcaa

SEQ ID NO: 2532772 - RNA, 19 nt, Artificial Sequence
  Description of Artificial Sequence: Synthetic oligonucleotide
  Sense strand starting at position 1045 of SEQ ID NO: 1888396
uuugcuaugaauuggugau

SEQ ID NO: 2532773 - RNA, 19 nt, Artificial Sequence
  Description of Artificial Sequence: Synthetic oligonucleotide
  Antisense strand to SEQ ID NO: 2532772
aucaccaauucauagcaaa

SEQ ID NO: 2532774 - RNA, 19 nt, Artificial Sequence
  Description of Artificial Sequence: Synthetic oligonucleotide
  Sense strand starting at position 1853 of SEQ ID NO: 1888396
ccaucuaucucugugacuu

SEQ ID NO: 2532775 - RNA, 19 nt, Artificial Sequence
  Description of Artificial Sequence: Synthetic oligonucleotide
  Antisense strand to SEQ ID NO: 2532774
aagucacagagauagaugg

SEQ ID NO: 2532776 - RNA, 19 nt, Artificial Sequence
  Description of Artificial Sequence: Synthetic oligonucleotide
  Sense strand starting at position 2002 of SEQ ID NO: 1888396
uagauuuguugugacaaau

SEQ ID NO: 2532777 - RNA, 19 nt, Artificial Sequence
  Description of Artificial Sequence: Synthetic oligonucleotide
  Antisense strand to SEQ ID NO: 2532776
auuugucacaacaaaucua

SEQ ID NO: 2532778 - RNA, 19 nt, Artificial Sequence
  Description of Artificial Sequence: Synthetic oligonucleotide
  Sense strand starting at position 3487 of SEQ ID NO: 1888396
ccauuauuauugguguuau

SEQ ID NO: 2532779 - RNA, 19 nt, Artificial Sequence
  Description of Artificial Sequence: Synthetic oligonucleotide
  Antisense strand to SEQ ID NO: 2532778
auaacaccaauaauaaugg

SEQ ID NO: 2532780 - RNA, 19 nt, Artificial Sequence
  Description of Artificial Sequence: Synthetic oligonucleotide
  Sense strand starting at position 1852 of SEQ ID NO: 1888396
uccaucuaucucugugacu

SEQ ID NO: 2532781 - RNA, 19 nt, Artificial Sequence
  Description of Artificial Sequence: Synthetic oligonucleotide
  Antisense strand to SEQ ID NO: 2532780
agucacagagauagaugga

SEQ ID NO: 2532782 - RNA, 19 nt, Artificial Sequence
  Description of Artificial Sequence: Synthetic oligonucleotide
  Sense strand starting at position 1107 of SEQ ID NO: 1888396
gggcuaaagucuccuaucu

SEQ ID NO: 2532783 - RNA, 19 nt, Artificial Sequence
  Description of Artificial Sequence: Synthetic oligonucleotide
  Antisense strand to SEQ ID NO: 2532782
agauaggagacuuuagccc

SEQ ID NO: 2532784 - RNA, 19 nt, Artificial Sequence
  Description of Artificial Sequence: Synthetic oligonucleotide
  Sense strand starting at position 904 of SEQ ID NO: 1888396
gcacgaaauaugcauagcu

SEQ ID NO: 2532785 - RNA, 19 nt, Artificial Sequence
  Description of Artificial Sequence: Synthetic oligonucleotide
  Antisense strand to SEQ ID NO: 2532784
agcuaugcauauuucgugc

SEQ ID NO: 2532786 - RNA, 19 nt, Artificial Sequence
  Description of Artificial Sequence: Synthetic oligonucleotide
  Sense strand starting at position 3329 of SEQ ID NO: 1888396
aucuuaauguaagugguuu

SEQ ID NO: 2532787 - RNA, 19 nt, Artificial Sequence
  Description of Artificial Sequence: Synthetic oligonucleotide
  Antisense strand to SEQ ID NO: 2532786
aaaccacuuacauuaagau

SEQ ID NO: 2532788 - RNA, 19 nt, Artificial Sequence
  Description of Artificial Sequence: Synthetic oligonucleotide
  Sense strand starting at position 2257 of SEQ ID NO: 1888396
ggaacaagcguuuguaaac

SEQ ID NO: 2532789 - RNA, 19 nt, Artificial Sequence
  Description of Artificial Sequence: Synthetic oligonucleotide
  Antisense strand to SEQ ID NO: 2532788
guuuacaaacgcuuguucc

SEQ ID NO: 2532790 - RNA, 19 nt, Artificial Sequence
  Description of Artificial Sequence: Synthetic oligonucleotide
  Sense strand starting at position 1720 of SEQ ID NO: 1888396
ggcagcacaucuguccaaa

SEQ ID NO: 2532791 - RNA, 19 nt, Artificial Sequence
  Description of Artificial Sequence: Synthetic oligonucleotide
  Antisense strand to SEQ ID NO: 2532790
uuuggacagaugugcugcc

SEQ ID NO: 2532792 - RNA, 19 nt, Artificial Sequence
  Description of Artificial Sequence: Synthetic oligonucleotide
  Sense strand starting at position 536 of SEQ ID NO: 1888396
uggucauauggcuggcaga

SEQ ID NO: 2532793 - RNA, 19 nt, Artificial Sequence
  Description of Artificial Sequence: Synthetic oligonucleotide
  Antisense strand to SEQ ID NO: 2532792
ucugccagccauaugacca

SEQ ID NO: 2532794 - RNA, 19 nt, Artificial Sequence
  Description of Artificial Sequence: Synthetic oligonucleotide
  Sense strand starting at position 3841 of SEQ ID NO: 1888397
gaaccauguggguacugau

SEQ ID NO: 2532795 - RNA, 19 nt, Artificial Sequence
  Description of Artificial Sequence: Synthetic oligonucleotide
  Antisense strand to SEQ ID NO: 2532794
aucaguacccacaugguuc

SEQ ID NO: 2532796 - RNA, 19 nt, Artificial Sequence
  Description of Artificial Sequence: Synthetic oligonucleotide
  Sense strand starting at position 3525 of SEQ ID NO: 1888397
gaaaccacuugaucuguga

SEQ ID NO: 2532797 - RNA, 19 nt, Artificial Sequence
  Description of Artificial Sequence: Synthetic oligonucleotide
  Antisense strand to SEQ ID NO: 2532796
ucacagaucaagugguuuc

SEQ ID NO: 2532798 - RNA, 19 nt, Artificial Sequence
  Description of Artificial Sequence: Synthetic oligonucleotide
  Sense strand starting at position 3461 of SEQ ID NO: 1888397
auaguaguaccagaguauu

SEQ ID NO: 2532799 - RNA, 19 nt, Artificial Sequence
  Description of Artificial Sequence: Synthetic oligonucleotide
  Antisense strand to SEQ ID NO: 2532798
aauacucugguacuacuau

SEQ ID NO: 2532800 - RNA, 19 nt, Artificial Sequence
  Description of Artificial Sequence: Synthetic oligonucleotide
  Sense strand starting at position 3464 of SEQ ID NO: 1888397
guaguaccagaguauuaua

SEQ ID NO: 2532801 - RNA, 19 nt, Artificial Sequence
  Description of Artificial Sequence: Synthetic oligonucleotide
  Antisense strand to SEQ ID NO: 2532800
uauaauacucugguacuac

SEQ ID NO: 2532802 - RNA, 19 nt, Artificial Sequence
  Description of Artificial Sequence: Synthetic oligonucleotide
  Sense strand starting at position 3115 of SEQ ID NO: 1888397
gggcgcuccgcagugaauu

SEQ ID NO: 2532803 - RNA, 19 nt, Artificial Sequence
  Description of Artificial Sequence: Synthetic oligonucleotide
  Antisense strand to SEQ ID NO: 2532802
aauucacugcggagcgccc

SEQ ID NO: 2532804 - RNA, 19 nt, Artificial Sequence
  Description of Artificial Sequence: Synthetic oligonucleotide
  Sense strand starting at position 3960 of SEQ ID NO: 1888397
guaaguaacuggucauaga

SEQ ID NO: 2532805 - RNA, 19 nt, Artificial Sequence
  Description of Artificial Sequence: Synthetic oligonucleotide
  Antisense strand to SEQ ID NO: 2532804
ucuaugaccaguuacuuac

SEQ ID NO: 2532806 - RNA, 19 nt, Artificial Sequence
  Description of Artificial Sequence: Synthetic oligonucleotide
  Sense strand starting at position 1164 of SEQ ID NO: 1888397
ucaagaaauucguccaauu

SEQ ID NO: 2532807 - RNA, 19 nt, Artificial Sequence
  Description of Artificial Sequence: Synthetic oligonucleotide
  Antisense strand to SEQ ID NO: 2532806
aauuggacgaauuucuuga

SEQ ID NO: 2532808 - RNA, 19 nt, Artificial Sequence
  Description of Artificial Sequence: Synthetic oligonucleotide
  Sense strand starting at position 3738 of SEQ ID NO: 1888397
agcuuuaacgucuaacaua

SEQ ID NO: 2532809 - RNA, 19 nt, Artificial Sequence
  Description of Artificial Sequence: Synthetic oligonucleotide
  Antisense strand to SEQ ID NO: 2532808
uauguuagacguuaaagcu

SEQ ID NO: 2532810 - RNA, 19 nt, Artificial Sequence
  Description of Artificial Sequence: Synthetic oligonucleotide
  Sense strand starting at position 3127 of SEQ ID NO: 1888397
gugaauucucagggccaag

SEQ ID NO: 2532811 - RNA, 19 nt, Artificial Sequence
  Description of Artificial Sequence: Synthetic oligonucleotide
  Antisense strand to SEQ ID NO: 2532810
cuuggcccugagaauucac

SEQ ID NO: 2532812 - RNA, 19 nt, Artificial Sequence
  Description of Artificial Sequence: Synthetic oligonucleotide
  Sense strand starting at position 457 of SEQ ID NO: 1888397
ggcggacaccuaugagauu

SEQ ID NO: 2532813 - RNA, 19 nt, Artificial Sequence
  Description of Artificial Sequence: Synthetic oligonucleotide
  Antisense strand to SEQ ID NO: 2532812
aaucucauagguguccgcc

SEQ ID NO: 2532814 - RNA, 19 nt, Artificial Sequence
  Description of Artificial Sequence: Synthetic oligonucleotide
  Sense strand starting at position 1027 of SEQ ID NO: 1888397
uuucuucucuaaguaggau

SEQ ID NO: 2532815 - RNA, 19 nt, Artificial Sequence
  Description of Artificial Sequence: Synthetic oligonucleotide
  Antisense strand to SEQ ID NO: 2532814
auccuacuuagagaagaaa

SEQ ID NO: 2532816 - RNA, 19 nt, Artificial Sequence
  Description of Artificial Sequence: Synthetic oligonucleotide
  Sense strand starting at position 2565 of SEQ ID NO: 1888397
aaggaauguggcggaguaa

SEQ ID NO: 2532817 - RNA, 19 nt, Artificial Sequence
  Description of Artificial Sequence: Synthetic oligonucleotide
  Antisense strand to SEQ ID NO: 2532816
uuacuccgccacauuccuu

SEQ ID NO: 2532818 - RNA, 19 nt, Artificial Sequence
  Description of Artificial Sequence: Synthetic oligonucleotide
  Sense strand starting at position 3897 of SEQ ID NO: 1888397
guugaacuauugcuaauug

SEQ ID NO: 2532819 - RNA, 19 nt, Artificial Sequence
  Description of Artificial Sequence: Synthetic oligonucleotide
  Antisense strand to SEQ ID NO: 2532818
caauuagcaauaguucaac

SEQ ID NO: 2532820 - RNA, 19 nt, Artificial Sequence
  Description of Artificial Sequence: Synthetic oligonucleotide
  Sense strand starting at position 3865 of SEQ ID NO: 1888397
gguuccagucacugggauu

SEQ ID NO: 2532821 - RNA, 19 nt, Artificial Sequence
  Description of Artificial Sequence: Synthetic oligonucleotide
  Antisense strand to SEQ ID NO: 2532820
aaucccagugacuggaacc

SEQ ID NO: 2532822 - RNA, 19 nt, Artificial Sequence
  Description of Artificial Sequence: Synthetic oligonucleotide
  Sense strand starting at position 3528 of SEQ ID NO: 1888397
accacuugaucugugaugu

SEQ ID NO: 2532823 - RNA, 19 nt, Artificial Sequence
  Description of Artificial Sequence: Synthetic oligonucleotide
  Antisense strand to SEQ ID NO: 2532822
acaucacagaucaaguggu

SEQ ID NO: 2532824 - RNA, 19 nt, Artificial Sequence
  Description of Artificial Sequence: Synthetic oligonucleotide
  Sense strand starting at position 3835 of SEQ ID NO: 1888397
guuugagaaccaugugggu

SEQ ID NO: 2532825 - RNA, 19 nt, Artificial Sequence
  Description of Artificial Sequence: Synthetic oligonucleotide
  Antisense strand to SEQ ID NO: 2532824
acccacaugguucucaaac

SEQ ID NO: 2532826 - RNA, 19 nt, Artificial Sequence
  Description of Artificial Sequence: Synthetic oligonucleotide
  Sense strand starting at position 3888 of SEQ ID NO: 1888397
ugccuuaguguugaacuau

SEQ ID NO: 2532827 - RNA, 19 nt, Artificial Sequence
  Description of Artificial Sequence: Synthetic oligonucleotide
  Antisense strand to SEQ ID NO: 2532826
auaguucaacacuaaggca

SEQ ID NO: 2532828 - RNA, 19 nt, Artificial Sequence
  Description of Artificial Sequence: Synthetic oligonucleotide
  Sense strand starting at position 901 of SEQ ID NO: 1888397
aagacauuggucugugguu

SEQ ID NO: 2532829 - RNA, 19 nt, Artificial Sequence
  Description of Artificial Sequence: Synthetic oligonucleotide
  Antisense strand to SEQ ID NO: 2532828
aaccacagaccaaugucuu

SEQ ID NO: 2532830 - RNA, 19 nt, Artificial Sequence
  Description of Artificial Sequence: Synthetic oligonucleotide
  Sense strand starting at position 2253 of SEQ ID NO: 1888397
ggaguucuggcccggacaa

SEQ ID NO: 2532831 - RNA, 19 nt, Artificial Sequence
  Description of Artificial Sequence: Synthetic oligonucleotide
  Antisense strand to SEQ ID NO: 2532830
uuguccgggccagaacucc

SEQ ID NO: 2532832 - RNA, 19 nt, Artificial Sequence
  Description of Artificial Sequence: Synthetic oligonucleotide
  Sense strand starting at position 1009 of SEQ ID NO: 1888397
guggcuggauuccuauuau

SEQ ID NO: 2532833 - RNA, 19 nt, Artificial Sequence
  Description of Artificial Sequence: Synthetic oligonucleotide
  Antisense strand to SEQ ID NO: 2532832
auaauaggaauccagccac

SEQ ID NO: 2532834 - RNA, 19 nt, Artificial Sequence
  Description of Artificial Sequence: Synthetic oligonucleotide
  Sense strand starting at position 3876 of SEQ ID NO: 1888397
cugggauuccucugccuua

SEQ ID NO: 2532835 - RNA, 19 nt, Artificial Sequence
  Description of Artificial Sequence: Synthetic oligonucleotide
  Antisense strand to SEQ ID NO: 2532834
uaaggcagaggaaucccag

SEQ ID NO: 2532836 - RNA, 19 nt, Artificial Sequence
  Description of Artificial Sequence: Synthetic oligonucleotide
  Sense strand starting at position 3798 of SEQ ID NO: 1888397
cauuguuuccaguguaaag

SEQ ID NO: 2532837 - RNA, 19 nt, Artificial Sequence
  Description of Artificial Sequence: Synthetic oligonucleotide
  Antisense strand to SEQ ID NO: 2532836
cuuuacacuggaaacaaug

SEQ ID NO: 2532838 - RNA, 19 nt, Artificial Sequence
  Description of Artificial Sequence: Synthetic oligonucleotide
  Sense strand starting at position 3418 of SEQ ID NO: 1888397
cuuaaaguguguccuggau

SEQ ID NO: 2532839 - RNA, 19 nt, Artificial Sequence
  Description of Artificial Sequence: Synthetic oligonucleotide
  Antisense strand to SEQ ID NO: 2532838
auccaggacacacuuuaag

SEQ ID NO: 2532840 - RNA, 19 nt, Artificial Sequence
  Description of Artificial Sequence: Synthetic oligonucleotide
  Sense strand starting at position 3529 of SEQ ID NO: 1888397
ccacuugaucugugauguc

SEQ ID NO: 2532841 - RNA, 19 nt, Artificial Sequence
  Description of Artificial Sequence: Synthetic oligonucleotide
  Antisense strand to SEQ ID NO: 2532840
gacaucacagaucaagugg

SEQ ID NO: 2532842 - RNA, 19 nt, Artificial Sequence
  Description of Artificial Sequence: Synthetic oligonucleotide
  Sense strand starting at position 428 of SEQ ID NO: 1888397
ggaaacauuugccauguau

SEQ ID NO: 2532843 - RNA, 19 nt, Artificial Sequence
  Description of Artificial Sequence: Synthetic oligonucleotide
  Antisense strand to SEQ ID NO: 2532842
auacauggcaaauguuucc

SEQ ID NO: 2532844 - RNA, 19 nt, Artificial Sequence
  Description of Artificial Sequence: Synthetic oligonucleotide
  Sense strand starting at position 3402 of SEQ ID NO: 1888397
ccucuagggcagugaucuu

SEQ ID NO: 2532845 - RNA, 19 nt, Artificial Sequence
  Description of Artificial Sequence: Synthetic oligonucleotide
  Antisense strand to SEQ ID NO: 2532844
aagaucacugcccuagagg

SEQ ID NO: 2532846 - RNA, 19 nt, Artificial Sequence
  Description of Artificial Sequence: Synthetic oligonucleotide
  Sense strand starting at position 926 of SEQ ID NO: 1888397
ucuggugaugucugacuuu

SEQ ID NO: 2532847 - RNA, 19 nt, Artificial Sequence
  Description of Artificial Sequence: Synthetic oligonucleotide
  Antisense strand to SEQ ID NO: 2532846
aaagucagacaucaccaga

SEQ ID NO: 2532848 - RNA, 19 nt, Artificial Sequence
  Description of Artificial Sequence: Synthetic oligonucleotide
  Sense strand starting at position 458 of SEQ ID NO: 1888397
gcggacaccuaugagauuu

SEQ ID NO: 2532849 - RNA, 19 nt, Artificial Sequence
  Description of Artificial Sequence: Synthetic oligonucleotide
  Antisense strand to SEQ ID NO: 2532848
aaaucucauagguguccgc

SEQ ID NO: 2532850 - RNA, 19 nt, Artificial Sequence
  Description of Artificial Sequence: Synthetic oligonucleotide
  Sense strand starting at position 2254 of SEQ ID NO: 1888397
gaguucuggcccggacaau

SEQ ID NO: 2532851 - RNA, 19 nt, Artificial Sequence
  Description of Artificial Sequence: Synthetic oligonucleotide
  Antisense strand to SEQ ID NO: 2532850
auuguccgggccagaacuc

SEQ ID NO: 2532852 - RNA, 19 nt, Artificial Sequence
  Description of Artificial Sequence: Synthetic oligonucleotide
  Sense strand starting at position 210 of SEQ ID NO: 1888397
ccaaucugacgcugguaua

SEQ ID NO: 2532853 - RNA, 19 nt, Artificial Sequence
  Description of Artificial Sequence: Synthetic oligonucleotide
  Antisense strand to SEQ ID NO: 2532852
uauaccagcgucagauugg

SEQ ID NO: 2532854 - RNA, 19 nt, Artificial Sequence
  Description of Artificial Sequence: Synthetic oligonucleotide
  Sense strand starting at position 3958 of SEQ ID NO: 1888397
ccguaaguaacuggucaua

SEQ ID NO: 2532855 - RNA, 19 nt, Artificial Sequence
  Description of Artificial Sequence: Synthetic oligonucleotide
  Antisense strand to SEQ ID NO: 2532854
uaugaccaguuacuuacgg

SEQ ID NO: 2532856 - RNA, 19 nt, Artificial Sequence
  Description of Artificial Sequence: Synthetic oligonucleotide
  Sense strand starting at position 916 of SEQ ID NO: 1888397
gguucuacugucuggugau

SEQ ID NO: 2532857 - RNA, 19 nt, Artificial Sequence
  Description of Artificial Sequence: Synthetic oligonucleotide
  Antisense strand to SEQ ID NO: 2532856
aucaccagacaguagaacc

SEQ ID NO: 2532858 - RNA, 19 nt, Artificial Sequence
  Description of Artificial Sequence: Synthetic oligonucleotide
  Sense strand starting at position 3957 of SEQ ID NO: 1888397
uccguaaguaacuggucau

SEQ ID NO: 2532859 - RNA, 19 nt, Artificial Sequence
  Description of Artificial Sequence: Synthetic oligonucleotide
  Antisense strand to SEQ ID NO: 2532858
augaccaguuacuuacgga

SEQ ID NO: 2532860 - RNA, 19 nt, Artificial Sequence
  Description of Artificial Sequence: Synthetic oligonucleotide
  Sense strand starting at position 929 of SEQ ID NO: 1888397
ggugaugucugacuuugcu

SEQ ID NO: 2532861 - RNA, 19 nt, Artificial Sequence
  Description of Artificial Sequence: Synthetic oligonucleotide
  Antisense strand to SEQ ID NO: 2532860
agcaaagucagacaucacc

SEQ ID NO: 2532862 - RNA, 19 nt, Artificial Sequence
  Description of Artificial Sequence: Synthetic oligonucleotide
  Sense strand starting at position 1371 of SEQ ID NO: 1888397
uuaauaacgccucgcagaa

SEQ ID NO: 2532863 - RNA, 19 nt, Artificial Sequence
  Description of Artificial Sequence: Synthetic oligonucleotide
  Antisense strand to SEQ ID NO: 2532862
uucugcgaggcguuauuaa

SEQ ID NO: 2532864 - RNA, 19 nt, Artificial Sequence
  Description of Artificial Sequence: Synthetic oligonucleotide
  Sense strand starting at position 3963 of SEQ ID NO: 1888397
aguaacuggucauagagaa

SEQ ID NO: 2532865 - RNA, 19 nt, Artificial Sequence
  Description of Artificial Sequence: Synthetic oligonucleotide
  Antisense strand to SEQ ID NO: 2532864
uucucuaugaccaguuacu

SEQ ID NO: 2532866 - RNA, 19 nt, Artificial Sequence
  Description of Artificial Sequence: Synthetic oligonucleotide
  Sense strand starting at position 3794 of SEQ ID NO: 1888397
cagucauuguuuccagugu

SEQ ID NO: 2532867 - RNA, 19 nt, Artificial Sequence
  Description of Artificial Sequence: Synthetic oligonucleotide
  Antisense strand to SEQ ID NO: 2532866
acacuggaaacaaugacug

SEQ ID NO: 2532868 - RNA, 19 nt, Artificial Sequence
  Description of Artificial Sequence: Synthetic oligonucleotide
  Sense strand starting at position 3792 of SEQ ID NO: 1888397
gucagucauuguuuccagu

SEQ ID NO: 2532869 - RNA, 19 nt, Artificial Sequence
  Description of Artificial Sequence: Synthetic oligonucleotide
  Antisense strand to SEQ ID NO: 2532868
acuggaaacaaugacugac

SEQ ID NO: 2532870 - RNA, 19 nt, Artificial Sequence
  Description of Artificial Sequence: Synthetic oligonucleotide
  Sense strand starting at position 374 of SEQ ID NO: 1888397
uucugauccugaggagacu

SEQ ID NO: 2532871 - RNA, 19 nt, Artificial Sequence
  Description of Artificial Sequence: Synthetic oligonucleotide
  Antisense strand to SEQ ID NO: 2532870
agucuccucaggaucagaa

SEQ ID NO: 2532872 - RNA, 19 nt, Artificial Sequence
  Description of Artificial Sequence: Synthetic oligonucleotide
  Sense strand starting at position 247 of SEQ ID NO: 1888397
cccucaaaguaucaaugua

SEQ ID NO: 2532873 - RNA, 19 nt, Artificial Sequence
  Description of Artificial Sequence: Synthetic oligonucleotide
  Antisense strand to SEQ ID NO: 2532872
uacauugauacuuugaggg

SEQ ID NO: 2532874 - RNA, 19 nt, Artificial Sequence
  Description of Artificial Sequence: Synthetic oligonucleotide
  Sense strand starting at position 1010 of SEQ ID NO: 1888398
cgcuuuggcaguuucuuaa

SEQ ID NO: 2532875 - RNA, 19 nt, Artificial Sequence
  Description of Artificial Sequence: Synthetic oligonucleotide
  Antisense strand to SEQ ID NO: 2532874
uuaagaaacugccaaagcg

SEQ ID NO: 2532876 - RNA, 19 nt, Artificial Sequence
  Description of Artificial Sequence: Synthetic oligonucleotide
  Sense strand starting at position 1108 of SEQ ID NO: 1888398
caaagacuugugcacaaug

SEQ ID NO: 2532877 - RNA, 19 nt, Artificial Sequence
  Description of Artificial Sequence: Synthetic oligonucleotide
  Antisense strand to SEQ ID NO: 2532876
cauugugcacaagucuuug

SEQ ID NO: 2532878 - RNA, 19 nt, Artificial Sequence
  Description of Artificial Sequence: Synthetic oligonucleotide
  Sense strand starting at position 1364 of SEQ ID NO: 1888398
caaaguaaucaguagugac

SEQ ID NO: 2532879 - RNA, 19 nt, Artificial Sequence
  Description of Artificial Sequence: Synthetic oligonucleotide
  Antisense strand to SEQ ID NO: 2532878
gucacuacugauuacuuug

SEQ ID NO: 2532880 - RNA, 19 nt, Artificial Sequence
  Description of Artificial Sequence: Synthetic oligonucleotide
  Sense strand starting at position 1524 of SEQ ID NO: 1888398
guggcuuaccgucugucaa

SEQ ID NO: 2532881 - RNA, 19 nt, Artificial Sequence
  Description of Artificial Sequence: Synthetic oligonucleotide
  Antisense strand to SEQ ID NO: 2532880
uugacagacgguaagccac

SEQ ID NO: 2532882 - RNA, 19 nt, Artificial Sequence
  Description of Artificial Sequence: Synthetic oligonucleotide
  Sense strand starting at position 314 of SEQ ID NO: 1888398
uuaauagaucaucacgcaa

SEQ ID NO: 2532883 - RNA, 19 nt, Artificial Sequence
  Description of Artificial Sequence: Synthetic oligonucleotide
  Antisense strand to SEQ ID NO: 2532882
uugcgugaugaucuauuaa

SEQ ID NO: 2532884 - RNA, 19 nt, Artificial Sequence
  Description of Artificial Sequence: Synthetic oligonucleotide
  Sense strand starting at position 1243 of SEQ ID NO: 1888398
agaaauacgcauugacaaa

SEQ ID NO: 2532885 - RNA, 19 nt, Artificial Sequence
  Description of Artificial Sequence: Synthetic oligonucleotide
  Antisense strand to SEQ ID NO: 2532884
uuugucaaugcguauuucu

SEQ ID NO: 2532886 - RNA, 19 nt, Artificial Sequence
  Description of Artificial Sequence: Synthetic oligonucleotide
  Sense strand starting at position 130 of SEQ ID NO: 1888398
gcaauuucuugagcgauac

SEQ ID NO: 2532887 - RNA, 19 nt, Artificial Sequence
  Description of Artificial Sequence: Synthetic oligonucleotide
  Antisense strand to SEQ ID NO: 2532886
guaucgcucaagaaauugc

SEQ ID NO: 2532888 - RNA, 19 nt, Artificial Sequence
  Description of Artificial Sequence: Synthetic oligonucleotide
  Sense strand starting at position 1009 of SEQ ID NO: 1888398
ucgcuuuggcaguuucuua

SEQ ID NO: 2532889 - RNA, 19 nt, Artificial Sequence
  Description of Artificial Sequence: Synthetic oligonucleotide
  Antisense strand to SEQ ID NO: 2532888
uaagaaacugccaaagcga

SEQ ID NO: 2532890 - RNA, 19 nt, Artificial Sequence
  Description of Artificial Sequence: Synthetic oligonucleotide
  Sense strand starting at position 1345 of SEQ ID NO: 1888398
gugcaaaucauaggaaaug

SEQ ID NO: 2532891 - RNA, 19 nt, Artificial Sequence
  Description of Artificial Sequence: Synthetic oligonucleotide
  Antisense strand to SEQ ID NO: 2532890
cauuuccuaugauuugcac

SEQ ID NO: 2532892 - RNA, 19 nt, Artificial Sequence
  Description of Artificial Sequence: Synthetic oligonucleotide
  Sense strand starting at position 134 of SEQ ID NO: 1888398
uuucuugagcgauacaaac

SEQ ID NO: 2532893 - RNA, 19 nt, Artificial Sequence
  Description of Artificial Sequence: Synthetic oligonucleotide
  Antisense strand to SEQ ID NO: 2532892
guuuguaucgcucaagaaa

SEQ ID NO: 2532894 - RNA, 19 nt, Artificial Sequence
  Description of Artificial Sequence: Synthetic oligonucleotide
  Sense strand starting at position 1759 of SEQ ID NO: 1888398
cccagaaguccugaugcca

SEQ ID NO: 2532895 - RNA, 19 nt, Artificial Sequence
  Description of Artificial Sequence: Synthetic oligonucleotide
  Antisense strand to SEQ ID NO: 2532894
uggcaucaggacuucuggg

SEQ ID NO: 2532896 - RNA, 19 nt, Artificial Sequence
  Description of Artificial Sequence: Synthetic oligonucleotide
  Sense strand starting at position 557 of SEQ ID NO: 1888398
gugacuuugggugaggcaa

SEQ ID NO: 2532897 - RNA, 19 nt, Artificial Sequence
  Description of Artificial Sequence: Synthetic oligonucleotide
  Antisense strand to SEQ ID NO: 2532896
uugccucacccaaagucac

SEQ ID NO: 2532898 - RNA, 19 nt, Artificial Sequence
  Description of Artificial Sequence: Synthetic oligonucleotide
  Sense strand starting at position 313 of SEQ ID NO: 1888398
auuaauagaucaucacgca

SEQ ID NO: 2532899 - RNA, 19 nt, Artificial Sequence
  Description of Artificial Sequence: Synthetic oligonucleotide
  Antisense strand to SEQ ID NO: 2532898
ugcgugaugaucuauuaau

SEQ ID NO: 2532900 - RNA, 19 nt, Artificial Sequence
  Description of Artificial Sequence: Synthetic oligonucleotide
  Sense strand starting at position 1619 of SEQ ID NO: 1888398
ccuuccuugggaugucaga

SEQ ID NO: 2532901 - RNA, 19 nt, Artificial Sequence
  Description of Artificial Sequence: Synthetic oligonucleotide
  Antisense strand to SEQ ID NO: 2532900
ucugacaucccaaggaagg

SEQ ID NO: 2532902 - RNA, 19 nt, Artificial Sequence
  Description of Artificial Sequence: Synthetic oligonucleotide
  Sense strand starting at position 1130 of SEQ ID NO: 1888398
ggaucagcuuuaucuguaa

SEQ ID NO: 2532903 - RNA, 19 nt, Artificial Sequence
  Description of Artificial Sequence: Synthetic oligonucleotide
  Antisense strand to SEQ ID NO: 2532902
uuacagauaaagcugaucc

SEQ ID NO: 2532904 - RNA, 19 nt, Artificial Sequence
  Description of Artificial Sequence: Synthetic oligonucleotide
  Sense strand starting at position 1262 of SEQ ID NO: 1888398
ccaaaugacgcaggcaaau

SEQ ID NO: 2532905 - RNA, 19 nt, Artificial Sequence
  Description of Artificial Sequence: Synthetic oligonucleotide
  Antisense strand to SEQ ID NO: 2532904
auuugccugcgucauuugg

SEQ ID NO: 2532906 - RNA, 19 nt, Artificial Sequence
  Description of Artificial Sequence: Synthetic oligonucleotide
  Sense strand starting at position 183 of SEQ ID NO: 1888398
ucagcaguuguauauccau

SEQ ID NO: 2532907 - RNA, 19 nt, Artificial Sequence
  Description of Artificial Sequence: Synthetic oligonucleotide
  Antisense strand to SEQ ID NO: 2532906
auggauauacaacugcuga

SEQ ID NO: 2532908 - RNA, 19 nt, Artificial Sequence
  Description of Artificial Sequence: Synthetic oligonucleotide
  Sense strand starting at position 1486 of SEQ ID NO: 1888398
ggaguauccgaguguuaaa

SEQ ID NO: 2532909 - RNA, 19 nt, Artificial Sequence
  Description of Artificial Sequence: Synthetic oligonucleotide
  Antisense strand to SEQ ID NO: 2532908
uuuaacacucggauacucc

SEQ ID NO: 2532910 - RNA, 19 nt, Artificial Sequence
  Description of Artificial Sequence: Synthetic oligonucleotide
  Sense strand starting at position 115 of SEQ ID NO: 1888398
acuuauaugcgaugggcaa

SEQ ID NO: 2532911 - RNA, 19 nt, Artificial Sequence
  Description of Artificial Sequence: Synthetic oligonucleotide
  Antisense strand to SEQ ID NO: 2532910
uugcccaucgcauauaagu

SEQ ID NO: 2532912 - RNA, 19 nt, Artificial Sequence
  Description of Artificial Sequence: Synthetic oligonucleotide
  Sense strand starting at position 186 of SEQ ID NO: 1888398
gcaguuguauauccauuaa

SEQ ID NO: 2532913 - RNA, 19 nt, Artificial Sequence
  Description of Artificial Sequence: Synthetic oligonucleotide
  Antisense strand to SEQ ID NO: 2532912
uuaauggauauacaacugc

SEQ ID NO: 2532914 - RNA, 19 nt, Artificial Sequence
  Description of Artificial Sequence: Synthetic oligonucleotide
  Sense strand starting at position 1462 of SEQ ID NO: 1888398
gcugauuguggugaugguu

SEQ ID NO: 2532915 - RNA, 19 nt, Artificial Sequence
  Description of Artificial Sequence: Synthetic oligonucleotide
  Antisense strand to SEQ ID NO: 2532914
aaccaucaccacaaucagc

SEQ ID NO: 2532916 - RNA, 19 nt, Artificial Sequence
  Description of Artificial Sequence: Synthetic oligonucleotide
  Sense strand starting at position 2686 of SEQ ID NO: 1888398
agggcuugcuggguuauga

SEQ ID NO: 2532917 - RNA, 19 nt, Artificial Sequence
  Description of Artificial Sequence: Synthetic oligonucleotide
  Antisense strand to SEQ ID NO: 2532916
ucauaacccagcaagcccu

SEQ ID NO: 2532918 - RNA, 19 nt, Artificial Sequence
  Description of Artificial Sequence: Synthetic oligonucleotide
  Sense strand starting at position 116 of SEQ ID NO: 1888398
cuuauaugcgaugggcaau

SEQ ID NO: 2532919 - RNA, 19 nt, Artificial Sequence
  Description of Artificial Sequence: Synthetic oligonucleotide
  Antisense strand to SEQ ID NO: 2532918
auugcccaucgcauauaag

SEQ ID NO: 2532920 - RNA, 19 nt, Artificial Sequence
  Description of Artificial Sequence: Synthetic oligonucleotide
  Sense strand starting at position 117 of SEQ ID NO: 1888398
uuauaugcgaugggcaauu

SEQ ID NO: 2532921 - RNA, 19 nt, Artificial Sequence
  Description of Artificial Sequence: Synthetic oligonucleotide
  Antisense strand to SEQ ID NO: 2532920
aauugcccaucgcauauaa

SEQ ID NO: 2532922 - RNA, 19 nt, Artificial Sequence
  Description of Artificial Sequence: Synthetic oligonucleotide
  Sense strand starting at position 1449 of SEQ ID NO: 1888398
ggguguucacuaugcugau

SEQ ID NO: 2532923 - RNA, 19 nt, Artificial Sequence
  Description of Artificial Sequence: Synthetic oligonucleotide
  Antisense strand to SEQ ID NO: 2532922
aucagcauagugaacaccc

SEQ ID NO: 2532924 - RNA, 19 nt, Artificial Sequence
  Description of Artificial Sequence: Synthetic oligonucleotide
  Sense strand starting at position 1003 of SEQ ID NO: 1888398
auacaaucgcuuuggcagu

SEQ ID NO: 2532925 - RNA, 19 nt, Artificial Sequence
  Description of Artificial Sequence: Synthetic oligonucleotide
  Antisense strand to SEQ ID NO: 2532924
acugccaaagcgauuguau

SEQ ID NO: 2532926 - RNA, 19 nt, Artificial Sequence
  Description of Artificial Sequence: Synthetic oligonucleotide
  Sense strand starting at position 926 of SEQ ID NO: 1888398
ccacacaccuauuagagua

SEQ ID NO: 2532927 - RNA, 19 nt, Artificial Sequence
  Description of Artificial Sequence: Synthetic oligonucleotide
  Antisense strand to SEQ ID NO: 2532926
uacucuaauaggugugugg

SEQ ID NO: 2532928 - RNA, 19 nt, Artificial Sequence
  Description of Artificial Sequence: Synthetic oligonucleotide
  Sense strand starting at position 1334 of SEQ ID NO: 1888398
ugauuccauuugugcaaau

SEQ ID NO: 2532929 - RNA, 19 nt, Artificial Sequence
  Description of Artificial Sequence: Synthetic oligonucleotide
  Antisense strand to SEQ ID NO: 2532928
auuugcacaaauggaauca

SEQ ID NO: 2532930 - RNA, 19 nt, Artificial Sequence
  Description of Artificial Sequence: Synthetic oligonucleotide
  Sense strand starting at position 1526 of SEQ ID NO: 1888398
ggcuuaccgucugucaauu

SEQ ID NO: 2532931 - RNA, 19 nt, Artificial Sequence
  Description of Artificial Sequence: Synthetic oligonucleotide
  Antisense strand to SEQ ID NO: 2532930
aauugacagacgguaagcc

SEQ ID NO: 2532932 - RNA, 19 nt, Artificial Sequence
  Description of Artificial Sequence: Synthetic oligonucleotide
  Sense strand starting at position 1343 of SEQ ID NO: 1888398
uugugcaaaucauaggaaa

SEQ ID NO: 2532933 - RNA, 19 nt, Artificial Sequence
  Description of Artificial Sequence: Synthetic oligonucleotide
  Antisense strand to SEQ ID NO: 2532932
uuuccuaugauuugcacaa

SEQ ID NO: 2532934 - RNA, 19 nt, Artificial Sequence
  Description of Artificial Sequence: Synthetic oligonucleotide
  Sense strand starting at position 1525 of SEQ ID NO: 1888398
uggcuuaccgucugucaau

SEQ ID NO: 2532935 - RNA, 19 nt, Artificial Sequence
  Description of Artificial Sequence: Synthetic oligonucleotide
  Antisense strand to SEQ ID NO: 2532934
auugacagacgguaagcca

SEQ ID NO: 2532936 - RNA, 19 nt, Artificial Sequence
  Description of Artificial Sequence: Synthetic oligonucleotide
  Sense strand starting at position 127 of SEQ ID NO: 1888398
ugggcaauuucuugagcga

SEQ ID NO: 2532937 - RNA, 19 nt, Artificial Sequence
  Description of Artificial Sequence: Synthetic oligonucleotide
  Antisense strand to SEQ ID NO: 2532936
ucgcucaagaaauugccca

SEQ ID NO: 2532938 - RNA, 19 nt, Artificial Sequence
  Description of Artificial Sequence: Synthetic oligonucleotide
  Sense strand starting at position 1194 of SEQ ID NO: 1888398
gacacaaacugugguacau

SEQ ID NO: 2532939 - RNA, 19 nt, Artificial Sequence
  Description of Artificial Sequence: Synthetic oligonucleotide
  Antisense strand to SEQ ID NO: 2532938
auguaccacaguuuguguc

SEQ ID NO: 2532940 - RNA, 19 nt, Artificial Sequence
  Description of Artificial Sequence: Synthetic oligonucleotide
  Sense strand starting at position 1367 of SEQ ID NO: 1888398
aguaaucaguagugacaga

SEQ ID NO: 2532941 - RNA, 19 nt, Artificial Sequence
  Description of Artificial Sequence: Synthetic oligonucleotide
  Antisense strand to SEQ ID NO: 2532940
ucugucacuacugauuacu

SEQ ID NO: 2532942 - RNA, 19 nt, Artificial Sequence
  Description of Artificial Sequence: Synthetic oligonucleotide
  Sense strand starting at position 1106 of SEQ ID NO: 1888398
uccaaagacuugugcacaa

SEQ ID NO: 2532943 - RNA, 19 nt, Artificial Sequence
  Description of Artificial Sequence: Synthetic oligonucleotide
  Antisense strand to SEQ ID NO: 2532942
uugugcacaagucuuugga

SEQ ID NO: 2532944 - RNA, 19 nt, Artificial Sequence
  Description of Artificial Sequence: Synthetic oligonucleotide
  Sense strand starting at position 1483 of SEQ ID NO: 1888398
acaggaguauccgaguguu

SEQ ID NO: 2532945 - RNA, 19 nt, Artificial Sequence
  Description of Artificial Sequence: Synthetic oligonucleotide
  Antisense strand to SEQ ID NO: 2532944
aacacucggauacuccugu

SEQ ID NO: 2532946 - RNA, 19 nt, Artificial Sequence
  Description of Artificial Sequence: Synthetic oligonucleotide
  Sense strand starting at position 1461 of SEQ ID NO: 1888398
ugcugauuguggugauggu

SEQ ID NO: 2532947 - RNA, 19 nt, Artificial Sequence
  Description of Artificial Sequence: Synthetic oligonucleotide
  Antisense strand to SEQ ID NO: 2532946
accaucaccacaaucagca

SEQ ID NO: 2532948 - RNA, 19 nt, Artificial Sequence
  Description of Artificial Sequence: Synthetic oligonucleotide
  Sense strand starting at position 3492 of SEQ ID NO: 1888399
gcaacagucccgucagcua

SEQ ID NO: 2532949 - RNA, 19 nt, Artificial Sequence
  Description of Artificial Sequence: Synthetic oligonucleotide
  Antisense strand to SEQ ID NO: 2532948
uagcugacgggacuguugc

SEQ ID NO: 2532950 - RNA, 19 nt, Artificial Sequence
  Description of Artificial Sequence: Synthetic oligonucleotide
  Sense strand starting at position 558 of SEQ ID NO: 1888399
aguccaguccauuaagaua

SEQ ID NO: 2532951 - RNA, 19 nt, Artificial Sequence
  Description of Artificial Sequence: Synthetic oligonucleotide
  Antisense strand to SEQ ID NO: 2532950
uaucuuaauggacuggacu

SEQ ID NO: 2532952 - RNA, 19 nt, Artificial Sequence
  Description of Artificial Sequence: Synthetic oligonucleotide
  Sense strand starting at position 964 of SEQ ID NO: 1888399
agauuuaagccuuguccuu

SEQ ID NO: 2532953 - RNA, 19 nt, Artificial Sequence
  Description of Artificial Sequence: Synthetic oligonucleotide
  Antisense strand to SEQ ID NO: 2532952
aaggacaaggcuuaaaucu

SEQ ID NO: 2532954 - RNA, 19 nt, Artificial Sequence
  Description of Artificial Sequence: Synthetic oligonucleotide
  Sense strand starting at position 3822 of SEQ ID NO: 1888399
gucagagucguccugcuau

SEQ ID NO: 2532955 - RNA, 19 nt, Artificial Sequence
  Description of Artificial Sequence: Synthetic oligonucleotide
  Antisense strand to SEQ ID NO: 2532954
auagcaggacgacucugac

SEQ ID NO: 2532956 - RNA, 19 nt, Artificial Sequence
  Description of Artificial Sequence: Synthetic oligonucleotide
  Sense strand starting at position 681 of SEQ ID NO: 1888399
auguuucuacauggaggaa

SEQ ID NO: 2532957 - RNA, 19 nt, Artificial Sequence
  Description of Artificial Sequence: Synthetic oligonucleotide
  Antisense strand to SEQ ID NO: 2532956
uuccuccauguagaaacau

SEQ ID NO: 2532958 - RNA, 19 nt, Artificial Sequence
  Description of Artificial Sequence: Synthetic oligonucleotide
  Sense strand starting at position 3045 of SEQ ID NO: 1888399
gagaguugcaaagauaguu

SEQ ID NO: 2532959 - RNA, 19 nt, Artificial Sequence
  Description of Artificial Sequence: Synthetic oligonucleotide
  Antisense strand to SEQ ID NO: 2532958
aacuaucuuugcaacucuc

SEQ ID NO: 2532960 - RNA, 19 nt, Artificial Sequence
  Description of Artificial Sequence: Synthetic oligonucleotide
  Sense strand starting at position 3281 of SEQ ID NO: 1888399
ugguuuauuccagacaucu

SEQ ID NO: 2532961 - RNA, 19 nt, Artificial Sequence
  Description of Artificial Sequence: Synthetic oligonucleotide
  Antisense strand to SEQ ID NO: 2532960
agaugucuggaauaaacca

SEQ ID NO: 2532962 - RNA, 19 nt, Artificial Sequence
  Description of Artificial Sequence: Synthetic oligonucleotide
  Sense strand starting at position 1078 of SEQ ID NO: 1888399
agaggugauuauccuugau

SEQ ID NO: 2532963 - RNA, 19 nt, Artificial Sequence
  Description of Artificial Sequence: Synthetic oligonucleotide
  Antisense strand to SEQ ID NO: 2532962
aucaaggauaaucaccucu

SEQ ID NO: 2532964 - RNA, 19 nt, Artificial Sequence
  Description of Artificial Sequence: Synthetic oligonucleotide
  Sense strand starting at position 3591 of SEQ ID NO: 1888399
cucugaacgggaugacauu

SEQ ID NO: 2532965 - RNA, 19 nt, Artificial Sequence
  Description of Artificial Sequence: Synthetic oligonucleotide
  Antisense strand to SEQ ID NO: 2532964
aaugucaucccguucagag

SEQ ID NO: 2532966 - RNA, 19 nt, Artificial Sequence
  Description of Artificial Sequence: Synthetic oligonucleotide
  Sense strand starting at position 387 of SEQ ID NO: 1888399
cuguaucuggcuuaaugaa

SEQ ID NO: 2532967 - RNA, 19 nt, Artificial Sequence
  Description of Artificial Sequence: Synthetic oligonucleotide
  Antisense strand to SEQ ID NO: 2532966
uucauuaagccagauacag

SEQ ID NO: 2532968 - RNA, 19 nt, Artificial Sequence
  Description of Artificial Sequence: Synthetic oligonucleotide
  Sense strand starting at position 1080 of SEQ ID NO: 1888399
aggugauuauccuugauug

SEQ ID NO: 2532969 - RNA, 19 nt, Artificial Sequence
  Description of Artificial Sequence: Synthetic oligonucleotide
  Antisense strand to SEQ ID NO: 2532968
caaucaaggauaaucaccu

SEQ ID NO: 2532970 - RNA, 19 nt, Artificial Sequence
  Description of Artificial Sequence: Synthetic oligonucleotide
  Sense strand starting at position 419 of SEQ ID NO: 1888399
guaguauguaagcagauag

SEQ ID NO: 2532971 - RNA, 19 nt, Artificial Sequence
  Description of Artificial Sequence: Synthetic oligonucleotide
  Antisense strand to SEQ ID NO: 2532970
cuaucugcuuacauacuac

SEQ ID NO: 2532972 - RNA, 19 nt, Artificial Sequence
  Description of Artificial Sequence: Synthetic oligonucleotide
  Sense strand starting at position 1082 of SEQ ID NO: 1888399
gugauuauccuugauuguc

SEQ ID NO: 2532973 - RNA, 19 nt, Artificial Sequence
  Description of Artificial Sequence: Synthetic oligonucleotide
  Antisense strand to SEQ ID NO: 2532972
gacaaucaaggauaaucac

SEQ ID NO: 2532974 - RNA, 19 nt, Artificial Sequence
  Description of Artificial Sequence: Synthetic oligonucleotide
  Sense strand starting at position 1325 of SEQ ID NO: 1888399
ggguccuugaccugacuua

SEQ ID NO: 2532975 - RNA, 19 nt, Artificial Sequence
  Description of Artificial Sequence: Synthetic oligonucleotide
  Antisense strand to SEQ ID NO: 2532974
uaagucaggucaaggaccc

SEQ ID NO: 2532976 - RNA, 19 nt, Artificial Sequence
  Description of Artificial Sequence: Synthetic oligonucleotide
  Sense strand starting at position 217 of SEQ ID NO: 1888399
aucacuuagcccuggaauu

SEQ ID NO: 2532977 - RNA, 19 nt, Artificial Sequence
  Description of Artificial Sequence: Synthetic oligonucleotide
  Antisense strand to SEQ ID NO: 2532976
aauuccagggcuaagugau

SEQ ID NO: 2532978 - RNA, 19 nt, Artificial Sequence
  Description of Artificial Sequence: Synthetic oligonucleotide
  Sense strand starting at position 3876 of SEQ ID NO: 1888399
gugacaggcucucugauaa

SEQ ID NO: 2532979 - RNA, 19 nt, Artificial Sequence
  Description of Artificial Sequence: Synthetic oligonucleotide
  Antisense strand to SEQ ID NO: 2532978
uuaucagagagccugucac

SEQ ID NO: 2532980 - RNA, 19 nt, Artificial Sequence
  Description of Artificial Sequence: Synthetic oligonucleotide
  Sense strand starting at position 3454 of SEQ ID NO: 1888399
ugacuugggcuguauguga

SEQ ID NO: 2532981 - RNA, 19 nt, Artificial Sequence
  Description of Artificial Sequence: Synthetic oligonucleotide
  Antisense strand to SEQ ID NO: 2532980
ucacauacagcccaaguca

SEQ ID NO: 2532982 - RNA, 19 nt, Artificial Sequence
  Description of Artificial Sequence: Synthetic oligonucleotide
  Sense strand starting at position 3462 of SEQ ID NO: 1888399
gcuguaugugaagaggguu

SEQ ID NO: 2532983 - RNA, 19 nt, Artificial Sequence
  Description of Artificial Sequence: Synthetic oligonucleotide
  Antisense strand to SEQ ID NO: 2532982
aacccucuucacauacagc

SEQ ID NO: 2532984 - RNA, 19 nt, Artificial Sequence
  Description of Artificial Sequence: Synthetic oligonucleotide
  Sense strand starting at position 1056 of SEQ ID NO: 1888399
ccguuucugaacugggaua

SEQ ID NO: 2532985 - RNA, 19 nt, Artificial Sequence
  Description of Artificial Sequence: Synthetic oligonucleotide
  Antisense strand to SEQ ID NO: 2532984
uaucccaguucagaaacgg

SEQ ID NO: 2532986 - RNA, 19 nt, Artificial Sequence
  Description of Artificial Sequence: Synthetic oligonucleotide
  Sense strand starting at position 922 of SEQ ID NO: 1888399
ucugacuuaacgggugauu

SEQ ID NO: 2532987 - RNA, 19 nt, Artificial Sequence
  Description of Artificial Sequence: Synthetic oligonucleotide
  Antisense strand to SEQ ID NO: 2532986
aaucacccguuaagucaga

SEQ ID NO: 2532988 - RNA, 19 nt, Artificial Sequence
  Description of Artificial Sequence: Synthetic oligonucleotide
  Sense strand starting at position 910 of SEQ ID NO: 1888399
gggauauguuugucugacu

SEQ ID NO: 2532989 - RNA, 19 nt, Artificial Sequence
  Description of Artificial Sequence: Synthetic oligonucleotide
  Antisense strand to SEQ ID NO: 2532988
agucagacaaacauauccc

SEQ ID NO: 2532990 - RNA, 19 nt, Artificial Sequence
  Description of Artificial Sequence: Synthetic oligonucleotide
  Sense strand starting at position 418 of SEQ ID NO: 1888399
aguaguauguaagcagaua

SEQ ID NO: 2532991 - RNA, 19 nt, Artificial Sequence
  Description of Artificial Sequence: Synthetic oligonucleotide
  Antisense strand to SEQ ID NO: 2532990
uaucugcuuacauacuacu

SEQ ID NO: 2532992 - RNA, 19 nt, Artificial Sequence
  Description of Artificial Sequence: Synthetic oligonucleotide
  Sense strand starting at position 911 of SEQ ID NO: 1888399
ggauauguuugucugacuu

SEQ ID NO: 2532993 - RNA, 19 nt, Artificial Sequence
  Description of Artificial Sequence: Synthetic oligonucleotide
  Antisense strand to SEQ ID NO: 2532992
aagucagacaaacauaucc

SEQ ID NO: 2532994 - RNA, 19 nt, Artificial Sequence
  Description of Artificial Sequence: Synthetic oligonucleotide
  Sense strand starting at position 1081 of SEQ ID NO: 1888399
ggugauuauccuugauugu

SEQ ID NO: 2532995 - RNA, 19 nt, Artificial Sequence
  Description of Artificial Sequence: Synthetic oligonucleotide
  Antisense strand to SEQ ID NO: 2532994
acaaucaaggauaaucacc

SEQ ID NO: 2532996 - RNA, 19 nt, Artificial Sequence
  Description of Artificial Sequence: Synthetic oligonucleotide
  Sense strand starting at position 921 of SEQ ID NO: 1888399
gucugacuuaacgggugau

SEQ ID NO: 2532997 - RNA, 19 nt, Artificial Sequence
  Description of Artificial Sequence: Synthetic oligonucleotide
  Antisense strand to SEQ ID NO: 2532996
aucacccguuaagucagac

SEQ ID NO: 2532998 - RNA, 19 nt, Artificial Sequence
  Description of Artificial Sequence: Synthetic oligonucleotide
  Sense strand starting at position 468 of SEQ ID NO: 1888399
gaagcuuaacugugucaau

SEQ ID NO: 2532999 - RNA, 19 nt, Artificial Sequence
  Description of Artificial Sequence: Synthetic oligonucleotide
  Antisense strand to SEQ ID NO: 2532998
auugacacaguuaagcuuc

SEQ ID NO: 2533000 - RNA, 19 nt, Artificial Sequence
  Description of Artificial Sequence: Synthetic oligonucleotide
  Sense strand starting at position 3525 of SEQ ID NO: 1888399
uuucgaucucuuugcagaa

SEQ ID NO: 2533001 - RNA, 19 nt, Artificial Sequence
  Description of Artificial Sequence: Synthetic oligonucleotide
  Antisense strand to SEQ ID NO: 2533000
uucugcaaagagaucgaaa

SEQ ID NO: 2533002 - RNA, 19 nt, Artificial Sequence
  Description of Artificial Sequence: Synthetic oligonucleotide
  Sense strand starting at position 385 of SEQ ID NO: 1888399
uucuguaucuggcuuaaug

SEQ ID NO: 2533003 - RNA, 19 nt, Artificial Sequence
  Description of Artificial Sequence: Synthetic oligonucleotide
  Antisense strand to SEQ ID NO: 2533002
cauuaagccagauacagaa

SEQ ID NO: 2533004 - RNA, 19 nt, Artificial Sequence
  Description of Artificial Sequence: Synthetic oligonucleotide
  Sense strand starting at position 1364 of SEQ ID NO: 1888399
ccagacgucagccauguuu

SEQ ID NO: 2533005 - RNA, 19 nt, Artificial Sequence
  Description of Artificial Sequence: Synthetic oligonucleotide
  Antisense strand to SEQ ID NO: 2533004
aaacauggcugacgucugg

SEQ ID NO: 2533006 - RNA, 19 nt, Artificial Sequence
  Description of Artificial Sequence: Synthetic oligonucleotide
  Sense strand starting at position 1241 of SEQ ID NO: 1888399
ccgaaaugcucacuaggcu

SEQ ID NO: 2533007 - RNA, 19 nt, Artificial Sequence
  Description of Artificial Sequence: Synthetic oligonucleotide
  Antisense strand to SEQ ID NO: 2533006
agccuagugagcauuucgg

SEQ ID NO: 2533008 - RNA, 19 nt, Artificial Sequence
  Description of Artificial Sequence: Synthetic oligonucleotide
  Sense strand starting at position 1262 of SEQ ID NO: 1888399
ggcaguuguaacuggaugu

SEQ ID NO: 2533009 - RNA, 19 nt, Artificial Sequence
  Description of Artificial Sequence: Synthetic oligonucleotide
  Antisense strand to SEQ ID NO: 2533008
acauccaguuacaacugcc

SEQ ID NO: 2533010 - RNA, 19 nt, Artificial Sequence
  Description of Artificial Sequence: Synthetic oligonucleotide
  Sense strand starting at position 3276 of SEQ ID NO: 1888399
gugccugguuuauuccaga

SEQ ID NO: 2533011 - RNA, 19 nt, Artificial Sequence
  Description of Artificial Sequence: Synthetic oligonucleotide
  Antisense strand to SEQ ID NO: 2533010
ucuggaauaaaccaggcac

SEQ ID NO: 2533012 - RNA, 19 nt, Artificial Sequence
  Description of Artificial Sequence: Synthetic oligonucleotide
  Sense strand starting at position 3317 of SEQ ID NO: 1888399
auacaugacuggcaaauaa

SEQ ID NO: 2533013 - RNA, 19 nt, Artificial Sequence
  Description of Artificial Sequence: Synthetic oligonucleotide
  Antisense strand to SEQ ID NO: 2533012
uuauuugccagucauguau

SEQ ID NO: 2533014 - RNA, 19 nt, Artificial Sequence
  Description of Artificial Sequence: Synthetic oligonucleotide
  Sense strand starting at position 3114 of SEQ ID NO: 1888399
ugugcauuguaagagauuu

SEQ ID NO: 2533015 - RNA, 19 nt, Artificial Sequence
  Description of Artificial Sequence: Synthetic oligonucleotide
  Antisense strand to SEQ ID NO: 2533014
aaaucucuuacaaugcaca

SEQ ID NO: 2533016 - RNA, 19 nt, Artificial Sequence
  Description of Artificial Sequence: Synthetic oligonucleotide
  Sense strand starting at position 3300 of SEQ ID NO: 1888399
uggagaaguugugaagaau

SEQ ID NO: 2533017 - RNA, 19 nt, Artificial Sequence
  Description of Artificial Sequence: Synthetic oligonucleotide
  Antisense strand to SEQ ID NO: 2533016
auucuucacaacuucucca

SEQ ID NO: 2533018 - RNA, 19 nt, Artificial Sequence
  Description of Artificial Sequence: Synthetic oligonucleotide
  Sense strand starting at position 3290 of SEQ ID NO: 1888399
ccagacaucuuggagaagu

SEQ ID NO: 2533019 - RNA, 19 nt, Artificial Sequence
  Description of Artificial Sequence: Synthetic oligonucleotide
  Antisense strand to SEQ ID NO: 2533018
acuucuccaagaugucugg

SEQ ID NO: 2533020 - RNA, 19 nt, Artificial Sequence
  Description of Artificial Sequence: Synthetic oligonucleotide
  Sense strand starting at position 3041 of SEQ ID NO: 1888399
auaggagaguugcaaagau

SEQ ID NO: 2533021 - RNA, 19 nt, Artificial Sequence
  Description of Artificial Sequence: Synthetic oligonucleotide
  Antisense strand to SEQ ID NO: 2533020
aucuuugcaacucuccuau

SEQ ID NO: 2533022 - RNA, 19 nt, Artificial Sequence
  Description of Artificial Sequence: Synthetic oligonucleotide
  Sense strand starting at position 3106 of SEQ ID NO: 1888399
cuuaguugugugcauugua

SEQ ID NO: 2533023 - RNA, 19 nt, Artificial Sequence
  Description of Artificial Sequence: Synthetic oligonucleotide
  Antisense strand to SEQ ID NO: 2533022
uacaaugcacacaacuaag

SEQ ID NO: 2533024 - RNA, 19 nt, Artificial Sequence
  Description of Artificial Sequence: Synthetic oligonucleotide
  Sense strand starting at position 3109 of SEQ ID NO: 1888399
aguugugugcauuguaaga

SEQ ID NO: 2533025 - RNA, 19 nt, Artificial Sequence
  Description of Artificial Sequence: Synthetic oligonucleotide
  Antisense strand to SEQ ID NO: 2533024
ucuuacaaugcacacaacu

SEQ ID NO: 2533026 - RNA, 19 nt, Artificial Sequence
  Description of Artificial Sequence: Synthetic oligonucleotide
  Sense strand starting at position 3461 of SEQ ID NO: 1888399
ggcuguaugugaagagggu

SEQ ID NO: 2533027 - RNA, 19 nt, Artificial Sequence
  Description of Artificial Sequence: Synthetic oligonucleotide
  Antisense strand to SEQ ID NO: 2533026
acccucuucacauacagcc

SEQ ID NO: 2533028 - RNA, 19 nt, Artificial Sequence
  Description of Artificial Sequence: Synthetic oligonucleotide
  Sense strand starting at position 1920 of SEQ ID NO: 1888400
gacugcugucaucaggaga

SEQ ID NO: 2533029 - RNA, 19 nt, Artificial Sequence
  Description of Artificial Sequence: Synthetic oligonucleotide
  Antisense strand to SEQ ID NO: 2533028
ucuccugaugacagcaguc

SEQ ID NO: 2533030 - RNA, 19 nt, Artificial Sequence
  Description of Artificial Sequence: Synthetic oligonucleotide
  Sense strand starting at position 1280 of SEQ ID NO: 1888400
ugagugucaccggagggau

SEQ ID NO: 2533031 - RNA, 19 nt, Artificial Sequence
  Description of Artificial Sequence: Synthetic oligonucleotide
  Antisense strand to SEQ ID NO: 2533030
aucccuccggugacacuca

SEQ ID NO: 2533032 - RNA, 19 nt, Artificial Sequence
  Description of Artificial Sequence: Synthetic oligonucleotide
  Sense strand starting at position 2319 of SEQ ID NO: 1888400
gccgauuuccagcgaggga

SEQ ID NO: 2533033 - RNA, 19 nt, Artificial Sequence
  Description of Artificial Sequence: Synthetic oligonucleotide
  Antisense strand to SEQ ID NO: 2533032
ucccucgcuggaaaucggc

SEQ ID NO: 2533034 - RNA, 19 nt, Artificial Sequence
  Description of Artificial Sequence: Synthetic oligonucleotide
  Sense strand starting at position 1282 of SEQ ID NO: 1888400
agugucaccggagggauau

SEQ ID NO: 2533035 - RNA, 19 nt, Artificial Sequence
  Description of Artificial Sequence: Synthetic oligonucleotide
  Antisense strand to SEQ ID NO: 2533034
auaucccuccggugacacu

SEQ ID NO: 2533036 - RNA, 19 nt, Artificial Sequence
  Description of Artificial Sequence: Synthetic oligonucleotide
  Sense strand starting at position 1330 of SEQ ID NO: 1888400
cagacauaugccgguggaa

SEQ ID NO: 2533037 - RNA, 19 nt, Artificial Sequence
  Description of Artificial Sequence: Synthetic oligonucleotide
  Antisense strand to SEQ ID NO: 2533036
uuccaccggcauaugucug

SEQ ID NO: 2533038 - RNA, 19 nt, Artificial Sequence
  Description of Artificial Sequence: Synthetic oligonucleotide
  Sense strand starting at position 1774 of SEQ ID NO: 1888400
cgauacguccucgagauca

SEQ ID NO: 2533039 - RNA, 19 nt, Artificial Sequence
  Description of Artificial Sequence: Synthetic oligonucleotide
  Antisense strand to SEQ ID NO: 2533038
ugaucucgaggacguaucg

SEQ ID NO: 2533040 - RNA, 19 nt, Artificial Sequence
  Description of Artificial Sequence: Synthetic oligonucleotide
  Sense strand starting at position 2114 of SEQ ID NO: 1888400
cgacucacgcuccacuaau

SEQ ID NO: 2533041 - RNA, 19 nt, Artificial Sequence
  Description of Artificial Sequence: Synthetic oligonucleotide
  Antisense strand to SEQ ID NO: 2533040
auuaguggagcgugagucg

SEQ ID NO: 2533042 - RNA, 19 nt, Artificial Sequence
  Description of Artificial Sequence: Synthetic oligonucleotide
  Sense strand starting at position 1772 of SEQ ID NO: 1888400
cccgauacguccucgagau

SEQ ID NO: 2533043 - RNA, 19 nt, Artificial Sequence
  Description of Artificial Sequence: Synthetic oligonucleotide
  Antisense strand to SEQ ID NO: 2533042
aucucgaggacguaucggg

SEQ ID NO: 2533044 - RNA, 19 nt, Artificial Sequence
  Description of Artificial Sequence: Synthetic oligonucleotide
  Sense strand starting at position 66 of SEQ ID NO: 1888400
agauguuucugccaauuuc

SEQ ID NO: 2533045 - RNA, 19 nt, Artificial Sequence
  Description of Artificial Sequence: Synthetic oligonucleotide
  Antisense strand to SEQ ID NO: 2533044
gaaauuggcagaaacaucu

SEQ ID NO: 2533046 - RNA, 19 nt, Artificial Sequence
  Description of Artificial Sequence: Synthetic oligonucleotide
  Sense strand starting at position 1773 of SEQ ID NO: 1888400
ccgauacguccucgagauc

SEQ ID NO: 2533047 - RNA, 19 nt, Artificial Sequence
  Description of Artificial Sequence: Synthetic oligonucleotide
  Antisense strand to SEQ ID NO: 2533046
gaucucgaggacguaucgg

SEQ ID NO: 2533048 - RNA, 19 nt, Artificial Sequence
  Description of Artificial Sequence: Synthetic oligonucleotide
  Sense strand starting at position 2036 of SEQ ID NO: 1888400
acuggugucuaagacaaca

SEQ ID NO: 2533049 - RNA, 19 nt, Artificial Sequence
  Description of Artificial Sequence: Synthetic oligonucleotide
  Antisense strand to SEQ ID NO: 2533048
uguugucuuagacaccagu

SEQ ID NO: 2533050 - RNA, 19 nt, Artificial Sequence
  Description of Artificial Sequence: Synthetic oligonucleotide
  Sense strand starting at position 1358 of SEQ ID NO: 1888400
gggugacauuuccgucaau

SEQ ID NO: 2533051 - RNA, 19 nt, Artificial Sequence
  Description of Artificial Sequence: Synthetic oligonucleotide
  Antisense strand to SEQ ID NO: 2533050
auugacggaaaugucaccc

SEQ ID NO: 2533052 - RNA, 19 nt, Artificial Sequence
  Description of Artificial Sequence: Synthetic oligonucleotide
  Sense strand starting at position 1440 of SEQ ID NO: 1888401
uguuauuucuaggccucaa

SEQ ID NO: 2533053 - RNA, 19 nt, Artificial Sequence
  Description of Artificial Sequence: Synthetic oligonucleotide
  Antisense strand to SEQ ID NO: 2533052
uugaggccuagaaauaaca

SEQ ID NO: 2533054 - RNA, 19 nt, Artificial Sequence
  Description of Artificial Sequence: Synthetic oligonucleotide
  Sense strand starting at position 3303 of SEQ ID NO: 1888401
ugaauauggcuuuacaauu

SEQ ID NO: 2533055 - RNA, 19 nt, Artificial Sequence
  Description of Artificial Sequence: Synthetic oligonucleotide
  Antisense strand to SEQ ID NO: 2533054
aauuguaaagccauauuca

SEQ ID NO: 2533056 - RNA, 19 nt, Artificial Sequence
  Description of Artificial Sequence: Synthetic oligonucleotide
  Sense strand starting at position 1196 of SEQ ID NO: 1888401
ccaugauauguacacagua

SEQ ID NO: 2533057 - RNA, 19 nt, Artificial Sequence
  Description of Artificial Sequence: Synthetic oligonucleotide
  Antisense strand to SEQ ID NO: 2533056
uacuguguacauaucaugg

SEQ ID NO: 2533058 - RNA, 19 nt, Artificial Sequence
  Description of Artificial Sequence: Synthetic oligonucleotide
  Sense strand starting at position 1439 of SEQ ID NO: 1888401
auguuauuucuaggccuca

SEQ ID NO: 2533059 - RNA, 19 nt, Artificial Sequence
  Description of Artificial Sequence: Synthetic oligonucleotide
  Antisense strand to SEQ ID NO: 2533058
ugaggccuagaaauaacau

SEQ ID NO: 2533060 - RNA, 19 nt, Artificial Sequence
  Description of Artificial Sequence: Synthetic oligonucleotide
  Sense strand starting at position 1782 of SEQ ID NO: 1888401
gggaugggucauggugaaa

SEQ ID NO: 2533061 - RNA, 19 nt, Artificial Sequence
  Description of Artificial Sequence: Synthetic oligonucleotide
  Antisense strand to SEQ ID NO: 2533060
uuucaccaugacccauccc

SEQ ID NO: 2533062 - RNA, 19 nt, Artificial Sequence
  Description of Artificial Sequence: Synthetic oligonucleotide
  Sense strand starting at position 1246 of SEQ ID NO: 1888401
cccagauuauuggugaaac

SEQ ID NO: 2533063 - RNA, 19 nt, Artificial Sequence
  Description of Artificial Sequence: Synthetic oligonucleotide
  Antisense strand to SEQ ID NO: 2533062
guuucaccaauaaucuggg

SEQ ID NO: 2533064 - RNA, 19 nt, Artificial Sequence
  Description of Artificial Sequence: Synthetic oligonucleotide
  Sense strand starting at position 2747 of SEQ ID NO: 1888401
gugguucgagaacagaauu

SEQ ID NO: 2533065 - RNA, 19 nt, Artificial Sequence
  Description of Artificial Sequence: Synthetic oligonucleotide
  Antisense strand to SEQ ID NO: 2533064
aauucuguucucgaaccac

SEQ ID NO: 2533066 - RNA, 19 nt, Artificial Sequence
  Description of Artificial Sequence: Synthetic oligonucleotide
  Sense strand starting at position 3414 of SEQ ID NO: 1888401
gacccauccuccuuaggga

SEQ ID NO: 2533067 - RNA, 19 nt, Artificial Sequence
  Description of Artificial Sequence: Synthetic oligonucleotide
  Antisense strand to SEQ ID NO: 2533066
ucccuaaggaggauggguc

SEQ ID NO: 2533068 - RNA, 19 nt, Artificial Sequence
  Description of Artificial Sequence: Synthetic oligonucleotide
  Sense strand starting at position 1759 of SEQ ID NO: 1888401
aguuucugacaauaguauu

SEQ ID NO: 2533069 - RNA, 19 nt, Artificial Sequence
  Description of Artificial Sequence: Synthetic oligonucleotide
  Antisense strand to SEQ ID NO: 2533068
aauacuauugucagaaacu

SEQ ID NO: 2533070 - RNA, 19 nt, Artificial Sequence
  Description of Artificial Sequence: Synthetic oligonucleotide
  Sense strand starting at position 2567 of SEQ ID NO: 1888401
cucuguaguuauuugagca

SEQ ID NO: 2533071 - RNA, 19 nt, Artificial Sequence
  Description of Artificial Sequence: Synthetic oligonucleotide
  Antisense strand to SEQ ID NO: 2533070
ugcucaaauaacuacagag

SEQ ID NO: 2533072 - RNA, 19 nt, Artificial Sequence
  Description of Artificial Sequence: Synthetic oligonucleotide
  Sense strand starting at position 1060 of SEQ ID NO: 1888401
auuacuuaugguuggaaua

SEQ ID NO: 2533073 - RNA, 19 nt, Artificial Sequence
  Description of Artificial Sequence: Synthetic oligonucleotide
  Antisense strand to SEQ ID NO: 2533072
uauuccaaccauaaguaau

SEQ ID NO: 2533074 - RNA, 19 nt, Artificial Sequence
  Description of Artificial Sequence: Synthetic oligonucleotide
  Sense strand starting at position 2767 of SEQ ID NO: 1888401
guacuuuaggaaugaucca

SEQ ID NO: 2533075 - RNA, 19 nt, Artificial Sequence
  Description of Artificial Sequence: Synthetic oligonucleotide
  Antisense strand to SEQ ID NO: 2533074
uggaucauuccuaaaguac

SEQ ID NO: 2533076 - RNA, 19 nt, Artificial Sequence
  Description of Artificial Sequence: Synthetic oligonucleotide
  Sense strand starting at position 3428 of SEQ ID NO: 1888401
agggaauacaucugaugcu

SEQ ID NO: 2533077 - RNA, 19 nt, Artificial Sequence
  Description of Artificial Sequence: Synthetic oligonucleotide
  Antisense strand to SEQ ID NO: 2533076
agcaucagauguauucccu

SEQ ID NO: 2533078 - RNA, 19 nt, Artificial Sequence
  Description of Artificial Sequence: Synthetic oligonucleotide
  Sense strand starting at position 1061 of SEQ ID NO: 1888401
uuacuuaugguuggaauag

SEQ ID NO: 2533079 - RNA, 19 nt, Artificial Sequence
  Description of Artificial Sequence: Synthetic oligonucleotide
  Antisense strand to SEQ ID NO: 2533078
cuauuccaaccauaaguaa

SEQ ID NO: 2533080 - RNA, 19 nt, Artificial Sequence
  Description of Artificial Sequence: Synthetic oligonucleotide
  Sense strand starting at position 1053 of SEQ ID NO: 1888401
augacauauuacuuauggu

SEQ ID NO: 2533081 - RNA, 19 nt, Artificial Sequence
  Description of Artificial Sequence: Synthetic oligonucleotide
  Antisense strand to SEQ ID NO: 2533080
accauaaguaauaugucau

SEQ ID NO: 2533082 - RNA, 19 nt, Artificial Sequence
  Description of Artificial Sequence: Synthetic oligonucleotide
  Sense strand starting at position 1752 of SEQ ID NO: 1888401
agaguacaguuucugacaa

SEQ ID NO: 2533083 - RNA, 19 nt, Artificial Sequence
  Description of Artificial Sequence: Synthetic oligonucleotide
  Antisense strand to SEQ ID NO: 2533082
uugucagaaacuguacucu

SEQ ID NO: 2533084 - RNA, 19 nt, Artificial Sequence
  Description of Artificial Sequence: Synthetic oligonucleotide
  Sense strand starting at position 1464 of SEQ ID NO: 1888401
cuuauagcuguauaugaca

SEQ ID NO: 2533085 - RNA, 19 nt, Artificial Sequence
  Description of Artificial Sequence: Synthetic oligonucleotide
  Antisense strand to SEQ ID NO: 2533084
ugucauauacagcuauaag

SEQ ID NO: 2533086 - RNA, 19 nt, Artificial Sequence
  Description of Artificial Sequence: Synthetic oligonucleotide
  Sense strand starting at position 1059 of SEQ ID NO: 1888401
uauuacuuaugguuggaau

SEQ ID NO: 2533087 - RNA, 19 nt, Artificial Sequence
  Description of Artificial Sequence: Synthetic oligonucleotide
  Antisense strand to SEQ ID NO: 2533086
auuccaaccauaaguaaua

SEQ ID NO: 2533088 - RNA, 19 nt, Artificial Sequence
  Description of Artificial Sequence: Synthetic oligonucleotide
  Sense strand starting at position 1387 of SEQ ID NO: 1888401
uucuuaaaucgguaguaaa

SEQ ID NO: 2533089 - RNA, 19 nt, Artificial Sequence
  Description of Artificial Sequence: Synthetic oligonucleotide
  Antisense strand to SEQ ID NO: 2533088
uuuacuaccgauuuaagaa

SEQ ID NO: 2533090 - RNA, 19 nt, Artificial Sequence
  Description of Artificial Sequence: Synthetic oligonucleotide
  Sense strand starting at position 792 of SEQ ID NO: 1888401
aaagacuccguacaguauu

SEQ ID NO: 2533091 - RNA, 19 nt, Artificial Sequence
  Description of Artificial Sequence: Synthetic oligonucleotide
  Antisense strand to SEQ ID NO: 2533090
aauacuguacggagucuuu

SEQ ID NO: 2533092 - RNA, 19 nt, Artificial Sequence
  Description of Artificial Sequence: Synthetic oligonucleotide
  Sense strand starting at position 2141 of SEQ ID NO: 1888401
aguaaucacgacgaccauu

SEQ ID NO: 2533093 - RNA, 19 nt, Artificial Sequence
  Description of Artificial Sequence: Synthetic oligonucleotide
  Antisense strand to SEQ ID NO: 2533092
aauggucgucgugauuacu

SEQ ID NO: 2533094 - RNA, 19 nt, Artificial Sequence
  Description of Artificial Sequence: Synthetic oligonucleotide
  Sense strand starting at position 5 of SEQ ID NO: 1888401
ccaauugugcaggauuauc

SEQ ID NO: 2533095 - RNA, 19 nt, Artificial Sequence
  Description of Artificial Sequence: Synthetic oligonucleotide
  Antisense strand to SEQ ID NO: 2533094
gauaauccugcacaauugg

SEQ ID NO: 2533096 - RNA, 19 nt, Artificial Sequence
  Description of Artificial Sequence: Synthetic oligonucleotide
  Sense strand starting at position 1739 of SEQ ID NO: 1888401
guguaaucacuuuagagua

SEQ ID NO: 2533097 - RNA, 19 nt, Artificial Sequence
  Description of Artificial Sequence: Synthetic oligonucleotide
  Antisense strand to SEQ ID NO: 2533096
uacucuaaagugauuacac

SEQ ID NO: 2533098 - RNA, 19 nt, Artificial Sequence
  Description of Artificial Sequence: Synthetic oligonucleotide
  Sense strand starting at position 2940 of SEQ ID NO: 1888401
uccuguagaacaggugaau

SEQ ID NO: 2533099 - RNA, 19 nt, Artificial Sequence
  Description of Artificial Sequence: Synthetic oligonucleotide
  Antisense strand to SEQ ID NO: 2533098
auucaccuguucuacagga

SEQ ID NO: 2533100 - RNA, 19 nt, Artificial Sequence
  Description of Artificial Sequence: Synthetic oligonucleotide
  Sense strand starting at position 2873 of SEQ ID NO: 1888401
ugaggugguugaucuuaaa

SEQ ID NO: 2533101 - RNA, 19 nt, Artificial Sequence
  Description of Artificial Sequence: Synthetic oligonucleotide
  Antisense strand to SEQ ID NO: 2533100
uuuaagaucaaccaccuca

SEQ ID NO: 2533102 - RNA, 19 nt, Artificial Sequence
  Description of Artificial Sequence: Synthetic oligonucleotide
  Sense strand starting at position 2010 of SEQ ID NO: 1888401
guagaauucuucuuccaga

SEQ ID NO: 2533103 - RNA, 19 nt, Artificial Sequence
  Description of Artificial Sequence: Synthetic oligonucleotide
  Antisense strand to SEQ ID NO: 2533102
ucuggaagaagaauucuac

SEQ ID NO: 2533104 - RNA, 19 nt, Artificial Sequence
  Description of Artificial Sequence: Synthetic oligonucleotide
  Sense strand starting at position 916 of SEQ ID NO: 1888401
uaaggaaagucugucaucu

SEQ ID NO: 2533105 - RNA, 19 nt, Artificial Sequence
  Description of Artificial Sequence: Synthetic oligonucleotide
  Antisense strand to SEQ ID NO: 2533104
agaugacagacuuuccuua

SEQ ID NO: 2533106 - RNA, 19 nt, Artificial Sequence
  Description of Artificial Sequence: Synthetic oligonucleotide
  Sense strand starting at position 1295 of SEQ ID NO: 1888401
uuguuagaauuguuaagac

SEQ ID NO: 2533107 - RNA, 19 nt, Artificial Sequence
  Description of Artificial Sequence: Synthetic oligonucleotide
  Antisense strand to SEQ ID NO: 2533106
gucuuaacaauucuaacaa

SEQ ID NO: 2533108 - RNA, 19 nt, Artificial Sequence
  Description of Artificial Sequence: Synthetic oligonucleotide
  Sense strand starting at position 336 of SEQ ID NO: 1888401
cagauccauugugugaaca

SEQ ID NO: 2533109 - RNA, 19 nt, Artificial Sequence
  Description of Artificial Sequence: Synthetic oligonucleotide
  Antisense strand to SEQ ID NO: 2533108
uguucacacaauggaucug

SEQ ID NO: 2533110 - RNA, 19 nt, Artificial Sequence
  Description of Artificial Sequence: Synthetic oligonucleotide
  Sense strand starting at position 2188 of SEQ ID NO: 1888401
ugaagaauaugagaaacaa

SEQ ID NO: 2533111 - RNA, 19 nt, Artificial Sequence
  Description of Artificial Sequence: Synthetic oligonucleotide
  Antisense strand to SEQ ID NO: 2533110
uuguuucucauauucuuca

SEQ ID NO: 2533112 - RNA, 19 nt, Artificial Sequence
  Description of Artificial Sequence: Synthetic oligonucleotide
  Sense strand starting at position 2325 of SEQ ID NO: 1888401
gaaggauuauaugccaguu

SEQ ID NO: 2533113 - RNA, 19 nt, Artificial Sequence
  Description of Artificial Sequence: Synthetic oligonucleotide
  Antisense strand to SEQ ID NO: 2533112
aacuggcauauaauccuuc

SEQ ID NO: 2533114 - RNA, 19 nt, Artificial Sequence
  Description of Artificial Sequence: Synthetic oligonucleotide
  Sense strand starting at position 1479 of SEQ ID NO: 1888401
gacauagucugagccauag

SEQ ID NO: 2533115 - RNA, 19 nt, Artificial Sequence
  Description of Artificial Sequence: Synthetic oligonucleotide
  Antisense strand to SEQ ID NO: 2533114
cuauggcucagacuauguc

SEQ ID NO: 2533116 - RNA, 19 nt, Artificial Sequence
  Description of Artificial Sequence: Synthetic oligonucleotide
  Sense strand starting at position 2150 of SEQ ID NO: 1888401
gacgaccauuuauagacua

SEQ ID NO: 2533117 - RNA, 19 nt, Artificial Sequence
  Description of Artificial Sequence: Synthetic oligonucleotide
  Antisense strand to SEQ ID NO: 2533116
uagucuauaaauggucguc

SEQ ID NO: 2533118 - RNA, 19 nt, Artificial Sequence
  Description of Artificial Sequence: Synthetic oligonucleotide
  Sense strand starting at position 337 of SEQ ID NO: 1888401
agauccauugugugaacau

SEQ ID NO: 2533119 - RNA, 19 nt, Artificial Sequence
  Description of Artificial Sequence: Synthetic oligonucleotide
  Antisense strand to SEQ ID NO: 2533118
auguucacacaauggaucu

SEQ ID NO: 2533120 - RNA, 19 nt, Artificial Sequence
  Description of Artificial Sequence: Synthetic oligonucleotide
  Sense strand starting at position 164 of SEQ ID NO: 1888401
acguuugaauaaccuauau

SEQ ID NO: 2533121 - RNA, 19 nt, Artificial Sequence
  Description of Artificial Sequence: Synthetic oligonucleotide
  Antisense strand to SEQ ID NO: 2533120
auauagguuauucaaacgu

SEQ ID NO: 2533122 - RNA, 19 nt, Artificial Sequence
  Description of Artificial Sequence: Synthetic oligonucleotide
  Sense strand starting at position 1495 of SEQ ID NO: 1888401
uaguuauauggaggcauac

SEQ ID NO: 2533123 - RNA, 19 nt, Artificial Sequence
  Description of Artificial Sequence: Synthetic oligonucleotide
  Antisense strand to SEQ ID NO: 2533122
guaugccuccauauaacua

SEQ ID NO: 2533124 - RNA, 19 nt, Artificial Sequence
  Description of Artificial Sequence: Synthetic oligonucleotide
  Sense strand starting at position 1025 of SEQ ID NO: 1888401
uguggcaauggcuauuaaa

SEQ ID NO: 2533125 - RNA, 19 nt, Artificial Sequence
  Description of Artificial Sequence: Synthetic oligonucleotide
  Antisense strand to SEQ ID NO: 2533124
uuuaauagccauugccaca

SEQ ID NO: 2533126 - RNA, 19 nt, Artificial Sequence
  Description of Artificial Sequence: Synthetic oligonucleotide
  Sense strand starting at position 1674 of SEQ ID NO: 1888401
uuacacagguuucuuauau

SEQ ID NO: 2533127 - RNA, 19 nt, Artificial Sequence
  Description of Artificial Sequence: Synthetic oligonucleotide
  Antisense strand to SEQ ID NO: 2533126
auauaagaaaccuguguaa

SEQ ID NO: 2533128 - RNA, 19 nt, Artificial Sequence
  Description of Artificial Sequence: Synthetic oligonucleotide
  Sense strand starting at position 1318 of SEQ ID NO: 1888401
aaaguauguugguuggaua

SEQ ID NO: 2533129 - RNA, 19 nt, Artificial Sequence
  Description of Artificial Sequence: Synthetic oligonucleotide
  Antisense strand to SEQ ID NO: 2533128
uauccaaccaacauacuuu

SEQ ID NO: 2533130 - RNA, 19 nt, Artificial Sequence
  Description of Artificial Sequence: Synthetic oligonucleotide
  Sense strand starting at position 2221 of SEQ ID NO: 1888401
aguuaagagucauuccauu

SEQ ID NO: 2533131 - RNA, 19 nt, Artificial Sequence
  Description of Artificial Sequence: Synthetic oligonucleotide
  Antisense strand to SEQ ID NO: 2533130
aauggaaugacucuuaacu

SEQ ID NO: 2533132 - RNA, 19 nt, Artificial Sequence
  Description of Artificial Sequence: Synthetic oligonucleotide
  Sense strand starting at position 692 of SEQ ID NO: 1888402
uguccuaggagucaggaau

SEQ ID NO: 2533133 - RNA, 19 nt, Artificial Sequence
  Description of Artificial Sequence: Synthetic oligonucleotide
  Antisense strand to SEQ ID NO: 2533132
auuccugacuccuaggaca

SEQ ID NO: 2533134 - RNA, 19 nt, Artificial Sequence
  Description of Artificial Sequence: Synthetic oligonucleotide
  Sense strand starting at position 613 of SEQ ID NO: 1888402
gaaauuugucuuggcagca

SEQ ID NO: 2533135 - RNA, 19 nt, Artificial Sequence
  Description of Artificial Sequence: Synthetic oligonucleotide
  Antisense strand to SEQ ID NO: 2533134
ugcugccaagacaaauuuc

SEQ ID NO: 2533136 - RNA, 19 nt, Artificial Sequence
  Description of Artificial Sequence: Synthetic oligonucleotide
  Sense strand starting at position 3761 of SEQ ID NO: 1888402
auagaaccuuaggucauau

SEQ ID NO: 2533137 - RNA, 19 nt, Artificial Sequence
  Description of Artificial Sequence: Synthetic oligonucleotide
  Antisense strand to SEQ ID NO: 2533136
auaugaccuaagguucuau

SEQ ID NO: 2533138 - RNA, 19 nt, Artificial Sequence
  Description of Artificial Sequence: Synthetic oligonucleotide
  Sense strand starting at position 2944 of SEQ ID NO: 1888402
guauguggucuccugcagu

SEQ ID NO: 2533139 - RNA, 19 nt, Artificial Sequence
  Description of Artificial Sequence: Synthetic oligonucleotide
  Antisense strand to SEQ ID NO: 2533138
acugcaggagaccacauac

SEQ ID NO: 2533140 - RNA, 19 nt, Artificial Sequence
  Description of Artificial Sequence: Synthetic oligonucleotide
  Sense strand starting at position 3735 of SEQ ID NO: 1888402
aaaugagaaguuugucuaa

SEQ ID NO: 2533141 - RNA, 19 nt, Artificial Sequence
  Description of Artificial Sequence: Synthetic oligonucleotide
  Antisense strand to SEQ ID NO: 2533140
uuagacaaacuucucauuu

SEQ ID NO: 2533142 - RNA, 19 nt, Artificial Sequence
  Description of Artificial Sequence: Synthetic oligonucleotide
  Sense strand starting at position 659 of SEQ ID NO: 1888402
aagccaaauggguauucuu

SEQ ID NO: 2533143 - RNA, 19 nt, Artificial Sequence
  Description of Artificial Sequence: Synthetic oligonucleotide
  Antisense strand to SEQ ID NO: 2533142
aagaauacccauuuggcuu

SEQ ID NO: 2533144 - RNA, 19 nt, Artificial Sequence
  Description of Artificial Sequence: Synthetic oligonucleotide
  Sense strand starting at position 3537 of SEQ ID NO: 1888402
uacgaauugccugauuaga

SEQ ID NO: 2533145 - RNA, 19 nt, Artificial Sequence
  Description of Artificial Sequence: Synthetic oligonucleotide
  Antisense strand to SEQ ID NO: 2533144
ucuaaucaggcaauucgua

SEQ ID NO: 2533146 - RNA, 19 nt, Artificial Sequence
  Description of Artificial Sequence: Synthetic oligonucleotide
  Sense strand starting at position 3697 of SEQ ID NO: 1888402
uugucauacaggcaugaug

SEQ ID NO: 2533147 - RNA, 19 nt, Artificial Sequence
  Description of Artificial Sequence: Synthetic oligonucleotide
  Antisense strand to SEQ ID NO: 2533146
caucaugccuguaugacaa

SEQ ID NO: 2533148 - RNA, 19 nt, Artificial Sequence
  Description of Artificial Sequence: Synthetic oligonucleotide
  Sense strand starting at position 662 of SEQ ID NO: 1888402
ccaaauggguauucuuaca

SEQ ID NO: 2533149 - RNA, 19 nt, Artificial Sequence
  Description of Artificial Sequence: Synthetic oligonucleotide
  Antisense strand to SEQ ID NO: 2533148
uguaagaauacccauuugg

SEQ ID NO: 2533150 - RNA, 19 nt, Artificial Sequence
  Description of Artificial Sequence: Synthetic oligonucleotide
  Sense strand starting at position 506 of SEQ ID NO: 1888402
guguucuaccuacauggga

SEQ ID NO: 2533151 - RNA, 19 nt, Artificial Sequence
  Description of Artificial Sequence: Synthetic oligonucleotide
  Antisense strand to SEQ ID NO: 2533150
ucccauguagguagaacac

SEQ ID NO: 2533152 - RNA, 19 nt, Artificial Sequence
  Description of Artificial Sequence: Synthetic oligonucleotide
  Sense strand starting at position 565 of SEQ ID NO: 1888402
gaaauuuguguuggcagca

SEQ ID NO: 2533153 - RNA, 19 nt, Artificial Sequence
  Description of Artificial Sequence: Synthetic oligonucleotide
  Antisense strand to SEQ ID NO: 2533152
ugcugccaacacaaauuuc

SEQ ID NO: 2533154 - RNA, 19 nt, Artificial Sequence
  Description of Artificial Sequence: Synthetic oligonucleotide
  Sense strand starting at position 3738 of SEQ ID NO: 1888402
ugagaaguuugucuaaaua

SEQ ID NO: 2533155 - RNA, 19 nt, Artificial Sequence
  Description of Artificial Sequence: Synthetic oligonucleotide
  Antisense strand to SEQ ID NO: 2533154
uauuuagacaaacuucuca

SEQ ID NO: 2533156 - RNA, 19 nt, Artificial Sequence
  Description of Artificial Sequence: Synthetic oligonucleotide
  Sense strand starting at position 3737 of SEQ ID NO: 1888402
augagaaguuugucuaaau

SEQ ID NO: 2533157 - RNA, 19 nt, Artificial Sequence
  Description of Artificial Sequence: Synthetic oligonucleotide
  Antisense strand to SEQ ID NO: 2533156
auuuagacaaacuucucau

SEQ ID NO: 2533158 - RNA, 19 nt, Artificial Sequence
  Description of Artificial Sequence: Synthetic oligonucleotide
  Sense strand starting at position 2201 of SEQ ID NO: 1888402
ucauuaaauccuuggaagu

SEQ ID NO: 2533159 - RNA, 19 nt, Artificial Sequence
  Description of Artificial Sequence: Synthetic oligonucleotide
  Antisense strand to SEQ ID NO: 2533158
acuuccaaggauuuaauga

SEQ ID NO: 2533160 - RNA, 19 nt, Artificial Sequence
  Description of Artificial Sequence: Synthetic oligonucleotide
  Sense strand starting at position 2791 of SEQ ID NO: 1888402
uaggcagaggguugauuaa

SEQ ID NO: 2533161 - RNA, 19 nt, Artificial Sequence
  Description of Artificial Sequence: Synthetic oligonucleotide
  Antisense strand to SEQ ID NO: 2533160
uuaaucaacccucugccua

SEQ ID NO: 2533162 - RNA, 19 nt, Artificial Sequence
  Description of Artificial Sequence: Synthetic oligonucleotide
  Sense strand starting at position 683 of SEQ ID NO: 1888402
agaauacuguguccuagga

SEQ ID NO: 2533163 - RNA, 19 nt, Artificial Sequence
  Description of Artificial Sequence: Synthetic oligonucleotide
  Antisense strand to SEQ ID NO: 2533162
uccuaggacacaguauucu

SEQ ID NO: 2533164 - RNA, 19 nt, Artificial Sequence
  Description of Artificial Sequence: Synthetic oligonucleotide
  Sense strand starting at position 3699 of SEQ ID NO: 1888402
gucauacaggcaugaugaa

SEQ ID NO: 2533165 - RNA, 19 nt, Artificial Sequence
  Description of Artificial Sequence: Synthetic oligonucleotide
  Antisense strand to SEQ ID NO: 2533164
uucaucaugccuguaugac

SEQ ID NO: 2533166 - RNA, 19 nt, Artificial Sequence
  Description of Artificial Sequence: Synthetic oligonucleotide
  Sense strand starting at position 2642 of SEQ ID NO: 1888402
gagguuugccuacaaacga

SEQ ID NO: 2533167 - RNA, 19 nt, Artificial Sequence
  Description of Artificial Sequence: Synthetic oligonucleotide
  Antisense strand to SEQ ID NO: 2533166
ucguuuguaggcaaaccuc

SEQ ID NO: 2533168 - RNA, 19 nt, Artificial Sequence
  Description of Artificial Sequence: Synthetic oligonucleotide
  Sense strand starting at position 703 of SEQ ID NO: 1888402
ucaggaauguucccuuuag

SEQ ID NO: 2533169 - RNA, 19 nt, Artificial Sequence
  Description of Artificial Sequence: Synthetic oligonucleotide
  Antisense strand to SEQ ID NO: 2533168
cuaaagggaacauuccuga

SEQ ID NO: 2533170 - RNA, 19 nt, Artificial Sequence
  Description of Artificial Sequence: Synthetic oligonucleotide
  Sense strand starting at position 2638 of SEQ ID NO: 1888402
aauggagguuugccuacaa

SEQ ID NO: 2533171 - RNA, 19 nt, Artificial Sequence
  Description of Artificial Sequence: Synthetic oligonucleotide
  Antisense strand to SEQ ID NO: 2533170
uuguaggcaaaccuccauu

SEQ ID NO: 2533172 - RNA, 19 nt, Artificial Sequence
  Description of Artificial Sequence: Synthetic oligonucleotide
  Sense strand starting at position 2100 of SEQ ID NO: 1888402
aaagaaauguuuguguaug

SEQ ID NO: 2533173 - RNA, 19 nt, Artificial Sequence
  Description of Artificial Sequence: Synthetic oligonucleotide
  Antisense strand to SEQ ID NO: 2533172
cauacacaaacauuucuuu

SEQ ID NO: 2533174 - RNA, 19 nt, Artificial Sequence
  Description of Artificial Sequence: Synthetic oligonucleotide
  Sense strand starting at position 680 of SEQ ID NO: 1888402
augagaauacuguguccua

SEQ ID NO: 2533175 - RNA, 19 nt, Artificial Sequence
  Description of Artificial Sequence: Synthetic oligonucleotide
  Antisense strand to SEQ ID NO: 2533174
uaggacacaguauucucau

SEQ ID NO: 2533176 - RNA, 19 nt, Artificial Sequence
  Description of Artificial Sequence: Synthetic oligonucleotide
  Sense strand starting at position 681 of SEQ ID NO: 1888402
ugagaauacuguguccuag

SEQ ID NO: 2533177 - RNA, 19 nt, Artificial Sequence
  Description of Artificial Sequence: Synthetic oligonucleotide
  Antisense strand to SEQ ID NO: 2533176
cuaggacacaguauucuca

SEQ ID NO: 2533178 - RNA, 19 nt, Artificial Sequence
  Description of Artificial Sequence: Synthetic oligonucleotide
  Sense strand starting at position 2099 of SEQ ID NO: 1888402
gaaagaaauguuuguguau

SEQ ID NO: 2533179 - RNA, 19 nt, Artificial Sequence
  Description of Artificial Sequence: Synthetic oligonucleotide
  Antisense strand to SEQ ID NO: 2533178
auacacaaacauuucuuuc

SEQ ID NO: 2533180 - RNA, 19 nt, Artificial Sequence
  Description of Artificial Sequence: Synthetic oligonucleotide
  Sense strand starting at position 3085 of SEQ ID NO: 1888402
agaauaucgugguuuggaa

SEQ ID NO: 2533181 - RNA, 19 nt, Artificial Sequence
  Description of Artificial Sequence: Synthetic oligonucleotide
  Antisense strand to SEQ ID NO: 2533180
uuccaaaccacgauauucu

SEQ ID NO: 2533182 - RNA, 19 nt, Artificial Sequence
  Description of Artificial Sequence: Synthetic oligonucleotide
  Sense strand starting at position 2584 of SEQ ID NO: 1888402
uguaauacauaguugaagu

SEQ ID NO: 2533183 - RNA, 19 nt, Artificial Sequence
  Description of Artificial Sequence: Synthetic oligonucleotide
  Antisense strand to SEQ ID NO: 2533182
acuucaacuauguauuaca

SEQ ID NO: 2533184 - RNA, 19 nt, Artificial Sequence
  Description of Artificial Sequence: Synthetic oligonucleotide
  Sense strand starting at position 2126 of SEQ ID NO: 1888402
gguuauaaagcuggaguga

SEQ ID NO: 2533185 - RNA, 19 nt, Artificial Sequence
  Description of Artificial Sequence: Synthetic oligonucleotide
  Antisense strand to SEQ ID NO: 2533184
ucacuccagcuuuauaacc

SEQ ID NO: 2533186 - RNA, 19 nt, Artificial Sequence
  Description of Artificial Sequence: Synthetic oligonucleotide
  Sense strand starting at position 3536 of SEQ ID NO: 1888402
auacgaauugccugauuag

SEQ ID NO: 2533187 - RNA, 19 nt, Artificial Sequence
  Description of Artificial Sequence: Synthetic oligonucleotide
  Antisense strand to SEQ ID NO: 2533186
cuaaucaggcaauucguau

SEQ ID NO: 2533188 - RNA, 19 nt, Artificial Sequence
  Description of Artificial Sequence: Synthetic oligonucleotide
  Sense strand starting at position 3534 of SEQ ID NO: 1888402
acauacgaauugccugauu

SEQ ID NO: 2533189 - RNA, 19 nt, Artificial Sequence
  Description of Artificial Sequence: Synthetic oligonucleotide
  Antisense strand to SEQ ID NO: 2533188
aaucaggcaauucguaugu

SEQ ID NO: 2533190 - RNA, 19 nt, Artificial Sequence
  Description of Artificial Sequence: Synthetic oligonucleotide
  Sense strand starting at position 3087 of SEQ ID NO: 1888402
aauaucgugguuuggaaau

SEQ ID NO: 2533191 - RNA, 19 nt, Artificial Sequence
  Description of Artificial Sequence: Synthetic oligonucleotide
  Antisense strand to SEQ ID NO: 2533190
auuuccaaaccacgauauu

SEQ ID NO: 2533192 - RNA, 19 nt, Artificial Sequence
  Description of Artificial Sequence: Synthetic oligonucleotide
  Sense strand starting at position 704 of SEQ ID NO: 1888402
caggaauguucccuuuagu

SEQ ID NO: 2533193 - RNA, 19 nt, Artificial Sequence
  Description of Artificial Sequence: Synthetic oligonucleotide
  Antisense strand to SEQ ID NO: 2533192
acuaaagggaacauuccug

SEQ ID NO: 2533194 - RNA, 19 nt, Artificial Sequence
  Description of Artificial Sequence: Synthetic oligonucleotide
  Sense strand starting at position 2681 of SEQ ID NO: 1888402
gucuacuauuuagagauuc

SEQ ID NO: 2533195 - RNA, 19 nt, Artificial Sequence
  Description of Artificial Sequence: Synthetic oligonucleotide
  Antisense strand to SEQ ID NO: 2533194
gaaucucuaaauaguagac

SEQ ID NO: 2533196 - RNA, 19 nt, Artificial Sequence
  Description of Artificial Sequence: Synthetic oligonucleotide
  Sense strand starting at position 2117 of SEQ ID NO: 1888402
ugcacaugcgguuauaaag

SEQ ID NO: 2533197 - RNA, 19 nt, Artificial Sequence
  Description of Artificial Sequence: Synthetic oligonucleotide
  Antisense strand to SEQ ID NO: 2533196
cuuuauaaccgcaugugca

SEQ ID NO: 2533198 - RNA, 19 nt, Artificial Sequence
  Description of Artificial Sequence: Synthetic oligonucleotide
  Sense strand starting at position 707 of SEQ ID NO: 1888402
gaauguucccuuuaguguc

SEQ ID NO: 2533199 - RNA, 19 nt, Artificial Sequence
  Description of Artificial Sequence: Synthetic oligonucleotide
  Antisense strand to SEQ ID NO: 2533198
gacacuaaagggaacauuc

SEQ ID NO: 2533200 - RNA, 19 nt, Artificial Sequence
  Description of Artificial Sequence: Synthetic oligonucleotide
  Sense strand starting at position 6 of SEQ ID NO: 1888402
cuuuguaauguuuauagcu

SEQ ID NO: 2533201 - RNA, 19 nt, Artificial Sequence
  Description of Artificial Sequence: Synthetic oligonucleotide
  Antisense strand to SEQ ID NO: 2533200
agcuauaaacauuacaaag

SEQ ID NO: 2533202 - RNA, 19 nt, Artificial Sequence
  Description of Artificial Sequence: Synthetic oligonucleotide
  Sense strand starting at position 2873 of SEQ ID NO: 1888402
ugacauuucucccacaggu

SEQ ID NO: 2533203 - RNA, 19 nt, Artificial Sequence
  Description of Artificial Sequence: Synthetic oligonucleotide
  Antisense strand to SEQ ID NO: 2533202
accugugggagaaauguca

SEQ ID NO: 2533204 - RNA, 19 nt, Artificial Sequence
  Description of Artificial Sequence: Synthetic oligonucleotide
  Sense strand starting at position 715 of SEQ ID NO: 1888402
ccuuuaguguccucauaau

SEQ ID NO: 2533205 - RNA, 19 nt, Artificial Sequence
  Description of Artificial Sequence: Synthetic oligonucleotide
  Antisense strand to SEQ ID NO: 2533204
auuaugaggacacuaaagg

SEQ ID NO: 2533206 - RNA, 19 nt, Artificial Sequence
  Description of Artificial Sequence: Synthetic oligonucleotide
  Sense strand starting at position 2265 of SEQ ID NO: 1888402
uguuaccuuuaggcauauu

SEQ ID NO: 2533207 - RNA, 19 nt, Artificial Sequence
  Description of Artificial Sequence: Synthetic oligonucleotide
  Antisense strand to SEQ ID NO: 2533206
aauaugccuaaagguaaca

SEQ ID NO: 2533208 - RNA, 19 nt, Artificial Sequence
  Description of Artificial Sequence: Synthetic oligonucleotide
  Sense strand starting at position 687 of SEQ ID NO: 1888402
uacuguguccuaggaguca

SEQ ID NO: 2533209 - RNA, 19 nt, Artificial Sequence
  Description of Artificial Sequence: Synthetic oligonucleotide
  Antisense strand to SEQ ID NO: 2533208
ugacuccuaggacacagua

SEQ ID NO: 2533210 - RNA, 19 nt, Artificial Sequence
  Description of Artificial Sequence: Synthetic oligonucleotide
  Sense strand starting at position 81 of SEQ ID NO: 1888402
cuaugacuuugugucuuua

SEQ ID NO: 2533211 - RNA, 19 nt, Artificial Sequence
  Description of Artificial Sequence: Synthetic oligonucleotide
  Antisense strand to SEQ ID NO: 2533210
uaaagacacaaagucauag

SEQ ID NO: 2533212 - RNA, 19 nt, Artificial Sequence
  Description of Artificial Sequence: Synthetic oligonucleotide
  Sense strand starting at position 2608 of SEQ ID NO: 1888403
guuuguacugugucuggua

SEQ ID NO: 2533213 - RNA, 19 nt, Artificial Sequence
  Description of Artificial Sequence: Synthetic oligonucleotide
  Antisense strand to SEQ ID NO: 2533212
uaccagacacaguacaaac

SEQ ID NO: 2533214 - RNA, 19 nt, Artificial Sequence
  Description of Artificial Sequence: Synthetic oligonucleotide
  Sense strand starting at position 1191 of SEQ ID NO: 1888403
ccugcuuuagaugauacaa

SEQ ID NO: 2533215 - RNA, 19 nt, Artificial Sequence
  Description of Artificial Sequence: Synthetic oligonucleotide
  Antisense strand to SEQ ID NO: 2533214
uuguaucaucuaaagcagg

SEQ ID NO: 2533216 - RNA, 19 nt, Artificial Sequence
  Description of Artificial Sequence: Synthetic oligonucleotide
  Sense strand starting at position 1186 of SEQ ID NO: 1888403
auauaccugcuuuagauga

SEQ ID NO: 2533217 - RNA, 19 nt, Artificial Sequence
  Description of Artificial Sequence: Synthetic oligonucleotide
  Antisense strand to SEQ ID NO: 2533216
ucaucuaaagcagguauau

SEQ ID NO: 2533218 - RNA, 19 nt, Artificial Sequence
  Description of Artificial Sequence: Synthetic oligonucleotide
  Sense strand starting at position 3701 of SEQ ID NO: 1888403
agaaauugcccauaggcaa

SEQ ID NO: 2533219 - RNA, 19 nt, Artificial Sequence
  Description of Artificial Sequence: Synthetic oligonucleotide
  Antisense strand to SEQ ID NO: 2533218
uugccuaugggcaauuucu

SEQ ID NO: 2533220 - RNA, 19 nt, Artificial Sequence
  Description of Artificial Sequence: Synthetic oligonucleotide
  Sense strand starting at position 3681 of SEQ ID NO: 1888403
ucauucuagguugaacuau

SEQ ID NO: 2533221 - RNA, 19 nt, Artificial Sequence
  Description of Artificial Sequence: Synthetic oligonucleotide
  Antisense strand to SEQ ID NO: 2533220
auaguucaaccuagaauga

SEQ ID NO: 2533222 - RNA, 19 nt, Artificial Sequence
  Description of Artificial Sequence: Synthetic oligonucleotide
  Sense strand starting at position 213 of SEQ ID NO: 1888403
gguaaagaccagugaauua

SEQ ID NO: 2533223 - RNA, 19 nt, Artificial Sequence
  Description of Artificial Sequence: Synthetic oligonucleotide
  Antisense strand to SEQ ID NO: 2533222
uaauucacuggucuuuacc

SEQ ID NO: 2533224 - RNA, 19 nt, Artificial Sequence
  Description of Artificial Sequence: Synthetic oligonucleotide
  Sense strand starting at position 2490 of SEQ ID NO: 1888403
ccagcaggucccuaagaga

SEQ ID NO: 2533225 - RNA, 19 nt, Artificial Sequence
  Description of Artificial Sequence: Synthetic oligonucleotide
  Antisense strand to SEQ ID NO: 2533224
ucucuuagggaccugcugg

SEQ ID NO: 2533226 - RNA, 19 nt, Artificial Sequence
  Description of Artificial Sequence: Synthetic oligonucleotide
  Sense strand starting at position 2630 of SEQ ID NO: 1888403
gcauuuauacucgggaugu

SEQ ID NO: 2533227 - RNA, 19 nt, Artificial Sequence
  Description of Artificial Sequence: Synthetic oligonucleotide
  Antisense strand to SEQ ID NO: 2533226
acaucccgaguauaaaugc

SEQ ID NO: 2533228 - RNA, 19 nt, Artificial Sequence
  Description of Artificial Sequence: Synthetic oligonucleotide
  Sense strand starting at position 2629 of SEQ ID NO: 1888403
cgcauuuauacucgggaug

SEQ ID NO: 2533229 - RNA, 19 nt, Artificial Sequence
  Description of Artificial Sequence: Synthetic oligonucleotide
  Antisense strand to SEQ ID NO: 2533228
caucccgaguauaaaugcg

SEQ ID NO: 2533230 - RNA, 19 nt, Artificial Sequence
  Description of Artificial Sequence: Synthetic oligonucleotide
  Sense strand starting at position 2929 of SEQ ID NO: 1888403
ucaauaaacguuuagacuu

SEQ ID NO: 2533231 - RNA, 19 nt, Artificial Sequence
  Description of Artificial Sequence: Synthetic oligonucleotide
  Antisense strand to SEQ ID NO: 2533230
aagucuaaacguuuauuga

SEQ ID NO: 2533232 - RNA, 19 nt, Artificial Sequence
  Description of Artificial Sequence: Synthetic oligonucleotide
  Sense strand starting at position 492 of SEQ ID NO: 1888403
gcagcaaggagucauggaa

SEQ ID NO: 2533233 - RNA, 19 nt, Artificial Sequence
  Description of Artificial Sequence: Synthetic oligonucleotide
  Antisense strand to SEQ ID NO: 2533232
uuccaugacuccuugcugc

SEQ ID NO: 2533234 - RNA, 19 nt, Artificial Sequence
  Description of Artificial Sequence: Synthetic oligonucleotide
  Sense strand starting at position 849 of SEQ ID NO: 1888403
ucgauuauacauuagguua

SEQ ID NO: 2533235 - RNA, 19 nt, Artificial Sequence
  Description of Artificial Sequence: Synthetic oligonucleotide
  Antisense strand to SEQ ID NO: 2533234
uaaccuaauguauaaucga

SEQ ID NO: 2533236 - RNA, 19 nt, Artificial Sequence
  Description of Artificial Sequence: Synthetic oligonucleotide
  Sense strand starting at position 3744 of SEQ ID NO: 1888403
gaaugacaaguuuguauaa

SEQ ID NO: 2533237 - RNA, 19 nt, Artificial Sequence
  Description of Artificial Sequence: Synthetic oligonucleotide
  Antisense strand to SEQ ID NO: 2533236
uuauacaaacuugucauuc

SEQ ID NO: 2533238 - RNA, 19 nt, Artificial Sequence
  Description of Artificial Sequence: Synthetic oligonucleotide
  Sense strand starting at position 457 of SEQ ID NO: 1888403
aaaugugcuuuggucauuu

SEQ ID NO: 2533239 - RNA, 19 nt, Artificial Sequence
  Description of Artificial Sequence: Synthetic oligonucleotide
  Antisense strand to SEQ ID NO: 2533238
aaaugaccaaagcacauuu

SEQ ID NO: 2533240 - RNA, 19 nt, Artificial Sequence
  Description of Artificial Sequence: Synthetic oligonucleotide
  Sense strand starting at position 2628 of SEQ ID NO: 1888403
ccgcauuuauacucgggau

SEQ ID NO: 2533241 - RNA, 19 nt, Artificial Sequence
  Description of Artificial Sequence: Synthetic oligonucleotide
  Antisense strand to SEQ ID NO: 2533240
aucccgaguauaaaugcgg

SEQ ID NO: 2533242 - RNA, 19 nt, Artificial Sequence
  Description of Artificial Sequence: Synthetic oligonucleotide
  Sense strand starting at position 3641 of SEQ ID NO: 1888403
guuacagaugccuacaaug

SEQ ID NO: 2533243 - RNA, 19 nt, Artificial Sequence
  Description of Artificial Sequence: Synthetic oligonucleotide
  Antisense strand to SEQ ID NO: 2533242
cauuguaggcaucuguaac

SEQ ID NO: 2533244 - RNA, 19 nt, Artificial Sequence
  Description of Artificial Sequence: Synthetic oligonucleotide
  Sense strand starting at position 995 of SEQ ID NO: 1888403
uuaugagcaucauuagaua

SEQ ID NO: 2533245 - RNA, 19 nt, Artificial Sequence
  Description of Artificial Sequence: Synthetic oligonucleotide
  Antisense strand to SEQ ID NO: 2533244
uaucuaaugaugcucauaa

SEQ ID NO: 2533246 - RNA, 19 nt, Artificial Sequence
  Description of Artificial Sequence: Synthetic oligonucleotide
  Sense strand starting at position 461 of SEQ ID NO: 1888403
gugcuuuggucauuugaca

SEQ ID NO: 2533247 - RNA, 19 nt, Artificial Sequence
  Description of Artificial Sequence: Synthetic oligonucleotide
  Antisense strand to SEQ ID NO: 2533246
ugucaaaugaccaaagcac

SEQ ID NO: 2533248 - RNA, 19 nt, Artificial Sequence
  Description of Artificial Sequence: Synthetic oligonucleotide
  Sense strand starting at position 1086 of SEQ ID NO: 1888403
ggccucagcuccuuaauuu

SEQ ID NO: 2533249 - RNA, 19 nt, Artificial Sequence
  Description of Artificial Sequence: Synthetic oligonucleotide
  Antisense strand to SEQ ID NO: 2533248
aaauuaaggagcugaggcc

SEQ ID NO: 2533250 - RNA, 19 nt, Artificial Sequence
  Description of Artificial Sequence: Synthetic oligonucleotide
  Sense strand starting at position 2512 of SEQ ID NO: 1888403
agaaauggucuucaggcga

SEQ ID NO: 2533251 - RNA, 19 nt, Artificial Sequence
  Description of Artificial Sequence: Synthetic oligonucleotide
  Antisense strand to SEQ ID NO: 2533250
ucgccugaagaccauuucu

SEQ ID NO: 2533252 - RNA, 19 nt, Artificial Sequence
  Description of Artificial Sequence: Synthetic oligonucleotide
  Sense strand starting at position 1597 of SEQ ID NO: 1888403
ugcaaagaagcucaaguau

SEQ ID NO: 2533253 - RNA, 19 nt, Artificial Sequence
  Description of Artificial Sequence: Synthetic oligonucleotide
  Antisense strand to SEQ ID NO: 2533252
auacuugagcuucuuugca

SEQ ID NO: 2533254 - RNA, 19 nt, Artificial Sequence
  Description of Artificial Sequence: Synthetic oligonucleotide
  Sense strand starting at position 888 of SEQ ID NO: 1888403
uacgucuucggagagauga

SEQ ID NO: 2533255 - RNA, 19 nt, Artificial Sequence
  Description of Artificial Sequence: Synthetic oligonucleotide
  Antisense strand to SEQ ID NO: 2533254
ucaucucuccgaagacgua

SEQ ID NO: 2533256 - RNA, 19 nt, Artificial Sequence
  Description of Artificial Sequence: Synthetic oligonucleotide
  Sense strand starting at position 890 of SEQ ID NO: 1888403
cgucuucggagagaugaau

SEQ ID NO: 2533257 - RNA, 19 nt, Artificial Sequence
  Description of Artificial Sequence: Synthetic oligonucleotide
  Antisense strand to SEQ ID NO: 2533256
auucaucucuccgaagacg

SEQ ID NO: 2533258 - RNA, 19 nt, Artificial Sequence
  Description of Artificial Sequence: Synthetic oligonucleotide
  Sense strand starting at position 3152 of SEQ ID NO: 1888403
acaugucagagcuggaaau

SEQ ID NO: 2533259 - RNA, 19 nt, Artificial Sequence
  Description of Artificial Sequence: Synthetic oligonucleotide
  Antisense strand to SEQ ID NO: 2533258
auuuccagcucugacaugu

SEQ ID NO: 2533260 - RNA, 19 nt, Artificial Sequence
  Description of Artificial Sequence: Synthetic oligonucleotide
  Sense strand starting at position 2724 of SEQ ID NO: 1888403
ggacauauuccuggagcau

SEQ ID NO: 2533261 - RNA, 19 nt, Artificial Sequence
  Description of Artificial Sequence: Synthetic oligonucleotide
  Antisense strand to SEQ ID NO: 2533260
augcuccaggaauaugucc

SEQ ID NO: 2533262 - RNA, 19 nt, Artificial Sequence
  Description of Artificial Sequence: Synthetic oligonucleotide
  Sense strand starting at position 3395 of SEQ ID NO: 1888403
ggagcauuauaaucucuau

SEQ ID NO: 2533263 - RNA, 19 nt, Artificial Sequence
  Description of Artificial Sequence: Synthetic oligonucleotide
  Antisense strand to SEQ ID NO: 2533262
auagagauuauaaugcucc

SEQ ID NO: 2533264 - RNA, 19 nt, Artificial Sequence
  Description of Artificial Sequence: Synthetic oligonucleotide
  Sense strand starting at position 3680 of SEQ ID NO: 1888403
cucauucuagguugaacua

SEQ ID NO: 2533265 - RNA, 19 nt, Artificial Sequence
  Description of Artificial Sequence: Synthetic oligonucleotide
  Antisense strand to SEQ ID NO: 2533264
uaguucaaccuagaaugag

SEQ ID NO: 2533266 - RNA, 19 nt, Artificial Sequence
  Description of Artificial Sequence: Synthetic oligonucleotide
  Sense strand starting at position 1395 of SEQ ID NO: 1888403
augcuaugagucuaacuuu

SEQ ID NO: 2533267 - RNA, 19 nt, Artificial Sequence
  Description of Artificial Sequence: Synthetic oligonucleotide
  Antisense strand to SEQ ID NO: 2533266
aaaguuagacucauagcau

SEQ ID NO: 2533268 - RNA, 19 nt, Artificial Sequence
  Description of Artificial Sequence: Synthetic oligonucleotide
  Sense strand starting at position 3968 of SEQ ID NO: 1888403
cucagcuuccuguaaauga

SEQ ID NO: 2533269 - RNA, 19 nt, Artificial Sequence
  Description of Artificial Sequence: Synthetic oligonucleotide
  Antisense strand to SEQ ID NO: 2533268
ucauuuacaggaagcugag

SEQ ID NO: 2533270 - RNA, 19 nt, Artificial Sequence
  Description of Artificial Sequence: Synthetic oligonucleotide
  Sense strand starting at position 638 of SEQ ID NO: 1888403
acaaguccucaugggcaaa

SEQ ID NO: 2533271 - RNA, 19 nt, Artificial Sequence
  Description of Artificial Sequence: Synthetic oligonucleotide
  Antisense strand to SEQ ID NO: 2533270
uuugcccaugaggacuugu

SEQ ID NO: 2533272 - RNA, 19 nt, Artificial Sequence
  Description of Artificial Sequence: Synthetic oligonucleotide
  Sense strand starting at position 807 of SEQ ID NO: 1888403
agaucaguccugugauuaa

SEQ ID NO: 2533273 - RNA, 19 nt, Artificial Sequence
  Description of Artificial Sequence: Synthetic oligonucleotide
  Antisense strand to SEQ ID NO: 2533272
uuaaucacaggacugaucu

SEQ ID NO: 2533274 - RNA, 19 nt, Artificial Sequence
  Description of Artificial Sequence: Synthetic oligonucleotide
  Sense strand starting at position 3939 of SEQ ID NO: 1888403
guggaaucugaacguuaaa

SEQ ID NO: 2533275 - RNA, 19 nt, Artificial Sequence
  Description of Artificial Sequence: Synthetic oligonucleotide
  Antisense strand to SEQ ID NO: 2533274
uuuaacguucagauuccac

SEQ ID NO: 2533276 - RNA, 19 nt, Artificial Sequence
  Description of Artificial Sequence: Synthetic oligonucleotide
  Sense strand starting at position 466 of SEQ ID NO: 1888403
uuggucauuugacagaaau

SEQ ID NO: 2533277 - RNA, 19 nt, Artificial Sequence
  Description of Artificial Sequence: Synthetic oligonucleotide
  Antisense strand to SEQ ID NO: 2533276
auuucugucaaaugaccaa

SEQ ID NO: 2533278 - RNA, 19 nt, Artificial Sequence
  Description of Artificial Sequence: Synthetic oligonucleotide
  Sense strand starting at position 2589 of SEQ ID NO: 1888403
guaacugggcuuugagaac

SEQ ID NO: 2533279 - RNA, 19 nt, Artificial Sequence
  Description of Artificial Sequence: Synthetic oligonucleotide
  Antisense strand to SEQ ID NO: 2533278
guucucaaagcccaguuac

SEQ ID NO: 2533280 - RNA, 19 nt, Artificial Sequence
  Description of Artificial Sequence: Synthetic oligonucleotide
  Sense strand starting at position 3678 of SEQ ID NO: 1888403
uucucauucuagguugaac

SEQ ID NO: 2533281 - RNA, 19 nt, Artificial Sequence
  Description of Artificial Sequence: Synthetic oligonucleotide
  Antisense strand to SEQ ID NO: 2533280
guucaaccuagaaugagaa

SEQ ID NO: 2533282 - RNA, 19 nt, Artificial Sequence
  Description of Artificial Sequence: Synthetic oligonucleotide
  Sense strand starting at position 3640 of SEQ ID NO: 1888403
gguuacagaugccuacaau

SEQ ID NO: 2533283 - RNA, 19 nt, Artificial Sequence
  Description of Artificial Sequence: Synthetic oligonucleotide
  Antisense strand to SEQ ID NO: 2533282
auuguaggcaucuguaacc

SEQ ID NO: 2533284 - RNA, 19 nt, Artificial Sequence
  Description of Artificial Sequence: Synthetic oligonucleotide
  Sense strand starting at position 3677 of SEQ ID NO: 1888403
uuucucauucuagguugaa

SEQ ID NO: 2533285 - RNA, 19 nt, Artificial Sequence
  Description of Artificial Sequence: Synthetic oligonucleotide
  Antisense strand to SEQ ID NO: 2533284
uucaaccuagaaugagaaa

SEQ ID NO: 2533286 - RNA, 19 nt, Artificial Sequence
  Description of Artificial Sequence: Synthetic oligonucleotide
  Sense strand starting at position 2948 of SEQ ID NO: 1888403
gaagaagaauaaggaaaua

SEQ ID NO: 2533287 - RNA, 19 nt, Artificial Sequence
  Description of Artificial Sequence: Synthetic oligonucleotide
  Antisense strand to SEQ ID NO: 2533286
uauuuccuuauucuucuuc

SEQ ID NO: 2533288 - RNA, 19 nt, Artificial Sequence
  Description of Artificial Sequence: Synthetic oligonucleotide
  Sense strand starting at position 1160 of SEQ ID NO: 1888403
guuaaauucuauccauagu

SEQ ID NO: 2533289 - RNA, 19 nt, Artificial Sequence
  Description of Artificial Sequence: Synthetic oligonucleotide
  Antisense strand to SEQ ID NO: 2533288
acuauggauagaauuuaac

SEQ ID NO: 2533290 - RNA, 19 nt, Artificial Sequence
  Description of Artificial Sequence: Synthetic oligonucleotide
  Sense strand starting at position 3631 of SEQ ID NO: 1888403
cccucugcugguuacagau

SEQ ID NO: 2533291 - RNA, 19 nt, Artificial Sequence
  Description of Artificial Sequence: Synthetic oligonucleotide
  Antisense strand to SEQ ID NO: 2533290
aucuguaaccagcagaggg

SEQ ID NO: 2533292 - RNA, 19 nt, Artificial Sequence
  Description of Artificial Sequence: Synthetic oligonucleotide
  Sense strand starting at position 1908 of SEQ ID NO: 1888404
cugacagagcuguaaauca

SEQ ID NO: 2533293 - RNA, 19 nt, Artificial Sequence
  Description of Artificial Sequence: Synthetic oligonucleotide
  Antisense strand to SEQ ID NO: 2533292
ugauuuacagcucugucag

SEQ ID NO: 2533294 - RNA, 19 nt, Artificial Sequence
  Description of Artificial Sequence: Synthetic oligonucleotide
  Sense strand starting at position 2681 of SEQ ID NO: 1888404
gagggaauucguuaucacc

SEQ ID NO: 2533295 - RNA, 19 nt, Artificial Sequence
  Description of Artificial Sequence: Synthetic oligonucleotide
  Antisense strand to SEQ ID NO: 2533294
ggugauaacgaauucccuc

SEQ ID NO: 2533296 - RNA, 19 nt, Artificial Sequence
  Description of Artificial Sequence: Synthetic oligonucleotide
  Sense strand starting at position 1141 of SEQ ID NO: 1888404
uucuuauacccugagugac

SEQ ID NO: 2533297 - RNA, 19 nt, Artificial Sequence
  Description of Artificial Sequence: Synthetic oligonucleotide
  Antisense strand to SEQ ID NO: 2533296
gucacucaggguauaagaa

SEQ ID NO: 2533298 - RNA, 19 nt, Artificial Sequence
  Description of Artificial Sequence: Synthetic oligonucleotide
  Sense strand starting at position 1640 of SEQ ID NO: 1888404
gacucugugcaagaacacu

SEQ ID NO: 2533299 - RNA, 19 nt, Artificial Sequence
  Description of Artificial Sequence: Synthetic oligonucleotide
  Antisense strand to SEQ ID NO: 2533298
aguguucuugcacagaguc

SEQ ID NO: 2533300 - RNA, 19 nt, Artificial Sequence
  Description of Artificial Sequence: Synthetic oligonucleotide
  Sense strand starting at position 554 of SEQ ID NO: 1888404
aggauugcccagcacagau

SEQ ID NO: 2533301 - RNA, 19 nt, Artificial Sequence
  Description of Artificial Sequence: Synthetic oligonucleotide
  Antisense strand to SEQ ID NO: 2533300
aucugugcugggcaauccu

SEQ ID NO: 2533302 - RNA, 19 nt, Artificial Sequence
  Description of Artificial Sequence: Synthetic oligonucleotide
  Sense strand starting at position 2517 of SEQ ID NO: 1888404
ggaauuccaucagauuuag

SEQ ID NO: 2533303 - RNA, 19 nt, Artificial Sequence
  Description of Artificial Sequence: Synthetic oligonucleotide
  Antisense strand to SEQ ID NO: 2533302
cuaaaucugauggaauucc

SEQ ID NO: 2533304 - RNA, 19 nt, Artificial Sequence
  Description of Artificial Sequence: Synthetic oligonucleotide
  Sense strand starting at position 1115 of SEQ ID NO: 1888404
uaaugcugugcagaggaaa

SEQ ID NO: 2533305 - RNA, 19 nt, Artificial Sequence
  Description of Artificial Sequence: Synthetic oligonucleotide
  Antisense strand to SEQ ID NO: 2533304
uuuccucugcacagcauua

SEQ ID NO: 2533306 - RNA, 19 nt, Artificial Sequence
  Description of Artificial Sequence: Synthetic oligonucleotide
  Sense strand starting at position 1542 of SEQ ID NO: 1888404
uccucaaggucaucagaua

SEQ ID NO: 2533307 - RNA, 19 nt, Artificial Sequence
  Description of Artificial Sequence: Synthetic oligonucleotide
  Antisense strand to SEQ ID NO: 2533306
uaucugaugaccuugagga

SEQ ID NO: 2533308 - RNA, 19 nt, Artificial Sequence
  Description of Artificial Sequence: Synthetic oligonucleotide
  Sense strand starting at position 849 of SEQ ID NO: 1888404
gccugaucaauggagagcu

SEQ ID NO: 2533309 - RNA, 19 nt, Artificial Sequence
  Description of Artificial Sequence: Synthetic oligonucleotide
  Antisense strand to SEQ ID NO: 2533308
agcucuccauugaucaggc

SEQ ID NO: 2533310 - RNA, 19 nt, Artificial Sequence
  Description of Artificial Sequence: Synthetic oligonucleotide
  Sense strand starting at position 3590 of SEQ ID NO: 1888404
uugguugacaucuaagguu

SEQ ID NO: 2533311 - RNA, 19 nt, Artificial Sequence
  Description of Artificial Sequence: Synthetic oligonucleotide
  Antisense strand to SEQ ID NO: 2533310
aaccuuagaugucaaccaa

SEQ ID NO: 2533312 - RNA, 19 nt, Artificial Sequence
  Description of Artificial Sequence: Synthetic oligonucleotide
  Sense strand starting at position 3530 of SEQ ID NO: 1888404
ggauaaugugcugagguua

SEQ ID NO: 2533313 - RNA, 19 nt, Artificial Sequence
  Description of Artificial Sequence: Synthetic oligonucleotide
  Antisense strand to SEQ ID NO: 2533312
uaaccucagcacauuaucc

SEQ ID NO: 2533314 - RNA, 19 nt, Artificial Sequence
  Description of Artificial Sequence: Synthetic oligonucleotide
  Sense strand starting at position 1411 of SEQ ID NO: 1888404
aaaguuguggcccaauaca

SEQ ID NO: 2533315 - RNA, 19 nt, Artificial Sequence
  Description of Artificial Sequence: Synthetic oligonucleotide
  Antisense strand to SEQ ID NO: 2533314
uguauugggccacaacuuu

SEQ ID NO: 2533316 - RNA, 19 nt, Artificial Sequence
  Description of Artificial Sequence: Synthetic oligonucleotide
  Sense strand starting at position 3605 of SEQ ID NO: 1888404
gguugauugccauacaacu

SEQ ID NO: 2533317 - RNA, 19 nt, Artificial Sequence
  Description of Artificial Sequence: Synthetic oligonucleotide
  Antisense strand to SEQ ID NO: 2533316
aguuguauggcaaucaacc

SEQ ID NO: 2533318 - RNA, 19 nt, Artificial Sequence
  Description of Artificial Sequence: Synthetic oligonucleotide
  Sense strand starting at position 841 of SEQ ID NO: 1888404
cggaccaugccugaucaau

SEQ ID NO: 2533319 - RNA, 19 nt, Artificial Sequence
  Description of Artificial Sequence: Synthetic oligonucleotide
  Antisense strand to SEQ ID NO: 2533318
auugaucaggcaugguccg

SEQ ID NO: 2533320 - RNA, 19 nt, Artificial Sequence
  Description of Artificial Sequence: Synthetic oligonucleotide
  Sense strand starting at position 2396 of SEQ ID NO: 1888404
ucaguaagauaugccauga

SEQ ID NO: 2533321 - RNA, 19 nt, Artificial Sequence
  Description of Artificial Sequence: Synthetic oligonucleotide
  Antisense strand to SEQ ID NO: 2533320
ucauggcauaucuuacuga

SEQ ID NO: 2533322 - RNA, 19 nt, Artificial Sequence
  Description of Artificial Sequence: Synthetic oligonucleotide
  Sense strand starting at position 2687 of SEQ ID NO: 1888404
auucguuaucaccagaccu

SEQ ID NO: 2533323 - RNA, 19 nt, Artificial Sequence
  Description of Artificial Sequence: Synthetic oligonucleotide
  Antisense strand to SEQ ID NO: 2533322
aggucuggugauaacgaau

SEQ ID NO: 2533324 - RNA, 19 nt, Artificial Sequence
  Description of Artificial Sequence: Synthetic oligonucleotide
  Sense strand starting at position 2683 of SEQ ID NO: 1888404
gggaauucguuaucaccag

SEQ ID NO: 2533325 - RNA, 19 nt, Artificial Sequence
  Description of Artificial Sequence: Synthetic oligonucleotide
  Antisense strand to SEQ ID NO: 2533324
cuggugauaacgaauuccc

SEQ ID NO: 2533326 - RNA, 19 nt, Artificial Sequence
  Description of Artificial Sequence: Synthetic oligonucleotide
  Sense strand starting at position 3786 of SEQ ID NO: 1888404
gagacuuauuuccagguaa

SEQ ID NO: 2533327 - RNA, 19 nt, Artificial Sequence
  Description of Artificial Sequence: Synthetic oligonucleotide
  Antisense strand to SEQ ID NO: 2533326
uuaccuggaaauaagucuc

SEQ ID NO: 2533328 - RNA, 19 nt, Artificial Sequence
  Description of Artificial Sequence: Synthetic oligonucleotide
  Sense strand starting at position 1792 of SEQ ID NO: 1888404
aguucauugcgugaaagaa

SEQ ID NO: 2533329 - RNA, 19 nt, Artificial Sequence
  Description of Artificial Sequence: Synthetic oligonucleotide
  Antisense strand to SEQ ID NO: 2533328
uucuuucacgcaaugaacu

SEQ ID NO: 2533330 - RNA, 19 nt, Artificial Sequence
  Description of Artificial Sequence: Synthetic oligonucleotide
  Sense strand starting at position 1967 of SEQ ID NO: 1888404
gugugauugcauuaugaau

SEQ ID NO: 2533331 - RNA, 19 nt, Artificial Sequence
  Description of Artificial Sequence: Synthetic oligonucleotide
  Antisense strand to SEQ ID NO: 2533330
auucauaaugcaaucacac

SEQ ID NO: 2533332 - RNA, 19 nt, Artificial Sequence
  Description of Artificial Sequence: Synthetic oligonucleotide
  Sense strand starting at position 3602 of SEQ ID NO: 1888404
uaagguugauugccauaca

SEQ ID NO: 2533333 - RNA, 19 nt, Artificial Sequence
  Description of Artificial Sequence: Synthetic oligonucleotide
  Antisense strand to SEQ ID NO: 2533332
uguauggcaaucaaccuua

SEQ ID NO: 2533334 - RNA, 19 nt, Artificial Sequence
  Description of Artificial Sequence: Synthetic oligonucleotide
  Sense strand starting at position 3564 of SEQ ID NO: 1888404
gcagauaaucccugaucuc

SEQ ID NO: 2533335 - RNA, 19 nt, Artificial Sequence
  Description of Artificial Sequence: Synthetic oligonucleotide
  Antisense strand to SEQ ID NO: 2533334
gagaucagggauuaucugc

SEQ ID NO: 2533336 - RNA, 19 nt, Artificial Sequence
  Description of Artificial Sequence: Synthetic oligonucleotide
  Sense strand starting at position 1140 of SEQ ID NO: 1888404
cuucuuauacccugaguga

SEQ ID NO: 2533337 - RNA, 19 nt, Artificial Sequence
  Description of Artificial Sequence: Synthetic oligonucleotide
  Antisense strand to SEQ ID NO: 2533336
ucacucaggguauaagaag

SEQ ID NO: 2533338 - RNA, 19 nt, Artificial Sequence
  Description of Artificial Sequence: Synthetic oligonucleotide
  Sense strand starting at position 1802 of SEQ ID NO: 1888404
gugaaagaaguauguugua

SEQ ID NO: 2533339 - RNA, 19 nt, Artificial Sequence
  Description of Artificial Sequence: Synthetic oligonucleotide
  Antisense strand to SEQ ID NO: 2533338
uacaacauacuucuuucac

SEQ ID NO: 2533340 - RNA, 19 nt, Artificial Sequence
  Description of Artificial Sequence: Synthetic oligonucleotide
  Sense strand starting at position 1800 of SEQ ID NO: 1888404
gcgugaaagaaguauguug

SEQ ID NO: 2533341 - RNA, 19 nt, Artificial Sequence
  Description of Artificial Sequence: Synthetic oligonucleotide
  Antisense strand to SEQ ID NO: 2533340
caacauacuucuuucacgc

SEQ ID NO: 2533342 - RNA, 19 nt, Artificial Sequence
  Description of Artificial Sequence: Synthetic oligonucleotide
  Sense strand starting at position 3563 of SEQ ID NO: 1888404
cgcagauaaucccugaucu

SEQ ID NO: 2533343 - RNA, 19 nt, Artificial Sequence
  Description of Artificial Sequence: Synthetic oligonucleotide
  Antisense strand to SEQ ID NO: 2533342
agaucagggauuaucugcg

SEQ ID NO: 2533344 - RNA, 19 nt, Artificial Sequence
  Description of Artificial Sequence: Synthetic oligonucleotide
  Sense strand starting at position 1774 of SEQ ID NO: 1888404
ggauauggguaggaacaaa

SEQ ID NO: 2533345 - RNA, 19 nt, Artificial Sequence
  Description of Artificial Sequence: Synthetic oligonucleotide
  Antisense strand to SEQ ID NO: 2533344
uuuguuccuacccauaucc

SEQ ID NO: 2533346 - RNA, 19 nt, Artificial Sequence
  Description of Artificial Sequence: Synthetic oligonucleotide
  Sense strand starting at position 1098 of SEQ ID NO: 1888404
gcaucucacccuugaggua

SEQ ID NO: 2533347 - RNA, 19 nt, Artificial Sequence
  Description of Artificial Sequence: Synthetic oligonucleotide
  Antisense strand to SEQ ID NO: 2533346
uaccucaagggugagaugc

SEQ ID NO: 2533348 - RNA, 19 nt, Artificial Sequence
  Description of Artificial Sequence: Synthetic oligonucleotide
  Sense strand starting at position 1111 of SEQ ID NO: 1888404
gagguaaugcugugcagag

SEQ ID NO: 2533349 - RNA, 19 nt, Artificial Sequence
  Description of Artificial Sequence: Synthetic oligonucleotide
  Antisense strand to SEQ ID NO: 2533348
cucugcacagcauuaccuc

SEQ ID NO: 2533350 - RNA, 19 nt, Artificial Sequence
  Description of Artificial Sequence: Synthetic oligonucleotide
  Sense strand starting at position 840 of SEQ ID NO: 1888404
gcggaccaugccugaucaa

SEQ ID NO: 2533351 - RNA, 19 nt, Artificial Sequence
  Description of Artificial Sequence: Synthetic oligonucleotide
  Antisense strand to SEQ ID NO: 2533350
uugaucaggcaugguccgc

SEQ ID NO: 2533352 - RNA, 19 nt, Artificial Sequence
  Description of Artificial Sequence: Synthetic oligonucleotide
  Sense strand starting at position 647 of SEQ ID NO: 1888404
uugugcugugcugaggauu

SEQ ID NO: 2533353 - RNA, 19 nt, Artificial Sequence
  Description of Artificial Sequence: Synthetic oligonucleotide
  Antisense strand to SEQ ID NO: 2533352
aauccucagcacagcacaa

SEQ ID NO: 2533354 - RNA, 19 nt, Artificial Sequence
  Description of Artificial Sequence: Synthetic oligonucleotide
  Sense strand starting at position 985 of SEQ ID NO: 1888404
uguuguacuugcccuaaca

SEQ ID NO: 2533355 - RNA, 19 nt, Artificial Sequence
  Description of Artificial Sequence: Synthetic oligonucleotide
  Antisense strand to SEQ ID NO: 2533354
uguuagggcaaguacaaca

SEQ ID NO: 2533356 - RNA, 19 nt, Artificial Sequence
  Description of Artificial Sequence: Synthetic oligonucleotide
  Sense strand starting at position 576 of SEQ ID NO: 1888404
gucuaagaguucucuucgu

SEQ ID NO: 2533357 - RNA, 19 nt, Artificial Sequence
  Description of Artificial Sequence: Synthetic oligonucleotide
  Antisense strand to SEQ ID NO: 2533356
acgaagagaacucuuagac

SEQ ID NO: 2533358 - RNA, 19 nt, Artificial Sequence
  Description of Artificial Sequence: Synthetic oligonucleotide
  Sense strand starting at position 1915 of SEQ ID NO: 1888404
agcuguaaaucacacuaga

SEQ ID NO: 2533359 - RNA, 19 nt, Artificial Sequence
  Description of Artificial Sequence: Synthetic oligonucleotide
  Antisense strand to SEQ ID NO: 2533358
ucuagugugauuuacagcu

SEQ ID NO: 2533360 - RNA, 19 nt, Artificial Sequence
  Description of Artificial Sequence: Synthetic oligonucleotide
  Sense strand starting at position 3603 of SEQ ID NO: 1888404
aagguugauugccauacaa

SEQ ID NO: 2533361 - RNA, 19 nt, Artificial Sequence
  Description of Artificial Sequence: Synthetic oligonucleotide
  Antisense strand to SEQ ID NO: 2533360
uuguauggcaaucaaccuu

SEQ ID NO: 2533362 - RNA, 19 nt, Artificial Sequence
  Description of Artificial Sequence: Synthetic oligonucleotide
  Sense strand starting at position 2684 of SEQ ID NO: 1888404
ggaauucguuaucaccaga

SEQ ID NO: 2533363 - RNA, 19 nt, Artificial Sequence
  Description of Artificial Sequence: Synthetic oligonucleotide
  Antisense strand to SEQ ID NO: 2533362
ucuggugauaacgaauucc

SEQ ID NO: 2533364 - RNA, 19 nt, Artificial Sequence
  Description of Artificial Sequence: Synthetic oligonucleotide
  Sense strand starting at position 2788 of SEQ ID NO: 1888404
acagacaagugaugcuaaa

SEQ ID NO: 2533365 - RNA, 19 nt, Artificial Sequence
  Description of Artificial Sequence: Synthetic oligonucleotide
  Antisense strand to SEQ ID NO: 2533364
uuuagcaucacuugucugu

SEQ ID NO: 2533366 - RNA, 19 nt, Artificial Sequence
  Description of Artificial Sequence: Synthetic oligonucleotide
  Sense strand starting at position 3776 of SEQ ID NO: 1888404
ucaccagccugagacuuau

SEQ ID NO: 2533367 - RNA, 19 nt, Artificial Sequence
  Description of Artificial Sequence: Synthetic oligonucleotide
  Antisense strand to SEQ ID NO: 2533366
auaagucucaggcugguga

SEQ ID NO: 2533368 - RNA, 19 nt, Artificial Sequence
  Description of Artificial Sequence: Synthetic oligonucleotide
  Sense strand starting at position 479 of SEQ ID NO: 1888404
uccacuugcucuuaugaga

SEQ ID NO: 2533369 - RNA, 19 nt, Artificial Sequence
  Description of Artificial Sequence: Synthetic oligonucleotide
  Antisense strand to SEQ ID NO: 2533368
ucucauaagagcaagugga

SEQ ID NO: 2533370 - RNA, 19 nt, Artificial Sequence
  Description of Artificial Sequence: Synthetic oligonucleotide
  Sense strand starting at position 1805 of SEQ ID NO: 1888404
aaagaaguauguuguaauc

SEQ ID NO: 2533371 - RNA, 19 nt, Artificial Sequence
  Description of Artificial Sequence: Synthetic oligonucleotide
  Antisense strand to SEQ ID NO: 2533370
gauuacaacauacuucuuu

SEQ ID NO: 2533372 - RNA, 19 nt, Artificial Sequence
  Description of Artificial Sequence: Synthetic oligonucleotide
  Sense strand starting at position 769 of SEQ ID NO: 1888405
uucaguagucgguuugcca

SEQ ID NO: 2533373 - RNA, 19 nt, Artificial Sequence
  Description of Artificial Sequence: Synthetic oligonucleotide
  Antisense strand to SEQ ID NO: 2533372
uggcaaaccgacuacugaa

SEQ ID NO: 2533374 - RNA, 19 nt, Artificial Sequence
  Description of Artificial Sequence: Synthetic oligonucleotide
  Sense strand starting at position 2812 of SEQ ID NO: 1888405
gggcuuugaaaugaguuua

SEQ ID NO: 2533375 - RNA, 19 nt, Artificial Sequence
  Description of Artificial Sequence: Synthetic oligonucleotide
  Antisense strand to SEQ ID NO: 2533374
uaaacucauuucaaagccc

SEQ ID NO: 2533376 - RNA, 19 nt, Artificial Sequence
  Description of Artificial Sequence: Synthetic oligonucleotide
  Sense strand starting at position 1650 of SEQ ID NO: 1888405
acaagagagugcccugaaa

SEQ ID NO: 2533377 - RNA, 19 nt, Artificial Sequence
  Description of Artificial Sequence: Synthetic oligonucleotide
  Antisense strand to SEQ ID NO: 2533376
uuucagggcacucucuugu

SEQ ID NO: 2533378 - RNA, 19 nt, Artificial Sequence
  Description of Artificial Sequence: Synthetic oligonucleotide
  Sense strand starting at position 908 of SEQ ID NO: 1888405
agaucaguccucgauauau

SEQ ID NO: 2533379 - RNA, 19 nt, Artificial Sequence
  Description of Artificial Sequence: Synthetic oligonucleotide
  Antisense strand to SEQ ID NO: 2533378
auauaucgaggacugaucu

SEQ ID NO: 2533380 - RNA, 19 nt, Artificial Sequence
  Description of Artificial Sequence: Synthetic oligonucleotide
  Sense strand starting at position 3295 of SEQ ID NO: 1888405
ccugguauugcauaugaaa

SEQ ID NO: 2533381 - RNA, 19 nt, Artificial Sequence
  Description of Artificial Sequence: Synthetic oligonucleotide
  Antisense strand to SEQ ID NO: 2533380
uuucauaugcaauaccagg

SEQ ID NO: 2533382 - RNA, 19 nt, Artificial Sequence
  Description of Artificial Sequence: Synthetic oligonucleotide
  Sense strand starting at position 1652 of SEQ ID NO: 1888405
aagagagugcccugaaaua

SEQ ID NO: 2533383 - RNA, 19 nt, Artificial Sequence
  Description of Artificial Sequence: Synthetic oligonucleotide
  Antisense strand to SEQ ID NO: 2533382
uauuucagggcacucucuu

SEQ ID NO: 2533384 - RNA, 19 nt, Artificial Sequence
  Description of Artificial Sequence: Synthetic oligonucleotide
  Sense strand starting at position 2944 of SEQ ID NO: 1888405
uugauuagucuccaagagu

SEQ ID NO: 2533385 - RNA, 19 nt, Artificial Sequence
  Description of Artificial Sequence: Synthetic oligonucleotide
  Antisense strand to SEQ ID NO: 2533384
acucuuggagacuaaucaa

SEQ ID NO: 2533386 - RNA, 19 nt, Artificial Sequence
  Description of Artificial Sequence: Synthetic oligonucleotide
  Sense strand starting at position 3777 of SEQ ID NO: 1888405
guagaauacucagcagaua

SEQ ID NO: 2533387 - RNA, 19 nt, Artificial Sequence
  Description of Artificial Sequence: Synthetic oligonucleotide
  Antisense strand to SEQ ID NO: 2533386
uaucugcugaguauucuac

SEQ ID NO: 2533388 - RNA, 19 nt, Artificial Sequence
  Description of Artificial Sequence: Synthetic oligonucleotide
  Sense strand starting at position 2153 of SEQ ID NO: 1888405
acugaagcuccaugacuaa

SEQ ID NO: 2533389 - RNA, 19 nt, Artificial Sequence
  Description of Artificial Sequence: Synthetic oligonucleotide
  Antisense strand to SEQ ID NO: 2533388
uuagucauggagcuucagu

SEQ ID NO: 2533390 - RNA, 19 nt, Artificial Sequence
  Description of Artificial Sequence: Synthetic oligonucleotide
  Sense strand starting at position 1416 of SEQ ID NO: 1888405
guccucuauggugaacuga

SEQ ID NO: 2533391 - RNA, 19 nt, Artificial Sequence
  Description of Artificial Sequence: Synthetic oligonucleotide
  Antisense strand to SEQ ID NO: 2533390
ucaguucaccauagaggac

SEQ ID NO: 2533392 - RNA, 19 nt, Artificial Sequence
  Description of Artificial Sequence: Synthetic oligonucleotide
  Sense strand starting at position 910 of SEQ ID NO: 1888405
aucaguccucgauauauua

SEQ ID NO: 2533393 - RNA, 19 nt, Artificial Sequence
  Description of Artificial Sequence: Synthetic oligonucleotide
  Antisense strand to SEQ ID NO: 2533392
uaauauaucgaggacugau

SEQ ID NO: 2533394 - RNA, 19 nt, Artificial Sequence
  Description of Artificial Sequence: Synthetic oligonucleotide
  Sense strand starting at position 1360 of SEQ ID NO: 1888405
aauagugaccgccaauaua

SEQ ID NO: 2533395 - RNA, 19 nt, Artificial Sequence
  Description of Artificial Sequence: Synthetic oligonucleotide
  Antisense strand to SEQ ID NO: 2533394
uauauuggcggucacuauu

SEQ ID NO: 2533396 - RNA, 19 nt, Artificial Sequence
  Description of Artificial Sequence: Synthetic oligonucleotide
  Sense strand starting at position 1383 of SEQ ID NO: 1888405
gcauacccugaguauaauu

SEQ ID NO: 2533397 - RNA, 19 nt, Artificial Sequence
  Description of Artificial Sequence: Synthetic oligonucleotide
  Antisense strand to SEQ ID NO: 2533396
aauuauacucaggguaugc

SEQ ID NO: 2533398 - RNA, 19 nt, Artificial Sequence
  Description of Artificial Sequence: Synthetic oligonucleotide
  Sense strand starting at position 2943 of SEQ ID NO: 1888405
uuugauuagucuccaagag

SEQ ID NO: 2533399 - RNA, 19 nt, Artificial Sequence
  Description of Artificial Sequence: Synthetic oligonucleotide
  Antisense strand to SEQ ID NO: 2533398
cucuuggagacuaaucaaa

SEQ ID NO: 2533400 - RNA, 19 nt, Artificial Sequence
  Description of Artificial Sequence: Synthetic oligonucleotide
  Sense strand starting at position 3383 of SEQ ID NO: 1888405
ugguuaccacuuuaacagu

SEQ ID NO: 2533401 - RNA, 19 nt, Artificial Sequence
  Description of Artificial Sequence: Synthetic oligonucleotide
  Antisense strand to SEQ ID NO: 2533400
acuguuaaagugguaacca

SEQ ID NO: 2533402 - RNA, 19 nt, Artificial Sequence
  Description of Artificial Sequence: Synthetic oligonucleotide
  Sense strand starting at position 1380 of SEQ ID NO: 1888405
uuggcauacccugaguaua

SEQ ID NO: 2533403 - RNA, 19 nt, Artificial Sequence
  Description of Artificial Sequence: Synthetic oligonucleotide
  Antisense strand to SEQ ID NO: 2533402
uauacucaggguaugccaa

SEQ ID NO: 2533404 - RNA, 19 nt, Artificial Sequence
  Description of Artificial Sequence: Synthetic oligonucleotide
  Sense strand starting at position 3431 of SEQ ID NO: 1888405
aucaguguucuaugggaaa

SEQ ID NO: 2533405 - RNA, 19 nt, Artificial Sequence
  Description of Artificial Sequence: Synthetic oligonucleotide
  Antisense strand to SEQ ID NO: 2533404
uuucccauagaacacugau

SEQ ID NO: 2533406 - RNA, 19 nt, Artificial Sequence
  Description of Artificial Sequence: Synthetic oligonucleotide
  Sense strand starting at position 3763 of SEQ ID NO: 1888405
uuguauagcccagaguaga

SEQ ID NO: 2533407 - RNA, 19 nt, Artificial Sequence
  Description of Artificial Sequence: Synthetic oligonucleotide
  Antisense strand to SEQ ID NO: 2533406
ucuacucugggcuauacaa

SEQ ID NO: 2533408 - RNA, 19 nt, Artificial Sequence
  Description of Artificial Sequence: Synthetic oligonucleotide
  Sense strand starting at position 906 of SEQ ID NO: 1888405
aaagaucaguccucgauau

SEQ ID NO: 2533409 - RNA, 19 nt, Artificial Sequence
  Description of Artificial Sequence: Synthetic oligonucleotide
  Antisense strand to SEQ ID NO: 2533408
auaucgaggacugaucuuu

SEQ ID NO: 2533410 - RNA, 19 nt, Artificial Sequence
  Description of Artificial Sequence: Synthetic oligonucleotide
  Sense strand starting at position 2593 of SEQ ID NO: 1888405
cugaucucuuugguaaaua

SEQ ID NO: 2533411 - RNA, 19 nt, Artificial Sequence
  Description of Artificial Sequence: Synthetic oligonucleotide
  Antisense strand to SEQ ID NO: 2533410
uauuuaccaaagagaucag

SEQ ID NO: 2533412 - RNA, 19 nt, Artificial Sequence
  Description of Artificial Sequence: Synthetic oligonucleotide
  Sense strand starting at position 907 of SEQ ID NO: 1888405
aagaucaguccucgauaua

SEQ ID NO: 2533413 - RNA, 19 nt, Artificial Sequence
  Description of Artificial Sequence: Synthetic oligonucleotide
  Antisense strand to SEQ ID NO: 2533412
uauaucgaggacugaucuu

SEQ ID NO: 2533414 - RNA, 19 nt, Artificial Sequence
  Description of Artificial Sequence: Synthetic oligonucleotide
  Sense strand starting at position 1363 of SEQ ID NO: 1888405
agugaccgccaauauaauu

SEQ ID NO: 2533415 - RNA, 19 nt, Artificial Sequence
  Description of Artificial Sequence: Synthetic oligonucleotide
  Antisense strand to SEQ ID NO: 2533414
aauuauauuggcggucacu

SEQ ID NO: 2533416 - RNA, 19 nt, Artificial Sequence
  Description of Artificial Sequence: Synthetic oligonucleotide
  Sense strand starting at position 3476 of SEQ ID NO: 1888405
aaaugugacuuugugaauu

SEQ ID NO: 2533417 - RNA, 19 nt, Artificial Sequence
  Description of Artificial Sequence: Synthetic oligonucleotide
  Antisense strand to SEQ ID NO: 2533416
aauucacaaagucacauuu

SEQ ID NO: 2533418 - RNA, 19 nt, Artificial Sequence
  Description of Artificial Sequence: Synthetic oligonucleotide
  Sense strand starting at position 2878 of SEQ ID NO: 1888405
ucagauucuccaugugaac

SEQ ID NO: 2533419 - RNA, 19 nt, Artificial Sequence
  Description of Artificial Sequence: Synthetic oligonucleotide
  Antisense strand to SEQ ID NO: 2533418
guucacauggagaaucuga

SEQ ID NO: 2533420 - RNA, 19 nt, Artificial Sequence
  Description of Artificial Sequence: Synthetic oligonucleotide
  Sense strand starting at position 934 of SEQ ID NO: 1888405
uguuucuuggcauaauuaa

SEQ ID NO: 2533421 - RNA, 19 nt, Artificial Sequence
  Description of Artificial Sequence: Synthetic oligonucleotide
  Antisense strand to SEQ ID NO: 2533420
uuaauuaugccaagaaaca

SEQ ID NO: 2533422 - RNA, 19 nt, Artificial Sequence
  Description of Artificial Sequence: Synthetic oligonucleotide
  Sense strand starting at position 3717 of SEQ ID NO: 1888405
cugugugaugacuauguga

SEQ ID NO: 2533423 - RNA, 19 nt, Artificial Sequence
  Description of Artificial Sequence: Synthetic oligonucleotide
  Antisense strand to SEQ ID NO: 2533422
ucacauagucaucacacag

SEQ ID NO: 2533424 - RNA, 19 nt, Artificial Sequence
  Description of Artificial Sequence: Synthetic oligonucleotide
  Sense strand starting at position 2656 of SEQ ID NO: 1888405
uggccuuucccugauaauu

SEQ ID NO: 2533425 - RNA, 19 nt, Artificial Sequence
  Description of Artificial Sequence: Synthetic oligonucleotide
  Antisense strand to SEQ ID NO: 2533424
aauuaucagggaaaggcca

SEQ ID NO: 2533426 - RNA, 19 nt, Artificial Sequence
  Description of Artificial Sequence: Synthetic oligonucleotide
  Sense strand starting at position 1888 of SEQ ID NO: 1888405
gaguccugauaguugaauu

SEQ ID NO: 2533427 - RNA, 19 nt, Artificial Sequence
  Description of Artificial Sequence: Synthetic oligonucleotide
  Antisense strand to SEQ ID NO: 2533426
aauucaacuaucaggacuc

SEQ ID NO: 2533428 - RNA, 19 nt, Artificial Sequence
  Description of Artificial Sequence: Synthetic oligonucleotide
  Sense strand starting at position 2624 of SEQ ID NO: 1888405
cuaccaauccugggauugu

SEQ ID NO: 2533429 - RNA, 19 nt, Artificial Sequence
  Description of Artificial Sequence: Synthetic oligonucleotide
  Antisense strand to SEQ ID NO: 2533428
acaaucccaggauugguag

SEQ ID NO: 2533430 - RNA, 19 nt, Artificial Sequence
  Description of Artificial Sequence: Synthetic oligonucleotide
  Sense strand starting at position 1382 of SEQ ID NO: 1888405
ggcauacccugaguauaau

SEQ ID NO: 2533431 - RNA, 19 nt, Artificial Sequence
  Description of Artificial Sequence: Synthetic oligonucleotide
  Antisense strand to SEQ ID NO: 2533430
auuauacucaggguaugcc

SEQ ID NO: 2533432 - RNA, 19 nt, Artificial Sequence
  Description of Artificial Sequence: Synthetic oligonucleotide
  Sense strand starting at position 2123 of SEQ ID NO: 1888405
uggagucucagucauguua

SEQ ID NO: 2533433 - RNA, 19 nt, Artificial Sequence
  Description of Artificial Sequence: Synthetic oligonucleotide
  Antisense strand to SEQ ID NO: 2533432
uaacaugacugagacucca

SEQ ID NO: 2533434 - RNA, 19 nt, Artificial Sequence
  Description of Artificial Sequence: Synthetic oligonucleotide
  Sense strand starting at position 3719 of SEQ ID NO: 1888405
gugugaugacuaugugaaa

SEQ ID NO: 2533435 - RNA, 19 nt, Artificial Sequence
  Description of Artificial Sequence: Synthetic oligonucleotide
  Antisense strand to SEQ ID NO: 2533434
uuucacauagucaucacac

SEQ ID NO: 2533436 - RNA, 19 nt, Artificial Sequence
  Description of Artificial Sequence: Synthetic oligonucleotide
  Sense strand starting at position 3424 of SEQ ID NO: 1888405
ugaauuaaucaguguucua

SEQ ID NO: 2533437 - RNA, 19 nt, Artificial Sequence
  Description of Artificial Sequence: Synthetic oligonucleotide
  Antisense strand to SEQ ID NO: 2533436
uagaacacugauuaauuca

SEQ ID NO: 2533438 - RNA, 19 nt, Artificial Sequence
  Description of Artificial Sequence: Synthetic oligonucleotide
  Sense strand starting at position 2591 of SEQ ID NO: 1888405
uucugaucucuuugguaaa

SEQ ID NO: 2533439 - RNA, 19 nt, Artificial Sequence
  Description of Artificial Sequence: Synthetic oligonucleotide
  Antisense strand to SEQ ID NO: 2533438
uuuaccaaagagaucagaa

SEQ ID NO: 2533440 - RNA, 19 nt, Artificial Sequence
  Description of Artificial Sequence: Synthetic oligonucleotide
  Sense strand starting at position 2165 of SEQ ID NO: 1888405
ugacuaauuugacagccaa

SEQ ID NO: 2533441 - RNA, 19 nt, Artificial Sequence
  Description of Artificial Sequence: Synthetic oligonucleotide
  Antisense strand to SEQ ID NO: 2533440
uuggcugucaaauuaguca

SEQ ID NO: 2533442 - RNA, 19 nt, Artificial Sequence
  Description of Artificial Sequence: Synthetic oligonucleotide
  Sense strand starting at position 2365 of SEQ ID NO: 1888405
uuucuauucugauugugga

SEQ ID NO: 2533443 - RNA, 19 nt, Artificial Sequence
  Description of Artificial Sequence: Synthetic oligonucleotide
  Antisense strand to SEQ ID NO: 2533442
uccacaaucagaauagaaa

SEQ ID NO: 2533444 - RNA, 19 nt, Artificial Sequence
  Description of Artificial Sequence: Synthetic oligonucleotide
  Sense strand starting at position 1439 of SEQ ID NO: 1888405
guacuuaauggcugacaua

SEQ ID NO: 2533445 - RNA, 19 nt, Artificial Sequence
  Description of Artificial Sequence: Synthetic oligonucleotide
  Antisense strand to SEQ ID NO: 2533444
uaugucagccauuaaguac

SEQ ID NO: 2533446 - RNA, 19 nt, Artificial Sequence
  Description of Artificial Sequence: Synthetic oligonucleotide
  Sense strand starting at position 1412 of SEQ ID NO: 1888405
aacuguccucuauggugaa

SEQ ID NO: 2533447 - RNA, 19 nt, Artificial Sequence
  Description of Artificial Sequence: Synthetic oligonucleotide
  Antisense strand to SEQ ID NO: 2533446
uucaccauagaggacaguu

SEQ ID NO: 2533448 - RNA, 19 nt, Artificial Sequence
  Description of Artificial Sequence: Synthetic oligonucleotide
  Sense strand starting at position 731 of SEQ ID NO: 1888405
cgauuaaagucuuccucaa

SEQ ID NO: 2533449 - RNA, 19 nt, Artificial Sequence
  Description of Artificial Sequence: Synthetic oligonucleotide
  Antisense strand to SEQ ID NO: 2533448
uugaggaagacuuuaaucg

SEQ ID NO: 2533450 - RNA, 19 nt, Artificial Sequence
  Description of Artificial Sequence: Synthetic oligonucleotide
  Sense strand starting at position 3423 of SEQ ID NO: 1888405
uugaauuaaucaguguucu

SEQ ID NO: 2533451 - RNA, 19 nt, Artificial Sequence
  Description of Artificial Sequence: Synthetic oligonucleotide
  Antisense strand to SEQ ID NO: 2533450
agaacacugauuaauucaa

SEQ ID NO: 2533452 - RNA, 19 nt, Artificial Sequence
  Description of Artificial Sequence: Synthetic oligonucleotide
  Sense strand starting at position 2850 of SEQ ID NO: 1888406
auuccuguguucccaauuu

SEQ ID NO: 2533453 - RNA, 19 nt, Artificial Sequence
  Description of Artificial Sequence: Synthetic oligonucleotide
  Antisense strand to SEQ ID NO: 2533452
aaauugggaacacaggaau

SEQ ID NO: 2533454 - RNA, 19 nt, Artificial Sequence
  Description of Artificial Sequence: Synthetic oligonucleotide
  Sense strand starting at position 3652 of SEQ ID NO: 1888406
agguguuggaacugaaaug

SEQ ID NO: 2533455 - RNA, 19 nt, Artificial Sequence
  Description of Artificial Sequence: Synthetic oligonucleotide
  Antisense strand to SEQ ID NO: 2533454
cauuucaguuccaacaccu

SEQ ID NO: 2533456 - RNA, 19 nt, Artificial Sequence
  Description of Artificial Sequence: Synthetic oligonucleotide
  Sense strand starting at position 2669 of SEQ ID NO: 1888406
gcuaaaguccaucgauuuc

SEQ ID NO: 2533457 - RNA, 19 nt, Artificial Sequence
  Description of Artificial Sequence: Synthetic oligonucleotide
  Antisense strand to SEQ ID NO: 2533456
gaaaucgauggacuuuagc

SEQ ID NO: 2533458 - RNA, 19 nt, Artificial Sequence
  Description of Artificial Sequence: Synthetic oligonucleotide
  Sense strand starting at position 211 of SEQ ID NO: 1888406
uuguaaucgggauaccacu

SEQ ID NO: 2533459 - RNA, 19 nt, Artificial Sequence
  Description of Artificial Sequence: Synthetic oligonucleotide
  Antisense strand to SEQ ID NO: 2533458
agugguaucccgauuacaa

SEQ ID NO: 2533460 - RNA, 19 nt, Artificial Sequence
  Description of Artificial Sequence: Synthetic oligonucleotide
  Sense strand starting at position 3579 of SEQ ID NO: 1888406
ggucuuagagcauaugauc

SEQ ID NO: 2533461 - RNA, 19 nt, Artificial Sequence
  Description of Artificial Sequence: Synthetic oligonucleotide
  Antisense strand to SEQ ID NO: 2533460
gaucauaugcucuaagacc

SEQ ID NO: 2533462 - RNA, 19 nt, Artificial Sequence
  Description of Artificial Sequence: Synthetic oligonucleotide
  Sense strand starting at position 3237 of SEQ ID NO: 1888406
auguauuagggccauugau

SEQ ID NO: 2533463 - RNA, 19 nt, Artificial Sequence
  Description of Artificial Sequence: Synthetic oligonucleotide
  Antisense strand to SEQ ID NO: 2533462
aucaauggcccuaauacau

SEQ ID NO: 2533464 - RNA, 19 nt, Artificial Sequence
  Description of Artificial Sequence: Synthetic oligonucleotide
  Sense strand starting at position 3930 of SEQ ID NO: 1888406
ccuucucuccuuggaaaga

SEQ ID NO: 2533465 - RNA, 19 nt, Artificial Sequence
  Description of Artificial Sequence: Synthetic oligonucleotide
  Antisense strand to SEQ ID NO: 2533464
ucuuuccaaggagagaagg

SEQ ID NO: 2533466 - RNA, 19 nt, Artificial Sequence
  Description of Artificial Sequence: Synthetic oligonucleotide
  Sense strand starting at position 3255 of SEQ ID NO: 1888406
uaaagaggcuaugugacau

SEQ ID NO: 2533467 - RNA, 19 nt, Artificial Sequence
  Description of Artificial Sequence: Synthetic oligonucleotide
  Antisense strand to SEQ ID NO: 2533466
augucacauagccucuuua

SEQ ID NO: 2533468 - RNA, 19 nt, Artificial Sequence
  Description of Artificial Sequence: Synthetic oligonucleotide
  Sense strand starting at position 3023 of SEQ ID NO: 1888406
cgugauauaacuuaaguug

SEQ ID NO: 2533469 - RNA, 19 nt, Artificial Sequence
  Description of Artificial Sequence: Synthetic oligonucleotide
  Antisense strand to SEQ ID NO: 2533468
caacuuaaguuauaucacg

SEQ ID NO: 2533470 - RNA, 19 nt, Artificial Sequence
  Description of Artificial Sequence: Synthetic oligonucleotide
  Sense strand starting at position 3261 of SEQ ID NO: 1888406
ggcuaugugacauauaagu

SEQ ID NO: 2533471 - RNA, 19 nt, Artificial Sequence
  Description of Artificial Sequence: Synthetic oligonucleotide
  Antisense strand to SEQ ID NO: 2533470
acuuauaugucacauagcc

SEQ ID NO: 2533472 - RNA, 19 nt, Artificial Sequence
  Description of Artificial Sequence: Synthetic oligonucleotide
  Sense strand starting at position 3385 of SEQ ID NO: 1888406
uagggugaguauuccuaag

SEQ ID NO: 2533473 - RNA, 19 nt, Artificial Sequence
  Description of Artificial Sequence: Synthetic oligonucleotide
  Antisense strand to SEQ ID NO: 2533472
cuuaggaauacucacccua

SEQ ID NO: 2533474 - RNA, 19 nt, Artificial Sequence
  Description of Artificial Sequence: Synthetic oligonucleotide
  Sense strand starting at position 2782 of SEQ ID NO: 1888406
ggaguuagaagccaagcuu

SEQ ID NO: 2533475 - RNA, 19 nt, Artificial Sequence
  Description of Artificial Sequence: Synthetic oligonucleotide
  Antisense strand to SEQ ID NO: 2533474
aagcuuggcuucuaacucc

SEQ ID NO: 2533476 - RNA, 19 nt, Artificial Sequence
  Description of Artificial Sequence: Synthetic oligonucleotide
  Sense strand starting at position 209 of SEQ ID NO: 1888406
uguuguaaucgggauacca

SEQ ID NO: 2533477 - RNA, 19 nt, Artificial Sequence
  Description of Artificial Sequence: Synthetic oligonucleotide
  Antisense strand to SEQ ID NO: 2533476
ugguaucccgauuacaaca

SEQ ID NO: 2533478 - RNA, 19 nt, Artificial Sequence
  Description of Artificial Sequence: Synthetic oligonucleotide
  Sense strand starting at position 520 of SEQ ID NO: 1888406
ccucuuuagcaaugagaca

SEQ ID NO: 2533479 - RNA, 19 nt, Artificial Sequence
  Description of Artificial Sequence: Synthetic oligonucleotide
  Antisense strand to SEQ ID NO: 2533478
ugucucauugcuaaagagg

SEQ ID NO: 2533480 - RNA, 19 nt, Artificial Sequence
  Description of Artificial Sequence: Synthetic oligonucleotide
  Sense strand starting at position 3416 of SEQ ID NO: 1888406
agagggaugguuuggguuu

SEQ ID NO: 2533481 - RNA, 19 nt, Artificial Sequence
  Description of Artificial Sequence: Synthetic oligonucleotide
  Antisense strand to SEQ ID NO: 2533480
aaacccaaaccaucccucu

SEQ ID NO: 2533482 - RNA, 19 nt, Artificial Sequence
  Description of Artificial Sequence: Synthetic oligonucleotide
  Sense strand starting at position 3061 of SEQ ID NO: 1888406
auaguuauuccagagcccu

SEQ ID NO: 2533483 - RNA, 19 nt, Artificial Sequence
  Description of Artificial Sequence: Synthetic oligonucleotide
  Antisense strand to SEQ ID NO: 2533482
agggcucuggaauaacuau

SEQ ID NO: 2533484 - RNA, 19 nt, Artificial Sequence
  Description of Artificial Sequence: Synthetic oligonucleotide
  Sense strand starting at position 3379 of SEQ ID NO: 1888406
ucagucuagggugaguauu

SEQ ID NO: 2533485 - RNA, 19 nt, Artificial Sequence
  Description of Artificial Sequence: Synthetic oligonucleotide
  Antisense strand to SEQ ID NO: 2533484
aauacucacccuagacuga

SEQ ID NO: 2533486 - RNA, 19 nt, Artificial Sequence
  Description of Artificial Sequence: Synthetic oligonucleotide
  Sense strand starting at position 110 of SEQ ID NO: 1888406
agaucacugugcuugggaa

SEQ ID NO: 2533487 - RNA, 19 nt, Artificial Sequence
  Description of Artificial Sequence: Synthetic oligonucleotide
  Antisense strand to SEQ ID NO: 2533486
uucccaagcacagugaucu

SEQ ID NO: 2533488 - RNA, 19 nt, Artificial Sequence
  Description of Artificial Sequence: Synthetic oligonucleotide
  Sense strand starting at position 2592 of SEQ ID NO: 1888406
cagaaaugcguugaguaau

SEQ ID NO: 2533489 - RNA, 19 nt, Artificial Sequence
  Description of Artificial Sequence: Synthetic oligonucleotide
  Antisense strand to SEQ ID NO: 2533488
auuacucaacgcauuucug

SEQ ID NO: 2533490 - RNA, 19 nt, Artificial Sequence
  Description of Artificial Sequence: Synthetic oligonucleotide
  Sense strand starting at position 3014 of SEQ ID NO: 1888406
gcuggaucccgugauauaa

SEQ ID NO: 2533491 - RNA, 19 nt, Artificial Sequence
  Description of Artificial Sequence: Synthetic oligonucleotide
  Antisense strand to SEQ ID NO: 2533490
uuauaucacgggauccagc

SEQ ID NO: 2533492 - RNA, 19 nt, Artificial Sequence
  Description of Artificial Sequence: Synthetic oligonucleotide
  Sense strand starting at position 2548 of SEQ ID NO: 1888406
cggacugucuaauuaauac

SEQ ID NO: 2533493 - RNA, 19 nt, Artificial Sequence
  Description of Artificial Sequence: Synthetic oligonucleotide
  Antisense strand to SEQ ID NO: 2533492
guauuaauuagacaguccg

SEQ ID NO: 2533494 - RNA, 19 nt, Artificial Sequence
  Description of Artificial Sequence: Synthetic oligonucleotide
  Sense strand starting at position 579 of SEQ ID NO: 1888406
guaugaacacgaggugauu

SEQ ID NO: 2533495 - RNA, 19 nt, Artificial Sequence
  Description of Artificial Sequence: Synthetic oligonucleotide
  Antisense strand to SEQ ID NO: 2533494
aaucaccucguguucauac

SEQ ID NO: 2533496 - RNA, 19 nt, Artificial Sequence
  Description of Artificial Sequence: Synthetic oligonucleotide
  Sense strand starting at position 1775 of SEQ ID NO: 1888406
ugacgaggcucaucugaua

SEQ ID NO: 2533497 - RNA, 19 nt, Artificial Sequence
  Description of Artificial Sequence: Synthetic oligonucleotide
  Antisense strand to SEQ ID NO: 2533496
uaucagaugagccucguca

SEQ ID NO: 2533498 - RNA, 19 nt, Artificial Sequence
  Description of Artificial Sequence: Synthetic oligonucleotide
  Sense strand starting at position 112 of SEQ ID NO: 1888406
aucacugugcuugggaaca

SEQ ID NO: 2533499 - RNA, 19 nt, Artificial Sequence
  Description of Artificial Sequence: Synthetic oligonucleotide
  Antisense strand to SEQ ID NO: 2533498
uguucccaagcacagugau

SEQ ID NO: 2533500 - RNA, 19 nt, Artificial Sequence
  Description of Artificial Sequence: Synthetic oligonucleotide
  Sense strand starting at position 2188 of SEQ ID NO: 1888406
augcgagagcuuuggagaa

SEQ ID NO: 2533501 - RNA, 19 nt, Artificial Sequence
  Description of Artificial Sequence: Synthetic oligonucleotide
  Antisense strand to SEQ ID NO: 2533500
uucuccaaagcucucgcau

SEQ ID NO: 2533502 - RNA, 19 nt, Artificial Sequence
  Description of Artificial Sequence: Synthetic oligonucleotide
  Sense strand starting at position 3928 of SEQ ID NO: 1888406
ggccuucucuccuuggaaa

SEQ ID NO: 2533503 - RNA, 19 nt, Artificial Sequence
  Description of Artificial Sequence: Synthetic oligonucleotide
  Antisense strand to SEQ ID NO: 2533502
uuuccaaggagagaaggcc

SEQ ID NO: 2533504 - RNA, 19 nt, Artificial Sequence
  Description of Artificial Sequence: Synthetic oligonucleotide
  Sense strand starting at position 2676 of SEQ ID NO: 1888406
uccaucgauuucuacagaa

SEQ ID NO: 2533505 - RNA, 19 nt, Artificial Sequence
  Description of Artificial Sequence: Synthetic oligonucleotide
  Antisense strand to SEQ ID NO: 2533504
uucuguagaaaucgaugga

SEQ ID NO: 2533506 - RNA, 19 nt, Artificial Sequence
  Description of Artificial Sequence: Synthetic oligonucleotide
  Sense strand starting at position 3496 of SEQ ID NO: 1888406
agagcugucuugucagaaa

SEQ ID NO: 2533507 - RNA, 19 nt, Artificial Sequence
  Description of Artificial Sequence: Synthetic oligonucleotide
  Antisense strand to SEQ ID NO: 2533506
uuucugacaagacagcucu

SEQ ID NO: 2533508 - RNA, 19 nt, Artificial Sequence
  Description of Artificial Sequence: Synthetic oligonucleotide
  Sense strand starting at position 3929 of SEQ ID NO: 1888406
gccuucucuccuuggaaag

SEQ ID NO: 2533509 - RNA, 19 nt, Artificial Sequence
  Description of Artificial Sequence: Synthetic oligonucleotide
  Antisense strand to SEQ ID NO: 2533508
cuuuccaaggagagaaggc

SEQ ID NO: 2533510 - RNA, 19 nt, Artificial Sequence
  Description of Artificial Sequence: Synthetic oligonucleotide
  Sense strand starting at position 3056 of SEQ ID NO: 1888406
ucugcauaguuauuccaga

SEQ ID NO: 2533511 - RNA, 19 nt, Artificial Sequence
  Description of Artificial Sequence: Synthetic oligonucleotide
  Antisense strand to SEQ ID NO: 2533510
ucuggaauaacuaugcaga

SEQ ID NO: 2533512 - RNA, 19 nt, Artificial Sequence
  Description of Artificial Sequence: Synthetic oligonucleotide
  Sense strand starting at position 3643 of SEQ ID NO: 1888406
uuacuuuccagguguugga

SEQ ID NO: 2533513 - RNA, 19 nt, Artificial Sequence
  Description of Artificial Sequence: Synthetic oligonucleotide
  Antisense strand to SEQ ID NO: 2533512
uccaacaccuggaaaguaa

SEQ ID NO: 2533514 - RNA, 19 nt, Artificial Sequence
  Description of Artificial Sequence: Synthetic oligonucleotide
  Sense strand starting at position 2560 of SEQ ID NO: 1888406
uuaauacucguuuagccau

SEQ ID NO: 2533515 - RNA, 19 nt, Artificial Sequence
  Description of Artificial Sequence: Synthetic oligonucleotide
  Antisense strand to SEQ ID NO: 2533514
auggcuaaacgaguauuaa

SEQ ID NO: 2533516 - RNA, 19 nt, Artificial Sequence
  Description of Artificial Sequence: Synthetic oligonucleotide
  Sense strand starting at position 3378 of SEQ ID NO: 1888406
cucagucuagggugaguau

SEQ ID NO: 2533517 - RNA, 19 nt, Artificial Sequence
  Description of Artificial Sequence: Synthetic oligonucleotide
  Antisense strand to SEQ ID NO: 2533516
auacucacccuagacugag

SEQ ID NO: 2533518 - RNA, 19 nt, Artificial Sequence
  Description of Artificial Sequence: Synthetic oligonucleotide
  Sense strand starting at position 3363 of SEQ ID NO: 1888406
acaagaaacgcgugacuca

SEQ ID NO: 2533519 - RNA, 19 nt, Artificial Sequence
  Description of Artificial Sequence: Synthetic oligonucleotide
  Antisense strand to SEQ ID NO: 2533518
ugagucacgcguuucuugu

SEQ ID NO: 2533520 - RNA, 19 nt, Artificial Sequence
  Description of Artificial Sequence: Synthetic oligonucleotide
  Sense strand starting at position 2600 of SEQ ID NO: 1888406
cguugaguaaugcaagcaa

SEQ ID NO: 2533521 - RNA, 19 nt, Artificial Sequence
  Description of Artificial Sequence: Synthetic oligonucleotide
  Antisense strand to SEQ ID NO: 2533520
uugcuugcauuacucaacg

SEQ ID NO: 2533522 - RNA, 19 nt, Artificial Sequence
  Description of Artificial Sequence: Synthetic oligonucleotide
  Sense strand starting at position 2595 of SEQ ID NO: 1888406
aaaugcguugaguaaugca

SEQ ID NO: 2533523 - RNA, 19 nt, Artificial Sequence
  Description of Artificial Sequence: Synthetic oligonucleotide
  Antisense strand to SEQ ID NO: 2533522
ugcauuacucaacgcauuu

SEQ ID NO: 2533524 - RNA, 19 nt, Artificial Sequence
  Description of Artificial Sequence: Synthetic oligonucleotide
  Sense strand starting at position 2378 of SEQ ID NO: 1888406
gucccuaaugcaggucaga

SEQ ID NO: 2533525 - RNA, 19 nt, Artificial Sequence
  Description of Artificial Sequence: Synthetic oligonucleotide
  Antisense strand to SEQ ID NO: 2533524
ucugaccugcauuagggac

SEQ ID NO: 2533526 - RNA, 19 nt, Artificial Sequence
  Description of Artificial Sequence: Synthetic oligonucleotide
  Sense strand starting at position 3387 of SEQ ID NO: 1888406
gggugaguauuccuaagcu

SEQ ID NO: 2533527 - RNA, 19 nt, Artificial Sequence
  Description of Artificial Sequence: Synthetic oligonucleotide
  Antisense strand to SEQ ID NO: 2533526
agcuuaggaauacucaccc

SEQ ID NO: 2533528 - RNA, 19 nt, Artificial Sequence
  Description of Artificial Sequence: Synthetic oligonucleotide
  Sense strand starting at position 2563 of SEQ ID NO: 1888406
auacucguuuagccauaga

SEQ ID NO: 2533529 - RNA, 19 nt, Artificial Sequence
  Description of Artificial Sequence: Synthetic oligonucleotide
  Antisense strand to SEQ ID NO: 2533528
ucuauggcuaaacgaguau

SEQ ID NO: 2533530 - RNA, 19 nt, Artificial Sequence
  Description of Artificial Sequence: Synthetic oligonucleotide
  Sense strand starting at position 2848 of SEQ ID NO: 1888406
uuauuccuguguucccaau

SEQ ID NO: 2533531 - RNA, 19 nt, Artificial Sequence
  Description of Artificial Sequence: Synthetic oligonucleotide
  Antisense strand to SEQ ID NO: 2533530
auugggaacacaggaauaa

SEQ ID NO: 2533532 - RNA, 19 nt, Artificial Sequence
  Description of Artificial Sequence: Synthetic oligonucleotide
  Sense strand starting at position 30 of SEQ ID NO: 1888408
gcauauuuguuacuaaggu

SEQ ID NO: 2533533 - RNA, 19 nt, Artificial Sequence
  Description of Artificial Sequence: Synthetic oligonucleotide
  Antisense strand to SEQ ID NO: 2533532
accuuaguaacaaauaugc

SEQ ID NO: 2533534 - RNA, 19 nt, Artificial Sequence
  Description of Artificial Sequence: Synthetic oligonucleotide
  Sense strand starting at position 26 of SEQ ID NO: 1888408
augugcauauuuguuacua

SEQ ID NO: 2533535 - RNA, 19 nt, Artificial Sequence
  Description of Artificial Sequence: Synthetic oligonucleotide
  Antisense strand to SEQ ID NO: 2533534
uaguaacaaauaugcacau

SEQ ID NO: 2533536 - RNA, 19 nt, Artificial Sequence
  Description of Artificial Sequence: Synthetic oligonucleotide
  Sense strand starting at position 27 of SEQ ID NO: 1888408
ugugcauauuuguuacuaa

SEQ ID NO: 2533537 - RNA, 19 nt, Artificial Sequence
  Description of Artificial Sequence: Synthetic oligonucleotide
  Antisense strand to SEQ ID NO: 2533536
uuaguaacaaauaugcaca

SEQ ID NO: 2533538 - RNA, 19 nt, Artificial Sequence
  Description of Artificial Sequence: Synthetic oligonucleotide
  Sense strand starting at position 239 of SEQ ID NO: 1888408
uuuccuggauuagauuuaa

SEQ ID NO: 2533539 - RNA, 19 nt, Artificial Sequence
  Description of Artificial Sequence: Synthetic oligonucleotide
  Antisense strand to SEQ ID NO: 2533538
uuaaaucuaauccaggaaa

SEQ ID NO: 2533540 - RNA, 19 nt, Artificial Sequence
  Description of Artificial Sequence: Synthetic oligonucleotide
  Sense strand starting at position 28 of SEQ ID NO: 1888408
gugcauauuuguuacuaag

SEQ ID NO: 2533541 - RNA, 19 nt, Artificial Sequence
  Description of Artificial Sequence: Synthetic oligonucleotide
  Antisense strand to SEQ ID NO: 2533540
cuuaguaacaaauaugcac

SEQ ID NO: 2533542 - RNA, 19 nt, Artificial Sequence
  Description of Artificial Sequence: Synthetic oligonucleotide
  Sense strand starting at position 130 of SEQ ID NO: 1888408
aacgcucugucucccgaaa

SEQ ID NO: 2533543 - RNA, 19 nt, Artificial Sequence
  Description of Artificial Sequence: Synthetic oligonucleotide
  Antisense strand to SEQ ID NO: 2533542
uuucgggagacagagcguu

SEQ ID NO: 2533544 - RNA, 19 nt, Artificial Sequence
  Description of Artificial Sequence: Synthetic oligonucleotide
  Sense strand starting at position 177 of SEQ ID NO: 1888408
gcguccaugugaucccauu

SEQ ID NO: 2533545 - RNA, 19 nt, Artificial Sequence
  Description of Artificial Sequence: Synthetic oligonucleotide
  Antisense strand to SEQ ID NO: 2533544
aaugggaucacauggacgc

SEQ ID NO: 2533546 - RNA, 19 nt, Artificial Sequence
  Description of Artificial Sequence: Synthetic oligonucleotide
  Sense strand starting at position 30 of SEQ ID NO: 1888410
gcauauuuguuacuaaggu

SEQ ID NO: 2533547 - RNA, 19 nt, Artificial Sequence
  Description of Artificial Sequence: Synthetic oligonucleotide
  Antisense strand to SEQ ID NO: 2533546
accuuaguaacaaauaugc

SEQ ID NO: 2533548 - RNA, 19 nt, Artificial Sequence
  Description of Artificial Sequence: Synthetic oligonucleotide
  Sense strand starting at position 26 of SEQ ID NO: 1888410
augugcauauuuguuacua

SEQ ID NO: 2533549 - RNA, 19 nt, Artificial Sequence
  Description of Artificial Sequence: Synthetic oligonucleotide
  Antisense strand to SEQ ID NO: 2533548
uaguaacaaauaugcacau

SEQ ID NO: 2533550 - RNA, 19 nt, Artificial Sequence
  Description of Artificial Sequence: Synthetic oligonucleotide
  Sense strand starting at position 27 of SEQ ID NO: 1888410
ugugcauauuuguuacuaa

SEQ ID NO: 2533551 - RNA, 19 nt, Artificial Sequence
  Description of Artificial Sequence: Synthetic oligonucleotide
  Antisense strand to SEQ ID NO: 2533550
uuaguaacaaauaugcaca

SEQ ID NO: 2533552 - RNA, 19 nt, Artificial Sequence
  Description of Artificial Sequence: Synthetic oligonucleotide
  Sense strand starting at position 239 of SEQ ID NO: 1888410
uuuccuggauuagauuuaa

SEQ ID NO: 2533553 - RNA, 19 nt, Artificial Sequence
  Description of Artificial Sequence: Synthetic oligonucleotide
  Antisense strand to SEQ ID NO: 2533552
uuaaaucuaauccaggaaa

SEQ ID NO: 2533554 - RNA, 19 nt, Artificial Sequence
  Description of Artificial Sequence: Synthetic oligonucleotide
  Sense strand starting at position 28 of SEQ ID NO: 1888410
gugcauauuuguuacuaag

SEQ ID NO: 2533555 - RNA, 19 nt, Artificial Sequence
  Description of Artificial Sequence: Synthetic oligonucleotide
  Antisense strand to SEQ ID NO: 2533554
cuuaguaacaaauaugcac

SEQ ID NO: 2533556 - RNA, 19 nt, Artificial Sequence
  Description of Artificial Sequence: Synthetic oligonucleotide
  Sense strand starting at position 130 of SEQ ID NO: 1888410
aacgcucugucucccgaaa

SEQ ID NO: 2533557 - RNA, 19 nt, Artificial Sequence
  Description of Artificial Sequence: Synthetic oligonucleotide
  Antisense strand to SEQ ID NO: 2533556
uuucgggagacagagcguu

SEQ ID NO: 2533558 - RNA, 19 nt, Artificial Sequence
  Description of Artificial Sequence: Synthetic oligonucleotide
  Sense strand starting at position 177 of SEQ ID NO: 1888410
gcguccaugugaucccauu

SEQ ID NO: 2533559 - RNA, 19 nt, Artificial Sequence
  Description of Artificial Sequence: Synthetic oligonucleotide
  Antisense strand to SEQ ID NO: 2533558
aaugggaucacauggacgc

SEQ ID NO: 2533560 - RNA, 19 nt, Artificial Sequence
  Description of Artificial Sequence: Synthetic oligonucleotide
  Sense strand starting at position 359 of SEQ ID NO: 1888412
uuucguucuguuucuaagu

SEQ ID NO: 2533561 - RNA, 19 nt, Artificial Sequence
  Description of Artificial Sequence: Synthetic oligonucleotide
  Antisense strand to SEQ ID NO: 2533560
acuuagaaacagaacgaaa

SEQ ID NO: 2533562 - RNA, 19 nt, Artificial Sequence
  Description of Artificial Sequence: Synthetic oligonucleotide
  Sense strand starting at position 357 of SEQ ID NO: 1888412
uguuucguucuguuucuaa

SEQ ID NO: 2533563 - RNA, 19 nt, Artificial Sequence
  Description of Artificial Sequence: Synthetic oligonucleotide
  Antisense strand to SEQ ID NO: 2533562
uuagaaacagaacgaaaca

SEQ ID NO: 2533564 - RNA, 19 nt, Artificial Sequence
  Description of Artificial Sequence: Synthetic oligonucleotide
  Sense strand starting at position 332 of SEQ ID NO: 1888412
uugcuauugcuuucugguu

SEQ ID NO: 2533565 - RNA, 19 nt, Artificial Sequence
  Description of Artificial Sequence: Synthetic oligonucleotide
  Antisense strand to SEQ ID NO: 2533564
aaccagaaagcaauagcaa

SEQ ID NO: 2533566 - RNA, 19 nt, Artificial Sequence
  Description of Artificial Sequence: Synthetic oligonucleotide
  Sense strand starting at position 401 of SEQ ID NO: 1888412
gcauauuuguuacuaaggu

SEQ ID NO: 2533567 - RNA, 19 nt, Artificial Sequence
  Description of Artificial Sequence: Synthetic oligonucleotide
  Antisense strand to SEQ ID NO: 2533566
accuuaguaacaaauaugc

SEQ ID NO: 2533568 - RNA, 19 nt, Artificial Sequence
  Description of Artificial Sequence: Synthetic oligonucleotide
  Sense strand starting at position 70 of SEQ ID NO: 1888412
uuguuauuaaugggaggac

SEQ ID NO: 2533569 - RNA, 19 nt, Artificial Sequence
  Description of Artificial Sequence: Synthetic oligonucleotide
  Antisense strand to SEQ ID NO: 2533568
guccucccauuaauaacaa

SEQ ID NO: 2533570 - RNA, 19 nt, Artificial Sequence
  Description of Artificial Sequence: Synthetic oligonucleotide
  Sense strand starting at position 397 of SEQ ID NO: 1888412
augugcauauuuguuacua

SEQ ID NO: 2533571 - RNA, 19 nt, Artificial Sequence
  Description of Artificial Sequence: Synthetic oligonucleotide
  Antisense strand to SEQ ID NO: 2533570
uaguaacaaauaugcacau

SEQ ID NO: 2533572 - RNA, 19 nt, Artificial Sequence
  Description of Artificial Sequence: Synthetic oligonucleotide
  Sense strand starting at position 398 of SEQ ID NO: 1888412
ugugcauauuuguuacuaa

SEQ ID NO: 2533573 - RNA, 19 nt, Artificial Sequence
  Description of Artificial Sequence: Synthetic oligonucleotide
  Antisense strand to SEQ ID NO: 2533572
uuaguaacaaauaugcaca

SEQ ID NO: 2533574 - RNA, 19 nt, Artificial Sequence
  Description of Artificial Sequence: Synthetic oligonucleotide
  Sense strand starting at position 610 of SEQ ID NO: 1888412
uuuccuggauuagauuuaa

SEQ ID NO: 2533575 - RNA, 19 nt, Artificial Sequence
  Description of Artificial Sequence: Synthetic oligonucleotide
  Antisense strand to SEQ ID NO: 2533574
uuaaaucuaauccaggaaa

SEQ ID NO: 2533576 - RNA, 19 nt, Artificial Sequence
  Description of Artificial Sequence: Synthetic oligonucleotide
  Sense strand starting at position 61 of SEQ ID NO: 1888412
ggcuuuccauuguuauuaa

SEQ ID NO: 2533577 - RNA, 19 nt, Artificial Sequence
  Description of Artificial Sequence: Synthetic oligonucleotide
  Antisense strand to SEQ ID NO: 2533576
uuaauaacaauggaaagcc

SEQ ID NO: 2533578 - RNA, 19 nt, Artificial Sequence
  Description of Artificial Sequence: Synthetic oligonucleotide
  Sense strand starting at position 59 of SEQ ID NO: 1888412
agggcuuuccauuguuauu

SEQ ID NO: 2533579 - RNA, 19 nt, Artificial Sequence
  Description of Artificial Sequence: Synthetic oligonucleotide
  Antisense strand to SEQ ID NO: 2533578
aauaacaauggaaagcccu

SEQ ID NO: 2533580 - RNA, 19 nt, Artificial Sequence
  Description of Artificial Sequence: Synthetic oligonucleotide
  Sense strand starting at position 138 of SEQ ID NO: 1888412
uagcgucaccauugaauuc

SEQ ID NO: 2533581 - RNA, 19 nt, Artificial Sequence
  Description of Artificial Sequence: Synthetic oligonucleotide
  Antisense strand to SEQ ID NO: 2533580
gaauucaauggugacgcua

SEQ ID NO: 2533582 - RNA, 19 nt, Artificial Sequence
  Description of Artificial Sequence: Synthetic oligonucleotide
  Sense strand starting at position 120 of SEQ ID NO: 1888412
auguuaugucccgguagau

SEQ ID NO: 2533583 - RNA, 19 nt, Artificial Sequence
  Description of Artificial Sequence: Synthetic oligonucleotide
  Antisense strand to SEQ ID NO: 2533582
aucuaccgggacauaacau

SEQ ID NO: 2533584 - RNA, 19 nt, Artificial Sequence
  Description of Artificial Sequence: Synthetic oligonucleotide
  Sense strand starting at position 399 of SEQ ID NO: 1888412
gugcauauuuguuacuaag

SEQ ID NO: 2533585 - RNA, 19 nt, Artificial Sequence
  Description of Artificial Sequence: Synthetic oligonucleotide
  Antisense strand to SEQ ID NO: 2533584
cuuaguaacaaauaugcac

SEQ ID NO: 2533586 - RNA, 19 nt, Artificial Sequence
  Description of Artificial Sequence: Synthetic oligonucleotide
  Sense strand starting at position 501 of SEQ ID NO: 1888412
aacgcucugucucccgaaa

SEQ ID NO: 2533587 - RNA, 19 nt, Artificial Sequence
  Description of Artificial Sequence: Synthetic oligonucleotide
  Antisense strand to SEQ ID NO: 2533586
uuucgggagacagagcguu

SEQ ID NO: 2533588 - RNA, 19 nt, Artificial Sequence
  Description of Artificial Sequence: Synthetic oligonucleotide
  Sense strand starting at position 548 of SEQ ID NO: 1888412
gcguccaugugaucccauu

SEQ ID NO: 2533589 - RNA, 19 nt, Artificial Sequence
  Description of Artificial Sequence: Synthetic oligonucleotide
  Antisense strand to SEQ ID NO: 2533588
aaugggaucacauggacgc

SEQ ID NO: 2533590 - RNA, 19 nt, Artificial Sequence
  Description of Artificial Sequence: Synthetic oligonucleotide
  Sense strand starting at position 360 of SEQ ID NO: 1888412
uucguucuguuucuaaguu

SEQ ID NO: 2533591 - RNA, 19 nt, Artificial Sequence
  Description of Artificial Sequence: Synthetic oligonucleotide
  Antisense strand to SEQ ID NO: 2533590
aacuuagaaacagaacgaa

SEQ ID NO: 2533592 - RNA, 19 nt, Artificial Sequence
  Description of Artificial Sequence: Synthetic oligonucleotide
  Sense strand starting at position 356 of SEQ ID NO: 1888412
uuguuucguucuguuucua

SEQ ID NO: 2533593 - RNA, 19 nt, Artificial Sequence
  Description of Artificial Sequence: Synthetic oligonucleotide
  Antisense strand to SEQ ID NO: 2533592
uagaaacagaacgaaacaa

SEQ ID NO: 2533594 - RNA, 19 nt, Artificial Sequence
  Description of Artificial Sequence: Synthetic oligonucleotide
  Sense strand starting at position 109 of SEQ ID NO: 1888412
uuuggaaucuaauguuaug

SEQ ID NO: 2533595 - RNA, 19 nt, Artificial Sequence
  Description of Artificial Sequence: Synthetic oligonucleotide
  Antisense strand to SEQ ID NO: 2533594
cauaacauuagauuccaaa

SEQ ID NO: 2533596 - RNA, 19 nt, Artificial Sequence
  Description of Artificial Sequence: Synthetic oligonucleotide
  Sense strand starting at position 321 of SEQ ID NO: 1888412
ccgcuagcgguuugcuauu

SEQ ID NO: 2533597 - RNA, 19 nt, Artificial Sequence
  Description of Artificial Sequence: Synthetic oligonucleotide
  Antisense strand to SEQ ID NO: 2533596
aauagcaaaccgcuagcgg

SEQ ID NO: 2533598 - RNA, 19 nt, Artificial Sequence
  Description of Artificial Sequence: Synthetic oligonucleotide
  Sense strand starting at position 119 of SEQ ID NO: 1888412
aauguuaugucccgguaga

SEQ ID NO: 2533599 - RNA, 19 nt, Artificial Sequence
  Description of Artificial Sequence: Synthetic oligonucleotide
  Antisense strand to SEQ ID NO: 2533598
ucuaccgggacauaacauu

SEQ ID NO: 2533600 - RNA, 19 nt, Artificial Sequence
  Description of Artificial Sequence: Synthetic oligonucleotide
  Sense strand starting at position 359 of SEQ ID NO: 1888414
uuucguucuguuucuaagu

SEQ ID NO: 2533601 - RNA, 19 nt, Artificial Sequence
  Description of Artificial Sequence: Synthetic oligonucleotide
  Antisense strand to SEQ ID NO: 2533600
acuuagaaacagaacgaaa

SEQ ID NO: 2533602 - RNA, 19 nt, Artificial Sequence
  Description of Artificial Sequence: Synthetic oligonucleotide
  Sense strand starting at position 357 of SEQ ID NO: 1888414
uguuucguucuguuucuaa

SEQ ID NO: 2533603 - RNA, 19 nt, Artificial Sequence
  Description of Artificial Sequence: Synthetic oligonucleotide
  Antisense strand to SEQ ID NO: 2533602
uuagaaacagaacgaaaca

SEQ ID NO: 2533604 - RNA, 19 nt, Artificial Sequence
  Description of Artificial Sequence: Synthetic oligonucleotide
  Sense strand starting at position 332 of SEQ ID NO: 1888414
uugcuauugcuuucugguu

SEQ ID NO: 2533605 - RNA, 19 nt, Artificial Sequence
  Description of Artificial Sequence: Synthetic oligonucleotide
  Antisense strand to SEQ ID NO: 2533604
aaccagaaagcaauagcaa

SEQ ID NO: 2533606 - RNA, 19 nt, Artificial Sequence
  Description of Artificial Sequence: Synthetic oligonucleotide
  Sense strand starting at position 401 of SEQ ID NO: 1888414
gcauauuuguuacuaaggu

SEQ ID NO: 2533607 - RNA, 19 nt, Artificial Sequence
  Description of Artificial Sequence: Synthetic oligonucleotide
  Antisense strand to SEQ ID NO: 2533606
accuuaguaacaaauaugc

SEQ ID NO: 2533608 - RNA, 19 nt, Artificial Sequence
  Description of Artificial Sequence: Synthetic oligonucleotide
  Sense strand starting at position 70 of SEQ ID NO: 1888414
uuguuauuaaugggaggac

SEQ ID NO: 2533609 - RNA, 19 nt, Artificial Sequence
  Description of Artificial Sequence: Synthetic oligonucleotide
  Antisense strand to SEQ ID NO: 2533608
guccucccauuaauaacaa

SEQ ID NO: 2533610 - RNA, 19 nt, Artificial Sequence
  Description of Artificial Sequence: Synthetic oligonucleotide
  Sense strand starting at position 397 of SEQ ID NO: 1888414
augugcauauuuguuacua

SEQ ID NO: 2533611 - RNA, 19 nt, Artificial Sequence
  Description of Artificial Sequence: Synthetic oligonucleotide
  Antisense strand to SEQ ID NO: 2533610
uaguaacaaauaugcacau

SEQ ID NO: 2533612 - RNA, 19 nt, Artificial Sequence
  Description of Artificial Sequence: Synthetic oligonucleotide
  Sense strand starting at position 398 of SEQ ID NO: 1888414
ugugcauauuuguuacuaa

SEQ ID NO: 2533613 - RNA, 19 nt, Artificial Sequence
  Description of Artificial Sequence: Synthetic oligonucleotide
  Antisense strand to SEQ ID NO: 2533612
uuaguaacaaauaugcaca

SEQ ID NO: 2533614 - RNA, 19 nt, Artificial Sequence
  Description of Artificial Sequence: Synthetic oligonucleotide
  Sense strand starting at position 610 of SEQ ID NO: 1888414
uuuccuggauuagauuuaa

SEQ ID NO: 2533615 - RNA, 19 nt, Artificial Sequence
  Description of Artificial Sequence: Synthetic oligonucleotide
  Antisense strand to SEQ ID NO: 2533614
uuaaaucuaauccaggaaa

SEQ ID NO: 2533616 - RNA, 19 nt, Artificial Sequence
  Description of Artificial Sequence: Synthetic oligonucleotide
  Sense strand starting at position 61 of SEQ ID NO: 1888414
ggcuuuccauuguuauuaa

SEQ ID NO: 2533617 - RNA, 19 nt, Artificial Sequence
  Description of Artificial Sequence: Synthetic oligonucleotide
  Antisense strand to SEQ ID NO: 2533616
uuaauaacaauggaaagcc

SEQ ID NO: 2533618 - RNA, 19 nt, Artificial Sequence
  Description of Artificial Sequence: Synthetic oligonucleotide
  Sense strand starting at position 59 of SEQ ID NO: 1888414
agggcuuuccauuguuauu

SEQ ID NO: 2533619 - RNA, 19 nt, Artificial Sequence
  Description of Artificial Sequence: Synthetic oligonucleotide
  Antisense strand to SEQ ID NO: 2533618
aauaacaauggaaagcccu

SEQ ID NO: 2533620 - RNA, 19 nt, Artificial Sequence
  Description of Artificial Sequence: Synthetic oligonucleotide
  Sense strand starting at position 138 of SEQ ID NO: 1888414
uagcgucaccauugaauuc

SEQ ID NO: 2533621 - RNA, 19 nt, Artificial Sequence
  Description of Artificial Sequence: Synthetic oligonucleotide
  Antisense strand to SEQ ID NO: 2533620
gaauucaauggugacgcua

SEQ ID NO: 2533622 - RNA, 19 nt, Artificial Sequence
  Description of Artificial Sequence: Synthetic oligonucleotide
  Sense strand starting at position 120 of SEQ ID NO: 1888414
auguuaugucccgguagau

SEQ ID NO: 2533623 - RNA, 19 nt, Artificial Sequence
  Description of Artificial Sequence: Synthetic oligonucleotide
  Antisense strand to SEQ ID NO: 2533622
aucuaccgggacauaacau

SEQ ID NO: 2533624 - RNA, 19 nt, Artificial Sequence
  Description of Artificial Sequence: Synthetic oligonucleotide
  Sense strand starting at position 399 of SEQ ID NO: 1888414
gugcauauuuguuacuaag

SEQ ID NO: 2533625 - RNA, 19 nt, Artificial Sequence
  Description of Artificial Sequence: Synthetic oligonucleotide
  Antisense strand to SEQ ID NO: 2533624
cuuaguaacaaauaugcac

SEQ ID NO: 2533626 - RNA, 19 nt, Artificial Sequence
  Description of Artificial Sequence: Synthetic oligonucleotide
  Sense strand starting at position 501 of SEQ ID NO: 1888414
aacgcucugucucccgaaa

SEQ ID NO: 2533627 - RNA, 19 nt, Artificial Sequence
  Description of Artificial Sequence: Synthetic oligonucleotide
  Antisense strand to SEQ ID NO: 2533626
uuucgggagacagagcguu

SEQ ID NO: 2533628 - RNA, 19 nt, Artificial Sequence
  Description of Artificial Sequence: Synthetic oligonucleotide
  Sense strand starting at position 548 of SEQ ID NO: 1888414
gcguccaugugaucccauu

SEQ ID NO: 2533629 - RNA, 19 nt, Artificial Sequence
  Description of Artificial Sequence: Synthetic oligonucleotide
  Antisense strand to SEQ ID NO: 2533628
aaugggaucacauggacgc

SEQ ID NO: 2533630 - RNA, 19 nt, Artificial Sequence
  Description of Artificial Sequence: Synthetic oligonucleotide
  Sense strand starting at position 360 of SEQ ID NO: 1888414
uucguucuguuucuaaguu

SEQ ID NO: 2533631 - RNA, 19 nt, Artificial Sequence
  Description of Artificial Sequence: Synthetic oligonucleotide
  Antisense strand to SEQ ID NO: 2533630
aacuuagaaacagaacgaa

SEQ ID NO: 2533632 - RNA, 19 nt, Artificial Sequence
  Description of Artificial Sequence: Synthetic oligonucleotide
  Sense strand starting at position 356 of SEQ ID NO: 1888414
uuguuucguucuguuucua

SEQ ID NO: 2533633 - RNA, 19 nt, Artificial Sequence
  Description of Artificial Sequence: Synthetic oligonucleotide
  Antisense strand to SEQ ID NO: 2533632
uagaaacagaacgaaacaa

SEQ ID NO: 2533634 - RNA, 19 nt, Artificial Sequence
  Description of Artificial Sequence: Synthetic oligonucleotide
  Sense strand starting at position 109 of SEQ ID NO: 1888414
uuuggaaucuaauguuaug

SEQ ID NO: 2533635 - RNA, 19 nt, Artificial Sequence
  Description of Artificial Sequence: Synthetic oligonucleotide
  Antisense strand to SEQ ID NO: 2533634
cauaacauuagauuccaaa

SEQ ID NO: 2533636 - RNA, 19 nt, Artificial Sequence
  Description of Artificial Sequence: Synthetic oligonucleotide
  Sense strand starting at position 321 of SEQ ID NO: 1888414
ccgcuagcgguuugcuauu

SEQ ID NO: 2533637 - RNA, 19 nt, Artificial Sequence
  Description of Artificial Sequence: Synthetic oligonucleotide
  Antisense strand to SEQ ID NO: 2533636
aauagcaaaccgcuagcgg

SEQ ID NO: 2533638 - RNA, 19 nt, Artificial Sequence
  Description of Artificial Sequence: Synthetic oligonucleotide
  Sense strand starting at position 119 of SEQ ID NO: 1888414
aauguuaugucccgguaga

SEQ ID NO: 2533639 - RNA, 19 nt, Artificial Sequence
  Description of Artificial Sequence: Synthetic oligonucleotide
  Antisense strand to SEQ ID NO: 2533638
ucuaccgggacauaacauu

SEQ ID NO: 2533640 - RNA, 19 nt, Artificial Sequence
  Description of Artificial Sequence: Synthetic oligonucleotide
  Sense strand starting at position 3427 of SEQ ID NO: 1888415
guuaguagcagagaugaga

SEQ ID NO: 2533641 - RNA, 19 nt, Artificial Sequence
  Description of Artificial Sequence: Synthetic oligonucleotide
  Antisense strand to SEQ ID NO: 2533640
ucucaucucugcuacuaac

SEQ ID NO: 2533642 - RNA, 19 nt, Artificial Sequence
  Description of Artificial Sequence: Synthetic oligonucleotide
  Sense strand starting at position 683 of SEQ ID NO: 1888415
uccuaauuggguuaacacu

SEQ ID NO: 2533643 - RNA, 19 nt, Artificial Sequence
  Description of Artificial Sequence: Synthetic oligonucleotide
  Antisense strand to SEQ ID NO: 2533642
aguguuaacccaauuagga

SEQ ID NO: 2533644 - RNA, 19 nt, Artificial Sequence
  Description of Artificial Sequence: Synthetic oligonucleotide
  Sense strand starting at position 1371 of SEQ ID NO: 1888415
aauauuaggcaguaguaga

SEQ ID NO: 2533645 - RNA, 19 nt, Artificial Sequence
  Description of Artificial Sequence: Synthetic oligonucleotide
  Antisense strand to SEQ ID NO: 2533644
ucuacuacugccuaauauu

SEQ ID NO: 2533646 - RNA, 19 nt, Artificial Sequence
  Description of Artificial Sequence: Synthetic oligonucleotide
  Sense strand starting at position 3074 of SEQ ID NO: 1888415
ccaggaaauugucuauaca

SEQ ID NO: 2533647 - RNA, 19 nt, Artificial Sequence
  Description of Artificial Sequence: Synthetic oligonucleotide
  Antisense strand to SEQ ID NO: 2533646
uguauagacaauuuccugg

SEQ ID NO: 2533648 - RNA, 19 nt, Artificial Sequence
  Description of Artificial Sequence: Synthetic oligonucleotide
  Sense strand starting at position 3968 of SEQ ID NO: 1888415
gucagaucuguggauacac

SEQ ID NO: 2533649 - RNA, 19 nt, Artificial Sequence
  Description of Artificial Sequence: Synthetic oligonucleotide
  Antisense strand to SEQ ID NO: 2533648
guguauccacagaucugac

SEQ ID NO: 2533650 - RNA, 19 nt, Artificial Sequence
  Description of Artificial Sequence: Synthetic oligonucleotide
  Sense strand starting at position 1799 of SEQ ID NO: 1888415
uugucuggucacuaaagag

SEQ ID NO: 2533651 - RNA, 19 nt, Artificial Sequence
  Description of Artificial Sequence: Synthetic oligonucleotide
  Antisense strand to SEQ ID NO: 2533650
cucuuuagugaccagacaa

SEQ ID NO: 2533652 - RNA, 19 nt, Artificial Sequence
  Description of Artificial Sequence: Synthetic oligonucleotide
  Sense strand starting at position 707 of SEQ ID NO: 1888415
uuaggaguuauuugugcac

SEQ ID NO: 2533653 - RNA, 19 nt, Artificial Sequence
  Description of Artificial Sequence: Synthetic oligonucleotide
  Antisense strand to SEQ ID NO: 2533652
gugcacaaauaacuccuaa

SEQ ID NO: 2533654 - RNA, 19 nt, Artificial Sequence
  Description of Artificial Sequence: Synthetic oligonucleotide
  Sense strand starting at position 3425 of SEQ ID NO: 1888415
uaguuaguagcagagauga

SEQ ID NO: 2533655 - RNA, 19 nt, Artificial Sequence
  Description of Artificial Sequence: Synthetic oligonucleotide
  Antisense strand to SEQ ID NO: 2533654
ucaucucugcuacuaacua

SEQ ID NO: 2533656 - RNA, 19 nt, Artificial Sequence
  Description of Artificial Sequence: Synthetic oligonucleotide
  Sense strand starting at position 104 of SEQ ID NO: 1888415
guaauccauguuuagauua

SEQ ID NO: 2533657 - RNA, 19 nt, Artificial Sequence
  Description of Artificial Sequence: Synthetic oligonucleotide
  Antisense strand to SEQ ID NO: 2533656
uaaucuaaacauggauuac

SEQ ID NO: 2533658 - RNA, 19 nt, Artificial Sequence
  Description of Artificial Sequence: Synthetic oligonucleotide
  Sense strand starting at position 716 of SEQ ID NO: 1888415
auuugugcacuuuguacaa

SEQ ID NO: 2533659 - RNA, 19 nt, Artificial Sequence
  Description of Artificial Sequence: Synthetic oligonucleotide
  Antisense strand to SEQ ID NO: 2533658
uuguacaaagugcacaaau

SEQ ID NO: 2533660 - RNA, 19 nt, Artificial Sequence
  Description of Artificial Sequence: Synthetic oligonucleotide
  Sense strand starting at position 3965 of SEQ ID NO: 1888415
aaagucagaucuguggaua

SEQ ID NO: 2533661 - RNA, 19 nt, Artificial Sequence
  Description of Artificial Sequence: Synthetic oligonucleotide
  Antisense strand to SEQ ID NO: 2533660
uauccacagaucugacuuu

SEQ ID NO: 2533662 - RNA, 19 nt, Artificial Sequence
  Description of Artificial Sequence: Synthetic oligonucleotide
  Sense strand starting at position 710 of SEQ ID NO: 1888415
ggaguuauuugugcacuuu

SEQ ID NO: 2533663 - RNA, 19 nt, Artificial Sequence
  Description of Artificial Sequence: Synthetic oligonucleotide
  Antisense strand to SEQ ID NO: 2533662
aaagugcacaaauaacucc

SEQ ID NO: 2533664 - RNA, 19 nt, Artificial Sequence
  Description of Artificial Sequence: Synthetic oligonucleotide
  Sense strand starting at position 681 of SEQ ID NO: 1888415
auuccuaauuggguuaaca

SEQ ID NO: 2533665 - RNA, 19 nt, Artificial Sequence
  Description of Artificial Sequence: Synthetic oligonucleotide
  Antisense strand to SEQ ID NO: 2533664
uguuaacccaauuaggaau

SEQ ID NO: 2533666 - RNA, 19 nt, Artificial Sequence
  Description of Artificial Sequence: Synthetic oligonucleotide
  Sense strand starting at position 3661 of SEQ ID NO: 1888415
gggcuucuggaacauguau

SEQ ID NO: 2533667 - RNA, 19 nt, Artificial Sequence
  Description of Artificial Sequence: Synthetic oligonucleotide
  Antisense strand to SEQ ID NO: 2533666
auacauguuccagaagccc

SEQ ID NO: 2533668 - RNA, 19 nt, Artificial Sequence
  Description of Artificial Sequence: Synthetic oligonucleotide
  Sense strand starting at position 1920 of SEQ ID NO: 1888415
ugaguaaaggcuugaugag

SEQ ID NO: 2533669 - RNA, 19 nt, Artificial Sequence
  Description of Artificial Sequence: Synthetic oligonucleotide
  Antisense strand to SEQ ID NO: 2533668
cucaucaagccuuuacuca

SEQ ID NO: 2533670 - RNA, 19 nt, Artificial Sequence
  Description of Artificial Sequence: Synthetic oligonucleotide
  Sense strand starting at position 3468 of SEQ ID NO: 1888415
auugucagacuuuaugcaa

SEQ ID NO: 2533671 - RNA, 19 nt, Artificial Sequence
  Description of Artificial Sequence: Synthetic oligonucleotide
  Antisense strand to SEQ ID NO: 2533670
uugcauaaagucugacaau

SEQ ID NO: 2533672 - RNA, 19 nt, Artificial Sequence
  Description of Artificial Sequence: Synthetic oligonucleotide
  Sense strand starting at position 1232 of SEQ ID NO: 1888415
ccacaaguagccuaugauc

SEQ ID NO: 2533673 - RNA, 19 nt, Artificial Sequence
  Description of Artificial Sequence: Synthetic oligonucleotide
  Antisense strand to SEQ ID NO: 2533672
gaucauaggcuacuugugg

SEQ ID NO: 2533674 - RNA, 19 nt, Artificial Sequence
  Description of Artificial Sequence: Synthetic oligonucleotide
  Sense strand starting at position 3688 of SEQ ID NO: 1888415
gcaauugcuggacauacau

SEQ ID NO: 2533675 - RNA, 19 nt, Artificial Sequence
  Description of Artificial Sequence: Synthetic oligonucleotide
  Antisense strand to SEQ ID NO: 2533674
auguauguccagcaauugc

SEQ ID NO: 2533676 - RNA, 19 nt, Artificial Sequence
  Description of Artificial Sequence: Synthetic oligonucleotide
  Sense strand starting at position 610 of SEQ ID NO: 1888415
ucccuaugucugggaauaa

SEQ ID NO: 2533677 - RNA, 19 nt, Artificial Sequence
  Description of Artificial Sequence: Synthetic oligonucleotide
  Antisense strand to SEQ ID NO: 2533676
uuauucccagacauaggga

SEQ ID NO: 2533678 - RNA, 19 nt, Artificial Sequence
  Description of Artificial Sequence: Synthetic oligonucleotide
  Sense strand starting at position 129 of SEQ ID NO: 1888415
ggaagaggcuucuuaucug

SEQ ID NO: 2533679 - RNA, 19 nt, Artificial Sequence
  Description of Artificial Sequence: Synthetic oligonucleotide
  Antisense strand to SEQ ID NO: 2533678
cagauaagaagccucuucc

SEQ ID NO: 2533680 - RNA, 19 nt, Artificial Sequence
  Description of Artificial Sequence: Synthetic oligonucleotide
  Sense strand starting at position 3966 of SEQ ID NO: 1888415
aagucagaucuguggauac

SEQ ID NO: 2533681 - RNA, 19 nt, Artificial Sequence
  Description of Artificial Sequence: Synthetic oligonucleotide
  Antisense strand to SEQ ID NO: 2533680
guauccacagaucugacuu

SEQ ID NO: 2533682 - RNA, 19 nt, Artificial Sequence
  Description of Artificial Sequence: Synthetic oligonucleotide
  Sense strand starting at position 1798 of SEQ ID NO: 1888415
auugucuggucacuaaaga

SEQ ID NO: 2533683 - RNA, 19 nt, Artificial Sequence
  Description of Artificial Sequence: Synthetic oligonucleotide
  Antisense strand to SEQ ID NO: 2533682
ucuuuagugaccagacaau

SEQ ID NO: 2533684 - RNA, 19 nt, Artificial Sequence
  Description of Artificial Sequence: Synthetic oligonucleotide
  Sense strand starting at position 96 of SEQ ID NO: 1888415
gaauauugguaauccaugu

SEQ ID NO: 2533685 - RNA, 19 nt, Artificial Sequence
  Description of Artificial Sequence: Synthetic oligonucleotide
  Antisense strand to SEQ ID NO: 2533684
acauggauuaccaauauuc

SEQ ID NO: 2533686 - RNA, 19 nt, Artificial Sequence
  Description of Artificial Sequence: Synthetic oligonucleotide
  Sense strand starting at position 874 of SEQ ID NO: 1888415
ggcaaaguauuaguauaga

SEQ ID NO: 2533687 - RNA, 19 nt, Artificial Sequence
  Description of Artificial Sequence: Synthetic oligonucleotide
  Antisense strand to SEQ ID NO: 2533686
ucuauacuaauacuuugcc

SEQ ID NO: 2533688 - RNA, 19 nt, Artificial Sequence
  Description of Artificial Sequence: Synthetic oligonucleotide
  Sense strand starting at position 3471 of SEQ ID NO: 1888415
gucagacuuuaugcaaaua

SEQ ID NO: 2533689 - RNA, 19 nt, Artificial Sequence
  Description of Artificial Sequence: Synthetic oligonucleotide
  Antisense strand to SEQ ID NO: 2533688
uauuugcauaaagucugac

SEQ ID NO: 2533690 - RNA, 19 nt, Artificial Sequence
  Description of Artificial Sequence: Synthetic oligonucleotide
  Sense strand starting at position 644 of SEQ ID NO: 1888415
gggaguaagucaguuccaa

SEQ ID NO: 2533691 - RNA, 19 nt, Artificial Sequence
  Description of Artificial Sequence: Synthetic oligonucleotide
  Antisense strand to SEQ ID NO: 2533690
uuggaacugacuuacuccc

SEQ ID NO: 2533692 - RNA, 19 nt, Artificial Sequence
  Description of Artificial Sequence: Synthetic oligonucleotide
  Sense strand starting at position 3290 of SEQ ID NO: 1888415
uucucagcacuguauuaca

SEQ ID NO: 2533693 - RNA, 19 nt, Artificial Sequence
  Description of Artificial Sequence: Synthetic oligonucleotide
  Antisense strand to SEQ ID NO: 2533692
uguaauacagugcugagaa

SEQ ID NO: 2533694 - RNA, 19 nt, Artificial Sequence
  Description of Artificial Sequence: Synthetic oligonucleotide
  Sense strand starting at position 1326 of SEQ ID NO: 1888415
auugcaauguuuccagaga

SEQ ID NO: 2533695 - RNA, 19 nt, Artificial Sequence
  Description of Artificial Sequence: Synthetic oligonucleotide
  Antisense strand to SEQ ID NO: 2533694
ucucuggaaacauugcaau

SEQ ID NO: 2533696 - RNA, 19 nt, Artificial Sequence
  Description of Artificial Sequence: Synthetic oligonucleotide
  Sense strand starting at position 1237 of SEQ ID NO: 1888415
aguagccuaugaucugaau

SEQ ID NO: 2533697 - RNA, 19 nt, Artificial Sequence
  Description of Artificial Sequence: Synthetic oligonucleotide
  Antisense strand to SEQ ID NO: 2533696
auucagaucauaggcuacu

SEQ ID NO: 2533698 - RNA, 19 nt, Artificial Sequence
  Description of Artificial Sequence: Synthetic oligonucleotide
  Sense strand starting at position 2123 of SEQ ID NO: 1888415
augacuuucguuugaaaua

SEQ ID NO: 2533699 - RNA, 19 nt, Artificial Sequence
  Description of Artificial Sequence: Synthetic oligonucleotide
  Antisense strand to SEQ ID NO: 2533698
uauuucaaacgaaagucau

SEQ ID NO: 2533700 - RNA, 19 nt, Artificial Sequence
  Description of Artificial Sequence: Synthetic oligonucleotide
  Sense strand starting at position 103 of SEQ ID NO: 1888415
gguaauccauguuuagauu

SEQ ID NO: 2533701 - RNA, 19 nt, Artificial Sequence
  Description of Artificial Sequence: Synthetic oligonucleotide
  Antisense strand to SEQ ID NO: 2533700
aaucuaaacauggauuacc

SEQ ID NO: 2533702 - RNA, 19 nt, Artificial Sequence
  Description of Artificial Sequence: Synthetic oligonucleotide
  Sense strand starting at position 3685 of SEQ ID NO: 1888415
gaugcaauugcuggacaua

SEQ ID NO: 2533703 - RNA, 19 nt, Artificial Sequence
  Description of Artificial Sequence: Synthetic oligonucleotide
  Antisense strand to SEQ ID NO: 2533702
uauguccagcaauugcauc

SEQ ID NO: 2533704 - RNA, 19 nt, Artificial Sequence
  Description of Artificial Sequence: Synthetic oligonucleotide
  Sense strand starting at position 100 of SEQ ID NO: 1888415
auugguaauccauguuuag

SEQ ID NO: 2533705 - RNA, 19 nt, Artificial Sequence
  Description of Artificial Sequence: Synthetic oligonucleotide
  Antisense strand to SEQ ID NO: 2533704
cuaaacauggauuaccaau

SEQ ID NO: 2533706 - RNA, 19 nt, Artificial Sequence
  Description of Artificial Sequence: Synthetic oligonucleotide
  Sense strand starting at position 1290 of SEQ ID NO: 1888415
aguaauguagcagaagcuu

SEQ ID NO: 2533707 - RNA, 19 nt, Artificial Sequence
  Description of Artificial Sequence: Synthetic oligonucleotide
  Antisense strand to SEQ ID NO: 2533706
aagcuucugcuacauuacu

SEQ ID NO: 2533708 - RNA, 19 nt, Artificial Sequence
  Description of Artificial Sequence: Synthetic oligonucleotide
  Sense strand starting at position 411 of SEQ ID NO: 1888415
gugcuuuaugaauggacac

SEQ ID NO: 2533709 - RNA, 19 nt, Artificial Sequence
  Description of Artificial Sequence: Synthetic oligonucleotide
  Antisense strand to SEQ ID NO: 2533708
guguccauucauaaagcac

SEQ ID NO: 2533710 - RNA, 19 nt, Artificial Sequence
  Description of Artificial Sequence: Synthetic oligonucleotide
  Sense strand starting at position 2696 of SEQ ID NO: 1888415
gcacacgauguguaaugau

SEQ ID NO: 2533711 - RNA, 19 nt, Artificial Sequence
  Description of Artificial Sequence: Synthetic oligonucleotide
  Antisense strand to SEQ ID NO: 2533710
aucauuacacaucgugugc

SEQ ID NO: 2533712 - RNA, 19 nt, Artificial Sequence
  Description of Artificial Sequence: Synthetic oligonucleotide
  Sense strand starting at position 2121 of SEQ ID NO: 1888415
ccaugacuuucguuugaaa

SEQ ID NO: 2533713 - RNA, 19 nt, Artificial Sequence
  Description of Artificial Sequence: Synthetic oligonucleotide
  Antisense strand to SEQ ID NO: 2533712
uuucaaacgaaagucaugg

SEQ ID NO: 2533714 - RNA, 19 nt, Artificial Sequence
  Description of Artificial Sequence: Synthetic oligonucleotide
  Sense strand starting at position 535 of SEQ ID NO: 1888415
cagguugauucugcucaaa

SEQ ID NO: 2533715 - RNA, 19 nt, Artificial Sequence
  Description of Artificial Sequence: Synthetic oligonucleotide
  Antisense strand to SEQ ID NO: 2533714
uuugagcagaaucaaccug

SEQ ID NO: 2533716 - RNA, 19 nt, Artificial Sequence
  Description of Artificial Sequence: Synthetic oligonucleotide
  Sense strand starting at position 3744 of SEQ ID NO: 1888415
uuggauucaggcuggcaga

SEQ ID NO: 2533717 - RNA, 19 nt, Artificial Sequence
  Description of Artificial Sequence: Synthetic oligonucleotide
  Antisense strand to SEQ ID NO: 2533716
ucugccagccugaauccaa

SEQ ID NO: 2533718 - RNA, 19 nt, Artificial Sequence
  Description of Artificial Sequence: Synthetic oligonucleotide
  Sense strand starting at position 3724 of SEQ ID NO: 1888415
gguaguuacgaucaaggcu

SEQ ID NO: 2533719 - RNA, 19 nt, Artificial Sequence
  Description of Artificial Sequence: Synthetic oligonucleotide
  Antisense strand to SEQ ID NO: 2533718
agccuugaucguaacuacc

SEQ ID NO: 2533720 - RNA, 19 nt, Artificial Sequence
  Description of Artificial Sequence: Synthetic oligonucleotide
  Sense strand starting at position 230 of SEQ ID NO: 1888416
agggaaaguuuaucauuau

SEQ ID NO: 2533721 - RNA, 19 nt, Artificial Sequence
  Description of Artificial Sequence: Synthetic oligonucleotide
  Antisense strand to SEQ ID NO: 2533720
auaaugauaaacuuucccu

SEQ ID NO: 2533722 - RNA, 19 nt, Artificial Sequence
  Description of Artificial Sequence: Synthetic oligonucleotide
  Sense strand starting at position 803 of SEQ ID NO: 1888416
cugcauuacggcuuuguua

SEQ ID NO: 2533723 - RNA, 19 nt, Artificial Sequence
  Description of Artificial Sequence: Synthetic oligonucleotide
  Antisense strand to SEQ ID NO: 2533722
uaacaaagccguaaugcag

SEQ ID NO: 2533724 - RNA, 19 nt, Artificial Sequence
  Description of Artificial Sequence: Synthetic oligonucleotide
  Sense strand starting at position 3255 of SEQ ID NO: 1888416
gucauccauccacaggauu

SEQ ID NO: 2533725 - RNA, 19 nt, Artificial Sequence
  Description of Artificial Sequence: Synthetic oligonucleotide
  Antisense strand to SEQ ID NO: 2533724
aauccuguggauggaugac

SEQ ID NO: 2533726 - RNA, 19 nt, Artificial Sequence
  Description of Artificial Sequence: Synthetic oligonucleotide
  Sense strand starting at position 1087 of SEQ ID NO: 1888416
gcaggauuuaugugggcau

SEQ ID NO: 2533727 - RNA, 19 nt, Artificial Sequence
  Description of Artificial Sequence: Synthetic oligonucleotide
  Antisense strand to SEQ ID NO: 2533726
augcccacauaaauccugc

SEQ ID NO: 2533728 - RNA, 19 nt, Artificial Sequence
  Description of Artificial Sequence: Synthetic oligonucleotide
  Sense strand starting at position 1770 of SEQ ID NO: 1888416
cuaauuuguuuguuguaag

SEQ ID NO: 2533729 - RNA, 19 nt, Artificial Sequence
  Description of Artificial Sequence: Synthetic oligonucleotide
  Antisense strand to SEQ ID NO: 2533728
cuuacaacaaacaaauuag

SEQ ID NO: 2533730 - RNA, 19 nt, Artificial Sequence
  Description of Artificial Sequence: Synthetic oligonucleotide
  Sense strand starting at position 2627 of SEQ ID NO: 1888416
ccaauagcaucacugagaa

SEQ ID NO: 2533731 - RNA, 19 nt, Artificial Sequence
  Description of Artificial Sequence: Synthetic oligonucleotide
  Antisense strand to SEQ ID NO: 2533730
uucucagugaugcuauugg

SEQ ID NO: 2533732 - RNA, 19 nt, Artificial Sequence
  Description of Artificial Sequence: Synthetic oligonucleotide
  Sense strand starting at position 265 of SEQ ID NO: 1888416
aaaguugcggcuuauauuu

SEQ ID NO: 2533733 - RNA, 19 nt, Artificial Sequence
  Description of Artificial Sequence: Synthetic oligonucleotide
  Antisense strand to SEQ ID NO: 2533732
aaauauaagccgcaacuuu

SEQ ID NO: 2533734 - RNA, 19 nt, Artificial Sequence
  Description of Artificial Sequence: Synthetic oligonucleotide
  Sense strand starting at position 177 of SEQ ID NO: 1888416
uguggucaagcacaagaaa

SEQ ID NO: 2533735 - RNA, 19 nt, Artificial Sequence
  Description of Artificial Sequence: Synthetic oligonucleotide
  Antisense strand to SEQ ID NO: 2533734
uuucuugugcuugaccaca

SEQ ID NO: 2533736 - RNA, 19 nt, Artificial Sequence
  Description of Artificial Sequence: Synthetic oligonucleotide
  Sense strand starting at position 1325 of SEQ ID NO: 1888416
agauguaccacugggaauu

SEQ ID NO: 2533737 - RNA, 19 nt, Artificial Sequence
  Description of Artificial Sequence: Synthetic oligonucleotide
  Antisense strand to SEQ ID NO: 2533736
aauucccagugguacaucu

SEQ ID NO: 2533738 - RNA, 19 nt, Artificial Sequence
  Description of Artificial Sequence: Synthetic oligonucleotide
  Sense strand starting at position 1326 of SEQ ID NO: 1888416
gauguaccacugggaauua

SEQ ID NO: 2533739 - RNA, 19 nt, Artificial Sequence
  Description of Artificial Sequence: Synthetic oligonucleotide
  Antisense strand to SEQ ID NO: 2533738
uaauucccagugguacauc

SEQ ID NO: 2533740 - RNA, 19 nt, Artificial Sequence
  Description of Artificial Sequence: Synthetic oligonucleotide
  Sense strand starting at position 3074 of SEQ ID NO: 1888416
uacucaggaggauguaauu

SEQ ID NO: 2533741 - RNA, 19 nt, Artificial Sequence
  Description of Artificial Sequence: Synthetic oligonucleotide
  Antisense strand to SEQ ID NO: 2533740
aauuacauccuccugagua

SEQ ID NO: 2533742 - RNA, 19 nt, Artificial Sequence
  Description of Artificial Sequence: Synthetic oligonucleotide
  Sense strand starting at position 2265 of SEQ ID NO: 1888416
ugguuugauaauuauggua

SEQ ID NO: 2533743 - RNA, 19 nt, Artificial Sequence
  Description of Artificial Sequence: Synthetic oligonucleotide
  Antisense strand to SEQ ID NO: 2533742
uaccauaauuaucaaacca

SEQ ID NO: 2533744 - RNA, 19 nt, Artificial Sequence
  Description of Artificial Sequence: Synthetic oligonucleotide
  Sense strand starting at position 1691 of SEQ ID NO: 1888416
auuucugucuuguucuuaa

SEQ ID NO: 2533745 - RNA, 19 nt, Artificial Sequence
  Description of Artificial Sequence: Synthetic oligonucleotide
  Antisense strand to SEQ ID NO: 2533744
uuaagaacaagacagaaau

SEQ ID NO: 2533746 - RNA, 19 nt, Artificial Sequence
  Description of Artificial Sequence: Synthetic oligonucleotide
  Sense strand starting at position 2128 of SEQ ID NO: 1888416
ggaauauauuggguagagu

SEQ ID NO: 2533747 - RNA, 19 nt, Artificial Sequence
  Description of Artificial Sequence: Synthetic oligonucleotide
  Antisense strand to SEQ ID NO: 2533746
acucuacccaauauauucc

SEQ ID NO: 2533748 - RNA, 19 nt, Artificial Sequence
  Description of Artificial Sequence: Synthetic oligonucleotide
  Sense strand starting at position 1769 of SEQ ID NO: 1888416
ccuaauuuguuuguuguaa

SEQ ID NO: 2533749 - RNA, 19 nt, Artificial Sequence
  Description of Artificial Sequence: Synthetic oligonucleotide
  Antisense strand to SEQ ID NO: 2533748
uuacaacaaacaaauuagg

SEQ ID NO: 2533750 - RNA, 19 nt, Artificial Sequence
  Description of Artificial Sequence: Synthetic oligonucleotide
  Sense strand starting at position 3266 of SEQ ID NO: 1888416
acaggauuaugggcuccaa

SEQ ID NO: 2533751 - RNA, 19 nt, Artificial Sequence
  Description of Artificial Sequence: Synthetic oligonucleotide
  Antisense strand to SEQ ID NO: 2533750
uuggagcccauaauccugu

SEQ ID NO: 2533752 - RNA, 19 nt, Artificial Sequence
  Description of Artificial Sequence: Synthetic oligonucleotide
  Sense strand starting at position 1658 of SEQ ID NO: 1888416
ccugucaaaggucaucaau

SEQ ID NO: 2533753 - RNA, 19 nt, Artificial Sequence
  Description of Artificial Sequence: Synthetic oligonucleotide
  Antisense strand to SEQ ID NO: 2533752
auugaugaccuuugacagg

SEQ ID NO: 2533754 - RNA, 19 nt, Artificial Sequence
  Description of Artificial Sequence: Synthetic oligonucleotide
  Sense strand starting at position 1768 of SEQ ID NO: 1888416
accuaauuuguuuguugua

SEQ ID NO: 2533755 - RNA, 19 nt, Artificial Sequence
  Description of Artificial Sequence: Synthetic oligonucleotide
  Antisense strand to SEQ ID NO: 2533754
uacaacaaacaaauuaggu

SEQ ID NO: 2533756 - RNA, 19 nt, Artificial Sequence
  Description of Artificial Sequence: Synthetic oligonucleotide
  Sense strand starting at position 3013 of SEQ ID NO: 1888416
augagacuugcucaaggca

SEQ ID NO: 2533757 - RNA, 19 nt, Artificial Sequence
  Description of Artificial Sequence: Synthetic oligonucleotide
  Antisense strand to SEQ ID NO: 2533756
ugccuugagcaagucucau

SEQ ID NO: 2533758 - RNA, 19 nt, Artificial Sequence
  Description of Artificial Sequence: Synthetic oligonucleotide
  Sense strand starting at position 98 of SEQ ID NO: 1888416
acuuauggcuuacuagaaa

SEQ ID NO: 2533759 - RNA, 19 nt, Artificial Sequence
  Description of Artificial Sequence: Synthetic oligonucleotide
  Antisense strand to SEQ ID NO: 2533758
uuucuaguaagccauaagu

SEQ ID NO: 2533760 - RNA, 19 nt, Artificial Sequence
  Description of Artificial Sequence: Synthetic oligonucleotide
  Sense strand starting at position 1889 of SEQ ID NO: 1888416
uuacuagguguaugagaaa

SEQ ID NO: 2533761 - RNA, 19 nt, Artificial Sequence
  Description of Artificial Sequence: Synthetic oligonucleotide
  Antisense strand to SEQ ID NO: 2533760
uuucucauacaccuaguaa

SEQ ID NO: 2533762 - RNA, 19 nt, Artificial Sequence
  Description of Artificial Sequence: Synthetic oligonucleotide
  Sense strand starting at position 2668 of SEQ ID NO: 1888416
ggcgucuuuggcuucagua

SEQ ID NO: 2533763 - RNA, 19 nt, Artificial Sequence
  Description of Artificial Sequence: Synthetic oligonucleotide
  Antisense strand to SEQ ID NO: 2533762
uacugaagccaaagacgcc

SEQ ID NO: 2533764 - RNA, 19 nt, Artificial Sequence
  Description of Artificial Sequence: Synthetic oligonucleotide
  Sense strand starting at position 2689 of SEQ ID NO: 1888416
caaagaucugaguggaguc

SEQ ID NO: 2533765 - RNA, 19 nt, Artificial Sequence
  Description of Artificial Sequence: Synthetic oligonucleotide
  Antisense strand to SEQ ID NO: 2533764
gacuccacucagaucuuug

SEQ ID NO: 2533766 - RNA, 19 nt, Artificial Sequence
  Description of Artificial Sequence: Synthetic oligonucleotide
  Sense strand starting at position 1141 of SEQ ID NO: 1888416
gaccauauguucuccagag

SEQ ID NO: 2533767 - RNA, 19 nt, Artificial Sequence
  Description of Artificial Sequence: Synthetic oligonucleotide
  Antisense strand to SEQ ID NO: 2533766
cucuggagaacauaugguc

SEQ ID NO: 2533768 - RNA, 19 nt, Artificial Sequence
  Description of Artificial Sequence: Synthetic oligonucleotide
  Sense strand starting at position 1900 of SEQ ID NO: 1888416
augagaaauuggcuuagua

SEQ ID NO: 2533769 - RNA, 19 nt, Artificial Sequence
  Description of Artificial Sequence: Synthetic oligonucleotide
  Antisense strand to SEQ ID NO: 2533768
uacuaagccaauuucucau

SEQ ID NO: 2533770 - RNA, 19 nt, Artificial Sequence
  Description of Artificial Sequence: Synthetic oligonucleotide
  Sense strand starting at position 2035 of SEQ ID NO: 1888416
gucacacuggucuaauuau

SEQ ID NO: 2533771 - RNA, 19 nt, Artificial Sequence
  Description of Artificial Sequence: Synthetic oligonucleotide
  Antisense strand to SEQ ID NO: 2533770
auaauuagaccagugugac

SEQ ID NO: 2533772 - RNA, 19 nt, Artificial Sequence
  Description of Artificial Sequence: Synthetic oligonucleotide
  Sense strand starting at position 1669 of SEQ ID NO: 1888416
ucaucaauggcuuauggua

SEQ ID NO: 2533773 - RNA, 19 nt, Artificial Sequence
  Description of Artificial Sequence: Synthetic oligonucleotide
  Antisense strand to SEQ ID NO: 2533772
uaccauaagccauugauga

SEQ ID NO: 2533774 - RNA, 19 nt, Artificial Sequence
  Description of Artificial Sequence: Synthetic oligonucleotide
  Sense strand starting at position 3113 of SEQ ID NO: 1888416
guacacugguaauuaauca

SEQ ID NO: 2533775 - RNA, 19 nt, Artificial Sequence
  Description of Artificial Sequence: Synthetic oligonucleotide
  Antisense strand to SEQ ID NO: 2533774
ugauuaauuaccaguguac

SEQ ID NO: 2533776 - RNA, 19 nt, Artificial Sequence
  Description of Artificial Sequence: Synthetic oligonucleotide
  Sense strand starting at position 1898 of SEQ ID NO: 1888416
guaugagaaauuggcuuag

SEQ ID NO: 2533777 - RNA, 19 nt, Artificial Sequence
  Description of Artificial Sequence: Synthetic oligonucleotide
  Antisense strand to SEQ ID NO: 2533776
cuaagccaauuucucauac

SEQ ID NO: 2533778 - RNA, 19 nt, Artificial Sequence
  Description of Artificial Sequence: Synthetic oligonucleotide
  Sense strand starting at position 757 of SEQ ID NO: 1888416
ggacuuuccuaagcaugac

SEQ ID NO: 2533779 - RNA, 19 nt, Artificial Sequence
  Description of Artificial Sequence: Synthetic oligonucleotide
  Antisense strand to SEQ ID NO: 2533778
gucaugcuuaggaaagucc

SEQ ID NO: 2533780 - RNA, 19 nt, Artificial Sequence
  Description of Artificial Sequence: Synthetic oligonucleotide
  Sense strand starting at position 3107 of SEQ ID NO: 1888416
uuuaaaguacacugguaau

SEQ ID NO: 2533781 - RNA, 19 nt, Artificial Sequence
  Description of Artificial Sequence: Synthetic oligonucleotide
  Antisense strand to SEQ ID NO: 2533780
auuaccaguguacuuuaaa

SEQ ID NO: 2533782 - RNA, 19 nt, Artificial Sequence
  Description of Artificial Sequence: Synthetic oligonucleotide
  Sense strand starting at position 3433 of SEQ ID NO: 1888416
augcuuugaccucaaguua

SEQ ID NO: 2533783 - RNA, 19 nt, Artificial Sequence
  Description of Artificial Sequence: Synthetic oligonucleotide
  Antisense strand to SEQ ID NO: 2533782
uaacuugaggucaaagcau

SEQ ID NO: 2533784 - RNA, 19 nt, Artificial Sequence
  Description of Artificial Sequence: Synthetic oligonucleotide
  Sense strand starting at position 2885 of SEQ ID NO: 1888416
uagggaucaugucucucau

SEQ ID NO: 2533785 - RNA, 19 nt, Artificial Sequence
  Description of Artificial Sequence: Synthetic oligonucleotide
  Antisense strand to SEQ ID NO: 2533784
augagagacaugaucccua

SEQ ID NO: 2533786 - RNA, 19 nt, Artificial Sequence
  Description of Artificial Sequence: Synthetic oligonucleotide
  Sense strand starting at position 1664 of SEQ ID NO: 1888416
aaaggucaucaauggcuua

SEQ ID NO: 2533787 - RNA, 19 nt, Artificial Sequence
  Description of Artificial Sequence: Synthetic oligonucleotide
  Antisense strand to SEQ ID NO: 2533786
uaagccauugaugaccuuu

SEQ ID NO: 2533788 - RNA, 19 nt, Artificial Sequence
  Description of Artificial Sequence: Synthetic oligonucleotide
  Sense strand starting at position 3510 of SEQ ID NO: 1888416
aggcaaucuuggguuacaa

SEQ ID NO: 2533789 - RNA, 19 nt, Artificial Sequence
  Description of Artificial Sequence: Synthetic oligonucleotide
  Antisense strand to SEQ ID NO: 2533788
uuguaacccaagauugccu

SEQ ID NO: 2533790 - RNA, 19 nt, Artificial Sequence
  Description of Artificial Sequence: Synthetic oligonucleotide
  Sense strand starting at position 1533 of SEQ ID NO: 1888416
caacuuugguaugcagaga

SEQ ID NO: 2533791 - RNA, 19 nt, Artificial Sequence
  Description of Artificial Sequence: Synthetic oligonucleotide
  Antisense strand to SEQ ID NO: 2533790
ucucugcauaccaaaguug

SEQ ID NO: 2533792 - RNA, 19 nt, Artificial Sequence
  Description of Artificial Sequence: Synthetic oligonucleotide
  Sense strand starting at position 2743 of SEQ ID NO: 1888416
acaagugauuuagauacuu

SEQ ID NO: 2533793 - RNA, 19 nt, Artificial Sequence
  Description of Artificial Sequence: Synthetic oligonucleotide
  Antisense strand to SEQ ID NO: 2533792
aaguaucuaaaucacuugu

SEQ ID NO: 2533794 - RNA, 19 nt, Artificial Sequence
  Description of Artificial Sequence: Synthetic oligonucleotide
  Sense strand starting at position 2543 of SEQ ID NO: 1888416
uaaguauggcauuaauguu

SEQ ID NO: 2533795 - RNA, 19 nt, Artificial Sequence
  Description of Artificial Sequence: Synthetic oligonucleotide
  Antisense strand to SEQ ID NO: 2533794
aacauuaaugccauacuua

SEQ ID NO: 2533796 - RNA, 19 nt, Artificial Sequence
  Description of Artificial Sequence: Synthetic oligonucleotide
  Sense strand starting at position 3166 of SEQ ID NO: 1888416
gguucuaagucccuggaaa

SEQ ID NO: 2533797 - RNA, 19 nt, Artificial Sequence
  Description of Artificial Sequence: Synthetic oligonucleotide
  Antisense strand to SEQ ID NO: 2533796
uuuccagggacuuagaacc

SEQ ID NO: 2533798 - RNA, 19 nt, Artificial Sequence
  Description of Artificial Sequence: Synthetic oligonucleotide
  Sense strand starting at position 1884 of SEQ ID NO: 1888416
cuagauuacuagguguaug

SEQ ID NO: 2533799 - RNA, 19 nt, Artificial Sequence
  Description of Artificial Sequence: Synthetic oligonucleotide
  Antisense strand to SEQ ID NO: 2533798
cauacaccuaguaaucuag

SEQ ID NO: 2533800 - RNA, 19 nt, Artificial Sequence
  Description of Artificial Sequence: Synthetic oligonucleotide
  Sense strand starting at position 621 of SEQ ID NO: 1888417
acuaguauccacuaaggua

SEQ ID NO: 2533801 - RNA, 19 nt, Artificial Sequence
  Description of Artificial Sequence: Synthetic oligonucleotide
  Antisense strand to SEQ ID NO: 2533800
uaccuuaguggauacuagu

SEQ ID NO: 2533802 - RNA, 19 nt, Artificial Sequence
  Description of Artificial Sequence: Synthetic oligonucleotide
  Sense strand starting at position 2365 of SEQ ID NO: 1888417
ucuagauaaggucauccuu

SEQ ID NO: 2533803 - RNA, 19 nt, Artificial Sequence
  Description of Artificial Sequence: Synthetic oligonucleotide
  Antisense strand to SEQ ID NO: 2533802
aaggaugaccuuaucuaga

SEQ ID NO: 2533804 - RNA, 19 nt, Artificial Sequence
  Description of Artificial Sequence: Synthetic oligonucleotide
  Sense strand starting at position 3563 of SEQ ID NO: 1888417
agacaaacucauuggaguc

SEQ ID NO: 2533805 - RNA, 19 nt, Artificial Sequence
  Description of Artificial Sequence: Synthetic oligonucleotide
  Antisense strand to SEQ ID NO: 2533804
gacuccaaugaguuugucu

SEQ ID NO: 2533806 - RNA, 19 nt, Artificial Sequence
  Description of Artificial Sequence: Synthetic oligonucleotide
  Sense strand starting at position 3103 of SEQ ID NO: 1888417
ugagcaacacaugauugua

SEQ ID NO: 2533807 - RNA, 19 nt, Artificial Sequence
  Description of Artificial Sequence: Synthetic oligonucleotide
  Antisense strand to SEQ ID NO: 2533806
uacaaucauguguugcuca

SEQ ID NO: 2533808 - RNA, 19 nt, Artificial Sequence
  Description of Artificial Sequence: Synthetic oligonucleotide
  Sense strand starting at position 1504 of SEQ ID NO: 1888417
uuuguugugggagacugaa

SEQ ID NO: 2533809 - RNA, 19 nt, Artificial Sequence
  Description of Artificial Sequence: Synthetic oligonucleotide
  Antisense strand to SEQ ID NO: 2533808
uucagucucccacaacaaa

SEQ ID NO: 2533810 - RNA, 19 nt, Artificial Sequence
  Description of Artificial Sequence: Synthetic oligonucleotide
  Sense strand starting at position 3883 of SEQ ID NO: 1888417
uaaagaguggcauauguaa

SEQ ID NO: 2533811 - RNA, 19 nt, Artificial Sequence
  Description of Artificial Sequence: Synthetic oligonucleotide
  Antisense strand to SEQ ID NO: 2533810
uuacauaugccacucuuua

SEQ ID NO: 2533812 - RNA, 19 nt, Artificial Sequence
  Description of Artificial Sequence: Synthetic oligonucleotide
  Sense strand starting at position 3283 of SEQ ID NO: 1888417
ggguuccuucuccaugaaa

SEQ ID NO: 2533813 - RNA, 19 nt, Artificial Sequence
  Description of Artificial Sequence: Synthetic oligonucleotide
  Antisense strand to SEQ ID NO: 2533812
uuucauggagaaggaaccc

SEQ ID NO: 2533814 - RNA, 19 nt, Artificial Sequence
  Description of Artificial Sequence: Synthetic oligonucleotide
  Sense strand starting at position 1414 of SEQ ID NO: 1888417
acugcuugagguuaaagau

SEQ ID NO: 2533815 - RNA, 19 nt, Artificial Sequence
  Description of Artificial Sequence: Synthetic oligonucleotide
  Antisense strand to SEQ ID NO: 2533814
aucuuuaaccucaagcagu

SEQ ID NO: 2533816 - RNA, 19 nt, Artificial Sequence
  Description of Artificial Sequence: Synthetic oligonucleotide
  Sense strand starting at position 489 of SEQ ID NO: 1888417
acuuuaucccauuacaggu

SEQ ID NO: 2533817 - RNA, 19 nt, Artificial Sequence
  Description of Artificial Sequence: Synthetic oligonucleotide
  Antisense strand to SEQ ID NO: 2533816
accuguaaugggauaaagu

SEQ ID NO: 2533818 - RNA, 19 nt, Artificial Sequence
  Description of Artificial Sequence: Synthetic oligonucleotide
  Sense strand starting at position 3383 of SEQ ID NO: 1888417
gauauucuagugcagggau

SEQ ID NO: 2533819 - RNA, 19 nt, Artificial Sequence
  Description of Artificial Sequence: Synthetic oligonucleotide
  Antisense strand to SEQ ID NO: 2533818
aucccugcacuagaauauc

SEQ ID NO: 2533820 - RNA, 19 nt, Artificial Sequence
  Description of Artificial Sequence: Synthetic oligonucleotide
  Sense strand starting at position 2403 of SEQ ID NO: 1888417
uccacugaagaaugucaua

SEQ ID NO: 2533821 - RNA, 19 nt, Artificial Sequence
  Description of Artificial Sequence: Synthetic oligonucleotide
  Antisense strand to SEQ ID NO: 2533820
uaugacauucuucagugga

SEQ ID NO: 2533822 - RNA, 19 nt, Artificial Sequence
  Description of Artificial Sequence: Synthetic oligonucleotide
  Sense strand starting at position 60 of SEQ ID NO: 1888417
augggaacauucccaguua

SEQ ID NO: 2533823 - RNA, 19 nt, Artificial Sequence
  Description of Artificial Sequence: Synthetic oligonucleotide
  Antisense strand to SEQ ID NO: 2533822
uaacugggaauguucccau

SEQ ID NO: 2533824 - RNA, 19 nt, Artificial Sequence
  Description of Artificial Sequence: Synthetic oligonucleotide
  Sense strand starting at position 3213 of SEQ ID NO: 1888417
ggaaaccuggcuuggagau

SEQ ID NO: 2533825 - RNA, 19 nt, Artificial Sequence
  Description of Artificial Sequence: Synthetic oligonucleotide
  Antisense strand to SEQ ID NO: 2533824
aucuccaagccagguuucc

SEQ ID NO: 2533826 - RNA, 19 nt, Artificial Sequence
  Description of Artificial Sequence: Synthetic oligonucleotide
  Sense strand starting at position 3340 of SEQ ID NO: 1888417
ccaagacaugcaggaucau

SEQ ID NO: 2533827 - RNA, 19 nt, Artificial Sequence
  Description of Artificial Sequence: Synthetic oligonucleotide
  Antisense strand to SEQ ID NO: 2533826
augauccugcaugucuugg

SEQ ID NO: 2533828 - RNA, 19 nt, Artificial Sequence
  Description of Artificial Sequence: Synthetic oligonucleotide
  Sense strand starting at position 3954 of SEQ ID NO: 1888417
agauucugugcugauaaua

SEQ ID NO: 2533829 - RNA, 19 nt, Artificial Sequence
  Description of Artificial Sequence: Synthetic oligonucleotide
  Antisense strand to SEQ ID NO: 2533828
uauuaucagcacagaaucu

SEQ ID NO: 2533830 - RNA, 19 nt, Artificial Sequence
  Description of Artificial Sequence: Synthetic oligonucleotide
  Sense strand starting at position 3408 of SEQ ID NO: 1888417
aggcaauguccagggaaca

SEQ ID NO: 2533831 - RNA, 19 nt, Artificial Sequence
  Description of Artificial Sequence: Synthetic oligonucleotide
  Antisense strand to SEQ ID NO: 2533830
uguucccuggacauugccu

SEQ ID NO: 2533832 - RNA, 19 nt, Artificial Sequence
  Description of Artificial Sequence: Synthetic oligonucleotide
  Sense strand starting at position 1872 of SEQ ID NO: 1888417
gugcucaaggcauagagaa

SEQ ID NO: 2533833 - RNA, 19 nt, Artificial Sequence
  Description of Artificial Sequence: Synthetic oligonucleotide
  Antisense strand to SEQ ID NO: 2533832
uucucuaugccuugagcac

SEQ ID NO: 2533834 - RNA, 19 nt, Artificial Sequence
  Description of Artificial Sequence: Synthetic oligonucleotide
  Sense strand starting at position 2515 of SEQ ID NO: 1888417
agugugaaggguugaggaa

SEQ ID NO: 2533835 - RNA, 19 nt, Artificial Sequence
  Description of Artificial Sequence: Synthetic oligonucleotide
  Antisense strand to SEQ ID NO: 2533834
uuccucaacccuucacacu

SEQ ID NO: 2533836 - RNA, 19 nt, Artificial Sequence
  Description of Artificial Sequence: Synthetic oligonucleotide
  Sense strand starting at position 3074 of SEQ ID NO: 1888417
augugaccuggguauccau

SEQ ID NO: 2533837 - RNA, 19 nt, Artificial Sequence
  Description of Artificial Sequence: Synthetic oligonucleotide
  Antisense strand to SEQ ID NO: 2533836
auggauacccaggucacau

SEQ ID NO: 2533838 - RNA, 19 nt, Artificial Sequence
  Description of Artificial Sequence: Synthetic oligonucleotide
  Sense strand starting at position 1038 of SEQ ID NO: 1888417
ccagaaugucugcaccaua

SEQ ID NO: 2533839 - RNA, 19 nt, Artificial Sequence
  Description of Artificial Sequence: Synthetic oligonucleotide
  Antisense strand to SEQ ID NO: 2533838
uauggugcagacauucugg

SEQ ID NO: 2533840 - RNA, 19 nt, Artificial Sequence
  Description of Artificial Sequence: Synthetic oligonucleotide
  Sense strand starting at position 3077 of SEQ ID NO: 1888417
ugaccuggguauccauaau

SEQ ID NO: 2533841 - RNA, 19 nt, Artificial Sequence
  Description of Artificial Sequence: Synthetic oligonucleotide
  Antisense strand to SEQ ID NO: 2533840
auuauggauacccagguca

SEQ ID NO: 2533842 - RNA, 19 nt, Artificial Sequence
  Description of Artificial Sequence: Synthetic oligonucleotide
  Sense strand starting at position 3106 of SEQ ID NO: 1888417
gcaacacaugauuguagaa

SEQ ID NO: 2533843 - RNA, 19 nt, Artificial Sequence
  Description of Artificial Sequence: Synthetic oligonucleotide
  Antisense strand to SEQ ID NO: 2533842
uucuacaaucauguguugc

SEQ ID NO: 2533844 - RNA, 19 nt, Artificial Sequence
  Description of Artificial Sequence: Synthetic oligonucleotide
  Sense strand starting at position 3949 of SEQ ID NO: 1888417
aagaaagauucugugcuga

SEQ ID NO: 2533845 - RNA, 19 nt, Artificial Sequence
  Description of Artificial Sequence: Synthetic oligonucleotide
  Antisense strand to SEQ ID NO: 2533844
ucagcacagaaucuuucuu

SEQ ID NO: 2533846 - RNA, 19 nt, Artificial Sequence
  Description of Artificial Sequence: Synthetic oligonucleotide
  Sense strand starting at position 3878 of SEQ ID NO: 1888417
gacucuaaagaguggcaua

SEQ ID NO: 2533847 - RNA, 19 nt, Artificial Sequence
  Description of Artificial Sequence: Synthetic oligonucleotide
  Antisense strand to SEQ ID NO: 2533846
uaugccacucuuuagaguc

SEQ ID NO: 2533848 - RNA, 19 nt, Artificial Sequence
  Description of Artificial Sequence: Synthetic oligonucleotide
  Sense strand starting at position 3848 of SEQ ID NO: 1888417
agacauucuuacucaguca

SEQ ID NO: 2533849 - RNA, 19 nt, Artificial Sequence
  Description of Artificial Sequence: Synthetic oligonucleotide
  Antisense strand to SEQ ID NO: 2533848
ugacugaguaagaaugucu

SEQ ID NO: 2533850 - RNA, 19 nt, Artificial Sequence
  Description of Artificial Sequence: Synthetic oligonucleotide
  Sense strand starting at position 1907 of SEQ ID NO: 1888417
ccuugagaggcauagccau

SEQ ID NO: 2533851 - RNA, 19 nt, Artificial Sequence
  Description of Artificial Sequence: Synthetic oligonucleotide
  Antisense strand to SEQ ID NO: 2533850
auggcuaugccucucaagg

SEQ ID NO: 2533852 - RNA, 19 nt, Artificial Sequence
  Description of Artificial Sequence: Synthetic oligonucleotide
  Sense strand starting at position 1043 of SEQ ID NO: 1888417
augucugcaccauauuaca

SEQ ID NO: 2533853 - RNA, 19 nt, Artificial Sequence
  Description of Artificial Sequence: Synthetic oligonucleotide
  Antisense strand to SEQ ID NO: 2533852
uguaauauggugcagacau

SEQ ID NO: 2533854 - RNA, 19 nt, Artificial Sequence
  Description of Artificial Sequence: Synthetic oligonucleotide
  Sense strand starting at position 3890 of SEQ ID NO: 1888417
uggcauauguaaucaagau

SEQ ID NO: 2533855 - RNA, 19 nt, Artificial Sequence
  Description of Artificial Sequence: Synthetic oligonucleotide
  Antisense strand to SEQ ID NO: 2533854
aucuugauuacauaugcca

SEQ ID NO: 2533856 - RNA, 19 nt, Artificial Sequence
  Description of Artificial Sequence: Synthetic oligonucleotide
  Sense strand starting at position 3731 of SEQ ID NO: 1888417
gcccacuuaggcuauaaau

SEQ ID NO: 2533857 - RNA, 19 nt, Artificial Sequence
  Description of Artificial Sequence: Synthetic oligonucleotide
  Antisense strand to SEQ ID NO: 2533856
auuuauagccuaagugggc

SEQ ID NO: 2533858 - RNA, 19 nt, Artificial Sequence
  Description of Artificial Sequence: Synthetic oligonucleotide
  Sense strand starting at position 2614 of SEQ ID NO: 1888417
uucagaugucugugagaga

SEQ ID NO: 2533859 - RNA, 19 nt, Artificial Sequence
  Description of Artificial Sequence: Synthetic oligonucleotide
  Antisense strand to SEQ ID NO: 2533858
ucucucacagacaucugaa

SEQ ID NO: 2533860 - RNA, 19 nt, Artificial Sequence
  Description of Artificial Sequence: Synthetic oligonucleotide
  Sense strand starting at position 3061 of SEQ ID NO: 1888417
auugcuuaccuacauguga

SEQ ID NO: 2533861 - RNA, 19 nt, Artificial Sequence
  Description of Artificial Sequence: Synthetic oligonucleotide
  Antisense strand to SEQ ID NO: 2533860
ucacauguagguaagcaau

SEQ ID NO: 2533862 - RNA, 19 nt, Artificial Sequence
  Description of Artificial Sequence: Synthetic oligonucleotide
  Sense strand starting at position 3951 of SEQ ID NO: 1888417
gaaagauucugugcugaua

SEQ ID NO: 2533863 - RNA, 19 nt, Artificial Sequence
  Description of Artificial Sequence: Synthetic oligonucleotide
  Antisense strand to SEQ ID NO: 2533862
uaucagcacagaaucuuuc

SEQ ID NO: 2533864 - RNA, 19 nt, Artificial Sequence
  Description of Artificial Sequence: Synthetic oligonucleotide
  Sense strand starting at position 2706 of SEQ ID NO: 1888417
ucaagaucauuugaacagu

SEQ ID NO: 2533865 - RNA, 19 nt, Artificial Sequence
  Description of Artificial Sequence: Synthetic oligonucleotide
  Antisense strand to SEQ ID NO: 2533864
acuguucaaaugaucuuga

SEQ ID NO: 2533866 - RNA, 19 nt, Artificial Sequence
  Description of Artificial Sequence: Synthetic oligonucleotide
  Sense strand starting at position 2332 of SEQ ID NO: 1888417
acagucuuugcagaguuaa

SEQ ID NO: 2533867 - RNA, 19 nt, Artificial Sequence
  Description of Artificial Sequence: Synthetic oligonucleotide
  Antisense strand to SEQ ID NO: 2533866
uuaacucugcaaagacugu

SEQ ID NO: 2533868 - RNA, 19 nt, Artificial Sequence
  Description of Artificial Sequence: Synthetic oligonucleotide
  Sense strand starting at position 125 of SEQ ID NO: 1888417
guucuuuaagauggauucu

SEQ ID NO: 2533869 - RNA, 19 nt, Artificial Sequence
  Description of Artificial Sequence: Synthetic oligonucleotide
  Antisense strand to SEQ ID NO: 2533868
agaauccaucuuaaagaac

SEQ ID NO: 2533870 - RNA, 19 nt, Artificial Sequence
  Description of Artificial Sequence: Synthetic oligonucleotide
  Sense strand starting at position 3386 of SEQ ID NO: 1888417
auucuagugcagggauaua

SEQ ID NO: 2533871 - RNA, 19 nt, Artificial Sequence
  Description of Artificial Sequence: Synthetic oligonucleotide
  Antisense strand to SEQ ID NO: 2533870
uauaucccugcacuagaau

SEQ ID NO: 2533872 - RNA, 19 nt, Artificial Sequence
  Description of Artificial Sequence: Synthetic oligonucleotide
  Sense strand starting at position 1409 of SEQ ID NO: 1888417
uguaaacugcuugagguua

SEQ ID NO: 2533873 - RNA, 19 nt, Artificial Sequence
  Description of Artificial Sequence: Synthetic oligonucleotide
  Antisense strand to SEQ ID NO: 2533872
uaaccucaagcaguuuaca

SEQ ID NO: 2533874 - RNA, 19 nt, Artificial Sequence
  Description of Artificial Sequence: Synthetic oligonucleotide
  Sense strand starting at position 1317 of SEQ ID NO: 1888417
cuagaaguguuaucacacu

SEQ ID NO: 2533875 - RNA, 19 nt, Artificial Sequence
  Description of Artificial Sequence: Synthetic oligonucleotide
  Antisense strand to SEQ ID NO: 2533874
agugugauaacacuucuag

SEQ ID NO: 2533876 - RNA, 19 nt, Artificial Sequence
  Description of Artificial Sequence: Synthetic oligonucleotide
  Sense strand starting at position 2184 of SEQ ID NO: 1888417
uuuauaugguuggcaauaa

SEQ ID NO: 2533877 - RNA, 19 nt, Artificial Sequence
  Description of Artificial Sequence: Synthetic oligonucleotide
  Antisense strand to SEQ ID NO: 2533876
uuauugccaaccauauaaa

SEQ ID NO: 2533878 - RNA, 19 nt, Artificial Sequence
  Description of Artificial Sequence: Synthetic oligonucleotide
  Sense strand starting at position 2950 of SEQ ID NO: 1888417
guuuacugucaggacugua

SEQ ID NO: 2533879 - RNA, 19 nt, Artificial Sequence
  Description of Artificial Sequence: Synthetic oligonucleotide
  Antisense strand to SEQ ID NO: 2533878
uacaguccugacaguaaac

SEQ ID NO: 2533880 - RNA, 19 nt, Artificial Sequence
  Description of Artificial Sequence: Synthetic oligonucleotide
  Sense strand starting at position 1612 of SEQ ID NO: 1888418
acuucugagcaugaaaucu

SEQ ID NO: 2533881 - RNA, 19 nt, Artificial Sequence
  Description of Artificial Sequence: Synthetic oligonucleotide
  Antisense strand to SEQ ID NO: 2533880
agauuucaugcucagaagu

SEQ ID NO: 2533882 - RNA, 19 nt, Artificial Sequence
  Description of Artificial Sequence: Synthetic oligonucleotide
  Sense strand starting at position 2658 of SEQ ID NO: 1888418
agagauugacagugaagug

SEQ ID NO: 2533883 - RNA, 19 nt, Artificial Sequence
  Description of Artificial Sequence: Synthetic oligonucleotide
  Antisense strand to SEQ ID NO: 2533882
cacuucacugucaaucucu

SEQ ID NO: 2533884 - RNA, 19 nt, Artificial Sequence
  Description of Artificial Sequence: Synthetic oligonucleotide
  Sense strand starting at position 758 of SEQ ID NO: 1888418
agaggaauuuaucacuaac

SEQ ID NO: 2533885 - RNA, 19 nt, Artificial Sequence
  Description of Artificial Sequence: Synthetic oligonucleotide
  Antisense strand to SEQ ID NO: 2533884
guuagugauaaauuccucu

SEQ ID NO: 2533886 - RNA, 19 nt, Artificial Sequence
  Description of Artificial Sequence: Synthetic oligonucleotide
  Sense strand starting at position 2494 of SEQ ID NO: 1888418
gcucauauacaagagguau

SEQ ID NO: 2533887 - RNA, 19 nt, Artificial Sequence
  Description of Artificial Sequence: Synthetic oligonucleotide
  Antisense strand to SEQ ID NO: 2533886
auaccucuuguauaugagc

SEQ ID NO: 2533888 - RNA, 19 nt, Artificial Sequence
  Description of Artificial Sequence: Synthetic oligonucleotide
  Sense strand starting at position 2659 of SEQ ID NO: 1888418
gagauugacagugaagugu

SEQ ID NO: 2533889 - RNA, 19 nt, Artificial Sequence
  Description of Artificial Sequence: Synthetic oligonucleotide
  Antisense strand to SEQ ID NO: 2533888
acacuucacugucaaucuc

SEQ ID NO: 2533890 - RNA, 19 nt, Artificial Sequence
  Description of Artificial Sequence: Synthetic oligonucleotide
  Sense strand starting at position 3969 of SEQ ID NO: 1888418
aacagauggcuuugauaag

SEQ ID NO: 2533891 - RNA, 19 nt, Artificial Sequence
  Description of Artificial Sequence: Synthetic oligonucleotide
  Antisense strand to SEQ ID NO: 2533890
cuuaucaaagccaucuguu

SEQ ID NO: 2533892 - RNA, 19 nt, Artificial Sequence
  Description of Artificial Sequence: Synthetic oligonucleotide
  Sense strand starting at position 2026 of SEQ ID NO: 1888418
uacagauuggaaggcuuaa

SEQ ID NO: 2533893 - RNA, 19 nt, Artificial Sequence
  Description of Artificial Sequence: Synthetic oligonucleotide
  Antisense strand to SEQ ID NO: 2533892
uuaagccuuccaaucugua

SEQ ID NO: 2533894 - RNA, 19 nt, Artificial Sequence
  Description of Artificial Sequence: Synthetic oligonucleotide
  Sense strand starting at position 196 of SEQ ID NO: 1888418
cuaguaauaguguauagaa

SEQ ID NO: 2533895 - RNA, 19 nt, Artificial Sequence
  Description of Artificial Sequence: Synthetic oligonucleotide
  Antisense strand to SEQ ID NO: 2533894
uucuauacacuauuacuag

SEQ ID NO: 2533896 - RNA, 19 nt, Artificial Sequence
  Description of Artificial Sequence: Synthetic oligonucleotide
  Sense strand starting at position 2116 of SEQ ID NO: 1888418
aaguucuuuguagaaauug

SEQ ID NO: 2533897 - RNA, 19 nt, Artificial Sequence
  Description of Artificial Sequence: Synthetic oligonucleotide
  Antisense strand to SEQ ID NO: 2533896
caauuucuacaaagaacuu

SEQ ID NO: 2533898 - RNA, 19 nt, Artificial Sequence
  Description of Artificial Sequence: Synthetic oligonucleotide
  Sense strand starting at position 2432 of SEQ ID NO: 1888418
gagggaauguaaguauauu

SEQ ID NO: 2533899 - RNA, 19 nt, Artificial Sequence
  Description of Artificial Sequence: Synthetic oligonucleotide
  Antisense strand to SEQ ID NO: 2533898
aauauacuuacauucccuc

SEQ ID NO: 2533900 - RNA, 19 nt, Artificial Sequence
  Description of Artificial Sequence: Synthetic oligonucleotide
  Sense strand starting at position 2863 of SEQ ID NO: 1888418
uuggcagacaagugaaaga

SEQ ID NO: 2533901 - RNA, 19 nt, Artificial Sequence
  Description of Artificial Sequence: Synthetic oligonucleotide
  Antisense strand to SEQ ID NO: 2533900
ucuuucacuugucugccaa

SEQ ID NO: 2533902 - RNA, 19 nt, Artificial Sequence
  Description of Artificial Sequence: Synthetic oligonucleotide
  Sense strand starting at position 3456 of SEQ ID NO: 1888418
cuugucuagggauaaugua

SEQ ID NO: 2533903 - RNA, 19 nt, Artificial Sequence
  Description of Artificial Sequence: Synthetic oligonucleotide
  Antisense strand to SEQ ID NO: 2533902
uacauuaucccuagacaag

SEQ ID NO: 2533904 - RNA, 19 nt, Artificial Sequence
  Description of Artificial Sequence: Synthetic oligonucleotide
  Sense strand starting at position 2292 of SEQ ID NO: 1888418
gguuuacaacuggauguau

SEQ ID NO: 2533905 - RNA, 19 nt, Artificial Sequence
  Description of Artificial Sequence: Synthetic oligonucleotide
  Antisense strand to SEQ ID NO: 2533904
auacauccaguuguaaacc

SEQ ID NO: 2533906 - RNA, 19 nt, Artificial Sequence
  Description of Artificial Sequence: Synthetic oligonucleotide
  Sense strand starting at position 3236 of SEQ ID NO: 1888418
ggagaacuauuaucuccga

SEQ ID NO: 2533907 - RNA, 19 nt, Artificial Sequence
  Description of Artificial Sequence: Synthetic oligonucleotide
  Antisense strand to SEQ ID NO: 2533906
ucggagauaauaguucucc

SEQ ID NO: 2533908 - RNA, 19 nt, Artificial Sequence
  Description of Artificial Sequence: Synthetic oligonucleotide
  Sense strand starting at position 31 of SEQ ID NO: 1888418
ugacaaucuccuugauaug

SEQ ID NO: 2533909 - RNA, 19 nt, Artificial Sequence
  Description of Artificial Sequence: Synthetic oligonucleotide
  Antisense strand to SEQ ID NO: 2533908
cauaucaaggagauuguca

SEQ ID NO: 2533910 - RNA, 19 nt, Artificial Sequence
  Description of Artificial Sequence: Synthetic oligonucleotide
  Sense strand starting at position 2268 of SEQ ID NO: 1888418
cagucauagagguaguaug

SEQ ID NO: 2533911 - RNA, 19 nt, Artificial Sequence
  Description of Artificial Sequence: Synthetic oligonucleotide
  Antisense strand to SEQ ID NO: 2533910
cauacuaccucuaugacug

SEQ ID NO: 2533912 - RNA, 19 nt, Artificial Sequence
  Description of Artificial Sequence: Synthetic oligonucleotide
  Sense strand starting at position 3276 of SEQ ID NO: 1888418
gcucuuaaacauugagaga

SEQ ID NO: 2533913 - RNA, 19 nt, Artificial Sequence
  Description of Artificial Sequence: Synthetic oligonucleotide
  Antisense strand to SEQ ID NO: 2533912
ucucucaauguuuaagagc

SEQ ID NO: 2533914 - RNA, 19 nt, Artificial Sequence
  Description of Artificial Sequence: Synthetic oligonucleotide
  Sense strand starting at position 1762 of SEQ ID NO: 1888418
uugccaaugcaauaugaga

SEQ ID NO: 2533915 - RNA, 19 nt, Artificial Sequence
  Description of Artificial Sequence: Synthetic oligonucleotide
  Antisense strand to SEQ ID NO: 2533914
ucucauauugcauuggcaa

SEQ ID NO: 2533916 - RNA, 19 nt, Artificial Sequence
  Description of Artificial Sequence: Synthetic oligonucleotide
  Sense strand starting at position 1920 of SEQ ID NO: 1888418
auauuaagauuggugugaa

SEQ ID NO: 2533917 - RNA, 19 nt, Artificial Sequence
  Description of Artificial Sequence: Synthetic oligonucleotide
  Antisense strand to SEQ ID NO: 2533916
uucacaccaaucuuaauau

SEQ ID NO: 2533918 - RNA, 19 nt, Artificial Sequence
  Description of Artificial Sequence: Synthetic oligonucleotide
  Sense strand starting at position 3452 of SEQ ID NO: 1888418
ucaacuugucuagggauaa

SEQ ID NO: 2533919 - RNA, 19 nt, Artificial Sequence
  Description of Artificial Sequence: Synthetic oligonucleotide
  Antisense strand to SEQ ID NO: 2533918
uuaucccuagacaaguuga

SEQ ID NO: 2533920 - RNA, 19 nt, Artificial Sequence
  Description of Artificial Sequence: Synthetic oligonucleotide
  Sense strand starting at position 1609 of SEQ ID NO: 1888418
ggcacuucugagcaugaaa

SEQ ID NO: 2533921 - RNA, 19 nt, Artificial Sequence
  Description of Artificial Sequence: Synthetic oligonucleotide
  Antisense strand to SEQ ID NO: 2533920
uuucaugcucagaagugcc

SEQ ID NO: 2533922 - RNA, 19 nt, Artificial Sequence
  Description of Artificial Sequence: Synthetic oligonucleotide
  Sense strand starting at position 1580 of SEQ ID NO: 1888418
guaauaagagaguguuaaa

SEQ ID NO: 2533923 - RNA, 19 nt, Artificial Sequence
  Description of Artificial Sequence: Synthetic oligonucleotide
  Antisense strand to SEQ ID NO: 2533922
uuuaacacucucuuauuac

SEQ ID NO: 2533924 - RNA, 19 nt, Artificial Sequence
  Description of Artificial Sequence: Synthetic oligonucleotide
  Sense strand starting at position 1448 of SEQ ID NO: 1888418
gcuguaugugaauagaaca

SEQ ID NO: 2533925 - RNA, 19 nt, Artificial Sequence
  Description of Artificial Sequence: Synthetic oligonucleotide
  Antisense strand to SEQ ID NO: 2533924
uguucuauucacauacagc

SEQ ID NO: 2533926 - RNA, 19 nt, Artificial Sequence
  Description of Artificial Sequence: Synthetic oligonucleotide
  Sense strand starting at position 3784 of SEQ ID NO: 1888418
gcaagaaacuuugugaaua

SEQ ID NO: 2533927 - RNA, 19 nt, Artificial Sequence
  Description of Artificial Sequence: Synthetic oligonucleotide
  Antisense strand to SEQ ID NO: 2533926
uauucacaaaguuucuugc

SEQ ID NO: 2533928 - RNA, 19 nt, Artificial Sequence
  Description of Artificial Sequence: Synthetic oligonucleotide
  Sense strand starting at position 2013 of SEQ ID NO: 1888418
uguauaaugugauuacaga

SEQ ID NO: 2533929 - RNA, 19 nt, Artificial Sequence
  Description of Artificial Sequence: Synthetic oligonucleotide
  Antisense strand to SEQ ID NO: 2533928
ucuguaaucacauuauaca

SEQ ID NO: 2533930 - RNA, 19 nt, Artificial Sequence
  Description of Artificial Sequence: Synthetic oligonucleotide
  Sense strand starting at position 1014 of SEQ ID NO: 1888418
aguuauaguugauuaacag

SEQ ID NO: 2533931 - RNA, 19 nt, Artificial Sequence
  Description of Artificial Sequence: Synthetic oligonucleotide
  Antisense strand to SEQ ID NO: 2533930
cuguuaaucaacuauaacu

SEQ ID NO: 2533932 - RNA, 19 nt, Artificial Sequence
  Description of Artificial Sequence: Synthetic oligonucleotide
  Sense strand starting at position 3449 of SEQ ID NO: 1888418
uuaucaacuugucuaggga

SEQ ID NO: 2533933 - RNA, 19 nt, Artificial Sequence
  Description of Artificial Sequence: Synthetic oligonucleotide
  Antisense strand to SEQ ID NO: 2533932
ucccuagacaaguugauaa

SEQ ID NO: 2533934 - RNA, 19 nt, Artificial Sequence
  Description of Artificial Sequence: Synthetic oligonucleotide
  Sense strand starting at position 1015 of SEQ ID NO: 1888418
guuauaguugauuaacagu

SEQ ID NO: 2533935 - RNA, 19 nt, Artificial Sequence
  Description of Artificial Sequence: Synthetic oligonucleotide
  Antisense strand to SEQ ID NO: 2533934
acuguuaaucaacuauaac

SEQ ID NO: 2533936 - RNA, 19 nt, Artificial Sequence
  Description of Artificial Sequence: Synthetic oligonucleotide
  Sense strand starting at position 2291 of SEQ ID NO: 1888418
agguuuacaacuggaugua

SEQ ID NO: 2533937 - RNA, 19 nt, Artificial Sequence
  Description of Artificial Sequence: Synthetic oligonucleotide
  Antisense strand to SEQ ID NO: 2533936
uacauccaguuguaaaccu

SEQ ID NO: 2533938 - RNA, 19 nt, Artificial Sequence
  Description of Artificial Sequence: Synthetic oligonucleotide
  Sense strand starting at position 3297 of SEQ ID NO: 1888418
uguguagaggcuuaaauac

SEQ ID NO: 2533939 - RNA, 19 nt, Artificial Sequence
  Description of Artificial Sequence: Synthetic oligonucleotide
  Antisense strand to SEQ ID NO: 2533938
guauuuaagccucuacaca

SEQ ID NO: 2533940 - RNA, 19 nt, Artificial Sequence
  Description of Artificial Sequence: Synthetic oligonucleotide
  Sense strand starting at position 531 of SEQ ID NO: 1888418
ccugucugagauugagacu

SEQ ID NO: 2533941 - RNA, 19 nt, Artificial Sequence
  Description of Artificial Sequence: Synthetic oligonucleotide
  Antisense strand to SEQ ID NO: 2533940
agucucaaucucagacagg

SEQ ID NO: 2533942 - RNA, 19 nt, Artificial Sequence
  Description of Artificial Sequence: Synthetic oligonucleotide
  Sense strand starting at position 1577 of SEQ ID NO: 1888418
gcaguaauaagagaguguu

SEQ ID NO: 2533943 - RNA, 19 nt, Artificial Sequence
  Description of Artificial Sequence: Synthetic oligonucleotide
  Antisense strand to SEQ ID NO: 2533942
aacacucucuuauuacugc

SEQ ID NO: 2533944 - RNA, 19 nt, Artificial Sequence
  Description of Artificial Sequence: Synthetic oligonucleotide
  Sense strand starting at position 2290 of SEQ ID NO: 1888418
gagguuuacaacuggaugu

SEQ ID NO: 2533945 - RNA, 19 nt, Artificial Sequence
  Description of Artificial Sequence: Synthetic oligonucleotide
  Antisense strand to SEQ ID NO: 2533944
acauccaguuguaaaccuc

SEQ ID NO: 2533946 - RNA, 19 nt, Artificial Sequence
  Description of Artificial Sequence: Synthetic oligonucleotide
  Sense strand starting at position 2859 of SEQ ID NO: 1888418
ugucuuggcagacaaguga

SEQ ID NO: 2533947 - RNA, 19 nt, Artificial Sequence
  Description of Artificial Sequence: Synthetic oligonucleotide
  Antisense strand to SEQ ID NO: 2533946
ucacuugucugccaagaca

SEQ ID NO: 2533948 - RNA, 19 nt, Artificial Sequence
  Description of Artificial Sequence: Synthetic oligonucleotide
  Sense strand starting at position 3036 of SEQ ID NO: 1888418
gcagucaaaccauauuagu

SEQ ID NO: 2533949 - RNA, 19 nt, Artificial Sequence
  Description of Artificial Sequence: Synthetic oligonucleotide
  Antisense strand to SEQ ID NO: 2533948
acuaauaugguuugacugc

SEQ ID NO: 2533950 - RNA, 19 nt, Artificial Sequence
  Description of Artificial Sequence: Synthetic oligonucleotide
  Sense strand starting at position 2665 of SEQ ID NO: 1888418
gacagugaaguguauuagu

SEQ ID NO: 2533951 - RNA, 19 nt, Artificial Sequence
  Description of Artificial Sequence: Synthetic oligonucleotide
  Antisense strand to SEQ ID NO: 2533950
acuaauacacuucacuguc

SEQ ID NO: 2533952 - RNA, 19 nt, Artificial Sequence
  Description of Artificial Sequence: Synthetic oligonucleotide
  Sense strand starting at position 1861 of SEQ ID NO: 1888418
gccauaccuguuuacugaa

SEQ ID NO: 2533953 - RNA, 19 nt, Artificial Sequence
  Description of Artificial Sequence: Synthetic oligonucleotide
  Antisense strand to SEQ ID NO: 2533952
uucaguaaacagguauggc

SEQ ID NO: 2533954 - RNA, 19 nt, Artificial Sequence
  Description of Artificial Sequence: Synthetic oligonucleotide
  Sense strand starting at position 1380 of SEQ ID NO: 1888418
cagagucuugcugaacuuu

SEQ ID NO: 2533955 - RNA, 19 nt, Artificial Sequence
  Description of Artificial Sequence: Synthetic oligonucleotide
  Antisense strand to SEQ ID NO: 2533954
aaaguucagcaagacucug

SEQ ID NO: 2533956 - RNA, 19 nt, Artificial Sequence
  Description of Artificial Sequence: Synthetic oligonucleotide
  Sense strand starting at position 3287 of SEQ ID NO: 1888418
uugagagauguguguagag

SEQ ID NO: 2533957 - RNA, 19 nt, Artificial Sequence
  Description of Artificial Sequence: Synthetic oligonucleotide
  Antisense strand to SEQ ID NO: 2533956
cucuacacacaucucucaa

SEQ ID NO: 2533958 - RNA, 19 nt, Artificial Sequence
  Description of Artificial Sequence: Synthetic oligonucleotide
  Sense strand starting at position 934 of SEQ ID NO: 1888418
guuuauaugguacaguauu

SEQ ID NO: 2533959 - RNA, 19 nt, Artificial Sequence
  Description of Artificial Sequence: Synthetic oligonucleotide
  Antisense strand to SEQ ID NO: 2533958
aauacuguaccauauaaac

SEQ ID NO: 2533960 - RNA, 19 nt, Artificial Sequence
  Description of Artificial Sequence: Synthetic oligonucleotide
  Sense strand starting at position 670 of SEQ ID NO: 1888419
ggacaaaugccucauauuc

SEQ ID NO: 2533961 - RNA, 19 nt, Artificial Sequence
  Description of Artificial Sequence: Synthetic oligonucleotide
  Antisense strand to SEQ ID NO: 2533960
gaauaugaggcauuugucc

SEQ ID NO: 2533962 - RNA, 19 nt, Artificial Sequence
  Description of Artificial Sequence: Synthetic oligonucleotide
  Sense strand starting at position 3477 of SEQ ID NO: 1888419
acaauaucugacugaggua

SEQ ID NO: 2533963 - RNA, 19 nt, Artificial Sequence
  Description of Artificial Sequence: Synthetic oligonucleotide
  Antisense strand to SEQ ID NO: 2533962
uaccucagucagauauugu

SEQ ID NO: 2533964 - RNA, 19 nt, Artificial Sequence
  Description of Artificial Sequence: Synthetic oligonucleotide
  Sense strand starting at position 3405 of SEQ ID NO: 1888419
auauccuaaggagguauua

SEQ ID NO: 2533965 - RNA, 19 nt, Artificial Sequence
  Description of Artificial Sequence: Synthetic oligonucleotide
  Antisense strand to SEQ ID NO: 2533964
uaauaccuccuuaggauau

SEQ ID NO: 2533966 - RNA, 19 nt, Artificial Sequence
  Description of Artificial Sequence: Synthetic oligonucleotide
  Sense strand starting at position 1783 of SEQ ID NO: 1888419
ggaagagguuacucccaau

SEQ ID NO: 2533967 - RNA, 19 nt, Artificial Sequence
  Description of Artificial Sequence: Synthetic oligonucleotide
  Antisense strand to SEQ ID NO: 2533966
auugggaguaaccucuucc

SEQ ID NO: 2533968 - RNA, 19 nt, Artificial Sequence
  Description of Artificial Sequence: Synthetic oligonucleotide
  Sense strand starting at position 2092 of SEQ ID NO: 1888419
gcguguguacccucaugau

SEQ ID NO: 2533969 - RNA, 19 nt, Artificial Sequence
  Description of Artificial Sequence: Synthetic oligonucleotide
  Antisense strand to SEQ ID NO: 2533968
aucaugaggguacacacgc

SEQ ID NO: 2533970 - RNA, 19 nt, Artificial Sequence
  Description of Artificial Sequence: Synthetic oligonucleotide
  Sense strand starting at position 3100 of SEQ ID NO: 1888419
gcgggauaugacuacuaau

SEQ ID NO: 2533971 - RNA, 19 nt, Artificial Sequence
  Description of Artificial Sequence: Synthetic oligonucleotide
  Antisense strand to SEQ ID NO: 2533970
auuaguagucauaucccgc

SEQ ID NO: 2533972 - RNA, 19 nt, Artificial Sequence
  Description of Artificial Sequence: Synthetic oligonucleotide
  Sense strand starting at position 913 of SEQ ID NO: 1888419
agauaacacucugugacau

SEQ ID NO: 2533973 - RNA, 19 nt, Artificial Sequence
  Description of Artificial Sequence: Synthetic oligonucleotide
  Antisense strand to SEQ ID NO: 2533972
augucacagaguguuaucu

SEQ ID NO: 2533974 - RNA, 19 nt, Artificial Sequence
  Description of Artificial Sequence: Synthetic oligonucleotide
  Sense strand starting at position 2975 of SEQ ID NO: 1888419
gcaggaugauacuccuaaa

SEQ ID NO: 2533975 - RNA, 19 nt, Artificial Sequence
  Description of Artificial Sequence: Synthetic oligonucleotide
  Antisense strand to SEQ ID NO: 2533974
uuuaggaguaucauccugc

SEQ ID NO: 2533976 - RNA, 19 nt, Artificial Sequence
  Description of Artificial Sequence: Synthetic oligonucleotide
  Sense strand starting at position 3668 of SEQ ID NO: 1888419
ugauauaauccguaauauc

SEQ ID NO: 2533977 - RNA, 19 nt, Artificial Sequence
  Description of Artificial Sequence: Synthetic oligonucleotide
  Antisense strand to SEQ ID NO: 2533976
gauauuacggauuauauca

SEQ ID NO: 2533978 - RNA, 19 nt, Artificial Sequence
  Description of Artificial Sequence: Synthetic oligonucleotide
  Sense strand starting at position 3380 of SEQ ID NO: 1888419
uguacacuccuugauauua

SEQ ID NO: 2533979 - RNA, 19 nt, Artificial Sequence
  Description of Artificial Sequence: Synthetic oligonucleotide
  Antisense strand to SEQ ID NO: 2533978
uaauaucaaggaguguaca

SEQ ID NO: 2533980 - RNA, 19 nt, Artificial Sequence
  Description of Artificial Sequence: Synthetic oligonucleotide
  Sense strand starting at position 2749 of SEQ ID NO: 1888419
ucauuauauccucacggau

SEQ ID NO: 2533981 - RNA, 19 nt, Artificial Sequence
  Description of Artificial Sequence: Synthetic oligonucleotide
  Antisense strand to SEQ ID NO: 2533980
auccgugaggauauaauga

SEQ ID NO: 2533982 - RNA, 19 nt, Artificial Sequence
  Description of Artificial Sequence: Synthetic oligonucleotide
  Sense strand starting at position 948 of SEQ ID NO: 1888419
gugagaugauacuccuaau

SEQ ID NO: 2533983 - RNA, 19 nt, Artificial Sequence
  Description of Artificial Sequence: Synthetic oligonucleotide
  Antisense strand to SEQ ID NO: 2533982
auuaggaguaucaucucac

SEQ ID NO: 2533984 - RNA, 19 nt, Artificial Sequence
  Description of Artificial Sequence: Synthetic oligonucleotide
  Sense strand starting at position 3753 of SEQ ID NO: 1888419
gagagauauuauuccuagu

SEQ ID NO: 2533985 - RNA, 19 nt, Artificial Sequence
  Description of Artificial Sequence: Synthetic oligonucleotide
  Antisense strand to SEQ ID NO: 2533984
acuaggaauaauaucucuc

SEQ ID NO: 2533986 - RNA, 19 nt, Artificial Sequence
  Description of Artificial Sequence: Synthetic oligonucleotide
  Sense strand starting at position 3690 of SEQ ID NO: 1888419
gagagauauuguucccaau

SEQ ID NO: 2533987 - RNA, 19 nt, Artificial Sequence
  Description of Artificial Sequence: Synthetic oligonucleotide
  Antisense strand to SEQ ID NO: 2533986
auugggaacaauaucucuc

SEQ ID NO: 2533988 - RNA, 19 nt, Artificial Sequence
  Description of Artificial Sequence: Synthetic oligonucleotide
  Sense strand starting at position 3288 of SEQ ID NO: 1888419
ggaagauguuacucuuaau

SEQ ID NO: 2533989 - RNA, 19 nt, Artificial Sequence
  Description of Artificial Sequence: Synthetic oligonucleotide
  Antisense strand to SEQ ID NO: 2533988
auuaagaguaacaucuucc

SEQ ID NO: 2533990 - RNA, 19 nt, Artificial Sequence
  Description of Artificial Sequence: Synthetic oligonucleotide
  Sense strand starting at position 1650 of SEQ ID NO: 1888419
gagugcgcccuguuauauu

SEQ ID NO: 2533991 - RNA, 19 nt, Artificial Sequence
  Description of Artificial Sequence: Synthetic oligonucleotide
  Antisense strand to SEQ ID NO: 2533990
aauauaacagggcgcacuc

SEQ ID NO: 2533992 - RNA, 19 nt, Artificial Sequence
  Description of Artificial Sequence: Synthetic oligonucleotide
  Sense strand starting at position 1220 of SEQ ID NO: 1888419
gguguacacccuuagauau

SEQ ID NO: 2533993 - RNA, 19 nt, Artificial Sequence
  Description of Artificial Sequence: Synthetic oligonucleotide
  Antisense strand to SEQ ID NO: 2533992
auaucuaaggguguacacc

SEQ ID NO: 2533994 - RNA, 19 nt, Artificial Sequence
  Description of Artificial Sequence: Synthetic oligonucleotide
  Sense strand starting at position 2307 of SEQ ID NO: 1888419
cauagucuccuagacggau

SEQ ID NO: 2533995 - RNA, 19 nt, Artificial Sequence
  Description of Artificial Sequence: Synthetic oligonucleotide
  Antisense strand to SEQ ID NO: 2533994
auccgucuaggagacuaug

SEQ ID NO: 2533996 - RNA, 19 nt, Artificial Sequence
  Description of Artificial Sequence: Synthetic oligonucleotide
  Sense strand starting at position 1926 of SEQ ID NO: 1888419
caaauaucacaugggugua

SEQ ID NO: 2533997 - RNA, 19 nt, Artificial Sequence
  Description of Artificial Sequence: Synthetic oligonucleotide
  Antisense strand to SEQ ID NO: 2533996
uacacccaugugauauuug

SEQ ID NO: 2533998 - RNA, 19 nt, Artificial Sequence
  Description of Artificial Sequence: Synthetic oligonucleotide
  Sense strand starting at position 1957 of SEQ ID NO: 1888419
acacauuaugugugaacac

SEQ ID NO: 2533999 - RNA, 19 nt, Artificial Sequence
  Description of Artificial Sequence: Synthetic oligonucleotide
  Antisense strand to SEQ ID NO: 2533998
guguucacacauaaugugu

SEQ ID NO: 2534000 - RNA, 19 nt, Artificial Sequence
  Description of Artificial Sequence: Synthetic oligonucleotide
  Sense strand starting at position 421 of SEQ ID NO: 1888419
gcaaguucucaagaccagu

SEQ ID NO: 2534001 - RNA, 19 nt, Artificial Sequence
  Description of Artificial Sequence: Synthetic oligonucleotide
  Antisense strand to SEQ ID NO: 2534000
acuggucuugagaacuugc

SEQ ID NO: 2534002 - RNA, 19 nt, Artificial Sequence
  Description of Artificial Sequence: Synthetic oligonucleotide
  Sense strand starting at position 1547 of SEQ ID NO: 1888419
guaaucuccuagguagaug

SEQ ID NO: 2534003 - RNA, 19 nt, Artificial Sequence
  Description of Artificial Sequence: Synthetic oligonucleotide
  Antisense strand to SEQ ID NO: 2534002
caucuaccuaggagauuac

SEQ ID NO: 2534004 - RNA, 19 nt, Artificial Sequence
  Description of Artificial Sequence: Synthetic oligonucleotide
  Sense strand starting at position 2169 of SEQ ID NO: 1888419
cccugugauagucacagua

SEQ ID NO: 2534005 - RNA, 19 nt, Artificial Sequence
  Description of Artificial Sequence: Synthetic oligonucleotide
  Antisense strand to SEQ ID NO: 2534004
uacugugacuaucacaggg

SEQ ID NO: 2534006 - RNA, 19 nt, Artificial Sequence
  Description of Artificial Sequence: Synthetic oligonucleotide
  Sense strand starting at position 2096 of SEQ ID NO: 1888419
guguacccucaugauagua

SEQ ID NO: 2534007 - RNA, 19 nt, Artificial Sequence
  Description of Artificial Sequence: Synthetic oligonucleotide
  Antisense strand to SEQ ID NO: 2534006
uacuaucaugaggguacac

SEQ ID NO: 2534008 - RNA, 19 nt, Artificial Sequence
  Description of Artificial Sequence: Synthetic oligonucleotide
  Sense strand starting at position 2752 of SEQ ID NO: 1888419
uuauauccucacggauuau

SEQ ID NO: 2534009 - RNA, 19 nt, Artificial Sequence
  Description of Artificial Sequence: Synthetic oligonucleotide
  Antisense strand to SEQ ID NO: 2534008
auaauccgugaggauauaa

SEQ ID NO: 2534010 - RNA, 19 nt, Artificial Sequence
  Description of Artificial Sequence: Synthetic oligonucleotide
  Sense strand starting at position 246 of SEQ ID NO: 1888419
ugcaguuugcaccaaacaa

SEQ ID NO: 2534011 - RNA, 19 nt, Artificial Sequence
  Description of Artificial Sequence: Synthetic oligonucleotide
  Antisense strand to SEQ ID NO: 2534010
uuguuuggugcaaacugca

SEQ ID NO: 2534012 - RNA, 19 nt, Artificial Sequence
  Description of Artificial Sequence: Synthetic oligonucleotide
  Sense strand starting at position 3265 of SEQ ID NO: 1888419
gggaucuuauucguaauau

SEQ ID NO: 2534013 - RNA, 19 nt, Artificial Sequence
  Description of Artificial Sequence: Synthetic oligonucleotide
  Antisense strand to SEQ ID NO: 2534012
auauuacgaauaagauccc

SEQ ID NO: 2534014 - RNA, 19 nt, Artificial Sequence
  Description of Artificial Sequence: Synthetic oligonucleotide
  Sense strand starting at position 2537 of SEQ ID NO: 1888419
gugcacacugaaugauauu

SEQ ID NO: 2534015 - RNA, 19 nt, Artificial Sequence
  Description of Artificial Sequence: Synthetic oligonucleotide
  Antisense strand to SEQ ID NO: 2534014
aauaucauucagugugcac

SEQ ID NO: 2534016 - RNA, 19 nt, Artificial Sequence
  Description of Artificial Sequence: Synthetic oligonucleotide
  Sense strand starting at position 2284 of SEQ ID NO: 1888419
gguguguucgcugcgauag

SEQ ID NO: 2534017 - RNA, 19 nt, Artificial Sequence
  Description of Artificial Sequence: Synthetic oligonucleotide
  Antisense strand to SEQ ID NO: 2534016
cuaucgcagcgaacacacc

SEQ ID NO: 2534018 - RNA, 19 nt, Artificial Sequence
  Description of Artificial Sequence: Synthetic oligonucleotide
  Sense strand starting at position 3264 of SEQ ID NO: 1888419
ugggaucuuauucguaaua

SEQ ID NO: 2534019 - RNA, 19 nt, Artificial Sequence
  Description of Artificial Sequence: Synthetic oligonucleotide
  Antisense strand to SEQ ID NO: 2534018
uauuacgaauaagauccca

SEQ ID NO: 2534020 - RNA, 19 nt, Artificial Sequence
  Description of Artificial Sequence: Synthetic oligonucleotide
  Sense strand starting at position 2716 of SEQ ID NO: 1888419
augucacaauacguauaua

SEQ ID NO: 2534021 - RNA, 19 nt, Artificial Sequence
  Description of Artificial Sequence: Synthetic oligonucleotide
  Antisense strand to SEQ ID NO: 2534020
uauauacguauugugacau

SEQ ID NO: 2534022 - RNA, 19 nt, Artificial Sequence
  Description of Artificial Sequence: Synthetic oligonucleotide
  Sense strand starting at position 2866 of SEQ ID NO: 1888419
gauauuacucgugauguuc

SEQ ID NO: 2534023 - RNA, 19 nt, Artificial Sequence
  Description of Artificial Sequence: Synthetic oligonucleotide
  Antisense strand to SEQ ID NO: 2534022
gaacaucacgaguaauauc

SEQ ID NO: 2534024 - RNA, 19 nt, Artificial Sequence
  Description of Artificial Sequence: Synthetic oligonucleotide
  Sense strand starting at position 3329 of SEQ ID NO: 1888419
gguuauuauuuggaauauc

SEQ ID NO: 2534025 - RNA, 19 nt, Artificial Sequence
  Description of Artificial Sequence: Synthetic oligonucleotide
  Antisense strand to SEQ ID NO: 2534024
gauauuccaaauaauaacc

SEQ ID NO: 2534026 - RNA, 19 nt, Artificial Sequence
  Description of Artificial Sequence: Synthetic oligonucleotide
  Sense strand starting at position 1524 of SEQ ID NO: 1888419
guggacacccugugauauc

SEQ ID NO: 2534027 - RNA, 19 nt, Artificial Sequence
  Description of Artificial Sequence: Synthetic oligonucleotide
  Antisense strand to SEQ ID NO: 2534026
gauaucacaggguguccac

SEQ ID NO: 2534028 - RNA, 19 nt, Artificial Sequence
  Description of Artificial Sequence: Synthetic oligonucleotide
  Sense strand starting at position 3667 of SEQ ID NO: 1888419
gugauauaauccguaauau

SEQ ID NO: 2534029 - RNA, 19 nt, Artificial Sequence
  Description of Artificial Sequence: Synthetic oligonucleotide
  Antisense strand to SEQ ID NO: 2534028
auauuacggauuauaucac

SEQ ID NO: 2534030 - RNA, 19 nt, Artificial Sequence
  Description of Artificial Sequence: Synthetic oligonucleotide
  Sense strand starting at position 3318 of SEQ ID NO: 1888419
uauacagccuggguuauua

SEQ ID NO: 2534031 - RNA, 19 nt, Artificial Sequence
  Description of Artificial Sequence: Synthetic oligonucleotide
  Antisense strand to SEQ ID NO: 2534030
uaauaacccaggcuguaua

SEQ ID NO: 2534032 - RNA, 19 nt, Artificial Sequence
  Description of Artificial Sequence: Synthetic oligonucleotide
  Sense strand starting at position 3263 of SEQ ID NO: 1888419
cugggaucuuauucguaau

SEQ ID NO: 2534033 - RNA, 19 nt, Artificial Sequence
  Description of Artificial Sequence: Synthetic oligonucleotide
  Antisense strand to SEQ ID NO: 2534032
auuacgaauaagaucccag

SEQ ID NO: 2534034 - RNA, 19 nt, Artificial Sequence
  Description of Artificial Sequence: Synthetic oligonucleotide
  Sense strand starting at position 1955 of SEQ ID NO: 1888419
guacacauuaugugugaac

SEQ ID NO: 2534035 - RNA, 19 nt, Artificial Sequence
  Description of Artificial Sequence: Synthetic oligonucleotide
  Antisense strand to SEQ ID NO: 2534034
guucacacauaauguguac

SEQ ID NO: 2534036 - RNA, 19 nt, Artificial Sequence
  Description of Artificial Sequence: Synthetic oligonucleotide
  Sense strand starting at position 3455 of SEQ ID NO: 1888419
guguacauccgugauauua

SEQ ID NO: 2534037 - RNA, 19 nt, Artificial Sequence
  Description of Artificial Sequence: Synthetic oligonucleotide
  Antisense strand to SEQ ID NO: 2534036
uaauaucacggauguacac

SEQ ID NO: 2534038 - RNA, 19 nt, Artificial Sequence
  Description of Artificial Sequence: Synthetic oligonucleotide
  Sense strand starting at position 789 of SEQ ID NO: 1888419
gguuguacacauugugaca

SEQ ID NO: 2534039 - RNA, 19 nt, Artificial Sequence
  Description of Artificial Sequence: Synthetic oligonucleotide
  Antisense strand to SEQ ID NO: 2534038
ugucacaauguguacaacc

SEQ ID NO: 2534040 - RNA, 19 nt, Artificial Sequence
  Description of Artificial Sequence: Synthetic oligonucleotide
  Sense strand starting at position 2886 of SEQ ID NO: 1888420
ggcauuauauuugucaagu

SEQ ID NO: 2534041 - RNA, 19 nt, Artificial Sequence
  Description of Artificial Sequence: Synthetic oligonucleotide
  Antisense strand to SEQ ID NO: 2534040
acuugacaaauauaaugcc

SEQ ID NO: 2534042 - RNA, 19 nt, Artificial Sequence
  Description of Artificial Sequence: Synthetic oligonucleotide
  Sense strand starting at position 19 of SEQ ID NO: 1888420
aggaaauagucuucuggau

SEQ ID NO: 2534043 - RNA, 19 nt, Artificial Sequence
  Description of Artificial Sequence: Synthetic oligonucleotide
  Antisense strand to SEQ ID NO: 2534042
auccagaagacuauuuccu

SEQ ID NO: 2534044 - RNA, 19 nt, Artificial Sequence
  Description of Artificial Sequence: Synthetic oligonucleotide
  Sense strand starting at position 2747 of SEQ ID NO: 1888420
guacacuauggugaccaau

SEQ ID NO: 2534045 - RNA, 19 nt, Artificial Sequence
  Description of Artificial Sequence: Synthetic oligonucleotide
  Antisense strand to SEQ ID NO: 2534044
auuggucaccauaguguac

SEQ ID NO: 2534046 - RNA, 19 nt, Artificial Sequence
  Description of Artificial Sequence: Synthetic oligonucleotide
  Sense strand starting at position 1531 of SEQ ID NO: 1888420
gugaccuucgaucaugaaa

SEQ ID NO: 2534047 - RNA, 19 nt, Artificial Sequence
  Description of Artificial Sequence: Synthetic oligonucleotide
  Antisense strand to SEQ ID NO: 2534046
uuucaugaucgaaggucac

SEQ ID NO: 2534048 - RNA, 19 nt, Artificial Sequence
  Description of Artificial Sequence: Synthetic oligonucleotide
  Sense strand starting at position 2885 of SEQ ID NO: 1888420
cggcauuauauuugucaag

SEQ ID NO: 2534049 - RNA, 19 nt, Artificial Sequence
  Description of Artificial Sequence: Synthetic oligonucleotide
  Antisense strand to SEQ ID NO: 2534048
cuugacaaauauaaugccg

SEQ ID NO: 2534050 - RNA, 19 nt, Artificial Sequence
  Description of Artificial Sequence: Synthetic oligonucleotide
  Sense strand starting at position 3882 of SEQ ID NO: 1888420
aguguacccagagaguuaa

SEQ ID NO: 2534051 - RNA, 19 nt, Artificial Sequence
  Description of Artificial Sequence: Synthetic oligonucleotide
  Antisense strand to SEQ ID NO: 2534050
uuaacucucuggguacacu

SEQ ID NO: 2534052 - RNA, 19 nt, Artificial Sequence
  Description of Artificial Sequence: Synthetic oligonucleotide
  Sense strand starting at position 1627 of SEQ ID NO: 1888420
gauuuauaguaugagaaag

SEQ ID NO: 2534053 - RNA, 19 nt, Artificial Sequence
  Description of Artificial Sequence: Synthetic oligonucleotide
  Antisense strand to SEQ ID NO: 2534052
cuuucucauacuauaaauc

SEQ ID NO: 2534054 - RNA, 19 nt, Artificial Sequence
  Description of Artificial Sequence: Synthetic oligonucleotide
  Sense strand starting at position 3618 of SEQ ID NO: 1888420
aggagaaggucucuaguga

SEQ ID NO: 2534055 - RNA, 19 nt, Artificial Sequence
  Description of Artificial Sequence: Synthetic oligonucleotide
  Antisense strand to SEQ ID NO: 2534054
ucacuagagaccuucuccu

SEQ ID NO: 2534056 - RNA, 19 nt, Artificial Sequence
  Description of Artificial Sequence: Synthetic oligonucleotide
  Sense strand starting at position 1327 of SEQ ID NO: 1888420
ucuccuauuggguacuaua

SEQ ID NO: 2534057 - RNA, 19 nt, Artificial Sequence
  Description of Artificial Sequence: Synthetic oligonucleotide
  Antisense strand to SEQ ID NO: 2534056
uauaguacccaauaggaga

SEQ ID NO: 2534058 - RNA, 19 nt, Artificial Sequence
  Description of Artificial Sequence: Synthetic oligonucleotide
  Sense strand starting at position 1347 of SEQ ID NO: 1888420
cuacuaucugagugacaga

SEQ ID NO: 2534059 - RNA, 19 nt, Artificial Sequence
  Description of Artificial Sequence: Synthetic oligonucleotide
  Antisense strand to SEQ ID NO: 2534058
ucugucacucagauaguag

SEQ ID NO: 2534060 - RNA, 19 nt, Artificial Sequence
  Description of Artificial Sequence: Synthetic oligonucleotide
  Sense strand starting at position 2908 of SEQ ID NO: 1888420
acccgaaaguaacuuaaau

SEQ ID NO: 2534061 - RNA, 19 nt, Artificial Sequence
  Description of Artificial Sequence: Synthetic oligonucleotide
  Antisense strand to SEQ ID NO: 2534060
auuuaaguuacuuucgggu

SEQ ID NO: 2534062 - RNA, 19 nt, Artificial Sequence
  Description of Artificial Sequence: Synthetic oligonucleotide
  Sense strand starting at position 1495 of SEQ ID NO: 1888420
uaucucugggucuaaggua

SEQ ID NO: 2534063 - RNA, 19 nt, Artificial Sequence
  Description of Artificial Sequence: Synthetic oligonucleotide
  Antisense strand to SEQ ID NO: 2534062
uaccuuagacccagagaua

SEQ ID NO: 2534064 - RNA, 19 nt, Artificial Sequence
  Description of Artificial Sequence: Synthetic oligonucleotide
  Sense strand starting at position 1709 of SEQ ID NO: 1888420
agaagagugccuuggagau

SEQ ID NO: 2534065 - RNA, 19 nt, Artificial Sequence
  Description of Artificial Sequence: Synthetic oligonucleotide
  Antisense strand to SEQ ID NO: 2534064
aucuccaaggcacucuucu

SEQ ID NO: 2534066 - RNA, 19 nt, Artificial Sequence
  Description of Artificial Sequence: Synthetic oligonucleotide
  Sense strand starting at position 3863 of SEQ ID NO: 1888420
ggcagucccagguaacuaa

SEQ ID NO: 2534067 - RNA, 19 nt, Artificial Sequence
  Description of Artificial Sequence: Synthetic oligonucleotide
  Antisense strand to SEQ ID NO: 2534066
uuaguuaccugggacugcc

SEQ ID NO: 2534068 - RNA, 19 nt, Artificial Sequence
  Description of Artificial Sequence: Synthetic oligonucleotide
  Sense strand starting at position 1335 of SEQ ID NO: 1888420
uggguacuauaucuacuau

SEQ ID NO: 2534069 - RNA, 19 nt, Artificial Sequence
  Description of Artificial Sequence: Synthetic oligonucleotide
  Antisense strand to SEQ ID NO: 2534068
auaguagauauaguaccca

SEQ ID NO: 2534070 - RNA, 19 nt, Artificial Sequence
  Description of Artificial Sequence: Synthetic oligonucleotide
  Sense strand starting at position 2043 of SEQ ID NO: 1888420
uuagcuggcccauaaauau

SEQ ID NO: 2534071 - RNA, 19 nt, Artificial Sequence
  Description of Artificial Sequence: Synthetic oligonucleotide
  Antisense strand to SEQ ID NO: 2534070
auauuuaugggccagcuaa

SEQ ID NO: 2534072 - RNA, 19 nt, Artificial Sequence
  Description of Artificial Sequence: Synthetic oligonucleotide
  Sense strand starting at position 2861 of SEQ ID NO: 1888420
agaguuuaucaaggaugcu

SEQ ID NO: 2534073 - RNA, 19 nt, Artificial Sequence
  Description of Artificial Sequence: Synthetic oligonucleotide
  Antisense strand to SEQ ID NO: 2534072
agcauccuugauaaacucu

SEQ ID NO: 2534074 - RNA, 19 nt, Artificial Sequence
  Description of Artificial Sequence: Synthetic oligonucleotide
  Sense strand starting at position 3348 of SEQ ID NO: 1888420
uagaaagcuugguucugga

SEQ ID NO: 2534075 - RNA, 19 nt, Artificial Sequence
  Description of Artificial Sequence: Synthetic oligonucleotide
  Antisense strand to SEQ ID NO: 2534074
uccagaaccaagcuuucua

SEQ ID NO: 2534076 - RNA, 19 nt, Artificial Sequence
  Description of Artificial Sequence: Synthetic oligonucleotide
  Sense strand starting at position 2726 of SEQ ID NO: 1888420
ugacauggugcagguagaa

SEQ ID NO: 2534077 - RNA, 19 nt, Artificial Sequence
  Description of Artificial Sequence: Synthetic oligonucleotide
  Antisense strand to SEQ ID NO: 2534076
uucuaccugcaccauguca

SEQ ID NO: 2534078 - RNA, 19 nt, Artificial Sequence
  Description of Artificial Sequence: Synthetic oligonucleotide
  Sense strand starting at position 1229 of SEQ ID NO: 1888420
gagcuaaacccuugguaua

SEQ ID NO: 2534079 - RNA, 19 nt, Artificial Sequence
  Description of Artificial Sequence: Synthetic oligonucleotide
  Antisense strand to SEQ ID NO: 2534078
uauaccaaggguuuagcuc

SEQ ID NO: 2534080 - RNA, 19 nt, Artificial Sequence
  Description of Artificial Sequence: Synthetic oligonucleotide
  Sense strand starting at position 1527 of SEQ ID NO: 1888420
augagugaccuucgaucau

SEQ ID NO: 2534081 - RNA, 19 nt, Artificial Sequence
  Description of Artificial Sequence: Synthetic oligonucleotide
  Antisense strand to SEQ ID NO: 2534080
augaucgaaggucacucau

SEQ ID NO: 2534082 - RNA, 19 nt, Artificial Sequence
  Description of Artificial Sequence: Synthetic oligonucleotide
  Sense strand starting at position 2768 of SEQ ID NO: 1888420
ggcaguaucuuaucaaauu

SEQ ID NO: 2534083 - RNA, 19 nt, Artificial Sequence
  Description of Artificial Sequence: Synthetic oligonucleotide
  Antisense strand to SEQ ID NO: 2534082
aauuugauaagauacugcc

SEQ ID NO: 2534084 - RNA, 19 nt, Artificial Sequence
  Description of Artificial Sequence: Synthetic oligonucleotide
  Sense strand starting at position 1150 of SEQ ID NO: 1888420
ggaggcugccuccacuuau

SEQ ID NO: 2534085 - RNA, 19 nt, Artificial Sequence
  Description of Artificial Sequence: Synthetic oligonucleotide
  Antisense strand to SEQ ID NO: 2534084
auaaguggaggcagccucc

SEQ ID NO: 2534086 - RNA, 19 nt, Artificial Sequence
  Description of Artificial Sequence: Synthetic oligonucleotide
  Sense strand starting at position 1240 of SEQ ID NO: 1888420
uugguauacgcggacauaa

SEQ ID NO: 2534087 - RNA, 19 nt, Artificial Sequence
  Description of Artificial Sequence: Synthetic oligonucleotide
  Antisense strand to SEQ ID NO: 2534086
uuauguccgcguauaccaa

SEQ ID NO: 2534088 - RNA, 19 nt, Artificial Sequence
  Description of Artificial Sequence: Synthetic oligonucleotide
  Sense strand starting at position 692 of SEQ ID NO: 1888420
aagauaagugguggcucau

SEQ ID NO: 2534089 - RNA, 19 nt, Artificial Sequence
  Description of Artificial Sequence: Synthetic oligonucleotide
  Antisense strand to SEQ ID NO: 2534088
augagccaccacuuaucuu

SEQ ID NO: 2534090 - RNA, 19 nt, Artificial Sequence
  Description of Artificial Sequence: Synthetic oligonucleotide
  Sense strand starting at position 1668 of SEQ ID NO: 1888420
aagggugggcguuagugaa

SEQ ID NO: 2534091 - RNA, 19 nt, Artificial Sequence
  Description of Artificial Sequence: Synthetic oligonucleotide
  Antisense strand to SEQ ID NO: 2534090
uucacuaacgcccacccuu

SEQ ID NO: 2534092 - RNA, 19 nt, Artificial Sequence
  Description of Artificial Sequence: Synthetic oligonucleotide
  Sense strand starting at position 1883 of SEQ ID NO: 1888420
gucagugaauggcucugaa

SEQ ID NO: 2534093 - RNA, 19 nt, Artificial Sequence
  Description of Artificial Sequence: Synthetic oligonucleotide
  Antisense strand to SEQ ID NO: 2534092
uucagagccauucacugac

SEQ ID NO: 2534094 - RNA, 19 nt, Artificial Sequence
  Description of Artificial Sequence: Synthetic oligonucleotide
  Sense strand starting at position 1624 of SEQ ID NO: 1888420
gcugauuuauaguaugaga

SEQ ID NO: 2534095 - RNA, 19 nt, Artificial Sequence
  Description of Artificial Sequence: Synthetic oligonucleotide
  Antisense strand to SEQ ID NO: 2534094
ucucauacuauaaaucagc

SEQ ID NO: 2534096 - RNA, 19 nt, Artificial Sequence
  Description of Artificial Sequence: Synthetic oligonucleotide
  Sense strand starting at position 2876 of SEQ ID NO: 1888420
ugcucacuacggcauuaua

SEQ ID NO: 2534097 - RNA, 19 nt, Artificial Sequence
  Description of Artificial Sequence: Synthetic oligonucleotide
  Antisense strand to SEQ ID NO: 2534096
uauaaugccguagugagca

SEQ ID NO: 2534098 - RNA, 19 nt, Artificial Sequence
  Description of Artificial Sequence: Synthetic oligonucleotide
  Sense strand starting at position 1621 of SEQ ID NO: 1888420
gaggcugauuuauaguaug

SEQ ID NO: 2534099 - RNA, 19 nt, Artificial Sequence
  Description of Artificial Sequence: Synthetic oligonucleotide
  Antisense strand to SEQ ID NO: 2534098
cauacuauaaaucagccuc

SEQ ID NO: 2534100 - RNA, 19 nt, Artificial Sequence
  Description of Artificial Sequence: Synthetic oligonucleotide
  Sense strand starting at position 3313 of SEQ ID NO: 1888420
auagauauuuguuagcaca

SEQ ID NO: 2534101 - RNA, 19 nt, Artificial Sequence
  Description of Artificial Sequence: Synthetic oligonucleotide
  Antisense strand to SEQ ID NO: 2534100
ugugcuaacaaauaucuau

SEQ ID NO: 2534102 - RNA, 19 nt, Artificial Sequence
  Description of Artificial Sequence: Synthetic oligonucleotide
  Sense strand starting at position 96 of SEQ ID NO: 1888420
auugacaauugggacauaa

SEQ ID NO: 2534103 - RNA, 19 nt, Artificial Sequence
  Description of Artificial Sequence: Synthetic oligonucleotide
  Antisense strand to SEQ ID NO: 2534102
uuaugucccaauugucaau

SEQ ID NO: 2534104 - RNA, 19 nt, Artificial Sequence
  Description of Artificial Sequence: Synthetic oligonucleotide
  Sense strand starting at position 1864 of SEQ ID NO: 1888420
auggaagacugccaagaaa

SEQ ID NO: 2534105 - RNA, 19 nt, Artificial Sequence
  Description of Artificial Sequence: Synthetic oligonucleotide
  Antisense strand to SEQ ID NO: 2534104
uuucuuggcagucuuccau

SEQ ID NO: 2534106 - RNA, 19 nt, Artificial Sequence
  Description of Artificial Sequence: Synthetic oligonucleotide
  Sense strand starting at position 2012 of SEQ ID NO: 1888420
acagcuuugccuuggaagu

SEQ ID NO: 2534107 - RNA, 19 nt, Artificial Sequence
  Description of Artificial Sequence: Synthetic oligonucleotide
  Antisense strand to SEQ ID NO: 2534106
acuuccaaggcaaagcugu

SEQ ID NO: 2534108 - RNA, 19 nt, Artificial Sequence
  Description of Artificial Sequence: Synthetic oligonucleotide
  Sense strand starting at position 1239 of SEQ ID NO: 1888420
cuugguauacgcggacaua

SEQ ID NO: 2534109 - RNA, 19 nt, Artificial Sequence
  Description of Artificial Sequence: Synthetic oligonucleotide
  Antisense strand to SEQ ID NO: 2534108
uauguccgcguauaccaag

SEQ ID NO: 2534110 - RNA, 19 nt, Artificial Sequence
  Description of Artificial Sequence: Synthetic oligonucleotide
  Sense strand starting at position 2836 of SEQ ID NO: 1888420
ggagaacucucagacaggu

SEQ ID NO: 2534111 - RNA, 19 nt, Artificial Sequence
  Description of Artificial Sequence: Synthetic oligonucleotide
  Antisense strand to SEQ ID NO: 2534110
accugucugagaguucucc

SEQ ID NO: 2534112 - RNA, 19 nt, Artificial Sequence
  Description of Artificial Sequence: Synthetic oligonucleotide
  Sense strand starting at position 944 of SEQ ID NO: 1888420
acugcaugccagugugaau

SEQ ID NO: 2534113 - RNA, 19 nt, Artificial Sequence
  Description of Artificial Sequence: Synthetic oligonucleotide
  Antisense strand to SEQ ID NO: 2534112
auucacacuggcaugcagu

SEQ ID NO: 2534114 - RNA, 19 nt, Artificial Sequence
  Description of Artificial Sequence: Synthetic oligonucleotide
  Sense strand starting at position 2013 of SEQ ID NO: 1888420
cagcuuugccuuggaaguu

SEQ ID NO: 2534115 - RNA, 19 nt, Artificial Sequence
  Description of Artificial Sequence: Synthetic oligonucleotide
  Antisense strand to SEQ ID NO: 2534114
aacuuccaaggcaaagcug

SEQ ID NO: 2534116 - RNA, 19 nt, Artificial Sequence
  Description of Artificial Sequence: Synthetic oligonucleotide
  Sense strand starting at position 1629 of SEQ ID NO: 1888420
uuuauaguaugagaaaggu

SEQ ID NO: 2534117 - RNA, 19 nt, Artificial Sequence
  Description of Artificial Sequence: Synthetic oligonucleotide
  Antisense strand to SEQ ID NO: 2534116
accuuucucauacuauaaa

SEQ ID NO: 2534118 - RNA, 19 nt, Artificial Sequence
  Description of Artificial Sequence: Synthetic oligonucleotide
  Sense strand starting at position 597 of SEQ ID NO: 1888420
cccauuacuugguaaauag

SEQ ID NO: 2534119 - RNA, 19 nt, Artificial Sequence
  Description of Artificial Sequence: Synthetic oligonucleotide
  Antisense strand to SEQ ID NO: 2534118
cuauuuaccaaguaauggg

SEQ ID NO: 2534120 - RNA, 19 nt, Artificial Sequence
  Description of Artificial Sequence: Synthetic oligonucleotide
  Sense strand starting at position 2043 of SEQ ID NO: 1888421
ugucuauuagcagaagaau

SEQ ID NO: 2534121 - RNA, 19 nt, Artificial Sequence
  Description of Artificial Sequence: Synthetic oligonucleotide
  Antisense strand to SEQ ID NO: 2534120
auucuucugcuaauagaca

SEQ ID NO: 2534122 - RNA, 19 nt, Artificial Sequence
  Description of Artificial Sequence: Synthetic oligonucleotide
  Sense strand starting at position 929 of SEQ ID NO: 1888421
gaaugaacauuguuaaagu

SEQ ID NO: 2534123 - RNA, 19 nt, Artificial Sequence
  Description of Artificial Sequence: Synthetic oligonucleotide
  Antisense strand to SEQ ID NO: 2534122
acuuuaacaauguucauuc

SEQ ID NO: 2534124 - RNA, 19 nt, Artificial Sequence
  Description of Artificial Sequence: Synthetic oligonucleotide
  Sense strand starting at position 1684 of SEQ ID NO: 1888421
ggccaaccuguauauuaaa

SEQ ID NO: 2534125 - RNA, 19 nt, Artificial Sequence
  Description of Artificial Sequence: Synthetic oligonucleotide
  Antisense strand to SEQ ID NO: 2534124
uuuaauauacagguuggcc

SEQ ID NO: 2534126 - RNA, 19 nt, Artificial Sequence
  Description of Artificial Sequence: Synthetic oligonucleotide
  Sense strand starting at position 2464 of SEQ ID NO: 1888421
aaccauuauugguuaugga

SEQ ID NO: 2534127 - RNA, 19 nt, Artificial Sequence
  Description of Artificial Sequence: Synthetic oligonucleotide
  Antisense strand to SEQ ID NO: 2534126
uccauaaccaauaaugguu

SEQ ID NO: 2534128 - RNA, 19 nt, Artificial Sequence
  Description of Artificial Sequence: Synthetic oligonucleotide
  Sense strand starting at position 2576 of SEQ ID NO: 1888421
gggugaagaguauaugcau

SEQ ID NO: 2534129 - RNA, 19 nt, Artificial Sequence
  Description of Artificial Sequence: Synthetic oligonucleotide
  Antisense strand to SEQ ID NO: 2534128
augcauauacucuucaccc

SEQ ID NO: 2534130 - RNA, 19 nt, Artificial Sequence
  Description of Artificial Sequence: Synthetic oligonucleotide
  Sense strand starting at position 2400 of SEQ ID NO: 1888421
guauaaggccaggaagguu

SEQ ID NO: 2534131 - RNA, 19 nt, Artificial Sequence
  Description of Artificial Sequence: Synthetic oligonucleotide
  Antisense strand to SEQ ID NO: 2534130
aaccuuccuggccuuauac

SEQ ID NO: 2534132 - RNA, 19 nt, Artificial Sequence
  Description of Artificial Sequence: Synthetic oligonucleotide
  Sense strand starting at position 2387 of SEQ ID NO: 1888421
uagacaagugauuguauaa

SEQ ID NO: 2534133 - RNA, 19 nt, Artificial Sequence
  Description of Artificial Sequence: Synthetic oligonucleotide
  Antisense strand to SEQ ID NO: 2534132
uuauacaaucacuugucua

SEQ ID NO: 2534134 - RNA, 19 nt, Artificial Sequence
  Description of Artificial Sequence: Synthetic oligonucleotide
  Sense strand starting at position 2568 of SEQ ID NO: 1888421
uccuaagugggugaagagu

SEQ ID NO: 2534135 - RNA, 19 nt, Artificial Sequence
  Description of Artificial Sequence: Synthetic oligonucleotide
  Antisense strand to SEQ ID NO: 2534134
acucuucacccacuuagga

SEQ ID NO: 2534136 - RNA, 19 nt, Artificial Sequence
  Description of Artificial Sequence: Synthetic oligonucleotide
  Sense strand starting at position 2096 of SEQ ID NO: 1888421
agaguauucggucacaaac

SEQ ID NO: 2534137 - RNA, 19 nt, Artificial Sequence
  Description of Artificial Sequence: Synthetic oligonucleotide
  Antisense strand to SEQ ID NO: 2534136
guuugugaccgaauacucu

SEQ ID NO: 2534138 - RNA, 19 nt, Artificial Sequence
  Description of Artificial Sequence: Synthetic oligonucleotide
  Sense strand starting at position 3152 of SEQ ID NO: 1888421
guuauuauugaugauaguc

SEQ ID NO: 2534139 - RNA, 19 nt, Artificial Sequence
  Description of Artificial Sequence: Synthetic oligonucleotide
  Antisense strand to SEQ ID NO: 2534138
gacuaucaucaauaauaac

SEQ ID NO: 2534140 - RNA, 19 nt, Artificial Sequence
  Description of Artificial Sequence: Synthetic oligonucleotide
  Sense strand starting at position 2566 of SEQ ID NO: 1888421
cauccuaagugggugaaga

SEQ ID NO: 2534141 - RNA, 19 nt, Artificial Sequence
  Description of Artificial Sequence: Synthetic oligonucleotide
  Antisense strand to SEQ ID NO: 2534140
ucuucacccacuuaggaug

SEQ ID NO: 2534142 - RNA, 19 nt, Artificial Sequence
  Description of Artificial Sequence: Synthetic oligonucleotide
  Sense strand starting at position 1682 of SEQ ID NO: 1888421
auggccaaccuguauauua

SEQ ID NO: 2534143 - RNA, 19 nt, Artificial Sequence
  Description of Artificial Sequence: Synthetic oligonucleotide
  Antisense strand to SEQ ID NO: 2534142
uaauauacagguuggccau

SEQ ID NO: 2534144 - RNA, 19 nt, Artificial Sequence
  Description of Artificial Sequence: Synthetic oligonucleotide
  Sense strand starting at position 2252 of SEQ ID NO: 1888421
uugaguagugguuaccaga

SEQ ID NO: 2534145 - RNA, 19 nt, Artificial Sequence
  Description of Artificial Sequence: Synthetic oligonucleotide
  Antisense strand to SEQ ID NO: 2534144
ucugguaaccacuacucaa

SEQ ID NO: 2534146 - RNA, 19 nt, Artificial Sequence
  Description of Artificial Sequence: Synthetic oligonucleotide
  Sense strand starting at position 937 of SEQ ID NO: 1888421
auuguuaaaguguacccaa

SEQ ID NO: 2534147 - RNA, 19 nt, Artificial Sequence
  Description of Artificial Sequence: Synthetic oligonucleotide
  Antisense strand to SEQ ID NO: 2534146
uuggguacacuuuaacaau

SEQ ID NO: 2534148 - RNA, 19 nt, Artificial Sequence
  Description of Artificial Sequence: Synthetic oligonucleotide
  Sense strand starting at position 2299 of SEQ ID NO: 1888421
gggugauccuggucaaagg

SEQ ID NO: 2534149 - RNA, 19 nt, Artificial Sequence
  Description of Artificial Sequence: Synthetic oligonucleotide
  Antisense strand to SEQ ID NO: 2534148
ccuuugaccaggaucaccc

SEQ ID NO: 2534150 - RNA, 19 nt, Artificial Sequence
  Description of Artificial Sequence: Synthetic oligonucleotide
  Sense strand starting at position 2353 of SEQ ID NO: 1888421
auguuuagauaugcaaaca

SEQ ID NO: 2534151 - RNA, 19 nt, Artificial Sequence
  Description of Artificial Sequence: Synthetic oligonucleotide
  Antisense strand to SEQ ID NO: 2534150
uguuugcauaucuaaacau

SEQ ID NO: 2534152 - RNA, 19 nt, Artificial Sequence
  Description of Artificial Sequence: Synthetic oligonucleotide
  Sense strand starting at position 3160 of SEQ ID NO: 1888421
ugaugauagucaccuuauu

SEQ ID NO: 2534153 - RNA, 19 nt, Artificial Sequence
  Description of Artificial Sequence: Synthetic oligonucleotide
  Antisense strand to SEQ ID NO: 2534152
aauaaggugacuaucauca

SEQ ID NO: 2534154 - RNA, 19 nt, Artificial Sequence
  Description of Artificial Sequence: Synthetic oligonucleotide
  Sense strand starting at position 3823 of SEQ ID NO: 1888421
cucuuuagguaaccagauu

SEQ ID NO: 2534155 - RNA, 19 nt, Artificial Sequence
  Description of Artificial Sequence: Synthetic oligonucleotide
  Antisense strand to SEQ ID NO: 2534154
aaucugguuaccuaaagag

SEQ ID NO: 2534156 - RNA, 19 nt, Artificial Sequence
  Description of Artificial Sequence: Synthetic oligonucleotide
  Sense strand starting at position 2386 of SEQ ID NO: 1888421
guagacaagugauuguaua

SEQ ID NO: 2534157 - RNA, 19 nt, Artificial Sequence
  Description of Artificial Sequence: Synthetic oligonucleotide
  Antisense strand to SEQ ID NO: 2534156
uauacaaucacuugucuac

SEQ ID NO: 2534158 - RNA, 19 nt, Artificial Sequence
  Description of Artificial Sequence: Synthetic oligonucleotide
  Sense strand starting at position 1429 of SEQ ID NO: 1888421
gugggcuggucaaggauuu

SEQ ID NO: 2534159 - RNA, 19 nt, Artificial Sequence
  Description of Artificial Sequence: Synthetic oligonucleotide
  Antisense strand to SEQ ID NO: 2534158
aaauccuugaccagcccac

SEQ ID NO: 2534160 - RNA, 19 nt, Artificial Sequence
  Description of Artificial Sequence: Synthetic oligonucleotide
  Sense strand starting at position 2091 of SEQ ID NO: 1888421
auggaagaguauucgguca

SEQ ID NO: 2534161 - RNA, 19 nt, Artificial Sequence
  Description of Artificial Sequence: Synthetic oligonucleotide
  Antisense strand to SEQ ID NO: 2534160
ugaccgaauacucuuccau

SEQ ID NO: 2534162 - RNA, 19 nt, Artificial Sequence
  Description of Artificial Sequence: Synthetic oligonucleotide
  Sense strand starting at position 2297 of SEQ ID NO: 1888421
uugggugauccuggucaaa

SEQ ID NO: 2534163 - RNA, 19 nt, Artificial Sequence
  Description of Artificial Sequence: Synthetic oligonucleotide
  Antisense strand to SEQ ID NO: 2534162
uuugaccaggaucacccaa

SEQ ID NO: 2534164 - RNA, 19 nt, Artificial Sequence
  Description of Artificial Sequence: Synthetic oligonucleotide
  Sense strand starting at position 1831 of SEQ ID NO: 1888421
gucacuguuagugggaaua

SEQ ID NO: 2534165 - RNA, 19 nt, Artificial Sequence
  Description of Artificial Sequence: Synthetic oligonucleotide
  Antisense strand to SEQ ID NO: 2534164
uauucccacuaacagugac

SEQ ID NO: 2534166 - RNA, 19 nt, Artificial Sequence
  Description of Artificial Sequence: Synthetic oligonucleotide
  Sense strand starting at position 3469 of SEQ ID NO: 1888421
cauuguggauguuuacauu

SEQ ID NO: 2534167 - RNA, 19 nt, Artificial Sequence
  Description of Artificial Sequence: Synthetic oligonucleotide
  Antisense strand to SEQ ID NO: 2534166
aauguaaacauccacaaug

SEQ ID NO: 2534168 - RNA, 19 nt, Artificial Sequence
  Description of Artificial Sequence: Synthetic oligonucleotide
  Sense strand starting at position 3020 of SEQ ID NO: 1888421
auaggcaugcuaugugaaa

SEQ ID NO: 2534169 - RNA, 19 nt, Artificial Sequence
  Description of Artificial Sequence: Synthetic oligonucleotide
  Antisense strand to SEQ ID NO: 2534168
uuucacauagcaugccuau

SEQ ID NO: 2534170 - RNA, 19 nt, Artificial Sequence
  Description of Artificial Sequence: Synthetic oligonucleotide
  Sense strand starting at position 946 of SEQ ID NO: 1888421
guguacccaaagugaucua

SEQ ID NO: 2534171 - RNA, 19 nt, Artificial Sequence
  Description of Artificial Sequence: Synthetic oligonucleotide
  Antisense strand to SEQ ID NO: 2534170
uagaucacuuuggguacac

SEQ ID NO: 2534172 - RNA, 19 nt, Artificial Sequence
  Description of Artificial Sequence: Synthetic oligonucleotide
  Sense strand starting at position 3015 of SEQ ID NO: 1888421
uugauauaggcaugcuaug

SEQ ID NO: 2534173 - RNA, 19 nt, Artificial Sequence
  Description of Artificial Sequence: Synthetic oligonucleotide
  Antisense strand to SEQ ID NO: 2534172
cauagcaugccuauaucaa

SEQ ID NO: 2534174 - RNA, 19 nt, Artificial Sequence
  Description of Artificial Sequence: Synthetic oligonucleotide
  Sense strand starting at position 3632 of SEQ ID NO: 1888421
augucaaaguuacuuguau

SEQ ID NO: 2534175 - RNA, 19 nt, Artificial Sequence
  Description of Artificial Sequence: Synthetic oligonucleotide
  Antisense strand to SEQ ID NO: 2534174
auacaaguaacuuugacau

SEQ ID NO: 2534176 - RNA, 19 nt, Artificial Sequence
  Description of Artificial Sequence: Synthetic oligonucleotide
  Sense strand starting at position 940 of SEQ ID NO: 1888421
guuaaaguguacccaaagu

SEQ ID NO: 2534177 - RNA, 19 nt, Artificial Sequence
  Description of Artificial Sequence: Synthetic oligonucleotide
  Antisense strand to SEQ ID NO: 2534176
acuuuggguacacuuuaac

SEQ ID NO: 2534178 - RNA, 19 nt, Artificial Sequence
  Description of Artificial Sequence: Synthetic oligonucleotide
  Sense strand starting at position 1559 of SEQ ID NO: 1888421
auauacaucugauaaggag

SEQ ID NO: 2534179 - RNA, 19 nt, Artificial Sequence
  Description of Artificial Sequence: Synthetic oligonucleotide
  Antisense strand to SEQ ID NO: 2534178
cuccuuaucagauguauau

SEQ ID NO: 2534180 - RNA, 19 nt, Artificial Sequence
  Description of Artificial Sequence: Synthetic oligonucleotide
  Sense strand starting at position 3542 of SEQ ID NO: 1888421
acuguaaacaguggugcaa

SEQ ID NO: 2534181 - RNA, 19 nt, Artificial Sequence
  Description of Artificial Sequence: Synthetic oligonucleotide
  Antisense strand to SEQ ID NO: 2534180
uugcaccacuguuuacagu

SEQ ID NO: 2534182 - RNA, 19 nt, Artificial Sequence
  Description of Artificial Sequence: Synthetic oligonucleotide
  Sense strand starting at position 1506 of SEQ ID NO: 1888421
gcuucuguacagcagugaa

SEQ ID NO: 2534183 - RNA, 19 nt, Artificial Sequence
  Description of Artificial Sequence: Synthetic oligonucleotide
  Antisense strand to SEQ ID NO: 2534182
uucacugcuguacagaagc

SEQ ID NO: 2534184 - RNA, 19 nt, Artificial Sequence
  Description of Artificial Sequence: Synthetic oligonucleotide
  Sense strand starting at position 3633 of SEQ ID NO: 1888421
ugucaaaguuacuuguauu

SEQ ID NO: 2534185 - RNA, 19 nt, Artificial Sequence
  Description of Artificial Sequence: Synthetic oligonucleotide
  Antisense strand to SEQ ID NO: 2534184
aauacaaguaacuuugaca

SEQ ID NO: 2534186 - RNA, 19 nt, Artificial Sequence
  Description of Artificial Sequence: Synthetic oligonucleotide
  Sense strand starting at position 592 of SEQ ID NO: 1888421
gguaaauuaucuguuugca

SEQ ID NO: 2534187 - RNA, 19 nt, Artificial Sequence
  Description of Artificial Sequence: Synthetic oligonucleotide
  Antisense strand to SEQ ID NO: 2534186
ugcaaacagauaauuuacc

SEQ ID NO: 2534188 - RNA, 19 nt, Artificial Sequence
  Description of Artificial Sequence: Synthetic oligonucleotide
  Sense strand starting at position 3961 of SEQ ID NO: 1888421
gcuaucauuccuuagcagu

SEQ ID NO: 2534189 - RNA, 19 nt, Artificial Sequence
  Description of Artificial Sequence: Synthetic oligonucleotide
  Antisense strand to SEQ ID NO: 2534188
acugcuaaggaaugauagc

SEQ ID NO: 2534190 - RNA, 19 nt, Artificial Sequence
  Description of Artificial Sequence: Synthetic oligonucleotide
  Sense strand starting at position 3460 of SEQ ID NO: 1888421
gugguacuccauuguggau

SEQ ID NO: 2534191 - RNA, 19 nt, Artificial Sequence
  Description of Artificial Sequence: Synthetic oligonucleotide
  Antisense strand to SEQ ID NO: 2534190
auccacaauggaguaccac

SEQ ID NO: 2534192 - RNA, 19 nt, Artificial Sequence
  Description of Artificial Sequence: Synthetic oligonucleotide
  Sense strand starting at position 2627 of SEQ ID NO: 1888421
uggguuuauucugcuacuu

SEQ ID NO: 2534193 - RNA, 19 nt, Artificial Sequence
  Description of Artificial Sequence: Synthetic oligonucleotide
  Antisense strand to SEQ ID NO: 2534192
aaguagcagaauaaaccca

SEQ ID NO: 2534194 - RNA, 19 nt, Artificial Sequence
  Description of Artificial Sequence: Synthetic oligonucleotide
  Sense strand starting at position 2532 of SEQ ID NO: 1888421
aggcacaacucugagaaca

SEQ ID NO: 2534195 - RNA, 19 nt, Artificial Sequence
  Description of Artificial Sequence: Synthetic oligonucleotide
  Antisense strand to SEQ ID NO: 2534194
uguucucagaguugugccu

SEQ ID NO: 2534196 - RNA, 19 nt, Artificial Sequence
  Description of Artificial Sequence: Synthetic oligonucleotide
  Sense strand starting at position 836 of SEQ ID NO: 1888421
ggugaaggaucuuacacug

SEQ ID NO: 2534197 - RNA, 19 nt, Artificial Sequence
  Description of Artificial Sequence: Synthetic oligonucleotide
  Antisense strand to SEQ ID NO: 2534196
caguguaagauccuucacc

SEQ ID NO: 2534198 - RNA, 19 nt, Artificial Sequence
  Description of Artificial Sequence: Synthetic oligonucleotide
  Sense strand starting at position 1392 of SEQ ID NO: 1888421
ugugaaagcuacuagggaa

SEQ ID NO: 2534199 - RNA, 19 nt, Artificial Sequence
  Description of Artificial Sequence: Synthetic oligonucleotide
  Antisense strand to SEQ ID NO: 2534198
uucccuaguagcuuucaca

SEQ ID NO: 2534200 - RNA, 19 nt, Artificial Sequence
  Description of Artificial Sequence: Synthetic oligonucleotide
  Sense strand starting at position 3641 of SEQ ID NO: 1888422
aacaguuaaccuggagacu

SEQ ID NO: 2534201 - RNA, 19 nt, Artificial Sequence
  Description of Artificial Sequence: Synthetic oligonucleotide
  Antisense strand to SEQ ID NO: 2534200
agucuccagguuaacuguu

SEQ ID NO: 2534202 - RNA, 19 nt, Artificial Sequence
  Description of Artificial Sequence: Synthetic oligonucleotide
  Sense strand starting at position 3588 of SEQ ID NO: 1888422
aguauaacaccucacguua

SEQ ID NO: 2534203 - RNA, 19 nt, Artificial Sequence
  Description of Artificial Sequence: Synthetic oligonucleotide
  Antisense strand to SEQ ID NO: 2534202
uaacgugagguguuauacu

SEQ ID NO: 2534204 - RNA, 19 nt, Artificial Sequence
  Description of Artificial Sequence: Synthetic oligonucleotide
  Sense strand starting at position 3684 of SEQ ID NO: 1888422
acaacuaaugccuggguua

SEQ ID NO: 2534205 - RNA, 19 nt, Artificial Sequence
  Description of Artificial Sequence: Synthetic oligonucleotide
  Antisense strand to SEQ ID NO: 2534204
uaacccaggcauuaguugu

SEQ ID NO: 2534206 - RNA, 19 nt, Artificial Sequence
  Description of Artificial Sequence: Synthetic oligonucleotide
  Sense strand starting at position 3490 of SEQ ID NO: 1888422
ccaguaggucgagguuuca

SEQ ID NO: 2534207 - RNA, 19 nt, Artificial Sequence
  Description of Artificial Sequence: Synthetic oligonucleotide
  Antisense strand to SEQ ID NO: 2534206
ugaaaccucgaccuacugg

SEQ ID NO: 2534208 - RNA, 19 nt, Artificial Sequence
  Description of Artificial Sequence: Synthetic oligonucleotide
  Sense strand starting at position 3846 of SEQ ID NO: 1888422
uguuauuaguugcuacagu

SEQ ID NO: 2534209 - RNA, 19 nt, Artificial Sequence
  Description of Artificial Sequence: Synthetic oligonucleotide
  Antisense strand to SEQ ID NO: 2534208
acuguagcaacuaauaaca

SEQ ID NO: 2534210 - RNA, 19 nt, Artificial Sequence
  Description of Artificial Sequence: Synthetic oligonucleotide
  Sense strand starting at position 3847 of SEQ ID NO: 1888422
guuauuaguugcuacaguu

SEQ ID NO: 2534211 - RNA, 19 nt, Artificial Sequence
  Description of Artificial Sequence: Synthetic oligonucleotide
  Antisense strand to SEQ ID NO: 2534210
aacuguagcaacuaauaac

SEQ ID NO: 2534212 - RNA, 19 nt, Artificial Sequence
  Description of Artificial Sequence: Synthetic oligonucleotide
  Sense strand starting at position 33 of SEQ ID NO: 1888423
gcuguuuaucaauaaagaa

SEQ ID NO: 2534213 - RNA, 19 nt, Artificial Sequence
  Description of Artificial Sequence: Synthetic oligonucleotide
  Antisense strand to SEQ ID NO: 2534212
uucuuuauugauaaacagc

SEQ ID NO: 2534214 - RNA, 19 nt, Artificial Sequence
  Description of Artificial Sequence: Synthetic oligonucleotide
  Sense strand starting at position 1170 of SEQ ID NO: 1888423
agaaauaaaggcuaugcuu

SEQ ID NO: 2534215 - RNA, 19 nt, Artificial Sequence
  Description of Artificial Sequence: Synthetic oligonucleotide
  Antisense strand to SEQ ID NO: 2534214
aagcauagccuuuauuucu

SEQ ID NO: 2534216 - RNA, 19 nt, Artificial Sequence
  Description of Artificial Sequence: Synthetic oligonucleotide
  Sense strand starting at position 2925 of SEQ ID NO: 1888423
guuaccuaagacugacaga

SEQ ID NO: 2534217 - RNA, 19 nt, Artificial Sequence
  Description of Artificial Sequence: Synthetic oligonucleotide
  Antisense strand to SEQ ID NO: 2534216
ucugucagucuuagguaac

SEQ ID NO: 2534218 - RNA, 19 nt, Artificial Sequence
  Description of Artificial Sequence: Synthetic oligonucleotide
  Sense strand starting at position 2508 of SEQ ID NO: 1888423
uuuagaaagccucaaagug

SEQ ID NO: 2534219 - RNA, 19 nt, Artificial Sequence
  Description of Artificial Sequence: Synthetic oligonucleotide
  Antisense strand to SEQ ID NO: 2534218
cacuuugaggcuuucuaaa

SEQ ID NO: 2534220 - RNA, 19 nt, Artificial Sequence
  Description of Artificial Sequence: Synthetic oligonucleotide
  Sense strand starting at position 1625 of SEQ ID NO: 1888423
gcagauuugcagugacuua

SEQ ID NO: 2534221 - RNA, 19 nt, Artificial Sequence
  Description of Artificial Sequence: Synthetic oligonucleotide
  Antisense strand to SEQ ID NO: 2534220
uaagucacugcaaaucugc

SEQ ID NO: 2534222 - RNA, 19 nt, Artificial Sequence
  Description of Artificial Sequence: Synthetic oligonucleotide
  Sense strand starting at position 2917 of SEQ ID NO: 1888423
ugacucaaguuaccuaaga

SEQ ID NO: 2534223 - RNA, 19 nt, Artificial Sequence
  Description of Artificial Sequence: Synthetic oligonucleotide
  Antisense strand to SEQ ID NO: 2534222
ucuuagguaacuugaguca

SEQ ID NO: 2534224 - RNA, 19 nt, Artificial Sequence
  Description of Artificial Sequence: Synthetic oligonucleotide
  Sense strand starting at position 2623 of SEQ ID NO: 1888423
auggcuuugaugcaggaaa

SEQ ID NO: 2534225 - RNA, 19 nt, Artificial Sequence
  Description of Artificial Sequence: Synthetic oligonucleotide
  Antisense strand to SEQ ID NO: 2534224
uuuccugcaucaaagccau

SEQ ID NO: 2534226 - RNA, 19 nt, Artificial Sequence
  Description of Artificial Sequence: Synthetic oligonucleotide
  Sense strand starting at position 822 of SEQ ID NO: 1888423
gggucuugugauuaaauca

SEQ ID NO: 2534227 - RNA, 19 nt, Artificial Sequence
  Description of Artificial Sequence: Synthetic oligonucleotide
  Antisense strand to SEQ ID NO: 2534226
ugauuuaaucacaagaccc

SEQ ID NO: 2534228 - RNA, 19 nt, Artificial Sequence
  Description of Artificial Sequence: Synthetic oligonucleotide
  Sense strand starting at position 3054 of SEQ ID NO: 1888423
uuuacagacgucuacacaa

SEQ ID NO: 2534229 - RNA, 19 nt, Artificial Sequence
  Description of Artificial Sequence: Synthetic oligonucleotide
  Antisense strand to SEQ ID NO: 2534228
uuguguagacgucuguaaa

SEQ ID NO: 2534230 - RNA, 19 nt, Artificial Sequence
  Description of Artificial Sequence: Synthetic oligonucleotide
  Sense strand starting at position 829 of SEQ ID NO: 1888423
gugauuaaaucauccugga

SEQ ID NO: 2534231 - RNA, 19 nt, Artificial Sequence
  Description of Artificial Sequence: Synthetic oligonucleotide
  Antisense strand to SEQ ID NO: 2534230
uccaggaugauuuaaucac

SEQ ID NO: 2534232 - RNA, 19 nt, Artificial Sequence
  Description of Artificial Sequence: Synthetic oligonucleotide
  Sense strand starting at position 1245 of SEQ ID NO: 1888423
uuccauuguguacacagaa

SEQ ID NO: 2534233 - RNA, 19 nt, Artificial Sequence
  Description of Artificial Sequence: Synthetic oligonucleotide
  Antisense strand to SEQ ID NO: 2534232
uucuguguacacaauggaa

SEQ ID NO: 2534234 - RNA, 19 nt, Artificial Sequence
  Description of Artificial Sequence: Synthetic oligonucleotide
  Sense strand starting at position 672 of SEQ ID NO: 1888423
aagacacgucuuuauuaug

SEQ ID NO: 2534235 - RNA, 19 nt, Artificial Sequence
  Description of Artificial Sequence: Synthetic oligonucleotide
  Antisense strand to SEQ ID NO: 2534234
cauaauaaagacgugucuu

SEQ ID NO: 2534236 - RNA, 19 nt, Artificial Sequence
  Description of Artificial Sequence: Synthetic oligonucleotide
  Sense strand starting at position 873 of SEQ ID NO: 1888423
acugguuguccuuauaaga

SEQ ID NO: 2534237 - RNA, 19 nt, Artificial Sequence
  Description of Artificial Sequence: Synthetic oligonucleotide
  Antisense strand to SEQ ID NO: 2534236
ucuuauaaggacaaccagu

SEQ ID NO: 2534238 - RNA, 19 nt, Artificial Sequence
  Description of Artificial Sequence: Synthetic oligonucleotide
  Sense strand starting at position 1119 of SEQ ID NO: 1888423
guucgugguagucuguuau

SEQ ID NO: 2534239 - RNA, 19 nt, Artificial Sequence
  Description of Artificial Sequence: Synthetic oligonucleotide
  Antisense strand to SEQ ID NO: 2534238
auaacagacuaccacgaac

SEQ ID NO: 2534240 - RNA, 19 nt, Artificial Sequence
  Description of Artificial Sequence: Synthetic oligonucleotide
  Sense strand starting at position 2128 of SEQ ID NO: 1888423
uguaauaagcuugacucua

SEQ ID NO: 2534241 - RNA, 19 nt, Artificial Sequence
  Description of Artificial Sequence: Synthetic oligonucleotide
  Antisense strand to SEQ ID NO: 2534240
uagagucaagcuuauuaca

SEQ ID NO: 2534242 - RNA, 19 nt, Artificial Sequence
  Description of Artificial Sequence: Synthetic oligonucleotide
  Sense strand starting at position 293 of SEQ ID NO: 1888423
ugugacauucuggagguuu

SEQ ID NO: 2534243 - RNA, 19 nt, Artificial Sequence
  Description of Artificial Sequence: Synthetic oligonucleotide
  Antisense strand to SEQ ID NO: 2534242
aaaccuccagaaugucaca

SEQ ID NO: 2534244 - RNA, 19 nt, Artificial Sequence
  Description of Artificial Sequence: Synthetic oligonucleotide
  Sense strand starting at position 1922 of SEQ ID NO: 1888423
acggauaauucccuaccua

SEQ ID NO: 2534245 - RNA, 19 nt, Artificial Sequence
  Description of Artificial Sequence: Synthetic oligonucleotide
  Antisense strand to SEQ ID NO: 2534244
uagguagggaauuauccgu

SEQ ID NO: 2534246 - RNA, 19 nt, Artificial Sequence
  Description of Artificial Sequence: Synthetic oligonucleotide
  Sense strand starting at position 2876 of SEQ ID NO: 1888423
ugugcuucccaggaauuga

SEQ ID NO: 2534247 - RNA, 19 nt, Artificial Sequence
  Description of Artificial Sequence: Synthetic oligonucleotide
  Antisense strand to SEQ ID NO: 2534246
ucaauuccugggaagcaca

SEQ ID NO: 2534248 - RNA, 19 nt, Artificial Sequence
  Description of Artificial Sequence: Synthetic oligonucleotide
  Sense strand starting at position 2017 of SEQ ID NO: 1888423
agagaaagcuuguccuaac

SEQ ID NO: 2534249 - RNA, 19 nt, Artificial Sequence
  Description of Artificial Sequence: Synthetic oligonucleotide
  Antisense strand to SEQ ID NO: 2534248
guuaggacaagcuuucucu

SEQ ID NO: 2534250 - RNA, 19 nt, Artificial Sequence
  Description of Artificial Sequence: Synthetic oligonucleotide
  Sense strand starting at position 1829 of SEQ ID NO: 1888423
ucaagucuagagugacauu

SEQ ID NO: 2534251 - RNA, 19 nt, Artificial Sequence
  Description of Artificial Sequence: Synthetic oligonucleotide
  Antisense strand to SEQ ID NO: 2534250
aaugucacucuagacuuga

SEQ ID NO: 2534252 - RNA, 19 nt, Artificial Sequence
  Description of Artificial Sequence: Synthetic oligonucleotide
  Sense strand starting at position 760 of SEQ ID NO: 1888423
gccaaaccucagcauguaa

SEQ ID NO: 2534253 - RNA, 19 nt, Artificial Sequence
  Description of Artificial Sequence: Synthetic oligonucleotide
  Antisense strand to SEQ ID NO: 2534252
uuacaugcugagguuuggc

SEQ ID NO: 2534254 - RNA, 19 nt, Artificial Sequence
  Description of Artificial Sequence: Synthetic oligonucleotide
  Sense strand starting at position 2018 of SEQ ID NO: 1888423
gagaaagcuuguccuaacc

SEQ ID NO: 2534255 - RNA, 19 nt, Artificial Sequence
  Description of Artificial Sequence: Synthetic oligonucleotide
  Antisense strand to SEQ ID NO: 2534254
gguuaggacaagcuuucuc

SEQ ID NO: 2534256 - RNA, 19 nt, Artificial Sequence
  Description of Artificial Sequence: Synthetic oligonucleotide
  Sense strand starting at position 1722 of SEQ ID NO: 1888423
agucaugagcuccaggguu

SEQ ID NO: 2534257 - RNA, 19 nt, Artificial Sequence
  Description of Artificial Sequence: Synthetic oligonucleotide
  Antisense strand to SEQ ID NO: 2534256
aacccuggagcucaugacu

SEQ ID NO: 2534258 - RNA, 19 nt, Artificial Sequence
  Description of Artificial Sequence: Synthetic oligonucleotide
  Sense strand starting at position 2725 of SEQ ID NO: 1888423
cuccaucaucuaggugauu

SEQ ID NO: 2534259 - RNA, 19 nt, Artificial Sequence
  Description of Artificial Sequence: Synthetic oligonucleotide
  Antisense strand to SEQ ID NO: 2534258
aaucaccuagaugauggag

SEQ ID NO: 2534260 - RNA, 19 nt, Artificial Sequence
  Description of Artificial Sequence: Synthetic oligonucleotide
  Sense strand starting at position 2667 of SEQ ID NO: 1888423
auguaagucuuccuaaauu

SEQ ID NO: 2534261 - RNA, 19 nt, Artificial Sequence
  Description of Artificial Sequence: Synthetic oligonucleotide
  Antisense strand to SEQ ID NO: 2534260
aauuuaggaagacuuacau

SEQ ID NO: 2534262 - RNA, 19 nt, Artificial Sequence
  Description of Artificial Sequence: Synthetic oligonucleotide
  Sense strand starting at position 1557 of SEQ ID NO: 1888423
gauagagugauacgucuca

SEQ ID NO: 2534263 - RNA, 19 nt, Artificial Sequence
  Description of Artificial Sequence: Synthetic oligonucleotide
  Antisense strand to SEQ ID NO: 2534262
ugagacguaucacucuauc

SEQ ID NO: 2534264 - RNA, 19 nt, Artificial Sequence
  Description of Artificial Sequence: Synthetic oligonucleotide
  Sense strand starting at position 3042 of SEQ ID NO: 1888423
gcaggaggaucguuuacag

SEQ ID NO: 2534265 - RNA, 19 nt, Artificial Sequence
  Description of Artificial Sequence: Synthetic oligonucleotide
  Antisense strand to SEQ ID NO: 2534264
cuguaaacgauccuccugc

SEQ ID NO: 2534266 - RNA, 19 nt, Artificial Sequence
  Description of Artificial Sequence: Synthetic oligonucleotide
  Sense strand starting at position 3920 of SEQ ID NO: 1888423
gaaugugagcuugagccuu

SEQ ID NO: 2534267 - RNA, 19 nt, Artificial Sequence
  Description of Artificial Sequence: Synthetic oligonucleotide
  Antisense strand to SEQ ID NO: 2534266
aaggcucaagcucacauuc

SEQ ID NO: 2534268 - RNA, 19 nt, Artificial Sequence
  Description of Artificial Sequence: Synthetic oligonucleotide
  Sense strand starting at position 2127 of SEQ ID NO: 1888423
auguaauaagcuugacucu

SEQ ID NO: 2534269 - RNA, 19 nt, Artificial Sequence
  Description of Artificial Sequence: Synthetic oligonucleotide
  Antisense strand to SEQ ID NO: 2534268
agagucaagcuuauuacau

SEQ ID NO: 2534270 - RNA, 19 nt, Artificial Sequence
  Description of Artificial Sequence: Synthetic oligonucleotide
  Sense strand starting at position 719 of SEQ ID NO: 1888423
acuguaguggguugaauau

SEQ ID NO: 2534271 - RNA, 19 nt, Artificial Sequence
  Description of Artificial Sequence: Synthetic oligonucleotide
  Antisense strand to SEQ ID NO: 2534270
auauucaacccacuacagu

SEQ ID NO: 2534272 - RNA, 19 nt, Artificial Sequence
  Description of Artificial Sequence: Synthetic oligonucleotide
  Sense strand starting at position 60 of SEQ ID NO: 1888423
agaccaguccuuuguccaa

SEQ ID NO: 2534273 - RNA, 19 nt, Artificial Sequence
  Description of Artificial Sequence: Synthetic oligonucleotide
  Antisense strand to SEQ ID NO: 2534272
uuggacaaaggacuggucu

SEQ ID NO: 2534274 - RNA, 19 nt, Artificial Sequence
  Description of Artificial Sequence: Synthetic oligonucleotide
  Sense strand starting at position 1549 of SEQ ID NO: 1888423
gccugagcgauagagugau

SEQ ID NO: 2534275 - RNA, 19 nt, Artificial Sequence
  Description of Artificial Sequence: Synthetic oligonucleotide
  Antisense strand to SEQ ID NO: 2534274
aucacucuaucgcucaggc

SEQ ID NO: 2534276 - RNA, 19 nt, Artificial Sequence
  Description of Artificial Sequence: Synthetic oligonucleotide
  Sense strand starting at position 870 of SEQ ID NO: 1888423
augacugguuguccuuaua

SEQ ID NO: 2534277 - RNA, 19 nt, Artificial Sequence
  Description of Artificial Sequence: Synthetic oligonucleotide
  Antisense strand to SEQ ID NO: 2534276
uauaaggacaaccagucau

SEQ ID NO: 2534278 - RNA, 19 nt, Artificial Sequence
  Description of Artificial Sequence: Synthetic oligonucleotide
  Sense strand starting at position 869 of SEQ ID NO: 1888423
aaugacugguuguccuuau

SEQ ID NO: 2534279 - RNA, 19 nt, Artificial Sequence
  Description of Artificial Sequence: Synthetic oligonucleotide
  Antisense strand to SEQ ID NO: 2534278
auaaggacaaccagucauu

SEQ ID NO: 2534280 - RNA, 19 nt, Artificial Sequence
  Description of Artificial Sequence: Synthetic oligonucleotide
  Sense strand starting at position 225 of SEQ ID NO: 1888423
cugguuucugcuuacuuaa

SEQ ID NO: 2534281 - RNA, 19 nt, Artificial Sequence
  Description of Artificial Sequence: Synthetic oligonucleotide
  Antisense strand to SEQ ID NO: 2534280
uuaaguaagcagaaaccag

SEQ ID NO: 2534282 - RNA, 19 nt, Artificial Sequence
  Description of Artificial Sequence: Synthetic oligonucleotide
  Sense strand starting at position 1553 of SEQ ID NO: 1888423
gagcgauagagugauacgu

SEQ ID NO: 2534283 - RNA, 19 nt, Artificial Sequence
  Description of Artificial Sequence: Synthetic oligonucleotide
  Antisense strand to SEQ ID NO: 2534282
acguaucacucuaucgcuc

SEQ ID NO: 2534284 - RNA, 19 nt, Artificial Sequence
  Description of Artificial Sequence: Synthetic oligonucleotide
  Sense strand starting at position 74 of SEQ ID NO: 1888423
uccaacuggaguuguagua

SEQ ID NO: 2534285 - RNA, 19 nt, Artificial Sequence
  Description of Artificial Sequence: Synthetic oligonucleotide
  Antisense strand to SEQ ID NO: 2534284
uacuacaacuccaguugga

SEQ ID NO: 2534286 - RNA, 19 nt, Artificial Sequence
  Description of Artificial Sequence: Synthetic oligonucleotide
  Sense strand starting at position 700 of SEQ ID NO: 1888423
ggaaaugauuaccauaaua

SEQ ID NO: 2534287 - RNA, 19 nt, Artificial Sequence
  Description of Artificial Sequence: Synthetic oligonucleotide
  Antisense strand to SEQ ID NO: 2534286
uauuaugguaaucauuucc

SEQ ID NO: 2534288 - RNA, 19 nt, Artificial Sequence
  Description of Artificial Sequence: Synthetic oligonucleotide
  Sense strand starting at position 1683 of SEQ ID NO: 1888423
ggaaaccauucucaggaaa

SEQ ID NO: 2534289 - RNA, 19 nt, Artificial Sequence
  Description of Artificial Sequence: Synthetic oligonucleotide
  Antisense strand to SEQ ID NO: 2534288
uuuccugagaaugguuucc

SEQ ID NO: 2534290 - RNA, 19 nt, Artificial Sequence
  Description of Artificial Sequence: Synthetic oligonucleotide
  Sense strand starting at position 2198 of SEQ ID NO: 1888423
aggaaauauuugcaacgua

SEQ ID NO: 2534291 - RNA, 19 nt, Artificial Sequence
  Description of Artificial Sequence: Synthetic oligonucleotide
  Antisense strand to SEQ ID NO: 2534290
uacguugcaaauauuuccu

SEQ ID NO: 2534292 - RNA, 19 nt, Artificial Sequence
  Description of Artificial Sequence: Synthetic oligonucleotide
  Sense strand starting at position 1604 of SEQ ID NO: 1888424
gauauacuccggugaaauc

SEQ ID NO: 2534293 - RNA, 19 nt, Artificial Sequence
  Description of Artificial Sequence: Synthetic oligonucleotide
  Antisense strand to SEQ ID NO: 2534292
gauuucaccggaguauauc

SEQ ID NO: 2534294 - RNA, 19 nt, Artificial Sequence
  Description of Artificial Sequence: Synthetic oligonucleotide
  Sense strand starting at position 1601 of SEQ ID NO: 1888424
ccggauauacuccggugaa

SEQ ID NO: 2534295 - RNA, 19 nt, Artificial Sequence
  Description of Artificial Sequence: Synthetic oligonucleotide
  Antisense strand to SEQ ID NO: 2534294
uucaccggaguauauccgg

SEQ ID NO: 2534296 - RNA, 19 nt, Artificial Sequence
  Description of Artificial Sequence: Synthetic oligonucleotide
  Sense strand starting at position 1602 of SEQ ID NO: 1888424
cggauauacuccggugaaa

SEQ ID NO: 2534297 - RNA, 19 nt, Artificial Sequence
  Description of Artificial Sequence: Synthetic oligonucleotide
  Antisense strand to SEQ ID NO: 2534296
uuucaccggaguauauccg

SEQ ID NO: 2534298 - RNA, 19 nt, Artificial Sequence
  Description of Artificial Sequence: Synthetic oligonucleotide
  Sense strand starting at position 2526 of SEQ ID NO: 1888428
uggguaggcucuuccggaa

SEQ ID NO: 2534299 - RNA, 19 nt, Artificial Sequence
  Description of Artificial Sequence: Synthetic oligonucleotide
  Antisense strand to SEQ ID NO: 2534298
uuccggaagagccuaccca

SEQ ID NO: 2534300 - RNA, 19 nt, Artificial Sequence
  Description of Artificial Sequence: Synthetic oligonucleotide
  Sense strand starting at position 2526 of SEQ ID NO: 1888432
uggguaggcucuuccggaa

SEQ ID NO: 2534301 - RNA, 19 nt, Artificial Sequence
  Description of Artificial Sequence: Synthetic oligonucleotide
  Antisense strand to SEQ ID NO: 2534300
uuccggaagagccuaccca

SEQ ID NO: 2534302 - RNA, 19 nt, Artificial Sequence
  Description of Artificial Sequence: Synthetic oligonucleotide
  Sense strand starting at position 2526 of SEQ ID NO: 1888436
uggguaggcucuuccggaa

SEQ ID NO: 2534303 - RNA, 19 nt, Artificial Sequence
  Description of Artificial Sequence: Synthetic oligonucleotide
  Antisense strand to SEQ ID NO: 2534302
uuccggaagagccuaccca

SEQ ID NO: 2534304 - RNA, 19 nt, Artificial Sequence
  Description of Artificial Sequence: Synthetic oligonucleotide
  Sense strand starting at position 2526 of SEQ ID NO: 1888440
uggguaggcucuuccggaa

SEQ ID NO: 2534305 - RNA, 19 nt, Artificial Sequence
  Description of Artificial Sequence: Synthetic oligonucleotide
  Antisense strand to SEQ ID NO: 2534304
uuccggaagagccuaccca

SEQ ID NO: 2534306 - RNA, 19 nt, Artificial Sequence
  Description of Artificial Sequence: Synthetic oligonucleotide
  Sense strand starting at position 3109 of SEQ ID NO: 1888441
agggaacacuaggcauauu

SEQ ID NO: 2534307 - RNA, 19 nt, Artificial Sequence
  Description of Artificial Sequence: Synthetic oligonucleotide
  Antisense strand to SEQ ID NO: 2534306
aauaugccuaguguucccu

SEQ ID NO: 2534308 - RNA, 19 nt, Artificial Sequence
  Description of Artificial Sequence: Synthetic oligonucleotide
  Sense strand starting at position 3512 of SEQ ID NO: 1888441
ucaugaguagcccagaaau

SEQ ID NO: 2534309 - RNA, 19 nt, Artificial Sequence
  Description of Artificial Sequence: Synthetic oligonucleotide
  Antisense strand to SEQ ID NO: 2534308
auuucugggcuacucauga

SEQ ID NO: 2534310 - RNA, 19 nt, Artificial Sequence
  Description of Artificial Sequence: Synthetic oligonucleotide
  Sense strand starting at position 3523 of SEQ ID NO: 1888441
ccagaaaugucuuuagagg

SEQ ID NO: 2534311 - RNA, 19 nt, Artificial Sequence
  Description of Artificial Sequence: Synthetic oligonucleotide
  Antisense strand to SEQ ID NO: 2534310
ccucuaaagacauuucugg

SEQ ID NO: 2534312 - RNA, 19 nt, Artificial Sequence
  Description of Artificial Sequence: Synthetic oligonucleotide
  Sense strand starting at position 847 of SEQ ID NO: 1888441
agaggagugguuuggaaac

SEQ ID NO: 2534313 - RNA, 19 nt, Artificial Sequence
  Description of Artificial Sequence: Synthetic oligonucleotide
  Antisense strand to SEQ ID NO: 2534312
guuuccaaaccacuccucu

SEQ ID NO: 2534314 - RNA, 19 nt, Artificial Sequence
  Description of Artificial Sequence: Synthetic oligonucleotide
  Sense strand starting at position 3181 of SEQ ID NO: 1888441
gggugucacaucuaucaga

SEQ ID NO: 2534315 - RNA, 19 nt, Artificial Sequence
  Description of Artificial Sequence: Synthetic oligonucleotide
  Antisense strand to SEQ ID NO: 2534314
ucugauagaugugacaccc

SEQ ID NO: 2534316 - RNA, 19 nt, Artificial Sequence
  Description of Artificial Sequence: Synthetic oligonucleotide
  Sense strand starting at position 792 of SEQ ID NO: 1888441
gcgggaugggcucagaaga

SEQ ID NO: 2534317 - RNA, 19 nt, Artificial Sequence
  Description of Artificial Sequence: Synthetic oligonucleotide
  Antisense strand to SEQ ID NO: 2534316
ucuucugagcccaucccgc

SEQ ID NO: 2534318 - RNA, 19 nt, Artificial Sequence
  Description of Artificial Sequence: Synthetic oligonucleotide
  Sense strand starting at position 1067 of SEQ ID NO: 1888441
cguacacacgcguuccaua

SEQ ID NO: 2534319 - RNA, 19 nt, Artificial Sequence
  Description of Artificial Sequence: Synthetic oligonucleotide
  Antisense strand to SEQ ID NO: 2534318
uauggaacgcguguguacg

SEQ ID NO: 2534320 - RNA, 19 nt, Artificial Sequence
  Description of Artificial Sequence: Synthetic oligonucleotide
  Sense strand starting at position 512 of SEQ ID NO: 1888441
cuggguggcacucaucaga

SEQ ID NO: 2534321 - RNA, 19 nt, Artificial Sequence
  Description of Artificial Sequence: Synthetic oligonucleotide
  Antisense strand to SEQ ID NO: 2534320
ucugaugagugccacccag

SEQ ID NO: 2534322 - RNA, 19 nt, Artificial Sequence
  Description of Artificial Sequence: Synthetic oligonucleotide
  Sense strand starting at position 372 of SEQ ID NO: 1888441
ggauuaaucgcccaacacc

SEQ ID NO: 2534323 - RNA, 19 nt, Artificial Sequence
  Description of Artificial Sequence: Synthetic oligonucleotide
  Antisense strand to SEQ ID NO: 2534322
gguguugggcgauuaaucc

SEQ ID NO: 2534324 - RNA, 19 nt, Artificial Sequence
  Description of Artificial Sequence: Synthetic oligonucleotide
  Sense strand starting at position 3964 of SEQ ID NO: 1888441
gccuucuagcaugaugaga

SEQ ID NO: 2534325 - RNA, 19 nt, Artificial Sequence
  Description of Artificial Sequence: Synthetic oligonucleotide
  Antisense strand to SEQ ID NO: 2534324
ucucaucaugcuagaaggc

SEQ ID NO: 2534326 - RNA, 19 nt, Artificial Sequence
  Description of Artificial Sequence: Synthetic oligonucleotide
  Sense strand starting at position 3602 of SEQ ID NO: 1888441
gugugacaacuuugaggau

SEQ ID NO: 2534327 - RNA, 19 nt, Artificial Sequence
  Description of Artificial Sequence: Synthetic oligonucleotide
  Antisense strand to SEQ ID NO: 2534326
auccucaaaguugucacac

SEQ ID NO: 2534328 - RNA, 19 nt, Artificial Sequence
  Description of Artificial Sequence: Synthetic oligonucleotide
  Sense strand starting at position 1039 of SEQ ID NO: 1888441
ggacaugucacucggauga

SEQ ID NO: 2534329 - RNA, 19 nt, Artificial Sequence
  Description of Artificial Sequence: Synthetic oligonucleotide
  Antisense strand to SEQ ID NO: 2534328
ucauccgagugacaugucc

SEQ ID NO: 2534330 - RNA, 19 nt, Artificial Sequence
  Description of Artificial Sequence: Synthetic oligonucleotide
  Sense strand starting at position 1361 of SEQ ID NO: 1888441
aucucaucagggugacuuu

SEQ ID NO: 2534331 - RNA, 19 nt, Artificial Sequence
  Description of Artificial Sequence: Synthetic oligonucleotide
  Antisense strand to SEQ ID NO: 2534330
aaagucacccugaugagau

SEQ ID NO: 2534332 - RNA, 19 nt, Artificial Sequence
  Description of Artificial Sequence: Synthetic oligonucleotide
  Sense strand starting at position 2819 of SEQ ID NO: 1888441
caauaaauaucguuaagug

SEQ ID NO: 2534333 - RNA, 19 nt, Artificial Sequence
  Description of Artificial Sequence: Synthetic oligonucleotide
  Antisense strand to SEQ ID NO: 2534332
cacuuaacgauauuuauug

SEQ ID NO: 2534334 - RNA, 19 nt, Artificial Sequence
  Description of Artificial Sequence: Synthetic oligonucleotide
  Sense strand starting at position 3972 of SEQ ID NO: 1888441
gcaugaugagaauguucug

SEQ ID NO: 2534335 - RNA, 19 nt, Artificial Sequence
  Description of Artificial Sequence: Synthetic oligonucleotide
  Antisense strand to SEQ ID NO: 2534334
cagaacauucucaucaugc

SEQ ID NO: 2534336 - RNA, 19 nt, Artificial Sequence
  Description of Artificial Sequence: Synthetic oligonucleotide
  Sense strand starting at position 370 of SEQ ID NO: 1888441
ugggauuaaucgcccaaca

SEQ ID NO: 2534337 - RNA, 19 nt, Artificial Sequence
  Description of Artificial Sequence: Synthetic oligonucleotide
  Antisense strand to SEQ ID NO: 2534336
uguugggcgauuaauccca

SEQ ID NO: 2534338 - RNA, 19 nt, Artificial Sequence
  Description of Artificial Sequence: Synthetic oligonucleotide
  Sense strand starting at position 3384 of SEQ ID NO: 1888441
gcuggaagaucucuucuca

SEQ ID NO: 2534339 - RNA, 19 nt, Artificial Sequence
  Description of Artificial Sequence: Synthetic oligonucleotide
  Antisense strand to SEQ ID NO: 2534338
ugagaagagaucuuccagc

SEQ ID NO: 2534340 - RNA, 19 nt, Artificial Sequence
  Description of Artificial Sequence: Synthetic oligonucleotide
  Sense strand starting at position 2372 of SEQ ID NO: 1888441
gaagaagucuuccucaguu

SEQ ID NO: 2534341 - RNA, 19 nt, Artificial Sequence
  Description of Artificial Sequence: Synthetic oligonucleotide
  Antisense strand to SEQ ID NO: 2534340
aacugaggaagacuucuuc

SEQ ID NO: 2534342 - RNA, 19 nt, Artificial Sequence
  Description of Artificial Sequence: Synthetic oligonucleotide
  Sense strand starting at position 3325 of SEQ ID NO: 1888441
gcguucugugcuuucuacu

SEQ ID NO: 2534343 - RNA, 19 nt, Artificial Sequence
  Description of Artificial Sequence: Synthetic oligonucleotide
  Antisense strand to SEQ ID NO: 2534342
aguagaaagcacagaacgc

SEQ ID NO: 2534344 - RNA, 19 nt, Artificial Sequence
  Description of Artificial Sequence: Synthetic oligonucleotide
  Sense strand starting at position 71 of SEQ ID NO: 1888441
guggguaaguggaaucuga

SEQ ID NO: 2534345 - RNA, 19 nt, Artificial Sequence
  Description of Artificial Sequence: Synthetic oligonucleotide
  Antisense strand to SEQ ID NO: 2534344
ucagauuccacuuacccac

SEQ ID NO: 2534346 - RNA, 19 nt, Artificial Sequence
  Description of Artificial Sequence: Synthetic oligonucleotide
  Sense strand starting at position 3614 of SEQ ID NO: 1888441
ugaggaugguguucggaau

SEQ ID NO: 2534347 - RNA, 19 nt, Artificial Sequence
  Description of Artificial Sequence: Synthetic oligonucleotide
  Antisense strand to SEQ ID NO: 2534346
auuccgaacaccauccuca

SEQ ID NO: 2534348 - RNA, 19 nt, Artificial Sequence
  Description of Artificial Sequence: Synthetic oligonucleotide
  Sense strand starting at position 342 of SEQ ID NO: 1888441
cugaucuccugagcucaca

SEQ ID NO: 2534349 - RNA, 19 nt, Artificial Sequence
  Description of Artificial Sequence: Synthetic oligonucleotide
  Antisense strand to SEQ ID NO: 2534348
ugugagcucaggagaucag

SEQ ID NO: 2534350 - RNA, 19 nt, Artificial Sequence
  Description of Artificial Sequence: Synthetic oligonucleotide
  Sense strand starting at position 399 of SEQ ID NO: 1888441
cguuauaaagcucacuuau

SEQ ID NO: 2534351 - RNA, 19 nt, Artificial Sequence
  Description of Artificial Sequence: Synthetic oligonucleotide
  Antisense strand to SEQ ID NO: 2534350
auaagugagcuuuauaacg

SEQ ID NO: 2534352 - RNA, 19 nt, Artificial Sequence
  Description of Artificial Sequence: Synthetic oligonucleotide
  Sense strand starting at position 3589 of SEQ ID NO: 1888441
uaaguaagucaagguguga

SEQ ID NO: 2534353 - RNA, 19 nt, Artificial Sequence
  Description of Artificial Sequence: Synthetic oligonucleotide
  Antisense strand to SEQ ID NO: 2534352
ucacaccuugacuuacuua

SEQ ID NO: 2534354 - RNA, 19 nt, Artificial Sequence
  Description of Artificial Sequence: Synthetic oligonucleotide
  Sense strand starting at position 949 of SEQ ID NO: 1888441
uccagaucaugagcaguuu

SEQ ID NO: 2534355 - RNA, 19 nt, Artificial Sequence
  Description of Artificial Sequence: Synthetic oligonucleotide
  Antisense strand to SEQ ID NO: 2534354
aaacugcucaugaucugga

SEQ ID NO: 2534356 - RNA, 19 nt, Artificial Sequence
  Description of Artificial Sequence: Synthetic oligonucleotide
  Sense strand starting at position 3323 of SEQ ID NO: 1888441
acgcguucugugcuuucua

SEQ ID NO: 2534357 - RNA, 19 nt, Artificial Sequence
  Description of Artificial Sequence: Synthetic oligonucleotide
  Antisense strand to SEQ ID NO: 2534356
uagaaagcacagaacgcgu

SEQ ID NO: 2534358 - RNA, 19 nt, Artificial Sequence
  Description of Artificial Sequence: Synthetic oligonucleotide
  Sense strand starting at position 2532 of SEQ ID NO: 1888441
ugggcucuagcuuauuauu

SEQ ID NO: 2534359 - RNA, 19 nt, Artificial Sequence
  Description of Artificial Sequence: Synthetic oligonucleotide
  Antisense strand to SEQ ID NO: 2534358
aauaauaagcuagagccca

SEQ ID NO: 2534360 - RNA, 19 nt, Artificial Sequence
  Description of Artificial Sequence: Synthetic oligonucleotide
  Sense strand starting at position 3756 of SEQ ID NO: 1888441
uguaaugcuccugaacugu

SEQ ID NO: 2534361 - RNA, 19 nt, Artificial Sequence
  Description of Artificial Sequence: Synthetic oligonucleotide
  Antisense strand to SEQ ID NO: 2534360
acaguucaggagcauuaca

SEQ ID NO: 2534362 - RNA, 19 nt, Artificial Sequence
  Description of Artificial Sequence: Synthetic oligonucleotide
  Sense strand starting at position 1072 of SEQ ID NO: 1888441
acacgcguuccauauaaac

SEQ ID NO: 2534363 - RNA, 19 nt, Artificial Sequence
  Description of Artificial Sequence: Synthetic oligonucleotide
  Antisense strand to SEQ ID NO: 2534362
guuuauauggaacgcgugu

SEQ ID NO: 2534364 - RNA, 19 nt, Artificial Sequence
  Description of Artificial Sequence: Synthetic oligonucleotide
  Sense strand starting at position 316 of SEQ ID NO: 1888441
gcgcauauuccugauauac

SEQ ID NO: 2534365 - RNA, 19 nt, Artificial Sequence
  Description of Artificial Sequence: Synthetic oligonucleotide
  Antisense strand to SEQ ID NO: 2534364
guauaucaggaauaugcgc

SEQ ID NO: 2534366 - RNA, 19 nt, Artificial Sequence
  Description of Artificial Sequence: Synthetic oligonucleotide
  Sense strand starting at position 1372 of SEQ ID NO: 1888441
gugacuuuccuaugccaga

SEQ ID NO: 2534367 - RNA, 19 nt, Artificial Sequence
  Description of Artificial Sequence: Synthetic oligonucleotide
  Antisense strand to SEQ ID NO: 2534366
ucuggcauaggaaagucac

SEQ ID NO: 2534368 - RNA, 19 nt, Artificial Sequence
  Description of Artificial Sequence: Synthetic oligonucleotide
  Sense strand starting at position 2912 of SEQ ID NO: 1888441
aguaaacgcccggaauguu

SEQ ID NO: 2534369 - RNA, 19 nt, Artificial Sequence
  Description of Artificial Sequence: Synthetic oligonucleotide
  Antisense strand to SEQ ID NO: 2534368
aacauuccgggcguuuacu

SEQ ID NO: 2534370 - RNA, 19 nt, Artificial Sequence
  Description of Artificial Sequence: Synthetic oligonucleotide
  Sense strand starting at position 1904 of SEQ ID NO: 1888441
ccaugaugugcaggauguu

SEQ ID NO: 2534371 - RNA, 19 nt, Artificial Sequence
  Description of Artificial Sequence: Synthetic oligonucleotide
  Antisense strand to SEQ ID NO: 2534370
aacauccugcacaucaugg

SEQ ID NO: 2534372 - RNA, 19 nt, Artificial Sequence
  Description of Artificial Sequence: Synthetic oligonucleotide
  Sense strand starting at position 1056 of SEQ ID NO: 1888441
gaugacuucugcguacaca

SEQ ID NO: 2534373 - RNA, 19 nt, Artificial Sequence
  Description of Artificial Sequence: Synthetic oligonucleotide
  Antisense strand to SEQ ID NO: 2534372
uguguacgcagaagucauc

SEQ ID NO: 2534374 - RNA, 19 nt, Artificial Sequence
  Description of Artificial Sequence: Synthetic oligonucleotide
  Sense strand starting at position 1913 of SEQ ID NO: 1888441
gcaggauguucuucucauc

SEQ ID NO: 2534375 - RNA, 19 nt, Artificial Sequence
  Description of Artificial Sequence: Synthetic oligonucleotide
  Antisense strand to SEQ ID NO: 2534374
gaugagaagaacauccugc

SEQ ID NO: 2534376 - RNA, 19 nt, Artificial Sequence
  Description of Artificial Sequence: Synthetic oligonucleotide
  Sense strand starting at position 2534 of SEQ ID NO: 1888441
ggcucuagcuuauuauuau

SEQ ID NO: 2534377 - RNA, 19 nt, Artificial Sequence
  Description of Artificial Sequence: Synthetic oligonucleotide
  Antisense strand to SEQ ID NO: 2534376
auaauaauaagcuagagcc

SEQ ID NO: 2534378 - RNA, 19 nt, Artificial Sequence
  Description of Artificial Sequence: Synthetic oligonucleotide
  Sense strand starting at position 62 of SEQ ID NO: 1888441
agguuucugguggguaagu

SEQ ID NO: 2534379 - RNA, 19 nt, Artificial Sequence
  Description of Artificial Sequence: Synthetic oligonucleotide
  Antisense strand to SEQ ID NO: 2534378
acuuacccaccagaaaccu

SEQ ID NO: 2534380 - RNA, 19 nt, Artificial Sequence
  Description of Artificial Sequence: Synthetic oligonucleotide
  Sense strand starting at position 2182 of SEQ ID NO: 1888441
caguguguuuggucacaga

SEQ ID NO: 2534381 - RNA, 19 nt, Artificial Sequence
  Description of Artificial Sequence: Synthetic oligonucleotide
  Antisense strand to SEQ ID NO: 2534380
ucugugaccaaacacacug

SEQ ID NO: 2534382 - RNA, 19 nt, Artificial Sequence
  Description of Artificial Sequence: Synthetic oligonucleotide
  Sense strand starting at position 668 of SEQ ID NO: 1888441
gcuauuuagugucagggaa

SEQ ID NO: 2534383 - RNA, 19 nt, Artificial Sequence
  Description of Artificial Sequence: Synthetic oligonucleotide
  Antisense strand to SEQ ID NO: 2534382
uucccugacacuaaauagc

SEQ ID NO: 2534384 - RNA, 19 nt, Artificial Sequence
  Description of Artificial Sequence: Synthetic oligonucleotide
  Sense strand starting at position 314 of SEQ ID NO: 1888441
gggcgcauauuccugauau

SEQ ID NO: 2534385 - RNA, 19 nt, Artificial Sequence
  Description of Artificial Sequence: Synthetic oligonucleotide
  Antisense strand to SEQ ID NO: 2534384
auaucaggaauaugcgccc

SEQ ID NO: 2534386 - RNA, 19 nt, Artificial Sequence
  Description of Artificial Sequence: Synthetic oligonucleotide
  Sense strand starting at position 795 of SEQ ID NO: 1888442
guguauccacgugugguau

SEQ ID NO: 2534387 - RNA, 19 nt, Artificial Sequence
  Description of Artificial Sequence: Synthetic oligonucleotide
  Antisense strand to SEQ ID NO: 2534386
auaccacacguggauacac

SEQ ID NO: 2534388 - RNA, 19 nt, Artificial Sequence
  Description of Artificial Sequence: Synthetic oligonucleotide
  Sense strand starting at position 3097 of SEQ ID NO: 1888442
ugaagucugggagaugcuu

SEQ ID NO: 2534389 - RNA, 19 nt, Artificial Sequence
  Description of Artificial Sequence: Synthetic oligonucleotide
  Antisense strand to SEQ ID NO: 2534388
aagcaucucccagacuuca

SEQ ID NO: 2534390 - RNA, 19 nt, Artificial Sequence
  Description of Artificial Sequence: Synthetic oligonucleotide
  Sense strand starting at position 834 of SEQ ID NO: 1888442
gcauguguccacgugugau

SEQ ID NO: 2534391 - RNA, 19 nt, Artificial Sequence
  Description of Artificial Sequence: Synthetic oligonucleotide
  Antisense strand to SEQ ID NO: 2534390
aucacacguggacacaugc

SEQ ID NO: 2534392 - RNA, 19 nt, Artificial Sequence
  Description of Artificial Sequence: Synthetic oligonucleotide
  Sense strand starting at position 3094 of SEQ ID NO: 1888442
agcugaagucugggagaug

SEQ ID NO: 2534393 - RNA, 19 nt, Artificial Sequence
  Description of Artificial Sequence: Synthetic oligonucleotide
  Antisense strand to SEQ ID NO: 2534392
caucucccagacuucagcu

SEQ ID NO: 2534394 - RNA, 19 nt, Artificial Sequence
  Description of Artificial Sequence: Synthetic oligonucleotide
  Sense strand starting at position 3105 of SEQ ID NO: 1888442
gggagaugcuuccugaauu

SEQ ID NO: 2534395 - RNA, 19 nt, Artificial Sequence
  Description of Artificial Sequence: Synthetic oligonucleotide
  Antisense strand to SEQ ID NO: 2534394
aauucaggaagcaucuccc

SEQ ID NO: 2534396 - RNA, 19 nt, Artificial Sequence
  Description of Artificial Sequence: Synthetic oligonucleotide
  Sense strand starting at position 3117 of SEQ ID NO: 1888442
cugaauuuguuacaagaga

SEQ ID NO: 2534397 - RNA, 19 nt, Artificial Sequence
  Description of Artificial Sequence: Synthetic oligonucleotide
  Antisense strand to SEQ ID NO: 2534396
ucucuuguaacaaauucag

SEQ ID NO: 2534398 - RNA, 19 nt, Artificial Sequence
  Description of Artificial Sequence: Synthetic oligonucleotide
  Sense strand starting at position 1997 of SEQ ID NO: 1888442
cagugucuacauggaaaug

SEQ ID NO: 2534399 - RNA, 19 nt, Artificial Sequence
  Description of Artificial Sequence: Synthetic oligonucleotide
  Antisense strand to SEQ ID NO: 2534398
cauuuccauguagacacug

SEQ ID NO: 2534400 - RNA, 19 nt, Artificial Sequence
  Description of Artificial Sequence: Synthetic oligonucleotide
  Sense strand starting at position 30 of SEQ ID NO: 1888442
cugauacuucugggccaga

SEQ ID NO: 2534401 - RNA, 19 nt, Artificial Sequence
  Description of Artificial Sequence: Synthetic oligonucleotide
  Antisense strand to SEQ ID NO: 2534400
ucuggcccagaaguaucag

SEQ ID NO: 2534402 - RNA, 19 nt, Artificial Sequence
  Description of Artificial Sequence: Synthetic oligonucleotide
  Sense strand starting at position 634 of SEQ ID NO: 1888442
uuggguguuacauacaugu

SEQ ID NO: 2534403 - RNA, 19 nt, Artificial Sequence
  Description of Artificial Sequence: Synthetic oligonucleotide
  Antisense strand to SEQ ID NO: 2534402
acauguauguaacacccaa

SEQ ID NO: 2534404 - RNA, 19 nt, Artificial Sequence
  Description of Artificial Sequence: Synthetic oligonucleotide
  Sense strand starting at position 3115 of SEQ ID NO: 1888442
uccugaauuuguuacaaga

SEQ ID NO: 2534405 - RNA, 19 nt, Artificial Sequence
  Description of Artificial Sequence: Synthetic oligonucleotide
  Antisense strand to SEQ ID NO: 2534404
ucuuguaacaaauucagga

SEQ ID NO: 2534406 - RNA, 19 nt, Artificial Sequence
  Description of Artificial Sequence: Synthetic oligonucleotide
  Sense strand starting at position 2733 of SEQ ID NO: 1888442
ggugcucugguucagaaug

SEQ ID NO: 2534407 - RNA, 19 nt, Artificial Sequence
  Description of Artificial Sequence: Synthetic oligonucleotide
  Antisense strand to SEQ ID NO: 2534406
cauucugaaccagagcacc

SEQ ID NO: 2534408 - RNA, 19 nt, Artificial Sequence
  Description of Artificial Sequence: Synthetic oligonucleotide
  Sense strand starting at position 2844 of SEQ ID NO: 1888442
ggaagugucugagcuggga

SEQ ID NO: 2534409 - RNA, 19 nt, Artificial Sequence
  Description of Artificial Sequence: Synthetic oligonucleotide
  Antisense strand to SEQ ID NO: 2534408
ucccagcucagacacuucc

SEQ ID NO: 2534410 - RNA, 19 nt, Artificial Sequence
  Description of Artificial Sequence: Synthetic oligonucleotide
  Sense strand starting at position 1474 of SEQ ID NO: 1888442
ucauuacugugcuuggaaa

SEQ ID NO: 2534411 - RNA, 19 nt, Artificial Sequence
  Description of Artificial Sequence: Synthetic oligonucleotide
  Antisense strand to SEQ ID NO: 2534410
uuuccaagcacaguaauga

SEQ ID NO: 2534412 - RNA, 19 nt, Artificial Sequence
  Description of Artificial Sequence: Synthetic oligonucleotide
  Sense strand starting at position 636 of SEQ ID NO: 1888442
ggguguuacauacaugugu

SEQ ID NO: 2534413 - RNA, 19 nt, Artificial Sequence
  Description of Artificial Sequence: Synthetic oligonucleotide
  Antisense strand to SEQ ID NO: 2534412
acacauguauguaacaccc

SEQ ID NO: 2534414 - RNA, 19 nt, Artificial Sequence
  Description of Artificial Sequence: Synthetic oligonucleotide
  Sense strand starting at position 1475 of SEQ ID NO: 1888442
cauuacugugcuuggaaac

SEQ ID NO: 2534415 - RNA, 19 nt, Artificial Sequence
  Description of Artificial Sequence: Synthetic oligonucleotide
  Antisense strand to SEQ ID NO: 2534414
guuuccaagcacaguaaug

SEQ ID NO: 2534416 - RNA, 19 nt, Artificial Sequence
  Description of Artificial Sequence: Synthetic oligonucleotide
  Sense strand starting at position 1463 of SEQ ID NO: 1888442
agucgaucacgucauuacu

SEQ ID NO: 2534417 - RNA, 19 nt, Artificial Sequence
  Description of Artificial Sequence: Synthetic oligonucleotide
  Antisense strand to SEQ ID NO: 2534416
aguaaugacgugaucgacu

SEQ ID NO: 2534418 - RNA, 19 nt, Artificial Sequence
  Description of Artificial Sequence: Synthetic oligonucleotide
  Sense strand starting at position 3965 of SEQ ID NO: 1888442
gguggagacuugcuugguu

SEQ ID NO: 2534419 - RNA, 19 nt, Artificial Sequence
  Description of Artificial Sequence: Synthetic oligonucleotide
  Antisense strand to SEQ ID NO: 2534418
aaccaagcaagucuccacc

SEQ ID NO: 2534420 - RNA, 19 nt, Artificial Sequence
  Description of Artificial Sequence: Synthetic oligonucleotide
  Sense strand starting at position 707 of SEQ ID NO: 1888442
gugauauguaugugugaug

SEQ ID NO: 2534421 - RNA, 19 nt, Artificial Sequence
  Description of Artificial Sequence: Synthetic oligonucleotide
  Antisense strand to SEQ ID NO: 2534420
caucacacauacauaucac

SEQ ID NO: 2534422 - RNA, 19 nt, Artificial Sequence
  Description of Artificial Sequence: Synthetic oligonucleotide
  Sense strand starting at position 3972 of SEQ ID NO: 1888442
acuugcuugguuugugaaa

SEQ ID NO: 2534423 - RNA, 19 nt, Artificial Sequence
  Description of Artificial Sequence: Synthetic oligonucleotide
  Antisense strand to SEQ ID NO: 2534422
uuucacaaaccaagcaagu

SEQ ID NO: 2534424 - RNA, 19 nt, Artificial Sequence
  Description of Artificial Sequence: Synthetic oligonucleotide
  Sense strand starting at position 3970 of SEQ ID NO: 1888442
agacuugcuugguuuguga

SEQ ID NO: 2534425 - RNA, 19 nt, Artificial Sequence
  Description of Artificial Sequence: Synthetic oligonucleotide
  Antisense strand to SEQ ID NO: 2534424
ucacaaaccaagcaagucu

SEQ ID NO: 2534426 - RNA, 19 nt, Artificial Sequence
  Description of Artificial Sequence: Synthetic oligonucleotide
  Sense strand starting at position 701 of SEQ ID NO: 1888442
acaugugugauauguaugu

SEQ ID NO: 2534427 - RNA, 19 nt, Artificial Sequence
  Description of Artificial Sequence: Synthetic oligonucleotide
  Antisense strand to SEQ ID NO: 2534426
acauacauaucacacaugu

SEQ ID NO: 2534428 - RNA, 19 nt, Artificial Sequence
  Description of Artificial Sequence: Synthetic oligonucleotide
  Sense strand starting at position 708 of SEQ ID NO: 1888442
ugauauguaugugugaugu

SEQ ID NO: 2534429 - RNA, 19 nt, Artificial Sequence
  Description of Artificial Sequence: Synthetic oligonucleotide
  Antisense strand to SEQ ID NO: 2534428
acaucacacauacauauca

SEQ ID NO: 2534430 - RNA, 19 nt, Artificial Sequence
  Description of Artificial Sequence: Synthetic oligonucleotide
  Sense strand starting at position 696 of SEQ ID NO: 1888442
uguguacaugugugauaug

SEQ ID NO: 2534431 - RNA, 19 nt, Artificial Sequence
  Description of Artificial Sequence: Synthetic oligonucleotide
  Antisense strand to SEQ ID NO: 2534430
cauaucacacauguacaca

SEQ ID NO: 2534432 - RNA, 19 nt, Artificial Sequence
  Description of Artificial Sequence: Synthetic oligonucleotide
  Sense strand starting at position 1696 of SEQ ID NO: 1888442
guaguuguggcccaaaugu

SEQ ID NO: 2534433 - RNA, 19 nt, Artificial Sequence
  Description of Artificial Sequence: Synthetic oligonucleotide
  Antisense strand to SEQ ID NO: 2534432
acauuugggccacaacuac

SEQ ID NO: 2534434 - RNA, 19 nt, Artificial Sequence
  Description of Artificial Sequence: Synthetic oligonucleotide
  Sense strand starting at position 736 of SEQ ID NO: 1888442
cauguauggugugcauaau

SEQ ID NO: 2534435 - RNA, 19 nt, Artificial Sequence
  Description of Artificial Sequence: Synthetic oligonucleotide
  Antisense strand to SEQ ID NO: 2534434
auuaugcacaccauacaug

SEQ ID NO: 2534436 - RNA, 19 nt, Artificial Sequence
  Description of Artificial Sequence: Synthetic oligonucleotide
  Sense strand starting at position 3973 of SEQ ID NO: 1888442
cuugcuugguuugugaaau

SEQ ID NO: 2534437 - RNA, 19 nt, Artificial Sequence
  Description of Artificial Sequence: Synthetic oligonucleotide
  Antisense strand to SEQ ID NO: 2534436
auuucacaaaccaagcaag

SEQ ID NO: 2534438 - RNA, 19 nt, Artificial Sequence
  Description of Artificial Sequence: Synthetic oligonucleotide
  Sense strand starting at position 3106 of SEQ ID NO: 1888442
ggagaugcuuccugaauuu

SEQ ID NO: 2534439 - RNA, 19 nt, Artificial Sequence
  Description of Artificial Sequence: Synthetic oligonucleotide
  Antisense strand to SEQ ID NO: 2534438
aaauucaggaagcaucucc

SEQ ID NO: 2534440 - RNA, 19 nt, Artificial Sequence
  Description of Artificial Sequence: Synthetic oligonucleotide
  Sense strand starting at position 1636 of SEQ ID NO: 1888442
gcgucuucccucuaagggu

SEQ ID NO: 2534441 - RNA, 19 nt, Artificial Sequence
  Description of Artificial Sequence: Synthetic oligonucleotide
  Antisense strand to SEQ ID NO: 2534440
acccuuagagggaagacgc

SEQ ID NO: 2534442 - RNA, 19 nt, Artificial Sequence
  Description of Artificial Sequence: Synthetic oligonucleotide
  Sense strand starting at position 746 of SEQ ID NO: 1888442
gugcauaauccauggugug

SEQ ID NO: 2534443 - RNA, 19 nt, Artificial Sequence
  Description of Artificial Sequence: Synthetic oligonucleotide
  Antisense strand to SEQ ID NO: 2534442
cacaccauggauuaugcac

SEQ ID NO: 2534444 - RNA, 19 nt, Artificial Sequence
  Description of Artificial Sequence: Synthetic oligonucleotide
  Sense strand starting at position 705 of SEQ ID NO: 1888442
gugugauauguauguguga

SEQ ID NO: 2534445 - RNA, 19 nt, Artificial Sequence
  Description of Artificial Sequence: Synthetic oligonucleotide
  Antisense strand to SEQ ID NO: 2534444
ucacacauacauaucacac

SEQ ID NO: 2534446 - RNA, 19 nt, Artificial Sequence
  Description of Artificial Sequence: Synthetic oligonucleotide
  Sense strand starting at position 1012 of SEQ ID NO: 1888442
uaauguguggugugugaua

SEQ ID NO: 2534447 - RNA, 19 nt, Artificial Sequence
  Description of Artificial Sequence: Synthetic oligonucleotide
  Antisense strand to SEQ ID NO: 2534446
uaucacacaccacacauua

SEQ ID NO: 2534448 - RNA, 19 nt, Artificial Sequence
  Description of Artificial Sequence: Synthetic oligonucleotide
  Sense strand starting at position 1405 of SEQ ID NO: 1888442
ccacuuucugccgaguguu

SEQ ID NO: 2534449 - RNA, 19 nt, Artificial Sequence
  Description of Artificial Sequence: Synthetic oligonucleotide
  Antisense strand to SEQ ID NO: 2534448
aacacucggcagaaagugg

SEQ ID NO: 2534450 - RNA, 19 nt, Artificial Sequence
  Description of Artificial Sequence: Synthetic oligonucleotide
  Sense strand starting at position 695 of SEQ ID NO: 1888442
guguguacaugugugauau

SEQ ID NO: 2534451 - RNA, 19 nt, Artificial Sequence
  Description of Artificial Sequence: Synthetic oligonucleotide
  Antisense strand to SEQ ID NO: 2534450
auaucacacauguacacac

SEQ ID NO: 2534452 - RNA, 19 nt, Artificial Sequence
  Description of Artificial Sequence: Synthetic oligonucleotide
  Sense strand starting at position 967 of SEQ ID NO: 1888442
gcacacauguguguaaugu

SEQ ID NO: 2534453 - RNA, 19 nt, Artificial Sequence
  Description of Artificial Sequence: Synthetic oligonucleotide
  Antisense strand to SEQ ID NO: 2534452
acauuacacacaugugugc

SEQ ID NO: 2534454 - RNA, 19 nt, Artificial Sequence
  Description of Artificial Sequence: Synthetic oligonucleotide
  Sense strand starting at position 965 of SEQ ID NO: 1888442
gugcacacauguguguaau

SEQ ID NO: 2534455 - RNA, 19 nt, Artificial Sequence
  Description of Artificial Sequence: Synthetic oligonucleotide
  Antisense strand to SEQ ID NO: 2534454
auuacacacaugugugcac

SEQ ID NO: 2534456 - RNA, 19 nt, Artificial Sequence
  Description of Artificial Sequence: Synthetic oligonucleotide
  Sense strand starting at position 1472 of SEQ ID NO: 1888442
cgucauuacugugcuugga

SEQ ID NO: 2534457 - RNA, 19 nt, Artificial Sequence
  Description of Artificial Sequence: Synthetic oligonucleotide
  Antisense strand to SEQ ID NO: 2534456
uccaagcacaguaaugacg

SEQ ID NO: 2534458 - RNA, 19 nt, Artificial Sequence
  Description of Artificial Sequence: Synthetic oligonucleotide
  Sense strand starting at position 964 of SEQ ID NO: 1888442
ugugcacacauguguguaa

SEQ ID NO: 2534459 - RNA, 19 nt, Artificial Sequence
  Description of Artificial Sequence: Synthetic oligonucleotide
  Antisense strand to SEQ ID NO: 2534458
uuacacacaugugugcaca

SEQ ID NO: 2534460 - RNA, 19 nt, Artificial Sequence
  Description of Artificial Sequence: Synthetic oligonucleotide
  Sense strand starting at position 735 of SEQ ID NO: 1888442
gcauguauggugugcauaa

SEQ ID NO: 2534461 - RNA, 19 nt, Artificial Sequence
  Description of Artificial Sequence: Synthetic oligonucleotide
  Antisense strand to SEQ ID NO: 2534460
uuaugcacaccauacaugc

SEQ ID NO: 2534462 - RNA, 19 nt, Artificial Sequence
  Description of Artificial Sequence: Synthetic oligonucleotide
  Sense strand starting at position 638 of SEQ ID NO: 1888442
guguuacauacaugugugu

SEQ ID NO: 2534463 - RNA, 19 nt, Artificial Sequence
  Description of Artificial Sequence: Synthetic oligonucleotide
  Antisense strand to SEQ ID NO: 2534462
acacacauguauguaacac

SEQ ID NO: 2534464 - RNA, 19 nt, Artificial Sequence
  Description of Artificial Sequence: Synthetic oligonucleotide
  Sense strand starting at position 803 of SEQ ID NO: 1888442
acgugugguauguguaaug

SEQ ID NO: 2534465 - RNA, 19 nt, Artificial Sequence
  Description of Artificial Sequence: Synthetic oligonucleotide
  Antisense strand to SEQ ID NO: 2534464
cauuacacauaccacacgu

SEQ ID NO: 2534466 - RNA, 19 nt, Artificial Sequence
  Description of Artificial Sequence: Synthetic oligonucleotide
  Sense strand starting at position 1012 of SEQ ID NO: 1888443
uuaggaacucucugaaacu

SEQ ID NO: 2534467 - RNA, 19 nt, Artificial Sequence
  Description of Artificial Sequence: Synthetic oligonucleotide
  Antisense strand to SEQ ID NO: 2534466
aguuucagagaguuccuaa

SEQ ID NO: 2534468 - RNA, 19 nt, Artificial Sequence
  Description of Artificial Sequence: Synthetic oligonucleotide
  Sense strand starting at position 2094 of SEQ ID NO: 1888443
gagaaacagaguggguauu

SEQ ID NO: 2534469 - RNA, 19 nt, Artificial Sequence
  Description of Artificial Sequence: Synthetic oligonucleotide
  Antisense strand to SEQ ID NO: 2534468
aauacccacucuguuucuc

SEQ ID NO: 2534470 - RNA, 19 nt, Artificial Sequence
  Description of Artificial Sequence: Synthetic oligonucleotide
  Sense strand starting at position 3186 of SEQ ID NO: 1888443
agucaacauguuuaaugau

SEQ ID NO: 2534471 - RNA, 19 nt, Artificial Sequence
  Description of Artificial Sequence: Synthetic oligonucleotide
  Antisense strand to SEQ ID NO: 2534470
aucauuaaacauguugacu

SEQ ID NO: 2534472 - RNA, 19 nt, Artificial Sequence
  Description of Artificial Sequence: Synthetic oligonucleotide
  Sense strand starting at position 1684 of SEQ ID NO: 1888443
uggcuugauagggaaaguu

SEQ ID NO: 2534473 - RNA, 19 nt, Artificial Sequence
  Description of Artificial Sequence: Synthetic oligonucleotide
  Antisense strand to SEQ ID NO: 2534472
aacuuucccuaucaagcca

SEQ ID NO: 2534474 - RNA, 19 nt, Artificial Sequence
  Description of Artificial Sequence: Synthetic oligonucleotide
  Sense strand starting at position 1354 of SEQ ID NO: 1888443
uaagaaucccggcauuaga

SEQ ID NO: 2534475 - RNA, 19 nt, Artificial Sequence
  Description of Artificial Sequence: Synthetic oligonucleotide
  Antisense strand to SEQ ID NO: 2534474
ucuaaugccgggauucuua

SEQ ID NO: 2534476 - RNA, 19 nt, Artificial Sequence
  Description of Artificial Sequence: Synthetic oligonucleotide
  Sense strand starting at position 1499 of SEQ ID NO: 1888443
aaagcuugcugagugauuu

SEQ ID NO: 2534477 - RNA, 19 nt, Artificial Sequence
  Description of Artificial Sequence: Synthetic oligonucleotide
  Antisense strand to SEQ ID NO: 2534476
aaaucacucagcaagcuuu

SEQ ID NO: 2534478 - RNA, 19 nt, Artificial Sequence
  Description of Artificial Sequence: Synthetic oligonucleotide
  Sense strand starting at position 3049 of SEQ ID NO: 1888443
ugugccuuguaauuuagga

SEQ ID NO: 2534479 - RNA, 19 nt, Artificial Sequence
  Description of Artificial Sequence: Synthetic oligonucleotide
  Antisense strand to SEQ ID NO: 2534478
uccuaaauuacaaggcaca

SEQ ID NO: 2534480 - RNA, 19 nt, Artificial Sequence
  Description of Artificial Sequence: Synthetic oligonucleotide
  Sense strand starting at position 2096 of SEQ ID NO: 1888443
gaaacagaguggguauuau

SEQ ID NO: 2534481 - RNA, 19 nt, Artificial Sequence
  Description of Artificial Sequence: Synthetic oligonucleotide
  Antisense strand to SEQ ID NO: 2534480
auaauacccacucuguuuc

SEQ ID NO: 2534482 - RNA, 19 nt, Artificial Sequence
  Description of Artificial Sequence: Synthetic oligonucleotide
  Sense strand starting at position 1500 of SEQ ID NO: 1888443
aagcuugcugagugauuua

SEQ ID NO: 2534483 - RNA, 19 nt, Artificial Sequence
  Description of Artificial Sequence: Synthetic oligonucleotide
  Antisense strand to SEQ ID NO: 2534482
uaaaucacucagcaagcuu

SEQ ID NO: 2534484 - RNA, 19 nt, Artificial Sequence
  Description of Artificial Sequence: Synthetic oligonucleotide
  Sense strand starting at position 3175 of SEQ ID NO: 1888443
uuugaucaaugagucaaca

SEQ ID NO: 2534485 - RNA, 19 nt, Artificial Sequence
  Description of Artificial Sequence: Synthetic oligonucleotide
  Antisense strand to SEQ ID NO: 2534484
uguugacucauugaucaaa

SEQ ID NO: 2534486 - RNA, 19 nt, Artificial Sequence
  Description of Artificial Sequence: Synthetic oligonucleotide
  Sense strand starting at position 2911 of SEQ ID NO: 1888443
accugaaauucuuucugga

SEQ ID NO: 2534487 - RNA, 19 nt, Artificial Sequence
  Description of Artificial Sequence: Synthetic oligonucleotide
  Antisense strand to SEQ ID NO: 2534486
uccagaaagaauuucaggu

SEQ ID NO: 2534488 - RNA, 19 nt, Artificial Sequence
  Description of Artificial Sequence: Synthetic oligonucleotide
  Sense strand starting at position 747 of SEQ ID NO: 1888443
accugaauauuugagggau

SEQ ID NO: 2534489 - RNA, 19 nt, Artificial Sequence
  Description of Artificial Sequence: Synthetic oligonucleotide
  Antisense strand to SEQ ID NO: 2534488
aucccucaaauauucaggu

SEQ ID NO: 2534490 - RNA, 19 nt, Artificial Sequence
  Description of Artificial Sequence: Synthetic oligonucleotide
  Sense strand starting at position 2967 of SEQ ID NO: 1888443
aaagaagucagugguggaa

SEQ ID NO: 2534491 - RNA, 19 nt, Artificial Sequence
  Description of Artificial Sequence: Synthetic oligonucleotide
  Antisense strand to SEQ ID NO: 2534490
uuccaccacugacuucuuu

SEQ ID NO: 2534492 - RNA, 19 nt, Artificial Sequence
  Description of Artificial Sequence: Synthetic oligonucleotide
  Sense strand starting at position 973 of SEQ ID NO: 1888443
cggauugcaagugagauga

SEQ ID NO: 2534493 - RNA, 19 nt, Artificial Sequence
  Description of Artificial Sequence: Synthetic oligonucleotide
  Antisense strand to SEQ ID NO: 2534492
ucaucucacuugcaauccg

SEQ ID NO: 2534494 - RNA, 19 nt, Artificial Sequence
  Description of Artificial Sequence: Synthetic oligonucleotide
  Sense strand starting at position 3282 of SEQ ID NO: 1888443
cccugaauucccuggagac

SEQ ID NO: 2534495 - RNA, 19 nt, Artificial Sequence
  Description of Artificial Sequence: Synthetic oligonucleotide
  Antisense strand to SEQ ID NO: 2534494
gucuccagggaauucaggg

SEQ ID NO: 2534496 - RNA, 19 nt, Artificial Sequence
  Description of Artificial Sequence: Synthetic oligonucleotide
  Sense strand starting at position 864 of SEQ ID NO: 1888443
uuucuccuugggcagaaau

SEQ ID NO: 2534497 - RNA, 19 nt, Artificial Sequence
  Description of Artificial Sequence: Synthetic oligonucleotide
  Antisense strand to SEQ ID NO: 2534496
auuucugcccaaggagaaa

SEQ ID NO: 2534498 - RNA, 19 nt, Artificial Sequence
  Description of Artificial Sequence: Synthetic oligonucleotide
  Sense strand starting at position 1386 of SEQ ID NO: 1888443
gguccugaaucggcuauuu

SEQ ID NO: 2534499 - RNA, 19 nt, Artificial Sequence
  Description of Artificial Sequence: Synthetic oligonucleotide
  Antisense strand to SEQ ID NO: 2534498
aaauagccgauucaggacc

SEQ ID NO: 2534500 - RNA, 19 nt, Artificial Sequence
  Description of Artificial Sequence: Synthetic oligonucleotide
  Sense strand starting at position 3893 of SEQ ID NO: 1888443
ccacaugucaugcauggga

SEQ ID NO: 2534501 - RNA, 19 nt, Artificial Sequence
  Description of Artificial Sequence: Synthetic oligonucleotide
  Antisense strand to SEQ ID NO: 2534500
ucccaugcaugacaugugg

SEQ ID NO: 2534502 - RNA, 19 nt, Artificial Sequence
  Description of Artificial Sequence: Synthetic oligonucleotide
  Sense strand starting at position 2181 of SEQ ID NO: 1888443
ggaacaaacugucucuuua

SEQ ID NO: 2534503 - RNA, 19 nt, Artificial Sequence
  Description of Artificial Sequence: Synthetic oligonucleotide
  Antisense strand to SEQ ID NO: 2534502
uaaagagacaguuuguucc

SEQ ID NO: 2534504 - RNA, 19 nt, Artificial Sequence
  Description of Artificial Sequence: Synthetic oligonucleotide
  Sense strand starting at position 2218 of SEQ ID NO: 1888443
gagaaacgcucacuuagaa

SEQ ID NO: 2534505 - RNA, 19 nt, Artificial Sequence
  Description of Artificial Sequence: Synthetic oligonucleotide
  Antisense strand to SEQ ID NO: 2534504
uucuaagugagcguuucuc

SEQ ID NO: 2534506 - RNA, 19 nt, Artificial Sequence
  Description of Artificial Sequence: Synthetic oligonucleotide
  Sense strand starting at position 2730 of SEQ ID NO: 1888443
ugacaugaaccuugcaaau

SEQ ID NO: 2534507 - RNA, 19 nt, Artificial Sequence
  Description of Artificial Sequence: Synthetic oligonucleotide
  Antisense strand to SEQ ID NO: 2534506
auuugcaagguucauguca

SEQ ID NO: 2534508 - RNA, 19 nt, Artificial Sequence
  Description of Artificial Sequence: Synthetic oligonucleotide
  Sense strand starting at position 1034 of SEQ ID NO: 1888443
agagauaaauuggauuugu

SEQ ID NO: 2534509 - RNA, 19 nt, Artificial Sequence
  Description of Artificial Sequence: Synthetic oligonucleotide
  Antisense strand to SEQ ID NO: 2534508
acaaauccaauuuaucucu

SEQ ID NO: 2534510 - RNA, 19 nt, Artificial Sequence
  Description of Artificial Sequence: Synthetic oligonucleotide
  Sense strand starting at position 3185 of SEQ ID NO: 1888443
gagucaacauguuuaauga

SEQ ID NO: 2534511 - RNA, 19 nt, Artificial Sequence
  Description of Artificial Sequence: Synthetic oligonucleotide
  Antisense strand to SEQ ID NO: 2534510
ucauuaaacauguugacuc

SEQ ID NO: 2534512 - RNA, 19 nt, Artificial Sequence
  Description of Artificial Sequence: Synthetic oligonucleotide
  Sense strand starting at position 854 of SEQ ID NO: 1888443
acguguuugcuuucuccuu

SEQ ID NO: 2534513 - RNA, 19 nt, Artificial Sequence
  Description of Artificial Sequence: Synthetic oligonucleotide
  Antisense strand to SEQ ID NO: 2534512
aaggagaaagcaaacacgu

SEQ ID NO: 2534514 - RNA, 19 nt, Artificial Sequence
  Description of Artificial Sequence: Synthetic oligonucleotide
  Sense strand starting at position 3021 of SEQ ID NO: 1888443
augaauggauguucucuau

SEQ ID NO: 2534515 - RNA, 19 nt, Artificial Sequence
  Description of Artificial Sequence: Synthetic oligonucleotide
  Antisense strand to SEQ ID NO: 2534514
auagagaacauccauucau

SEQ ID NO: 2534516 - RNA, 19 nt, Artificial Sequence
  Description of Artificial Sequence: Synthetic oligonucleotide
  Sense strand starting at position 3343 of SEQ ID NO: 1888443
ggaaguauggcugacaguc

SEQ ID NO: 2534517 - RNA, 19 nt, Artificial Sequence
  Description of Artificial Sequence: Synthetic oligonucleotide
  Antisense strand to SEQ ID NO: 2534516
gacugucagccauacuucc

SEQ ID NO: 2534518 - RNA, 19 nt, Artificial Sequence
  Description of Artificial Sequence: Synthetic oligonucleotide
  Sense strand starting at position 3025 of SEQ ID NO: 1888443
auggauguucucuauucuu

SEQ ID NO: 2534519 - RNA, 19 nt, Artificial Sequence
  Description of Artificial Sequence: Synthetic oligonucleotide
  Antisense strand to SEQ ID NO: 2534518
aagaauagagaacauccau

SEQ ID NO: 2534520 - RNA, 19 nt, Artificial Sequence
  Description of Artificial Sequence: Synthetic oligonucleotide
  Sense strand starting at position 2000 of SEQ ID NO: 1888443
acgaguggugaccaagagu

SEQ ID NO: 2534521 - RNA, 19 nt, Artificial Sequence
  Description of Artificial Sequence: Synthetic oligonucleotide
  Antisense strand to SEQ ID NO: 2534520
acucuuggucaccacucgu

SEQ ID NO: 2534522 - RNA, 19 nt, Artificial Sequence
  Description of Artificial Sequence: Synthetic oligonucleotide
  Sense strand starting at position 3669 of SEQ ID NO: 1888443
uagacagugcuuggaauaa

SEQ ID NO: 2534523 - RNA, 19 nt, Artificial Sequence
  Description of Artificial Sequence: Synthetic oligonucleotide
  Antisense strand to SEQ ID NO: 2534522
uuauuccaagcacugucua

SEQ ID NO: 2534524 - RNA, 19 nt, Artificial Sequence
  Description of Artificial Sequence: Synthetic oligonucleotide
  Sense strand starting at position 2826 of SEQ ID NO: 1888443
aauccaugagcuggaaagu

SEQ ID NO: 2534525 - RNA, 19 nt, Artificial Sequence
  Description of Artificial Sequence: Synthetic oligonucleotide
  Antisense strand to SEQ ID NO: 2534524
acuuuccagcucauggauu

SEQ ID NO: 2534526 - RNA, 19 nt, Artificial Sequence
  Description of Artificial Sequence: Synthetic oligonucleotide
  Sense strand starting at position 3673 of SEQ ID NO: 1888443
cagugcuuggaauaagcaa

SEQ ID NO: 2534527 - RNA, 19 nt, Artificial Sequence
  Description of Artificial Sequence: Synthetic oligonucleotide
  Antisense strand to SEQ ID NO: 2534526
uugcuuauuccaagcacug

SEQ ID NO: 2534528 - RNA, 19 nt, Artificial Sequence
  Description of Artificial Sequence: Synthetic oligonucleotide
  Sense strand starting at position 3895 of SEQ ID NO: 1888443
acaugucaugcaugggaag

SEQ ID NO: 2534529 - RNA, 19 nt, Artificial Sequence
  Description of Artificial Sequence: Synthetic oligonucleotide
  Antisense strand to SEQ ID NO: 2534528
cuucccaugcaugacaugu

SEQ ID NO: 2534530 - RNA, 19 nt, Artificial Sequence
  Description of Artificial Sequence: Synthetic oligonucleotide
  Sense strand starting at position 749 of SEQ ID NO: 1888443
cugaauauuugagggauga

SEQ ID NO: 2534531 - RNA, 19 nt, Artificial Sequence
  Description of Artificial Sequence: Synthetic oligonucleotide
  Antisense strand to SEQ ID NO: 2534530
ucaucccucaaauauucag

SEQ ID NO: 2534532 - RNA, 19 nt, Artificial Sequence
  Description of Artificial Sequence: Synthetic oligonucleotide
  Sense strand starting at position 3680 of SEQ ID NO: 1888443
uggaauaagcaauggcauu

SEQ ID NO: 2534533 - RNA, 19 nt, Artificial Sequence
  Description of Artificial Sequence: Synthetic oligonucleotide
  Antisense strand to SEQ ID NO: 2534532
aaugccauugcuuauucca

SEQ ID NO: 2534534 - RNA, 19 nt, Artificial Sequence
  Description of Artificial Sequence: Synthetic oligonucleotide
  Sense strand starting at position 963 of SEQ ID NO: 1888443
cugaaaugcacggauugca

SEQ ID NO: 2534535 - RNA, 19 nt, Artificial Sequence
  Description of Artificial Sequence: Synthetic oligonucleotide
  Antisense strand to SEQ ID NO: 2534534
ugcaauccgugcauuucag

SEQ ID NO: 2534536 - RNA, 19 nt, Artificial Sequence
  Description of Artificial Sequence: Synthetic oligonucleotide
  Sense strand starting at position 2058 of SEQ ID NO: 1888443
auggcacuuucuucugaaa

SEQ ID NO: 2534537 - RNA, 19 nt, Artificial Sequence
  Description of Artificial Sequence: Synthetic oligonucleotide
  Antisense strand to SEQ ID NO: 2534536
uuucagaagaaagugccau

SEQ ID NO: 2534538 - RNA, 19 nt, Artificial Sequence
  Description of Artificial Sequence: Synthetic oligonucleotide
  Sense strand starting at position 246 of SEQ ID NO: 1888443
ugagucuuacaaggucuga

SEQ ID NO: 2534539 - RNA, 19 nt, Artificial Sequence
  Description of Artificial Sequence: Synthetic oligonucleotide
  Antisense strand to SEQ ID NO: 2534538
ucagaccuuguaagacuca

SEQ ID NO: 2534540 - RNA, 19 nt, Artificial Sequence
  Description of Artificial Sequence: Synthetic oligonucleotide
  Sense strand starting at position 3015 of SEQ ID NO: 1888443
cccaguaugaauggauguu

SEQ ID NO: 2534541 - RNA, 19 nt, Artificial Sequence
  Description of Artificial Sequence: Synthetic oligonucleotide
  Antisense strand to SEQ ID NO: 2534540
aacauccauucauacuggg

SEQ ID NO: 2534542 - RNA, 19 nt, Artificial Sequence
  Description of Artificial Sequence: Synthetic oligonucleotide
  Sense strand starting at position 1724 of SEQ ID NO: 1888443
guuacagagcuugggauua

SEQ ID NO: 2534543 - RNA, 19 nt, Artificial Sequence
  Description of Artificial Sequence: Synthetic oligonucleotide
  Antisense strand to SEQ ID NO: 2534542
uaaucccaagcucuguaac

SEQ ID NO: 2534544 - RNA, 19 nt, Artificial Sequence
  Description of Artificial Sequence: Synthetic oligonucleotide
  Sense strand starting at position 1723 of SEQ ID NO: 1888443
aguuacagagcuugggauu

SEQ ID NO: 2534545 - RNA, 19 nt, Artificial Sequence
  Description of Artificial Sequence: Synthetic oligonucleotide
  Antisense strand to SEQ ID NO: 2534544
aaucccaagcucuguaacu

SEQ ID NO: 2534546 - RNA, 19 nt, Artificial Sequence
  Description of Artificial Sequence: Synthetic oligonucleotide
  Sense strand starting at position 1754 of SEQ ID NO: 1888444
cuauuaauguguccauaaa

SEQ ID NO: 2534547 - RNA, 19 nt, Artificial Sequence
  Description of Artificial Sequence: Synthetic oligonucleotide
  Antisense strand to SEQ ID NO: 2534546
uuuauggacacauuaauag

SEQ ID NO: 2534548 - RNA, 19 nt, Artificial Sequence
  Description of Artificial Sequence: Synthetic oligonucleotide
  Sense strand starting at position 1752 of SEQ ID NO: 1888444
gucuauuaauguguccaua

SEQ ID NO: 2534549 - RNA, 19 nt, Artificial Sequence
  Description of Artificial Sequence: Synthetic oligonucleotide
  Antisense strand to SEQ ID NO: 2534548
uauggacacauuaauagac

SEQ ID NO: 2534550 - RNA, 19 nt, Artificial Sequence
  Description of Artificial Sequence: Synthetic oligonucleotide
  Sense strand starting at position 1754 of SEQ ID NO: 1888446
cuauuaauguguccauaaa

SEQ ID NO: 2534551 - RNA, 19 nt, Artificial Sequence
  Description of Artificial Sequence: Synthetic oligonucleotide
  Antisense strand to SEQ ID NO: 2534550
uuuauggacacauuaauag

SEQ ID NO: 2534552 - RNA, 19 nt, Artificial Sequence
  Description of Artificial Sequence: Synthetic oligonucleotide
  Sense strand starting at position 1752 of SEQ ID NO: 1888446
gucuauuaauguguccaua

SEQ ID NO: 2534553 - RNA, 19 nt, Artificial Sequence
  Description of Artificial Sequence: Synthetic oligonucleotide
  Antisense strand to SEQ ID NO: 2534552
uauggacacauuaauagac

SEQ ID NO: 2534554 - RNA, 19 nt, Artificial Sequence
  Description of Artificial Sequence: Synthetic oligonucleotide
  Sense strand starting at position 1478 of SEQ ID NO: 1888448
gccauaguucuagucgcaa

SEQ ID NO: 2534555 - RNA, 19 nt, Artificial Sequence
  Description of Artificial Sequence: Synthetic oligonucleotide
  Antisense strand to SEQ ID NO: 2534554
uugcgacuagaacuauggc

SEQ ID NO: 2534556 - RNA, 19 nt, Artificial Sequence
  Description of Artificial Sequence: Synthetic oligonucleotide
  Sense strand starting at position 2908 of SEQ ID NO: 1888448
ugauaaguuguacaaucau

SEQ ID NO: 2534557 - RNA, 19 nt, Artificial Sequence
  Description of Artificial Sequence: Synthetic oligonucleotide
  Antisense strand to SEQ ID NO: 2534556
augauuguacaacuuauca

SEQ ID NO: 2534558 - RNA, 19 nt, Artificial Sequence
  Description of Artificial Sequence: Synthetic oligonucleotide
  Sense strand starting at position 416 of SEQ ID NO: 1888448
aucuguuuagaaugaauga

SEQ ID NO: 2534559 - RNA, 19 nt, Artificial Sequence
  Description of Artificial Sequence: Synthetic oligonucleotide
  Antisense strand to SEQ ID NO: 2534558
ucauucauucuaaacagau

SEQ ID NO: 2534560 - RNA, 19 nt, Artificial Sequence
  Description of Artificial Sequence: Synthetic oligonucleotide
  Sense strand starting at position 1037 of SEQ ID NO: 1888448
aucuaauagggcugaaaug

SEQ ID NO: 2534561 - RNA, 19 nt, Artificial Sequence
  Description of Artificial Sequence: Synthetic oligonucleotide
  Antisense strand to SEQ ID NO: 2534560
cauuucagcccuauuagau

SEQ ID NO: 2534562 - RNA, 19 nt, Artificial Sequence
  Description of Artificial Sequence: Synthetic oligonucleotide
  Sense strand starting at position 2615 of SEQ ID NO: 1888448
cgauaauggcaugauuacu

SEQ ID NO: 2534563 - RNA, 19 nt, Artificial Sequence
  Description of Artificial Sequence: Synthetic oligonucleotide
  Antisense strand to SEQ ID NO: 2534562
aguaaucaugccauuaucg

SEQ ID NO: 2534564 - RNA, 19 nt, Artificial Sequence
  Description of Artificial Sequence: Synthetic oligonucleotide
  Sense strand starting at position 1749 of SEQ ID NO: 1888448
uuccaaguuguugagaauu

SEQ ID NO: 2534565 - RNA, 19 nt, Artificial Sequence
  Description of Artificial Sequence: Synthetic oligonucleotide
  Antisense strand to SEQ ID NO: 2534564
aauucucaacaacuuggaa

SEQ ID NO: 2534566 - RNA, 19 nt, Artificial Sequence
  Description of Artificial Sequence: Synthetic oligonucleotide
  Sense strand starting at position 2107 of SEQ ID NO: 1888448
cugaguucuaaggaugcau

SEQ ID NO: 2534567 - RNA, 19 nt, Artificial Sequence
  Description of Artificial Sequence: Synthetic oligonucleotide
  Antisense strand to SEQ ID NO: 2534566
augcauccuuagaacucag

SEQ ID NO: 2534568 - RNA, 19 nt, Artificial Sequence
  Description of Artificial Sequence: Synthetic oligonucleotide
  Sense strand starting at position 1075 of SEQ ID NO: 1888448
ggcccaaaucaaugaucca

SEQ ID NO: 2534569 - RNA, 19 nt, Artificial Sequence
  Description of Artificial Sequence: Synthetic oligonucleotide
  Antisense strand to SEQ ID NO: 2534568
uggaucauugauuugggcc

SEQ ID NO: 2534570 - RNA, 19 nt, Artificial Sequence
  Description of Artificial Sequence: Synthetic oligonucleotide
  Sense strand starting at position 800 of SEQ ID NO: 1888448
agcuauuaacucuagcaga

SEQ ID NO: 2534571 - RNA, 19 nt, Artificial Sequence
  Description of Artificial Sequence: Synthetic oligonucleotide
  Antisense strand to SEQ ID NO: 2534570
ucugcuagaguuaauagcu

SEQ ID NO: 2534572 - RNA, 19 nt, Artificial Sequence
  Description of Artificial Sequence: Synthetic oligonucleotide
  Sense strand starting at position 2323 of SEQ ID NO: 1888448
gaggcaugaauguaguauu

SEQ ID NO: 2534573 - RNA, 19 nt, Artificial Sequence
  Description of Artificial Sequence: Synthetic oligonucleotide
  Antisense strand to SEQ ID NO: 2534572
aauacuacauucaugccuc

SEQ ID NO: 2534574 - RNA, 19 nt, Artificial Sequence
  Description of Artificial Sequence: Synthetic oligonucleotide
  Sense strand starting at position 1560 of SEQ ID NO: 1888448
auauaaauccaaugguagu

SEQ ID NO: 2534575 - RNA, 19 nt, Artificial Sequence
  Description of Artificial Sequence: Synthetic oligonucleotide
  Antisense strand to SEQ ID NO: 2534574
acuaccauuggauuuauau

SEQ ID NO: 2534576 - RNA, 19 nt, Artificial Sequence
  Description of Artificial Sequence: Synthetic oligonucleotide
  Sense strand starting at position 1722 of SEQ ID NO: 1888448
gaacuugaaugggugugau

SEQ ID NO: 2534577 - RNA, 19 nt, Artificial Sequence
  Description of Artificial Sequence: Synthetic oligonucleotide
  Antisense strand to SEQ ID NO: 2534576
aucacacccauucaaguuc

SEQ ID NO: 2534578 - RNA, 19 nt, Artificial Sequence
  Description of Artificial Sequence: Synthetic oligonucleotide
  Sense strand starting at position 2995 of SEQ ID NO: 1888448
auacuaauugcuuagugau

SEQ ID NO: 2534579 - RNA, 19 nt, Artificial Sequence
  Description of Artificial Sequence: Synthetic oligonucleotide
  Antisense strand to SEQ ID NO: 2534578
aucacuaagcaauuaguau

SEQ ID NO: 2534580 - RNA, 19 nt, Artificial Sequence
  Description of Artificial Sequence: Synthetic oligonucleotide
  Sense strand starting at position 310 of SEQ ID NO: 1888448
ugaauuaucuaaguguagg

SEQ ID NO: 2534581 - RNA, 19 nt, Artificial Sequence
  Description of Artificial Sequence: Synthetic oligonucleotide
  Antisense strand to SEQ ID NO: 2534580
ccuacacuuagauaauuca

SEQ ID NO: 2534582 - RNA, 19 nt, Artificial Sequence
  Description of Artificial Sequence: Synthetic oligonucleotide
  Sense strand starting at position 791 of SEQ ID NO: 1888448
ugcuaugggagcuauuaac

SEQ ID NO: 2534583 - RNA, 19 nt, Artificial Sequence
  Description of Artificial Sequence: Synthetic oligonucleotide
  Antisense strand to SEQ ID NO: 2534582
guuaauagcucccauagca

SEQ ID NO: 2534584 - RNA, 19 nt, Artificial Sequence
  Description of Artificial Sequence: Synthetic oligonucleotide
  Sense strand starting at position 1132 of SEQ ID NO: 1888448
gcucaaucagguuaaagug

SEQ ID NO: 2534585 - RNA, 19 nt, Artificial Sequence
  Description of Artificial Sequence: Synthetic oligonucleotide
  Antisense strand to SEQ ID NO: 2534584
cacuuuaaccugauugagc

SEQ ID NO: 2534586 - RNA, 19 nt, Artificial Sequence
  Description of Artificial Sequence: Synthetic oligonucleotide
  Sense strand starting at position 1171 of SEQ ID NO: 1888448
ucaagugugcuccaaggaa

SEQ ID NO: 2534587 - RNA, 19 nt, Artificial Sequence
  Description of Artificial Sequence: Synthetic oligonucleotide
  Antisense strand to SEQ ID NO: 2534586
uuccuuggagcacacuuga

SEQ ID NO: 2534588 - RNA, 19 nt, Artificial Sequence
  Description of Artificial Sequence: Synthetic oligonucleotide
  Sense strand starting at position 1340 of SEQ ID NO: 1888448
agggcuuggcaaggauaua

SEQ ID NO: 2534589 - RNA, 19 nt, Artificial Sequence
  Description of Artificial Sequence: Synthetic oligonucleotide
  Antisense strand to SEQ ID NO: 2534588
uauauccuugccaagcccu

SEQ ID NO: 2534590 - RNA, 19 nt, Artificial Sequence
  Description of Artificial Sequence: Synthetic oligonucleotide
  Sense strand starting at position 1725 of SEQ ID NO: 1888448
cuugaaugggugugauaua

SEQ ID NO: 2534591 - RNA, 19 nt, Artificial Sequence
  Description of Artificial Sequence: Synthetic oligonucleotide
  Antisense strand to SEQ ID NO: 2534590
uauaucacacccauucaag

SEQ ID NO: 2534592 - RNA, 19 nt, Artificial Sequence
  Description of Artificial Sequence: Synthetic oligonucleotide
  Sense strand starting at position 3058 of SEQ ID NO: 1888448
ucauguguucuacauaauu

SEQ ID NO: 2534593 - RNA, 19 nt, Artificial Sequence
  Description of Artificial Sequence: Synthetic oligonucleotide
  Antisense strand to SEQ ID NO: 2534592
aauuauguagaacacauga

SEQ ID NO: 2534594 - RNA, 19 nt, Artificial Sequence
  Description of Artificial Sequence: Synthetic oligonucleotide
  Sense strand starting at position 2614 of SEQ ID NO: 1888448
acgauaauggcaugauuac

SEQ ID NO: 2534595 - RNA, 19 nt, Artificial Sequence
  Description of Artificial Sequence: Synthetic oligonucleotide
  Antisense strand to SEQ ID NO: 2534594
guaaucaugccauuaucgu

SEQ ID NO: 2534596 - RNA, 19 nt, Artificial Sequence
  Description of Artificial Sequence: Synthetic oligonucleotide
  Sense strand starting at position 315 of SEQ ID NO: 1888448
uaucuaaguguaggaucau

SEQ ID NO: 2534597 - RNA, 19 nt, Artificial Sequence
  Description of Artificial Sequence: Synthetic oligonucleotide
  Antisense strand to SEQ ID NO: 2534596
augauccuacacuuagaua

SEQ ID NO: 2534598 - RNA, 19 nt, Artificial Sequence
  Description of Artificial Sequence: Synthetic oligonucleotide
  Sense strand starting at position 2914 of SEQ ID NO: 1888448
guuguacaaucauuaauca

SEQ ID NO: 2534599 - RNA, 19 nt, Artificial Sequence
  Description of Artificial Sequence: Synthetic oligonucleotide
  Antisense strand to SEQ ID NO: 2534598
ugauuaaugauuguacaac

SEQ ID NO: 2534600 - RNA, 19 nt, Artificial Sequence
  Description of Artificial Sequence: Synthetic oligonucleotide
  Sense strand starting at position 2109 of SEQ ID NO: 1888448
gaguucuaaggaugcauau

SEQ ID NO: 2534601 - RNA, 19 nt, Artificial Sequence
  Description of Artificial Sequence: Synthetic oligonucleotide
  Antisense strand to SEQ ID NO: 2534600
auaugcauccuuagaacuc

SEQ ID NO: 2534602 - RNA, 19 nt, Artificial Sequence
  Description of Artificial Sequence: Synthetic oligonucleotide
  Sense strand starting at position 631 of SEQ ID NO: 1888448
gcucauuaugaguaaggca

SEQ ID NO: 2534603 - RNA, 19 nt, Artificial Sequence
  Description of Artificial Sequence: Synthetic oligonucleotide
  Antisense strand to SEQ ID NO: 2534602
ugccuuacucauaaugagc

SEQ ID NO: 2534604 - RNA, 19 nt, Artificial Sequence
  Description of Artificial Sequence: Synthetic oligonucleotide
  Sense strand starting at position 3262 of SEQ ID NO: 1888448
gucuuaucaggucauguaa

SEQ ID NO: 2534605 - RNA, 19 nt, Artificial Sequence
  Description of Artificial Sequence: Synthetic oligonucleotide
  Antisense strand to SEQ ID NO: 2534604
uuacaugaccugauaagac

SEQ ID NO: 2534606 - RNA, 19 nt, Artificial Sequence
  Description of Artificial Sequence: Synthetic oligonucleotide
  Sense strand starting at position 2571 of SEQ ID NO: 1888448
uuacaauauuuggaugagu

SEQ ID NO: 2534607 - RNA, 19 nt, Artificial Sequence
  Description of Artificial Sequence: Synthetic oligonucleotide
  Antisense strand to SEQ ID NO: 2534606
acucauccaaauauuguaa

SEQ ID NO: 2534608 - RNA, 19 nt, Artificial Sequence
  Description of Artificial Sequence: Synthetic oligonucleotide
  Sense strand starting at position 2118 of SEQ ID NO: 1888448
ggaugcauauucuccauua

SEQ ID NO: 2534609 - RNA, 19 nt, Artificial Sequence
  Description of Artificial Sequence: Synthetic oligonucleotide
  Antisense strand to SEQ ID NO: 2534608
uaauggagaauaugcaucc

SEQ ID NO: 2534610 - RNA, 19 nt, Artificial Sequence
  Description of Artificial Sequence: Synthetic oligonucleotide
  Sense strand starting at position 1153 of SEQ ID NO: 1888448
gaagaauuccucgacggcu

SEQ ID NO: 2534611 - RNA, 19 nt, Artificial Sequence
  Description of Artificial Sequence: Synthetic oligonucleotide
  Antisense strand to SEQ ID NO: 2534610
agccgucgaggaauucuuc

SEQ ID NO: 2534612 - RNA, 19 nt, Artificial Sequence
  Description of Artificial Sequence: Synthetic oligonucleotide
  Sense strand starting at position 3979 of SEQ ID NO: 1888448
aaggacgauggcuguuaaa

SEQ ID NO: 2534613 - RNA, 19 nt, Artificial Sequence
  Description of Artificial Sequence: Synthetic oligonucleotide
  Antisense strand to SEQ ID NO: 2534612
uuuaacagccaucguccuu

SEQ ID NO: 2534614 - RNA, 19 nt, Artificial Sequence
  Description of Artificial Sequence: Synthetic oligonucleotide
  Sense strand starting at position 1566 of SEQ ID NO: 1888448
auccaaugguagucuuuaa

SEQ ID NO: 2534615 - RNA, 19 nt, Artificial Sequence
  Description of Artificial Sequence: Synthetic oligonucleotide
  Antisense strand to SEQ ID NO: 2534614
uuaaagacuaccauuggau

SEQ ID NO: 2534616 - RNA, 19 nt, Artificial Sequence
  Description of Artificial Sequence: Synthetic oligonucleotide
  Sense strand starting at position 2374 of SEQ ID NO: 1888448
aaguuaauuguguaugagu

SEQ ID NO: 2534617 - RNA, 19 nt, Artificial Sequence
  Description of Artificial Sequence: Synthetic oligonucleotide
  Antisense strand to SEQ ID NO: 2534616
acucauacacaauuaacuu

SEQ ID NO: 2534618 - RNA, 19 nt, Artificial Sequence
  Description of Artificial Sequence: Synthetic oligonucleotide
  Sense strand starting at position 2337 of SEQ ID NO: 1888448
guauuacgagccuauaauu

SEQ ID NO: 2534619 - RNA, 19 nt, Artificial Sequence
  Description of Artificial Sequence: Synthetic oligonucleotide
  Antisense strand to SEQ ID NO: 2534618
aauuauaggcucguaauac

SEQ ID NO: 2534620 - RNA, 19 nt, Artificial Sequence
  Description of Artificial Sequence: Synthetic oligonucleotide
  Sense strand starting at position 622 of SEQ ID NO: 1888448
auaguuagugcucauuaug

SEQ ID NO: 2534621 - RNA, 19 nt, Artificial Sequence
  Description of Artificial Sequence: Synthetic oligonucleotide
  Antisense strand to SEQ ID NO: 2534620
cauaaugagcacuaacuau

SEQ ID NO: 2534622 - RNA, 19 nt, Artificial Sequence
  Description of Artificial Sequence: Synthetic oligonucleotide
  Sense strand starting at position 3406 of SEQ ID NO: 1888448
cuaucuuaagcguauggau

SEQ ID NO: 2534623 - RNA, 19 nt, Artificial Sequence
  Description of Artificial Sequence: Synthetic oligonucleotide
  Antisense strand to SEQ ID NO: 2534622
auccauacgcuuaagauag

SEQ ID NO: 2534624 - RNA, 19 nt, Artificial Sequence
  Description of Artificial Sequence: Synthetic oligonucleotide
  Sense strand starting at position 2533 of SEQ ID NO: 1888448
auauacaucugugucuaua

SEQ ID NO: 2534625 - RNA, 19 nt, Artificial Sequence
  Description of Artificial Sequence: Synthetic oligonucleotide
  Antisense strand to SEQ ID NO: 2534624
uauagacacagauguauau

SEQ ID NO: 2534626 - RNA, 19 nt, Artificial Sequence
  Description of Artificial Sequence: Synthetic oligonucleotide
  Sense strand starting at position 2531 of SEQ ID NO: 1888448
auauauacaucugugucua

SEQ ID NO: 2534627 - RNA, 19 nt, Artificial Sequence
  Description of Artificial Sequence: Synthetic oligonucleotide
  Antisense strand to SEQ ID NO: 2534626
uagacacagauguauauau

SEQ ID NO: 2534628 - RNA, 19 nt, Artificial Sequence
  Description of Artificial Sequence: Synthetic oligonucleotide
  Sense strand starting at position 2099 of SEQ ID NO: 1888448
uuuaaaugcugaguucuaa

SEQ ID NO: 2534629 - RNA, 19 nt, Artificial Sequence
  Description of Artificial Sequence: Synthetic oligonucleotide
  Antisense strand to SEQ ID NO: 2534628
uuagaacucagcauuuaaa

SEQ ID NO: 2534630 - RNA, 19 nt, Artificial Sequence
  Description of Artificial Sequence: Synthetic oligonucleotide
  Sense strand starting at position 3788 of SEQ ID NO: 1888448
gguagacgaucgagaagaa

SEQ ID NO: 2534631 - RNA, 19 nt, Artificial Sequence
  Description of Artificial Sequence: Synthetic oligonucleotide
  Antisense strand to SEQ ID NO: 2534630
uucuucucgaucgucuacc

SEQ ID NO: 2534632 - RNA, 19 nt, Artificial Sequence
  Description of Artificial Sequence: Synthetic oligonucleotide
  Sense strand starting at position 2317 of SEQ ID NO: 1888448
aauugugaggcaugaaugu

SEQ ID NO: 2534633 - RNA, 19 nt, Artificial Sequence
  Description of Artificial Sequence: Synthetic oligonucleotide
  Antisense strand to SEQ ID NO: 2534632
acauucaugccucacaauu

SEQ ID NO: 2534634 - RNA, 19 nt, Artificial Sequence
  Description of Artificial Sequence: Synthetic oligonucleotide
  Sense strand starting at position 3300 of SEQ ID NO: 1888449
augauucuguaaucaggaa

SEQ ID NO: 2534635 - RNA, 19 nt, Artificial Sequence
  Description of Artificial Sequence: Synthetic oligonucleotide
  Antisense strand to SEQ ID NO: 2534634
uuccugauuacagaaucau

SEQ ID NO: 2534636 - RNA, 19 nt, Artificial Sequence
  Description of Artificial Sequence: Synthetic oligonucleotide
  Sense strand starting at position 1113 of SEQ ID NO: 1888449
ugaguuucucaccaaugau

SEQ ID NO: 2534637 - RNA, 19 nt, Artificial Sequence
  Description of Artificial Sequence: Synthetic oligonucleotide
  Antisense strand to SEQ ID NO: 2534636
aucauuggugagaaacuca

SEQ ID NO: 2534638 - RNA, 19 nt, Artificial Sequence
  Description of Artificial Sequence: Synthetic oligonucleotide
  Sense strand starting at position 1466 of SEQ ID NO: 1888449
gcauccuaaggaggauuaa

SEQ ID NO: 2534639 - RNA, 19 nt, Artificial Sequence
  Description of Artificial Sequence: Synthetic oligonucleotide
  Antisense strand to SEQ ID NO: 2534638
uuaauccuccuuaggaugc

SEQ ID NO: 2534640 - RNA, 19 nt, Artificial Sequence
  Description of Artificial Sequence: Synthetic oligonucleotide
  Sense strand starting at position 2011 of SEQ ID NO: 1888449
gugcuaugugcugcagaca

SEQ ID NO: 2534641 - RNA, 19 nt, Artificial Sequence
  Description of Artificial Sequence: Synthetic oligonucleotide
  Antisense strand to SEQ ID NO: 2534640
ugucugcagcacauagcac

SEQ ID NO: 2534642 - RNA, 19 nt, Artificial Sequence
  Description of Artificial Sequence: Synthetic oligonucleotide
  Sense strand starting at position 2500 of SEQ ID NO: 1888449
agaaucuagucaguaaaua

SEQ ID NO: 2534643 - RNA, 19 nt, Artificial Sequence
  Description of Artificial Sequence: Synthetic oligonucleotide
  Antisense strand to SEQ ID NO: 2534642
uauuuacugacuagauucu

SEQ ID NO: 2534644 - RNA, 19 nt, Artificial Sequence
  Description of Artificial Sequence: Synthetic oligonucleotide
  Sense strand starting at position 3743 of SEQ ID NO: 1888449
aguugcuugauagauaaug

SEQ ID NO: 2534645 - RNA, 19 nt, Artificial Sequence
  Description of Artificial Sequence: Synthetic oligonucleotide
  Antisense strand to SEQ ID NO: 2534644
cauuaucuaucaagcaacu

SEQ ID NO: 2534646 - RNA, 19 nt, Artificial Sequence
  Description of Artificial Sequence: Synthetic oligonucleotide
  Sense strand starting at position 625 of SEQ ID NO: 1888449
gauaaagcacuguauguaa

SEQ ID NO: 2534647 - RNA, 19 nt, Artificial Sequence
  Description of Artificial Sequence: Synthetic oligonucleotide
  Antisense strand to SEQ ID NO: 2534646
uuacauacagugcuuuauc

SEQ ID NO: 2534648 - RNA, 19 nt, Artificial Sequence
  Description of Artificial Sequence: Synthetic oligonucleotide
  Sense strand starting at position 583 of SEQ ID NO: 1888449
ugaacuuuccuccauguga

SEQ ID NO: 2534649 - RNA, 19 nt, Artificial Sequence
  Description of Artificial Sequence: Synthetic oligonucleotide
  Antisense strand to SEQ ID NO: 2534648
ucacauggaggaaaguuca

SEQ ID NO: 2534650 - RNA, 19 nt, Artificial Sequence
  Description of Artificial Sequence: Synthetic oligonucleotide
  Sense strand starting at position 3304 of SEQ ID NO: 1888449
uucuguaaucaggaaugca

SEQ ID NO: 2534651 - RNA, 19 nt, Artificial Sequence
  Description of Artificial Sequence: Synthetic oligonucleotide
  Antisense strand to SEQ ID NO: 2534650
ugcauuccugauuacagaa

SEQ ID NO: 2534652 - RNA, 19 nt, Artificial Sequence
  Description of Artificial Sequence: Synthetic oligonucleotide
  Sense strand starting at position 214 of SEQ ID NO: 1888449
cucauuugugaacguuauu

SEQ ID NO: 2534653 - RNA, 19 nt, Artificial Sequence
  Description of Artificial Sequence: Synthetic oligonucleotide
  Antisense strand to SEQ ID NO: 2534652
aauaacguucacaaaugag

SEQ ID NO: 2534654 - RNA, 19 nt, Artificial Sequence
  Description of Artificial Sequence: Synthetic oligonucleotide
  Sense strand starting at position 3271 of SEQ ID NO: 1888449
cuguauuuauugguguauu

SEQ ID NO: 2534655 - RNA, 19 nt, Artificial Sequence
  Description of Artificial Sequence: Synthetic oligonucleotide
  Antisense strand to SEQ ID NO: 2534654
aauacaccaauaaauacag

SEQ ID NO: 2534656 - RNA, 19 nt, Artificial Sequence
  Description of Artificial Sequence: Synthetic oligonucleotide
  Sense strand starting at position 598 of SEQ ID NO: 1888449
gugacagaugcauacaagu

SEQ ID NO: 2534657 - RNA, 19 nt, Artificial Sequence
  Description of Artificial Sequence: Synthetic oligonucleotide
  Antisense strand to SEQ ID NO: 2534656
acuuguaugcaucugucac

SEQ ID NO: 2534658 - RNA, 19 nt, Artificial Sequence
  Description of Artificial Sequence: Synthetic oligonucleotide
  Sense strand starting at position 27 of SEQ ID NO: 1888449
agaaauugcauugaagugu

SEQ ID NO: 2534659 - RNA, 19 nt, Artificial Sequence
  Description of Artificial Sequence: Synthetic oligonucleotide
  Antisense strand to SEQ ID NO: 2534658
acacuucaaugcaauuucu

SEQ ID NO: 2534660 - RNA, 19 nt, Artificial Sequence
  Description of Artificial Sequence: Synthetic oligonucleotide
  Sense strand starting at position 1112 of SEQ ID NO: 1888449
augaguuucucaccaauga

SEQ ID NO: 2534661 - RNA, 19 nt, Artificial Sequence
  Description of Artificial Sequence: Synthetic oligonucleotide
  Antisense strand to SEQ ID NO: 2534660
ucauuggugagaaacucau

SEQ ID NO: 2534662 - RNA, 19 nt, Artificial Sequence
  Description of Artificial Sequence: Synthetic oligonucleotide
  Sense strand starting at position 3270 of SEQ ID NO: 1888449
ccuguauuuauugguguau

SEQ ID NO: 2534663 - RNA, 19 nt, Artificial Sequence
  Description of Artificial Sequence: Synthetic oligonucleotide
  Antisense strand to SEQ ID NO: 2534662
auacaccaauaaauacagg

SEQ ID NO: 2534664 - RNA, 19 nt, Artificial Sequence
  Description of Artificial Sequence: Synthetic oligonucleotide
  Sense strand starting at position 1093 of SEQ ID NO: 1888449
ucauuacugcaugauguaa

SEQ ID NO: 2534665 - RNA, 19 nt, Artificial Sequence
  Description of Artificial Sequence: Synthetic oligonucleotide
  Antisense strand to SEQ ID NO: 2534664
uuacaucaugcaguaauga

SEQ ID NO: 2534666 - RNA, 19 nt, Artificial Sequence
  Description of Artificial Sequence: Synthetic oligonucleotide
  Sense strand starting at position 1557 of SEQ ID NO: 1888449
ucucaucugcaguagaaca

SEQ ID NO: 2534667 - RNA, 19 nt, Artificial Sequence
  Description of Artificial Sequence: Synthetic oligonucleotide
  Antisense strand to SEQ ID NO: 2534666
uguucuacugcagaugaga

SEQ ID NO: 2534668 - RNA, 19 nt, Artificial Sequence
  Description of Artificial Sequence: Synthetic oligonucleotide
  Sense strand starting at position 2691 of SEQ ID NO: 1888449
augucaugccuugaaacac

SEQ ID NO: 2534669 - RNA, 19 nt, Artificial Sequence
  Description of Artificial Sequence: Synthetic oligonucleotide
  Antisense strand to SEQ ID NO: 2534668
guguuucaaggcaugacau

SEQ ID NO: 2534670 - RNA, 19 nt, Artificial Sequence
  Description of Artificial Sequence: Synthetic oligonucleotide
  Sense strand starting at position 969 of SEQ ID NO: 1888449
gagagaauguagccacauu

SEQ ID NO: 2534671 - RNA, 19 nt, Artificial Sequence
  Description of Artificial Sequence: Synthetic oligonucleotide
  Antisense strand to SEQ ID NO: 2534670
aauguggcuacauucucuc

SEQ ID NO: 2534672 - RNA, 19 nt, Artificial Sequence
  Description of Artificial Sequence: Synthetic oligonucleotide
  Sense strand starting at position 240 of SEQ ID NO: 1888449
aucuacuuugguuauguaa

SEQ ID NO: 2534673 - RNA, 19 nt, Artificial Sequence
  Description of Artificial Sequence: Synthetic oligonucleotide
  Antisense strand to SEQ ID NO: 2534672
uuacauaaccaaaguagau

SEQ ID NO: 2534674 - RNA, 19 nt, Artificial Sequence
  Description of Artificial Sequence: Synthetic oligonucleotide
  Sense strand starting at position 1568 of SEQ ID NO: 1888449
guagaacaccauugguuaa

SEQ ID NO: 2534675 - RNA, 19 nt, Artificial Sequence
  Description of Artificial Sequence: Synthetic oligonucleotide
  Antisense strand to SEQ ID NO: 2534674
uuaaccaaugguguucuac

SEQ ID NO: 2534676 - RNA, 19 nt, Artificial Sequence
  Description of Artificial Sequence: Synthetic oligonucleotide
  Sense strand starting at position 26 of SEQ ID NO: 1888449
uagaaauugcauugaagug

SEQ ID NO: 2534677 - RNA, 19 nt, Artificial Sequence
  Description of Artificial Sequence: Synthetic oligonucleotide
  Antisense strand to SEQ ID NO: 2534676
cacuucaaugcaauuucua

SEQ ID NO: 2534678 - RNA, 19 nt, Artificial Sequence
  Description of Artificial Sequence: Synthetic oligonucleotide
  Sense strand starting at position 537 of SEQ ID NO: 1888449
augacaauguuggcugaga

SEQ ID NO: 2534679 - RNA, 19 nt, Artificial Sequence
  Description of Artificial Sequence: Synthetic oligonucleotide
  Antisense strand to SEQ ID NO: 2534678
ucucagccaacauugucau

SEQ ID NO: 2534680 - RNA, 19 nt, Artificial Sequence
  Description of Artificial Sequence: Synthetic oligonucleotide
  Sense strand starting at position 2977 of SEQ ID NO: 1888449
ggguuuaccucauuauaua

SEQ ID NO: 2534681 - RNA, 19 nt, Artificial Sequence
  Description of Artificial Sequence: Synthetic oligonucleotide
  Antisense strand to SEQ ID NO: 2534680
uauauaaugagguaaaccc

SEQ ID NO: 2534682 - RNA, 19 nt, Artificial Sequence
  Description of Artificial Sequence: Synthetic oligonucleotide
  Sense strand starting at position 2497 of SEQ ID NO: 1888449
aguagaaucuagucaguaa

SEQ ID NO: 2534683 - RNA, 19 nt, Artificial Sequence
  Description of Artificial Sequence: Synthetic oligonucleotide
  Antisense strand to SEQ ID NO: 2534682
uuacugacuagauucuacu

SEQ ID NO: 2534684 - RNA, 19 nt, Artificial Sequence
  Description of Artificial Sequence: Synthetic oligonucleotide
  Sense strand starting at position 580 of SEQ ID NO: 1888449
gagugaacuuuccuccaug

SEQ ID NO: 2534685 - RNA, 19 nt, Artificial Sequence
  Description of Artificial Sequence: Synthetic oligonucleotide
  Antisense strand to SEQ ID NO: 2534684
cauggaggaaaguucacuc

SEQ ID NO: 2534686 - RNA, 19 nt, Artificial Sequence
  Description of Artificial Sequence: Synthetic oligonucleotide
  Sense strand starting at position 3307 of SEQ ID NO: 1888449
uguaaucaggaaugcaauu

SEQ ID NO: 2534687 - RNA, 19 nt, Artificial Sequence
  Description of Artificial Sequence: Synthetic oligonucleotide
  Antisense strand to SEQ ID NO: 2534686
aauugcauuccugauuaca

SEQ ID NO: 2534688 - RNA, 19 nt, Artificial Sequence
  Description of Artificial Sequence: Synthetic oligonucleotide
  Sense strand starting at position 3738 of SEQ ID NO: 1888449
aaauuaguugcuugauaga

SEQ ID NO: 2534689 - RNA, 19 nt, Artificial Sequence
  Description of Artificial Sequence: Synthetic oligonucleotide
  Antisense strand to SEQ ID NO: 2534688
ucuaucaagcaacuaauuu

SEQ ID NO: 2534690 - RNA, 19 nt, Artificial Sequence
  Description of Artificial Sequence: Synthetic oligonucleotide
  Sense strand starting at position 2580 of SEQ ID NO: 1888449
agugaaucugcaugaauca

SEQ ID NO: 2534691 - RNA, 19 nt, Artificial Sequence
  Description of Artificial Sequence: Synthetic oligonucleotide
  Antisense strand to SEQ ID NO: 2534690
ugauucaugcagauucacu

SEQ ID NO: 2534692 - RNA, 19 nt, Artificial Sequence
  Description of Artificial Sequence: Synthetic oligonucleotide
  Sense strand starting at position 2550 of SEQ ID NO: 1888449
cguauuacuaggcaucaga

SEQ ID NO: 2534693 - RNA, 19 nt, Artificial Sequence
  Description of Artificial Sequence: Synthetic oligonucleotide
  Antisense strand to SEQ ID NO: 2534692
ucugaugccuaguaauacg

SEQ ID NO: 2534694 - RNA, 19 nt, Artificial Sequence
  Description of Artificial Sequence: Synthetic oligonucleotide
  Sense strand starting at position 2998 of SEQ ID NO: 1888449
aaaugaugucgcuaaccug

SEQ ID NO: 2534695 - RNA, 19 nt, Artificial Sequence
  Description of Artificial Sequence: Synthetic oligonucleotide
  Antisense strand to SEQ ID NO: 2534694
cagguuagcgacaucauuu

SEQ ID NO: 2534696 - RNA, 19 nt, Artificial Sequence
  Description of Artificial Sequence: Synthetic oligonucleotide
  Sense strand starting at position 1108 of SEQ ID NO: 1888449
guaaaugaguuucucacca

SEQ ID NO: 2534697 - RNA, 19 nt, Artificial Sequence
  Description of Artificial Sequence: Synthetic oligonucleotide
  Antisense strand to SEQ ID NO: 2534696
uggugagaaacucauuuac

SEQ ID NO: 2534698 - RNA, 19 nt, Artificial Sequence
  Description of Artificial Sequence: Synthetic oligonucleotide
  Sense strand starting at position 3737 of SEQ ID NO: 1888449
uaaauuaguugcuugauag

SEQ ID NO: 2534699 - RNA, 19 nt, Artificial Sequence
  Description of Artificial Sequence: Synthetic oligonucleotide
  Antisense strand to SEQ ID NO: 2534698
cuaucaagcaacuaauuua

SEQ ID NO: 2534700 - RNA, 19 nt, Artificial Sequence
  Description of Artificial Sequence: Synthetic oligonucleotide
  Sense strand starting at position 3164 of SEQ ID NO: 1888449
ucagaagcugcucauuauu

SEQ ID NO: 2534701 - RNA, 19 nt, Artificial Sequence
  Description of Artificial Sequence: Synthetic oligonucleotide
  Antisense strand to SEQ ID NO: 2534700
aauaaugagcagcuucuga

SEQ ID NO: 2534702 - RNA, 19 nt, Artificial Sequence
  Description of Artificial Sequence: Synthetic oligonucleotide
  Sense strand starting at position 2847 of SEQ ID NO: 1888449
gcuguuaugaccgaggauu

SEQ ID NO: 2534703 - RNA, 19 nt, Artificial Sequence
  Description of Artificial Sequence: Synthetic oligonucleotide
  Antisense strand to SEQ ID NO: 2534702
aauccucggucauaacagc

SEQ ID NO: 2534704 - RNA, 19 nt, Artificial Sequence
  Description of Artificial Sequence: Synthetic oligonucleotide
  Sense strand starting at position 1726 of SEQ ID NO: 1888449
cuaauuacagccgagucau

SEQ ID NO: 2534705 - RNA, 19 nt, Artificial Sequence
  Description of Artificial Sequence: Synthetic oligonucleotide
  Antisense strand to SEQ ID NO: 2534704
augacucggcuguaauuag

SEQ ID NO: 2534706 - RNA, 19 nt, Artificial Sequence
  Description of Artificial Sequence: Synthetic oligonucleotide
  Sense strand starting at position 2577 of SEQ ID NO: 1888449
guaagugaaucugcaugaa

SEQ ID NO: 2534707 - RNA, 19 nt, Artificial Sequence
  Description of Artificial Sequence: Synthetic oligonucleotide
  Antisense strand to SEQ ID NO: 2534706
uucaugcagauucacuuac

SEQ ID NO: 2534708 - RNA, 19 nt, Artificial Sequence
  Description of Artificial Sequence: Synthetic oligonucleotide
  Sense strand starting at position 828 of SEQ ID NO: 1888449
gguuuaauguuguuaagaa

SEQ ID NO: 2534709 - RNA, 19 nt, Artificial Sequence
  Description of Artificial Sequence: Synthetic oligonucleotide
  Antisense strand to SEQ ID NO: 2534708
uucuuaacaacauuaaacc

SEQ ID NO: 2534710 - RNA, 19 nt, Artificial Sequence
  Description of Artificial Sequence: Synthetic oligonucleotide
  Sense strand starting at position 3211 of SEQ ID NO: 1888449
ucagaaugcuaagcuuuaa

SEQ ID NO: 2534711 - RNA, 19 nt, Artificial Sequence
  Description of Artificial Sequence: Synthetic oligonucleotide
  Antisense strand to SEQ ID NO: 2534710
uuaaagcuuagcauucuga

SEQ ID NO: 2534712 - RNA, 19 nt, Artificial Sequence
  Description of Artificial Sequence: Synthetic oligonucleotide
  Sense strand starting at position 3016 of SEQ ID NO: 1888449
gccaacaaauguuuaagua

SEQ ID NO: 2534713 - RNA, 19 nt, Artificial Sequence
  Description of Artificial Sequence: Synthetic oligonucleotide
  Antisense strand to SEQ ID NO: 2534712
uacuuaaacauuuguuggc

SEQ ID NO: 2534714 - RNA, 19 nt, Artificial Sequence
  Description of Artificial Sequence: Synthetic oligonucleotide
  Sense strand starting at position 3933 of SEQ ID NO: 1888451
auuagaagucugcaauuaa

SEQ ID NO: 2534715 - RNA, 19 nt, Artificial Sequence
  Description of Artificial Sequence: Synthetic oligonucleotide
  Antisense strand to SEQ ID NO: 2534714
uuaauugcagacuucuaau

SEQ ID NO: 2534716 - RNA, 19 nt, Artificial Sequence
  Description of Artificial Sequence: Synthetic oligonucleotide
  Sense strand starting at position 3172 of SEQ ID NO: 1888451
ggcuuugauacugauugga

SEQ ID NO: 2534717 - RNA, 19 nt, Artificial Sequence
  Description of Artificial Sequence: Synthetic oligonucleotide
  Antisense strand to SEQ ID NO: 2534716
uccaaucaguaucaaagcc

SEQ ID NO: 2534718 - RNA, 19 nt, Artificial Sequence
  Description of Artificial Sequence: Synthetic oligonucleotide
  Sense strand starting at position 1124 of SEQ ID NO: 1888451
auucuuugccaggaauaac

SEQ ID NO: 2534719 - RNA, 19 nt, Artificial Sequence
  Description of Artificial Sequence: Synthetic oligonucleotide
  Antisense strand to SEQ ID NO: 2534718
guuauuccuggcaaagaau

SEQ ID NO: 2534720 - RNA, 19 nt, Artificial Sequence
  Description of Artificial Sequence: Synthetic oligonucleotide
  Sense strand starting at position 3442 of SEQ ID NO: 1888451
aauaauacugucugaugga

SEQ ID NO: 2534721 - RNA, 19 nt, Artificial Sequence
  Description of Artificial Sequence: Synthetic oligonucleotide
  Antisense strand to SEQ ID NO: 2534720
uccaucagacaguauuauu

SEQ ID NO: 2534722 - RNA, 19 nt, Artificial Sequence
  Description of Artificial Sequence: Synthetic oligonucleotide
  Sense strand starting at position 3175 of SEQ ID NO: 1888451
uuugauacugauuggauua

SEQ ID NO: 2534723 - RNA, 19 nt, Artificial Sequence
  Description of Artificial Sequence: Synthetic oligonucleotide
  Antisense strand to SEQ ID NO: 2534722
uaauccaaucaguaucaaa

SEQ ID NO: 2534724 - RNA, 19 nt, Artificial Sequence
  Description of Artificial Sequence: Synthetic oligonucleotide
  Sense strand starting at position 3314 of SEQ ID NO: 1888451
ggcaauauuccucauggau

SEQ ID NO: 2534725 - RNA, 19 nt, Artificial Sequence
  Description of Artificial Sequence: Synthetic oligonucleotide
  Antisense strand to SEQ ID NO: 2534724
auccaugaggaauauugcc

SEQ ID NO: 2534726 - RNA, 19 nt, Artificial Sequence
  Description of Artificial Sequence: Synthetic oligonucleotide
  Sense strand starting at position 3355 of SEQ ID NO: 1888451
caaaguggacagugacaua

SEQ ID NO: 2534727 - RNA, 19 nt, Artificial Sequence
  Description of Artificial Sequence: Synthetic oligonucleotide
  Antisense strand to SEQ ID NO: 2534726
uaugucacuguccacuuug

SEQ ID NO: 2534728 - RNA, 19 nt, Artificial Sequence
  Description of Artificial Sequence: Synthetic oligonucleotide
  Sense strand starting at position 1092 of SEQ ID NO: 1888451
uugcaugccgcuuccuaaa

SEQ ID NO: 2534729 - RNA, 19 nt, Artificial Sequence
  Description of Artificial Sequence: Synthetic oligonucleotide
  Antisense strand to SEQ ID NO: 2534728
uuuaggaagcggcaugcaa

SEQ ID NO: 2534730 - RNA, 19 nt, Artificial Sequence
  Description of Artificial Sequence: Synthetic oligonucleotide
  Sense strand starting at position 225 of SEQ ID NO: 1888451
uuugcaauuguugaaggaa

SEQ ID NO: 2534731 - RNA, 19 nt, Artificial Sequence
  Description of Artificial Sequence: Synthetic oligonucleotide
  Antisense strand to SEQ ID NO: 2534730
uuccuucaacaauugcaaa

SEQ ID NO: 2534732 - RNA, 19 nt, Artificial Sequence
  Description of Artificial Sequence: Synthetic oligonucleotide
  Sense strand starting at position 943 of SEQ ID NO: 1888451
agacauuguucuccagaaa

SEQ ID NO: 2534733 - RNA, 19 nt, Artificial Sequence
  Description of Artificial Sequence: Synthetic oligonucleotide
  Antisense strand to SEQ ID NO: 2534732
uuucuggagaacaaugucu

SEQ ID NO: 2534734 - RNA, 19 nt, Artificial Sequence
  Description of Artificial Sequence: Synthetic oligonucleotide
  Sense strand starting at position 3726 of SEQ ID NO: 1888451
gccaauagauauguagaaa

SEQ ID NO: 2534735 - RNA, 19 nt, Artificial Sequence
  Description of Artificial Sequence: Synthetic oligonucleotide
  Antisense strand to SEQ ID NO: 2534734
uuucuacauaucuauuggc

SEQ ID NO: 2534736 - RNA, 19 nt, Artificial Sequence
  Description of Artificial Sequence: Synthetic oligonucleotide
  Sense strand starting at position 942 of SEQ ID NO: 1888451
gagacauuguucuccagaa

SEQ ID NO: 2534737 - RNA, 19 nt, Artificial Sequence
  Description of Artificial Sequence: Synthetic oligonucleotide
  Antisense strand to SEQ ID NO: 2534736
uucuggagaacaaugucuc

SEQ ID NO: 2534738 - RNA, 19 nt, Artificial Sequence
  Description of Artificial Sequence: Synthetic oligonucleotide
  Sense strand starting at position 3174 of SEQ ID NO: 1888451
cuuugauacugauuggauu

SEQ ID NO: 2534739 - RNA, 19 nt, Artificial Sequence
  Description of Artificial Sequence: Synthetic oligonucleotide
  Antisense strand to SEQ ID NO: 2534738
aauccaaucaguaucaaag

SEQ ID NO: 2534740 - RNA, 19 nt, Artificial Sequence
  Description of Artificial Sequence: Synthetic oligonucleotide
  Sense strand starting at position 3755 of SEQ ID NO: 1888451
cuaauuacuguuugaggaa

SEQ ID NO: 2534741 - RNA, 19 nt, Artificial Sequence
  Description of Artificial Sequence: Synthetic oligonucleotide
  Antisense strand to SEQ ID NO: 2534740
uuccucaaacaguaauuag

SEQ ID NO: 2534742 - RNA, 19 nt, Artificial Sequence
  Description of Artificial Sequence: Synthetic oligonucleotide
  Sense strand starting at position 1243 of SEQ ID NO: 1888451
aggacacaccagugaucuu

SEQ ID NO: 2534743 - RNA, 19 nt, Artificial Sequence
  Description of Artificial Sequence: Synthetic oligonucleotide
  Antisense strand to SEQ ID NO: 2534742
aagaucacugguguguccu

SEQ ID NO: 2534744 - RNA, 19 nt, Artificial Sequence
  Description of Artificial Sequence: Synthetic oligonucleotide
  Sense strand starting at position 2023 of SEQ ID NO: 1888451
cagguaacuguaggaucaa

SEQ ID NO: 2534745 - RNA, 19 nt, Artificial Sequence
  Description of Artificial Sequence: Synthetic oligonucleotide
  Antisense strand to SEQ ID NO: 2534744
uugauccuacaguuaccug

SEQ ID NO: 2534746 - RNA, 19 nt, Artificial Sequence
  Description of Artificial Sequence: Synthetic oligonucleotide
  Sense strand starting at position 3213 of SEQ ID NO: 1888451
aaaggcuguuacucagaaa

SEQ ID NO: 2534747 - RNA, 19 nt, Artificial Sequence
  Description of Artificial Sequence: Synthetic oligonucleotide
  Antisense strand to SEQ ID NO: 2534746
uuucugaguaacagccuuu

SEQ ID NO: 2534748 - RNA, 19 nt, Artificial Sequence
  Description of Artificial Sequence: Synthetic oligonucleotide
  Sense strand starting at position 3327 of SEQ ID NO: 1888451
auggauaccuggccaacua

SEQ ID NO: 2534749 - RNA, 19 nt, Artificial Sequence
  Description of Artificial Sequence: Synthetic oligonucleotide
  Antisense strand to SEQ ID NO: 2534748
uaguuggccagguauccau

SEQ ID NO: 2534750 - RNA, 19 nt, Artificial Sequence
  Description of Artificial Sequence: Synthetic oligonucleotide
  Sense strand starting at position 2066 of SEQ ID NO: 1888451
uaaggaguucuugguaaga

SEQ ID NO: 2534751 - RNA, 19 nt, Artificial Sequence
  Description of Artificial Sequence: Synthetic oligonucleotide
  Antisense strand to SEQ ID NO: 2534750
ucuuaccaagaacuccuua

SEQ ID NO: 2534752 - RNA, 19 nt, Artificial Sequence
  Description of Artificial Sequence: Synthetic oligonucleotide
  Sense strand starting at position 2115 of SEQ ID NO: 1888451
gggaauucagaguguaauc

SEQ ID NO: 2534753 - RNA, 19 nt, Artificial Sequence
  Description of Artificial Sequence: Synthetic oligonucleotide
  Antisense strand to SEQ ID NO: 2534752
gauuacacucugaauuccc

SEQ ID NO: 2534754 - RNA, 19 nt, Artificial Sequence
  Description of Artificial Sequence: Synthetic oligonucleotide
  Sense strand starting at position 3754 of SEQ ID NO: 1888451
ucuaauuacuguuugagga

SEQ ID NO: 2534755 - RNA, 19 nt, Artificial Sequence
  Description of Artificial Sequence: Synthetic oligonucleotide
  Antisense strand to SEQ ID NO: 2534754
uccucaaacaguaauuaga

SEQ ID NO: 2534756 - RNA, 19 nt, Artificial Sequence
  Description of Artificial Sequence: Synthetic oligonucleotide
  Sense strand starting at position 895 of SEQ ID NO: 1888451
gaguuauaaguaugacuac

SEQ ID NO: 2534757 - RNA, 19 nt, Artificial Sequence
  Description of Artificial Sequence: Synthetic oligonucleotide
  Antisense strand to SEQ ID NO: 2534756
guagucauacuuauaacuc

SEQ ID NO: 2534758 - RNA, 19 nt, Artificial Sequence
  Description of Artificial Sequence: Synthetic oligonucleotide
  Sense strand starting at position 3581 of SEQ ID NO: 1888451
agucacugauagguuugaa

SEQ ID NO: 2534759 - RNA, 19 nt, Artificial Sequence
  Description of Artificial Sequence: Synthetic oligonucleotide
  Antisense strand to SEQ ID NO: 2534758
uucaaaccuaucagugacu

SEQ ID NO: 2534760 - RNA, 19 nt, Artificial Sequence
  Description of Artificial Sequence: Synthetic oligonucleotide
  Sense strand starting at position 2762 of SEQ ID NO: 1888451
guucucuaugcuuaaggaa

SEQ ID NO: 2534761 - RNA, 19 nt, Artificial Sequence
  Description of Artificial Sequence: Synthetic oligonucleotide
  Antisense strand to SEQ ID NO: 2534760
uuccuuaagcauagagaac

SEQ ID NO: 2534762 - RNA, 19 nt, Artificial Sequence
  Description of Artificial Sequence: Synthetic oligonucleotide
  Sense strand starting at position 187 of SEQ ID NO: 1888451
ugaacuuguucucuuagaa

SEQ ID NO: 2534763 - RNA, 19 nt, Artificial Sequence
  Description of Artificial Sequence: Synthetic oligonucleotide
  Antisense strand to SEQ ID NO: 2534762
uucuaagagaacaaguuca

SEQ ID NO: 2534764 - RNA, 19 nt, Artificial Sequence
  Description of Artificial Sequence: Synthetic oligonucleotide
  Sense strand starting at position 2709 of SEQ ID NO: 1888451
aaagaaugcugguuuauua

SEQ ID NO: 2534765 - RNA, 19 nt, Artificial Sequence
  Description of Artificial Sequence: Synthetic oligonucleotide
  Antisense strand to SEQ ID NO: 2534764
uaauaaaccagcauucuuu

SEQ ID NO: 2534766 - RNA, 19 nt, Artificial Sequence
  Description of Artificial Sequence: Synthetic oligonucleotide
  Sense strand starting at position 3497 of SEQ ID NO: 1888451
ugguaauaggaguguuaaa

SEQ ID NO: 2534767 - RNA, 19 nt, Artificial Sequence
  Description of Artificial Sequence: Synthetic oligonucleotide
  Antisense strand to SEQ ID NO: 2534766
uuuaacacuccuauuacca

SEQ ID NO: 2534768 - RNA, 19 nt, Artificial Sequence
  Description of Artificial Sequence: Synthetic oligonucleotide
  Sense strand starting at position 3313 of SEQ ID NO: 1888451
uggcaauauuccucaugga

SEQ ID NO: 2534769 - RNA, 19 nt, Artificial Sequence
  Description of Artificial Sequence: Synthetic oligonucleotide
  Antisense strand to SEQ ID NO: 2534768
uccaugaggaauauugcca

SEQ ID NO: 2534770 - RNA, 19 nt, Artificial Sequence
  Description of Artificial Sequence: Synthetic oligonucleotide
  Sense strand starting at position 3580 of SEQ ID NO: 1888451
gagucacugauagguuuga

SEQ ID NO: 2534771 - RNA, 19 nt, Artificial Sequence
  Description of Artificial Sequence: Synthetic oligonucleotide
  Antisense strand to SEQ ID NO: 2534770
ucaaaccuaucagugacuc

SEQ ID NO: 2534772 - RNA, 19 nt, Artificial Sequence
  Description of Artificial Sequence: Synthetic oligonucleotide
  Sense strand starting at position 431 of SEQ ID NO: 1888451
cuuucuucccuuugaagag

SEQ ID NO: 2534773 - RNA, 19 nt, Artificial Sequence
  Description of Artificial Sequence: Synthetic oligonucleotide
  Antisense strand to SEQ ID NO: 2534772
cucuucaaagggaagaaag

SEQ ID NO: 2534774 - RNA, 19 nt, Artificial Sequence
  Description of Artificial Sequence: Synthetic oligonucleotide
  Sense strand starting at position 3343 of SEQ ID NO: 1888451
cuaaauugucugcaaagug

SEQ ID NO: 2534775 - RNA, 19 nt, Artificial Sequence
  Description of Artificial Sequence: Synthetic oligonucleotide
  Antisense strand to SEQ ID NO: 2534774
cacuuugcagacaauuuag

SEQ ID NO: 2534776 - RNA, 19 nt, Artificial Sequence
  Description of Artificial Sequence: Synthetic oligonucleotide
  Sense strand starting at position 528 of SEQ ID NO: 1888451
acaagagccuacucuagua

SEQ ID NO: 2534777 - RNA, 19 nt, Artificial Sequence
  Description of Artificial Sequence: Synthetic oligonucleotide
  Antisense strand to SEQ ID NO: 2534776
uacuagaguaggcucuugu

SEQ ID NO: 2534778 - RNA, 19 nt, Artificial Sequence
  Description of Artificial Sequence: Synthetic oligonucleotide
  Sense strand starting at position 453 of SEQ ID NO: 1888451
uggagcuucuaacuccaau

SEQ ID NO: 2534779 - RNA, 19 nt, Artificial Sequence
  Description of Artificial Sequence: Synthetic oligonucleotide
  Antisense strand to SEQ ID NO: 2534778
auuggaguuagaagcucca

SEQ ID NO: 2534780 - RNA, 19 nt, Artificial Sequence
  Description of Artificial Sequence: Synthetic oligonucleotide
  Sense strand starting at position 3923 of SEQ ID NO: 1888451
ggucuuaugcauuagaagu

SEQ ID NO: 2534781 - RNA, 19 nt, Artificial Sequence
  Description of Artificial Sequence: Synthetic oligonucleotide
  Antisense strand to SEQ ID NO: 2534780
acuucuaaugcauaagacc

SEQ ID NO: 2534782 - RNA, 19 nt, Artificial Sequence
  Description of Artificial Sequence: Synthetic oligonucleotide
  Sense strand starting at position 2426 of SEQ ID NO: 1888451
aaagguaaacuccgaguuu

SEQ ID NO: 2534783 - RNA, 19 nt, Artificial Sequence
  Description of Artificial Sequence: Synthetic oligonucleotide
  Antisense strand to SEQ ID NO: 2534782
aaacucggaguuuaccuuu

SEQ ID NO: 2534784 - RNA, 19 nt, Artificial Sequence
  Description of Artificial Sequence: Synthetic oligonucleotide
  Sense strand starting at position 3920 of SEQ ID NO: 1888451
gcaggucuuaugcauuaga

SEQ ID NO: 2534785 - RNA, 19 nt, Artificial Sequence
  Description of Artificial Sequence: Synthetic oligonucleotide
  Antisense strand to SEQ ID NO: 2534784
ucuaaugcauaagaccugc

SEQ ID NO: 2534786 - RNA, 19 nt, Artificial Sequence
  Description of Artificial Sequence: Synthetic oligonucleotide
  Sense strand starting at position 1259 of SEQ ID NO: 1888451
cuugcuggcagucagauaa

SEQ ID NO: 2534787 - RNA, 19 nt, Artificial Sequence
  Description of Artificial Sequence: Synthetic oligonucleotide
  Antisense strand to SEQ ID NO: 2534786
uuaucugacugccagcaag

SEQ ID NO: 2534788 - RNA, 19 nt, Artificial Sequence
  Description of Artificial Sequence: Synthetic oligonucleotide
  Sense strand starting at position 2761 of SEQ ID NO: 1888451
aguucucuaugcuuaagga

SEQ ID NO: 2534789 - RNA, 19 nt, Artificial Sequence
  Description of Artificial Sequence: Synthetic oligonucleotide
  Antisense strand to SEQ ID NO: 2534788
uccuuaagcauagagaacu

SEQ ID NO: 2534790 - RNA, 19 nt, Artificial Sequence
  Description of Artificial Sequence: Synthetic oligonucleotide
  Sense strand starting at position 3661 of SEQ ID NO: 1888451
gauucuguuauggacguuu

SEQ ID NO: 2534791 - RNA, 19 nt, Artificial Sequence
  Description of Artificial Sequence: Synthetic oligonucleotide
  Antisense strand to SEQ ID NO: 2534790
aaacguccauaacagaauc

SEQ ID NO: 2534792 - RNA, 19 nt, Artificial Sequence
  Description of Artificial Sequence: Synthetic oligonucleotide
  Sense strand starting at position 849 of SEQ ID NO: 1888451
cucuauaggcucugauauu

SEQ ID NO: 2534793 - RNA, 19 nt, Artificial Sequence
  Description of Artificial Sequence: Synthetic oligonucleotide
  Antisense strand to SEQ ID NO: 2534792
aauaucagagccuauagag

SEQ ID NO: 2534794 - RNA, 19 nt, Artificial Sequence
  Description of Artificial Sequence: Synthetic oligonucleotide
  Sense strand starting at position 3892 of SEQ ID NO: 1888450
augauucuguaaucaggaa

SEQ ID NO: 2534795 - RNA, 19 nt, Artificial Sequence
  Description of Artificial Sequence: Synthetic oligonucleotide
  Antisense strand to SEQ ID NO: 2534794
uuccugauuacagaaucau

SEQ ID NO: 2534796 - RNA, 19 nt, Artificial Sequence
  Description of Artificial Sequence: Synthetic oligonucleotide
  Sense strand starting at position 1705 of SEQ ID NO: 1888450
ugaguuucucaccaaugau

SEQ ID NO: 2534797 - RNA, 19 nt, Artificial Sequence
  Description of Artificial Sequence: Synthetic oligonucleotide
  Antisense strand to SEQ ID NO: 2534796
aucauuggugagaaacuca

SEQ ID NO: 2534798 - RNA, 19 nt, Artificial Sequence
  Description of Artificial Sequence: Synthetic oligonucleotide
  Sense strand starting at position 2058 of SEQ ID NO: 1888450
gcauccuaaggaggauuaa

SEQ ID NO: 2534799 - RNA, 19 nt, Artificial Sequence
  Description of Artificial Sequence: Synthetic oligonucleotide
  Antisense strand to SEQ ID NO: 2534798
uuaauccuccuuaggaugc

SEQ ID NO: 2534800 - RNA, 19 nt, Artificial Sequence
  Description of Artificial Sequence: Synthetic oligonucleotide
  Sense strand starting at position 2603 of SEQ ID NO: 1888450
gugcuaugugcugcagaca

SEQ ID NO: 2534801 - RNA, 19 nt, Artificial Sequence
  Description of Artificial Sequence: Synthetic oligonucleotide
  Antisense strand to SEQ ID NO: 2534800
ugucugcagcacauagcac

SEQ ID NO: 2534802 - RNA, 19 nt, Artificial Sequence
  Description of Artificial Sequence: Synthetic oligonucleotide
  Sense strand starting at position 3092 of SEQ ID NO: 1888450
agaaucuagucaguaaaua

SEQ ID NO: 2534803 - RNA, 19 nt, Artificial Sequence
  Description of Artificial Sequence: Synthetic oligonucleotide
  Antisense strand to SEQ ID NO: 2534802
uauuuacugacuagauucu

SEQ ID NO: 2534804 - RNA, 19 nt, Artificial Sequence
  Description of Artificial Sequence: Synthetic oligonucleotide
  Sense strand starting at position 118 of SEQ ID NO: 1888450
agauguuauuccuuaagga

SEQ ID NO: 2534805 - RNA, 19 nt, Artificial Sequence
  Description of Artificial Sequence: Synthetic oligonucleotide
  Antisense strand to SEQ ID NO: 2534804
uccuuaaggaauaacaucu

SEQ ID NO: 2534806 - RNA, 19 nt, Artificial Sequence
  Description of Artificial Sequence: Synthetic oligonucleotide
  Sense strand starting at position 1217 of SEQ ID NO: 1888450
gauaaagcacuguauguaa

SEQ ID NO: 2534807 - RNA, 19 nt, Artificial Sequence
  Description of Artificial Sequence: Synthetic oligonucleotide
  Antisense strand to SEQ ID NO: 2534806
uuacauacagugcuuuauc

SEQ ID NO: 2534808 - RNA, 19 nt, Artificial Sequence
  Description of Artificial Sequence: Synthetic oligonucleotide
  Sense strand starting at position 1175 of SEQ ID NO: 1888450
ugaacuuuccuccauguga

SEQ ID NO: 2534809 - RNA, 19 nt, Artificial Sequence
  Description of Artificial Sequence: Synthetic oligonucleotide
  Antisense strand to SEQ ID NO: 2534808
ucacauggaggaaaguuca

SEQ ID NO: 2534810 - RNA, 19 nt, Artificial Sequence
  Description of Artificial Sequence: Synthetic oligonucleotide
  Sense strand starting at position 3896 of SEQ ID NO: 1888450
uucuguaaucaggaaugca

SEQ ID NO: 2534811 - RNA, 19 nt, Artificial Sequence
  Description of Artificial Sequence: Synthetic oligonucleotide
  Antisense strand to SEQ ID NO: 2534810
ugcauuccugauuacagaa

SEQ ID NO: 2534812 - RNA, 19 nt, Artificial Sequence
  Description of Artificial Sequence: Synthetic oligonucleotide
  Sense strand starting at position 806 of SEQ ID NO: 1888450
cucauuugugaacguuauu

SEQ ID NO: 2534813 - RNA, 19 nt, Artificial Sequence
  Description of Artificial Sequence: Synthetic oligonucleotide
  Antisense strand to SEQ ID NO: 2534812
aauaacguucacaaaugag

SEQ ID NO: 2534814 - RNA, 19 nt, Artificial Sequence
  Description of Artificial Sequence: Synthetic oligonucleotide
  Sense strand starting at position 3863 of SEQ ID NO: 1888450
cuguauuuauugguguauu

SEQ ID NO: 2534815 - RNA, 19 nt, Artificial Sequence
  Description of Artificial Sequence: Synthetic oligonucleotide
  Antisense strand to SEQ ID NO: 2534814
aauacaccaauaaauacag

SEQ ID NO: 2534816 - RNA, 19 nt, Artificial Sequence
  Description of Artificial Sequence: Synthetic oligonucleotide
  Sense strand starting at position 1190 of SEQ ID NO: 1888450
gugacagaugcauacaagu

SEQ ID NO: 2534817 - RNA, 19 nt, Artificial Sequence
  Description of Artificial Sequence: Synthetic oligonucleotide
  Antisense strand to SEQ ID NO: 2534816
acuuguaugcaucugucac

SEQ ID NO: 2534818 - RNA, 19 nt, Artificial Sequence
  Description of Artificial Sequence: Synthetic oligonucleotide
  Sense strand starting at position 619 of SEQ ID NO: 1888450
agaaauugcauugaagugu

SEQ ID NO: 2534819 - RNA, 19 nt, Artificial Sequence
  Description of Artificial Sequence: Synthetic oligonucleotide
  Antisense strand to SEQ ID NO: 2534818
acacuucaaugcaauuucu

SEQ ID NO: 2534820 - RNA, 19 nt, Artificial Sequence
  Description of Artificial Sequence: Synthetic oligonucleotide
  Sense strand starting at position 1704 of SEQ ID NO: 1888450
augaguuucucaccaauga

SEQ ID NO: 2534821 - RNA, 19 nt, Artificial Sequence
  Description of Artificial Sequence: Synthetic oligonucleotide
  Antisense strand to SEQ ID NO: 2534820
ucauuggugagaaacucau

SEQ ID NO: 2534822 - RNA, 19 nt, Artificial Sequence
  Description of Artificial Sequence: Synthetic oligonucleotide
  Sense strand starting at position 3862 of SEQ ID NO: 1888450
ccuguauuuauugguguau

SEQ ID NO: 2534823 - RNA, 19 nt, Artificial Sequence
  Description of Artificial Sequence: Synthetic oligonucleotide
  Antisense strand to SEQ ID NO: 2534822
auacaccaauaaauacagg

SEQ ID NO: 2534824 - RNA, 19 nt, Artificial Sequence
  Description of Artificial Sequence: Synthetic oligonucleotide
  Sense strand starting at position 1685 of SEQ ID NO: 1888450
ucauuacugcaugauguaa

SEQ ID NO: 2534825 - RNA, 19 nt, Artificial Sequence
  Description of Artificial Sequence: Synthetic oligonucleotide
  Antisense strand to SEQ ID NO: 2534824
uuacaucaugcaguaauga

SEQ ID NO: 2534826 - RNA, 19 nt, Artificial Sequence
  Description of Artificial Sequence: Synthetic oligonucleotide
  Sense strand starting at position 194 of SEQ ID NO: 1888450
ucucuuacagcagaaugua

SEQ ID NO: 2534827 - RNA, 19 nt, Artificial Sequence
  Description of Artificial Sequence: Synthetic oligonucleotide
  Antisense strand to SEQ ID NO: 2534826
uacauucugcuguaagaga

SEQ ID NO: 2534828 - RNA, 19 nt, Artificial Sequence
  Description of Artificial Sequence: Synthetic oligonucleotide
  Sense strand starting at position 2149 of SEQ ID NO: 1888450
ucucaucugcaguagaaca

SEQ ID NO: 2534829 - RNA, 19 nt, Artificial Sequence
  Description of Artificial Sequence: Synthetic oligonucleotide
  Antisense strand to SEQ ID NO: 2534828
uguucuacugcagaugaga

SEQ ID NO: 2534830 - RNA, 19 nt, Artificial Sequence
  Description of Artificial Sequence: Synthetic oligonucleotide
  Sense strand starting at position 3283 of SEQ ID NO: 1888450
augucaugccuugaaacac

SEQ ID NO: 2534831 - RNA, 19 nt, Artificial Sequence
  Description of Artificial Sequence: Synthetic oligonucleotide
  Antisense strand to SEQ ID NO: 2534830
guguuucaaggcaugacau

SEQ ID NO: 2534832 - RNA, 19 nt, Artificial Sequence
  Description of Artificial Sequence: Synthetic oligonucleotide
  Sense strand starting at position 1561 of SEQ ID NO: 1888450
gagagaauguagccacauu

SEQ ID NO: 2534833 - RNA, 19 nt, Artificial Sequence
  Description of Artificial Sequence: Synthetic oligonucleotide
  Antisense strand to SEQ ID NO: 2534832
aauguggcuacauucucuc

SEQ ID NO: 2534834 - RNA, 19 nt, Artificial Sequence
  Description of Artificial Sequence: Synthetic oligonucleotide
  Sense strand starting at position 832 of SEQ ID NO: 1888450
aucuacuuugguuauguaa

SEQ ID NO: 2534835 - RNA, 19 nt, Artificial Sequence
  Description of Artificial Sequence: Synthetic oligonucleotide
  Antisense strand to SEQ ID NO: 2534834
uuacauaaccaaaguagau

SEQ ID NO: 2534836 - RNA, 19 nt, Artificial Sequence
  Description of Artificial Sequence: Synthetic oligonucleotide
  Sense strand starting at position 2160 of SEQ ID NO: 1888450
guagaacaccauugguuaa

SEQ ID NO: 2534837 - RNA, 19 nt, Artificial Sequence
  Description of Artificial Sequence: Synthetic oligonucleotide
  Antisense strand to SEQ ID NO: 2534836
uuaaccaaugguguucuac

SEQ ID NO: 2534838 - RNA, 19 nt, Artificial Sequence
  Description of Artificial Sequence: Synthetic oligonucleotide
  Sense strand starting at position 618 of SEQ ID NO: 1888450
uagaaauugcauugaagug

SEQ ID NO: 2534839 - RNA, 19 nt, Artificial Sequence
  Description of Artificial Sequence: Synthetic oligonucleotide
  Antisense strand to SEQ ID NO: 2534838
cacuucaaugcaauuucua

SEQ ID NO: 2534840 - RNA, 19 nt, Artificial Sequence
  Description of Artificial Sequence: Synthetic oligonucleotide
  Sense strand starting at position 1129 of SEQ ID NO: 1888450
augacaauguuggcugaga

SEQ ID NO: 2534841 - RNA, 19 nt, Artificial Sequence
  Description of Artificial Sequence: Synthetic oligonucleotide
  Antisense strand to SEQ ID NO: 2534840
ucucagccaacauugucau

SEQ ID NO: 2534842 - RNA, 19 nt, Artificial Sequence
  Description of Artificial Sequence: Synthetic oligonucleotide
  Sense strand starting at position 3569 of SEQ ID NO: 1888450
ggguuuaccucauuauaua

SEQ ID NO: 2534843 - RNA, 19 nt, Artificial Sequence
  Description of Artificial Sequence: Synthetic oligonucleotide
  Antisense strand to SEQ ID NO: 2534842
uauauaaugagguaaaccc

SEQ ID NO: 2534844 - RNA, 19 nt, Artificial Sequence
  Description of Artificial Sequence: Synthetic oligonucleotide
  Sense strand starting at position 197 of SEQ ID NO: 1888450
cuuacagcagaauguauaa

SEQ ID NO: 2534845 - RNA, 19 nt, Artificial Sequence
  Description of Artificial Sequence: Synthetic oligonucleotide
  Antisense strand to SEQ ID NO: 2534844
uuauacauucugcuguaag

SEQ ID NO: 2534846 - RNA, 19 nt, Artificial Sequence
  Description of Artificial Sequence: Synthetic oligonucleotide
  Sense strand starting at position 132 of SEQ ID NO: 1888450
aaggaagacgaucgugauu

SEQ ID NO: 2534847 - RNA, 19 nt, Artificial Sequence
  Description of Artificial Sequence: Synthetic oligonucleotide
  Antisense strand to SEQ ID NO: 2534846
aaucacgaucgucuuccuu

SEQ ID NO: 2534848 - RNA, 19 nt, Artificial Sequence
  Description of Artificial Sequence: Synthetic oligonucleotide
  Sense strand starting at position 3089 of SEQ ID NO: 1888450
aguagaaucuagucaguaa

SEQ ID NO: 2534849 - RNA, 19 nt, Artificial Sequence
  Description of Artificial Sequence: Synthetic oligonucleotide
  Antisense strand to SEQ ID NO: 2534848
uuacugacuagauucuacu

SEQ ID NO: 2534850 - RNA, 19 nt, Artificial Sequence
  Description of Artificial Sequence: Synthetic oligonucleotide
  Sense strand starting at position 413 of SEQ ID NO: 1888450
agugacuaugccuaucauu

SEQ ID NO: 2534851 - RNA, 19 nt, Artificial Sequence
  Description of Artificial Sequence: Synthetic oligonucleotide
  Antisense strand to SEQ ID NO: 2534850
aaugauaggcauagucacu

SEQ ID NO: 2534852 - RNA, 19 nt, Artificial Sequence
  Description of Artificial Sequence: Synthetic oligonucleotide
  Sense strand starting at position 1172 of SEQ ID NO: 1888450
gagugaacuuuccuccaug

SEQ ID NO: 2534853 - RNA, 19 nt, Artificial Sequence
  Description of Artificial Sequence: Synthetic oligonucleotide
  Antisense strand to SEQ ID NO: 2534852
cauggaggaaaguucacuc

SEQ ID NO: 2534854 - RNA, 19 nt, Artificial Sequence
  Description of Artificial Sequence: Synthetic oligonucleotide
  Sense strand starting at position 3899 of SEQ ID NO: 1888450
uguaaucaggaaugcaauu

SEQ ID NO: 2534855 - RNA, 19 nt, Artificial Sequence
  Description of Artificial Sequence: Synthetic oligonucleotide
  Antisense strand to SEQ ID NO: 2534854
aauugcauuccugauuaca

SEQ ID NO: 2534856 - RNA, 19 nt, Artificial Sequence
  Description of Artificial Sequence: Synthetic oligonucleotide
  Sense strand starting at position 3172 of SEQ ID NO: 1888450
agugaaucugcaugaauca
